(19) United States
(12) Patent Application Publication
(10) Pub. No.: US 2026/0209739 A1
(43) Pub. Date: Jul. 23, 2026

(54) NUCLEIC ACID MOLECULES

(71) Applicant: CureVac SE, Tübingen (DE)

(72) Inventors: Mariola FOTIN-MLECZEK, Sindelfingen (DE); Katja FIEDLER, Bad Urach (DE); Aleksandra KOWALCZYK, Stuttgart (DE); Regina HEIDENREICH, Tübingen (DE)

(73) Assignee: CureVac SE, Tübingen (DE)

(21) Appl. No.: 19/640,675

(22) Filed: Apr. 7, 2026

Related U.S. Application Data
(62) Division of application No. 17/201,764, filed on Mar. 15, 2021, now Pat. No. 12,618,060.
Application No. 17/201,764 is a division of application No. 16/026,729, filed on Jul. 3, 2018, now Pat. No. 10,988,754.
Application No. 16/026,729 is a continuation of application No. PCT/EP2017/066676, filed on Jul. 4, 2017.

(51) Int. Cl. C12N 9/90; A61K 38/00; A61K 39/00; A61K 39/385; A61K 39/39; C07K 14/705

(52) U.S. Cl. CPC C12N 9/90; A61K 39/00; A61K 39/0011; A61K 39/385; A61K 39/39; C07K 14/70521; C12Y 503/03012; A61K 38/00; A61K 2039/53; A61K 2039/6031; A61K 2039/605; C07K 2319/02; C07K 2319/03

(57) ABSTRACT

The present invention provides novel artificial nucleic acid molecules encoding at least one antigenic peptide or protein and at least one additional sequence preferably targeting the antigenic peptides or proteins to cellular compartments of interest. Further, the invention provides (pharmaceutical) compositions or vaccines and kits comprising said nucleic acid molecules. The nucleic acid molecules, (pharmaceutical) compositions or vaccines and kits are useful for treating a variety of diseases such as cancer, infectious diseases, autoimmune diseases, allergies or graft-versus host disease.

[0001] The present application is a divisional of U.S. application Ser. No. 17/201,764, filed Mar. 15, 2021, which is a divisional of U.S. application Ser. No. 16/026,729, filed Jul. 3, 2018, now U.S. Pat. No. 10,988,754, which is a continuation of International Application No. PCT/EP2017/066676, filed Jul. 4, 2017, the entire contents of each of which are hereby incorporated by reference.

[0002] This application contains a Sequence Listing XML, which has been submitted electronically and is hereby incorporated by reference in its entirety. Said Sequence Listing XML, created on Apr. 6, 2026, is named CRVCP0248USD2.xml and is 100,614,039 bytes in size.

[0003] Unlike conventional protein-based vaccines, nucleic acid vaccines are based on nucleic acid molecules-either DNA or RNA-encoding vaccine antigens. DNA vaccines typically consist of antigen-encoding gene(s) inserted into a bacterial plasmid under the control of a eukaryotic promoter, whereas RNA vaccines may usually employ messenger RNAs (mRNA) or other antigen-encoding RNA molecules. Like protein vaccines, nucleic acid vaccines can be delivered through a variety of different routes, including intramuscular, subcutaneous, mucosal, or transdermal delivery. However, unlike protein antigens, the nucleic acid vaccine to be effective must gain entry to the cytoplasm of cells at the injection site in order to induce antigen expression in vivo, thereby enabling antigen presentation on major histocompatability molecules (MHC) and T-cell recognition (Li and Petrovsky Expert Rev Vaccines. 2016; 15(3): 313-329, McNamara et al. J Immunol Res. 2015; 2015:794528).

[0004] DNA vaccines are administered to the host and internalized by host cells, where the antigen-encoding DNA plasmid is transcribed in the nucleus and translated in the cytoplasm by host cellular machinery. Unlike DNA vaccines, antigen-encoding mRNAs only needs to gain entry into the cytoplasm, where translation occurs, in order to transfect a cell. Either way, the resulting proteins are processed into peptides, which are ultimately presented on the surface of host cells in the context of major histocompatibility complex (MHC) molecules. The peptide-MHC complex is recognized by antigen-specific T cells, resulting in a cellular host immune response (McNamara et al. J Immunol Res. 2015; 2015:794528).

[0005] There are two branches of MHC receptor presentation. MHC class I molecules—abundantly expressed in all nucleated cells and also in platelets—bind endogenously produced peptides including viral peptides and tumor antigens in the endoplasmatic reticulum (ER). Specifically, MHC class I molecules present peptides that result from proteolytic cleavage of endogenous proteins. Cleaved peptide fragments bind to an antigen peptide transporter (TAP) of the endoplasmic reticulum (ER), where they undergo further trimming of N-terminal residues and then bind to MHC class I complexes (Murphy K (2011) Janeways Immunobiology. New York: Garland Science).

[0006] In contrast, MHC class II molecules are predominantly expressed by professional antigen-presenting cells (APCs) such as macrophages, B cells, and especially dendritic cells (DCs). MHC class II molecules acquire their peptides from endocytosed antigens in endocytic vesicles. Specifically, the class II molecules primarily present peptides of exogenous or plasma membrane proteins that are taken up by APCs during the course of endocytosis. The antigen is processed through a series of endosomal compartments with denaturing environment and a set of proteolytic and denaturing enzymes (Bryant et al. Adv. Immunol. 2002; 80:71-114). As the major proportion of MHC class II epitopes is generated by cleavage and processing of peptides by endosomal and lysosomal proteases, MHC class II epitopes are mainly derived from endocytosed proteins and antigens, which reside in or travel through the endocytic pathway. Proteins without direct access to the endocytic pathway (e.g., antigens naturally located in the cytoplasm, in nonendocytic organelles, or in the nucleus) are in general poorly presented in a MHC class II context.

[0007] Antigen/MHC complexes are recognized by T-lymphocytes bearing the antigen-specific TCRs (T-cell receptors). Antigenic peptides presented in a MHC class I context are recognized by CD8⁺ cytotoxic T-lymphocytes (CTLs), whereas complexes of antigenic peptides and MHC class II molecules are recognized by CD4⁺-T helper-cells. While CD8⁺ CTLs mediate important cell-mediated effector functions including cytotoxic activity directed against cancerous or virus-infected cells, CD4⁺ T helper cells play a key role in orchestrating CTL effector functions and antibody production. Nucleic acid vaccines have many advantages over traditional peptide/protein vaccines with vaccine design being straightforward, thereby reducing cost and production time. Moreover nucleic acid vaccines allow easy delivery of multiple antigens with one immunization and can induce both humoral and cellular immune responses, which makes tumor/pathogen escape less likely. Additionally, unlike peptide-based vaccines, nucleic acid-based vaccines are not restricted by the patient's HLA type. Furthermore, the in vivo expression of an antigen and endogenous post-translational modification results in native protein structures ensuring appropriate processing and immune presentation. From a safety aspect, cloning or synthesis of nucleic acids rather than having to purify proteins from pathogens avoids the need for use of pathogenic microorganisms in vaccine manufacture, rendering nucleic acid vaccines generally safe and tolerable (Li and Petrovsky Expert Rev Vaccines. 2016; 15(3): 313-329, McNamara et al. J Immunol Res. 2015; 2015:794528).

[0008] Despite their promising characteristics, DNA vaccines were found to elicit less of an immune response than other types of vaccines, including peptide vaccines, cellular vaccines, viral vector vaccines, and RNA vaccines. The relatively poor immunogenicity of DNA vaccines combined with concerns about their potential for oncogenesis via integration into the host genome renders RNA-based vaccines particularly appealing. However, antigens encoded by RNA vaccines are typically translated in the cytoplasm and degraded by proteasomes, resulting predominantly in MHC class I-mediated presentation to CD8⁺ T cells. In order to foster CTL-mediated immune responses, or even induce antibody production, an additional stimulation of a productive T helper cell response via the MHC class II pathway would be highly desirable (McNamara et al. J Immunol Res. 2015; 2015:794528).

[0009] Different strategies were tested in preclinical models to exploit the therapeutic potential of nucleic acid vaccines, including novel plasmid vectors and codon optimization to enhance antigen expression, new gene transfection systems or electroporation to increase delivery efficiency, protein or live virus vector boosting regimens to maximise immune stimulation, and formulation of nucleic acid vaccines with traditional or molecular adjuvants (Li and Petrovsky Expert Rev Vaccines. 2016; 15(3): 313-329). Several studies have demonstrated that addition of a lysosomal targeting signal to the antigen-encoding sequence can result in a productive T helper cell response. Additionally, tumor antigen mRNAs fused to a signal peptide and an HLA class II sorting can result in HLA class I and II presentation (WO200212281; Marks et al. 1995 J Cell Biol. 1995; 131:351-369; Kreiter et al. 2007 J Immunol. 2008 Jan. 1; 180 (1): 309-18). Diebold et al. (Gene Ther. 2001 March; 8 (6): 487-93) demonstrated that dendritic cells expressing cDNA as transferrin receptor (TfR) or invariant chain fusions were capable of generating MHC class II specific immune responses in addition to MHC class I responses. Kreiter et al. (J Immunol. 2008 Jan. 1; 180(1): 309-18) reported that combining an N-terminal leader peptide with an MHC class I trafficking signal (MITD) attached to the C terminus of an RNA-encoded antigen strongly improves the presentation of MHC class I and class II epitopes in human and murine dendritic cells (DCs).

[0010] In the two decades since their initial discovery, nucleic acid vaccines technologies have come a long way. However, effective strategies for boosting both CD8⁺ and CD4⁺ T cell responses and thereby increasing the therapeutic or prophylactic efficacy of nucleic acid based vaccines are still missing.

[0011] Boyle et al. (Nature. 1998 Mar. 26; 392 (6674): 408-11), Deliyannis et al. (Proc Natl Acad Sci USA. 2000 Jun. 6; 97 (12): 6676-80) and Xu et al. (J Gene Med. 2009 April; 11 (4): 354-60) all describe DNA vaccines encoding fusion proteins with extracellular domains of CTLA4. These extracellular domains specifically target the fused antigens to professional antigen-presenting cells expressing the CTLA4 ligand B7.

[0012] It is an object of the present invention to comply with the needs in the art and to provide improved therapeutic approaches for the treatment of the diseases specified herein. The object underlying the present invention is solved by the claimed subject matter, inter alia by providing nucleic acids encoding fusion proteins with functional transmembrane domains for improved antigen “loading” of MHC-I and MHC-II in the respective cellular compartments.

[0013] Although the present invention is described in detail below, it is to be understood that this invention is not limited to the particular methodologies, protocols and reagents described herein as these may vary. It is also to be understood that the terminology used herein is not intended to limit the scope of the present invention which will be limited only by the appended claims. Unless defined otherwise, all technical and scientific terms used herein have the same meanings as commonly understood by one of ordinary skill in the art.

[0014] In the following, the elements of the present invention will be described. These elements are listed with specific embodiments, however, it should be understood that they may be combined in any manner and in any number to create additional embodiments. The variously described examples and preferred embodiments should not be construed to limit the present invention to only the explicitly described embodiments. This description should be understood to support and encompass embodiments which combine the explicitly described embodiments with any number of the disclosed and/or preferred elements. Furthermore, any permutations and combinations of all described elements in this application should be considered disclosed by the description of the present application unless the context indicates otherwise.

[0015] Throughout this specification and the claims which follow, unless the context requires otherwise, the term “comprise”, and variations such as “comprises” and “comprising”, will be understood to imply the inclusion of a stated member, integer or step but not the exclusion of any other non-stated member, integer or step. The term “consist of” is a particular embodiment of the term “comprise”, wherein any other non-stated member, integer or step is excluded. In the context of the present invention, the term “comprise” encompasses the term “consist of”. The term “comprising” thus encompasses “including” as well as “consisting” e.g., a composition “comprising” X may consist exclusively of X or may include something additional e.g., X+Y.

[0016] The terms “a” and “an” and “the” and similar reference used in the context of describing the invention (especially in the context of the claims) are to be construed to cover both the singular and the plural, unless otherwise indicated herein or clearly contradicted by context. Recitation of ranges of values herein is merely intended to serve as a shorthand method of referring individually to each separate value falling within the range. Unless otherwise indicated herein, each individual value is incorporated into the specification as if it were individually recited herein. No language in the specification should be construed as indicating any non-claimed element essential to the practice of the invention.

[0017] The word “substantially” does not exclude “completely” e.g., a composition which is “substantially free” from Y may be completely free from Y. Where necessary, the word “substantially” may be omitted from the definition of the invention. The term “about” in relation to a numerical value x means x±10%.

[0018] In the present invention, if not otherwise indicated, different features of alternatives and embodiments may be combined with each other.

[0019] For the sake of clarity and readability the following definitions are provided. Any technical feature mentioned for these definitions may be read on each and every embodiment of the invention. Additional definitions and explanations may be specifically provided in the context of these embodiments.

### Definitions

[0020] Artificial nucleic acid molecule: An artificial nucleic acid molecule may typically be understood to be a nucleic acid molecule, e.g. a DNA or an RNA, that does not occur naturally. In other words, an artificial nucleic acid molecule may be understood as a non-natural nucleic acid molecule. Such nucleic acid molecule may be non-natural due to its individual sequence (which does not occur naturally) and/or due to other modifications, e.g. structural modifications of nucleotides, which do not occur naturally. An artificial nucleic acid molecule may be a DNA molecule, an RNA molecule or a hybrid-molecule comprising DNA and RNA portions. Typically, artificial nucleic acid molecules may be designed and/or generated by genetic engineering methods to correspond to a desired artificial sequence of nucleotides (heterologous sequence). In this context an artificial sequence is usually a sequence that may not occur naturally, i.e. it differs from the wild type sequence by at least one nucleotide. The term “wild type” may be understood as a sequence occurring in nature. Further, the term “artificial nucleic acid molecule” is not restricted to mean “one single molecule” but is, typically, understood to comprise an ensemble of identical molecules. Accordingly, it may relate to a plurality of identical molecules contained in an aliquot.
[0021] DNA: DNA is the usual abbreviation for deoxy-ribonucleic acid. It is a nucleic acid molecule, i.e. a polymer consisting of nucleotides. These nucleotides are usually deoxy-adenosine-monophosphate, deoxy-thymidine-monophosphate, deoxy-guanosine-monophosphate and deoxy-cytidine-monophosphate monomers which are—by themselves—composed of a sugar moiety (deoxyribose), a base moiety and a phosphate moiety, and polymerise by a characteristic backbone structure. The backbone structure is, typically, formed by phosphodiester bonds between the sugar moiety of the nucleotide, i.e. deoxyribose, of a first and a phosphate moiety of a second, adjacent monomer. The specific order of the monomers, i.e. the order of the bases linked to the sugar/phosphate-backbone, is called the DNA sequence. DNA may be single stranded or double stranded. In the double stranded form, the nucleotides of the first strand typically hybridize with the nucleotides of the second strand, e.g. by A/T-base-pairing and G/C-base-pairing.
[0022] Heterologous sequence: Two sequences are typically understood to be ‘heterologous’ if they are not derivable from the same gene. I.e., although heterologous sequences may be derivable from the same organism, they naturally (in nature) do not occur in the same nucleic acid molecule, such as in the same mRNA.
[0023] Cloning site: A cloning site is typically understood to be a segment of a nucleic acid molecule, which is suitable for insertion of a nucleic acid sequence, e.g., a nucleic acid sequence comprising an open reading frame. Insertion may be performed by any molecular biological method known to the one skilled in the art, e.g. by restriction and ligation. A cloning site typically comprises one or more restriction enzyme recognition sites (restriction sites). These one or more restrictions sites may be recognized by restriction enzymes which cleave the DNA at these sites. A cloning site which comprises more than one restriction site may also be termed a multiple cloning site (MCS) or a polylinker.
[0024] Nucleic acid molecule: A nucleic acid molecule is a molecule comprising, preferably consisting of nucleic acid components. The term nucleic acid molecule preferably refers to DNA or RNA molecules. It is preferably used synonymous with the term “polynucleotide”. Preferably, a nucleic acid molecule is a polymer comprising or consisting of nucleotide monomers, which are covalently linked to each other by phosphodiester-bonds of a sugar/phosphate-backbone. The term “nucleic acid molecule” also encompasses modified nucleic acid molecules, such as base-modified, sugar-modified or backbone-modified etc. DNA or RNA molecules.
[0025] Open reading frame: An open reading frame (ORF) in the context of the invention may typically be a sequence of several nucleotide triplets, which may be translated into a peptide or protein. An open reading frame preferably contains a start codon, i.e. a combination of three subsequent nucleotides coding usually for the amino acid methionine (ATG), at its 5′-end and a subsequent region, which usually exhibits a length which is a multiple of 3 nucleotides. An ORF is preferably terminated by a stop-codon (e.g., TAA, TAG, TGA). Typically, this is the only stop-codon of the open reading frame. Thus, an open reading frame in the context of the present invention is preferably a nucleotide sequence, consisting of a number of nucleotides that may be divided by three, which starts with a start codon (e.g. ATG) and which preferably terminates with a stop codon (e.g., TAA, TGA, or TAG). The open reading frame may be isolated or it may be incorporated in a longer nucleic acid sequence, for example in a vector or an mRNA. An open reading frame may also be termed “(protein) coding sequence” or, preferably, “coding sequence”.
[0026] Peptide: A peptide or polypeptide is typically a polymer of amino acid monomers, linked by peptide bonds. It typically contains less than 50 monomer units. Nevertheless, the term peptide is not a disclaimer for molecules having more than 50 monomer units. Long peptides are also called polypeptides, typically having between 50 and 600 monomeric units.
[0027] Polyvalent/multivalent composition: The terms “polyvalent composition” or “multivalent composition” will be recognized and understood by the person of ordinary skill in the art, and are e.g. intended to refer to a composition or a vaccine comprising different antigens or epitopes of different antigens, or comprising different epitopes of the same antigen, or any combination thereof. The terms describe that said vaccine or composition has more than one valence. In the context of the invention, a polyvalent cancer vaccine would comprise at least one artificial nucleic acid molecule e.g. RNA encoding antigenic peptides or proteins derived from several different antigens or encoding different epitopes from the same antigen, or a combination thereof.
[0028] Protein: A protein typically comprises one or more peptides or polypeptides. A protein is typically folded into 3-dimensional form, which may be required for the protein to exert its biological function.
[0029] Restriction site: A restriction site, also termed restriction enzyme recognition site, is a nucleotide sequence recognized by a restriction enzyme. A restriction site is typically a short, preferably palindromic nucleotide sequence, e.g. a sequence comprising 4 to 8 nucleotides. A restriction site is preferably specifically recognized by a restriction enzyme. The restriction enzyme typically cleaves a nucleotide sequence comprising a restriction site at this site. In a double-stranded nucleotide sequence, such as a double-stranded DNA sequence, the restriction enzyme typically cuts both strands of the nucleotide sequence.
[0030] RNA, mRNA: RNA is the usual abbreviation for ribonucleic acid. It is a nucleic acid molecule, i.e. a polymer consisting of nucleotides. These nucleotides are usually adenosine-monophosphate, uridine-monophosphate, guanosine-monophosphate and cytidine-monophosphate monomers which are connected to each other along a so-called backbone. The backbone is formed by phosphodiester bonds between the sugar, i.e. ribose, of a first and a phosphate moiety of a second, adjacent monomer. The specific succession of the monomers is called the RNA-sequence. Usually RNA may be obtainable by transcription of a DNA-sequence, e.g., inside a cell. In eukaryotic cells, transcription is typically performed inside the nucleus or the mitochondria. In vivo, transcription of DNA usually results in the so-called premature RNA which has to be processed into so-called messenger-RNA, usually abbreviated as mRNA. Processing of the premature RNA, e.g. in eukaryotic organisms, comprises a variety of different posttranscriptional-modifications such as splicing, 5′-capping, polyadenylation, export from the nucleus or the mitochondria and the like. The sum of these processes is also called maturation of RNA. The mature messenger RNA usually provides the nucleotide sequence that may be translated into an amino-acid sequence of a particular peptide or protein. Typically, a mature mRNA comprises a 5′-cap, a 5′-UTR, an open reading frame, a 3′-UTR and a poly(A) sequence.

[0031] The artificial RNA, preferably the mRNA of the invention may be prepared using any method known in the art, including chemical synthesis such as e.g. solid phase RNA synthesis, as well as in vitro methods, such as RNA in vitro transcription reactions.
[0032] RNA in vitro transcription/in vitro transcription: The terms “RNA in vitro transcription” or “in vitro transcription” relate to a process wherein RNA is synthesized in a cell-free system (in vitro). DNA, particularly plasmid DNA (or PCR product), is typically used as template for the generation of RNA transcripts. RNA may be obtained by DNA-dependent in vitro transcription of an appropriate DNA template, which according to the present invention is preferably a linearized plasmid DNA template. The promoter for controlling in vitro transcription can be any promoter for any DNA-dependent RNA polymerase. Particular examples of DNA-dependent RNA polymerases are the T7, T3, and SP6 RNA polymerases. A DNA template for in vitro RNA transcription may be obtained by cloning of a nucleic acid, in particular cDNA corresponding to the respective RNA to be in vitro transcribed, and introducing it into an appropriate vector for in vitro transcription, for example into plasmid DNA. In a preferred embodiment of the present invention the DNA template is linearized with a suitable restriction enzyme, before it is transcribed in vitro. The cDNA may be obtained by reverse transcription of mRNA or chemical synthesis. Moreover, the DNA template for in vitro RNA synthesis may also be obtained by gene synthesis.

[0033] Reagents used in RNA in vitro transcription typically include: a DNA template (linearized plasmid DNA or PCR product) with a promoter sequence that has a high binding affinity for its respective RNA polymerase such as bacteriophage-encoded RNA polymerases (T7, T3, SP6, or Syn5); ribonucleotide triphosphates (NTPs) for the four bases (adenine, cytosine, guanine and uracil); optionally, a cap analogue as defined herein (e.g. m7G(5′)ppp(5′)G(m7G)); optionally, further modified nucleotides as defined herein; a DNA-dependent RNA polymerase capable of binding to the promoter sequence within the DNA template (e.g. T7, T3, SP6, or Syn5 RNA polymerase); optionally, a ribonuclease (RNase) inhibitor to inactivate any contaminating RNase; optionally, a pyrophosphatase to degrade pyrophosphate, which may inhibit transcription; MgCl2, which supplies Mg2+ ions as a co-factor for the polymerase; a buffer (TRIS or HEPES) to maintain a suitable pH value, which can also contain antioxidants (e.g. DTT), and/or polyamines such as spermidine at optimal concentrations, or a buffer system as disclosed in WO2017/109161.

[0034] In the context of nucleic acid vaccine production, it may be required to provide GMP-grade RNA. GMP-grade RNA may be suitably produced using a manufacturing process approved by regulatory authorities. Accordingly, in a particularly preferred embodiment, RNA production is performed under current good manufacturing practice (GMP), implementing various quality control steps on DNA and RNA level, according to WO2016/180430. Accordingly, the RNA of the invention is a GMP-grade RNA, particularly a GMP-grade RNA mRNA.

[0035] The obtained RNA products are preferably purified using PureMessenger® (CureVac, Tübingen, Germany; RP-HPLC according to WO2008/077592) and/or tangential flow filtration (as described in WO2016/193206). Where nucleic acid sequences are reported in the context of the present invention, these sequences generally comprise both, the specific RNA or DNA sequence as well as its corresponding DNA or RNA counterpart, respectively. For example, where a DNA sequence is provided, the skilled person knows that the corresponding RNA sequence is obtained by exchange of thymine by uracil residues and vice versa.
[0036] Sequence of a nucleic acid molecule: The sequence of a nucleic acid molecule is typically understood to be the particular and individual order, i.e. the succession of its nucleotides. The sequence of a protein or peptide is typically understood to be the order, i.e. the succession of its amino acids.
[0037] Sequence identity: Two or more sequences are identical if they exhibit the same length and order of nucleotides or amino acids. The percentage of identity typically describes the extent to which two sequences are identical, i.e. it typically describes the percentage of nucleotides that correspond in their sequence position with identical nucleotides of a reference-sequence. For determination of the degree of identity (“% identity), the sequences to be compared are typically considered to exhibit the same length, i.e. the length of the longest sequence of the sequences to be compared. This means that a first sequence consisting of 8 nucleotides is 80% identical to a second sequence consisting of 10 nucleotides comprising the first sequence. In other words, in the context of the present invention, identity of sequences preferably relates to the percentage of nucleotides or amino acids of a sequence which have the same position in two or more sequences having the same length. Specifically, the “% identity” of two amino acid sequences or two nucleic acid sequences may be determined by aligning the sequences for optimal comparison purposes (e.g., gaps can be introduced in either sequences for best alignment with the other sequence) and comparing the amino acids or nucleotides at corresponding positions. Gaps are usually regarded as non-identical positions, irrespective of their actual position in an alignment. The “best alignment” is typically an alignment of two sequences that results in the highest percent identity. The percent identity is determined by the number of identical nucleotides in the sequences being compared (i.e., % identity=#of identical positions/total #of positions×100). The determination of percent identity between two sequences can be accomplished using a mathematical algorithm known to those of skill in the art.
[0038] Stabilized nucleic acid molecule: A stabilized nucleic acid molecule is a nucleic acid molecule, preferably a DNA or RNA molecule that is modified such, that it is more stable to disintegration or degradation, e.g., by environmental factors or enzymatic digest, such as by an exo- or endonuclease degradation, than the nucleic acid molecule without the modification. Preferably, a stabilized nucleic acid molecule in the context of the present invention is stabilized in a cell, such as a prokaryotic or eukaryotic cell, preferably in a mammalian cell, such as a human cell. The stabilization effect may also be exerted outside of cells, e.g. in a buffer solution etc., for example, in a manufacturing process for a pharmaceutical composition comprising the stabilized nucleic acid molecule.
[0039] Transfection:

[0040] The term “transfection” refers to the introduction of nucleic acid molecules, such as DNA or RNA (e.g. mRNA) molecules, into cells, preferably into eukaryotic cells. In the context of the present invention, the term “transfection” encompasses any method known to the skilled person for introducing nucleic acid molecules into cells, preferably into eukaryotic cells, such as into mammalian cells. Such methods encompass, for example, electroporation, lipofection, e.g. based on cationic lipids and/or liposomes, calcium phosphate precipitation, nanoparticle based transfection, virus based transfection, or transfection based on cationic polymers, such as DEAE-dextran or polyethylenimine etc. Preferably, the introduction is non-viral.
[0041] Vector: The term “vector” refers to a nucleic acid molecule, preferably to an artificial nucleic acid molecule. A vector in the context of the present invention is suitable for incorporating or harboring a desired nucleic acid sequence, such as a nucleic acid sequence comprising an open reading frame. Such vectors may be storage vectors, expression vectors, cloning vectors, transfer vectors etc. A storage vector is a vector, which allows the convenient storage of a nucleic acid molecule, for example, of an mRNA molecule. Thus, the vector may comprise a sequence corresponding, e.g., to a desired mRNA sequence or a part thereof, such as a sequence corresponding to the coding sequence and the 3′-UTR of an mRNA. An expression vector may be used for production of expression products such as RNA, e.g. mRNA, or peptides, polypeptides or proteins. For example, an expression vector may comprise sequences needed for transcription of a sequence stretch of the vector, such as a promoter sequence, e.g. an RNA polymerase promoter sequence. A cloning vector is typically a vector that contains a cloning site, which may be used to incorporate nucleic acid sequences into the vector. A cloning vector may be, e.g., a plasmid vector or a bacteriophage vector. A transfer vector may be a vector, which is suitable for transferring nucleic acid molecules into cells or organisms, for example, viral vectors. A vector in the context of the present invention may be, e.g., an RNA vector or a DNA vector. Preferably, a vector is a DNA molecule. Preferably, a vector in the sense of the present application comprises a cloning site, a selection marker, such as an antibiotic resistance factor, and a sequence suitable for multiplication of the vector, such as an origin of replication.
[0042] Vehicle: A vehicle is typically understood to be a material that is suitable for storing, transporting, and/or administering a compound, such as a pharmaceutically active compound. For example, it may be a physiologically acceptable liquid, which is suitable for storing, transporting, and/or administering a pharmaceutically active compound.

[0043] The present application is filed together with a sequence listing in electronic format, which is part of the description of the present application (WIPO standard ST.25). The information contained in the electronic format of the sequence listing filed together with this application is incorporated herein by reference in its entirety. Where reference is made herein to a “SEQ ID NO:” the corresponding nucleic acid sequence or amino acid (aa) sequence in the sequence listing having the respective identifier is referred to. For many sequences, the sequence listing also provides additional detailed information, e.g. regarding certain structural features, sequence optimizations, GenBank identifiers, or regarding its coding capacity. In particular, such information is provided under numeric identifier <223> in the WIPO standard ST.25 sequence listing. Accordingly, information provided under said numeric identifier <223> is explicitly included herein in its entirety and has to be understood as integral part of the description of the underlying invention.

[0044] The present invention is based, in part, on the surprising finding that antigen fusion to suitable “targeting” sequences derived from a group of signal transduction proteins involved in immune responses advantageously routes these antigens to MHC class I and MHC class II processing compartments. These “targeting” sequences preferably comprise or consist of transmembrane domains. Proteins (e.g. CTLA4) containing the employed “targeting” sequences are expressed on the external side of plasma membranes, and are typically “fast recycling” proteins that are readily and recurrently internalized to enter the endosomal pathways, which preferably intersect MHC class I and in particular also MHC class II pathways. The “targeting” approach of the present invention is therefore different from other prior art approaches in that it preferably targets antigens to desired intracellular pathways, rather than certain cell types.

[0045] For effective delivery of antigenic sequences to MHC class I and MHC class II processing compartments, nucleic acid molecules can be engineered to encode antigens/epitopes that are fused to suitable amino acid sequences derived from fast-recycling proteins residing in the plasma membrane. Targeting can be achieved by using the full-length amino acid sequence of a protein, or preferably its transmembrane (and optionally cytoplasmic) domains, preferably together with a suitable signal peptide. Fusing these sequences to the antigenic peptide or protein of interest preferably facilitates the localization of the antigens/epitopes to the plasma membrane, and its recycling to cellular compartments where the MHC class I and II processing and loading take place, like the endoplasmic reticulum, endosomes or the lysosome. The unprecedented targeting strategy presented herein exploits the fast-recycling characteristics conferred by amino acid sequences (in particular transmembrane domains) derived from the group of immune-response activating signal transduction (IRSTₑₚₘ) proteins residing in the plasma membrane of immune cells. By effectively routing antigenic peptides or proteins to the plasma membrane and effecting their anchorage therein and subsequent recycling to cellular compartments intersecting with the MHC processing and loading pathways via the fused IRSTₑₚₘ-derived protein domains, the presentation of encoded antigens/epitopes by MHC class I and MHC class II in recipient cells and therefore the induction of antigen-specific immune responses against the immunogenic epitopes or whole antigens by nucleic acid-based vaccines is preferably increased. The targeting approach presented herein therefore exploits the common pathways of fast-recycling of membrane-bound IRSTₑₚₘ-proteins, instead of using state-of-the-art approaches of directing the translated antigenic proteins or peptides directly to endosomal/lysosomal compartments via the fusion of different trafficking sequences.

[0046] To that end, the present inventors generated nucleic acid molecules encoding such antigenic fusion proteins and investigated their therapeutic potential in a tumor model. Therefore, antigenic proteins, peptides or epitopes of interest were joined to selected domains or full-length proteins derived from several fast-recycling immune-response activating signal transduction proteins. Typically, nucleic acid constructs were designed by removing the extracellular domain of the protein and replace it by the antigen/epitope. Signal peptides and transmembrane domains can be included to optimize transport to and anchorage on the external site of the plasma membrane. Additionally, suitable linkers were introduced to allow the correct presentation of immunogenic peptides by the MHC class I and class II molecules. T helper cell epitopes may be included to increase the induction of antigen-specific immune responses against the encoded epitopes. The design strategy permitted the targeting of specific epitopes or whole antigens to MHC class I- and class II-enriched cellular compartments.

[0047] Surprisingly, the antigenic fusion proteins were capable of effectively inducing antigen-specific T cell responses, and and was shown to efficiently reduce tumor growth in a mouse model.

[0048] The novel targeting approach presented herein provides a convenient and effective means to preferably ensure antigen entry into MHC processing pathways. Thereby, said targeting strategy preferably enhances the induction of antigen-specific immune responses against antigenic peptides or proteins or epitopes and opens up new possibilities for the increased therapeutic efficacy of nucleic acid vaccines.

[0049] In a first aspect, the present invention relates to an artificial nucleic acid molecule comprising at least one coding region encoding a. at least one antigenic peptide or protein, and b. at least one additional amino acid sequence derived from at least one immune response signal transduction protein located in the external plasma membrane, as defined below. Preferably, said at least one additional amino acid sequence comprises or consists of at least one transmembrane domain of said protein. Without wishing to be bound by specific theory, it is envisaged that the at least one additional amino acid sequence derived from the at least one immune response signal transduction protein located in the external plasma membrane (also referred to as “IRSTₑₚₘ herein) provides for an improved MHC class I and II presentation efficiency, preferably resulting in simultaneous stimulation and expansion of CD8⁺ and CD4⁺ T cell subsets.

[0050] The artificial nucleic acid molecule of the invention-which may preferably be an RNA as described below-thus encodes at least one IRSTₑₚₘ derived amino acid sequence (which is preferably selected based on its capability of routing fused amino acid sequences into desired compartments of MHC processing and loading) and at least one antigenic peptide or protein (which is preferably selected based on the particular disease or condition to be treated or prevented).

[0051] Both are typically expressed as a fusion protein, which is also referred to as “antigenic fusion protein herein”. As described below, the artificial nucleic acid molecules, preferably RNAs, of the invention may encode antigenic polypeptide constructs comprising several (identical or different) IRSTₑₚₘ derived amino acid sequences, several (identical or different) antigenic peptides or proteins, and optionally further (poly-)peptides, proteins or protein domains (such as signal peptides, peptide linkers, and T helper epitopes) in any combination disclosed herein. However, the artificial nucleic acid molecule, preferably RNA, of the invention is envisaged to encode an “antigenic polypeptide construct” comprising at least one antigenic peptide or protein, and at least one IRSTₑₚₘ-derived additional amino acid sequence.

### Coding Region

### IRSTₑₚₘ-Derived Amino Acid Sequences

[0052] The present inventors surprisingly discovered that fusing antigenic peptides or proteins to appropriate targeting sequences derived from immune response-activating signal transduction proteins located in the external plasma membrane (“IRSTₑₚₘ”) effectively mediates MHC presentation, preferably resulting in increased T cell responses. Without wishing to be bound by specific theory, IRSTₑₚₘ-derived amino acid sequences may preferably comprise targeting sequences, which mediate translocation into defined subcellular compartments of MHC processing and loading, resulting in enhanced MHC class I and class II presentation of antigenic peptides and proteins fused thereto.

[0053] The term “immune-response-activating signal transduction” refers to the cascade of processes by which a signal interacts with a receptor, causing a change in the level or activity of a second messenger or other downstream target, and ultimately leading to activation or perpetuation of an immune response. The term “IRSTₑₚₘ protein” thus refers proteins located in the external plasma membrane, i.e. the leaflet of the plasma membrane that faces away from the cytoplasm, which are involved in such signaling cascades. IRSTₑₚₘ proteins are therefore preferably expressed on the plasma membrane of immune cells, more preferably of antigen-presenting cells (APCs). It will be acknowledged that due to the complexity of intracellular signaling pathways, the term IRSTₑₚₘ protein may include proteins having dual roles in the regulation of immune responses and have inhibitory and activating effects in different settings. Preferred IRSTₑₚₘ proteins are indicated in Table 1 below. Preferably, “IRSTₑₚₘ proteins” are quickly recycled at the cellular surface.

[0054] As explained above, the inventive artificial nucleic acid molecules comprise at least one amino acid sequence “derived from” at least one IRSTₑₚₘ protein as defined herein.

[0055] The term “derived from” as used herein generally indicates that a sequence may be isolated from, related to, based on or homologous to a reference sequence. Sequences that are “derived from” a reference sequences thus include sequences that are identical to said reference sequence (i.e. full-length sequences exhibiting 100% sequence identity to said reference sequence), as well as variants, fragments and derivatives of said reference sequences. The definition is applicable to both amino acid sequences and nucleic acid sequences, mutatis mutandis.

[0056] Artificial nucleic acid molecules, preferably RNAs, of the invention preferably encode, in their at least one coding region, at least one amino acid sequence derived from an IRSTₑₚₘ protein as described herein, or a fragment, variant or derivative of any of said proteins.

[0057] As used herein, the term “(protein/amino acid sequence) variant” in general refers to “sequence variants”, i.e. proteins or (poly-)peptides comprising an amino acid sequence that differs in at least one amino acid residue from a reference (or “parent”) amino acid sequence of a reference (or “parent”) protein or (poly-)peptide.

[0058] “Variant” proteins/(poly-)peptides may thus preferably comprise, in their amino acid sequence, at least one amino acid mutation, substitution, insertion or deletion as compared to their respective reference sequence. Substitutions may be selected from conservative or non-conservative substitutions. Protein/(poly-)peptide “variants” may comprise at least one conservative amino acid substitution, wherein amino acids, originating from the same class, are exchanged for one another. In particular, these are amino acids having aliphatic side chains, positively or negatively charged side chains, aromatic groups in the side chains or amino acids, the side chains of which can form hydrogen bridges, e.g. side chains which have a hydroxyl function. By conservative constitution, e.g. an amino acid having a polar side chain may be replaced by another amino acid having a corresponding polar side chain, or, for example, an amino acid characterized by a hydrophobic side chain may be substituted by another amino acid having a corresponding hydrophobic side chain (e.g. serine (threonine) by threonine (serine) or leucine (isoleucine) by isoleucine (leucine)). However, non-conservative amino acid substitutions are also envisaged herein.

[0059] Preferably, the term “variant” as used herein includes naturally occurring variants, e.g. preproproteins, proproteins, and proteins/(poly-)peptides that have been subjected to post-translational proteolytic processing (this may involve removal of the N-terminal methionine, signal peptide, and/or the conversion of an inactive or non-functional protein to an active or functional one), and naturally occurring mutant proteins/(poly-)peptides. The term “variant” further encompasses engineered variants of proteins/(poly-)peptides, which may be (sequence-) modified to introduce or abolish a certain biological property and/or functionality. The terms “transcript variants” or “splice variants” in the context of proteins/(poly-)peptides refer to variants produced from messenger RNAs that are initially transcribed from the same gene, but are subsequently subjected to alternative (or differential) splicing, where particular exons of a gene may be included within or excluded from the final, processed messenger RNA (mRNA). It will be noted that the term “variant” may essentially be defined by way of a minimum degree of sequence identity (and preferably also a desired biological function/properties) as compared to a reference protein/(poly-)peptides. Thus, fragments or certain derivatives (which also differ in terms of their amino acid sequence from the reference protein/(poly-)peptide) could be classified as “variants” as well. Therefore, a “variant” as defined herein can be derived from, isolated from, related to or based on the reference protein/(poly-)peptide or a fragment or derivative thereof.

[0060] The term “(protein/amino acid sequence) variant” as used herein preferably refers to (poly-)peptides having a sequence identity of at least 5%, 10%, 20%, 30%, 40%, 50%, 60%, 70%, 80%, 85%, 86%, 87%, 88%, 89%, 90%, 91%, 92%, 93%, 94%, 95%, 96%, 97%, 98%, or 99%, preferably of at least 70%, more preferably of at least 80%, even more preferably at least 85%, even more preferably of at least 90% and most preferably of at least 95% or even 97%, with an amino acid sequence of the respective naturally occurring (wild-type) protein/(poly-)peptide, or a fragment or derivative thereof.

[0061] As used herein, the term “(protein/amino acid sequence) fragment” in general refers to a protein/(poly-)peptide that consists of a continuous subsequence of the full-length amino acid sequence of a reference (or “parent”) protein/(poly-) peptide, which is, with regard to its amino acid sequence, N-terminally, C-terminally and/or intrasequentially truncated compared to the amino acid sequence of said reference protein/(poly-)peptide. Such truncation may occur either on the amino acid level or on the nucleic acid level, respectively. In other words, a “fragment” may typically be a shorter portion of a full-length sequence of an amino acid sequence. Accordingly, a fragment, typically, consists of a sequence that is identical to the corresponding stretch within the full-length amino acid sequence. The term includes naturally occurring fragments (such as fragments resulting from naturally occurring in vivo protease activity) as well as engineered fragments.

[0062] The term “(protein/amino acid sequence) fragment” as used herein may refer to a protein/(poly-)peptide comprising an amino acid sequence of at least 5 contiguous amino acid residues, at least 10 contiguous amino acid residues, at least 15 contiguous amino acid residues, at least 20 contiguous amino acid residues, at least 25 contiguous amino acid residues, at least 40 contiguous amino acid residues, at least 50 contiguous amino acid residues, at least 60 contiguous amino residues, at least 70 contiguous amino acid residues, at least contiguous 80 amino acid residues, at least contiguous 90 amino acid residues, at least contiguous 100 amino acid residues, at least contiguous 125 amino acid residues, at least 150 contiguous amino acid residues, at least contiguous 175 amino acid residues, at least contiguous 200 amino acid residues, or at least contiguous 250 amino acid residues of the amino acid sequence of a reference protein/(poly-)peptide, or a variant or derivative thereof.

[0063] A preferred fragment of a sequence in the context of the present invention, consists of a continuous stretch of amino acids corresponding to a continuous stretch of entities in the reference protein/(poly-)peptide, which represents at least 20%, preferably at least 30%, more preferably at least 40%, more preferably at least 50%, even more preferably at least 60%, even more preferably at least 70%, and most preferably at least 80% of the total (i.e. full-length) reference protein/(poly-)peptide, or a variant or derivative thereof, from which the fragment is derived.

[0064] A sequence identity indicated with respect to such a fragment preferably refers to the entire amino acid sequence of the reference protein/(poly-)peptide. Preferably, a “fragment” may typically comprise or consist of an amino acid sequence having a sequence identity of at least 5%, 10%, 20%, 30%, 40%, 50%, 60%, 70%, 80%, 85%, 86%, 87%, 88%, 89%, 90%, 91%, 92%, 93%, 94%, 95%, 96%, 97%, 98%, or 99%, preferably of at least 70%, more preferably of at least 80%, even more preferably at least 85%, even more preferably of at least 90% and most preferably of at least 95% or even 97%, with the amino acid sequence of to a reference protein/(poly-)peptide, or a variant or derivative derivative thereof.

[0065] As used herein, the term “(protein/amino acid sequence) derivative”, is generally to be understood as a protein/(poly-) peptide that has been modified with respect to a reference (or “parent”) protein/(poly-)peptide to include a new or additional property or functionality. Derivatives may be modified to comprise desired biological functionalities (e.g. by introducing or removing moieties or domains that confer, enhance, reduce or abolish target binding affinity or specificity or enzymatic activities), manufacturing properties (e.g. by introducing moieties which confer an increased solubility or enhanced excretion, or allow for purification) or pharmacokinetic/pharmacodynamics properties for medical use (e.g. by introducing moieties which confer increased stability, bioavailability, absorption; distribution and/or reduced clearance). Derivatives may be prepared by introducing or removing a moiety or domain that confers a biological property or functionality of interest. Such moieties or domains may be introduced into the amino acid sequence (e.g. at the amino and/or carboxyl terminal residues) post-translationally or at the nucleic acid sequence level using standard genetic engineering techniques (cf. Sambrook J et al., 2012 (4th ed.), Molecular cloning: a laboratory manual. Cold Spring Harbor Laboratory, Cold Spring Harbor, New York). A “derivative” may be derived from (and thus optionally include) the naturally occurring (wild-type) protein/(poly-)peptide amino acid sequence, or a variant or fragment thereof. It will be understood that “(protein/amino acid sequence) derivatives” may differ (e.g. by way of introduction or removal of (poly-)peptide moieties and/or protein domains) in their amino acid sequence from the reference protein/(poly-) peptide that they are derived from, and thus may qualify as “variants” as well. However, whereas “(protein/amino acid sequence) variants” are primarily defined in terms of their sequence identity to a reference amino acid sequence, derivatives are preferably characterized by the presence or absence of a specific biological property or functionality as compared to the reference protein. Nevertheless, “(protein/amino acid sequence) derivatives” may preferably comprise or consist of an amino acid sequence having a sequence identity of at least 5%, 10%, 20%, 30%, 40%, 50%, 60%, 70%, 80%, 85%, 86%, 87%, 88%, 89%, 90%, 91%, 92%, 93%, 94%, 95%, 96%, 97%, 98%, or 99%, preferably of at least 70%, more preferably of at least 80%, even more preferably at least 85%, even more preferably of at least 90% and most preferably of at least 95% or even 97%, with the amino acid sequence of to a reference protein/(poly-)peptide, or a variant or fragment thereof.

[0066] According to preferred embodiments of the invention, the artificial nucleic acid molecule, preferably RNA, of the invention, encodes in its at least one coding region at least one additional amino acid sequence derived from any one of the proteins indicated in Table 1 below, or a (preferably functional) fragment, variant or derivative of any one of said proteins.

[0067] Preferably, in the context of the present invention, “functional” fragments, variants or derivatives substantially exhibit the same or comparable biological functionalities as their respective “parent” or “reference” sequence. The definition is applicable to “functional” protein/peptide/amino acid sequence fragments, variants or derivatives as well as “functional” nucleic acid sequence/polynucleotide fragments, variants or derivatives. The desired biological functionality is preferably indicated in the context of the respective sequence. In general, “functional” protein/peptide/amino acid sequence fragments, variants or derivatives may preferably exhibit the same or comparable binding characteristics, targeting characteristics, immune response-inducing characteristics . . . and so an as their “parent” or “reference” sequence. “Functional” nucleic acid sequence/polynucleotide fragments, variants or derivatives may preferably exhibit the same or a comparable capability as to encode and be expressed (i.e. optionally transcribed, and translated) to yield a desired protein/peptide/amino acid sequence as their respective “parent” or “reference” sequence.

[0068] “Functional” IRSTₑₚₘ protein fragments, variants and derivatives are preferably capable of directing antigenic proteins or peptides (preferably fused thereto) into MHC class I and preferably MHC class II processing compartments. The use of “functional” IRSTₑₚₘ protein fragments, variants and derivatives therefore preferably enhances CD4⁺ T helper cell responses, and, accordingly, increased CD8⁺ CTL and/or antibody-mediated immunity.

TABLE 1
IRSTₑₚₘ proteins

| | | | | | SEQ ID NO: | SEQ ID NO: |
|---|---|---|---|---|---|---|
| | | | | SEQ ID NO: | wt nucleic | optimized |
| | UniProt | | Short | wt amino | acid | nucleic acid |
| # | Identifier | Protein Name | Name | acid sequence | sequence | sequence |
| 1 | P16410 | Cytotoxic | CTLA4 | SEQ ID NO: 169 | 377 | 585, 793, |
| | | T-lymphocyte protein | | | | 1001, 1209, |
| | | 4 | | | | 1417, 1625, |
| | | | | | | 1833, 2041, |
| | | | | | | 2249, 2457, |
| | | | | | | 2665, 2873 |
| 2 | P32248 | C—C chemokine | CCR7 | SEQ ID NO: 173 | 381 | 589, 797, |
| | | receptor type 7 | | | | 1005, 1213, |
| | | | | | | 1421, 1629, |
| | | | | | | 1837, 2045, |
| | | | | | | 2253, 2461, |
| | | | | | | 2669, 2877 |
| 3 | A0A5B9 | T-cell receptor beta- | TRBC2 | SEQ ID NO: 157 | 365 | 573, 781, 989, |
| | | 2 chain C region | | | | 1197, 1405, |
| | | | | | | 1613, 1821, |
| | | | | | | 2029, 2237, |
| | | | | | | 2445, 2653, |
| | | | | | | 2861 |
| 4 | B7Z8K6 | T-cell receptor delta | TRDC | SEQ ID NO: 158 | 366 | 574, 782, 990, |
| | | chain C region | | | | 1198, 1406, |
| | | | | | | 1614, 1822, |
| | | | | | | 2030, 2238, |
| | | | | | | 2446, 2654, |
| | | | | | | 2862 |
| 5 | B9A064 | Immunoglobulin | IGLL5 | SEQ ID NO: 159 | 367 | 575, 783, 991, |
| | | lambda-like | | | | 1199, 1407, |
| | | polypeptide 5 | | | | 1615, 1823, |
| | | | | | | 2031, 2239, |
| | | | | | | 2447, 2655, |
| | | | | | | 2863 |
| 6 | O00206 | Toll-like receptor 4 | TLR4 | SEQ ID NO: 160 | 368 | 576, 784, 992, |
| | | | | | | 1200, 1408, |
| | | | | | | 1616, 1824, |
| | | | | | | 2032, 2240, |
| | | | | | | 2448, 2656, |
| | | | | | | 2864 |
| 7 | P01730 | T-cell surface | CD4 | SEQ ID NO: 161 | 369 | 577, 785, 993, |
| | | glycoprotein CD4 | | | | 1201, 1409, |
| | | | | | | 1617, 1825, |
| | | | | | | 2033, 2241, |
| | | | | | | 2449, 2657, |
| | | | | | | 2865 |
| 8 | P01850 | T-cell receptor beta- | TRBC1 | SEQ ID NO: 162 | 370 | 578, 786, 994, |
| | | 1 chain C region | | | | 1202, 1410, |
| | | | | | | 1618, 1826, |
| | | | | | | 2034, 2242, |
| | | | | | | 2450, 2658, |
| | | | | | | 2866 |
| 9 | P07766 | T-cell surface | CD3E | SEQ ID NO: 163 | 371 | 579, 787, 995, |
| | | glycoprotein CD3 | | | | 1203, 1411, |
| | | epsilon chain | | | | 1619, 1827, |
| | | | | | | 2035, 2243, |
| | | | | | | 2451, 2659, |
| | | | | | | 2867 |
| 10 | P08575 | Receptor-type | PTPRC | SEQ ID NO: 164 | 372 | 580, 788, 996, |
| | | tyrosine-protein | | | | 1204, 1412, |
| | | phosphatase C | | | | 1620, 1828, |
| | | | | | | 2036, 2244, |
| | | | | | | 2452, 2660, |
| | | | | | | 2868 |
| 11 | P08637 | Low affinity | FCG3A | SEQ ID NO: 165 | 373 | 581, 789, 997, |
| | | immunoglobulin | | | | 1205, 1413, |
| | | gamma Fc region | | | | 1621, 1829, |
| | | receptor III-A | | | | 2037, 2245, |
| | | | | | | 2453, 2661, |
| | | | | | | 2869 |
| 12 | P10747 | T-cell-specific | CD28 | SEQ ID NO: 166 | 374 | 582, 790, 998, |
| | | surface glycoprotein | | | | 1206, 1414, |
| | | CD28 | | | | 1622, 1830, |
| | | | | | | 2038, 2246, |
| | | | | | | 2454, 2662, |
| | | | | | | 2870 |
| 13 | P11912 | B-cell antigen | CD79A | SEQ ID NO: 167 | 375 | 583, 791, 999, |
| | | receptor complex- | | | | 1207, 1415, |
| | | associated protein | | | | 1623 1831, |
| | | alpha chain | | | | 2039, 2247, |
| | | | | | | 2455, 2663, |
| | | | | | | 2871 |
| 14 | P15391 | B-lymphocyte | CD19 | SEQ ID NO: 168 | 376 | 792, 1000, |
| | | antigen CD19 | | | | 1208, 1416, |
| | | | | | | 1624, 1832, |
| | | | | | | 2040, 2248, |
| | | | | | | 2456, 2664, |
| | | | | | | 2872, 584 |
| 15 | P16671 | Platelet glycoprotein | CD36 | SEQ ID NO: 170 | 378 | 586, 794, |
| | | 4 | | | | 1002, 1210, |
| | | | | | | 1418, 1626, |
| | | | | | | 1834, 2042, |
| | | | | | | 2250, 2458, |
| | | | | | | 2666, 2874 |
| 16 | P26718 | NKG2-D type II | NKG2D | SEQ ID NO: 171 | 379 | 587, 795, |
| | | integral membrane | | | | 1003, 1211, |
| | | protein | | | | 1419, 1627, |
| | | | | | | 1835, 2043, |
| | | | | | | 2251, 2459, |
| | | | | | | 2667, 2875 |
| 17 | P30273 | High affinity | FCERG | SEQ ID NO: 172 | 380 | 588, 796, |
| | | immunoglobulin | | | | 1004, 1212, |
| | | epsilon receptor | | | | 1420, 1628, |
| | | subunit gamma | | | | 1836, 2044, |
| | | | | | | 2252, 2460, |
| | | | | | | 2668, 2876 |
| 18 | P40259 | B-cell antigen | CD79B | SEQ ID NO: 174 | 382 | 590, 798, |
| | | receptor complex- | | | | 1006, 1214, |
| | | associated protein | | | | 1422, 1630, |
| | | beta chain, | | | | 1838, 2046, |
| | | | | | | 2254, 2462, |
| | | | | | | 2670, 2878 |
| 19 | P42081 | T-lymphocyte | CD86 | SEQ ID NO: 175 | 383 | 591, 799, |
| | | activation antigen | | | | 1007, 1215, |
| | | CD86 | | | | 1423, 1631, |
| | | | | | | 1839, 2047, |
| | | | | | | 2255, 2463, |
| | | | | | | 2671, 2879 |
| 20 | Q15762 | CD226 antigen | CD226 | SEQ ID NO: 176 | 384 | 592, 800, |
| | | | | | | 1008, 1216, |
| | | | | | | 1424, 1632, |
| | | | | | | 1840, 2048, |
| | | | | | | 2256, 2464, |
| | | | | | | 2672, 2880 |
| 21 | Q685J3 | Mucin-17 | MUC17 | SEQ ID NO: 177 | 385 | 593, 801, |
| | | | | | | 1009, 1217, |
| | | | | | | 1425, 1633, |
| | | | | | | 1841, 2049, |
| | | | | | | 2257, 2465, |
| | | | | | | 2673, 2881 |
| 22 | Q9NNX6 | CD209 | CD209 | SEQ ID NO: 178 | 386 | 594, 802, |
| | | | antigen | | | 1010, 1218, |
| | | | | | | 1426, 1634, |
| | | | | | | 1842, 2050, |
| | | | | | | 2258, 2466, |
| | | | | | | 2674, 2882 |
| 23 | Q9NR97 | TLR8 | Toll-like | SEQ ID NO: 179 | 387 | 803, 1011, |
| | | | receptor 8 | | | 1219, 1427, |
| | | | | | | 1635, 1843, |
| | | | | | | 2051, 2259, |
| | | | | | | 2467, 2675, |
| | | | | | | 2883, 595 |

[0069] According to preferred embodiments, the artificial nucleic acid molecule, preferably RNA, according to the invention may encode in its at least one encoding region at least one IRSTₑₚₘ-derived additional amino acid sequence comprising or consisting of an amino acid sequence according to any one of SEQ ID NOs: 157-179, or a (preferably functional) fragment, variant or derivative of any one of said sequences, preferably comprising or consisting of an amino acid sequence having, in increasing order of preference, at least 5%, 10%, 20%, 30%, 40%, 50%, 60%, 70%, 80%, 85%, 86%, 87%, 88%, 89%, 90%, 91%, 92%, 93%, 94%, 95%, 96%, 97%, 98%, or 99%, preferably of at least 70%, more preferably of at least 80%, even more preferably at least 85%, even more preferably of at least 90% and most preferably of at least 95% or even 97%, sequence identity to any of these sequences.

[0070] Accordingly, the coding region of the artificial nucleic acid molecule, preferably RNA, according to the invention may preferably comprise a nucleic acid sequence according to any one of SEQ ID NOs: 365-387, or a (preferably functional) fragment, variant or derivative of any one of said sequences, preferably comprising or consisting of a nucleic acid sequence having, in increasing order of preference, at least 5%, 10%, 20%, 30%, 40%, 50%, 60%, 70%, 80%, 85%, 86%, 87%, 88%, 89%, 90%, 91%, 92%, 93%, 94%, 95%, 96%, 97%, 98%, or 99%, preferably of at least 70%, more preferably of at least 80%, even more preferably at least 85%, even more preferably of at least 90% and most preferably of at least 95% or even 97%, sequence identity to any of these sequences.

[0071] The term “(nucleic acid sequence/polynucleotide/gene) variant” refers to nucleic acid sequence variants, i.e. nucleic acid sequences or genes comprising a nucleic acid sequence that differs in at least one nucleic acid from a reference (or “parent”) nucleic acid sequence of a reference (or “parent”) nucleic acid or gene. Variant nucleic acids or genes may thus preferably comprise, in their nucleic acid sequence, at least one mutation, substitution, insertion or deletion as compared to their respective reference sequence. Preferably, the term “variant” as used herein includes naturally occurring variants, and engineered variants of nucleic acid sequences or genes. Therefore, a “variant” as defined herein can be derived from, isolated from, related to, based on or homologous to the reference nucleic acid sequence. “Variants” may preferably have a sequence identity of at least 5%, 10%, 20%, 30%, 40%, 50%, 60%, 70%, 80%, 85%, 86%, 87%, 88%, 89%, 90%, 91%, 92%, 93%, 94%, 95%, 96%, 97%, 98%, or 99%, preferably of at least 70%, more preferably of at least 80%, even more preferably at least 85%, even more preferably of at least 90% and most preferably of at least 95% or even 97%, to a nucleic acid sequence of the respective naturally occurring (wild-type) nucleic acid sequence or gene, or a homolog, fragment or derivative thereof.

[0072] The term “(nucleic acid sequence/polynucleotide/gene) fragment” refers to a continuous subsequence of the full-length reference (or “parent”) nucleic acid sequence or gene. In other words, a “fragment” may typically be a shorter portion of a full-length nucleic acid sequence or gene. Accordingly, a fragment, typically, consists of a sequence that is identical to the corresponding stretch within the full-length nucleic acid sequence or gene. The term includes naturally occurring fragments as well as engineered fragments. A preferred fragment of a sequence in the context of the present invention, consists of a continuous stretch of nucleic acids corresponding to a continuous stretch of entities in the nucleic acid or gene the fragment is derived from, which represents at least 20%, preferably at least 30%, more preferably at least 40%, more preferably at least 50%, even more preferably at least 60%, even more preferably at least 70%, and most preferably at least 80% of the total (i.e. full-length) nucleic acid sequence or gene from which the fragment is derived. A sequence identity indicated with respect to such a fragment preferably refers to the entire nucleic acid sequence or gene. Preferably, a “fragment” may comprise a nucleic acid sequence having a sequence identity of at least 5%, 10%, 20%, 30%, 40%, 50%, 60%, 70%, 80%, 85%, 86%, 87%, 88%, 89%, 90%, 91%, 92%, 93%, 94%, 95%, 96%, 97%, 98%, or 99%, preferably of at least 70%, more preferably of at least 80%, even more preferably at least 85%, even more preferably of at least 90% and most preferably of at least 95% or even 97%, to a reference nucleic acid sequence or gene that it is derived from.

[0073] The term “(nucleic acid sequence/polynucleotide/gene) derivative”, is generally to be understood as a nucleic acid sequence/polynucleotide/gene that has been modified with respect to a reference (or “parent”) nucleic acid sequence/polynucleotide/gene to include a new or additional property or functionality. Derivatives may be modified to comprise desired biological functionalities (e.g. resistance to enzymatic degradation, translation efficacy), manufacturing properties, or pharmacokinetic/pharmacodynamics properties for medical use (e.g. by introducing moieties which confer increased stability, bioavailability, absorption; distribution and/or reduced clearance). Derivatives may be prepared by introducing or removing a nucleic acid sequence or additional moiety that confers a biological property or functionality of interest. Such nucleic acid sequences or additional moieties may be introduced using standard genetic engineering techniques (cf. Sambrook J et al., 2012 (4th ed.), Molecular cloning: a laboratory manual. Cold Spring Harbor Laboratory, Cold Spring Harbor, New York). A “derivative” may be derived from (and thus optionally include) the naturally occurring (wild-type) nucleic acid sequence/polynucleotide/gene, or a variant or fragment thereof. It will be understood that “(nucleic acid sequence/polynucleotide/gene) derivatives” may differ (e.g. by way of introduction or removal of (poly-)nucleotides) in their nucleotide sequence from the reference nucleic acid sequence/polynucleotide/gene that they are derived from, and thus may qualify as “variants” as well. However, whereas “(nucleic acid sequence/polynucleotide/gene) variants” are primarily defined in terms of their % sequence identity to a reference nucleotide sequence, “derivatives” are preferably characterized by the presence or absence of a specific biological property or functionality as compared to the reference nucleic acid sequence/polynucleotide/gene. Nevertheless, “(nucleic acid sequence/polynucleotide/gene) derivatives” may preferably comprise or consist of an amino acid sequence having a sequence identity of at least 5%, 10%, 20%, 30%, 40%, 50%, 60%, 70%, 80%, 85%, 86%, 87%, 88%, 89%, 90%, 91%, 92%, 93%, 94%, 95%, 96%, 97%, 98%, or 99%, preferably of at least 70%, more preferably of at least 80%, even more preferably at least 85%, even more preferably of at least 90% and most preferably of at least 95% or even 97%, with the nucleic acid sequence of a reference nucleic acid sequence/polynucleotide/gene, or a variant or fragment thereof.

[0074] In the context of the present invention, “(nucleic acid sequence/polynucleotide) derivatives” may particularly include nucleic acid sequence/polynucleotide sequences which have been modified or stabilized as compared to the “parent” or “reference” nucleic acid sequences that they are derived from. It will however be understood that such modified/stabilized nucleic acid sequences/polynucleotides may be defined as “variants” as well.

[0075] A “functional” fragment, variant or derivative of said nucleic acid sequences preferably encodes (and thus allows expression of) an IRSTₑₚₘ-derived additional amino acid sequence as defined herein.

[0076] According to preferred embodiments, the coding region of the artificial nucleic acid molecule, preferably RNA, according to the invention may preferably comprise a nucleic acid sequence according to any one of SEQ ID NOs: 365-387, 573-595, 781-803, 989-1011, 1197-1219, 1613-1635, 1821-1843, 2029-2051, 2237-2259, 2445-2467, 2653-2675, 2861-2883 or a (preferably functional) fragment, variant or derivative of any one of said sequences, preferably comprising or consisting of a nucleic acid sequence having, in increasing order of preference, at least 5%, 10%, 20%, 30%, 40%, 50%, 60%, 70%, 80%, 85%, 86%, 87%, 88%, 89%, 90%, 91%, 92%, 93%, 94%, 95%, 96%, 97%, 98%, or 99%, preferably of at least 70%, more preferably of at least 80%, even more preferably at least 85%, even more preferably of at least 90% and most preferably of at least 95% or even 97%, sequence identity to any of these sequences.

[0077] It will be understood that the artificial nucleic acid molecule, preferably RNA, according to the invention may encode at least one, or a plurality of at least two (identical or different) IRSTₑₚₘ-derived amino acid sequences (cf. “Monocistronic, bi- and multicistronic RNAs”).

[0078] In general, “identical” sequences (or molecules characterized by said sequences, such as (poly-)peptides or nucleic acid molecules) share 100% sequence identity, whereas “different” sequences (or molecules characterized by said sequences, such as (poly-)peptides or nucleic acid molecules) share a sequence identity of less than 100%, such as 99% or less, 90% or less, 80% or less, 70% or less, 60% or less, 50% or less, 40% or less, 30% or less, 20% or less, 10% or less, 5% or less, or 2% or less.

[0079] A particularly preferred IRSTₑₚₘ protein may be CTLA4. The additional amino acid sequence(s) encoded by the at least one coding region of the inventive artificial nucleic acid molecule, preferably RNA, of the invention may be derived from CTLA4.

[0080] Accordingly, in preferred embodiments, the artificial nucleic acid molecule, preferably RNA, of the invention may encode in its at least one coding region a CTLA4-derived additional amino acid sequence comprising or consisting of an amino acid sequence according to SEQ ID NO: 169, or a (preferably functional) fragment, variant or derivative thereof, preferably comprising or consisting of an amino acid sequence having, in increasing order of preference, at least 5%, 10%, 20%, 30%, 40%, 50%, 60%, 70%, 80%, 85%, 86%, 87%, 88%, 89%, 90%, 91%, 92%, 93%, 94%, 95%, 96%, 97%, 98%, or 99%, preferably of at least 70%, more preferably of at least 80%, even more preferably at least 85%, even more preferably of at least 90% and most preferably of at least 95% or even 97%, sequence identity to SEQ ID NO: 169.

[0081] Preferably, the artificial nucleic acid molecule, preferably RNA, of the invention may thus comprise in its at least one coding region a nucleic acid sequence comprising or consisting of a nucleic acid sequence according to any one of SEQ ID Nos: 377, 585, 793, 1001, 1209, 1417, 1625, 1833, 2041, 2249, 2457, 2665 or 2873, or a (preferably functional) fragment, variant or derivative of any one of said sequences, preferably comprising or consisting of a nucleic acid sequence having, in increasing order of preference, at least 5%, 10%, 20%, 30%, 40%, 50%, 60%, 70%, 80%, 85%, 86%, 87%, 88%, 89%, 90%, 91%, 92%, 93%, 94%, 95%, 96%, 97%, 98%, or 99%, preferably of at least 70%, more preferably of at least 80%, even more preferably at least 85%, even more preferably of at least 90% and most preferably of at least 95% or even 97%, sequence identity to any one of said sequences.

### Transmembrane Domain (TMD)

[0082] According to preferred embodiments, the at least one IRSTₑₚₘ-derived additional amino acid sequence encoded in the at least one coding region of the artificial nucleic acid molecule, preferably RNA, according to the invention, may comprise or consist of an IRSTₑₚₘ-derived transmembrane domain. Accordingly, in the artificial nucleic acid molecule, preferably RNA, of the invention, said at least one additional IRSTₑₚₘ-derived amino acid sequence may preferably comprise or consist of b. at least one transmembrane domain.

[0083] “Transmembrane domains” are membrane-spanning, typically short (less than 50 amino acid) helical or beta-stranded domain protein domains. Transmembrane domains may be determined by experimentally, e.g. by X-ray diffraction, or may be predicted based on sequence similarities or using known prediction tools, such as MHMM, Memsat, Phobius and the hydrophobic moment plot method. Without wishing to be bound by specific theory, it is envisaged that “fast-recycling” IRSTₑₚₘ-derived transmembrane domains are advantageously capable of anchoring fused antigenic peptides or proteins to the plasma membrane, where they are recycled and guided to the cellular compartments of MHC I and in particular MHC II processing.

[0084] According to preferred embodiments of the invention, the artificial nucleic acid molecule, preferably RNA, of the invention, encodes in its at least one coding region at least one transmembrane domain as indicated in Table 2 below, or a (preferably functional) fragment, variant or derivative of any of said transmembrane domains.

TABLE 2
IRSTₑₚₘ-derived transmembrane domains

| | | | | TM | SEQ ID | SEQ ID | |
|---|---|---|---|---|---|---|---|
| | | | | domain | NO: | NO: wt | |
| | | | | amino | wt amino | nucleic | SEQ ID NO: |
| | UniProt | Short | | acid | acid | acid | optimized nucleic |
| # | Identifier | name | Protein names | position | sequence | sequence | acid sequence |
| 24 | P16671 | CD36 | Platelet glycoprotein 4 | 8-29 | SEQ ID NO: | 388 | 596, 804, 1012, |
| | | | (Fatty acid translocase) | | 180 | | 1220, 1428, 1636, |
| | | | (FAT) (Glycoprotein IIIb) | | | | 1844, 2052, 2260, |
| | | | (GPIIIB) (Leukocyte | | | | 2468, 2676, 2884 |
| | | | differentiation antigen | | | | |
| | | | CD36) (PAS IV) (PAS-4) | | | | |
| | | | (Platelet collagen | | | | |
| | | | receptor) (Platelet | | | | |
| | | | glycoprotein IV) (GPIV) | | | | |
| | | | (Thrombospondin | | | | |
| | | | receptor) (CD antigen | | | | |
| | | | CD36) | | | | |
| 25 | P16671 | CD36 | See #24 | 440-461 | SEQ ID NO: | 390 | 598, 806, 1014, |
| | | | | | 182 | | 1222, 1430, 1638, |
| | | | | | | | 1846, 2054, 2262, |
| | | | | | | | 2470, 2678, 2886 |
| 26 | P32248 | CCR7 | C—C chemokine receptor | 60-86 | SEQ ID NO: | 389 | 597, 805, 1013, |
| | | | type 7 (C—C CKR-7) (CC- | | 181 | | 1221, 1429, 1637, |
| | | | CKR-7) (CCR-7) (BLR2) | | | | 1845, 2053, 2261, |
| | | | (CDw197) (Epstein-Barr | | | | 2469, 2677, 2885 |
| | | | virus-induced G-protein | | | | |
| | | | coupled receptor 1) | | | | |
| | | | (EBI1) (EBV-induced G- | | | | |
| | | | protein coupled receptor | | | | |
| | | | 1) (MIP-3 beta receptor) | | | | |
| | | | (CD antigen CD197) | | | | |
| 27 | P32248 | CCR7 | See #26 | 96-116 | SEQ ID NO: | 391 | 599, 807, 1015, |
| | | | | | 183 | | 1223, 1431, 1639, |
| | | | | | | | 1847, 2055, 2263, |
| | | | | | | | 2471, 2679, 2887 |
| 28 | P32248 | CCR7 | See #26 | 131-152 | SEQ ID NO: | 392 | 600, 808, 1016, |
| | | | | | 184 | | 1224, 1432, 1640, |
| | | | | | | | 1848, 2056, 2264, |
| | | | | | | | 2472, 2680, 2888 |
| 29 | P32248 | CCR7 | See #26 | 171-191 | SEQ ID NO: | 393 | 601, 809, 1017, |
| | | | | | 185 | | 1225, 1433, 1641, |
| | | | | | | | 1849, 2057, 2265, |
| | | | | | | | 2473, 2681, 2889 |
| 30 | P32248 | CCR7 | See #26 | 220-247 | SEQ ID NO: | 394 | 602, 810, 1018, |
| | | | | | 186 | | 1226, 1434, 1642, |
| | | | | | | | 1850, 2058, 2266, |
| | | | | | | | 2474, 2682, 2890 |
| 31 | P32248 | CCR7 | See #26 | 264-289 | SEQ ID NO: | 395 | 603, 811, 1019, |
| | | | | | 187 | | 1227, 1435, 1643, |
| | | | | | | | 1851, 2059, 2267, |
| | | | | | | | 2475, 2683, 2891 |
| 32 | P32248 | CCR7 | See #26 | 314-331 | SEQ ID NO: | 396 | 604, 812, 1020, |
| | | | | | 188 | | 1228, 1436, 1644, |
| | | | | | | | 1852, 2060, 2268, |
| | | | | | | | 2476, 2684, 2892 |
| 33 | A0A5B9 | TRBC2 | T-cell receptor beta-2 | 146-168 | SEQ ID NO: | 397 | 605, 813, 1021, |
| | | | chain C region | | 189 | | 1229, 1437, 1645, |
| | | | | | | | 1853, 2061, 2269, |
| | | | | | | | 2477, 2685, 2893 |
| 34 | B7Z8K6 | TRDC | T-cell receptor delta chain | 131-153 | SEQ ID NO: | 398 | 606, 814, 1022, |
| | | | C region | | 190 | | 1230, 1438, 1646, |
| | | | | | | | 1854, 2062, 2270, |
| | | | | | | | 2478, 2686, 2894 |
| 35 | O00206 | TLR4 | Toll-like receptor 4 (hToll) | 632-652 | SEQ ID NO: | 399 | 607, 815, 1023, |
| | | | (CD antigen CD284) | | 191 | | 1231, 1439, 1647, |
| | | | | | | | 1855, 2063, 2271, |
| | | | | | | | 2479, 2687, 2895 |
| 36 | P01730 | CD4 | T-cell surface | 397-418 | SEQ ID NO: | 400 | 608, 816, 1024, |
| | | | glycoprotein CD4 (T-cell | | 192 | | 1232, 1440, 1648, |
| | | | surface antigen T4/Leu-3) | | | | 1856, 2064, 2272, |
| | | | (CD antigen CD4) | | | | 2480, 2688, 2896 |
| 37 | P01850 | TRBC1 | T-cell receptor beta-1 | 152-172 | SEQ ID NO: | 401 | 609, 817, 1025, |
| | | | chain C region | | 193 | | 1233, 1441, 1649, |
| | | | | | | | 1857, 2065, 2273, |
| | | | | | | | 2481, 2689, 2897 |
| 38 | P07766 | CD3E | T-cell surface | 127-152 | SEQ ID NO: | 402 | 610, 818, 1026, |
| | | | glycoprotein CD3 epsilon | | 194 | | 1234, 1442, 1650, |
| | | | chain (T-cell surface | | | | 1858, 2066, 2274, |
| | | | antigen T3/Leu-4 epsilon | | | | 2482, 2690, 2898 |
| | | | chain) (CD antigen CD3e) | | | | |
| 39 | P08575 | PTPRC | Receptor-type tyrosine- | 576-597 | SEQ ID NO: | 403 | 611, 819, 1027, |
| | | | protein phosphatase C | | 195 | | 1235, 1443, 1651, |
| | | | (EC 3.1.3.48) (Leukocyte | | | | 1859, 2067, 2275, |
| | | | common antigen) (L-CA) | | | | 2483, 2691, 2899 |
| | | | (T200) (CD antigen | | | | |
| | | | CD45) | | | | |
| 40 | P08637 | FCG3A | Low affinity | 209-229 | SEQ ID NO: | 404 | 612, 820, 1028, |
| | | | immunoglobulin gamma | | 196 | | 1236, 1444, 1652, |
| | | | Fc region receptor III-A | | | | 1860, 2068, 2276, |
| | | | (CD16a antigen) (Fc- | | | | 2484, 2692, 2900 |
| | | | gamma RIII-alpha) (Fc- | | | | |
| | | | gamma RIII) (Fc-gamma | | | | |
| | | | Rllla) (FcRIII) (FcRIIIa) | | | | |
| | | | (FcR-10) (IgG Fc receptor | | | | |
| | | | III-2) (CD antigen CD16a) | | | | |
| 41 | P10747 | CD28 | T-cell-specific surface | 153-179 | SEQ ID NO: | 405 | 613, 821, 1029, |
| | | | glycoprotein CD28 | | 197 | | 1237, 1445, 1653, |
| | | | (TP44) (CD antigen | | | | 1861, 2069, 2277, |
| | | | CD28) | | | | 2485, 2693, 2901 |
| 42 | P11912 | CD79A | B-cell antigen receptor | 144-165 | SEQ ID NO: | 406 | 614, 822, 1030, |
| | | | complex-associated | | 198 | | 1238, 1446, 1654, |
| | | | protein alpha chain (Ig- | | | | 1862, 2070, 2278, |
| | | | alpha) (MB-1 membrane | | | | 2486, 2694, 2902 |
| | | | glycoprotein) (Membrane- | | | | |
| | | | bound immunoglobulin- | | | | |
| | | | associated protein) | | | | |
| | | | (Surface IgM-associated | | | | |
| | | | protein) (CD antigen | | | | |
| | | | CD79a) | | | | |
| 43 | P15391 | CD19 | B-lymphocyte antigen | 292-313 | SEQ ID NO: | 407 | 615, 823, 1031, |
| | | | CD19 (B-lymphocyte | | 199 | | 1239, 1447, 1655, |
| | | | surface antigen B4) | | | | 1863, 2071, 2279, |
| | | | (Differentiation antigen | | | | 2487, 2695, 2903 |
| | | | CD19) (T-cell surface | | | | |
| | | | antigen Leu-12) (CD | | | | |
| | | | antigen CD19) | | | | |
| 44 | P16410 | CTLA4 | Cytotoxic T-lymphocyte | 162-182 | SEQ ID NO: | 408 | 616, 824, 1032, |
| | | | protein 4 (Cytotoxic T- | | 200 | | 1240, 1448, 1656, |
| | | | lymphocyte-associated | | | | 1864, 2072, 2280, |
| | | | antigen 4) (CTLA-4) (CD | | | | 2488, 2696, 2904 |
| | | | antigen CD152) | | | | |
| 45 | P26718 | NKG2D | NKG2-D type II integral | 52-72 | SEQ ID NO: | 409 | 617, 825, 1033, |
| | | | membrane protein (Killer | | 201 | | 1241, 1449, 1657, |
| | | | cell lectin-like receptor | | | | 1865, 2073, 2281, |
| | | | subfamily K member 1) | | | | 2489, 2697, 2905 |
| | | | (NK cell receptor D) | | | | |
| | | | (NKG2-D-activating NK | | | | |
| | | | receptor) (CD antigen | | | | |
| | | | CD314) | | | | |
| 46 | P30273 | FCERG | High affinity | 24-44 | SEQ ID NO: | 410 | 618, 826, 1034, |
| | | | immunoglobulin epsilon | | 202 | | 1242, 1450, 1658, |
| | | | receptor subunit gamma | | | | 1866, 2074, 2282, |
| | | | (Fc receptor gamma- | | | | 2490, 2698, 2906 |
| | | | chain) (FcRgamma) (Fc- | | | | |
| | | | epsilon RI-gamma) (IgE | | | | |
| | | | Fc receptor subunit | | | | |
| | | | gamma) (FceRI gamma) | | | | |
| 47 | P40259 | CD79B | B-cell antigen receptor | 160-180 | SEQ ID NO: | 411 | 619, 827, 1035, |
| | | | complex-associated | | 203 | | 1243, 1451, 1659, |
| | | | protein beta chain (B-cell- | | | | 1867, 2075, 2283, |
| | | | specific glycoprotein B29) | | | | 2491, 2699, 2907 |
| | | | (Ig-beta) | | | | |
| | | | (Immunoglobulin- | | | | |
| | | | associated B29 protein) | | | | |
| | | | (CD antigen CD79b) | | | | |
| 48 | P42081 | CD86 | T-lymphocyte activation | 248-268 | SEQ ID NO: | 412 | 620, 828, 1036, |
| | | | antigen CD86 (Activation | | 204 | | 1244, 1452, 1660, |
| | | | B7-2 antigen) (B70) | | | | 1868, 2076, 2284, |
| | | | (BU63) (CTLA-4 counter- | | | | 2492, 2700, 2908 |
| | | | receptor B7.2) (FUN-1) | | | | |
| | | | (CD antigen CD86) | | | | |
| 49 | Q15762 | CD226 | CD226 antigen (DNAX | 255-275 | SEQ ID NO: | 413 | 621, 829, 1037, |
| | | | accessory molecule 1) | | 205 | | 1245, 1453, 1661, |
| | | | (DNAM-1) (CD antigen | | | | 1869, 2077, 2285, |
| | | | CD226) | | | | 2493, 2701, 2909 |
| 50 | Q685J3 | MUC17 | Mucin-17 (MUC-17) | 4394-4414 | SEQ ID NO: | 414 | 622, 830, 1038, |
| | | | (Small intestinal mucin-3) | | 206 | | 1246, 1454, 1662, |
| | | | (MUC-3) | | | | 1870, 2078, 2286, |
| | | | | | | | 2494, 2702, 2910 |
| 51 | Q9NNX6 | CD209 | CD209 antigen (C-type | 38-58 | SEQ ID NO: | 415 | 623, 831, 1039, |
| | | | lectin domain family 4 | | 207 | | 1247, 1455, 1663, |
| | | | member L) (Dendritic cell- | | | | 1871, 2079, 2287, |
| | | | specific ICAM-3-grabbing | | | | 2495, 2703, 2911 |
| | | | non-integrin 1) (DC- | | | | |
| | | | SIGN) (DC-SIGN1) (CD | | | | |
| | | | antigen CD209) | | | | |
| 52 | Q9NR97 | TLR8 | Toll-like receptor 8 (CD | 828-848 | SEQ ID NO: | 416 | 624, 832, 1040, |
| | | | antigen CD288) | | 208 | | 1248, 1456, 1664, |
| | | | | | | | 1872, 2080, 2288, |
| | | | | | | | 2496, 2704, 2912 |

[0085] According to preferred embodiments, the artificial nucleic acid molecule according to the invention may encode in its at least one encoding region at least one IRSTₑₚₘ-derived transmembrane domain comprising or consisting of an amino acid sequence according to any one of SEQ ID NOs: 180-208, or a (preferably functional) fragment, variant or derivative of any one of said sequences, preferably comprising or consisting of an amino acid sequence having, in increasing order of preference, at least 5%, 10%, 20%, 30%, 40%, 50%, 60%, 70%, 80%, 85%, 86%, 87%, 88%, 89%, 90%, 91%, 92%, 93%, 94%, 95%, 96%, 97%, 98%, or 99%, preferably of at least 70%, more preferably of at least 80%, even more preferably at least 85%, even more preferably of at least 90% and most preferably of at least 95% or even 97%, sequence identity to any of these sequences.

[0086] Accordingly, the artificial nucleic acid molecule, preferably RNA, of the invention may preferably comprise in its at least one coding region a nucleic acid sequence according to any one of SEQ ID NOs: 388-416, 596-624, 804-832, 1012-1040, 1220-1248, 1428-1456, 1636-1664, 1844-1872, 2052-2080, 2260-2288, 2468-2496, 2676-2704, 2884-2912, or a (preferably functional) fragment, variant or derivative of any one of said sequences, preferably comprising or consisting of a nucleic acid sequence having, in increasing order of preference, at least 5%, 10%, 20%, 30%, 40%, 50%, 60%, 70%, 80%, 85%, 86%, 87%, 88%, 89%, 90%, 91%, 92%, 93%, 94%, 95%, 96%, 97%, 98%, or 99%, preferably of at least 70%, more preferably of at least 80%, even more preferably at least 85%, even more preferably of at least 90% and most preferably of at least 95% or even 97%, sequence identity to any of these sequences.

[0087] More preferably, the artificial nucleic acid molecule, preferably RNA, of the invention may encode in its at least one coding region a CTLA4-derived transmembrane domain comprising or consisting of an amino acid sequence according to SEQ ID NO: 200, or a (preferably functional) fragment, variant or derivative thereof, preferably comprising or consisting of an amino acid sequence having, in increasing order of preference, at least 5%, 10%, 20%, 30%, 40%, 50%, 60%, 70%, 80%, 85%, 86%, 87%, 88%, 89%, 90%, 91%, 92%, 93%, 94%, 95%, 96%, 97%, 98%, or 99%, preferably of at least 70%, more preferably of at least 80%, even more preferably at least 85%, even more preferably of at least 90% and most preferably of at least 95% or even 97%, sequence identity to SEQ ID NO: 200.

[0088] Preferably, the artificial nucleic acid molecule, preferably RNA, of the invention may thus comprise in its at least one coding region a nucleic acid sequence comprising or consisting of a nucleic acid sequence according to any one of SEQ ID NOs: 408, 616, 824, 1032, 1240, 1448, 1656, 1864, 2072, 2280, 2488, 2696 or 2904, or a (preferably functional) fragment, variant or derivative of any one of said sequences, preferably comprising or consisting of a nucleic acid sequence having, in increasing order of preference, at least 5%, 10%, 20%, 30%, 40%, 50%, 60%, 70%, 80%, 85%, 86%, 87%, 88%, 89%, 90%, 91%, 92%, 93%, 94%, 95%, 96%, 97%, 98%, or 99%, preferably of at least 70%, more preferably of at least 80%, even more preferably at least 85%, even more preferably of at least 90% and most preferably of at least 95% or even 97%, sequence identity to any one of said sequences.

### Cytoplasmic Domain (CD)

[0089] According to preferred embodiments, the at least one IRSTₑₚₘ-derived additional amino acid sequence encoded in the at least one coding region of the artificial nucleic acid molecule, preferably RNA, according to the invention, may optionally (further) comprise or consist of an IRSTₑₚₘ-derived cytoplasmic domain. Accordingly, in the artificial nucleic acid molecule, preferably RNA, of the invention, said at least one additional IRSTₑₚₘ-derived amino acid sequence may preferably (further) comprise or consist of c. at least one cytoplasmic domain.

[0090] “Cytoplasmic domains” are intracellular domains that typically interact with the interior of the cell. Without wishing to be bound by specific theory, it is envisaged that IRSTₑₚₘ-derived cytoplasmic domains may confer further advantageous targeting characteristics to the encoded antigenic peptides or proteins to MHC I and in particular MHC II processing compartments.

[0091] Preferably, the IRSTₑₚₘ-derived cytoplasmic domain may be present in addition to the IRSTₑₚₘ-derived transmembrane domain. The cytoplasmic domain and the transmembrane domain may be derived from identical or different IRSTₑₚₘ proteins. According to some preferred embodiments, the cytoplasmic domain and transmembrane domain are present in one continuous additional IRSTₑₚₘ-derived amino acid sequence.

### Transmembrane Domain+Cytoplasmic Domain (CD)

[0092] According to preferred embodiments, the at least one IRSTₑₚₘ-derived additional amino acid sequence encoded in the at least one coding region of the artificial nucleic acid molecule, preferably RNA, according to the invention, may comprise or consist of an IRSTₑₚₘ-derived transmembrane domain and an IRSTₑₚₘ-derived cytoplasmic domain. Accordingly, in the artificial nucleic acid molecule, preferably RNA, of the invention, said at least one additional IRSTₑₚₘ-derived amino acid sequence may preferably comprise or consist of b. at least one transmembrane domain and c. at least one cytoplasmic domain.

TABLE 3
IRSTₑₚₘ-derived proteins comprising a transmembrane domain and a cytoplasmatic domain

| | | | TM + | | | | |
|---|---|---|---|---|---|---|---|
| | | | Cys | | | | |
| | | | domain | | | | |
| | | | amino | | | SEQ ID | SEQ ID NO: |
| | UniProt | Short | acid | SEQ ID | | NO: wt | optimized |
| # | Identifier | name | position | NO: (AA) | Gene names | nucleic acid | nucleic acid |
| 53 | P16671 | CD36 | 440-472 | SEQ ID | CD36 GP3B | 76668 | 76691, 76714, |
| | | | | NO: | GP4 | | 76737, 76760, |
| | | | | 76645 | | | 76783, 76806, |
| | | | | | | | 76829, 76852, |
| | | | | | | | 76875, 76898, |
| | | | | | | | 76921, 76944 |
| 54 | P32248 | CCR7 | 153-191 | SEQ ID | CCR7 CMKBR7 | 76669 | 76692, 76715, |
| | | | | NO: | EBI1 EVI1 | | 76738, 76761, |
| | | | | 76646 | | | 76784, 76807, |
| | | | | | | | 76830, 76853, |
| | | | | | | | 76876, 76899, |
| | | | | | | | 76922, 76945 |
| 55 | P32248 | CCR7 | 248-289 | SEQ ID | CCR7 CMKBR7 | 76670 | 76693, 76716, |
| | | | | NO: | EBI1 EVI1 | | 76739, 76762, |
| | | | | 76647 | | | 76785, 76808, |
| | | | | | | | 76831, 76854, |
| | | | | | | | 76877, 76900, |
| | | | | | | | 76923, 76946 |
| 56 | A0A5B9 | TRBC2 | 145-178 | SEQ ID | TRBC2 TCRBC2 | 76648 | 76671, 76694, |
| | | | | NO: | | | 76717, 76740, |
| | | | | 76625 | | | 76763, 76786, |
| | | | | | | | 76809, 76832, |
| | | | | | | | 76855, 76878, |
| | | | | | | | 76901, 76924 |
| 57 | B7Z8K6 | TRDC | 131-154 | SEQ ID | TRDC | 76649 | 76672, 76695, |
| | | | | NO: | | | 76718, 76741, |
| | | | | 76626 | | | 76764, 76787, |
| | | | | | | | 76810, 76833, |
| | | | | | | | 76856, 76879, |
| | | | | | | | 76902, 76925 |
| 58 | O00206 | TLR4 | 632-839 | SEQ ID | TLR4 | 76650 | 76673, 76696, |
| | | | | NO: | | | 76719, 76742, |
| | | | | 76627 | | | 76765, 76788, |
| | | | | | | | 76811, 76834, |
| | | | | | | | 76857, 76880, |
| | | | | | | | 76903, 76926 |
| 59 | P01730 | CD4 | 397-458 | SEQ ID | CD4 | 76651 | 76674, 76697, |
| | | | | NO: | | | 76720, 76743, |
| | | | | 76628 | | | 76766, 76789, |
| | | | | | | | 76812, 76835, |
| | | | | | | | 76858, 76881, |
| | | | | | | | 76904, 76927 |
| 60 | P01850 | TRBC1 | 152-178 | SEQ ID | TRBC1 | 76652 | 76675, 76698, |
| | | | | NO: | | | 76721, 76744, |
| | | | | 76629 | | | 76767, 76790, |
| | | | | | | | 76813, 76836, |
| | | | | | | | 76859, 76882, |
| | | | | | | | 76905, 76928 |
| 61 | P07766 | CD3E | 27-207 | SEQ ID | CD3E T3E | 76653 | 76676, 76699, |
| | | | | NO: | | | 76722, 76745, |
| | | | | 76630 | | | 76768, 76791, |
| | | | | | | | 76814, 76837, |
| | | | | | | | 76860, 76883, |
| | | | | | | | 76906, 76929 |
| 62 | P08575 | PTPRC | 576-1304 | SEQ ID | PTPRC CD45 | 76654 | 76677, 76700, |
| | | | | NO: | | | 76723, 76746, |
| | | | | 76631 | | | 76769, 76792, |
| | | | | | | | 76815, 76838, |
| | | | | | | | 76861, 76884, |
| | | | | | | | 76907, 76930 |
| 63 | P08637 | FCG3A | 209-254 | SEQ ID | FCGR3A CD16A | 76655 | 76678, 76701, |
| | | | | NO: | FCG3 FCGR3 | | 76724, 76747, |
| | | | | 76632 | IGFR3 | | 76770, 76793, |
| | | | | | | | 76816, 76839, |
| | | | | | | | 76862, 76885, |
| | | | | | | | 76908, 76931 |
| 64 | P10747 | CD28 | 153-179 | SEQ ID | CD28 | 76656 | 76679, 76702, |
| | | | | NO: | | | 76725, 76748, |
| | | | | 76633 | | | 76771, 76794, |
| | | | | | | | 76817, 76840, |
| | | | | | | | 76863, 76886, |
| | | | | | | | 76909, 76932 |
| 65 | P11912 | CD79A | 144-226 | SEQ ID | CD79A IGA MB1 | 76657 | 76680, 76703, |
| | | | | NO: | | | 76726, 76749, |
| | | | | 76634 | | | 76772, 76795, |
| | | | | | | | 76818, 76841, |
| | | | | | | | 76864, 76887, |
| | | | | | | | 76910, 76933 |
| 66 | P15391 | CD19 | 292-556 | SEQ ID | CD19 | 76658 | 76681, 76704, |
| | | | | NO: | | | 76727, 76750, |
| | | | | 76635 | | | 76773, 76796, |
| | | | | | | | 76819, 76842, |
| | | | | | | | 76865, 76888, |
| | | | | | | | 76911, 76934 |
| 67 | P16410 | CTLA4 | 162-223 | SEQ ID | CTLA4 CD152 | 76659 | 76682, 76705, |
| | | | | NO: | | | 76728, 76751, |
| | | | | 76636 | | | 76774, 76797, |
| | | | | | | | 76820, 76843, |
| | | | | | | | 76866, 76889, |
| | | | | | | | 76912, 76935, |
| | | | | | | | 76947, 77004- |
| | | | | | | | 77017, 77066 |
| 68 | P26718 | NKG2D | 1-72 | SEQ ID | KLRK1 | 76660 | 76683, 76706, |
| | | | | NO: | D12S2489E | | 76729, 76752, |
| | | | | 76637 | NKG2D | | 76775, 76798, |
| | | | | | | | 76821, 76844, |
| | | | | | | | 76867, 76890, |
| | | | | | | | 76913, 76936 |
| 69 | P30273 | FCERG | 24-86 | SEQ ID | FCER1G | 76661 | 76684, 76707, |
| | | | | NO: | | | 76730, 76753, |
| | | | | 76638 | | | 76776, 76799, |
| | | | | | | | 76822, 76845, |
| | | | | | | | 76868, 76891, |
| | | | | | | | 76914, 76937 |
| 70 | P40259 | CD79B | 160-229 | SEQ ID | CD79B B29 IGB | 76662 | 76685, 76708, |
| | | | | NO: | | | 76731, 76754, |
| | | | | 76639 | | | 76777, 76800, |
| | | | | | | | 76823, 76846, |
| | | | | | | | 76869, 76892, |
| | | | | | | | 76915, 76938 |
| 71 | P42081 | CD86 | 248-329 | SEQ ID | CD86 CD28LG2 | 76663 | 76686, 76709, |
| | | | | NO: | | | 76732, 76755, |
| | | | | 76640 | | | 76778, 76801, |
| | | | | | | | 76824, 76847, |
| | | | | | | | 76870, 76893, |
| | | | | | | | 76916, 76939 |
| 72 | Q15762 | CD226 | 255-336 | SEQ ID | CD226 DNAM1 | 76664 | 76687, 76710, |
| | | | | NO: | | | 76733, 76756, |
| | | | | 76641 | | | 76779, 76802, |
| | | | | | | | 76825, 76848, |
| | | | | | | | 76871, 76894, |
| | | | | | | | 76917, 76940 |
| 73 | Q685J3 | MUC17 | 4393-4493 | SEQ ID | MUC17 MUC3 | 76665 | 76688, 76711, |
| | | | | NO: | | | 76734, 76757, |
| | | | | 76642 | | | 76780, 76803, |
| | | | | | | | 76826, 76849, |
| | | | | | | | 76872, 76895, |
| | | | | | | | 76918, 76941 |
| 74 | Q9NNX6 | CD209 | 1-58 | SEQ ID | CD209 CLEC4L | 76666 | 76689, 76712, |
| | | | | NO: | | | 76735, 76758, |
| | | | | 76643 | | | 76781, 76804, |
| | | | | | | | 76827, 76850, |
| | | | | | | | 76873, 76896, |
| | | | | | | | 76919, 76942 |
| 75 | Q9NR97 | TLR8 | 828-1041 | SEQ ID | TLR8 | 76667 | 76690, 76713, |
| | | | | NO: | UNQ249/PRO286 | | 76736, 76759, |
| | | | | 76644 | | | 76782, 76805, |
| | | | | | | | 76828, 76851, |
| | | | | | | | 76874, 76897, |
| | | | | | | | 76920, 76943 |

[0093] According to preferred embodiments, the artificial nucleic acid molecule according to the invention may encode in its at least one coding region at least one IRSTₑₚₘ-derived transmembrane domain and at least one cytoplasmic domain comprising or consisting of an amino acid sequence according to any one of SEQ ID NOs: 76625-76647, or a (preferably functional) fragment, variant or derivative of any one of said sequences, preferably comprising or consisting of an amino acid sequence having, in increasing order of preference, at least 5%, 10%, 20%, 30%, 40%, 50%, 60%, 70%, 80%, 85%, 86%, 87%, 88%, 89%, 90%, 91%, 92%, 93%, 94%, 95%, 96%, 97%, 98%, or 99%, preferably of at least 70%, more preferably of at least 80%, even more preferably at least 85%, even more preferably of at least 90% and most preferably of at least 95% or even 97%, sequence identity to any of these sequences.

[0094] Accordingly, the artificial nucleic acid molecule, preferably RNA, of the invention may preferably comprise in its at least one coding region a nucleic acid sequence according to any one of SEQ ID NOs: 76648-76670, 76694-76716, 76717-76739, 76671-76693, 77004-770017, 76763-76785, 76786-76808, 76809-76831, 76832-76854, 76855-76877, 76878-76900, 76901-76923, 76924-76946, 76947, 76740-76762, 77066, or a (preferably functional) fragment, variant or derivative of any one of said sequences, preferably comprising or consisting of a nucleic acid sequence having, in increasing order of preference, at least 5%, 10%, 20%, 30%, 40%, 50%, 60%, 70%, 80%, 85%, 86%, 87%, 88%, 89%, 90%, 91%, 92%, 93%, 94%, 95%, 96%, 97%, 98%, or 99%, preferably of at least 70%, more preferably of at least 80%, even more preferably at least 85%, even more preferably of at least 90% and most preferably of at least 95% or even 97%, sequence identity to any of these sequences.

[0095] More preferably, the artificial nucleic acid molecule, preferably RNA, of the invention may encode in its at least one coding region a CTLA4-derived transmembrane domain and cytoplasmic domain comprising or consisting of an amino acid sequence according to SEQ ID NO: 76636, or a (preferably functional) fragment, variant or derivative thereof, preferably comprising or consisting of an amino acid sequence having, in increasing order of preference, at least 5%, 10%, 20%, 30%, 40%, 50%, 60%, 70%, 80%, 85%, 86%, 87%, 88%, 89%, 90%, 91%, 92%, 93%, 94%, 95%, 96%, 97%, 98%, or 99%, preferably of at least 70%, more preferably of at least 80%, even more preferably at least 85%, even more preferably of at least 90% and most preferably of at least 95% or even 97%, sequence identity to SEQ ID NO: 76636.

[0096] Preferably, the artificial nucleic acid molecule, preferably RNA, of the invention may thus comprise in its at least one coding region a nucleic acid sequence comprising or consisting of a nucleic acid sequence according to any one of SEQ ID NOs: 76659, 76705, 76728, 76682, 77004-77017, 76774, 76797, 76820, 76843, 76866, 76912, 76889, 76935, 76947, 76751, 77066 or a (preferably functional) fragment, variant or derivative of any one of said sequences, preferably comprising or consisting of a nucleic acid sequence having, in increasing order of preference, at least 5%, 10%, 20%, 30%, 40%, 50%, 60%, 70%, 80%, 85%, 86%, 87%, 88%, 89%, 90%, 91%, 92%, 93%, 94%, 95%, 96%, 97%, 98%, or 99%, preferably of at least 70%, more preferably of at least 80%, even more preferably at least 85%, even more preferably of at least 90% and most preferably of at least 95% or even 97%, sequence identity to any one of said sequences.

[0097] The nucleic acid sequence of the RNA of the invention may be adapted in a manner to allow differentiation of different RNA species in a composition comprising more than one RNA species. Preferably, the nucleic acid sequence of the RNA is adapted without introducing changes in the amino acid sequence encoded by the respective RNA. Preferably, the nucleic acid sequence of the RNA is adapted in a stretch of 10-200 nucleotides to allow differentiation of different RNA species via PCR based analytical methods. Said adapted sequence stretch(es) may be positioned in an untranslated region (UTR), in the coding sequence of a signal peptide, in the coding sequence of the epitope, in a linker region, in the coding sequence of a helper epitope, in the CTLA4 transmembrane region, in the CTLA4 cytoplasmatic region, in the CTLA4 transmembrane and cytoplasmatic region. Preferably, adapted sequence stretches allowing differentiation of different RNA species in a composition are introduced in the CTLA4 transmembrane and cytoplasmatic region. As a non-limiting example, a composition comprising two different RNA species, wherein the adapted sequence stretches allowing for differentiation is in the CTLA4 transmembrane and cytoplasmatic region (for example SEQ ID NO: 77004 and SEQ ID NO: 77005). As a further non-limiting example, a composition comprising three different RNA species, wherein the adapted sequence stretches allowing for differentiation is in the CTLA4 transmembrane and cytoplasmatic region (for example SEQ ID NO: 77004, SEQ ID NO: 77005 and SEQ ID NO: 77006). As a further non-limiting example, a composition comprising thirteen different RNA species, wherein the adapted sequence stretches allowing for differentiation is in the CTLA4 transmembrane and cytoplasmatic region (for example SEQ ID NO: 77004-SEQ ID NO: 77017).

### Antigenic Peptide or Protein (AN)

[0098] The artificial nuclei acid molecule, preferably RNA, according to the invention encodes, in its at least one coding region, a. at least one antigenic peptide or protein. According to preferred embodiments, the nucleic acid sequence encoding said at least one antigenic peptide or protein may be fused (in frame) to a nucleic acid sequence encoding the at least one IRSTₑₚₘ-derived amino acid sequence. Therefore, expression of the artificial nucleic acid molecule, preferably RNA, of the invention may preferably result in a fusion protein comprising the at least one antigenic protein or peptide joined to (optionally via appropriate linkers) the at least one IRSTₑₚₘ-derived additional amino acid sequence. Said additional amino acid sequence preferably directs the antigenic peptide or protein to MHC class I and more preferably MHC class II processing compartments, resulting in enhanced MHC class I and/or preferably MHC class II presentation. Generally, the present invention envisages the combination of any of the antigenic peptides or proteins described herein with any of the IRSTₑₚₘ-derived additional amino acid sequences, any of the linkers, and any of the signal peptides described herein, in any suitable order, in the antigenic fusion proteins encoded by the artificial nucleic acid molecules, preferably RNAs, of the invention.

[0099] The term “antigenic peptide or protein” generally refers to any peptide or protein capable, under appropriate conditions, of interacting with/being recognized by components of the immune system (such as antibodies or immune cells). The “antigenic peptide or protein” preferably interacts with/is recognized by the components of the immune system via its “epitope(s)” or “antigenic determinant(s)”. Thus, the term “antigenic peptide or protein” refers to a (poly-)peptide comprising, consisting of or being capable of providing at least one (functional) epitope. It is particularly envisaged that the artificial nucleic acid molecules, preferably RNAs, of the invention encode full-length antigenic peptides or proteins, or preferably fragments thereof. Said fragment may comprise or consist of (functional) epitopes of said antigenic peptides or proteins. Preferably, said fragments or epitopes are expressed in the host cell, directed to MHC class I and preferably MHC class II processing compartments, and recognized by components of the immune system.

[0100] The term “components of the immune system” preferably refers to immune cells, immune cell receptors and antibodies of the adaptive immune system. “Antigenic peptides or proteins” are preferably capable of being processed by the intracellular machinery to be presented to immune cells on an MHC molecule, preferably resulting in an antigen-specific immune response (e.g. cell-mediated immunity or formation of antibodies). “Antigenic peptides or proteins” may be the product of translation of an artificial nucleic acid molecule, preferably RNA, of the invention.

[0101] The term “epitope” or “antigenic determinant” refers to a part or fragment of an antigenic peptide or protein that is recognized by the immune system. Said fragment may typically comprise from about 5 to about 20 or even more amino acids. Epitopes may be “conformational” (or “discontinuous”), i.e. composed of discontinuous sequences of the amino acids of the antigenic peptide or protein that they are derived from, but brought together in the three-dimensional structure of e.g. a MHC-complex, or “linear”, i.e. consist of a continuous sequence of amino acids of the antigenic peptides or proteins that they are derived from. The term “epitope” generally encompasses “T cell epitopes” (recognized by T cells via their T cell receptor) and “B cell epitopes” (recognized by B cells via their B cell receptor). “B cell epitopes” are typically located on the outer surface of (native) protein or peptide antigens as defined herein, and may preferably comprise or consist of between 5 to 15 amino acids, more preferably between 5 to 12 amino acids, even more preferably between 6 to 9 amino acids. “T cell epitopes” are typically recognized by T cells in a MHC-I or MHC-II bound form, i.e. as a complex formed by an antigenic protein or peptide fragment comprising the epitope, and a MHC-I or MHC-II surface molecule. “T cell epitopes” may typically have a length of about 6 to about 20 or even more amino acids, T cell epitopes presented by MHC class I molecules may preferably have a length of about 8 to about 10 amino acids, e.g. 8, 9, or 10, (or even 11, or 12 amino acids). T cell epitopes presented by MHC class II molecules may preferably have a length of about 13 or more amino acids, e.g. 13, 14, 15, 16, 17, 18, 19, 20, 21, 22, 23, 24, 25, 26, 27, 28, 29, 30 or even more amino acids. In the context of the present invention, the term “epitope” may in particular refer to T cell epitopes.

[0102] When referring to an artificial nucleic acid molecule, preferably RNA, encoding “at least one antigenic peptide or protein” herein, it is envisaged that said artificial nucleic acid molecule may encode one or more full-length (wild-type/variant/derivative) antigenic peptide(s) or protein(s), or one or more fragment(s), in particular a (functional) epitope(s), of said (wild-type/variant/derivative) antigenic peptide or protein. Said full-length (wild-type/variant/derivative) antigenic peptide(s) or protein(s), or its fragment(s), preferably comprises, consists of or provides at least one (functional) epitope, i.e. said (wild-type/variant/derivative) antigenic peptide(s) or protein(s) or its fragment(s) preferably either comprise(s) or consist(s) of a native epitope (preferably recognized by B cells) or is capable of being processed and presented by an MHC-I or MHC-II molecule to provide a MHC-bound epitope (preferably recognized by T cells). A “functional” epitope refers to an epitope capable of inducing a desired adaptive immune response in a subject.

[0103] The at least one antigenic peptide or protein encoded by the artificial nucleic acid molecule, preferably RNA, of the invention may be N-terminally, C-terminally or intrasequentially fused to or comprised by the at least one IRSTₑₚₘ-derived amino acid sequence, optionally via appropriate peptide linkers (providing an “antigenic fusion protein” as defined herein). Thus, it is inter alia envisaged herein that the artificial nucleic acid molecule, preferably RNA, of the invention encodes an IRSTₑₚₘ-derived amino acid sequence as defined herein, which comprises an antigenic peptide or protein, or yields a functional epitope, as defined herein.

[0104] The choice of appropriate antigenic peptides or proteins generally depends on the condition or disease to be treated or prevented. In general, the artificial nucleic acid molecule, preferably RNA, may encode any antigenic peptide or protein (or any desired combination of antigenic peptides or proteins) in its at least one coding region. It is also envisaged herein to provide artificial nucleic acid molecules, preferably RNAs, encoding a plurality of any combination of at least 2, 3, 4, 5, 6, 7, 8, 9 or 10 or more (identical or different) antigenic peptides or proteins, preferably as defined herein (see e.g. polyvalent vaccines).

[0105] Preferred antigenic peptides and proteins are specified below.

Antigenic Peptides or Proteins Derived from Tumor Antigens

[0106] According to preferred embodiments, the artificial nuclei acid molecule, preferably RNA, according to the invention encodes, in its at least one coding region, at least one antigenic peptide or protein derived from a tumor antigen.

[0107] The term “tumor antigen” refers to antigens derived from or associated with a (preferably malignant) tumor or a cancer disease. As used herein, the terms “cancer” and “tumor” are used interchangeably to refer to a neoplasm characterized by the uncontrolled and usually rapid proliferation of cells that tend to invade surrounding tissue and to metastasize to distant body sites. The term encompasses benign and malignant neoplasms. Malignancy in cancers is typically characterized by anaplasia, invasiveness, and metastasis; whereas benign malignancies typically have none of those properties. The terms “cancer” and “tumor” in particular refer to neoplasms characterized by tumor growth, but also to cancers of blood and lymphatic system. A “tumor antigen” is typically derived from a tumor/cancer cell, preferably a mammalian tumor/cancer cell, and may be located in or on the surface of a tumor cell derived from a mammalian, preferably from a human, tumor, such as a systemic or a solid tumor. “Tumor antigens” generally include tumor-specific antigens (TSAs) and tumor-associated-antigens (TAAs). TSAs may only be presented by tumor cells and not by normal “healthy” cells. They typically result from a tumor specific mutation. TAAs, which are more common, are usually presented by both tumor and healthy cells. These antigens are recognized and the antigen-presenting cell can be destroyed by cytotoxic T cells. Additionally, tumor antigens can also occur on the surface of the tumor in the form of, e.g., a mutated receptor. In this case, they can be recognized by antibodies.

[0108] Preferably, the at least one antigenic peptide or protein encoded by the at least one coding region of the artificial nucleic acid molecule, preferably RNA, of the invention, may be derived from Melanoma antigen recognized by T-cells 1, Eukaryotic translation initiation factor 4 gamma 1, Histone H1.2, Cyclin-dependent kinase 4, 40S ribosomal protein S21, DNA replication licensing factor MCM4, Actin, gamma-enteric smooth muscle, Melanocyte protein PMEL, Phospholipid transfer protein, Vimentin, Eukaryotic translation initiation factor 3 subunit D, Melanoma-associated antigen 1, Fructose-bisphosphate aldolase A, Guanine nucleotide-binding protein G(I)/G(S)/G(T) subunit beta-2, ER membrane protein complex subunit 7, Actin, cytoplasmic 1, High mobility group protein B1, Coiled-coil-helix-coiled-coil-helix domain-containing protein 2, HLA class II histocompatibility antigen, DP beta 1 chain, 60S ribosomal protein L13, Thymosin beta-10, Guanine nucleotide-binding protein G(s) subunit alpha isoforms short, Guanine nucleotide-binding protein subunit beta-2-like 1, Bax inhibitor 1, Wilms tumor protein, Gamma-secretase C-terminal fragment 59, Thymidylate synthase, 60S ribosomal protein L10, Lys-63-specific deubiquitinase BRCC36, Myelin basic protein, HLA class I histocompatibility antigen, A-2 alpha chain, Ragulator complex protein LAMTOR5, 40S ribosomal protein S25, POTE ankyrin domain family member F, Mortality factor 4-like protein 1, Melanoma-associated antigen 3, Heme oxygenase 1, G2/mitotic-specific cyclin-B1, Proteasome subunit alpha type-5, Protein THEMIS2, Fatty acid synthase, Mammaglobin-A, Actin-related protein 2, 60S ribosomal protein L28, 60S acidic ribosomal protein P0, Cellular tumor antigen p53, Proteasome subunit beta type-3, DNA (cytosine-5)-methyltransferase 1, Catenin beta-1, Myosin-9, Reticulocalbin-2, Heterogeneous nuclear ribonucleoprotein A1, 60S ribosomal protein L8, Ribonucleoside-diphosphate reductase subunit M2, Melanoma-associated antigen B2, Protein SSX2, Proliferating cell nuclear antigen, Receptor tyrosine-protein kinase erbB-2, Heat shock protein HSP 90-beta, Ornithine decarboxylase, Ubiquitin-conjugating enzyme E2 E3, 60S ribosomal protein L19, Small nuclear ribonucleoprotein-associated proteins B and B′, Elongation factor 2, Putative small nuclear ribonucleoprotein G-like protein 15, Serine-tRNA ligase, cytoplasmic, Beta-2-microglobulin, ADP/ATP translocase 2, Acyl-CoA desaturase, Ubiquitin-60S ribosomal protein L40, Prelamin-A/C, Heat shock cognate 71 kDa protein, Melanoma-associated antigen 2, Beta-adrenergic receptor kinase 1, Farnesyl pyrophosphate synthase, 40S ribosomal protein S8, Glutamate carboxypeptidase 2, Serine/threonine-protein phosphatase PP1-beta catalytic subunit, ATP-binding cassette sub-family F member 2, Gamma-interferon-inducible lysosomal thiol reductase, Stress-70 protein, mitochondrial, Mucin-1, Rac GTPase-activating protein 1, HLA class I histocompatibility antigen, B-39 alpha chain, 40S ribosomal protein S16, Tyrosinase, HLA class I histocompatibility antigen, alpha chain E, Bifunctional purine biosynthesis protein PURH, Transferrin receptor protein 1, ELAV-like protein 1, U1 small nuclear ribonucleoprotein A, Heat shock 70 kDa protein 1-like, HLA class II histocompatibility antigen, DR alpha chain, T-complex protein 1 subunit alpha, Carcinoembryonic antigen-related cell adhesion molecule 5, Histone H2AX, Lamin-B1, 60S acidic ribosomal protein P2, Actin, cytoplasmic 2, B-lymphocyte antigen CD20, Actin, aortic smooth muscle, Probable global transcription activator SNF2L2, Myotubularin-related protein 5, Proteasome subunit beta type-1, 60S ribosomal protein L7a, Histone H3.3, 60S ribosomal protein L24, 40S ribosomal protein S3, HLA class I histocompatibility antigen, Cw-7 alpha chain, HLA class I histocompatibility antigen, B-15 alpha chain, Serine/threonine-protein kinase Sgk1, Serine/threonine-protein phosphatase PP1-alpha catalytic subunit, Heterogeneous nuclear ribonucleoprotein K, L-dopachrome tautomerase, Protein flightless-1 homolog, Dual specificity protein phosphatase 5, TSC22 domain family protein 3, Cancer/testis antigen 1, Serine/threonine-protein phosphatase 2A 65 kDa regulatory subunit A alpha isoform, Protein transport protein Sec23B, Protein transport protein Sec23A, CD59 glycoprotein, Collagen alpha-5 (IV) chain, AT-rich interactive domain-containing protein 3A, Polypyrimidine tract-binding protein 1, Spermine synthase, Glutamine-fructose-6-phosphate aminotransferase [isomerizing] 1, Eukaryotic translation initiation factor 3 subunit L, Protein BTG2, DNA-directed RNA polymerase II subunit RPB1, Myeloblastin, HLA class I histocompatibility antigen, Cw-3 alpha chain, Importin subunit alpha-5, rRNA 2′-O-methyltransferase fibrillarin, Cyclin-A2, Probable ATP-dependent RNA helicase DDX5, Cytochrome c oxidase subunit 2, IST1 homolog, 60S ribosomal protein L35, Triosephosphate isomerase, Sorting nexin-5, Melanoma-associated antigen 4, Ubiquilin-4, HLA class I histocompatibility antigen, Cw-2 alpha chain, Interferon-induced transmembrane protein 1, Amyloid beta A4 protein, Heat shock 70 kDa protein 1B, HLA class I histocompatibility antigen, A-1 alpha chain, G antigen 12H, Transaldolase, Putative pre-mRNA-splicing factor ATP-dependent RNA helicase DHX16, 14-3-3 protein gamma, Serine/threonine-protein kinase SMG1, Cyclin-L1, Glyceraldehyde-3-phosphate dehydrogenase, Elongation of very long chain fatty acids protein 1, Microtubule-associated protein RP/EB family member 2, T-complex protein 1 subunit epsilon, Sphingolipid delta (4)-desaturase DES1, Elongation of very long chain fatty acids protein 5, ORM1-like protein 2, Baculoviral IAP repeat-containing protein 7, E3 ubiquitin-protein ligase TRIM68, Putative HTLV-1-related endogenous sequence, Myelin proteolipid protein, SAM and SH3 domain-containing protein 1, E3 ubiquitin-protein ligase SIAH1, Muscleblind-like protein 2, Annexin A1, Nuclear ubiquitous casein and cyclin-dependent kinase substrate 1, Pleiotropic regulator 1, NADH dehydrogenase [ubiquinone] 1 alpha subcomplex subunit 3, CD99 antigen, Guanine nucleotide-binding protein G(o) subunit alpha, Calsyntenin-1, GPI transamidase component PIG-T, Perilipin-3, WD40 repeat-containing protein SMU1, Protein S100-B, Annexin A11, Histone H2B type 2-F, Calmodulin, Phosphoinositide-3-kinase-interacting protein 1, THO complex subunit 4, Neuroblast differentiation-associated protein AHNAK, Phosphoserine aminotransferase, Histone deacetylase 7, Gelsolin, Tight junction protein ZO-1, NADH dehydrogenase [ubiquinone] iron-sulfur protein 7, mitochondrial, LIM domain transcription factor LMO4, Spectrin beta chain, non-erythrocytic 1, NADH dehydrogenase [ubiquinone] 1 subunit C2, Testican-2, Alpha-adducin, V-type proton ATPase subunit F, 40S ribosomal protein SA, Bcl-2-associated transcription factor 1, ATP synthase-coupling factor 6, mitochondrial, Phosphatidylethanolamine-binding protein 1, 40S ribosomal protein S29, Septin-2, Methyl-CpG-binding domain protein 3, Transformation/transcription domain-associated protein, Transcription factor HES-1, Paralemmin-2, Sodium/potassium-transporting ATPase subunit alpha-3, Stathmin, Heterogeneous nuclear ribonucleoprotein L-like, Nodal modulator 3, Interferon-induced GTP-binding protein Mx2, Neuronal membrane glycoprotein M6-b, Contactin-1, Cytosolic non-specific dipeptidase, Noelin-2, Serine/threonine-protein kinase DCLK1, U2 small nuclear ribonucleoprotein B, Nuclear autoantigenic sperm protein, 60S ribosomal protein L5, Endoplasmic reticulum-Golgi intermediate compartment protein 1, Programmed cell death protein 4, Endoplasmin, Eukaryotic translation initiation factor 3 subunit F, Cofilin-1, Pyruvate kinase PKM, Dolichyl-diphosphooligosaccharide-protein glycosyltransferase subunit STT3A, 5′ (3′)-deoxyribonucleotidase, cytosolic type, CKLF-like MARVEL transmembrane domain-containing protein 6, Cleavage and polyadenylation specificity factor subunit 1, Neutral amino acid transporter B (0), Protein PRRC1, Probable ATP-dependent RNA helicase DDX49, Nuclear pore complex protein Nup 160, ATP synthase subunit beta, mitochondrial, Signal peptidase complex subunit 2, Protein kinase C iota type, Histone acetyltransferase p300, Histone H2A type 1-A, Small nuclear ribonucleoprotein G, Nucleosome assembly protein 1-like 1, 40S ribosomal protein S11, Structural maintenance of chromosomes protein 3, Centrin-2, GTP-binding nuclear protein Ran, 40S ribosomal protein S3a, ATP-dependent RNA helicase A, T-complex protein 1 subunit eta, Proteasome-associated protein ECM29 homolog, GPN-loop GTPase 1, 60S ribosomal protein L10a, Heterogeneous nuclear ribonucleoproteins C1/C2, Hydroxymethylglutaryl-CoA synthase, cytoplasmic, Sterol O-acyltransferase 1, Tuberin, Eukaryotic translation elongation factor 1 epsilon-1, Phosphoinositide 3-kinase regulatory subunit 4, Annexin A2, U2 small nuclear ribonucleoprotein A′, Serine/threonine-protein kinase SIK1, Nucleolin, L-lactate dehydrogenase B chain, L-lactate dehydrogenase A chain, Aladin, Microtubule-associated protein 4, Peroxiredoxin-5, mitochondrial, HLA class I histocompatibility antigen, B-7 alpha chain, Carbamoyl-phosphate synthase [ammonia], mitochondrial, Coiled-coil domain-containing protein 12, Kinectin, Keratin, type I cytoskeletal 18, 40S ribosomal protein S5, Nucleosome assembly protein 1-like 4, U4/U6 small nuclear ribonucleoprotein Prp31, ELAV-like protein 3, Minor histocompatibility protein HA-1, Low affinity immunoglobulin epsilon Fc receptor, 26S proteasome non-ATPase regulatory subunit 2, ATP-dependent RNA helicase DDX3X, Putative homeodomain transcription factor 2, Transcription factor BTF3, Ribosome biogenesis protein BRX1 homolog, HLA class I histocompatibility antigen, B-8 alpha chain, Dynamin-2, ELAV-like protein 4, ATP-dependent RNA helicase DDX3Y, Histone demethylase UTY, Pumilio homolog 3, Histone H4, Histone H3.2, Protein S100-A9, Macrophage migration inhibitory factor, Hemoglobin subunit alpha, 40S ribosomal protein S17, Collagen alpha-1 (I) chain, Collagen alpha-2 (1) chain, T-complex protein 1 subunit theta, Cullin-1, DNA replication licensing factor MCM7, BolA-like protein 2, DNA topoisomerase 2-beta, Proteasome subunit alpha type-4, Bifunctional glutamate/proline-tRNA ligase, Sodium/potassium-transporting ATPase subunit alpha-1, MICOS complex subunit MIC60, Peptidyl-prolyl cis-trans isomerase A, NADH dehydrogenase [ubiquinone] 1 beta subcomplex subunit 7, Zinc finger MYM-type protein 2, Transforming protein RhoA, Putative endoplasmin-like protein, Plasminogen activator inhibitor 1 RNA-binding protein, Uncharacterized protein C20orf24, Importin subunit beta-1, Melanoma-associated antigen D2, Protein Spindly, Coatomer subunit epsilon, Targeting protein for Xklp2, H/ACA ribonucleoprotein complex subunit 4, H/ACA ribonucleoprotein complex subunit 3, Cerebellar degeneration-related protein 2, Exocyst complex component 2, 1-phosphatidylinositol 3-phosphate 5-kinase, Proteasome activator complex subunit 3, Nuclear pore complex protein Nup205, Neurogenic locus notch homolog protein 1, Lysosomal protective protein, Serine/threonine-protein kinase 38-like, Alpha-1B-glycoprotein, Neuropilin-2, Calreticulin, Filamin-A, Syntenin-1, Cathepsin D, HLA class I histocompatibility antigen, B-51 alpha chain, Profilin-1, Lymphocyte-specific protein 1, Synemin, Insulin receptor substrate 2, ETS translocation variant 5, E3 ubiquitin-protein ligase Mdm2, U1 small nuclear ribonucleoprotein 70 kDa, Coatomer subunit gamma-1, T-complex protein 1 subunit gamma, DCN1-like protein 1, U3 small nucleolar ribonucleoprotein protein IMP3, Phosphoglycerate kinase 1, Diphthamide biosynthesis protein 1, Methionine aminopeptidase 2, Dipeptidyl peptidase 9, Chloride intracellular channel protein 4, 3-hydroxy-3-methylglutaryl-coenzyme A reductase, Acyl-protein thioesterase 2, 26S proteasome non-ATPase regulatory subunit 14, Golgi-specific brefeldin A-resistance guanine nucleotide exchange factor 1, E3 ubiquitin-protein ligase BRE1A, Abl interactor 2, Nuclear pore complex protein Nup88, Thioredoxin-like protein 4A, Transmembrane emp24 domain-containing protein 2, Glycogen phosphorylase, muscle form, Junction plakoglobin, Dolichyl-diphosphooligosaccharide-protein glycosyltransferase subunit 2, Putative eukaryotic translation initiation factor 2 subunit 3-like protein, Serine/threonine-protein kinase/endoribonuclease IRE1, Interferon-induced GTP-binding protein Mx1, Mitotic spindle-associated MMXD complex subunit MIP18, Sulfiredoxin-1, Nucleolar GTP-binding protein 1, 10 kDa heat shock protein, mitochondrial, Anoctamin-6, Nucleolar pre-ribosomal-associated protein 1, RNA-binding protein 34, S-adenosylmethionine synthase isoform type-2, Transmembrane protein 209, HLA class I histocompatibility antigen, B-13 alpha chain, Ubiquitin carboxyl-terminal hydrolase 11, Ataxin-10, Vacuolar protein sorting-associated protein 13B, Suppressor of SWI4 1 homolog, Golgin subfamily A member 7, Stomatin-like protein 2, mitochondrial, Nuclear pore complex protein Nup107, N-alpha-acetyltransferase 10, Cytochrome c oxidase subunit 6B1, General transcription factor II-I repeat domain-containing protein 2B, Heterogeneous nuclear ribonucleoprotein A0, Condensin complex subunit 3, Regulation of nuclear pre-mRNA domain-containing protein 1A, Helicase SRCAP, Spartin, Uncharacterized protein ZMYM6NB, CLIP-associating protein 1, Alpha-actinin-4, Nucleolar protein 58, Serine/threonine-protein kinase Kist, Transcription factor Sp2, Apolipoprotein L1, Tankyrase-2, Uncharacterized protein C19orf43, Heat shock protein HSP 90-alpha, X-ray repair cross-complementing protein 5, Nucleolar protein 7, U5 small nuclear ribonucleoprotein 200 kDa helicase, 15 kDa selenoprotein, Ribosomal RNA processing protein 1 homolog B, 116 kDa U5 small nuclear ribonucleoprotein component, Paraneoplastic antigen Ma1, Retinoic acid-induced protein 1, ADP-ribosylation factor GTPase-activating protein 2, Nucleolar protein 56, RNA-binding protein 14, Eukaryotic initiation factor 4A-I, Septin-7, Protein polybromo-1, Annexin A4, Centromere protein F, 60S ribosomal protein L22-like 1, Histone H2B type 1-A, ADP-dependent glucokinase, Heterogeneous nuclear ribonucleoprotein U, High affinity cAMP-specific 3′,5′-cyclic phosphodiesterase 7A, E3 ubiquitin-protein ligase UBR2, m7GpppX diphosphatase, Microtubule-actin cross-linking factor 1, isoforms 1/2/3/5, YTH domain-containing protein 1, Eukaryotic translation initiation factor 5A-1, Activating transcription factor 7-interacting protein 1, Transmembrane protein 258, U3 small nucleolar RNA-associated protein 6 homolog, Nucleolar RNA helicase 2, DNA-directed RNA polymerase II subunit RPB7, RRP12-like protein, 26S protease regulatory subunit 6B, 26S protease regulatory subunit 7, 26S protease regulatory subunit 4, Nucleolar protein 11, Prothymosin alpha, Vezatin, Protein AF-10, Negative elongation factor C/D, Transcription factor E2F1, RNA-binding protein 6, Eukaryotic translation initiation factor 4 gamma 3, Next to BRCA1 gene 1 protein, Mitochondrial import receptor subunit TOM7 homolog, Heterogeneous nuclear ribonucleoprotein U-like protein 1, Poly [ADP-ribose] polymerase 1, Eukaryotic translation initiation factor 3 subunit C, Condensin-2 complex subunit G2, Signal transducer and activator of transcription 1-alpha/beta, Signal transducer and activator of transcription 3, Ataxin-2-like protein, G patch domain-containing protein 4, Golgi resident protein GCP60, AP-1 complex subunit sigma-3, Cleavage stimulation factor subunit 3, ATP-dependent RNA helicase DDX24, Mediator of RNA polymerase II transcription subunit 23, Sorting and assembly machinery component 50 homolog, Protein LAP2, Spectrin beta chain, erythrocytic, E3 ubiquitin-protein ligase RBBP6, 40S ribosomal protein S18, Keratinocyte-associated protein 2, Dolichyl-diphosphooligosaccharide-protein glycosyltransferase subunit DAD1, Minor histocompatibility antigen H13, Catenin alpha-2, TBC1 domain family member 31, Poly [ADP-ribose] polymerase 4, Basic leucine zipper and W2 domain-containing protein 1, Neutral alpha-glucosidase AB, RuvB-like 2, Protein MCM10 homolog, Plexin-C1, DNA repair protein XRCC1, Protein AATF, Short transient receptor potential channel 4-associated protein, Cell cycle progression protein 1, Dihydrofolate reductase, mitochondrial, Splicing factor 3A subunit 3, RNMT-activating mini protein, Coatomer subunit delta, Coatomer subunit alpha, Mothers against decapentaplegic homolog 9, Ubiquitin-like protein FUBI, Lysine-tRNA ligase, Cytochrome c oxidase subunit 6A1, mitochondrial, Polycomb protein SUZ12, SNARE-associated protein Snapin, Signal recognition particle 54 kDa protein, Probable JmjC domain-containing histone demethylation protein 2C, Putative ATP-dependent RNA helicase DDX11-like protein 8, General transcription factor 3C polypeptide 1, Tonsoku-like protein, Nuclear pore complex protein Nup214, ATP-dependent 6-phosphofructokinase, platelet type, Alpha-endosulfine, 60S ribosomal protein L26, DNA mismatch repair protein Msh2, Chromodomain-helicase-DNA-binding protein 8, Cell division cycle protein 27 homolog, Transmembrane protein 43, Clathrin heavy chain 1, Disintegrin and metalloproteinase domain-containing protein 10, Protein CASP, Gem-associated protein 5, Ribosomal biogenesis protein LAS1L, WD repeat-containing protein 34, DnaJ homolog subfamily B member 4, Tyrosine-protein kinase Fyn, Activating signal cointegrator 1, Putative mitochondrial import inner membrane translocase subunit Tim23B, Peroxisomal acyl-coenzyme A oxidase 1, HLA class II histocompatibility antigen, DO alpha chain, Poly [ADP-ribose] polymerase 14, Mediator of RNA polymerase II transcription subunit 18, 60S ribosomal protein L7, Zinc finger protein 548, Protein FAM32A, Heat shock protein HSP 90-alpha A2, Myc-associated zinc finger protein, Heterogeneous nuclear ribonucleoproteins A2/B1, V-type proton ATPase 116 kDa subunit a isoform 4, Zinc finger protein 770, Protein SSXT, Zinc finger and BTB domain-containing protein 43, Signal transducing adapter molecule 2, Cirhin, DTW domain-containing protein 1, Bone morphogenetic protein receptor type-2, Dedicator of cytokinesis protein 7, SUMO-activating enzyme subunit 1, Superkiller viralicidic activity 2-like 2, 60S ribosomal protein L15, Transcription elongation factor SPT6, 60S ribosomal protein L18a, Catalase, Tuftelin-interacting protein 11, Hepatoma-derived growth factor-related protein 2, Putative annexin A2-like protein, Protein transport protein Sec16A, Transcription elongation factor SPT5, Splicing factor 3B subunit 4, Serine/threonine-protein kinase 17B, Pre-mRNA-splicing factor CWC22 homolog, Serine/threonine-protein kinase mTOR, E3 ubiquitin-protein ligase RNF213, RNA polymerase I-specific transcription initiation factor RRN3, Nuclear receptor corepressor 2, HLA class II histocompatibility antigen, DQ alpha 1 chain, Nuclear pore membrane glycoprotein 210, NADH dehydrogenase [ubiquinone] 1 beta subcomplex subunit 10, Lysine-specific histone demethylase 1A, Thioredoxin-interacting protein, 60S ribosomal protein L27, Putative elongation factor 1-alpha-like 3, Long-chain-fatty-acid-CoA ligase 4, Signal recognition particle receptor subunit alpha, Embryonic stem cell-specific 5-hydroxymethylcytosine-binding protein, DNA-directed RNA polymerases I, II, and Ill subunit RPABC5, Dystonin, 60S ribosomal protein L23a, ATP-citrate synthase, Protein quaking, Homocysteine-responsive endoplasmic reticulum-resident ubiquitin-like domain member 1 protein, Transducin-like enhancer protein 2, Gamma-interferon-inducible protein 16, Cytoplasmic dynein 1 heavy chain 1, Staphylococcal nuclease domain-containing protein 1, Thioredoxin, Ribonucleoside-diphosphate reductase large subunit, Lamin-B receptor, Asparagine synthetase [glutamine-hydrolyzing], Heterogeneous nuclear ribonucleoprotein L, Caprin-1, DNA-dependent protein kinase catalytic subunit, RAC-beta serine/threonine-protein kinase, Replication factor C subunit 1, Pre-mRNA-processing factor 40 homolog A, Helicase-like transcription factor, Pre-mRNA-splicing factor RBM22, Kinesin-like protein KIF18A, Vacuolar protein sorting-associated protein 13A, Raftlin, Coiled-coil domain-containing protein 94, Signal-induced proliferation-associated 1-like protein 2, Pre-mRNA-processing-splicing factor 8, Serine/arginine-rich splicing factor 3, T-complex protein 1 subunit zeta-2, Periphilin-1, Metastasis-associated protein MTA2, Spatacsin, Heterogeneous nuclear ribonucleoprotein A/B, Protein RRP5 homolog, 60 kDa heat shock protein, mitochondrial, Protein transport protein Sec61 subunit beta, 40S ribosomal protein S19, Protein DEK, Cyclin-dependent kinases regulatory subunit 2, Protein disulfide-isomerase A3, Heterogeneous nuclear ribonucleoprotein R, Lamina-associated polypeptide 2, isoform alpha, ATP synthaseF(0) complex subunit C1, mitochondrial, Cytospin-A, Zinc finger protein 557, Zinc finger protein 669, WD repeat-containing protein 6, Signal transducer and activator of transcription 6, Antigen peptide transporter 1, Retinoic acid receptor RXR-gamma, Eukaryotic translation initiation factor 2-alpha kinase 1, CDK5 regulatory subunit-associated protein 2, Trifunctional purine biosynthetic protein adenosine-3, R3H domain-containing protein 4, WD repeat-containing protein 27, UAP56-interacting factor, Histone acetyltransferase KAT8, Probable tRNA N6-adenosine threonylcarbamoyltransferase, Deoxynucleotidyltransferase terminal-interacting protein 2, Serpin B8, ATP synthase subunit alpha, mitochondrial, 1,4-alpha-glucan-branching enzyme, Phosphatidylinositol 4,5-bisphosphate 3-kinase catalytic subunit alpha isoform, Probable threonine-tRNA ligase 2, cytoplasmic, Coiled-coil domain-containing protein 127, Glucosylceramidase, ATPase family AAA domain-containing protein 5, Casein kinase II subunit alpha, Gamma-tubulin complex component 2, Integrator complex subunit 11, Pogo transposable element with KRAB domain, Nuclear factor erythroid 2-related factor 2, Serpin B9, Folliculin-interacting protein 2, Exportin-5, Protein transport protein Sec61 subunit gamma, Brefeldin A-inhibited guanine nucleotide-exchange protein 1, Charged multivesicular body protein 5, Calpain small subunit 1, PR domain zinc finger protein 15, DnaJ homolog subfamily C member 11, Ubiquitin-conjugating enzyme E2 variant 3, Spermatid perinuclear RNA-binding protein, Cytosolic carboxypeptidase 1, DNA repair protein RAD51 homolog 1, Eukaryotic translation initiation factor 3 subunit C-like protein, Methionine aminopeptidase 1, Tyrosine-protein phosphatase non-receptor type 11, Protein UXT, Nardilysin, Mediator of RNA polymerase II transcription subunit 13, Absent in melanoma 1 protein, Ubiquitin carboxyl-terminal hydrolase 22, ADP-sugar pyrophosphatase, Ras GTPase-activating protein-binding protein 1, Nuclear pore complex protein Nup155, Zinc finger protein 550, Zinc finger protein 674, Nucleoporin NUP188 homolog, Signal recognition particle subunit SRP72, Oxysterol-binding protein-related protein 8, Probable cation-transporting ATPase 13A3, Band 4.1-like protein 2, 26S proteasome non-ATPase regulatory subunit 13, Cytochrome b-c1 complex subunit 9, Mitotic checkpoint protein BUB3, Exocyst complex component 4, Patatin-like phospholipase domain-containing protein 2, Tubulin beta-4A chain, ATP-binding cassette sub-family F member 3, Pre-mRNA-splicing factor ATP-dependent RNA helicase DHX15, Actin-related protein 2/3 complex subunit 2, Protein FAM60A, Chromobox protein homolog 6, Splicing factor 3B subunit 1, FAS-associated factor 2, 26S proteasome non-ATPase regulatory subunit 3, Histone deacetylase 9, F-box only protein 5, ATP-binding cassette sub-family D member 1, V-type proton ATPase subunit d 1, Enhancer of rudimentary homolog, ATP synthase subunit epsilon-like protein, mitochondrial, Polyadenylate-binding protein 1, Protein OS-9, Interferon-induced, double-stranded RNA-activated protein kinase, Alpha-taxilin, Tetratricopeptide repeat protein 9C, Transmembrane emp24 domain-containing protein 4, Non-receptor tyrosine-protein kinase TYK2, E3 ubiquitin-protein ligase AMFR, Proteasome subunit alpha type-2, Nucleolysin TIA-1 isoform p40, Nucleolysin TIAR, Kinesin-like protein KIF20A, Non-specific lipid-transfer protein, Ectonucleoside triphosphate diphosphohydrolase 1, FACT complex subunit SSRP1, Double-stranded RNA-binding protein Staufen homolog 1, Serine/threonine-protein phosphatase 6 regulatory subunit 3, SUMO-specific isopeptidase USPL1, 5′-nucleotidase domain-containing protein 1, Serine/arginine-rich splicing factor 6, Serine/threonine-protein kinase 17A, A-kinase anchor protein 2, Zinc finger protein RIf, Histone-lysine N-methyltransferase SETD2, Nesprin-2, Uncharacterized protein C14orf119, Cyclin-G-associated kinase, Peroxisomal membrane protein 2, Nucleoporin GLE1, Nuclear pore complex protein Nup93, 60S ribosomal export protein NMD3, 14 kDa phosphohistidine phosphatase, MKI67 FHA domain-interacting nucleolar phosphoprotein, Kinesin-associated protein 3, U4/U6 small nuclear ribonucleoprotein Prp4, Transmembrane emp24 domain-containing protein 3, E3 ubiquitin-protein ligase MARCH7, Midasin, Arf-GAP with coiled-coil, ANK repeat and PH domain-containing protein 2, Zinc finger protein 330, Protein FAM208B, Heat shock 70 kDa protein 14, COP9 signalosome complex subunit 6, Axin-1, Proteasome subunit beta type-8, Dedicator of cytokinesis protein 11, Mitochondrial Rho GTPase 2, Cysteine-rich PDZ-binding protein, Exosome complex exonuclease RRP44, Collagen type IV alpha-3-binding protein, Vigilin, WD repeat-containing protein 1, Cytoplasmic FMR1-interacting protein 1, Eukaryotic translation initiation factor 3 subunit I, Epidermal growth factor receptor substrate 15, E3 ubiquitin-protein ligase Topors, Tubulin beta chain, Cohesin subunit SA-2, Phosphatidylinositol 3,4,5-trisphosphate-dependent Rac exchanger 1 protein, Phospholipid-transporting ATPase IG, Vacuolar protein sorting-associated protein 26A, Syntaxin-binding protein 3, Centrosomal protein CEP57L1, Pleckstrin homology domain-containing family B member 2, Zinc finger protein 706, SWI/SNF-related matrix-associated actin-dependent regulator of chromatin subfamily D member 2, V-type proton ATPase subunit E 2, 40S ribosomal protein S13, Cation-independent mannose-6-phosphate receptor, Nucleoporin Nup37, RNA polymerase II elongation factor ELL, Heterogeneous nuclear ribonucleoprotein F, Tetratricopeptide repeat protein 13, Tapasin, Condensin-2 complex subunit D3, Endoplasmic reticulum-Golgi intermediate compartment protein 3, Threonine-tRNA ligase, cytoplasmic, Choline/ethanolaminephosphotransferase 1, 28S ribosomal protein S17, mitochondrial, Protein Niban, Ubiquitin carboxyl-terminal hydrolase 7, E3 ubiquitin-protein ligase RNF19A, Interleukin enhancer-binding factor 2, Transitional endoplasmic reticulum ATPase, Nuclear factor NF-kappa-B p100 subunit, Phospholipase D2, Acidic fibroblast growth factor intracellular-binding protein, Alanine-tRNA ligase, cytoplasmic, Histone-lysine N-methyltransferase 2C, Attractin, Histone-lysine N-methyltransferase, H3 lysine-79 specific, Dynamin-1-like protein, Pyridine nucleotide-disulfide oxidoreductase domain-containing protein 1, Chromodomain-helicase-DNA-binding protein 7, Polypyrimidine tract-binding protein 3, HLA class I histocompatibility antigen, B-52 alpha chain, Cell division cycle-associated 7-like protein, Mediator of RNA polymerase II transcription subunit 10, Hypoxia-inducible factor 1-alpha, Metastasis-associated protein MTA3, Oxysterol-binding protein-related protein 3, tRNA (adenine (58)-N(1))-methyltransferase non-catalytic subunit TRM6, Nucleolar complex protein 4 homolog, Geminin, Chromodomain-helicase-DNA-binding protein 1-like, Up-regulated during skeletal muscle growth protein 5, Integrator complex subunit 3, Mitogen-activated protein kinase 6, RNA binding motif protein, X-linked-like-1, Serine/threonine-protein kinase PLK1, Glycoprotein endo-alpha-1,2-mannosidase-like protein, Cold-inducible RNA-binding protein, DNA mismatch repair protein Msh6, Serine hydroxymethyltransferase, cytosolic, Store-operated calcium entry-associated regulatory factor, FACT complex subunit SPT16, Histone-lysine N-methyltransferase EZH1, Trafficking protein particle complex subunit 4, DnaJ homolog subfamily C member 3, Meckelin, Serine/threonine-protein kinase pim-2, RNA-binding protein 7, Glutathione S-transferase Mu 2, Protein patched homolog 1, ARF GTPase-activating protein GIT2, Thioredoxin-related transmembrane protein 2, Zinc finger CCCH domain-containing protein 18, Probable ATP-dependent RNA helicase DDX47, Eukaryotic translation initiation factor 2 subunit 3, AP-1 complex subunit beta-1, Septin-6, DNA topoisomerase 2-alpha, Coilin, ATPase family AAA domain-containing protein 2, Choline-phosphate cytidylyltransferase A, Serine/threonine-protein kinase pim-1, Death-associated protein kinase 2, Transcription termination factor 2, C-1-tetrahydrofolate synthase, cytoplasmic, Major histocompatibility complex class I-related gene protein, Delta (24)-sterol reductase, Protein SET, Constitutive coactivator of PPAR-gamma-like protein 1, DNA replication complex GINS protein PSF1, AP-1 complex subunit mu-2, Dolichol-phosphate mannosyltransferase subunit 1, Heterogeneous nuclear ribonucleoprotein M, Plastin-3, THO complex subunit 2, 60S ribosomal protein L4, Hexokinase-2, Ribosome-binding protein 1, Proteasome subunit beta type-5, Anaphase-promoting complex subunit 2, Protein-tyrosine kinase 2-beta, NEDD8 ultimate buster 1, Baculoviral IAP repeat-containing protein 6, E3 ubiquitin-protein ligase CBL-B, Basigin, Phosphatidylinositol 4-kinase type 2-beta, Histone-binding protein RBBP7, High mobility group protein B3, Lymphocyte antigen 75, Putative RRN3-like protein RRN3P1, Chloride intracellular channel protein 1, Transmembrane emp24 domain-containing protein 7, Myosin light polypeptide 6, Proteasome inhibitor PI31 subunit, Kinesin-like protein KIF20B, rRNA-processing protein FCF1 homolog, Cyclin-dependent kinase 6, Filamin A, Replication protein A 32 kDa subunit, ATP-dependent RNA helicase DHX8, Cysteine and glycine-rich protein 1, ER membrane protein complex subunit 2, Cleavage stimulation factor subunit 1, Exportin-2, Protein KIAA0100, Cyclin-dependent kinase inhibitor 3, Eukaryotic translation initiation factor 3 subunit M, Sigma non-opioid intracellular receptor 1, DNA repair protein RAD50, Nuclear pore complex protein Nup153, Protein SCO1 homolog, mitochondrial, F-box/LRR-repeat protein 3, von Willebrand factor, DNA nucleotidylexotransferase, Endothelial differentiation-related factor 1, Serine/arginine-rich splicing factor 9, Probable E3 ubiquitin-protein ligase makorin-2, Antigen KI-67, Mediator of RNA polymerase II transcription subunit 17, Non-canonical poly(A) RNA polymerase PAPD5, Interleukin-9 receptor, Trafficking protein particle complex subunit 5, Magnesium transporter protein 1, Transforming acidic coiled-coil-containing protein 3, Membrane-associated tyrosine- and threonine-specific cdc2-inhibitory kinase, Ig kappa chain C region, Multifunctional protein ADE2, TPT1-like protein, AP-5 complex subunit zeta-1, Protein transport protein Sec31A, DnaJ homolog subfamily C member 7, WD repeat-containing protein 82, Disco-interacting protein 2 homolog A, DNA replication licensing factor MCM5, Disks large homolog 1, Ubiquitin-conjugating enzyme E2 J1, Nucleolar transcription factor 1, Citrate synthase, mitochondrial, GMP reductase 2, Single Ig IL-1-related receptor, Sulfhydryl oxidase 1, Cyclin-D1-binding protein 1, HLA class II histocompatibility antigen, DRB1-15 beta chain, Pre-mRNA-splicing factor ISY1 homolog, CUGBP Elav-like family member 1, Gamma-secretase subunit PEN-2, Tyrosine-protein kinase BAZ1B, Influenza virus NS1A-binding protein, Target of rapamycin complex subunit LST8, Splicing factor 3B subunit 2, Importin subunit alpha-1, Cullin-4A, Carbonic anhydrase 9, BTB/POZ domain-containing adapter for CUL3-mediated RhoA degradation protein 3, Melanoma-associated antigen 10, 26S proteasome non-ATPase regulatory subunit 6, 40S ribosomal protein S26, Long-chain-fatty-acid-CoA ligase 3, N6-adenosine-methyltransferase subunit METTL14, Ubiquitin-conjugating enzyme E2H, Adenylosuccinate synthetase isozyme 2, Serine/threonine-protein phosphatase 2A 56 kDa regulatory subunit epsilon isoform, Actin-binding protein IPP, Mitogen-activated protein kinase 4, Tyrosine-protein phosphatase non-receptor type 23, Mitochondrial carrier homolog 1, Microspherule protein 1, Splicing factor 3B subunit 3, Casein kinase I isoform delta, Protein kish-A, Seipin, CMP-N-acetylneuraminate-beta-galactosamide-alpha-2,3-sialyltransferase 2, Cleft lip and palate transmembrane protein 1, Proteasome subunit beta type-6, RNA-binding protein 42, Alpha-enolase, Unconventional myosin-lc, THO complex subunit 5 homolog, Solute carrier family 35 member B1, Sarcoplasmic/endoplasmic reticulum calcium ATPase 1, ATP-dependent RNA helicase DDX50, Splicing factor, proline- and glutamine-rich, DDB1- and CUL4-associated factor 11, EH domain-containing protein 1, COP9 signalosome complex subunit 7a, Cullin-2, Glutathione S-transferase A4, WD repeat-containing protein 19, Serine palmitoyltransferase 2, Apoptosis-associated speck-like protein containing a CARD, DNA damage-inducible transcript 3 protein, Erlin-2, DNA polymerase alpha subunit B, Thyroid adenoma-associated protein, AP-3 complex subunit delta-1, Extended synaptotagmin-2, Transportin-1, NudC domain-containing protein 3, Ubiquitin carboxyl-terminal hydrolase 35, Proline and serine-rich protein 1, Hsp90 co-chaperone Cdc37, Ubiquitin-conjugating enzyme E2 S, Talin-1, Kinetochore protein NDC80 homolog, Integrator complex subunit 4, BRISC complex subunit Abro1, Enhancer of filamentation 1, SET and MYND domain-containing protein 4, Leucine-rich PPR motif-containing protein, mitochondrial, HAUS augmin-like complex subunit 1, T-complex protein 1 subunit zeta, FERM, RhoGEF and pleckstrin domain-containing protein 2, Mannose-1-phosphate guanyltransferase alpha, Structural maintenance of chromosomes flexible hinge domain-containing protein 1, A-kinase anchor protein 11, tRNA-splicing ligase RtcB homolog, Sister chromatid cohesion protein PDS5 homolog A, Autophagy-related protein 101, ATP-binding cassette sub-family F member 1, Ankyrin repeat and KH domain-containing protein 1, Phosphopantothenoylcysteine decarboxylase, Bifunctional methylenetetrahydrofolate dehydrogenase/cyclohydrolase, mitochondrial, Leucine-rich repeat flightless-interacting protein 2, ADP-ribosylation factor GTPase-activating protein 3, Plexin-B2, Ankyrin repeat and LEM domain-containing protein 2, Signal transducer and activator of transcription 5B, DNA-directed RNA polymerase I subunit RPA2, Son of sevenless homolog 1, Formin-like protein 1, Cytoskeleton-associated protein 5, DNA dC→dU-editing enzyme APOBEC-3F, General transcription factor 3C polypeptide 2, DCC-interacting protein 13-alpha, Nucleoside diphosphate kinase 3, Dipeptidyl peptidase 8, Myotubularin, Ubiquitin fusion degradation protein 1 homolog, Epidermal growth factor receptor substrate 15-like 1, Serine/threonine-protein kinase N1, Sphingomyelin phosphodiesterase 4, Probable dolichyl pyrophosphate Glc1Man9GlcNAc2 alpha-1,3-glucosyltransferase, Gamma-tubulin complex component 5, Bromodomain adjacent to zinc finger domain protein 2A, Serine/threonine-protein phosphatase 4 regulatory subunit 3A, Protein yippee-like 5, Protein TASOR, Protein FAM177A1, 60S ribosomal protein L34, TBCC domain-containing protein 1, T-complex protein 1 subunit beta, Plectin, GDP-mannose 4,6 dehydratase, Protein arginine N-methyltransferase 3, Unconventional myosin-If, TBC1 domain family member 9B, Poly [ADP-ribose] polymerase 10,

[0109] Transport and Golgi organization protein 6 homolog, Protein transport protein Sec24A, GMP synthase [glutamine-hydrolyzing], Nuclear pore complex protein Nup133, SHC SH2 domain-binding protein 1, 3-hydroxyacyl-CoA dehydrogenase type-2, Translation initiation factor elF-2B subunit delta, Ubiquitin-associated protein 2-like, DNA dC→dU-editing enzyme APOBEC-3B, Proteasome activator complex subunit 4, cAMP-dependent protein kinase type I-alpha regulatory subunit, 6-phosphofructo-2-kinase/fructose-2,6-bisphosphatase 4, Calcium and integrin-binding protein 1, Zinc transporter ZIP6, DDB1- and CUL4-associated factor 15, Alpha-ketoglutarate-dependent dioxygenase FTO, Serine/threonine-protein phosphatase 6 catalytic subunit, U4/U6 small nuclear ribonucleoprotein Prp3, Putative helicase MOV-10, Ubiquitin carboxyl-terminal hydrolase 10, CAD protein, Importin-4, Filamin-B, Probable helicase with zinc finger domain, Rho GTPase-activating protein 12, Proline-rich protein 12, WD repeat-containing protein 70, Hexokinase-1, Nischarin, Protein SPT2 homolog, Bardet-Biedl syndrome 1 protein, Ubiquitin-like domain-containing CTD phosphatase 1, Programmed cell death protein 5, Na(+)/H(+) exchange regulatory cofactor NHE-RF1, Hom s 1, Tumor necrosis factor receptor superfamily member 10B, Glucocorticoid modulatory element-binding protein 1, Hydroxyacyl-coenzyme A dehydrogenase, mitochondrial, Myocyte-specific enhancer factor 2A, Zinc finger protein 106, Rho GTPase-activating protein 35, Probable RNA-binding protein 23, Anamorsin, Anaphase-promoting complex subunit 1, Intraflagellar transport protein 172 homolog, Protein PRRC2B, TRPM8 channel-associated factor 1, DNA damage-binding protein 1, ORM1-like protein 3, WD repeat-containing protein 18, Chitinase domain-containing protein 1, Protein VPRBP, E3 ubiquitin-protein ligase TRIM22, Tetratricopeptide repeat protein 17, Ninein, Golgin subfamily A member 4, Multiple C2 and transmembrane domain-containing protein 1, Nucleoside diphosphate-linked moiety X motif 19, Probable helicase senataxin, Folliculin-interacting protein 1, Ras GTPase-activating-like protein IQGAP1, 26S proteasome non-ATPase regulatory subunit 1, F-box only protein 8, Melanoma inhibitory activity protein 3, IQ domain-containing protein D, Dihydroxyacetone phosphate acyltransferase, Protein DBF4 homolog A, F-box only protein 25, Hermansky-Pudlak syndrome 5 protein, Guanine nucleotide-binding protein subunit beta-5, Cytosolic phospholipase A2, 60S acidic ribosomal protein P1, ATP-binding cassette sub-family B member 7, mitochondrial, Dual specificity mitogen-activated protein kinase kinase 7, Lon protease homolog 2, peroxisomal, Protein virilizer homolog, Histone-lysine N-methyltransferase SETD1A, Endosomal/lysomomal potassium channel TMEM175, Serine/threonine-protein kinase TAO2, Cell division control protein 6 homolog, AT-rich interactive domain-containing protein 4B, Transcription activator BRG1, Ankyrin repeat and SOCS box protein 3, Ribonucleases P/MRP protein subunit POP1, Translin-associated protein X, Phosphotriesterase-related protein, Methionine adenosyltransferase 2 subunit beta, Chromosome transmission fidelity protein 8 homolog, Catenin alpha-1, Splicing factor 3A subunit 1, Aurora kinase B, Vam6/Vps39-like protein, Kelch-like protein 13, Interleukin-6 receptor subunit beta, Ankyrin repeat domain-containing protein 17, Protein IWS1 homolog, G2/M phase-specific E3 ubiquitin-protein ligase, Adenomatous polyposis coli protein, Flotillin-2, Calpastatin, Cyclin-dependent kinase 9, E3 ubiquitin-protein ligase listerin, Guanosine-3′,5′-bis(diphosphate) 3′-pyrophosphohydrolase MESH1, Protein PRR14L, MAP kinase-activated protein kinase 5, Nck-associated protein 1, Nuclear pore glycoprotein p62, DNA excision repair protein ERCC-6-like, Kelch repeat and BTB domain-containing protein 4, N-acetylneuraminate lyase, DENN domain-containing protein 4C, Fatty acyl-CoA reductase 2, 28S ribosomal protein S33, mitochondrial, RNA-binding protein 4B, Zinc finger protein 143, cAMP-responsive element modulator, WD repeat-containing protein 43, CTD small phosphatase-like protein 2, Ras-related GTP-binding protein C, DNA repair and recombination protein RAD54B, HIV Tat-specific factor 1, Negative elongation factor A, Rho-associated protein kinase 1, E3 ISG15-protein ligase HERC5, Renal cancer differentiation gene 1 protein, E3 ubiquitin-protein ligase UBR4, Prolyl 4-hydroxylase subunit alpha-1, Archaemetzincin-2, EH domain-binding protein 1, Hyaluronan mediated motility receptor, Conserved oligomeric Golgi complex subunit 5, Ribosomal L1 domain-containing protein 1, Regulator of G-protein signaling 10, Protein Jade-2, DNA-directed RNA polymerase II subunit RPB3, Electron transfer flavoprotein subunit beta, Protein Mis18-alpha, Phosphatidylinositol 4-kinase beta, Cytochrome P450 20A1, Ectopic P granules protein 5 homolog, CCAAT/enhancer-binding protein zeta, MORF4 family-associated protein 1-like 1, Proteasome subunit beta type-2, cAMP-dependent protein kinase type I-beta regulatory subunit, Rap1 GTPase-GDP dissociation stimulator 1, Probable E3 ubiquitin-protein ligase HERC4, Protein SON, Proteasome activator complex subunit 2, CCR4-NOT transcription complex subunit 1, DNA fragmentation factor subunit beta, CREB-binding protein, SCAN domain-containing protein 1, Cyclin-dependent kinase inhibitor 1C, ERI1 exoribonuclease 3, Cyclin-I, Tight junction protein ZO-2, DNA-directed RNA polymerase II subunit RPB11-b1, Conserved oligomeric Golgi complex subunit 4, Cip1-interacting zinc finger protein, Neuferricin, Cyclin-dependent kinase 1, RCC1 and BTB domain-containing protein 1, Eukaryotic translation initiation factor 3 subunit H, Zinc finger SWIM domain-containing protein 1, DNA-directed RNA polymerase II subunit RPB4, Rho guanine nucleotide exchange factor 2, E3 ubiquitin-protein ligase TRIM37, DEP domain-containing protein 1A, Small nuclear ribonucleoprotein Sm D1, Lipopolysaccharide-responsive and beige-like anchor protein, Electron transfer flavoprotein subunit alpha, mitochondrial, Solute carrier family 43 member 3, Integrin alpha-4, Uridine-cytidine kinase-like 1, KH domain-containing, RNA-binding, signal transduction-associated protein 1, Rho guanine nucleotide exchange factor 18, Steroid receptor RNA activator 1, Cytochrome c oxidase subunit 7C, mitochondrial, Flotillin-1, Breast cancer type 1 susceptibility protein, Ral GTPase-activating protein subunit beta, F-box only protein 22, Glycerol-3-phosphate dehydrogenase, mitochondrial, Propionyl-CoA carboxylase beta chain, mitochondrial, Utrophin, Testis-expressed sequence 10 protein, SEC14-like protein 1, Ethylmalonyl-CoA decarboxylase, HEAT repeat-containing protein 2, 60S ribosomal protein L6, Mitochondrial dynamics protein MID51, Zinc finger protein 131, Vacuolar protein sorting-associated protein 53 homolog, Putative sodium-coupled neutral amino acid transporter 10, KN motif and ankyrin repeat domain-containing protein 2, Pyridoxal-dependent decarboxylase domain-containing protein 1, Pinin, V-type proton ATPase subunit H, Ubiquitin-conjugating enzyme E2 B, Inhibitor of nuclear factor kappa-B kinase-interacting protein, Double-strand-break repair protein rad21 homolog, PRA1 family protein 3, DEP domain-containing protein 1B, ATP-binding cassette sub-family B member 10, mitochondrial, SHC-transforming protein 1, Serine/threonine-protein phosphatase PP1-gamma catalytic subunit, Eukaryotic translation initiation factor 2 subunit 1, Anaphase-promoting complex subunit 7, TATA-binding protein-associated factor 172, 2′-5′-oligoadenylate synthase 3, LisH domain-containing protein ARMC9, Ankyrin repeat and SOCS box protein 6, DNA polymerase epsilon catalytic subunit A, Sestrin-1, V-type proton ATPase catalytic subunit A, Trinucleotide repeat-containing gene 6A protein, TNFAIP3-interacting protein 2, Phosphatidylinositol 3-kinase regulatory subunit gamma, TELO2-interacting protein 1 homolog, Leucine-rich repeat and coiled-coil domain-containing protein 1, Transmembrane emp24 domain-containing protein 9, F-box/LRR-repeat protein 5, Programmed cell death 6-interacting protein, Ribosome production factor 1, Exostosin-2, Bloom syndrome protein, U1 small nuclear ribonucleoprotein C, Transcription factor RFX3, Ubiquitin carboxyl-terminal hydrolase 34, Polymerase I and transcript release factor, Mediator of RNA polymerase II transcription subunit 12, Heterogeneous nuclear ribonucleoprotein C-like 1, Serine/threonine-protein kinase ATR, Neurochondrin, Adrenocortical dysplasia protein homolog, Ran GTPase-activating protein 1, Arfaptin-2, Pericentrin, Hermansky-Pudlak syndrome 4 protein, Choline/ethanolamine kinase, WD repeat-containing protein 3, Peroxisomal membrane protein 4, Dynactin subunit 1, AP-3 complex subunit mu-1, Alsin, RNA-binding protein 28, Zinc finger MYM-type protein 3, RNA polymerase II-associated protein 1, General transcription factor 3C polypeptide 5, EH domain-containing protein 4, Huntingtin, Set1/Ash2 histone methyltransferase complex subunit ASH2, Non-POU domain-containing octamer-binding protein, Ancient ubiquitous protein 1, Coiled-coil domain-containing protein 93, Probable ATP-dependent RNA helicase DDX27, Nuclear respiratory factor 1, Fanconi anemia group D2 protein, E3 ubiquitin-protein ligase UHRF1, Cyclic AMP-dependent transcription factor ATF-1, HEAT repeat-containing protein 5B, NmrA-like family domain-containing protein 1, Tetratricopeptide repeat protein 21B, Inositol 1,4,5-trisphosphate receptor type 1, Perilipin-2, V-type proton ATPase subunit C 1, Protein NOXP20, Short transient receptor potential channel 1, Mitochondrial import receptor subunit TOM22 homolog, AP-3 complex subunit mu-2, Malate dehydrogenase, mitochondrial, Quinone oxidoreductase, Dual specificity protein phosphatase 14, Cell division cycle and apoptosis regulator protein 1, Protein PAT1 homolog 1, Tropomyosin alpha-4 chain, 40S ribosomal protein S15a, Prefoldin subunit 4, Neurobeachin-like protein 2, E3 ubiquitin-protein ligase RNF130, Calmodulin-regulated spectrin-associated protein 1, HEAT repeat-containing protein 3, Carbohydrate sulfotransferase 14, Isochorismatase domain-containing protein 1, Rab GTPase-activating protein 1-like, Centrosomal protein of 76 kDa, Exportin-1, von Willebrand factor A domain-containing protein 8, Ras-related protein Rab-5A, MAU2 chromatid cohesion factor homolog, Kelch-like protein 24, Protein FAM171B, Protein yippee-like 1, Inhibitor of nuclear factor kappa-B kinase subunit alpha, Probable ATP-dependent RNA helicase DDX56, Uncharacterized protein C18orf8, Protein LLP homolog, AP-2 complex subunit sigma, Maestro heat-like repeat-containing protein family member 1, Nucleolar protein 9, High mobility group protein 20A, HLA class II histocompatibility antigen, DR beta 3 chain, Importin-9, Protein asunder homolog, Ribonuclease UK114, Zinc finger BED domain-containing protein 1, Tyrosine-protein kinase JAK1, Putative RNA-binding protein 15, AKT-interacting protein, Werner syndrome ATP-dependent helicase, Protein downstream neighbor of Son, Protein artemis, Adenosylhomocysteinase 2, Ligand-dependent nuclear receptor-interacting factor 1, Kelch-like protein 8, Adenosylhomocysteinase, DNA-directed RNA polymerases I, II, and Ill subunit RPABC3, Transcription factor 25, Nuclear migration protein nudC, COP9 signalosome complex subunit 1, Nucleoprotein TPR, Neutral alpha-glucosidase C, UPF0585 protein C16orf13, BTB/POZ domain-containing protein KCTD3, DBF4-type zinc finger-containing protein 2, NADH dehydrogenase [ubiquinone] iron-sulfur protein 8, mitochondrial, Protein unc-50 homolog, Vacuole membrane protein 1, SUMO-activating enzyme subunit 2, Mitotic checkpoint serine/threonine-protein kinase BUB1 beta, EKC/KEOPS complex subunit TPRKB, PRKC apoptosis WT1 regulator protein, Probable methyltransferase TARBP1, E3 ubiquitin-protein ligase HUWE1, 26S proteasome non-ATPase regulatory subunit 8, Leucine-tRNA ligase, cytoplasmic, Striatin-interacting protein 2, Zinc finger protein Pegasus, A-kinase anchor protein 10, mitochondrial, RNA polymerase II subunit A C-terminal domain phosphatase, DNA repair protein complementing XP-G cells, Protein phosphatase 1G, Interleukin-1 receptor-associated kinase-like 2, Dual specificity protein kinase CLK2, Sterol regulatory element-binding protein 2, Actin-related protein 2/3 complex subunit 4, Replication factor C subunit 5, Histone deacetylase 3, 40S ribosomal protein S10, Protein unc-93 homolog B1, Sodium- and chloride-dependent taurine transporter, Cullin-7, Kinetochore-associated protein 1, Histone deacetylase 1, Syntaxin-binding protein 5, Speriolin-like protein, Erythroid differentiation-related factor 1, Ubiquitin-conjugating enzyme E2 J2, E3 ubiquitin-protein ligase Hakai, Annexin A5, cAMP-dependent protein kinase catalytic subunit alpha, Cytochrome c, COMM domain-containing protein 2, Akirin-1, ORM1-like protein 1, Sodium channel and clathrin linker 1, Tetratricopeptide repeat protein 14, Structural maintenance of chromosomes protein 4, BCL-6 corepressor, NEDD8-activating enzyme E1 regulatory subunit, RANBP2-like and GRIP domain-containing protein 2, Mediator of RNA polymerase II transcription subunit 19, Afadin, Tubulin beta-2A chain, N-alpha-acetyltransferase 50, Origin recognition complex subunit 1, Syntaxin-binding protein 2, Abl interactor 1, FERM domain-protein containing protein 4A, 60S ribosome subunit biogenesis NIP7 homolog, Dolichol-phosphate mannosyltransferase subunit 3, Protein enabled homolog, F-actin-capping protein subunit beta, Centromere protein W, Histone H1.1, Crooked neck-like protein 1, Exportin-T, Chondroitin sulfate glucuronyltransferase, 78 kDa glucose-regulated protein, X-ray repair cross-complementing protein 6, WD and tetratricopeptide repeats protein 1, DNA replication licensing factor MCM3, Retinoblastoma-like protein 1, Alpha-2-macroglobulin receptor-associated protein, Immunoglobulin-binding protein 1, Myeloid leukemia factor 2, Histone-lysine N-methyltransferase NSD3, Secernin-1, DNA dC→dU-editing enzyme APOBEC-3D, Syntaxin-18, WD repeat-containing protein 91, Tubulin-specific chaperone A, MAP3K12-binding inhibitory protein 1, Spectrin alpha chain, non-erythrocytic 1, Transcriptional regulator ATRX, Nuclear receptor corepressor 1, Protein kinase C delta type, ATP-dependent RNA helicase DDX42, E3 ubiquitin-protein ligase TTC3, RAB6A-GEF complex partner protein 1, B-cell receptor-associated protein 31, Poly(A)-specific ribonuclease PARN, Translation initiation factor elF-2B subunit epsilon, RNA-binding protein 8A, Pre-mRNA-processing factor 6, Cleavage and polyadenylation specificity factor subunit 7, 39S ribosomal protein L20, mitochondrial, Melanoma-associated antigen F1, Lysine-specific demethylase 2B, Translation factor GUF1, mitochondrial, V-type proton ATPase subunit E 1, 60S ribosomal protein L9, Actin-related protein 2/3 complex subunit 5, Prefoldin subunit 6, Serine hydroxymethyltransferase, mitochondrial, Interferon alpha-inducible protein 6, Engulfment and cell motility protein 2, Transcription initiation factor IIE subunit beta, F-box only protein 21, Cytochrome c oxidase subunit 7A-related protein, mitochondrial, Mitochondrial ubiquitin ligase activator of NFKB 1, NAD(P)H dehydrogenase [quinone] 1, Lysine-specific demethylase 5D, Major facilitator superfamily domain-containing protein 12, Casein kinase II subunit beta, Sec1 family domain-containing protein 1, Receptor expression-enhancing protein 3, Kinetochore protein Nuf2, E3 ubiquitin-protein ligase makorin-1, Probable ATP-dependent RNA helicase DHX37, Exosome complex component RRP41, Angio-associated migratory cell protein, Trans-3-hydroxy-L-proline dehydratase, Helicase with zinc finger domain 2, Fanconi anemia group I protein, Pescadillo homolog, Nucleolar and spindle-associated protein 1, Retinoblastoma-associated protein, DNA repair protein XRCC2, Derlin-1, DNA (cytosine-5)-methyltransferase 3A, Putative rhophilin-2-like protein RHPN2P1, TRAF2 and NCK-interacting protein kinase, Nucleoside diphosphate kinase 6, Methylsterol monooxygenase 1, Protein HIRA, Probable phospholipid-transporting ATPase IF, Integrator complex subunit 12, Signal peptidase complex catalytic subunit SEC11C, Sororin, Histone H2B type 1-K, Integrator complex subunit 8, Toll-interacting protein, Amyloid protein-binding protein 2, 182 kDa tankyrase-1-binding protein, Cytoplasmic FMR1-interacting protein 2, Heat shock protein 105 kDa, Chromodomain-helicase-DNA-binding protein 2, 26S protease regulatory subunit 10B, Zinc finger MYND domain-containing protein 11, General transcription factor IIH subunit 5, Ubiquitin carboxyl-terminal hydrolase 19, Serrate RNA effector molecule homolog, Ras GTPase-activating protein-binding protein 2, Heat shock 70 kDa protein 4, Coatomer subunit beta, NADH dehydrogenase [ubiquinone] 1 alpha subcomplex subunit 13, DDB1- and CUL4-associated factor 10, Negative elongation factor E, Coiled-coil domain-containing protein 66, E3 ubiquitin-protein ligase MGRN1, WD repeat-containing protein 36, Unconventional myosin-Ie, PH domain leucine-rich repeat-containing protein phosphatase 1, Paxillin, Kinesin-like protein KIF21A, 2′,3′-cyclic-nucleotide 3′-phosphodiesterase, Protein FAM192A, Proteasome subunit beta type-4, Sorting nexin-14, Krueppel-like factor 6, Tropomodulin-3, Nuclear receptor-binding protein, Nitrogen permease regulator 2-like protein, OTU domain-containing protein 5, Histone-binding protein RBBP4, Sorting nexin-24, Poly(rC)-binding protein 2, Vacuolar fusion protein CCZ1 homolog, ATP-dependent RNA helicase DDX19B, Elongation factor 1-gamma, Adenylate cyclase type 3, MICOS complex subunit MIC19, Ferritin light chain, Glutaredoxin-3, Pre-B-cell leukemia transcription factor 3, AP-2 complex subunit alpha-1, 40S ribosomal protein S24, Enhancer of mRNA-decapping protein 3, Neuroblastoma-amplified sequence, Protein phosphatase 1 regulatory subunit 7, Exosome component 10, Cyclin-dependent kinase 14, Translocation protein SEC62, Constitutive coactivator of peroxisome proliferator-activated receptor gamma, Protein SCAF11, Rho GTPase-activating protein 21, Arfaptin-1, AP-2 complex subunit mu, Ubiquitin carboxyl-terminal hydrolase 36, Glutathione S-transferase kappa 1, Kelch repeat and BTB domain-containing protein 7, Calcium homeostasis endoplasmic reticulum protein, RNA polymerase II-associated protein 3, Zinc finger E-box-binding homeobox 1, Dynein light chain 1, cytoplasmic, 39S ribosomal protein L2, mitochondrial, Fidgetin-like protein 1, WD repeat-containing protein 46, Exosome complex component RRP40, Ubiquinol-cytochrome-c reductase complex assembly factor 1, Antizyme inhibitor 1, Transketolase, Carbohydrate sulfotransferase 10, LanC-like protein 1, Histone H2A.V, E3 ubiquitin-protein ligase TRIP12, Unconventional myosin-VI, Integrin-linked protein kinase, Serine/threonine-protein kinase WNK1, Centromere protein M, Ankyrin repeat family A protein 2, Little elongation complex subunit 1, Deoxynucleoside triphosphate triphosphohydrolase SAMHD1, Lanosterol 14-alpha demethylase, NADH dehydrogenase [ubiquinone] 1 beta subcomplex subunit 4, TFIIH basal transcription factor complex helicase XPD subunit, Thymidine kinase, cytosolic, Peroxiredoxin-6, LYR motif-containing protein 1, SWI/SNF complex subunit SMARCC2, Lysine-specific histone demethylase 1B, Induced myeloid leukemia cell differentiation protein Mcl-1, V-type proton ATPase 16 kDa proteolipid subunit, HLA class II histocompatibility antigen, DP alpha 1 chain, ATP synthase subunit g, mitochondrial, Interferon regulatory factor 9, Cleavage and polyadenylation specificity factor subunit 2, Sentrin-specific protease 6, Zinc finger CCCH domain-containing protein 4, Squalene monooxygenase, RNA cytidine acetyltransferase, Ribonuclease inhibitor, UDP-glucose: glycoprotein glucosyltransferase 2, Bifunctional apoptosis regulator, SWI/SNF-related matrix-associated actin-dependent regulator of chromatin subfamily E member 1, Zinc finger protein 302, Phosphatidylinositol 4-phosphate 5-kinase type-1 alpha, Transmembrane emp24 domain-containing protein 10, Phosphatidylinositol-binding clathrin assembly protein, DnaJ homolog subfamily B member 14, Ezrin, Moesin, Transcription elongation factor B polypeptide 2, Small kinetochore-associated protein, RANBP2-like and GRIP domain-containing protein 1, Mitochondrial fission 1 protein, Spliceosome RNA helicase DDX39B, Activating signal cointegrator 1 complex subunit 2, Fibroblast growth factor receptor 1, 60S ribosomal protein L7-like 1, Tyrosine-protein kinase JAK2, Replication factor C subunit 2, SAGA-associated factor 29, B-cell linker protein, SWI/SNF-related matrix-associated actin-dependent regulator of chromatin subfamily A member 5, Myc proto-oncogene protein, Translationally-controlled tumor protein, Baculoviral IAP repeat-containing protein 2, Serine/threonine-protein kinase Chk1, 40S ribosomal protein S9, Galactosylgalactosylxylosylprotein 3-beta-glucuronosyltransferase 3, BRISC and BRCA1-A complex member 1, SWI/SNF-related matrix-associated actin-dependent regulator of chromatin subfamily D member 3, Tyrosine-tRNA ligase, cytoplasmic, Target of rapamycin complex 2 subunit MAPKAP1, Activator of 90 kDa heat shock protein ATPase homolog 1, Class E basic helix-loop-helix protein 40, 60S ribosomal protein L27a, Cilia- and flagella-associated protein 20, Polyribonucleotide 5′-hydroxyl-kinase Clp1, Elongator complex protein 3, Nodal modulator 2, Low density lipoprotein receptor adapter protein 1, Protein FAM136A, Selenoprotein T, cAMP-dependent protein kinase catalytic subunit beta, Small EDRK-rich factor 2, A-kinase anchor protein 13, Renin receptor, Chromosome alignment-maintaining phosphoprotein 1, Mediator of RNA polymerase II transcription subunit 27, Zinc finger and BTB domain-containing protein 40, Protein FAM3C, Pseudouridylate synthase 7 homolog, Cyclin-dependent kinase 11A, Cyclin-dependent kinase 11B, Zinc finger FYVE domain-containing protein 16, Cyclic AMP-dependent transcription factor ATF-6 beta, Bridging integrator 3, 26S proteasome non-ATPase regulatory subunit 11, RNA-binding protein 43, Serine/threonine-protein kinase Chk2, 60S ribosomal protein L13a, G2/mitotic-specific cyclin-B2, Tryptophan-tRNA ligase, mitochondrial, B-lymphocyte antigen CD19, Astrotactin-2, Rab GDP dissociation inhibitor beta, Unconventional myosin-Id, Nipped-B-like protein, E3 ubiquitin-protein ligase RAD18, Motile sperm domain-containing protein 2, Microtubule-associated protein RP/EB family member 1, DNA replication licensing factor MCM2, Methionine synthase reductase, Leucine-rich repeat-containing protein 58, Proteasome assembly chaperone 2, Neuroguidin, 40S ribosomal protein S7, PRELI domain containing protein 3B, Cyclin-T1, Dolichyl-diphosphooligosaccharide-protein glycosyltransferase 48 kDa subunit, Large proline-rich protein BAG6, Myosin-7B, DnaJ homolog subfamily B member 5, Nuclear factor interleukin-3-regulated protein, Ras-related protein Rab-7a, Fizzy-related protein homolog, CUGBP Elav-like family member 2, Serine/threonine-protein kinase PAK 2, Serine/threonine/tyrosine-interacting-like protein 1, Monocarboxylate transporter 7, Oxysterol-binding protein-related protein 9, DnaJ homolog subfamily A member 1, Copine-8, Forkhead box protein K2, RNA polymerase II subunit A C-terminal domain phosphatase SSU72, Alpha-galactosidase A, Mis18-binding protein 1, Desmin, DNA-(apurinic or apyrimidinic site) lyase, tRNA (cytosine (34)-C(5))-methyltransferase, Condensin-2 complex subunit H2, Protein C10, TRAF3-interacting JNK-activating modulator, Eukaryotic translation initiation factor 3 subunit E, TCF3 fusion partner, Inorganic pyrophosphatase, LBH domain-containing protein 1, NADH dehydrogenase [ubiquinone] 1 beta subcomplex subunit 11, mitochondrial, Ubiquilin-2, Gamma-taxilin, Di-N-acetylchitobiase, Sorting nexin-17, Ras-related GTP-binding protein A, Tropomyosin alpha-3 chain, Tetratricopeptide repeat protein 39C, Aurora kinase A, Histone H2B type 2-E, Sorbitol dehydrogenase, Serine/threonine-protein kinase Nek6, U3 small nucleolar ribonucleoprotein protein MPP10, 60S ribosomal protein L31, Importin-8, Replication factor C subunit 4, Putative Polycomb group protein ASXL1, Protein PML, DNA-directed RNA polymerases I, II, and Ill subunit RPABC2, Translational activator GCN1, Zinc finger protein 195, Fragile X mental retardation syndrome-related protein 1, Dual specificity tyrosine-phosphorylation-regulated kinase 1A, Integrator complex subunit 1, RNA pseudouridylate synthase domain-containing protein 4, Phosducin-like protein 3, Golgi phosphoprotein 3, Guanine nucleotide-binding protein G(I)/G(S)/G(O) subunit gamma-5, Cartilage-associated protein, Ubiquitin-associated domain-containing protein 2, Heterogeneous nuclear ribonucleoprotein Q, Semaphorin-7A, Pentatricopeptide repeat domain-containing protein 3, mitochondrial, Egl nine homolog 2, Parkinson disease 7 domain-containing protein 1, Nuclear pore complex protein Nup98-Nup96, Glycogen synthase kinase-3 beta, BTB/POZ domain-containing protein KCTD20, Tubulin gamma-1 chain, LYR motif-containing protein 2, NF-kappa-B inhibitor beta, Kinesin-like protein KIF18B, Histone deacetylase 5, HCLS1-associated protein X-1, 40S ribosomal protein S4, X isoform, E3 ubiquitin-protein ligase MARCH6, Kelch-like protein 20, Terminal uridylyltransferase 4, TNF receptor-associated factor 1, DnaJ homolog subfamily B member 12, E3 ubiquitin-protein ligase UBR5, DNA methyltransferase 1-associated protein 1, Zinc finger MIZ domain-containing protein 1, Apoptosis inhibitor 5, 39S ribosomal protein L55, mitochondrial, Phosphate carrier protein, mitochondrial, Formin-binding protein 1, F-box only protein 33, Protein-lysine N-methyltransferase EEF2KMT, Growth factor receptor-bound protein 2, 60S ribosomal protein L23, Neuroepithelial cell-transforming gene 1 protein, Isoleucine-tRNA ligase, cytoplasmic, Uncharacterized protein KIAA1551, 60S ribosomal protein L30, Protein BRICK1, Protein PRRC2C, Cytoskeleton-associated protein 2-like, Cyclin-dependent kinase 12, Cold shock domain-containing protein E1, Eukaryotic translation initiation factor 4H, Cell division cycle 5-like protein, Biogenesis of lysosome-related organelles complex 1 subunit 1, Beta-catenin-like protein 1, 60S ribosomal protein L37a, Peroxisomal multifunctional enzyme type 2, Ubiquitin-40S ribosomal protein S27a, RAD50-interacting protein 1, Dynamin-binding protein, Diphosphoinositol polyphosphate phosphohydrolase 1, Diphosphoinositol polyphosphate phosphohydrolase 2, Coatomer subunit beta′, Plakophilin-4, tRNA pseudouridine synthase-like 1, Protein ERGIC-53, F-box only protein 3, ATP synthase mitochondrial F1 complex assembly factor 1, tRNA (guanine (26)-N(2))-dimethyltransferase, Poly [ADP-ribose] polymerase 3, Drebrin-like protein, YEATS domain-containing protein 4, Sorting nexin-3, Copper transport protein ATOX1, U3 small nucleolar RNA-associated protein 14 homolog A, Acetolactate synthase-like protein, Inosine-5′-monophosphate dehydrogenase 2, Transmembrane protein 107, Mitochondrial import receptor subunit TOM5 homolog, Ribosome biogenesis protein WDR12, WD repeat-containing protein 74, Centrosomal protein of 104 kDa, Probable E3 ubiquitin-protein ligase TRIM8, UPF0769 protein C21orf59, E3 ubiquitin-protein ligase Itchy homolog, Ubiquilin-1, Ferritin heavy chain, Single-stranded DNA-binding protein 2, PERQ amino acid-rich with GYF domain-containing protein 2, Transcriptional adapter 1, Zinc finger protein 296, UV-stimulated scaffold protein A, WD repeat-containing protein 63, Programmed cell death protein 6, WD repeat-containing protein 62, Beta-parvin, DnaJ homolog subfamily A member 2, Protein sel-1 homolog 1, HLA class II histocompatibility antigen, DRB1-11 beta chain, Retinoic acid receptor alpha, Vacuolar protein sorting-associated protein 51 homolog, Misshapen-like kinase 1, Arginine-glutamic acid dipeptide repeats protein, Manganese-transporting ATPase 13A1, Myotubularin-related protein 10, Double-stranded RNA-specific adenosine deaminase, Adenylate cyclase type 6, Cytochrome c oxidase subunit 6C, N-alpha-acetyltransferase 30, COP9 signalosome complex subunit 2, Cell division cycle-associated protein 2, Zinc finger protein 697, Protection of telomeres protein 1, Uridine diphosphate glucose pyrophosphatase, Ubiquitin carboxyl-terminal hydrolase 48, RNA-binding protein EWS, Immediate early response gene 5 protein, PCI domain-containing protein 2, MAP7 domain-containing protein 1, 60S ribosomal protein L18, WD repeat and coiled-coil-containing protein C2orf44, Kanadaptin, Double-stranded RNA-binding protein Staufen homolog 2, F-box only protein 11, E3 ubiquitin-protein ligase CHFR, Heterogeneous nuclear ribonucleoprotein U-like protein 2, Cathepsin Z, MOB kinase activator 1A, Lysine-specific demethylase 5C, Lysine-specific demethylase 5A, Probable cation-transporting ATPase 13A4, Sentrin-specific protease 5, SRR1-like protein, Epidermal growth factor receptor kinase substrate 8, Cytoplasmic dynein 1 light intermediate chain 1, Zinc finger protein 619, Fatty acyl-CoA reductase 1, NHP2-like protein 1, RNA-binding protein 27, RNA-binding protein 26, Geranylgeranyl pyrophosphate synthase, Myosin phosphatase Rho-interacting protein, Protein kinase C delta-binding protein, Histidine triad nucleotide-binding protein 1, Interferon-related developmental regulator 1, GPI mannosyltransferase 3, Ubiquitin-like protein 7, Exportin-6, Male-specific lethal 3 homolog, Flap endonuclease 1, Elongation factor 1-alpha 1, COP9 signalosome complex subunit 3, HIG1 domain family member 2A, mitochondrial, 3-phosphoinositide-dependent protein kinase 1, Sodium-coupled neutral amino acid transporter 2, Intraflagellar transport protein 81 homolog, Cleavage and polyadenylation specificity factor subunit 3, Centrosomal protein of 57 kDa, Interferon-stimulated gene 20 kDa protein, DNA-directed RNA polymerase II subunit RPB2, Protein kintoun, Leucine-rich repeat-containing protein 20, Probable 18S rRNA (guanine-N(7))-methyltransferase, Heterogeneous nuclear ribonucleoprotein A3, Transmembrane protein 263, Glutathione S-transferase P, Adenylosuccinate lyase, ER membrane protein complex subunit 1, JmjC domain-containing protein 8, AN1-type zinc finger protein 5, Cullin-3, MICOS complex subunit MIC27, Selenoprotein H, Centromere protein H, Beta-hexosaminidase subunit alpha, Zinc phosphodiesterase ELAC protein 2, BRCA1-A complex subunit BRE, SRSF protein kinase 1, Insulin-like growth factor 2 mRNA-binding protein 2, Coiled-coil domain-containing protein 85B, Centrosomal protein of 55 kDa, COMM domain-containing protein 4, 14-3-3 protein theta, Armadillo repeat-containing X-linked protein 3, Uncharacterized protein C6orf226, DNA-directed RNA polymerase I subunit RPA1, Syntaxin-binding protein 1, Small nuclear ribonucleoprotein Sm D2, T-complex protein 1 subunit delta, Nucleophosmin, Serine/arginine repetitive matrix protein 2, PC4 and SFRS1-interacting protein, Nardilysin (N-arginine dibasic convertase), isoform CRA_d, Ragulator complex protein LAMTOR4, Golgin subfamily B member 1, E3 SUMO-protein ligase PIAS3, Prohibitin, Maspardin, Chromodomain-helicase-DNA-binding protein 6, V-type proton ATPase subunit D, Taperin, Coronin-1C, Importin subunit alpha-4, Pre-mRNA-processing factor 19, Single-stranded DNA-binding protein, mitochondrial, Vacuolar protein sorting-associated protein 33A, STAGA complex 65 subunit gamma, F-box only protein 38, Protein C-ets-1, DNA repair endonuclease XPF, Clathrin light chain A, Inhibitor of growth protein 4, Protein zer-1 homolog, Apolipoprotein L2, Serine/Arginine-related protein 53, Transcription initiation factor IIB, Ras suppressor protein 1, V-type proton ATPase 116 kDa subunit a isoform 1, Scavenger receptor class B member 1, Importin-11, Periodic tryptophan protein 1 homolog, Sequestosome-1, DNA replication licensing factor MCM6, Lupus La protein, 40S ribosomal protein S2, DNA-directed RNA polymerases I, II, and III subunit RPABC4, Dual specificity protein kinase CLK3, Mitochondrial import inner membrane translocase subunit TIM50, Cyclin-dependent kinase 7, Interleukin enhancer-binding factor 3, Poly(U)-binding-splicing factor PUF60, Fc receptor-like A, Heterogeneous nuclear ribonucleoprotein H, Nucleolar complex protein 2 homolog, DNA topoisomerase 1, Eukaryotic initiation factor 4A-II, Inner centromere protein, ZW10 interactor, Epsilon-sarcoglycan, Protein disulfide-isomerase A6, Transcription factor E2F7, GDP-L-fucose synthase, Runt-related transcription factor 3, Chromodomain-helicase-DNA-binding protein 4, SRA stem-loop-interacting RNA-binding protein, mitochondrial, Poly [ADP-ribose] polymerase 9, Zinc finger protein 451, Coatomer subunit zeta-1, Eukaryotic translation initiation factor 4B, Death-associated protein kinase 3, Leucine-rich repeat-containing protein 47, Guanylate-binding protein 1, Actin-related protein 2/3 complex subunit 1B, Proteasome maturation protein, Probable ATP-dependent RNA helicase DDX41, General vesicular transport factor p115, SH2 domain-containing protein 3C, Polyadenylate-binding protein-interacting protein 1, Histone H3.1, Probable ATP-dependent RNA helicase DDX6, Poly(rC)-binding protein 1, Steroid hormone receptor ERR1, Cytoskeleton-associated protein 4, Integrin beta-7, Eukaryotic translation initiation factor 3 subunit A, F-box only protein 7, GPN-loop GTPase 2, Melanoma-associated antigen 12, Basic leucine zipper and W2 domain-containing protein 2, Stomatin-like protein 3, Condensin complex subunit 1, Septin-11, Glutamine-dependent NAD (+) synthetase, Mitogen-activated protein kinase kinase kinase 5, Ubiquitin-like modifier-activating enzyme 1, Disco-interacting protein 2 homolog B, HLA class I histocompatibility antigen, A-24 alpha chain, Integrator complex subunit 2, UPF0428 protein CXorf56, MMS19 nucleotide excision repair protein homolog, AF4/FMR2 family member 4, Ras-related C3 botulinum toxin substrate 1, Bone morphogenetic protein receptor type-1B, Multiple epidermal growth factor-like domains protein 8, Keratin, type II cytoskeletal 1, Tumor suppressor candidate 3, Rho GTPase-activating protein 24, Nuclear nucleic acid-binding protein C1D, Pecanex-like protein 1, Melanoma antigen preferentially expressed in tumors, RNA exonuclease 4, YTH domain-containing family protein 2, Probable bifunctional methylenetetrahydrofolate dehydrogenase/cyclohydrolase 2, HLA class I histocompatibility antigen, A-29 alpha chain, Ubiquitin-like protein ISG15, N-acetyltransferase 8, Protein prune homolog 2, Phosphatidylinositol 4,5-bisphosphate 3-kinase catalytic subunit delta isoform, Glutathione peroxidase 1, Dermokine, PRELI domain-containing protein 1, mitochondrial, Putative WAS protein family homolog 3, Mitochondrial import inner membrane translocase subunit Tim23, SLAM family member 6, Probable ubiquitin carboxyl-terminal hydrolase FAF-Y, Annexin A3, Microtubule-associated protein 1B, Glyoxylate reductase/hydroxypyruvate reductase, 40S ribosomal protein S4, Y isoform 1, Probable ATP-dependent RNA helicase DDX4, EH domain-containing protein 2, Ubiquitin carboxyl-terminal hydrolase 45, Trinucleotide repeat-containing gene 18 protein, Aldo-keto reductase family 1 member C1, Protein phosphatase 1 regulatory subunit 35, Frizzled-2, E3 ubiquitin-protein ligase HECTD1, V-type proton ATPase subunit S1, Peroxisomal membrane protein PEX16, Pro-interleukin-16, Amidophosphoribosyltransferase, Hsc70-interacting protein, YEATS domain-containing protein 2, Protein arginine N-methyltransferase 1, Cyclic AMP-responsive element-binding protein 3-like protein 2, Solute carrier family 25 member 46, General transcription factor II-I, 40S ribosomal protein S30, 2′-5′-oligoadenylate synthase 1, NADH dehydrogenase [ubiquinone] 1 alpha subcomplex subunit 1, Reticulocalbin-1, S-adenosylmethionine synthase isoform type-1, Membralin, Dynamin-like 120 kDa protein, mitochondrial, Growth hormone-inducible transmembrane protein, Heat shock-related 70 kDa protein 2, Eukaryotic translation initiation factor 3 subunit B, Ras-specific guanine nucleotide-releasing factor 1, Voltage-dependent anion-selective channel protein 2, Protein unc-13 homolog D, Golgi apparatus protein 1, Eukaryotic translation initiation factor 6, Probable ribonuclease ZC3H12D, Ragulator complex protein LAMTOR1, Ribonucleoside-diphosphate reductase subunit M2 B, Zinc finger protein 638, B- and T-lymphocyte attenuator, CD44 antigen, Cordon-bleu protein-like 1, C—C chemokine receptor type 7, Ragulator complex protein LAMTOR3, IgG receptor FcRn large subunit p51, Serine/threonine-protein kinase LATS1, E3 ubiquitin-protein ligase CHIP, T-cell activation Rho GTPase-activating protein, Platelet endothelial cell adhesion molecule, TBC1 domain family member 22A, Endoplasmic reticulum resident protein 44, Lipolysis-stimulated lipoprotein receptor, Glucose-6-phosphate isomerase, Cystatin-C, Ras-related protein Rab-11A, Cadherin EGF LAG seven-pass G-type receptor 1, Tumor protein p53-inducible protein 11, Short-chain dehydrogenase/reductase 3, Probable ribosome biogenesis protein RLP24, Ceruloplasmin, Ceramide glucosyltransferase, Dystrophin, Uncharacterized protein CXorf21, MyoD family inhibitor domain-containing protein, Obscurin-like protein 1, Beta-1,4-galactosyltransferase 1, Plasma membrane calcium-transporting ATPase 1, Vesicle-associated membrane protein 3, Protein CDV3 homolog, Peroxiredoxin-1, Methyltransferase-like protein 7A, HLA class II histocompatibility antigen, DO beta chain, Receptor-type tyrosine-protein phosphatase alpha, ATP-binding cassette sub-family A member 6, 14-3-3 protein beta/alpha, Glycosyltransferase 8 domain-containing protein 1, Serine incorporator 3, NACHT, LRR and PYD domains-containing protein 2, Baculoviral IAP repeat-containing protein 5, Alpha-mannosidase 2, DnaJ homolog subfamily C member 5, Fas apoptotic inhibitory molecule 3, HLA class II histocompatibility antigen, DM alpha chain, Heterogeneous nuclear ribonucleoprotein A1-like 2, Transcription regulator protein BACH2, Zinc finger protein 107, Probable ATP-dependent RNA helicase DDX46, Kynureninase, Interleukin-4 receptor subunit alpha, Polypeptide N-acetylgalactosaminyltransferase 1, Fibromodulin, Pericentriolar material 1 protein, 60S ribosomal protein L3, Glycosylphosphatidylinositol anchor attachment 1 protein, AT-rich interactive domain-containing protein 5B, Carbohydrate sulfotransferase 2, Kelch-like ECH-associated protein 1, DmX-like protein 1, 14-3-3 protein zeta/delta, Plexin-B3, Elongation factor Tu, mitochondrial, Protocadherin-9, Monoglyceride lipase, Afadin- and alpha-actinin-binding protein, Platelet glycoprotein 4, Transmembrane protein C16orf54, Cullin-associated NEDD8-dissociated protein 1, Proline and serine-rich protein 2, Pro-cathepsin H, RUN and FYVE domain-containing protein 1, Neurofibromin, Leukosialin, Arrestin domain-containing protein 4, TP53-target gene 5 protein, Vitamin D-binding protein, Tumor necrosis factor receptor superfamily member 13C, Phosphate-regulating neutral endopeptidase, Interleukin-1 beta, Interleukin-17 receptor A, Putative heat shock 70 kDa protein 7, Cytochrome b ascorbate-dependent protein 3, Vesicle-associated membrane protein 1, Ras GTPase-activating protein nGAP, BRCA2 and CDKN1A-interacting protein, Rab GTPase-activating protein 1, Melanoma-associated antigen C2, C—C motif chemokine 3, Ig gamma-1 chain C region, Serum albumin, Basement membrane-specific heparan sulfate proteoglycan core protein, Protein phosphatase 1M, Guanine nucleotide-binding protein G(I)/G(S)/G(T) subunit beta-1, HLA class I histocompatibility antigen, A-23 alpha chain, Zinc finger protein ZPR1, Cytochrome c oxidase assembly factor 3 homolog, mitochondrial, Arf-GAP with Rho-GAP domain, ANK repeat and PH domain-containing protein 1, Keratin, type I cytoskeletal 9, Anion exchange protein 2, Tumor susceptibility gene 101 protein, A-kinase anchor protein 1, mitochondrial, 4-hydroxyphenylpyruvate dioxygenase-like protein, Nucleosome-remodeling factor subunit BPTF, Centrin-3, Uridine-cytidine kinase 2, Isovaleryl-CoA dehydrogenase, mitochondrial, Alkyldihydroxyacetonephosphate synthase, peroxisomal, Polyadenylate-binding protein 4, Polyadenylate-binding protein 3, Bromodomain adjacent to zinc finger domain protein 2B, Protein unc-45 homolog A, Iron-sulfur cluster assembly 2 homolog, mitochondrial, ATP-dependent RNA helicase DHX36, Multidrug resistance protein 1, WD repeat-containing protein 11, Serine-rich coiled-coil domain-containing protein 2, Protein KRI1 homolog, Centrosomal protein of 192 kDa, Zinc finger protein 829, Protein kinase C-binding protein 1, AT-rich interactive domain-containing protein 1A, Msx2-interacting protein, Long-chain-fatty-acid-CoA ligase 1, Intercellular adhesion molecule 3, Treacle protein, Cytochrome c oxidase subunit 7A2, mitochondrial, HLA class I histocompatibility antigen, Cw-5 alpha chain, HLA class I histocompatibility antigen, B-55 alpha chain, Dihydropyrimidinase-related protein 2, Deoxyuridine 5′-triphosphate nucleotidohydrolase, mitochondrial, Translocon-associated protein subunit alpha, Endoplasmic reticulum resident protein 29, Lysosomal alpha-glucosidase, Armadillo repeat-containing protein 8, Pre-rRNA-processing protein TSR1 homolog, Protein FAM98B, 40S ribosomal protein S28, Rab GDP dissociation inhibitor alpha, Lysosome-associated membrane glycoprotein 2, Menin, Uncharacterized protein C1orf131, Protein MON2 homolog, Major facilitator superfamily domain-containing protein 10, Protein CNPPD1, E3 ubiquitin-protein ligase MYCBP2, NEDD4 family-interacting protein 1, Inositol hexakisphosphate kinase 2, Translocon-associated protein subunit delta, Cleavage and polyadenylation specificity factor subunit 5, Zinc finger protein 281, Calpain-1 catalytic subunit, Copine-1, Ornithine decarboxylase antizyme 1, ER degradation-enhancing alpha-mannosidase-like protein 1, Nuclear envelope integral membrane protein 1, ER membrane protein complex subunit 4, 60S ribosomal protein L17, Charged multivesicular body protein 2a, Pre-mRNA cleavage complex 2 protein Pcf11, Myosin-7, NADH dehydrogenase [ubiquinone] 1 beta subcomplex subunit 5, mitochondrial, Protein diaphanous homolog 3, Cytochrome b-c1 complex subunit 8, Intron-binding protein aquarius, Serine/threonine-protein kinase 38, 39S ribosomal protein L43, mitochondrial, Protein diaphanous homolog 1, 60S ribosomal protein L37, Vacuolar protein sorting-associated protein 4A, COMM domain-containing protein 3, POTE ankyrin domain family member E, TAR DNA-binding protein 43, Hemoglobin subunit delta, Ubiquitin-conjugating enzyme E2 D2, CDK5 regulatory subunit-associated protein 1, Nuclear export mediator factor NEMF, Late secretory pathway protein AVL9 homolog, Elongation factor 1-beta, Poly(A) RNA polymerase GLD2, Little elongation complex subunit 2, Modulator of apoptosis 1, Zinc finger protein 24, G1/S-specific cyclin-E2, Signal peptidase complex subunit 1, Lon protease homolog, mitochondrial, Deoxynucleotidyltransferase terminal-interacting protein 1, Retinoblastoma-like protein 2, Cullin-4B, DDB1- and CUL4-associated factor 8, Zyxin, Protein SDA1 homolog, Muscleblind-like protein 3, U6 snRNA-associated Sm-like protein LSm7, RuvB-like 1, Calcium-binding protein 39-like, Small subunit processome component 20 homolog, Mitochondrial-processing peptidase subunit alpha, DNA ligase 1, Gamma-aminobutyric acid receptor-associated protein-like 1, Translocating chain-associated membrane protein 1, NADH dehydrogenase [ubiquinone] iron-sulfur protein 5, Heme oxygenase 2, WD repeat-containing protein 35, NADH dehydrogenase [ubiquinone] 1 alpha subcomplex subunit 12, Nuclear factor erythroid 2-related factor 3, Rho GTPase-activating protein 1, Tubulin alpha-1C chain, Sorting nexin-4, CWF19-like protein 1, Methionine-tRNA ligase, cytoplasmic, Nuclease-sensitive element-binding protein 1, pre-mRNA 3′ end processing protein WDR33, Fatty acid desaturase 2, Surfeit locus protein 4, Protein BIVM-ERCC5, Interferon-induced helicase C domain-containing protein 1, Suppressor of fused homolog, Astrocytic phosphoprotein PEA-15, Protein ELYS, Solute carrier family 23 member 2, Splicing factor 3B subunit 5, Lymphokine-activated killer T-cell-originated protein kinase, Signal transducer and activator of transcription 2, Zinc finger protein 280C, Peroxisomal acyl-coenzyme A oxidase 3, Oxidative stress-induced growth inhibitor 2, Iron-responsive element-binding protein 2, StAR-related lipid transfer protein 7, mitochondrial, F-actin-capping protein subunit alpha-2, Mitochondrial folate transporter/carrier, Protein-lysine N-methyltransferase METTL10, Cytochrome c oxidase subunit 4 isoform 1, mitochondrial, Guanine nucleotide-binding protein-like 3-like protein, Rho-related BTB domain-containing protein 1, Pre-mRNA-splicing factor SPF27, Serine/arginine-rich splicing factor 1, Ribosome biogenesis protein BMS1 homolog, BRCA1-associated protein, Lipopolysaccharide-induced tumor necrosis factor-alpha factor, TraB domain-containing protein, Phosphatidylinositol 4-kinase alpha, Microsomal glutathione S-transferase 3, Prolyl endopeptidase, Vacuolar protein sorting-associated protein 41 homolog, GTPase-activating protein and VPS9 domain-containing protein 1, 26S proteasome non-ATPase regulatory subunit 4, Protein SDE2 homolog, ADP-ribosylation factor 5, Regulation of nuclear pre-mRNA domain-containing protein 2, ADP/ATP translocase 3, 60S ribosomal protein L36, Myotrophin, Protein PRRC2A, NSFL1 cofactor p47, Interferon regulatory factor 2-binding protein 1, Serine/threonine-protein kinase 4, S-formylglutathione hydrolase, E3 ubiquitin/ISG15 ligase TRIM25, Omega-amidase NIT2, COP9 signalosome complex subunit 8, Asparagine-tRNA ligase, cytoplasmic, Glucose-6-phosphate 1-dehydrogenase, Transgelin-2, Malignant T-cell-amplified sequence 1, Synaptic vesicle membrane protein VAT-1 homolog, Calnexin, Parafibromin, Transcription factor 12, Extended synaptotagmin-1, Spectrin beta chain, non-erythrocytic 4, COX assembly mitochondrial protein 2 homolog, Lymphocyte cytosolic protein 2, DNA polymerase epsilon subunit 3, Sorting nexin-1, BAG family molecular chaperone regulator 3, Beta-enolase, RNA-binding protein 4, Destrin, Eukaryotic translation initiation factor 1A, Y-chromosomal, 5′-3′ exoribonuclease 2, Nucleoporin SEH1, Reticulon-4, 26S protease regulatory subunit 6A, Heat shock 70 kDa protein 4L, Cytoskeleton-associated protein 2, Coiled-coil domain-containing protein 124, Serine-threonine kinase receptor-associated protein, 26S proteasome non-ATPase regulatory subunit 12, Ataxin-3, Polyglutamine-binding protein 1, Transcriptional repressor p66-alpha, Paired amphipathic helix protein Sin3a, Ribose-5-phosphate isomerase, Transmembrane and coiled-coil domain-containing protein 1, Dynein light chain roadblock-type 1, Rho guanine nucleotide exchange factor 1, Isocitrate dehydrogenase [NADP] cytoplasmic, Trifunctional enzyme subunit alpha, mitochondrial, Cleavage stimulation factor subunit 2, Telomeric repeat-binding factor 2-interacting protein 1, RNA-binding protein FUS, Far upstream element-binding protein 3, TATA-binding protein-associated factor 2N, Prosaposin, Myb-binding protein 1A, Barrier-to-autointegration factor, Signal recognition particle subunit SRP68, Protein FAM219A, Tripeptidyl-peptidase 1, HLA class I histocompatibility antigen, B-38 alpha chain, Proteasome subunit beta type-7, Neudesin, Tubulin beta-6 chain, Actin-related protein 2/3 complex subunit 3, Solute carrier family 35 member F5, Myoferlin, HLA class I histocompatibility antigen, B-44 alpha chain, Fructose-bisphosphate aldolase B, Neutral cholesterol ester hydrolase 1, FERM domain-containing protein 6, Cyclic AMP-dependent transcription factor ATF-4, Transcription factor AP-1, Growth arrest and DNA damage-inducible protein GADD45 alpha, Probable C-mannosyltransferase DPY19L4, Integrin alpha-3, Protein transport protein Sec61 subunit alpha isoform 2, Rho GTPase-activating protein 7, Exosome complex component RRP42, WD repeat-containing protein 48, Protein LDOC1, BTB/POZ domain-containing protein KCTD4, DNA-binding protein SATB2, Tribbles homolog 3, Small nuclear ribonucleoprotein E, SH3 domain-binding glutamic acid-rich-like protein 3, HLA class II histocompatibility antigen, DRB1-4 beta chain, HLA class I histocompatibility antigen, Cw-4 alpha chain, Fatty acid-binding protein, liver, Polymeric immunoglobulin receptor, DAZ-associated protein 2, Lck-interacting transmembrane adapter 1, Cysteine-rich protein 2-binding protein, Bifunctional 3′-phosphoadenosine 5′-phosphosulfate synthase 2, Bifunctional 3′-phosphoadenosine 5′-phosphosulfate synthase 1, Phosphatidylinositol 5-phosphate 4-kinase type-2 alpha, Calsyntenin-3, Ras-related protein Rab-20, Structure-specific endonuclease subunit SLX4, Myosin regulatory light polypeptide 9, Centrosome-associated protein 350, StAR-related lipid transfer protein 5, WASH complex subunit 7, Lysocardiolipin acyltransferase 1, Puromycin-sensitive aminopeptidase-like protein, Myocyte-specific enhancer factor 2D, Ribosomal RNA processing protein 36 homolog, G1/S-specific cyclin-D3, Dipeptidyl peptidase 1, Histone acetyltransferase KAT6A, Putative ATP-dependent RNA helicase DHX57, Histone-arginine methyltransferase CARM1, Myosin regulatory light chain 12A, Cytochrome c oxidase subunit NDUFA4, Ras-related protein Rab-5B, Dermcidin, RING finger and transmembrane domain-containing protein 2, Inositol 1,4,5-trisphosphate receptor type 3, E3 ubiquitin-protein ligase TRIM56, DNA repair protein complementing XP-C cells, HLA class I histocompatibility antigen, B-35 alpha chain, Ubiquitin-conjugating enzyme E2 C, Bardet-Biedl syndrome 2 protein, Protein S100-A8, Zinc finger protein 608, BTB/POZ domain-containing protein KCTD1, RNA-binding protein with serine-rich domain 1, Laminin subunit beta-3, UDP-N-acetylglucosamine-dolichyl-phosphate N-acetylglucosaminephosphotransferase, DAZ-associated protein 1, Ribosomal protein S6 kinase alpha-1, Type II inositol 3,4-bisphosphate 4-phosphatase, Zinc finger CCHC domain-containing protein 14, Prefoldin subunit 5, Protein prenyltransferase alpha subunit repeat-containing protein 1, Peroxisomal membrane protein PEX14, Protein FAM134C, Dolichol kinase, Eukaryotic peptide chain release factor subunit 1, Cyclin-H, Phosphorylated CTD-interacting factor 1, Golgi-associated PDZ and coiled-coil motif-containing protein, Protein farnesyltransferase/geranylgeranyltransferase type-1 subunit alpha, SPRY domain-containing protein 3, Platelet-activating factor acetylhydrolase IB subunit alpha, Elongation factor Tu GTP-binding domain-containing protein 1, Protein RMD5 homolog B, Probable E3 ubiquitin-protein ligase HECTD4, KIF1-binding protein, CDNA FLJ25829 fis, clone TST08126, Heat shock protein beta-1, Serpin B12, S1 RNA-binding domain-containing protein 1, Agrin, Abhydrolase domain-containing protein 2, Muskelin, DNA polymerase delta catalytic subunit, Zinc finger protein 419, Angiomotin, Protein Smaug homolog 2, N-acetylgalactosamine-6-sulfatase, Probable C-mannosyltransferase DPY19L3, Src substrate cortactin, Signal peptidase complex catalytic subunit SEC11A, Matrin-3, NFX1-type zinc finger-containing protein 1, UPF0505 protein C16orf62, DNA damage-regulated autophagy modulator protein 2, Semaphorin-4C, Niemann-Pick C1 protein, Transmembrane 9 superfamily member 2, Cyclin-dependent kinase 19, Probable glutamate-tRNA ligase, mitochondrial, Chondroitin sulfate proteoglycan 4, Peroxisomal carnitine O-octanoyltransferase, WD repeat-containing protein 44, Cytochrome c oxidase subunit 1, Regulator of microtubule dynamics protein 1, GPI transamidase component PIG-S, Ubiquitin-protein ligase E3C, Transcription elongation regulator 1, Sorting nexin-9, N-acetylglucosamine-6-sulfatase, Thymosin beta-4, Integral membrane protein GPR155, Intraflagellar transport protein 122 homolog, Calponin-3, Inactive hydroxysteroid dehydrogenase-like protein 1, Calcyclin-binding protein, F-box only protein 31, MORN repeat-containing protein 1, Leukocyte receptor cluster member 8, Serine/threonine-protein kinase NLK, Histone acetyltransferase KAT6B, Protein FAM26F, MORN repeat-containing protein 2, Probable ATP-dependent RNA helicase YTHDC2, Leucine-rich repeat-containing protein 1, Sphingomyelin phosphodiesterase 2, Myosin regulatory light chain 12B, Sorting nexin-6, Peptidyl-prolyl cis-trans isomerase-like 2, Nucleolar GTP-binding protein 2, Serine/threonine-protein kinase MRCK alpha, 2-oxoisovalerate dehydrogenase subunit alpha, mitochondrial, Structural maintenance of chromosomes protein 1A, Ubiquitin-like modifier-activating enzyme 6, SAFB-like transcription modulator, Putative heat shock protein HSP 90-beta 2, Ubiquitin-like protein 3, Kelch repeat and BTB domain-containing protein 6, WD repeat-containing protein 81, DDB1- and CUL4-associated factor 13, T-complex protein 11-like protein 1, Aspartate-tRNA ligase, cytoplasmic, MAP kinase-activated protein kinase 2, Thyroid receptor-interacting protein 11, Clusterin-associated protein 1, Ubiquitin carboxyl-terminal hydrolase 32, Low-density lipoprotein receptor class A domain-containing protein 3, Homeodomain-interacting protein kinase 2, Zinc finger protein 318, E3 ubiquitin-protein ligase BRE1B, O-acetyl-ADP-ribose deacetylase 1, Coiled-coil domain-containing protein 141, Endoribonuclease Dicer, EVI5-like protein, MAP kinase-interacting serine/threonine-protein kinase 2, Nicotinamide phosphoribosyltransferase, Fibronectin type III domain-containing protein 3B, Alpha-catulin, TOX high mobility group box family member 4, Nuclear factor of activated T-cells 5, Elongator complex protein 5, Protein FAM13A, Transcription factor E2F3, Tubulin-specific chaperone cofactor E-like protein, Phospholipid scramblase 4, Complex I intermediate-associated protein 30, mitochondrial, Replication protein A 70 kDa DNA-binding subunit, Adenylyl cyclase-associated protein 1, Protein arginine N-methyltransferase 7, LIM domain kinase 2, NADPH-cytochrome P450 reductase, Peptidyl-prolyl cis-trans isomerase D, Ankyrin repeat and IBR domain-containing protein 1, Small G protein signaling modulator 2, Protein-glutamate O-methyltransferase, Zinc transporter 5, Peptidyl-prolyl cis-trans isomerase FKBP8, Eyes absent homolog 3, Nicotinamide riboside kinase 1, PCNA-interacting partner, Beta-mannosidase, Probable ATP-dependent RNA helicase DDX17, Synergin gamma, Kremen protein 2, Guanine nucleotide exchange factor VAV3, DNA polymerase zeta catalytic subunit, Histone acetyltransferase type B catalytic subunit, Interferon regulatory factor 2-binding protein-like, Protein YIF1B, Ubiquitin carboxyl-terminal hydrolase 8, Group XV phospholipase A2, Probable C-mannosyltransferase DPY19L1, Probable E3 ubiquitin-protein ligase HERC1, Iduronate 2-sulfatase, Type 2 lactosamine alpha-2,3-sialyltransferase, Protein FAM65B, Protein RCC2, DNA ligase 3, FAS-associated factor 1, Geranylgeranyl transferase type-2 subunit alpha, CLIP-associating protein 2, Zinc finger protein 746, G patch domain and KOW motifs-containing protein, Retinoid-inducible serine carboxypeptidase, Kelch-like protein 15, Trafficking protein particle complex subunit 3, Xaa-Pro aminopeptidase 1, PMS1 protein homolog 1, SEC23-interacting protein, Syndetin, CDK5 regulatory subunit-associated protein 3, Endophilin-B1, GON-4-like protein, MHC class I polypeptide-related sequence A, Zinc finger protein with KRAB and SCAN domains 5, Zinc finger CW-type PWWP domain protein 1, Conserved oligomeric Golgi complex subunit 6, Unconventional myosin-Va, N6-adenosine-methyltransferase 70 kDa subunit, Arylamine N-acetyltransferase 1, CD82 antigen, Lathosterol oxidase, Synembryn-B, Mitochondrial enolase superfamily member 1, Serine/threonine-protein kinase N2, Hermansky-Pudlak syndrome 1 protein, Protein 4.1, Lysine-specific demethylase 2A, TP53-regulating kinase, Tubulin beta-4B chain, Integrin alpha-V, Protein disulfide-isomerase A5, Oligoribonuclease, mitochondrial, Protein furry homolog-like, N-alpha-acetyltransferase 16, NatA auxiliary subunit, Trophinin, Vacuolar protein sorting-associated protein 13C, F-box/LRR-repeat protein 14, F-box/LRR-repeat protein 17, Transmembrane protein 218, Protein unc-13 homolog B, RNA-binding protein Raly, Interferon-induced protein with tetratricopeptide repeats 1, Mitochondrial import receptor subunit TOM70, RNA polymerase II-associated factor 1 homolog, Cytokine receptor-like factor 3, Cytosol aminopeptidase, Protein zyg-11 homolog B, N-acetylglucosamine-1-phosphotransferase subunits alpha/beta, Protein transport protein Sec61 subunit alpha isoform 1, Mitogen-activated protein kinase kinase kinase 7, Intraflagellar transport protein 43 homolog, Zinc finger protein 627, Zinc finger protein 614, Zinc finger protein 324B, S100P-binding protein, Early endosome antigen 1, Phospholipid scramblase 1, Sialidase-1, Inhibitor of nuclear factor kappa-B kinase subunit beta, Deoxyribose-phosphate aldolase, Rho-related BTB domain-containing protein 3, Ribosomal protein S6 kinase delta-1, Nucleoporin NDC1, Importin-7, Cyclin-dependent kinase 2-associated protein 1, PAS domain-containing serine/threonine-protein kinase, Vacuolar protein sorting-associated protein 18 homolog, Transmembrane and TPR repeat-containing protein 3, Alpha/beta hydrolase domain-containing protein 17B, Immediate early response gene 5-like protein, Casein kinase II subunit alpha′, DNA excision repair protein ERCC-6-like 2, 3′(2′),5′-bisphosphate nucleotidase 1, MAP kinase-activating death domain protein, Dynactin subunit 2, Mucosa-associated lymphoid tissue lymphoma translocation protein 1, Putative deoxyribonuclease TATDN1, Interferon regulatory factor 3, Tubulin polyglutamylase complex subunit 2, Regulator of microtubule dynamics protein 3, Probable histidine-tRNA ligase, mitochondrial, 39S ribosomal protein L52, mitochondrial, Tectonin beta-propeller repeat-containing protein 2, 7SK snRNA methylphosphate capping enzyme, Proline-rich nuclear receptor coactivator 1, Ubiquinone biosynthesis protein COQ9, mitochondrial, Clustered mitochondria protein homolog, Dexamethasone-induced protein, Semaphorin-4F, Fatty acid-binding protein, epidermal, Acylamino-acid-releasing enzyme, Zinc finger MYM-type protein 4, YTH domain-containing family protein 3, A-kinase anchor protein 6, Lambda-crystallin homolog, Telomerase protein component 1, DNA helicase B, Presenilin-1, Zinc finger protein 428, NF-kappa-B-repressing factor, Probable ATP-dependent RNA helicase DHX35, Prolyl 3-hydroxylase OGFOD1, N-alpha-acetyltransferase 20, E3 ubiquitin-protein ligase RNF135, Thrombospondin-3, NADH-ubiquinone oxidoreductase chain 5, 52 kDa repressor of the inhibitor of the protein kinase, Homeodomain-interacting protein kinase 1, Serine/threonine-protein kinase RIO3, YY1-associated protein 1, Myosin-14, LIM domain and actin-binding protein 1, Zinc finger protein 462, Protein YIPF5, Putative SMEK homolog 3, Charged multivesicular body protein 4b, Microphthalmia-associated transcription factor, Unhealthy ribosome biogenesis protein 2 homolog, Probable 28S rRNA (cytosine-C(5))-methyltransferase, Vesicle-associated membrane protein 7, Leucyl-cystinyl aminopeptidase, Mitogen-activated protein kinase kinase kinase kinase 2, GRAM domain-containing protein 4, Nuclear factor erythroid 2-related factor 1, Uncharacterized protein KIAA2013, Lysophospholipid acyltransferase LPCAT4, Actin-related protein 6, Hepatocyte growth factor-regulated tyrosine kinase substrate, Zinc finger protein 74, Phosphofurin acidic cluster sorting protein 1, PH domain leucine-rich repeat-containing protein phosphatase 2, HMG box-containing protein 1, Aryl hydrocarbon receptor, LIM and SH3 domain protein 1, E3 ubiquitin-protein ligase synoviolin, Vacuolar protein sorting-associated protein 13D, Ubiquitin carboxyl-terminal hydrolase 25, RNA polymerase-associated protein CTR9 homolog, Charged multivesicular body protein 7, RAB6A-GEF complex partner protein 2, UDP-glucose: glycoprotein glucosyltransferase 1, DNA-directed RNA polymerase II subunit RPB9, Nitric oxide synthase, endothelial, Peptidyl-prolyl cis-trans isomerase FKBP3, Ubiquitin carboxyl-terminal hydrolase 15, WASH complex subunit strumpellin, Selenocysteine insertion sequence-binding protein 2-like, Nuclear cap-binding protein subunit 2, Methyltransferase-like protein 22, F-box only protein 9, DmX-like protein 2, Ectonucleotide pyrophosphatase/phosphodiesterase family member 2, Creatine kinase B-type, Protein FAM91A1, Paired box protein Pax-3, Integrin beta-3, Protein SEC13 homolog, Histone-lysine N-methyltransferase SETDB2, Scm-like with four MBT domains protein 1, Forkhead box protein M1, Protein kinase C and casein kinase substrate in neurons protein 2, Clathrin interactor 1, Protein FAM189B, Nuclear receptor-interacting protein 1, Centriole, cilia and spindle-associated protein, Ubiquitin carboxyl-terminal hydrolase 38, Recombining binding protein suppressor of hairless, Holliday junction recognition protein, Integrin alpha-5, Immunoglobulin superfamily member 8, Signal-induced proliferation-associated 1-like protein 1, Eukaryotic translation initiation factor 2A, Mitochondrial import inner membrane translocase subunit Tim17-A, Protein strawberry notch homolog 1, Splicing factor 3B subunit 6, Glutamine-tRNA ligase, BRCA2-interacting transcriptional repressor EMSY, E3 SUMO-protein ligase NSE2, Retinal dehydrogenase 1, Alpha-N-acetylglucosaminidase, E3 SUMO-protein ligase RanBP2, Endoplasmic reticulum metallopeptidase 1, Leucine-rich repeat flightless-interacting protein 1, Uncharacterized protein C15orf41, High affinity cAMP-specific and IBMX-insensitive 3′,5′-cyclic phosphodiesterase 8A, Sodium/potassium-transporting ATPase subunit alpha-2, Neuroplastin, Leukotriene A-4 hydrolase, DNA-directed RNA polymerases I and III subunit RPAC1, Mitotic spindle assembly checkpoint protein MAD2A, Exosome complex component RRP4, SET domain-containing protein 4, Transmembrane protein 70, mitochondrial, Mitotic spindle assembly checkpoint protein MAD1, Akirin-2, BCL2/adenovirus E1B 19 kDa protein-interacting protein 2, U3 small nucleolar RNA-associated protein 15 homolog, Fascin, Proteasome subunit alpha type-7, 14-3-3 protein epsilon, Spindlin-3, LETM1 and EF-hand domain-containing protein 1, mitochondrial, Nucleolar protein 14, Ubiquitin-conjugating enzyme E2 Z, Elongator complex protein 1, DNA repair protein XRCC4, Importin-5, Splicing factor 1, Phosphatidylinositol 4-phosphate 3-kinase C2 domain-containing subunit beta, Acetyl-coenzyme A transporter 1, Zinc finger protein 275, E3 ubiquitin-protein ligase HACE1, AT-rich interactive domain-containing protein 2, Tetraspanin-33, Peroxisome assembly factor 2, Oral-facial-digital syndrome 1 protein, Nuclear factor of activated T-cells, cytoplasmic 1, TBC1 domain family member 8, Protein MEF2BNB, Complex I assembly factor TMEM126B, mitochondrial, DNA polymerase delta subunit 3, Gamma-secretase subunit APH-1A, Bcl-2-modifying factor, Epididymis-specific alpha-mannosidase, Ras association domain-containing protein 3, Uncharacterized protein C15orf61, Spindlin-1, Cholinesterase, Acetyl-CoA carboxylase 1, Transmembrane protein 87A, Lysyl oxidase homolog 3, SWI/SNF-related matrix-associated actin-dependent regulator of chromatin subfamily E member 1-related, Prostamide/prostaglandin F synthase, E3 ubiquitin-protein ligase TRIM4, MAGUK p55 subfamily member 2, Far upstream element-binding protein 1, Dimethylaniline monooxygenase [N-oxide-forming] 4, Dihydropyrimidine dehydrogenase [NADP(+)], Spermatogenesis-associated protein 20, AN1-type zinc finger protein 6, YTH domain-containing family protein 1, SUN domain-containing protein 2, 45 kDa calcium-binding protein, Integrator complex subunit 6, Protein Lines homolog 1, Proline-rich protein 7, Zinc finger MIZ domain-containing protein 2, RNA-binding protein 5, Serine/arginine-rich splicing factor 10, Tetraspanin-4, Ribosomal RNA small subunit methyltransferase NEP1, Presenilin-2, Prolyl 3-hydroxylase 2, Mitogen-activated protein kinase kinase kinase 1, Coiled-coil domain-containing protein 121, Osteoclast-stimulating factor 1, 39S ribosomal protein L35, mitochondrial, UDP-N-acetylhexosamine pyrophosphorylase-like protein 1, RNA-binding protein 39, Thioredoxin-like protein AAED1, Eukaryotic translation initiation factor 3 subunit K, Protein timeless homolog, Zinc finger and BTB domain-containing protein 6, ATP-binding cassette sub-family A member 3, Vinculin, Microtubule-associated protein 1A, C-Jun-amino-terminal kinase-interacting protein 2, Plakophilin-2, 39S ribosomal protein L34, mitochondrial, Ras-related protein Rab-27A, Serine/threonine-protein kinase tousled-like 1, Protein S100-A4, Centriolin, Transcriptional repressor CTCF, Golgin subfamily A member 3, Death-inducer obliterator 1, Glycogen debranching enzyme, Transmembrane protein 181, A-kinase anchor protein 9, E3 ubiquitin-protein ligase MYLIP, Guanine nucleotide-binding protein G (i) subunit alpha-2, Peptidyl-prolyl cis-trans isomerase FKBP4, Metaxin-1, Uncharacterized protein KIAA1143, Disabled homolog 2, Serine/threonine-protein kinase tousled-like 2, Squamous cell carcinoma antigen recognized by T-cells 3, Natural resistance-associated macrophage protein 2, S-adenosyl-L-methionine-dependent tRNA 4-demethylwyosine synthase, Puromycin-sensitive aminopeptidase, Protocadherin gamma-A11, Eukaryotic peptide chain release factor GTP-binding subunit ERF3A, Protocadherin Fat 1, H(+)/Cl(−) exchange transporter 7, Zinc finger protein 407, Desmoplakin, Kelch-like protein 7, H(+)/Cl(−) exchange transporter 3, Protein phosphatase 1 regulatory subunit 3C, Interleukin-17 receptor C, Solute carrier family 22 member 18, Sodium/potassium-transporting ATPase subunit beta-1, ATP-binding cassette sub-family B member 8, mitochondrial, Sorbin and SH3 domain-containing protein 2, Histidine-tRNA ligase, cytoplasmic, Probable cation-transporting ATPase 13A2, Unconventional myosin-lb, MAP/microtubule affinity-regulating kinase 3, NADH dehydrogenase [ubiquinone] flavoprotein 2, mitochondrial, Ceramide synthase 5, Transcription intermediary factor 1-beta, Arginine-tRNA ligase, cytoplasmic, Neurosecretory protein VGF, U8 snoRNA-decapping enzyme, Epididymal secretory protein E1, Phenylalanine-tRNA ligase alpha subunit, Zinc finger protein 536, Vascular endothelial growth factor A, Decapping and exoribonuclease protein, Glia-derived nexin, PITH domain-containing protein 1, Gamma-aminobutyric acid receptor subunit beta-3, Lysine-specific demethylase 3B, Protein diaphanous homolog 2, Nuclear protein localization protein 4 homolog, Aldehyde dehydrogenase family 1 member A3, Ubiquitin-like protein 5, Zinc finger BED domain-containing protein 5, Rho GTPase-activating protein 5, Tyrosine-protein phosphatase non-receptor type 1, ATP-dependent RNA helicase DDX18, Structural maintenance of chromosomes protein 2, Dihydropyrimidinase-related protein 1, Mitochondrial import receptor subunit TOM20 homolog, ADP-ribosylation factor 3, WD repeat-containing protein 26, Mitogen-activated protein kinase kinase kinase 3, Zinc finger protein 579, Uridine phosphorylase 1, MORF4 family-associated protein 1, Exocyst complex component 1, Keratin, type I cytoskeletal 10, Rho GTPase-activating protein 18, Mitotic checkpoint serine/threonine-protein kinase BUB1, Transmembrane protein 131, Ceramide synthase 6, MICOS complex subunit MIC25, E3 ubiquitin-protein ligase RNF114, JNK1/MAPK8-associated membrane protein, Coiled-coil domain-containing protein 14, Brefeldin A-inhibited guanine nucleotide-exchange protein 2, Exosome complex component MTR3, PR domain zinc finger protein 4, Protein CutA, Trafficking protein particle complex subunit 2-like protein, TGF-beta-activated kinase 1 and MAP3K7-binding protein 1, Cyclin-dependent kinase 2-associated protein 2, Wings apart-like protein homolog, Pre-mRNA-splicing factor ATP-dependent RNA helicase PRP16, Two pore calcium channel protein 1, DNA/RNA-binding protein KIN17, Ribonucleoprotein PTB-binding 1, Sterol regulatory element-binding protein 1, NADH dehydrogenase [ubiquinone] 1 alpha subcomplex assembly factor 4, Proline-rich nuclear receptor coactivator 2, Zinc finger protein 526, Protein Wiz, PHD finger protein 23, Carboxymethylenebutenolidase homolog, Protein phosphatase 1 regulatory subunit 15B, Putative PIP5K1A and PSMD4-like protein, Acyl-protein thioesterase 1, Alpha-1,2-mannosyltransferase ALG9, Ankyrin repeat domain-containing protein 10, Vesicle transport protein SEC20, Triple functional domain protein, Inositol hexakisphosphate and diphosphoinositol-pentakisphosphate kinase 1, Probable ATP-dependent RNA helicase DDX10, Zinc finger protein 292, Leucine-rich repeat and calponin homology domain-containing protein 3, Calcium-binding protein 39, Small integral membrane protein 15, Protein phosphatase 1A, ATP-dependent RNA helicase DHX29, Structural maintenance of chromosomes protein 6, Caldesmon, REST corepressor 1, Calmodulin-like protein 4, F-box/WD repeat-containing protein 5, Zinc finger RNA-binding protein, L-aminoadipate-semialdehyde dehydrogenase-phosphopantetheinyl transferase, Hom s 5, Harmonin, tRNA selenocysteine 1-associated protein 1, Vacuolar protein sorting-associated protein 35, Argininosuccinate synthase, RNA-binding protein 3, 40S ribosomal protein S6, Myosin-11, Carbonic anhydrase 12, Myosin-10, Carboxy-terminal domain RNA polymerase II polypeptide A small phosphatase 2, Electrogenic sodium bicarbonate cotransporter 1, Epidermal growth factor receptor, 39S ribosomal protein L49, mitochondrial, ELKS/Rab6-interacting/CAST family member 1, Statherin, ATP-dependent RNA helicase DDX1, 6-phosphofructo-2-kinase/fructose-2,6-bisphosphatase 3, Formin-like protein 3, Elongator complex protein 2, Prostaglandin G/H synthase 1, ATP-dependent DNA helicase Q5, Nucleolar protein 10, Thioredoxin-like protein 1, ETS translocation variant 3, Actin, alpha skeletal muscle, KAT8 regulatory NSL complex subunit 3, Neutral and basic amino acid transport protein rBAT, Myotubularin-related protein 2, Glutathione S-transferase Mu 4, ADP-ribosylation factor-like protein 2-binding protein, A-kinase-interacting protein 1, Sorting nexin-7, Serine-protein kinase ATM, Poly [ADP-ribose] polymerase, Piezo-type mechanosensitive ion channel component 1, Multidrug resistance-associated protein 1, Glutathione-specific gamma-glutamylcyclotransferase 1, Macrophage metalloelastase, SURP and G-patch domain-containing protein 1, Factor VIII intron 22 protein, Sacsin, Epithelial discoidin domain-containing receptor 1, Pseudouridylate synthase 7 homolog-like protein, La-related protein 1, Adenylate kinase 2, mitochondrial, ATR-interacting protein, Transmembrane protein 41B, Protein SZT2, Transient receptor potential cation channel subfamily V member 2, Phosphatidylcholine translocator ABCB4, Ras GTPase-activating-like protein IQGAP2, F-box DNA helicase 1, Fas apoptotic inhibitory molecule 1, Interferon regulatory factor 2-binding protein 2, Inactive serine/threonine-protein kinase VRK3, Complement C1q tumor necrosis factor-related protein 3, Coiled-coil domain-containing protein 106, LIM and senescent cell antigen-like-containing domain protein 1, Fibrinogen alpha chain, Cytospin-B, DNA-directed RNA polymerase III subunit RPC7, Regulator of nonsense transcripts 1, Keratin, type II cytoskeletal 2 epidermal, Gem-associated protein 4, Histone-lysine N-methyltransferase ASH1L, MORC family CW-type zinc finger protein 4, C-terminal-binding protein 2, Basic salivary proline-rich protein 2, Salivary acidic proline-rich phosphoprotein 1/2, Histone chaperone ASF1A, Beclin-1, Putative methyltransferase-like protein 15P1, Putative peripheral benzodiazepine receptor-related protein, Protein FAM216A, AP-2 complex subunit beta, PHD and RING finger domain-containing protein 1, E3 ubiquitin-protein ligase TRAF7, Voltage-dependent anion-selective channel protein 3, F-box/WD repeat-containing protein 11, Protein O-GlcNAcase, Tubulin-folding cofactor B, Activating signal cointegrator 1 complex subunit 1, Polypyrimidine tract-binding protein 2, Mitochondrial genome maintenance exonuclease 1, NEDD4-binding protein 2-like 1, Zinc finger and BTB domain-containing protein 38, Protein sel-1 homolog 3, Repressor of RNA polymerase III transcription MAF1 homolog, Versican core protein, Histone-lysine N-methyltransferase 2E, Endothelial PAS domain-containing protein 1, Histone-lysine N-methyltransferase NSD2, Amyloid-like protein 2, Transcription initiation factor TFIID subunit 4, Cysteine and histidine-rich protein 1, Formin-like protein 2, KRR1 small subunit processome component homolog, V-type proton ATPase 116 kDa subunit a isoform 3, Dymeclin, Histone deacetylase 4, Solute carrier family 2, facilitated glucose transporter member 1, Tripeptidyl-peptidase 2, Probable UDP-sugar transporter protein SLC35A5, Probable ATP-dependent RNA helicase DDX60-like, Cystatin-A, Splicing factor U2AF 65 kDa subunit, Membrane-bound transcription factor site-1 protease, UBX domain-containing protein 4, Kinesin-like protein KIF11, FAST kinase domain-containing protein 2, LEM domain-containing protein 2, Galectin-3, Solute carrier family 12 member 6, BCL2/adenovirus E1B 19 kDa protein-interacting protein 3, Serine/threonine-protein phosphatase 2A 56 kDa regulatory subunit gamma isoform, Bardet-Biedl syndrome 4 protein, Progestin and adipoQ receptor family member 4, 40S ribosomal protein S23, Peroxisomal membrane protein PMP34, Polycystic kidney disease and receptor for egg jelly-related protein, Protein Red, Protein KHNYN, 40S ribosomal protein S15, Putative methyltransferase NSUN6, Sin3 histone deacetylase corepressor complex component SDS3, Protein S100-A10, Melanoma-associated antigen D4, Calcium/calmodulin-dependent protein kinase type IV, E3 ubiquitin-protein ligase RNF19B, Girdin, Testin, SWI/SNF-related matrix-associated actin-dependent regulator of chromatin subfamily B member 1, Calcium uptake protein 2, mitochondrial, Tetratricopeptide repeat protein 25, Inhibitor of growth protein 5, Son of sevenless homolog 2, Trans-Golgi network integral membrane protein 2, Insulin-like growth factor 2 mRNA-binding protein 3, Transcription factor SOX-8, Serine/threonine-protein kinase DCLK2, Golgin subfamily A member 5, TBC1 domain family member 13, HLA class II histocompatibility antigen, DR beta 5 chain, E3 SUMO-protein ligase CBX4, PWWP domain-containing protein MUM1, Interferon-induced transmembrane protein 2, DNA polymerase kappa, Methionine synthase, SWI/SNF-related matrix-associated actin-dependent regulator of chromatin subfamily A containing DEAD/H box 1, Translocation protein SEC63 homolog, Chromodomain Y-like protein, Procollagen-lysine, 2-oxoglutarate 5-dioxygenase 2, F-box only protein 28, Tripartite motif-containing protein 34, Tubulin-tyrosine ligase, DNA topoisomerase 3-beta-1, Hermansky-Pudlak syndrome 3 protein, G/T mismatch-specific thymine DNA glycosylase, Transducin beta-like protein 3, Negative regulator of reactive oxygen species, BAG family molecular chaperone regulator 2, Ganglioside GM2 activator, RNA-binding protein 12B, Beta-galactoside alpha-2,6-sialyltransferase 1, Dynactin subunit 5, N-terminal Xaa-Pro-Lys N-methyltransferase 1, Ran-binding protein 9, E3 ubiquitin-protein ligase RNF216, SET domain-containing protein 5, F-box/WD repeat-containing protein 7, TRIO and F-actin-binding protein, Pleckstrin homology domain-containing family A member 2, Beta-actin-like protein 2, Stimulator of interferon genes protein, Putative V-set and immunoglobulin domain-containing-like protein IGHV4OR15-8, Ig kappa chain V-I region HK102, Arachidonate 5-lipoxygenase, U2 snRNP-associated SURP motif-containing protein, HLA class I histocompatibility antigen, A-3 alpha chain, Nuclear pore complex protein Nup50, Trinucleotide repeat-containing gene 6B protein, Four and a half LIM domains protein 2, Protein disulfide-isomerase, Radial spoke head protein 3 homolog, Collagen alpha-3 (VI) chain, Synaptobrevin homolog YKT6, Myotubularin-related protein 6, Polypeptide N-acetylgalactosaminyltransferase 2, Cytochrome c oxidase subunit 5B, mitochondrial, Dol-P-Man:Man (7) GlcNAc (2)-PP-Dol alpha-1,6-mannosyltransferase, Serglycin, UDP-glucuronic acid decarboxylase 1, Integrin beta-2, Forkhead-associated domain-containing protein 1, Zinc finger protein 36, C3H1 type-like 2, Chloride intracellular channel protein 6, Rab3 GTPase-activating protein non-catalytic subunit, Guanylate-binding protein 4, Cell division control protein 42 homolog, 40S ribosomal protein S27-like, Septin-9, Macrosialin, Serine/threonine-protein kinase RIO1, Transcription elongation factor A protein 1, Transmembrane protein 14A, Protein nepro homolog, Torsin-4A, Protein CEBPZOS, HLA class I histocompatibility antigen, B-57 alpha chain, Ras-related protein M-Ras, DNA polymerase delta subunit 2, Zinc finger protein 343, ADP-ribosylation factor 6, Discoidin, CUB and LCCL domain-containing protein 2, Deoxyhypusine synthase, Lysophospholipid acyltransferase 5, Nuclear cap-binding protein subunit 1, 40S ribosomal protein S27, Serpin H1, Tetratricopeptide repeat protein 30A, A-kinase anchor protein 8-like, Actin-related protein 3, Inositol-tetrakisphosphate 1-kinase, STE20-related kinase adapter protein alpha, Grancalcin, Transcriptional repressor p66-beta, Cytochrome b-245 heavy chain, Lanosterol synthase, Protein phosphatase 1 regulatory subunit 12A, Protein FAM168A, HLA class II histocompatibility antigen, DRB1-16 beta chain, Rotatin, Histone H2A type 1-B/E, SH3 domain-binding glutamic acid-rich-like protein, WD repeat domain phosphoinositide-interacting protein 3, Lysine-specific demethylase 6B, Poly [ADP-ribose] polymerase 8, Intraflagellar transport protein 25 homolog, Histone-lysine N-methyltransferase setd3, Rho guanine nucleotide exchange factor 12, Cell division cycle protein 16 homolog, ATP-dependent zinc metalloprotease YME1L1, Ubiquitin thioesterase OTUB1, Homeobox-containing protein 1, Protein FAM162A, Group XIIB secretory phospholipase A2-like protein, SH3 domain-binding protein 2, 14-3-3 protein eta, CTTNBP2 N-terminal-like protein, Claspin, ADP-ribosylation factor 4, Geranylgeranyl transferase type-1 subunit beta, Galectin-2, CAAX prenyl protease 1 homolog, Phospholipase D1, DNA-directed RNA polymerase III subunit RPC4, Serine/threonine-protein kinase MARK2, FGFR1 oncogene partner 2, 4F2 cell-surface antigen heavy chain, Bromodomain-containing protein 8, Mitochondrial coenzyme A transporter SLC25A42, Terminal uridylyltransferase 7, Hyccin, Serine/threonine-protein phosphatase 2B catalytic subunit beta isoform, Transcription factor SOX-9, F-box/LRR-repeat protein 6, Adiponectin receptor protein 1, Ribosomal protein S6 kinase beta-1, Zinc finger protein 655, Probable aminopeptidase NPEPL1, Dolichyl-diphosphooligosaccharide-protein glycosyltransferase subunit 1, Nuclear transcription factor Y subunit gamma, COUP transcription factor 2, Chromodomain-helicase-DNA-binding protein 1, Glycogen phosphorylase, brain form, Disintegrin and metalloproteinase domain-containing protein 23, Insulin-like growth factor I, Sentrin-specific protease 2, Actin, alpha cardiac muscle 1, Apoptosis-inducing factor 1, mitochondrial, Denticleless protein homolog, Sarcoplasmic/endoplasmic reticulum calcium ATPase 2, Chromodomain-helicase-DNA-binding protein 3, Histone-lysine N-methyltransferase EHMT1, Mediator of RNA polymerase II transcription subunit 6, Chromatin complexes subunit BAP18, Anaphase-promoting complex subunit 16, Exocyst complex component 6, Dehydrodolichyl diphosphate syntase complex subunit NUS1, Tetratricopeptide repeat protein 27, DNA-directed RNA polymerase II subunit RPB11-b2, Tensin-1, Keratin, type I cytoskeletal 19, UPF0568 protein C14orf166, Disheveled-associated activator of morphogenesis 1, Thiopurine S-methyltransferase, Tuftelin, Autophagy-related protein 9A, Serine/threonine-protein phosphatase 6 regulatory ankyrin repeat subunit C, Leucine-rich repeat-containing protein 41, Transmembrane protein 50A, snRNA-activating protein complex subunit 4, Galectin-8, WAS/WASL-interacting protein family member 1, ATP synthase F (0) complex subunit C2, mitochondrial, MIT domain-containing protein 1, 28S ribosomal protein S24, mitochondrial, Glycine-tRNA ligase, Ubiquitin-protein ligase E3A, Bifunctional polynucleotide phosphatase/kinase, Serine/threonine-protein kinase PLK2, Ubiquitin carboxyl-terminal hydrolase 16, Cholesteryl ester transfer protein, Rho GDP-dissociation inhibitor 1, F-box/LRR-repeat protein 19, Interleukin-12 subunit alpha, Tumor necrosis factor receptor superfamily member 19, 2′-deoxynucleoside 5′-phosphate N-hydrolase 1, Protein phosphatase 1 regulatory subunit 15A, Transmembrane protein 140, DNA damage-inducible transcript 4 protein, Tetratricopeptide repeat protein 28, Beta-2-syntrophin, Jouberin, Ribose-phosphate pyrophosphokinase 1, Inactive tyrosine-protein kinase 7, Protein LYRIC, HLA class I histocompatibility antigen, alpha chain G, Transcriptional adapter 2-alpha, Myeloid cell nuclear differentiation antigen, Integrin beta-1, Solute carrier family 25 member 43, UDP-N-acetylglucosamine transporter, Zinc finger protein 573, Ubiquitin-conjugating enzyme E2 E1, All-trans-retinol 13,14-reductase, Laminin subunit gamma-1, Bromodomain and WD repeat-containing protein 1, ATP-dependent RNA helicase DDX51, Cytosolic purine 5′-nucleotidase, Sterol regulatory element-binding protein cleavage-activating protein, Tankyrase-1, Zinc finger protein 609, M-phase inducer phosphatase 2, Uncharacterized protein C8orf59, Intraflagellar transport protein 27 homolog, RNA-binding motif, single-stranded-interacting protein 2, S-phase kinase-associated protein 1, Mitochondrial fission process protein 1, Protein SHQ1 homolog, Carboxypeptidase Q, Serine/threonine-protein kinase 10, Cardiolipin synthase (CMP-forming), Splicing regulatory glutamine/lysine-rich protein 1, ATP-binding cassette sub-family A member 7, AT-rich interactive domain-containing protein 1B, Sodium/potassium-transporting ATPase subunit beta-3, RING finger protein 214, UDP-glucuronosyltransferase 1-10, Developmentally-regulated GTP-binding protein 2, Transcription factor Maf, Serine/threonine-protein kinase 35, GRIP and coiled-coil domain-containing protein 2, Transcription factor IIIB 90 kDa subunit, TAF6-like RNA polymerase II p300/CBP-associated factor-associated factor 65 kDa subunit 6L, Serine/threonine-protein phosphatase 6 regulatory ankyrin repeat subunit B, Ankyrin repeat domain-containing protein 27, Zinc finger protein 148, Glutamate-rich WD repeat-containing protein 1, TBC domain-containing protein kinase-like protein, Enhancer of mRNA-decapping protein 4, Quinone oxidoreductase-like protein 1, Transcription initiation factor TFIID subunit 2, Beta-hexosaminidase subunit beta, Transmembrane protein 234, 28S ribosomal protein S29, mitochondrial, CAS1 domain-containing protein 1, Ubiquitin carboxyl-terminal hydrolase 4, Biogenesis of lysosome-related organelles complex 1 subunit 3, Ankyrin repeat domain-containing protein 11, Zinc fingers and homeoboxes protein 2, Hepatoma-derived growth factor, Cancer/testis antigen 2, Histone deacetylase 6, Conserved oligomeric Golgi complex subunit 7, Striatin-4, Tricarboxylate transport protein, mitochondrial, General transcription factor IIF subunit 2, RNA demethylase ALKBH5, Phosphatidylinositide phosphatase SAC2, tRNA-splicing endonuclease subunit Sen34, WAS/WASL-interacting protein family member 2, Protocadherin gamma-C3, Round spermatid basic protein 1-like protein, Alpha-mannosidase 2C1, Transcription factor p65, Serine protease 23, Splicing factor, arginine/serine-rich 15, Neuropathy target esterase, Tubulin epsilon chain, MICOS complex subunit MIC13, Endonuclease domain-containing 1 protein, Sodium-dependent phosphate transport protein 4, Deubiquitinating protein VCIP135, Kinase D-interacting substrate of 220 kDa, Multivesicular body subunit 12A, Heterogeneous nuclear ribonucleoprotein D-like, Gamma-adducin, Nucleotide exchange factor SIL1, Protein FAM76B, Nuclear mitotic apparatus protein 1, Isoaspartyl peptidase/L-asparaginase, Chromobox protein homolog 2, Cilia- and flagella-associated protein 97, Heme-binding protein 1, SCY1-like protein 2, E3 ubiquitin-protein ligase RNF123, Transcription termination factor 1, COP9 signalosome complex subunit 4, UDP-N-acetylglucosamine-peptide N-acetylglucosaminyltransferase 110 kDa subunit, Conserved oligomeric Golgi complex subunit 2, Rho-associated protein kinase 2, Uncharacterized protein C1orf43, Protein FAM179B, Cyclic AMP-responsive element-binding protein 1, Endothelin-converting enzyme 1, Torsin-1A-interacting protein 1, ATP-binding cassette sub-family E member 1, 5′-3′ exoribonuclease 1, MAX gene-associated protein, Protein MAK16 homolog, Arf-GAP with Rho-GAP domain, ANK repeat and PH domain-containing protein 3, Lysine-specific demethylase 5B, Signal recognition particle 9 kDa protein, DnaJ homolog subfamily C member 16, CSC1-like protein 1, 39S ribosomal protein L38, mitochondrial, Golgin subfamily A member 2, N-alpha-acetyltransferase 25, NatB auxiliary subunit, ADP-ribosylation factor-like protein 2, Protein Asterix, Dapper homolog 1, Transmembrane protein 64, Transcription factor EB, Magnesium transporter NIPA2, DnaJ homolog subfamily C member 8, Membrane-bound transcription factor site-2 protease, Coiled-coil domain-containing protein 134, Kynurenine 3-monooxygenase, Peptidyl-prolyl cis-trans isomerase F, mitochondrial, GH3 domain-containing protein, AF4/FMR2 family member 1, Trafficking protein particle complex subunit 9, Calcineurin B homologous protein 1, Poly(ADP-ribose) glycohydrolase ARH3, TERF1-interacting nuclear factor 2, Prefoldin subunit 2, Pumilio homolog 1, Arf-GAP with SH3 domain, ANK repeat and PH domain-containing protein 2, Protein CMSS1, Beta-lactamase-like protein 2, ERO1-like protein alpha, Protein SLX4IP, Vacuolar protein sorting-associated protein 8 homolog, RING finger protein 145, Type II inositol 1,4,5-trisphosphate 5-phosphatase, Transmembrane anterior posterior transformation protein 1 homolog, Glutamyl-tRNA (Gln) amidotransferase subunit A, mitochondrial, G1/S-specific cyclin-D2, Transcription termination factor 1, mitochondrial, Sterol 26-hydroxylase, mitochondrial, Alpha/beta hydrolase domain-containing protein 17C, PHD finger protein 10, SNF-related serine/threonine-protein kinase, Transcription initiation factor TFIID subunit 1-like, Shootin-1, Glucocorticoid receptor, Histone H2A deubiquitinase MYSM1, CD9 antigen, Calcium signal-modulating cyclophilin ligand, NADH dehydrogenase [ubiquinone] 1 beta subcomplex subunit 6, Tyrosyl-DNA phosphodiesterase 2, 60 kDa SS-A/Ro ribonucleoprotein, Insulin-degrading enzyme, Cytosolic 5′-nucleotidase 3A, Mediator of RNA polymerase II transcription subunit 26, Ribosomal protein S6 kinase alpha-3, DNA polymerase eta, Glycylpeptide N-tetradecanoyltransferase 1, DNA-directed RNA polymerases I, II, and Ill subunit RPABC1, Volume-regulated anion channel subunit LRRC8D, Peptide-N(4)-(N-acetyl-beta-glucosaminyl) asparagine amidase, GA-binding protein subunit beta-1, Inverted formin-2, Oxysterol-binding protein, Phospholipid hydroperoxide glutathione peroxidase, mitochondrial, Chromatin assembly factor 1 subunit B, Putative heat shock protein HSP 90-alpha A5, Phosphatidylinositol 4,5-bisphosphate 3-kinase catalytic subunit gamma isoform, Rho GTPase-activating protein 4, WD repeat-containing protein 47, Probable ubiquitin carboxyl-terminal hydrolase FAF-X, Endoplasmic reticulum aminopeptidase 1, HEAT repeat-containing protein 1, cAMP-specific 3′,5′-cyclic phosphodiesterase 4B, Serine/threonine-protein kinase 11-interacting protein, Atlastin-3, Glycerol-3-phosphate acyltransferase 4, Bifunctional coenzyme A synthase, Arginyl aminopeptidase-like 1, Acidic leucine-rich nuclear phosphoprotein 32 family member A, Mannosyl-oligosaccharide glucosidase, rRNA methyltransferase 1, mitochondrial, tRNA-splicing endonuclease subunit Sen15, Ecto-NOX disulfide-thiol exchanger 1, Zinc finger protein 662, Glutamine-fructose-6-phosphate aminotransferase [isomerizing] 2, Transcription intermediary factor 1-alpha, Nicotinate phosphoribosyltransferase, 5-aminolevulinate synthase, nonspecific, mitochondrial, Actin-binding protein anillin, Putative deoxyribonuclease TATDN3, WD repeat-containing protein 61, Protein SCAF8, MKL/myocardin-like protein 2, TRPM8 channel-associated factor 2, Rapamycin-insensitive companion of mTOR, Nuclear receptor subfamily 2 group C member 2, Lysophospholipid acyltransferase 7, Complex I assembly factor TIMMDC1, mitochondrial, KATNB1-like protein 1, Putative ATP-dependent RNA helicase DHX30, RNA-binding protein 12, Transmembrane protein 214, PHD finger protein 3, COP9 signalosome complex subunit 5, Neutral amino acid transporter A, AP-5 complex subunit beta-1, PX domain-containing protein kinase-like protein, Putative inactive carbonic anhydrase 5B-like protein, Small integral membrane protein 4, DNA cross-link repair 1A protein, Mothers against decapentaplegic homolog 2, TIP41-like protein, Retinol dehydrogenase 10, Hippocampus abundant transcript-like protein 1, N-acetyltransferase 9, MOB kinase activator 3A, Transcriptional repressor protein YY1, Kelch-like protein 6, Squalene synthase, N-alpha-acetyltransferase 38, NatC auxiliary subunit, Dedicator of cytokinesis protein 2, E3 ubiquitin-protein ligase TRIM11, tRNA-specific adenosine deaminase 1, Transmembrane protein 248, E3 ubiquitin-protein ligase RNF167, Uncharacterized protein C20orf196, Polycomb protein EED, Exosome complex component RRP46, Kelch-like protein 11, POTE ankyrin domain family member I, Activity-dependent neuroprotector homeobox protein, DNA-binding protein inhibitor ID-4, Secernin-2, ETS-related transcription factor Elf-1, TCDD-inducible poly [ADP-ribose] polymerase, Proliferation-associated protein 2G4, NudC domain-containing protein 1, ATPase family AAA domain-containing protein 2B, Zinc fingers and homeoboxes protein 3, Methylmalonyl-CoA mutase, mitochondrial, Protein RRNAD1, Phospholipase A-2-activating protein, Glycerol-3-phosphate acyltransferase 3, Protein FAM122B, Uncharacterized protein KIAA1109, Phenylalanine-tRNA ligase, mitochondrial, Serine/threonine-protein phosphatase 2B catalytic subunit alpha isoform, Thioredoxin domain-containing protein 11, Bladder cancer-associated protein, Membrane cofactor protein, Nuclear factor of activated T-cells, cytoplasmic 2, Smith-Magenis syndrome chromosomal region candidate gene 8 protein, Krueppel-like factor 3, CDK5 and ABL1 enzyme substrate 1, 40S ribosomal protein S14, Phosphatidylinositol 4-phosphate 5-kinase type-1 beta, Cyclin-dependent kinase 16, SAP domain-containing ribonucleoprotein, Protein NDRG1, WAS protein family homolog 1, Interferon regulatory factor 4, DNA-directed DNA/RNA polymerase mu, Actin-like protein 6A, Dedicator of cytokinesis protein 4, Protein furry homolog, Telomere-associated protein RIF1, Ras association domain-containing protein 1, Cytochrome P450 2J2, Protein scribble homolog, Proheparin-binding EGF-like growth factor, Cytosolic acyl coenzyme A thioester hydrolase, Cohesin subunit SA-1, Myomegalin, Twinfilin-1, Stromal interaction molecule 1, Probable U3 small nucleolar RNA-associated protein 11, Centromere-associated protein E, Zinc finger C3H1 domain-containing protein, EF-hand domain-containing protein D1, Keratin, type II cytoskeletal 8, Retrotransposon-derived protein PEG10, Cyclin-dependent kinase 2, UBX domain-containing protein 11, Pecanex-like protein 3, Rho guanine nucleotide exchange factor 3, ADP-ribosylation factor-like protein 4C, Ribosome biogenesis protein BOP1, KDEL motif-containing protein 2, Structural maintenance of chromosomes protein 5, La-related protein 4B, Acid ceramidase, Proteasome assembly chaperone 1, Radixin, Retinoblastoma-binding protein 5, Forkhead box protein N2, rRNA-processing protein UTP23 homolog, Src kinase-associated phosphoprotein 2, Volume-regulated anion channel subunit LRRC8C, Acyl-CoA dehydrogenase family member 9, mitochondrial, Beta-synuclein, Short coiled-coil protein, Collagen alpha-2 (VI) chain, Ubinuclein-2, Plasmalemma vesicle-associated protein, Mitofusin-2, Small integral membrane protein 20, Stromal interaction molecule 2, Threonylcarbamoyladenosine tRNA methylthiotransferase, Alpha-soluble NSF attachment protein, Putative E3 ubiquitin-protein ligase UBR7, BRCA1-associated ATM activator 1, Group XIIA secretory phospholipase A2, Transcription factor 20, Potassium channel subfamily K member 4, Casein kinase I isoform alpha, Bombesin receptor-activated protein C6orf89, Peripheral plasma membrane protein CASK, Proline-rich protein PRCC, Serine/threonine-protein kinase SIK2, Host cell factor 1, Transducin-like enhancer protein 4, Biogenesis of lysosome-related organelles complex 1 subunit 6, Queuine tRNA-ribosyltransferase subunit QTRTD1, RNA-binding protein 33, Leucine-rich repeat-containing protein 59, Transcription factor Sp3, Eukaryotic initiation factor 4A-III, E3 ubiquitin-protein ligase RNF181, Mediator of RNA polymerase II transcription subunit 7, Transcription elongation factor SPT4, Homeobox protein TGIF2, Carnitine O-palmitoyltransferase 1, liver isoform, cGMP-inhibited 3′,5′-cyclic phosphodiesterase B, Polymerase delta-interacting protein 3, Runt-related transcription factor 2, THUMP domain-containing protein 3, Serpin B6, Interleukin-32, Sodium-coupled neutral amino acid transporter 1, Nucleoside diphosphate kinase A, Cytochrome b, Putative uncharacterized protein ZNF436-AS1, Beta-1-syntrophin, Mitotic-spindle organizing protein 2A, Calcium/calmodulin-dependent protein kinase II inhibitor 1, Necdin, FERM domain-containing protein 8, Serine/threonine-protein phosphatase 2A catalytic subunit beta isoform, Transcription factor 4, SHC-transforming protein 4, Dedicator of cytokinesis protein 8, Ankyrin repeat domain-containing protein 54, Transcription factor jun-B, Periodic tryptophan protein 2 homolog, RUS1 family protein C16orf58, Pterin-4-alpha-carbinolamine dehydratase, Tyrosine-protein phosphatase non-receptor type 13, Chloride intracellular channel protein 5, PHD finger protein 20-like protein 1, 55 kDa erythrocyte membrane protein, Tetratricopeptide repeat protein 4, Roundabout homolog 1, Putative methyltransferase NSUN3, Toll-like receptor 9, E3 ubiquitin-protein ligase DTX3L, Arf-GAP with SH3 domain, ANK repeat and PH domain-containing protein 1, GRB2-related adapter protein, Fructosamine-3-kinase, TATA element modulatory factor, Nuclear autoantigen Sp-100, Solute carrier family 41 member 3, Putative Polycomb group protein ASXL2, Protein ZGRF1, Transmembrane emp24 domain-containing protein 5, E3 ubiquitin-protein ligase RNF31, B-cell receptor-associated protein 29, mRNA cap guanine-N7 methyltransferase, Uromodulin, Signal transducer CD24, Integrin alpha-6, NF-kappa-B essential modulator, Kinesin-like protein KIFC1, Translation machinery-associated protein 16, Valine-tRNA ligase, COMM domain-containing protein 9, 28S ribosomal protein S21, mitochondrial, Kalirin, Prostaglandin F2 receptor negative regulator, BTB/POZ domain-containing protein 2, Dol-P-Man:Man (5) GlcNAc (2)-PP-Dol alpha-1,3-mannosyltransferase, tRNA-dihydrouridine (20) synthase [NAD(P)+]-like, Surfeit locus protein 6, Rho GTPase-activating protein 19, Eukaryotic translation initiation factor 4E, C—X—C motif chemokine 14, Engulfment and cell motility protein 1, Collagen alpha-1 (XVIII) chain, Isochorismatase domain-containing protein 2, Coatomer subunit gamma-2, DNA-directed RNA polymerase III subunit RPC1, Kazrin, Synaptojanin-2-binding protein, Centrosomal protein of 85 kDa, Transmembrane protein 69, Lariat debranching enzyme, Receptor activity-modifying protein 2, F-box only protein 32, Transcription cofactor vestigial-like protein 4, SH3 domain-binding protein 1, Epsin-2, Mitogen-activated protein kinase 3, Ragulator complex protein LAMTOR2, Mitogen-activated protein kinase 9, Adipocyte plasma membrane-associated protein, [Pyruvate dehydrogenase [acetyl-transferring]]-phosphatase 1, mitochondrial, 28S ribosomal protein S12, mitochondrial, WD repeat and FYVE domain-containing protein 1, Protein disulfide-isomerase A4, Protein DEPP, Antigen peptide transporter 2, CDC42 small effector protein 1, Cyclin-dependent kinase 13, MICOS complex subunit MIC10, Nicastrin, Protein FAM73A, Complement C1q subcomponent subunit C, 28S ribosomal protein S7, mitochondrial, Serine/threonine-protein kinase TAO1, Ras GTPase-activating protein 3, Protein LDOC1L, Cytosolic 10-formyltetrahydrofolate dehydrogenase, Smoothelin, WW domain-binding protein 5, Phosphatidylinositide phosphatase SAC1, 39S ribosomal protein L3, mitochondrial, Inositol-trisphosphate 3-kinase B, Erythrocyte band 7 integral membrane protein, Solute carrier family 35 member E1, Probable 28S rRNA (cytosine (4447)-C(5))-methyltransferase, Y-box-binding protein 3, Proline-, glutamic acid- and leucine-rich protein 1, HCLS1-binding protein 3, Ubiquitin carboxyl-terminal hydrolase 37, Protein-L-isoaspartate (D-aspartate)O-methyltransferase, Transcriptional activator Myb, Abnormal spindle-like microcephaly-associated protein, Exportin-4, GMP reductase 1, Sperm-associated antigen 7, Tyrosine-protein kinase Fer, Coronin-1B, Acidic leucine-rich nuclear phosphoprotein 32 family member B, Schlafen family member 5, Macrophage erythroblast attacher, Histone acetyltransferase KAT2A, Mitotic spindle assembly checkpoint protein MAD2B, RecQ-mediated genome instability protein 1, Up-regulator of cell proliferation, Nucleoside diphosphate kinase, C-myc promoter-binding protein, Molybdate-anion transporter, Integrator complex subunit 5, Centrosomal protein of 170 kDa, Protein CASC5, Ephrin-A4, Tumor suppressor p53-binding protein 1, Proteasomal ATPase-associated factor 1, Gephyrin, Helicase SKI2W, Pleckstrin homology domain-containing family G member 2, Serine/threonine-protein kinase receptor R3, AP-5 complex subunit mu-1, Nuclear receptor subfamily 1 group D member 1, DnaJ homolog subfamily B member 2, Merlin, Ashwin, Transmembrane protein 176A, Synaptotagmin-like protein 2, Serine/threonine-protein kinase RIO2, AP-3 complex subunit beta-1, Forkhead box protein 01, Protein STON1-GTF2A1L, Lysine-specific demethylase 7A, Inactive phospholipase C-like protein 2, Transcription factor MafG, Protein TBRG4, Nesprin-1, Type I inositol 1,4,5-trisphosphate 5-phosphatase, Disks large homolog 3, Long-chain-fatty-acid-CoA ligase 5, Trafficking protein particle complex subunit 1, Bromodomain testis-specific protein, Heterochromatin protein 1-binding protein 3, Histone H1.3, Malectin, Glyoxalase domain-containing protein 4, SRSF protein kinase 2, Twinfilin-2, ATPase WRNIP1, Transgelin, Echinoderm microtubule-associated protein-like 3, Histone deacetylase complex subunit SAP18, RE1-silencing transcription factor, Protein tyrosine phosphatase type IVA 1, Phospholipase D3, Microfibrillar-associated protein 1, Putative protein arginine N-methyltransferase 9, Protein NYNRIN, NADH-cytochrome b5 reductase 1, Centrosomal protein POC5, Protrudin, Transcription initiation factor TFIID subunit 8, Motile sperm domain-containing protein 1, Splicing factor, arginine/serine-rich 19, BTB/POZ domain-containing adapter for CUL3-mediated RhoA degradation protein 2, Sentrin-specific protease 3, Interferon regulatory factor 1, 40S ribosomal protein S4, Y isoform 2, Transmembrane protein 147, Transcriptional regulator Kaiso, HCG2043421, isoform CRA_c, WD repeat-containing protein 78, 1,2-dihydroxy-3-keto-5-methylthiopentene dioxygenase, Aldehyde dehydrogenase family 16 member A1, Protein phosphatase 1D, Caspase-1, CMP-N-acetylneuraminate-beta-galactosamide-alpha-2,3-sialyltransferase 1, Putative 40S ribosomal protein S10-like, Protein DENND6A, N-glycosylase/DNA lyase, Kelch-like protein 5, RNA-binding protein 40, Major prion protein, Fibroblast growth factor receptor substrate 2, Fragile X mental retardation protein 1, Signal recognition particle 14 kDa protein, Sarcolemmal membrane-associated protein, 5-formyltetrahydrofolate cyclo-ligase, 2′,5′-phosphodiesterase 12, Receptor-type tyrosine-protein phosphatase U, Translocon-associated protein subunit gamma, Guanine nucleotide-binding protein-like 3, Ran-binding protein 6, Transcription factor Sp4, Histone deacetylase complex subunit SAP130, Adapter protein CIKS, PDZ and LIM domain protein 5, Ankyrin repeat domain-containing protein 40, Uroporphyrinogen decarboxylase, DNA repair protein RAD51 homolog 3, CGG triplet repeat-binding protein 1, Ubiquitin carboxyl-terminal hydrolase BAP1, ATP-dependent DNA helicase Q1, Sorting nexin-8, Syntaxin-binding protein 6, Protein syndesmos, Mitogen-activated protein kinase kinase kinase 6, Gametogenetin-binding protein 2, ATP-dependent 6-phosphofructokinase, muscle type, ADP-ribosylation factor-like protein 6-interacting protein 1, Protein dpy-30 homolog, Ras-like protein family member 11A, Core histone macro-H2A.1, Vacuolar protein sorting-associated protein 16 homolog, ER lumen protein-retaining receptor 2, Ubiquitin-conjugating enzyme E2 L3, Phosphatidate cytidylyltransferase 1, Putative oxidoreductase GLYR1, 39S ribosomal protein L37, mitochondrial, HLA class II histocompatibility antigen, DQ beta 1 chain, Mitogen-activated protein kinase 14, Mitogen-activated protein kinase 7, Endoplasmic reticulum lectin 1, Rho GTPase-activating protein 17, EP300-interacting inhibitor of differentiation 1, Codanin-1, Tetratricopeptide repeat protein 19, mitochondrial, High affinity cationic amino acid transporter 1, Protein strawberry notch homolog 2, Rabankyrin-5, HEAT repeat-containing protein 6, Mitochondrial antiviral-signaling protein, Liprin-alpha-1, Chromodomain-helicase-DNA-binding protein 9, Ras-specific guanine nucleotide-releasing factor RalGPS2, Transmembrane 9 superfamily member 1, Dipeptidyl peptidase 2, Lysophosphatidylcholine acyltransferase 1, E1A-binding protein p400, DNA fragmentation factor subunit alpha, DNA mismatch repair protein MIh1, Receptor-interacting serine/threonine-protein kinase 4, Alpha-tubulin N-acetyltransferase 1, HLA class I histocompatibility antigen, B-40 alpha chain, RILP-like protein 1, Aminopeptidase B, Protein fem-1 homolog A, DNA polymerase alpha catalytic subunit, Protein DGCR6L, Histone deacetylase 10, DENN domain-containing protein 4B, Transmembrane protein 102, Cell differentiation protein RCD1 homolog, GSK3-beta interaction protein, Multiple inositol polyphosphate phosphatase 1, THAP domain-containing protein 11, Synaptosomal-associated protein 29, Inversin, Small integral membrane protein 10, Kinesin light chain 1, tRNA-splicing endonuclease subunit Sen2, Putative phospholipase B-like 2, AP-1 complex subunit gamma-1, E3 ubiquitin-protein ligase RFWD2, Integrin alpha-X, Chitobiosyldiphosphodolichol beta-mannosyltransferase, Tripartite motif-containing protein 44, Histone H1.4, Liprin-beta-1, Zinc finger HIT domain-containing protein 2, RELT-like protein 1, Rhotekin, Long-chain fatty acid transport protein 1, Coiled-coil domain-containing protein 50, Pumilio homolog 2, Alpha-actinin-1, Vacuolar protein sorting-associated protein 54, Erlin-1, Ubiquitin carboxyl-terminal hydrolase 28, Echinoderm microtubule-associated protein-like 5, GRB2-associated-binding protein 1, Protein BANP, DNA excision repair protein ERCC-1, Zinc finger and BTB domain-containing protein 17, Autophagy-related protein 16-1, Segment polarity protein dishevelled homolog DVL-2, GRIP1-associated protein 1, Circadian clock protein PASD1, Cyclin-J-like protein, Tristetraprolin, Ral GTPase-activating protein subunit alpha-1, DENN domain-containing protein 5B, Caspase recruitment domain-containing protein 19, Eukaryotic translation initiation factor 4 gamma 2, Phospholipase DDHD1, Major facilitator superfamily domain-containing protein 1, Beta-glucuronidase, Putative protein PLEKHA9, Probable ATP-dependent RNA helicase DDX59, Putative histone H2B type 2-D, Osteopetrosis-associated transmembrane protein 1, Structure-specific endonuclease subunit SLX1, Nicalin, E3 ubiquitin-protein ligase XIAP, Rhomboid domain-containing protein 2, Telomere length regulation protein TEL2 homolog, Leucine-rich repeat serine/threonine-protein kinase 2, U3 small nucleolar RNA-associated protein 18 homolog, CAP-Gly domain-containing linker protein 1, Autophagy-related protein 13, WD repeat and FYVE domain-containing protein 3, Transcription initiation factor TFIID subunit 4B, Phosphatidylinositol N-acetylglucosaminyltransferase subunit H, Adiponectin receptor protein 2, Protein GPR107, Tumor protein p53-inducible protein 13, Apoptosis-stimulating of p53 protein 2, Kelch domain-containing protein 3, Leucine-rich repeat and calponin homology domain-containing protein 1, Vascular endothelial growth factor receptor 1, Transcription factor E2-alpha, Pre-mRNA-processing factor 17, Leupaxin, Transmembrane protein 2, Huntingtin-interacting protein 1, NIPA-like protein 3, Glucosamine-6-phosphate isomerase 2, U6 snRNA-associated Sm-like protein LSm8, Copper chaperone for superoxide dismutase, Major facilitator superfamily domain-containing protein 8, Integrator complex subunit 7, Cytoplasmic dynein 1 light intermediate chain 2, Protein angel homolog 1, Protein cramped-like, Transmembrane protein 261, Apoptosis-resistant E3 ubiquitin protein ligase 1, Endonuclease G, mitochondrial, Something about silencing protein 10, Calpain-7, Probable ATP-dependent RNA helicase DDX60, KAT8 regulatory NSL complex subunit 1, Protein NPAT, Rab3 GTPase-activating protein catalytic subunit, Transmembrane protein 223, tRNA wybutosine-synthesizing protein 2 homolog, T-complex protein 11-like protein 2, TATA box-binding protein-associated factor RNA polymerase I subunit B, Rab-like protein 2A, Inactive ubiquitin carboxyl-terminal hydrolase 54, Inner nuclear membrane protein Man1, Ribosomal protein S6 kinase alpha-4, Ligand of Numb protein X 2, DDB1- and CUL4-associated factor 16, HCG2044777, TELO2-interacting protein 2, Bromodomain-containing protein 9, Zinc finger protein 644, Dual specificity protein phosphatase 10, Tax1-binding protein 1, THAP domain-containing protein 4, DNA topoisomerase I, mitochondrial, NFATC2-interacting protein, ATPase family AAA domain-containing protein 1, Protein Hook homolog 1, Polypeptide N-acetylgalactosaminyltransferase 18, Kinesin-like protein KIF1C, Trafficking protein particle complex subunit 11, Cytochrome P450 4V2, NADH dehydrogenase [ubiquinone] iron-sulfur protein 2, mitochondrial, cAMP-dependent protein kinase type II-alpha regulatory subunit, Transmembrane protein 245, Acetyl-CoA acetyltransferase, mitochondrial, AP-1 complex subunit sigma-1A, mRNA export factor, Ski oncogene, Breast cancer type 2 susceptibility protein, E3 UFM1-protein ligase 1, Ribonuclease H2 subunit B, Beta-secretase 2, Growth arrest-specific protein 7, Lethal (2) giant larvae protein homolog 2, Activating signal cointegrator 1 complex subunit 3, Zinc finger protein 532, DNA-directed RNA polymerase II subunit RPB11-a, Ubiquitin/ISG15-conjugating enzyme E2 L6, Kelch-like protein 12, tRNA-dihydrouridine (47) synthase [NAD(P)(+)]-like, Activating molecule in BECN1-regulated autophagy protein 1, Angiomotin-like protein 1, Pleckstrin homology domain-containing family A member 4, Liprin-alpha-3, Fasciculation and elongation protein zeta-2, 5′-nucleotidase domain-containing protein 3, Growth arrest-specific protein 8, SLIT-ROBO Rho GTPase-activating protein 2, DNA dC→dU-editing enzyme APOBEC-3A, N-acetylgalactosamine kinase, U6 snRNA-associated Sm-like protein LSm4, Keratinocyte-associated transmembrane protein 2, E3 ubiquitin-protein ligase UBR1, Riboflavin kinase, TFIIH basal transcription factor complex helicase XPB subunit, GPN-loop GTPase 3, Nitrogen permease regulator 3-like protein, SH3KBP1-binding protein 1, Serine/threonine-protein phosphatase 4 regulatory subunit 3B, Unconventional myosin-XVIIIa, Ras GTPase-activating-like protein IQGAP3, Protein TRIM6-TRIM34, Calponin-2, Developmentally-regulated GTP-binding protein 1, Transcription initiation factor TFIID subunit 1, Zinc finger BED domain-containing protein 4, Ubiquitin-like modifier-activating enzyme 7, Protein C12orf4, Prefoldin subunit 1, Phosphatidate phosphatase LPIN1, N-acetyllactosaminide beta-1,3-N-acetylglucosaminyltransferase 2, Mitochondrial fission regulator 1, Palladin, Forkhead box protein J3, Tyrosine-protein phosphatase non-receptor type 12, Phospholipase A1 member A, Eyes absent homolog 2, Dual specificity protein phosphatase 6, COMM domain-containing protein 8, Nuclear factor NF-kappa-B p105 subunit, Ketosamine-3-kinase, E3 ubiquitin-protein ligase RLIM, Cyclin-L2, WD repeat domain phosphoinositide-interacting protein 4, DDB1- and CUL4-associated factor 4-like protein 1, Partitioning defective 3 homolog, 3-ketodihydrosphingosine reductase, Upstream-binding protein 1, Xyloside xylosyltransferase 1, Suppressor APC domain-containing protein 2, Translocon-associated protein subunit beta, Vacuolar protein sorting-associated protein 33B, Probable inactive glycosyltransferase 25 family member 3, HMG domain-containing protein 4, Protein orai-3, Copine-3, Myeloid-derived growth factor, BTB/POZ domain-containing adapter for CUL3-mediated RhoA degradation protein 1, Calcium-independent phospholipase A2-gamma, Sperm-specific antigen 2, Glycerol-3-phosphate acyltransferase 1, mitochondrial, Replication initiator 1, Uncharacterized protein C15orf39, Uncharacterized protein C5orf34, FAD synthase, Inhibitor of Bruton tyrosine kinase, Cell growth-regulating nucleolar protein, EF-hand domain-containing protein 1, Centrosome-associated protein CEP250, SH3 domain and tetratricopeptide repeat-containing protein 1, Kelch-like protein 21, Cullin-9, Optineurin, Kelch domain-containing protein 10, Cation channel sperm-associated protein 2, Solute carrier family 35 member C2, Carboxypeptidase D, Peroxisomal biogenesis factor 3, Kinesin-like protein KIF3A, Lysosomal-trafficking regulator, Uncharacterized aarF domain-containing protein kinase 2, Transportin-3, Mediator of RNA polymerase II transcription subunit 24, CAP-Gly domain-containing linker protein 2, Solute carrier family 35 member E4, Sestrin-3, Bromodomain adjacent to zinc finger domain protein 1A, Dehydrogenase/reductase SDR family member 1, Cyclin-dependent-like kinase 5, Heat shock factor protein 2, Serine/threonine-protein kinase TBK1, Ubiquitin conjugation factor E4 B, Band 4.1-like protein 3, ADNP homeobox protein 2, Ubiquitin carboxyl-terminal hydrolase 6, Mediator of DNA damage checkpoint protein 1, Mitochondrial fission factor, PDZ domain-containing protein GIPC1, Serine incorporator 1, Nectin-2, Phosphopantothenate-cysteine ligase, Paraspeckle component 1, Tumor necrosis factor receptor superfamily member 6, Vacuolar protein sorting-associated protein 29, EMILIN-2, Ubiquitin carboxyl-terminal hydrolase 33, Mediator of RNA polymerase II transcription subunit 14, Histone-lysine N-methyltransferase 2B, Coronin, Signal-induced proliferation-associated protein 1, 2-hydroxyacyl-CoA lyase 1, Kelch-like protein 22, Vacuolar protein sorting-associated protein 11 homolog, 1-phosphatidylinositol 4,5-bisphosphate phosphodiesterase gamma-1, Acylglycerol kinase, mitochondrial, Transmembrane protein 9B, Insulin-like growth factor 2 mRNA-binding protein 1, Tartrate-resistant acid phosphatase type 5, Kelch-like protein 18, Glycogen phosphorylase, liver form, Protein Mis18-beta, Guanine nucleotide-binding protein G (i) subunit alpha-1, Disheveled-associated activator of morphogenesis 2, Protein VAC14 homolog, Ubiquitin-like protein 4A, Vesicle-trafficking protein Zinc SEC22b, finger CCCH-type antiviral protein 1, Phosphatidylinositol N-acetylglucosaminyltransferase subunit A, Coiled-coil domain-containing protein 84, Vesicle-associated membrane protein 4, UPF0606 protein KIAA1549L, Phosphatidylglycerophosphatase and protein-tyrosine phosphatase 1, Uncharacterized protein C11orf24, 60S ribosomal protein L32, EF-hand calcium-binding domain-containing protein 7, Glucose-fructose oxidoreductase domain-containing protein 2, Nucleolar protein 6, NAD kinase, Methyltransferase-like protein 9, GTP-binding protein 2, Protocadherin beta-6, Myotubularin-related protein 4, Serine palmitoyltransferase small subunit A, G patch domain-containing protein 11, GRB2-associated-binding protein 2, Copper-transporting ATPase 1, Coiled-coil and C2 domain-containing protein 2A, Helicase ARIP4, Uncharacterized protein C20orf144, Gamma-soluble NSF attachment protein, Lysine-specific demethylase 6A, Protein S100-A6, Collagen alpha-2 (VIII) chain, Ephrin type-B receptor 1, Fer-1-like protein 5, Molybdenum cofactor sulfurase, Cysteine-rich protein 2, Interferon-induced protein with tetratricopeptide repeats 2, Fas-binding factor 1, IQ motif and SEC7 domain-containing protein 2, Beta-secretase 1, GDNF family receptor alpha-1, H/ACA ribonucleoprotein complex subunit 2, Rho guanine nucleotide exchange factor 17, Uncharacterized protein C2orf15, Nesprin-3, Ankyrin repeat domain-containing protein 35, Probable ATP-dependent RNA helicase DDX53, DNA-binding protein RFX6, BTB/POZ domain-containing protein KCTD7, Fanconi anemia group M protein, Collagen alpha-4 (IV) chain, Complement C4-A, Collagen alpha-1 (XIX) chain, Neuronal tyrosine-phosphorylated phosphoinositide-3-kinase adapter 2, Kinesin-like protein KIF27, Meprin A subunit beta, F-box/LRR-repeat protein 4, PHD finger protein 14, Arylsulfatase E, NACHT, LRR and PYD domains-containing protein 9, Kelch-like protein 2, Protein RER1, L-lactate dehydrogenase A-like 6B, Diacylglycerol O-acyltransferase 2, PWWP domain-containing protein 2B, DNA mismatch repair protein MIh3, Cathepsin K, Synaptojanin-1, Zinc finger MYND domain-containing protein 15, Histone H2A type 2-A, D-dopachrome decarboxylase, FAST kinase domain-containing protein 1, F-box only protein 41, Threonine synthase-like 1, Beta-1,4-galactosyltransferase 7, Usherin, Nucleoside diphosphate kinase B, Endoplasmic reticulum aminopeptidase 2, Wiskott-Aldrich syndrome protein, Cartilage intermediate layer protein 1, Probable phosphoglycerate mutase 4, Tumor protein D52, Histidine protein methyltransferase 1 homolog, Glutaredoxin-2, mitochondrial, Polycystin-1, Cilia- and flagella-associated protein 52, Oxysterol-binding protein 2, UV excision repair protein RAD23 homolog B, Protein boule-like, Beta-1,3-galactosyltransferase 6, Sodium-coupled monocarboxylate transporter 2, Rabenosyn-5, Leucine-rich repeat-containing protein 28, NUAK family SNF1-like kinase 2, Laminin subunit alpha-4, Otoferlin, Procollagen-lysine, 2-oxoglutarate 5-dioxygenase 1, Galectin-1, Ovochymase-1, Envoplakin, Neuron navigator 2, VIP peptides, Activin receptor type-2A, Serine/threonine-protein phosphatase with EF-hands 1, Kin of IRRE-like protein 3, Ankyrin repeat domain-containing protein 26, Microsomal glutathione S-transferase 1, Gamma-enolase, Matrix-remodeling-associated protein 5, HMG domain-containing protein 3, Selenide, water dikinase 2, Transmembrane glycoprotein NMB, Cytochrome b-245 light chain, Transcription factor 7-like 2, Tumor protein p63-regulated gene 1-like protein, Transmembrane protein 141, Protein FAM188B, Protein TANC1, 5-oxoprolinase, Tryptophan-tRNA ligase, cytoplasmic, Leishmanolysin-like peptidase, Kinesin-like protein KIF7, 40S ribosomal protein S12, Anthrax toxin receptor 1, Actin-related protein 2/3 complex subunit 1A, Nicotinate-nucleotide pyrophosphorylase [carboxylating], Caskin-2, Protein Wnt-5a, Dehydrogenase/reductase SDR family member 4, Fatty acid desaturase 1, RalBP1-associated Eps domain-containing protein 1, Cadherin-5, Mitogen-activated protein kinase kinase kinase MLT, Transcription initiation protein SPT3 homolog, HEAT repeat-containing protein 5A, Solute carrier family 26 member 6, CD109 antigen, Stress-induced-phosphoprotein 1, Nuclear receptor coactivator 7, Liprin-alpha-4, Mesoderm induction early response protein 1, Kynurenine-oxoglutarate transaminase 3, Leucine-zipper-like transcriptional regulator 1, Ubiquitin-like-conjugating enzyme ATG3, Protein shisa-5, Cell adhesion molecule-related/down-regulated by oncogenes, Breast cancer anti-estrogen resistance protein 3, Phosphoacetylglucosamine mutase, Ras-related protein Rab-14, Glutamate receptor ionotropic, kainate 2, DNA-directed RNA polymerase III subunit RPC3, Enhancer of polycomb homolog 1, Nuclear protein 1, Melanoma-associated antigen 11, Inositol polyphosphate multikinase, Sorting nexin-18, Poly [ADP-ribose] polymerase 12, Ubiquitin-conjugating enzyme E2 K, Leucine-rich repeats and immunoglobulin-like domains protein 2, Trifunctional enzyme subunit beta, mitochondrial, Cytoplasmic dynein 2 heavy chain 1, Thimet oligopeptidase, Regulatory-associated protein of mTOR, Protein FAM83H, DDB1- and CUL4-associated factor 12, Creatine kinase M-type, Nestin, ADP-ribosylation factor-binding protein GGA1, DDRGK domain-containing protein 1, Laminin subunit alpha-1, Upstream stimulatory factor 1, Reticulocalbin-3, Low-density lipoprotein receptor-related protein 4, PR domain zinc finger protein 10, Glutathione S-transferase Mu 3, Ribosomal protein S6 kinase alpha-5, Protein CLEC16A, Zinc transporter SLC39A7, Armadillo repeat containing 8, isoform CRA_g, Uncharacterized protein KIAA0355, Caseinolytic peptidase B protein homolog, Hypoxanthine-guanine phosphoribosyltransferase, Receptor-type tyrosine-protein phosphatase F, Rhophilin-2, E3 ubiquitin-protein ligase Arkadia, Dedicator of cytokinesis protein 5, Dynein heavy chain 14, axonemal, U5 small nuclear ribonucleoprotein 40 kDa protein, Progesterone-induced-blocking factor 1, Vesicle-associated membrane protein-associated protein A, Switch-associated protein 70, Prolow-density lipoprotein receptor-related protein 1, Noelin, D-3-phosphoglycerate dehydrogenase, Serine/threonine-protein kinase 24, Serine protease HTRA1, 39S ribosomal protein L12, mitochondrial, Peptidyl-prolyl cis-trans isomerase FKBP9, E3 ubiquitin-protein ligase TRIM21, Wee1-like protein kinase, Hydroxyacylglutathione hydrolase, mitochondrial, Solute carrier family 12 member 4, 1-phosphatidylinositol 4,5-bisphosphate phosphodiesterase gamma-2, USP6 N-terminal-like protein, Collagen alpha-1 (XV) chain, Nuclear fragile X mental retardation-interacting protein 2, Protein unc-119 homolog B, Exocyst complex component 6B, Aminoacylase-1, Kelch domain-containing protein 7B, pre-rRNA processing protein FTSJ3, Ryanodine receptor 1, Nucleobindin-1, Striatin-3, Serine/threonine-protein kinase ULK4, GTP-binding protein Rheb, Probable E3 ubiquitin-protein ligase HERC3, Dedicator of cytokinesis protein 1, Proline-rich protein 11, Sister chromatid cohesion protein PDS5 homolog B, Breast cancer anti-estrogen resistance protein 1, Vitamin K-dependent protein S, POZ-, AT hook-, and zinc finger-containing protein 1, Probable global transcription activator SNF2L1, Hepatocyte growth factor receptor, Leucine-rich repeat-containing protein 42, AMP deaminase 2, Protein phosphatase Slingshot homolog 3, Serine/threonine-protein kinase PLK3, BTB/POZ domain-containing protein 3, General transcription factor IIF subunit 1, Protein SOGA1, Serine/threonine-protein phosphatase 4 catalytic subunit, Zinc finger protein 3, Neurolysin, mitochondrial, T-box transcription factor TBX3, Bardet-Biedl syndrome 10 protein, Inositol-trisphosphate 3-kinase C, Serine/threonine-protein phosphatase 5, Phospholipase DDHD2, Zinc finger protein 530, Phospholysine phosphohistidine inorganic pyrophosphate phosphatase, SPRY domain-containing SOCS box protein 1, Supervillin, UDP-N-acetylglucosamine/UDP-glucose/GDP-mannose transporter, Complement decay-accelerating factor, LIM and calponin homology domains-containing protein 1, Lysosomal Pro-X carboxypeptidase, Putative RNA polymerase II subunit B1 CTD phosphatase RPAP2, Heat shock 70 kDa protein 13, Alpha/beta hydrolase domain-containing protein 14B, Unconventional myosin-X, Mimitin, mitochondrial, Protein TALPID3, Centrosomal protein of 63 kDa, Very-long-chain (3R)-3-hydroxyacyl-CoA dehydratase 3, HAUS augmin-like complex subunit 6, Neural cell adhesion molecule L1, Oxysterol-binding protein-related protein 1, Caspase recruitment domain-containing protein 8, Ras-related protein Rap-2c, Sorting nexin-30, Serine/threonine-protein kinase D3, Progressive ankylosis protein homolog, Bleomycin hydrolase, Trafficking protein particle complex subunit 2, Pyruvate carboxylase, mitochondrial, Peroxisome proliferator-activated receptor gamma coactivator 1-alpha, Cadherin EGF LAG seven-pass G-type receptor 2, Dedicator of cytokinesis protein 9, C-Jun-amino-terminal kinase-interacting protein 4, E3 ubiquitin-protein ligase SHPRH, Alpha-mannosidase 2x, H/ACA ribonucleoprotein complex subunit 1, Zinc finger protein 503, Tubulin polyglutamylase TTLL4, Oxysterol-binding protein-related protein 10, Origin recognition complex subunit 5, Serine/threonine-protein kinase PLK4, Disks large homolog 5, H/ACA ribonucleoprotein complex non-core subunit NAF1, Prolyl 3-hydroxylase 1, Protein FAM46B, Nuclear factor 1 X-type, Multiple PDZ domain protein, Serine/threonine-protein kinase SIK3, Ribonuclease P protein subunit p21, Serine/threonine-protein kinase MRCK beta, Serine/threonine-protein phosphatase 2A 55 kDa regulatory subunit B alpha isoform, snRNA-activating protein complex subunit 1, Rab proteins geranylgeranyltransferase component A 1, Cystine/glutamate transporter, ER degradation-enhancing alpha-mannosidase-like protein 3, RNA pseudouridylate synthase domain-containing protein 2, DENN domain-containing protein 1B, Trimethylguanosine synthase, Catechol O-methyltransferase, E3 ubiquitin-protein ligase DZIP3, Myotubularin-related protein 13, Epoxide hydrolase 1, RNA-binding motif protein, X-linked-like-2, Tyrosine-protein phosphatase non-receptor type 9, Cell cycle checkpoint control protein RAD9A, UHRF1-binding protein 1-like, Plasma membrane calcium-transporting ATPase 4, Aminoacyl tRNA synthase complex-interacting multifunctional protein 1, Neural Wiskott-Aldrich syndrome protein, Collagen alpha-1 (VII) chain, Kelch repeat and BTB domain-containing protein 2, Protein FAM63A, RNA-binding protein with multiple splicing 2, Discoidin domain-containing receptor 2, Actin filament-associated protein 1, Protein Smaug homolog 1, Serum paraoxonase/arylesterase 2, Ankyrin repeat and BTB/POZ domain-containing protein 2, Zinc-binding alcohol dehydrogenase domain-containing protein 2, Serine/threonine-protein kinase 3, Actin-related protein 10, Lipoma-preferred partner, Zinc finger protein RFP, Very-long-chain enoyl-CoA reductase, Elongation protein 4 homolog (S. cerevisiae), isoform CRA_b, Dual specificity protein phosphatase 4, Anoctamin-1, Actin-binding LIM protein 3, Kelch-like protein 9, Cytoplasmic aconitate hydratase, Protein FAM178B, Cell cycle control protein 50A, tRNA wybutosine-synthesizing protein 4, Cholinephosphotransferase 1, Glycogen synthase kinase-3 alpha, Tectonic-3, Paired amphipathic helix protein Sin3b, ATP-binding cassette sub-family D member 3, CCR4-NOT transcription complex subunit 4, Mini-chromosome maintenance complex-binding protein, Integral membrane protein 2C, Protein C-ets-2, Interferon-induced 35 kDa protein, RNA-binding protein NOB1, Selenocysteine insertion sequence-binding protein 2, Enoyl-CoA delta isomerase 2, mitochondrial, Receptor tyrosine-protein kinase erbB-3, Partitioning defective 3 homolog B, F-box only protein 42, Brain-specific angiogenesis inhibitor 1-associated protein 2, Hemoglobin subunit gamma-2, Zinc transporter 6, La-related protein 4, Zinc transporter 7, Ribonuclease P protein subunit p30, Tensin-2, Volume-regulated anion channel subunit LRRC8E, Kinesin-like protein KIF3B, Cytochrome c oxidase assembly protein COX11, mitochondrial, Tripartite motif-containing protein 47, Monocarboxylate transporter 1, DDB1- and CUL4-associated factor 4, Kinesin-like protein KIF1A, Kinesin-like protein KIF13A, ATP synthase F (0) complex subunit B1, mitochondrial, LIM domain-containing protein ajuba, UDP-glucose 6-dehydrogenase, Transcriptional enhancer factor TEF-3, Mid1-interacting protein 1, Lipase maturation factor 2, Ganglioside-induced differentiation-associated protein 2, BAG family molecular chaperone regulator 4, InaD-like protein, RNA binding protein fox-1 homolog 2, Protein TANC2, Probable E3 ubiquitin-protein ligase HECTD2, Medium-chain specific acyl-CoA dehydrogenase, mitochondrial, Prenylcysteine oxidase 1, Interferon alpha-inducible protein 27-like protein 2, RNA-binding protein 38, Ephrin-A1, Glycine dehydrogenase (decarboxylating), mitochondrial, Protein FAM50A, ELM2 and SANT domain-containing protein 1, UPF0668 protein C10orf76, Synaptonemal complex protein SC65, 5′-AMP-activated protein kinase catalytic subunit alpha-1, Peroxisome assembly protein 26, Thioredoxin domain-containing protein 5, Cell cycle and apoptosis regulator protein 2, X-box-binding protein 1, Protein YIF1A, PAB-dependent poly(A)-specific ribonuclease subunit PAN2, Methionine-R-sulfoxide reductase B1, Calcineurin-binding protein cabin-1, Protein RTF2 homolog, Endoplasmic reticulum-Golgi intermediate compartment protein 2, General transcription factor 3C polypeptide 3, N-acylneuraminate cytidylyltransferase, Zinc finger protein ZXDC, PRKCA-binding protein, Talin-2, SURP and G-patch domain-containing protein 2, Kinesin-1 heavy chain, Syntaxin-8, Galectin-3-binding protein, Ankyrin repeat and zinc finger domain-containing protein 1, E3 ubiquitin-protein ligase NEURL1B, Transcription and mRNA export factor ENY2, V-type proton ATPase 21 kDa proteolipid subunit, Probable RNA-binding protein 19, Selenoprotein O, Zinc finger protein 622, Origin recognition complex subunit 3, Serine/threonine-protein phosphatase 6 regulatory ankyrin repeat subunit A, 39S ribosomal protein L22, mitochondrial, Chromosome transmission fidelity protein 8 homolog isoform 2, Zinc finger protein 574, Ubiquitin-conjugating enzyme E2 T, Anthrax toxin receptor 2, Cilia- and flagella-associated protein 58, Mitogen-activated protein kinase-binding protein 1, Glucosamine 6-phosphate N-acetyltransferase, UPF0472 protein C16orf72, NAD(P) transhydrogenase, mitochondrial, E3 ubiquitin-protein ligase RNF220, Collagen alpha-1 (XII) chain, Serine/threonine-protein kinase OSR1, Inositol-pentakisphosphate 2-kinase, General transcription factor IIH subunit 2, Polycomb group RING finger protein 6, Isocitrate dehydrogenase [NAD] subunit alpha, mitochondrial, Protein MMS22-like, HAUS augmin-like complex subunit 7, PIN2/TERF1-interacting telomerase inhibitor 1, Homeobox protein Hox-A13, Tubby-related protein 4, Golgi apparatus membrane protein TVP23 homolog B, Phosphoribosyl pyrophosphate synthase-associated protein 1, Protein phosphatase methylesterase 1, Uncharacterized aarF domain-containing protein kinase 5, Protein canopy homolog 4, Zinc transporter ZIP3, L-xylulose reductase, Protein S100-A16, Zinc finger SWIM domain-containing protein 8, Charged multivesicular body protein 3, Aspartyl aminopeptidase, TSC22 domain family protein 4, 5′-AMP-activated protein kinase subunit gamma-1, CD99 antigen-like protein 2, CD81 antigen, Inositol 1,4,5-trisphosphate receptor-interacting protein, Ankyrin-2, Leucine-rich repeat protein SHOC-2, Angiomotin-like protein 2, Zinc finger protein 580, Proteasome subunit beta type-10, Torsin-1A-interacting protein 2, Centrosomal protein of 95 kDa, Securin, 26S protease regulatory subunit 8, Nucleoporin NUP53, Nicotinamide/nicotinic acid mononucleotide adenylyltransferase 1, Mediator of RNA polymerase II transcription subunit 13-like, Protein FAM172A, N-acetyl-D-glucosamine kinase, Hsp70-binding protein 1, Ribosomal RNA-processing protein 7 homolog A, Methylmalonic aciduria and homocystinuria type D protein, mitochondrial, Glycerol-3-phosphate dehydrogenase 1-like protein, 3-ketoacyl-CoA thiolase, mitochondrial, COMM domain-containing protein 6, Replication protein A 14 kDa subunit, Peptidyl-prolyl cis-trans isomerase CWC27 homolog, Uncharacterized protein C16orf45, NF-kappa-B inhibitor-interacting Ras-like protein 1, FRAS1-related extracellular matrix protein 2, Semaphorin-3C, Maturin, U11/U12 small nuclear ribonucleoprotein 48 kDa protein, Inactive tyrosine-protein kinase transmembrane receptor ROR1, Vacuolar protein sorting-associated protein 4B, UPF0469 protein KIAA0907, Melanoma-associated antigen D1, HLA class I histocompatibility antigen, alpha chain F, Zinc finger protein 506, Kinesin-like protein KIF22, Phosphatidylinositol 4-phosphate 3-kinase C2 domain-containing subunit alpha, Sarcosine dehydrogenase, mitochondrial, Glutamine and serine-rich protein 1, Alpha-parvin, Transmembrane protein 97, Importin subunit alpha-7, 60S ribosomal protein L11, TBC1 domain family member 22B, Neuronal calcium sensor 1, Glutamyl-tRNA (Gln) amidotransferase subunit C, mitochondrial, E3 ubiquitin-protein ligase RNF187, von Willebrand factor A domain-containing protein 5A, Class E basic helix-loop-helix protein 41, Box C/D snoRNA protein 1, C-terminal-binding protein 1, Acyl-CoA synthetase family member 4, Fos-related antigen 2, Mitofusin-1, Retinoic acid receptor gamma, Uncharacterized protein C17orf85, Very-long-chain (3R)-3-hydroxyacyl-CoA dehydratase 1, Tripartite motif-containing protein 65, Thioredoxin reductase 1, cytoplasmic, Cdc42 effector protein 3, Regulator of chromosome condensation, Glutamine-rich protein 1, Sphingosine-1-phosphate phosphatase 1, WD repeat-containing protein 92, Unconventional myosin-IXa, Biogenesis of lysosome-related organelles complex 1 subunit 4, Neurobeachin-like protein 1, Phosphomannomutase 1, Probable phospholipid-transporting ATPase IIA, Thioredoxin domain-containing protein 9, Inter-alpha-trypsin inhibitor heavy chain H5, E3 ubiquitin-protein ligase CBL, E3 SUMO-protein ligase PIAS1, Tenascin, NADH dehydrogenase [ubiquinone] iron-sulfur protein 6, mitochondrial, Glutathione synthetase, Ectonucleoside triphosphate diphosphohydrolase 4, V-type proton ATPase subunit B, brain isoform, TBC1 domain family member 14, DNA-directed RNA polymerases I and III subunit RPAC2, X-linked retinitis pigmentosa GTPase regulator, PTB domain-containing engulfment adapter protein 1, Protein Churchill, SUN domain-containing protein 1, E3 ubiquitin-protein ligase pellino homolog 3, Synembryn-A, SAP30-binding protein, Zinc finger and BTB domain-containing protein 7B, Ubinuclein-1, Cysteine-tRNA ligase, cytoplasmic, Protein FAM135A, PERQ amino acid-rich with GYF domain-containing protein 1, Cytochrome c1, heme protein, mitochondrial, FUN14 domain-containing protein 1, Isocitrate dehydrogenase [NAD] subunit gamma, mitochondrial, DNA damage-binding protein 2, Integrin beta-5, Histone-lysine N-methyltransferase 2A, KN motif and ankyrin repeat domain-containing protein 1, Small ubiquitin-related modifier 1, Derlin-3, Replication factor C subunit 3, Beta-crystallin B2, Elongator complex protein 6, Kelch domain-containing protein 2, Focadhesin, 26S proteasome non-ATPase regulatory subunit 7, U4/U6.U5 tri-snRNP-associated protein 2, Calpain-5, Cyclin E variant ex7del, BTB/POZ domain-containing protein 10, Beta-soluble NSF attachment protein, SMC5-SMC6 complex localization factor protein 2, WW domain-binding protein 2, F-box/WD repeat-containing protein 8, Ceramide synthase 2, WD repeat-containing protein WRAP73, Transmembrane protein 165, Zinc finger protein AEBP2, Charged multivesicular body protein 4a, Transcriptional adapter 3, Trafficking kinesin-binding protein 2, [Pyruvate dehydrogenase (acetyl-transferring)] kinase isozyme 4, mitochondrial, Cytochrome b-c1 complex subunit Rieske, mitochondrial, Protein bicaudal D homolog 2, Nibrin, SNW domain-containing protein 1, Sperm-associated antigen 5, TSC22 domain family protein 1, Corepressor interacting with RBPJ 1, Kinesin-like protein, General transcription factor II-I repeat domain-containing protein 1, RNA-binding protein PNO1, Vacuolar protein sorting-associated protein 52 homolog, Actin-related protein 5, Ran-binding protein 17, Intermediate filament family orphan 2, Ubiquitin-conjugating enzyme E2 G2, Myeloid leukemia factor 1, Poly(A) polymerase alpha, Protein IMPACT, Proto-oncogene tyrosine-protein kinase receptor Ret, Heat shock factor protein 1, PDZ domain-containing RING finger protein 4, Mothers against decapentaplegic homolog 4, RING finger protein 113A, Neuron navigator 3, Conserved oligomeric Golgi complex subunit 3, CASP8-associated protein 2, Glutathione S-transferase omega-1, BAH and coiled-coil domain-containing protein 1, Dynactin subunit 4, Transcription elongation factor B polypeptide 1, Tight junction-associated protein 1, Anaphase-promoting complex subunit 5, DNA replication ATP-dependent helicase/nuclease DNA2, Integrin alpha-9, Sarcospan, Catenin delta-1, Ankycorbin, Lamina-associated polypeptide 2, isoforms beta/gamma, Intraflagellar transport protein 74 homolog, Actin-related protein 8, Neuron-specific calcium-binding protein hippocalcin, Pre-mRNA-processing factor 40 homolog B, Tumor protein D54, Mitogen-activated protein kinase kinase kinase kinase 4, Myristoylated alanine-rich C-kinase substrate, Kinetochore protein Spc25, B9 domain-containing protein 1, Zinc finger homeobox protein 3, Membrane metallo-endopeptidase-like 1, Vesicle-associated membrane protein-associated protein B/C, Zinc finger CCCH domain-containing protein 11A, 60S ribosomal protein L39-like, Transcription initiation factor TFIID subunit 7, Transforming growth factor beta-1, Max-like protein X, tRNA pseudouridine synthase A, mitochondrial, Asparagine synthetase domain-containing protein 1, mRNA-capping enzyme, Zinc finger protein SNAI2, ETS translocation variant 1, 5′-AMP-activated protein kinase catalytic subunit alpha-2, Kinesin-like protein KIFC3, Cathepsin L1, Aspartyl/asparaginyl beta-hydroxylase, Leucine-rich repeat-containing protein 61, Zinc finger protein 721, Flavin reductase (NADPH), Voltage-dependent anion-selective channel protein 1, KH domain-containing, RNA-binding, signal transduction-associated protein 3, Probable E3 ubiquitin-protein ligase HERC6, ER membrane protein complex subunit 3, Homeobox protein Hox-B7, Zinc finger C2HC domain-containing protein 1A, T-box transcription factor TBX15, Putative zinc finger protein 724, Zinc finger protein 486, Zinc finger protein 675, Prolyl endopeptidase-like, UBX domain-containing protein 8, Gamma-aminobutyric acid receptor subunit pi, ATP-dependent RNA helicase DDX54, Lysine-specific demethylase 4B, Protocadherin-1, Zinc finger protein 490, NKG2D ligand 3, Uncharacterized protein C18orf63, Peptidyl-prolyl cis-trans isomerase B, Plasma alpha-L-fucosidase, Notchless protein homolog 1, Adenosine 3′-phospho 5′-phosphosulfate transporter 1, Nucleus accumbens-associated protein 1, Biorientation of chromosomes in cell division protein 1-like 1, CDK5 and ABL1 enzyme substrate 2, Putative tRNA (cytidine (32)/guanosine (34)-2′-O)-methyltransferase, tRNA-splicing endonuclease subunit Sen54, Beta-galactosidase-1-like protein 2, Protein archease, Formin-binding protein 1-like, Eukaryotic translation initiation factor 2 subunit 2, Centromere/kinetochore protein zw10 homolog, Pyridoxal kinase, Tyrosine-protein phosphatase non-receptor type 14, Phosphatidate cytidylyltransferase 2, M-phase phosphoprotein 8, Ribonuclease P/MRP protein subunit POP5, DENN domain-containing protein 5A, Nuclear receptor coactivator 6, UDP-N-acetylhexosamine pyrophosphorylase, Mediator of RNA polymerase II transcription subunit 22, Transcription factor COE2, Niban-like protein 1, GREB1-like protein, Vesicular integral-membrane protein VIP36, Dynactin subunit 6, Sperm-associated antigen 16 protein, Abelson tyrosine-protein kinase 2, Opioid growth factor receptor, Proteasomal ubiquitin receptor ADRM1, Gamma-aminobutyric acid receptor-associated protein, B-cell CLL/lymphoma 9-like protein, Retroviral-like aspartic protease 1, Procollagen-lysine, 2-oxoglutarate 5-dioxygenase 3, Bifunctional arginine demethylase and lysyl-hydroxylase JMJD6, Histone-lysine N-methyltransferase SETD7, Ras-associated and pleckstrin homology domains-containing protein 1, Mortality factor 4-like protein 2, Kinesin-like protein KIF15, Pleckstrin homology-like domain family B member 1, Zinc finger protein ubi-d4, KxDL motif-containing protein 1, Transmembrane protein 160, Very long-chain specific acyl-CoA dehydrogenase, mitochondrial, Signal recognition particle receptor subunit beta, Small G protein signaling modulator 3, Sodium-dependent lysophosphatidylcholine symporter 1, DNA-directed RNA polymerase III subunit RPC5, Protein Tob2, UPF0488 protein C8orf33, DNA-directed RNA polymerase III subunit RPC2, Protein spire homolog 1, Spectrin beta chain, non-erythrocytic 2, Phosphatidylinositol transfer protein beta isoform, CCAAT/enhancer-binding protein beta, Ras and Rab interactor 2, Histone-lysine N-methyltransferase 2D, ADP-ribose pyrophosphatase, mitochondrial, Peptidyl-prolyl cis-trans isomerase FKBP14, Transcription factor AP-2 alpha (Activating enhancer binding protein 2 alpha), isoform CRA_c, Putative pituitary tumor-transforming gene 3 protein, WW domain-containing transcription regulator protein 1, AP-5 complex subunit sigma-1, Protein EFR3 homolog A, Tubulin polyglutamylase TTLL7, BolA-like protein 3, MORC family CW-type zinc finger protein 3, Cleavage stimulation factor subunit 2 tau variant, Pleckstrin homology domain-containing family A member 5, Coronin-2B, Arpin, Reticulon-1, Centrosomal protein of 41 kDa, NEDD8-conjugating enzyme Ubc12, Protein S100-A13, ATP synthase subunit a, Fibronectin type-Ill domain-containing protein 3A, Serine/threonine-protein phosphatase 2A 56 kDa regulatory subunit delta isoform, Lipase maturation factor 1, Pituitary tumor-transforming gene 1 protein-interacting protein, GRAM domain-containing protein 1B, DNA topoisomerase 3-alpha, Uncharacterized protein, Dynamin-1, Cell division cycle protein 23 homolog, Pre-mRNA-splicing factor SYF1, Focal adhesion kinase 1, SH2B adapter protein 1, Breast cancer metastasis-suppressor 1-like protein, Putative protein N-methyltransferase FAM86B1, Dual specificity protein kinase CLK1, Non-structural maintenance of chromosomes element 4 homolog A, Nephrocystin-1, Ectonucleoside triphosphate diphosphohydrolase 6, Protein LSM12 homolog, Tubulin-tyrosine ligase-like protein 12, Leucine-rich repeat-containing protein 57, Nuclear factor 1 C-type, Diphosphoinositol polyphosphate phosphohydrolase 3-alpha, Ras and Rab interactor 1, Acyl-CoA dehydrogenase family member 10, Coiled-coil domain-containing protein 115, Serine/threonine-protein kinase B-raf, Arf-GAP with GTPase, ANK repeat and PH domain-containing protein 3, 28S ribosomal protein S15, mitochondrial, E3 ubiquitin-protein ligase NEDD4, Monofunctional C1-tetrahydrofolate synthase, mitochondrial, 3-hydroxybutyrate dehydrogenase type 2, Cysteine-rich with EGF-like domain protein 1, Zinc finger MYM-type protein 1, Exostosin-like 2, LysM and putative peptidoglycan-binding domain-containing protein 2, SLAIN motif-containing protein 2, SWI/SNF complex subunit SMARCC1, Charged multivesicular body protein 1a, Cytochrome c oxidase assembly protein COX14, Uncharacterized protein KIAA1522, Kinesin-like protein KIF2C, Protein-cysteine N-palmitoyltransferase HHAT, Deoxyguanosine kinase, mitochondrial, Potassium voltage-gated channel subfamily G member 1, Thyroid transcription factor 1-associated protein 26, Centrosomal protein of 89 kDa, Leucine zipper putative tumor suppressor 1, Rap guanine nucleotide exchange factor 6, Histone-lysine N-methyltransferase EHMT2, Fanconi anemia group C protein, COBW domain-containing protein 5, MICAL-like protein 2, Zinc finger protein 217, Protein CASC3, GPI-anchor transamidase, Caspase-8, Centrin-1, Ubiquitin carboxyl-terminal hydrolase 43, Protein deglycase DJ-1, Zinc finger and BTB domain-containing protein 2, Dual specificity mitogen-activated protein kinase kinase 1, Rho-related GTP-binding protein RhoE, Reticulon-3, Sialin, Kit ligand, Nuclear receptor coactivator 3, Calmodulin-regulated spectrin-associated protein 2, Wiskott-Aldrich syndrome protein family member 2, Histone H1x, Mothers against decapentaplegic homolog 6, Activating transcription factor 7-interacting protein 2, Uncharacterized protein C17orf112, Leukocyte tyrosine kinase receptor, PRELI domain containing protein 3A, Sugar phosphate exchanger 3, Type I inositol 3,4-bisphosphate 4-phosphatase, E3 ubiquitin-protein ligase TRIM38, DNA primase small subunit, Pleckstrin homology-like domain family B member 2, GDH/6PGL endoplasmic bifunctional protein, D-beta-hydroxybutyrate dehydrogenase, mitochondrial, Ubiquitin carboxyl-terminal hydrolase isozyme L5, Chloride channel CLIC-like protein 1, Zinc finger SWIM domain-containing protein 7, mRNA-decapping enzyme 1A, Centromere protein J, G protein pathway suppressor 2, Protein CYR61, Rho guanine nucleotide exchange factor 35, Integrin alpha-7, Transcriptional coactivator YAP1, Spermatogenesis-associated serine-rich protein 2, Myotubularin-related protein 14, GATS-like protein 2, Oxidative stress-responsive serine-rich protein 1, Tigger transposable element-derived protein 2, Mediator of RNA polymerase II transcription subunit 20, Guanine nucleotide-binding protein G(I)/G(S)/G(O) subunit gamma-12, Mediator of RNA polymerase II transcription subunit 25, Protein FAM84B, Protein FAN, Nitric oxide synthase-interacting protein, Striatin, Phosducin-like protein, Protein fuzzy homolog, Tubby-related protein 3, SEC14 domain and spectrin repeat-containing protein 1, NHS-like protein 1, Lysine-specific demethylase 3A, TGF-beta-activated kinase 1 and MAP3K7-binding protein 2, LON peptidase N-terminal domain and RING finger protein 1, DNA topoisomerase 2-binding protein 1, MAP7 domain-containing protein 3, BRCA1-associated RING domain protein 1, DNA-directed RNA polymerase, mitochondrial, GAS2-like protein 3, Probable 8-oxo-dGTP diphosphatase NUDT15, Transmembrane and TPR repeat-containing protein 2, Selenoprotein N, Zinc finger protein 383, Tumor necrosis factor receptor superfamily member 3, Transmembrane protein 39A, Tetraspanin-10, Serine/threonine-protein kinase LATS2, BRF1 protein, Apoptosis-inducing factor 2, GLTSCR1-like protein, Calmodulin-binding transcription activator 1, Syndecan-3, Uncharacterized protein C1orf198, Cell division cycle protein 20 homolog, SH3 domain-containing protein 19, Ephrin-A5, Synphilin-1, SWI/SNF-related matrix-associated actin-dependent regulator of chromatin subfamily D member 1, Protein FAM204A, Dual specificity mitogen-activated protein kinase kinase 3, Germinal-center associated nuclear protein, Protein transport protein Sec24B, Putative UDP-GlcNAc:betaGal beta-1,3-N-acetylglucosaminyltransferase LOC100288842, Glycogenin-2, EF-hand calcium-binding domain-containing protein 11, ATP-dependent 6-phosphofructokinase, liver type, Hydroxyacylglutathione hydrolase-like protein, StAR-related lipid transfer protein 13, Dynactin subunit 3, Alpha-internexin, Dehydrogenase/reductase SDR family member on chromosome X, Transcription initiation factor IIA subunit 1, Copine-2, Acyl-CoA:lysophosphatidylglycerol acyltransferase 1, Dolichyl-diphosphooligosaccharide-protein glycosyltransferase subunit 4, Fas-activated serine/threonine kinase, Zinc finger CCCH domain-containing protein 7A, Golgin-45, Oxidoreductase HTATIP2, Neuronal regeneration-related protein, E3 ubiquitin-protein ligase TRIM23, Vacuolar protein sorting-associated protein 45, Sulfate anion transporter 1, Uncharacterized protein C5orf42, Small nuclear ribonucleoprotein Sm D3, Selenoprotein K, Bcl-2 homologous antagonist/killer, Mitochondrial peptide methionine sulfoxide reductase, Latent-transforming growth factor beta-binding protein 3, Uncharacterized protein C11orf80, Integrin alpha-11, A-kinase anchor protein 12, Ras-related protein Rab-1B, Acetyl-CoA carboxylase 2, RNA-binding motif protein, X-linked 2, Tubulin-specific chaperone C, Tensin-3, Uncharacterized protein CXorf57, ER lumen protein-retaining receptor 3, Disabled homolog 2-interacting protein, 7-methylguanosine phosphate-specific 5′-nucleotidase, Ataxin-2, Caveolin-2, Calcium-responsive transactivator, Melanophilin, Coiled-coil domain-containing protein 130, Alpha-actinin-3, Serine/threonine-protein kinase ULK3, Myelin expression factor 2, Multifunctional methyltransferase subunit TRM112-like protein, Protein FAM214A, Potassium voltage-gated channel subfamily KQT member 5, Sialate O-acetylesterase, Protein ELFN1, TATA-box-binding protein, Mitogen-activated protein kinase kinase kinase 12, Aurora kinase A-interacting protein, Tetratricopeptide repeat protein 12, Transcription factor E2F4, CAP-Gly domain-containing linker protein 4, Glutamine synthetase, Signal peptide peptidase-like 2A, Glucoside xylosyltransferase 1, GEM-interacting protein, Zinc finger protein 277, Ubiquitin carboxyl-terminal hydrolase 14, Calcium-binding mitochondrial carrier protein Aralar1, N(G),N(G)-dimethylarginine dimethylaminohydrolase 1, GTP-binding protein Rit1, Matrix Gla protein, Cell surface glycoprotein MUC18, Polypeptide N-acetylgalactosaminyltransferase 5, Calcyphosin, PEST proteolytic signal-containing nuclear protein, Serine/threonine-protein kinase Nek7, Calpain-3, Membrane-associated transporter protein, V-type proton ATPase subunit B, kidney isoform, Sialidase-4, Zinc finger protein 552, Colipase-like protein 2, ATP-binding cassette sub-family G member 1, Fumarate hydratase, mitochondrial, Protein phosphatase inhibitor 2, Tyrosine-protein kinase HCK, 2-oxoglutarate dehydrogenase, mitochondrial, Uncharacterized protein ENSP00000382042, Testicular acid phosphatase, Lysosomal acid phosphatase, Protein FAM195A, Nuclear inhibitor of protein phosphatase 1, Exosome complex component CSL4, Sodium-coupled neutral amino acid transporter 5, Protein arginine N-methyltransferase 5, Peptidase M20 domain-containing protein 2, Drebrin, NAD(P)H-hydrate epimerase, 1-phosphatidylinositol 4,5-bisphosphate phosphodiesterase beta-1, DCN1-like protein 2, DnaJ homolog subfamily B member 9, NACHT, LRR and PYD domains-containing protein 7, Cystatin-B, Fatty aldehyde dehydrogenase, D (2) dopamine receptor, Reticulon-2, COBW domain-containing protein 6, Myosin light chain 1/3, skeletal muscle isoform, Zinc finger Ran-binding domain-containing protein 2, Peptidyl-prolyl cis-trans isomerase FKBP1A, Immunoglobulin superfamily member 10, Olfactomedin-like protein 2B, Proteasome activator complex subunit 1, Putative uncharacterized protein C10orf113, Protein disulfide-isomerase TMX3, Plastin-2, Transmembrane protein 14D, Nck-associated protein 1-like, CXXC-type zinc finger protein 1, Guanine nucleotide-binding protein G(s) subunit alpha isoforms XLas, Integrator complex subunit 10, Protein FAM217A, HAUS augmin-like complex subunit 8, Mesoderm development candidate 1, Zinc finger protein 827, DNA-directed RNA polymerase I subunit RPA49, Symplekin, Protein spinster homolog 3, 28S ribosomal protein S9, mitochondrial, Melanocyte-stimulating hormone receptor, Enteropeptidase, Poly(A) polymerase gamma, Ribosomal RNA processing protein 1 homolog A, Disintegrin and metalloproteinase domain-containing protein 15, Activator of basal transcription 1, Ribonuclease K6, Centromere protein N, Olfactory receptor 5K3, N-acetyllactosaminide beta-1,6-N-acetylglucosaminyl-transferase, isoform A, Serine/threonine-protein phosphatase 6 regulatory subunit 1, Leukocyte-associated immunoglobulin-like receptor 1, 39S ribosomal protein L44, mitochondrial, Ig lambda-2 chain C regions, Sialoadhesin, Transmembrane inner ear expressed protein, Tetraspanin-18, Protein-glutamine gamma-glutamyltransferase 4, Endothelin-1 receptor, Protein FAM127A, Period circadian protein homolog 1, Autism susceptibility gene 2 protein, Voltage-dependent T-type calcium channel subunit alpha-1G, Protein Hook homolog 2, Cyclin-Y-like protein 2, BPI fold-containing family A member 2, Solute carrier family 2, facilitated glucose transporter member 2, Peroxidasin-like protein, Mitochondrial import receptor subunit TOM6 homolog, Phosphorylase b kinase gamma catalytic chain, skeletal muscle/heart isoform, Inosine-5′-monophosphate dehydrogenase 1, Proline and serine-rich protein 3, WD repeat-containing protein 54, Protein FAM117A, Carboxylesterase 3, Bardet-Biedl syndrome 7 protein, Exocyst complex component 5, Probable phospholipid-transporting ATPase VA, Pre-B-cell leukemia transcription factor-interacting protein 1, MICAL C-terminal-like protein, Protein transport protein Sec24C, Epiplakin, Inactive ubiquitin carboxyl-terminal hydrolase 17-like protein 4, Kinesin heavy chain isoform 5A, Hyaluronan and proteoglycan link protein 2, Intraflagellar transport protein 46 homolog, Kinesin-like protein KIF21B, OTU domain-containing protein 6B, C—X—C motif chemokine 9, Uncharacterized protein CXorf23, Centrosomal protein of 170 kDa protein B, Testis-specific Y-encoded-like protein 2, Oxysterols receptor LXR-beta, Williams-Beuren syndrome chromosomal region 16 protein, Zinc finger protein 559, Glutamate-rich protein 3, GLIPR1-like protein 2, Pleckstrin homology domain-containing family G member 3, Putative vomeronasal receptor-like protein 4, Gamma-glutamyltransferase 6, Serine/threonine-protein kinase pim-3, Ribonuclease H2 subunit C, Neurexin-3, Mucin-16, Non-structural maintenance of chromosomes element 1 homolog, E2F-associated phosphoprotein, Actin-binding LIM protein 1, Non-canonical poly(A) RNA polymerase PAPD7, Nuclear receptor-binding factor 2, Gypsy retrotransposon integrase-like protein 1, Monocarboxylate transporter 4, Coiled-coil domain-containing protein 60, Inactive phospholipase D5, Microtubule cross-linking factor 1, ATP synthase subunit delta, mitochondrial, G patch domain-containing protein 2, Protein disulfide-isomerase A2, ATP-binding cassette sub-family A member 9, Unconventional myosin-Ih, Band 4.1-like protein 1, Gigaxonin, Acyl-CoA-binding domain-containing protein 6, Complement receptor type 2, Eukaryotic elongation factor 2 kinase, Large subunit GTPase 1 homolog, tRNA (uracil (54)-C(5))-methyltransferase homolog, Nectin-1, Zinc finger protein 460, Ras association domain-containing protein 2, SLIT-ROBO Rho GTPase-activating protein 3, ETS domain-containing protein Elk-4, Nucleoporin-like protein 2, U2 small nuclear ribonucleoprotein auxiliary factor 35 kDa subunit-related protein 2, Bestrophin-3, Heparan-alpha-glucosaminide N-acetyltransferase, Protein SGT1 homolog, Choline-phosphate cytidylyltransferase B, Fibrillin-3, GPALPP motifs-containing protein 1, Meiosis arrest female protein 1, ETS domain-containing protein Elk-3, Embigin, Protein TFG, Phosphomannomutase 2, V-type proton ATPase subunit G 1, T-box transcription factor TBX20, Beta-1,3-galactosyltransferase 5, Olfactory receptor 12D2, Laminin subunit alpha-5, Forkhead box protein 03, Tumor necrosis factor receptor superfamily member 18, Leukocyte elastase inhibitor, Solute carrier family 22 member 9, Nuclease EXOG, mitochondrial, Leucine-rich repeat LGI family member 4, Anosmin-1, Centrosomal protein of 152 kDa, Selenocysteine-specific elongation factor, Hairy/enhancer-of-split related with YRPW motif protein 1, Scaffold attachment factor B1, Cytochrome b-c1 complex subunit 2, mitochondrial, Tetratricopeptide repeat protein 8, Ubiquitin carboxyl-terminal hydrolase 1, Phospholipid phosphatase 5, Zinc finger protein 623, Zinc finger protein 791, Zinc finger protein with KRAB and SCAN domains 1, Zinc finger protein 397, O-acetyl-ADP-ribose deacetylase MACROD1, Ig lambda chain V-II region BOH, Ig kappa chain V-I region Walker, MYCBP-associated protein, 60S ribosomal protein L36a, Phospholipase ABHD3, TBC1 domain family member 9, Ras GTPase-activating protein 1, Solute carrier family 35 member E2B, Calcium channel flower homolog, T-cell-specific surface glycoprotein CD28, Sterile alpha motif domain-containing protein 9-like, Hydroxysteroid dehydrogenase-like protein 2, Tripartite motif-containing protein 26, Vitamin D 25-hydroxylase, Pre-mRNA-splicing factor SLU7, WD repeat-containing protein 75, Zinc finger protein 213, Zinc finger protein 845, Ras-related protein Rab-6A, Zinc finger protein 264, Estradiol 17-beta-dehydrogenase 8, Dual specificity protein phosphatase 16, Protein lin-7 homolog C, Major vault protein, Interferon-induced protein 44, Golgi pH regulator A, Ethanolamine kinase 1, Phosphatidylinositol 3-kinase regulatory subunit alpha, Protein phosphatase 1K, mitochondrial, Transmembrane protein 222, DC-STAMP domain-containing protein 2, Basic salivary proline-rich protein 4, Ig kappa chain V-I region WAT, Fibronectin, FERM domain-containing protein 3, Zinc finger protein 507, NADH dehydrogenase [ubiquinone] 1 alpha subcomplex subunit 8, Olfactory receptor 812, Dual adapter for phosphotyrosine and 3-phosphotyrosine and 3-phosphoinositide, Splicing factor 3A subunit 2, Dynein heavy chain 6, axonemal, HLA class I histocompatibility antigen, A-30 alpha chain, Tryptophan 2,3-dioxygenase, MKL/myocardin-like protein 1, Rho guanine nucleotide exchange factor 5, Protein phosphatase 2C-like domain-containing protein 1, Histatin-3, 60S ribosomal protein L36a-like, Cancer/testis antigen 47A, Centrosomal protein of 97 kDa, Thyroid hormone receptor-associated protein 3, Beta-galactoside alpha-2,6-sialyltransferase 2, Transcription factor ETV6, Gamma-glutamyltranspeptidase 1, Suppression of tumorigenicity 18 protein, Calpain-12, Neuropeptide FF receptor 1, AP-1 complex subunit gamma-like 2, Uncharacterized protein C2orf16, Programmed cell death protein 10, TBC1 domain family member 2B, Hematopoietic SH2 domain-containing protein, Thrombospondin type-1 domain-containing protein 7B, Paired box protein Pax-9, Mucin-3A, 5-phosphohydroxy-L-lysine phospho-lyase, Extracellular matrix protein FRAS1, Transmembrane protein 201, Monoacylglycerol lipase ABHD12, Low-density lipoprotein receptor-related protein 1B, DENN domain-containing protein 1A, Basic helix-loop-helix domain-containing protein KIAA2018, Olfactory receptor 5H15, Leucine-rich repeat-containing protein 16A, Calcium/calmodulin-dependent protein kinase type 1, G-protein coupled receptor 98, Tumor suppressor candidate 2, Stress-associated endoplasmic reticulum protein 1, Annexin A7, Tetraspanin-8, 60S ribosomal protein L12, Probable ATP-dependent RNA helicase DDX52, Ribulose-phosphate 3-epimerase, Eukaryotic translation initiation factor 5B, Ubiquitin carboxyl-terminal hydrolase 40, Trace amine-associated receptor 6, Tetra-peptide repeat homeobox protein 1, Serine/threonine-protein phosphatase 4 regulatory subunit 2, Protein capicua homolog, Sphingomyelin phosphodiesterase 3, Sodium channel protein type 5 subunit alpha, Calcineurin subunit B type 2, Methylcrotonoyl-CoA carboxylase subunit alpha, mitochondrial, Kelch repeat and BTB domain-containing protein 12, Titin, NADH dehydrogenase [ubiquinone] 1 beta subcomplex subunit 1, Pre-mRNA-splicing factor SYF2, Zinc finger protein 215, Collagen alpha-6 (VI) chain, Zinc finger protein 491, Phosphoenolpyruvate carboxykinase, cytosolic [GTP], Zinc finger protein 726, PDZ domain-containing protein 8, Zinc finger protein 470, Glucose-6-phosphate translocase, Protein bassoon, Ciliogenesis-associated TTC17-interacting protein, Heparan-sulfate 6-O-sulfotransferase 2, Stabilin-2, Desmoglein-2, Tumor necrosis factor ligand superfamily member 11, Arginase-1, Repetin, Potassium-transporting ATPase alpha chain 1, C1GALT1-specific chaperone 1, UPF0729 protein C18orf32, Cholesterol 24-hydroxylase, Spermidine synthase, TRAF-interacting protein with FHA domain-containing protein A, Protein FAM173B, Leydig cell tumor 10 kDa protein homolog, Brain-specific angiogenesis inhibitor 1-associated protein 2-like protein 1, General transcription factor 3C polypeptide 4, Synaptojanin-2, Protein KIAA2022, Regulatory factor X-associated protein, Prefoldin subunit 3, Poly(ADP-ribose) glycohydrolase, Sorting nexin-29, 3-hydroxyisobutyryl-CoA hydrolase, mitochondrial, Oxysterol-binding protein 1, F-BAR and double SH3 domains protein 2, Remodeling and spacing factor 1, Zymogen granule protein 16 homolog B, Ubiquitin carboxyl-terminal hydrolase 3, Rap guanine nucleotide exchange factor 2, Dynein heavy chain 1, axonemal, Dedicator of cytokinesis protein 3, Nucleoporin p58/p45, MARCKS-related protein, MARVEL domain-containing protein 2, ADP-ribosylation factor-binding protein GGA2, Cancer-related nucleoside-triphosphatase, Unconventional myosin-VIIb, Cyclin-dependent kinase-like 5, Dol-P-Glc:Glc (2) Man (9) GlcNAc (2)-PP-Dol alpha-1,2-glucosyltransferase, Leucine-rich repeat-containing protein 40, Solute carrier family 7 member 13, Aromatase, Thromboxane-A synthase, Hypoxia up-regulated protein 1, Translin, ADP-ribosylation factor-like protein 11, Peptidylprolyl isomerase domain and WD repeat-containing protein 1, Proto-oncogene vav, Protein mab-21-like 3, Suppressor of tumorigenicity 7 protein-like, Apolipoprotein B receptor, Dystrophin-related protein 2, Orexin receptor type 1, Nucleolar protein 16, 60S ribosomal protein L29, Potassium-transporting ATPase alpha chain 2, Sodium-driven chloride bicarbonate exchanger, Uncharacterized protein C9orf171, Ankyrin repeat and LEM domain-containing protein 1, Vasohibin-2, Putative nuclease HARBI1, Hyaluronidase-4, G-protein coupled receptor family C group 6 member A, Nucleoporin Nup43, Delta (14)-sterol reductase, Phospholipid-transporting ATPase ID, GTP-binding protein 1, G patch domain-containing protein 8, IQ motif and SEC7 domain-containing protein 1, Selenoprotein S, DnaJ homolog subfamily C member 13, Leucine-rich repeat and fibronectin type-Ill domain-containing protein 4, Dynein heavy chain 9, axonemal, Dynein heavy chain 10, axonemal, Echinoderm microtubule-associated protein-like 4, Melatonin receptor type 1A, CTP synthase 2, Ubiquitin-like modifier-activating enzyme ATG7, Carboxy-terminal domain RNA polymerase II polypeptide A small phosphatase 1, Neutrophil cytosol factor 4, Collagen alpha-2 (IV) chain, Protein unc-13 homolog C, TBC1 domain family member 4, Acyl-coenzyme A synthetase ACSM5, mitochondrial, FH1/FH2 domain-containing protein 1, FYVE, RhoGEF and PH domain-containing protein 5, Cilia- and flagella-associated protein 54, Alpha-ketoglutarate-dependent dioxygenase alkB homolog 7, mitochondrial, WD repeat-containing protein 7, Transcription factor SOX-30, Cationic amino acid transporter 3, Mitogen-activated protein kinase kinase kinase 10, Glypican-4, Transmembrane protein with metallophosphoesterase domain, Transcription factor SOX-6, 28S ribosomal protein S14, mitochondrial, Steroid 21-hydroxylase, XK-related protein 5, N-acetylated-alpha-linked acidic dipeptidase 2, Mucin-17, Butyrophilin-like protein 8, Zinc finger protein 28, Major facilitator superfamily domain-containing protein 9, Small nuclear ribonucleoprotein-associated protein N, Coiled-coil domain-containing protein 42A, Frizzled-4, Putative tripartite motif-containing protein 49B, C—C chemokine receptor type 9, Centrosomal protein of 72 kDa, Adenosine receptor A2b, Protein CREG1, P2X purinoceptor 7, F-box only protein 44, BEN domain-containing protein 7, Rho guanine nucleotide exchange factor 11, Lethal (3) malignant brain tumor-like protein 3, Metalloreductase STEAP2, CD97 antigen, Putative uncharacterized protein ENSP00000381562, Ubiquitin carboxyl-terminal hydrolase isozyme L3, Transmembrane protein 114, Leucine-twenty homeobox, Protein Tob1, Deoxyribonuclease-1-like 1, Neuronal acetylcholine receptor subunit alpha-4, Lymphocyte antigen 86, Dentin matrix acidic phosphoprotein 1, Striatin-interacting protein 1, Zinc finger protein 425, Inactive phospholipase C-like protein 1, Tyrosine-protein phosphatase non-receptor type 2, SPARC-related modular calcium-binding protein 1, NACHT, LRR and PYD domains-containing protein 4, Olfactory receptor 4K1, BUB3-interacting and GLEBS motif-containing protein ZNF207, Protein SSX4, Putative uncharacterized protein ENSP00000383407, von Willebrand factor A domain-containing protein 5B2, Cytochrome c oxidase subunit 8C, mitochondrial, Retrotransposon gag domain-containing protein 1, Nuclear receptor coactivator 2, Laminin subunit alpha-2, Toll-like receptor 3, Transmembrane channel-like protein 2, Clathrin coat assembly protein AP180, RING finger protein 148, Zinc finger protein ZFPM2, Cerebral dopamine neurotrophic factor, Testis- and ovary-specific PAZ domain-containing protein 1, Vomeronasal type-1 receptor 3, Receptor expression-enhancing protein 2, Secretogranin-1, Protocadherin-19, Protein RMD5 homolog A, Protein dopey-2, Protein FAM193A, Vesicle transport protein SFT2B, C—X—C chemokine receptor type 4, Sialic acid-binding Ig-like lectin 9, Leucine-rich repeat and calponin homology domain-containing protein 2, Dynein regulatory complex protein 1, Gamma-aminobutyric acid receptor subunit delta, Anaphase-promoting complex subunit CDC26, Nuclear transcription factor Y subunit alpha, Unconventional myosin-XV, Olfactory receptor 5D18, Sodium- and chloride-dependent glycine transporter 2, Peroxiredoxin-4, Leucine-rich repeat-containing protein 26, Dystrophia myotonica WD repeat-containing protein, Zinc finger protein 853, Integrin beta-6, AF4/FMR2 family member 2, RAS guanyl-releasing protein 2, Coiled-coil domain-containing protein 8, Cornulin, Metastasis-associated in colon cancer protein 1, Mitochondrial import inner membrane translocase subunit Tim17-B, Protocadherin Fat 4, Transmembrane protein 205, CX3C chemokine receptor 1, Inositol polyphosphate 5-phosphatase K, Torsin-3A, PAX-interacting protein 1, G protein-regulated inducer of neurite outgrowth 3, Class A basic helix-loop-helix protein 15, Glutathione peroxidase 7, N-terminal EF-hand calcium-binding protein 2, Ig heavy chain V-II region MCE, CDGSH iron-sulfur domain-containing protein 3, mitochondrial, Apolipoprotein L6, Synapsin-2, Chloride transport protein 6, dCTP pyrophosphatase 1, Histamine H1 receptor, Pyruvate dehydrogenase protein X component, mitochondrial, Mismatch repair endonuclease PMS2, CD160 antigen, Solute carrier family 15 member 3, tRNA dimethylallyltransferase, mitochondrial, Voltage-dependent L-type calcium channel subunit alpha-1D, Ras-related protein Rab-30, Colorectal mutant cancer protein, Beta-1,4-galactosyltransferase 6, Exophilin-5, Ribosome biogenesis protein TSR3 homolog, Actin filament-associated protein 1-like 2, Eukaryotic peptide chain release factor GTP-binding subunit ERF3B, Cytochrome c oxidase subunit 5A, mitochondrial, Protein ENL, CD2 antigen cytoplasmic tail-binding protein 2, Neurabin-2, von Willebrand factor A domain-containing protein 9, Ubiquitin carboxyl-terminal hydrolase 47, Mitochondrial carrier homolog 2, Max-binding protein MNT, Nuclear pore complex protein Nup85, N-alpha-acetyltransferase 35, NatC auxiliary subunit, Cyclic GMP-AMP synthase, Myosin light chain kinase 2, skeletal/cardiac muscle, C-type lectin domain family 4 member F, Proteasome assembly chaperone 4, Cytochrome c oxidase assembly protein COX15 homolog, R3H domain-containing protein 2, Protein FAM46A, DnaJ homolog subfamily C member 10, Androglobin, Ankyrin repeat domain-containing protein 13C, Eyes absent homolog 1, Histone-lysine N-methyltransferase EZH2, Bystin, Dipeptidyl peptidase 3, Deleted in malignant brain tumors 1 protein, Pleckstrin homology domain-containing family B member 1, Multidrug resistance-associated protein 4, CapZ-interacting protein, Mucin-20, AFG3-like protein 2, Obscurin, Lipase member J, Protein phosphatase 1 regulatory subunit 14B, Kinesin-like protein KIFC2, Sorting nexin-19, Mucin-7, Putative uncharacterized protein FLJ37218, Protein FAM78A, Cytochrome c oxidase subunit 7B, mitochondrial, 39S ribosomal protein L17, mitochondrial, CLOCK-interacting pacemaker, DNA-binding protein RFX7, Protein EVI2B, Copper-transporting ATPase 2, NADH dehydrogenase [ubiquinone] 1 beta subcomplex subunit 8, mitochondrial, Core-binding factor subunit beta, CWF19-like protein 2, E3 ubiquitin-protein ligase RING1, Ubiquitin-conjugating enzyme E2 A, Deoxyribonuclease-2-alpha, Intraflagellar transport protein 80 homolog, Protein yippee-like 3, Calcium-dependent secretion activator 1, Protein YIPF1, 7-dehydrocholesterol reductase, Gamma-tubulin complex component 6, Intraflagellar transport protein 140 homolog, Nuclear pore membrane glycoprotein 210-like, Ribonuclease 3, Protein S100-A7, Protein AF-17, Fanconi anemia group E protein, NEDD8-activating enzyme E1 catalytic subunit, WD repeat-containing protein 97, Hematological and neurological expressed 1 protein, Uncharacterized protein C20orf195, Putative glycosylation-dependent cell adhesion molecule 1, Nucleolar and coiled-body phosphoprotein 1, Intraflagellar transport protein 88 homolog, Syndecan-1, XK-related protein 9, Uncharacterized protein C9orf78, cTAGE family member 5, Glutaryl-CoA dehydrogenase, mitochondrial, BMP/retinoic acid-inducible neural-specific protein 2, Homeodomain-interacting protein kinase 3, Bone marrow stromal antigen 2, Myocyte-specific enhancer factor 20, Stromal cell-derived factor 2, Lymphoid-restricted membrane protein, Myosin-binding protein H-like, WD repeat-containing protein 5, Disintegrin and metalloproteinase domain-containing protein 17, Cerebral cavernous malformations 2 protein, DNA dC→dU-editing enzyme APOBEC-3C, Protein FAM185A, Far upstream element-binding protein 2, Vacuolar protein sorting-associated protein VTA1 homolog, TBC1 domain family member 30, Intercellular adhesion molecule 1, Vesicular, overexpressed in cancer, prosurvival protein 1, Translocating chain-associated membrane protein 2, Target of Nesh-SH3, Serine/threonine-protein kinase VRK1, Uncharacterized protein DKFZp434B061, Putative coiled-coil-helix-coiled-coil-helix domain-containing protein CHCHD2P9, mitochondrial, Ataxin-7, Eukaryotic translation initiation factor 3 subunit G, Serine/threonine-protein phosphatase 2A 65 kDa regulatory subunit A beta isoform, Exocyst complex component 3, Cathepsin B, G1/S-specific cyclin-E1, Ubiquitin carboxyl-terminal hydrolase 30, Ubiquitin carboxyl-terminal hydrolase 51, Interleukin-1 receptor accessory protein-like 1, Ankyrin-1, Transmembrane protein 106C, Phosphatidylinositol transfer protein alpha isoform, Transportin-2, Polyhomeotic-like protein 3, Charged multivesicular body protein 2b, Ubiquitin D, RING finger protein unkempt homolog, Protein SMG7, E3 ubiquitin-protein ligase RNF144A, Mediator of RNA polymerase II transcription subunit 15, Cytochrome c oxidase subunit 8A, mitochondrial, NADH dehydrogenase [ubiquinone] flavoprotein 3, mitochondrial, Calcipressin-1, Vesicle-fusing ATPase, Putative ATP-dependent RNA helicase DHX33, Alpha-synuclein, Carbonic anhydrase 2, Complement factor H, RalBP1-associated Eps domain-containing protein 2, Semaphorin-3A, Core histone macro-H2A.2, Melanotransferrin, SKI family transcriptional corepressor 2, Collagen alpha-1 (VI) chain, Dachshund homolog 1, Protein BTG1, Cyclin-dependent kinase 18, T-box transcription factor TBX2, IgGFc-binding protein, Voltage-dependent L-type calcium channel subunit alpha-1C, Zinc finger protein 516, Guanine nucleotide-binding protein G(olf) subunit alpha, Melanoma-associated antigen 9, Protocadherin gamma-B2, RING finger protein 112, Transcription factor SOX-10, Peroxisome assembly protein 12, Collagen alpha-1 (XI) chain, Tripartite motif-containing protein 67, H(+)/Cl(−) exchange transporter 5, Probable phospholipid-transporting ATPase VB, Aldose reductase, Receptor-type tyrosine-protein phosphatase zeta, Kinesin-like protein KIF2A, Arginyl-tRNA-protein transferase 1, ATP synthase subunit epsilon, mitochondrial, Alpha-protein kinase 2, Putative hexokinase HKDC1, Metastasis-associated protein MTA1, Seizure 6-like protein 2, Chloride channel protein 2, RNA 3′-terminal phosphate cyclase, Poly(rC)-binding protein 4, Oxidation resistance protein 1, Kinesin light chain 4, E3 ubiquitin-protein ligase TRIM33, Receptor-type tyrosine-protein phosphatase gamma, Chromobox protein homolog 8, Cathepsin F, Integrin beta-8, C-type lectin domain family 11 member A, Keratin, type I cytoskeletal 27, Ankyrin repeat and SAM domain-containing protein 1A, Eukaryotic translation initiation factor 2-alpha kinase 4, Transforming growth factor-beta-induced protein ig-h3, Jerky protein homolog, Fucose-1-phosphate guanylyltransferase, ATP-binding cassette sub-family A member 13, Sodium-dependent phosphate transporter 2, Outer dense fiber protein 2-like, G1/S-specific cyclin-D1, Phosphatidylinositol 3-kinase catalytic subunit type 3, Immunity-related GTPase family Q protein, Transmembrane O-methyltransferase, Sulfate transporter, Protein eva-1 homolog A, Putative tyrosine-protein phosphatase auxilin, Ankyrin repeat and SOCS box protein 11, Protein cordon-bleu, Bestrophin-1, Putative ribosome-binding factor A, mitochondrial, Protocadherin gamma-A2, Formin-1, Nuclear receptor subfamily 1 group D member 2, Interleukin-17 receptor D, Rootletin, Serine incorporator 5, Glutamate receptor ionotropic, kainate 3, Plexin-A2, tRNA (uracil-5-)-methyltransferase homolog A, WD repeat-containing protein 60, Hemicentin-1, E3 ubiquitin-protein ligase MIB2, Lysosome-associated membrane glycoprotein 1, Dynein heavy chain domain-containing protein 1, Uncharacterized protein C17orf51, UPF0669 protein C6orf120, La-related protein 7, DNA-binding protein RFX5, Alpha-1-syntrophin, Nance-Horan syndrome protein, Dickkopf-related protein 3, Voltage-dependent T-type calcium channel subunit alpha-1H, HLA class I histocompatibility antigen, A-69 alpha chain, F-box/LRR-repeat protein 18, Arrestin domain-containing protein 1, Membrane-associated guanylate kinase, WW and PDZ domain-containing protein 2, Receptor-type tyrosine-protein phosphatase mu, Thioredoxin domain-containing protein 12, Adhesion G protein-coupled receptor A3, Proline synthase co-transcribed bacterial homolog protein, Solute carrier family 52, riboflavin transporter, member 2, Cystic fibrosis transmembrane conductance regulator, Kinesin-like protein KIF3C, Endothelin B receptor, Sideroflexin-3, Tubulin alpha-3E chain, SH3 domain-containing RING finger protein 3, GTP-binding protein Di-Ras2, Low-density lipoprotein receptor-related protein 2, Pirin, Trinucleotide repeat-containing gene 6C protein, Fanconi anemia group B protein, Coagulation factor VIII, E3 ubiquitin-protein ligase TRIM13, Lysophosphatidic acid receptor 1, Collagen alpha-1 (XXII) chain, Low affinity sodium-glucose cotransporter, Density-regulated protein, Uncharacterized protein C15orf52, Zinc finger SWIM domain-containing protein 6, Protocadherin gamma-A12, Importin subunit alpha-3, Cubilin, Putative segment polarity protein dishevelled homolog DVL1P1, Aggrecan core protein, Prohibitin-2, Rho GTPase-activating protein 33, Myotubularin-related protein 3, Phosphorylase b kinase regulatory subunit alpha, skeletal muscle isoform, Biotin-protein ligase, 1-phosphatidylinositol 4,5-bisphosphate phosphodiesterase beta-4, Protein AHNAK2, Inosine triphosphate pyrophosphatase, Cadherin-2, DNA helicase MCM9, Putative signal peptidase complex catalytic subunit SEC11B, Maestro heat-like repeat-containing protein family member 6, Prolyl 4-hydroxylase subunit alpha-2, Integral membrane protein DGCR2/IDD, Zinc finger protein 469, Sorbin and SH3 domain-containing protein 1, Multidrug resistance-associated protein 5, Down syndrome critical region protein 3, V-set and immunoglobulin domain-containing protein 10-like, Coronin-6, Kinesin-like protein KIF13B, Tribbles homolog 2, STAM-binding protein, Zinc finger E-box-binding homeobox 2, FERM domain-containing protein 5, Tropomodulin-2, Lymphoid enhancer-binding factor 1, General receptor for phosphoinositides 1-associated scaffold protein, Dedicator of cytokinesis protein 10, Protein ITFG3, Heat shock protein beta-8, Secretory phospholipase A2 receptor, FYVE, RhoGEF and PH domain-containing protein 6, Ankyrin repeat domain-containing protein SOWAHB, Nurim, Integral membrane protein GPR137C, Keratin, type II cytoskeletal 1b, Netrin receptor UNC5A, Receptor-type tyrosine-protein phosphatase C, UPF0606 protein KIAA1549, RNA-binding protein Nova-1, Zinc finger protein 317, Lysophosphatidylcholine acyltransferase 2, Aspartate aminotransferase, mitochondrial, Histone-lysine N-methyltransferase SETDB1, Frizzled-1, ATP-binding cassette sub-family C member 11, Arf-GAP with SH3 domain, ANK repeat and PH domain-containing protein 3, Sodium-dependent phosphate transport protein 2C, Dynein light chain 4, axonemal, Cyclin-dependent kinase 3, Vitamin K-dependent gamma-carboxylase, BTB/POZ domain-containing protein KCTD15, Cyclin-related protein FAM58A, Tripartite motif-containing protein 2, Calcium/calmodulin-dependent 3′,5′-cyclic nucleotide phosphodiesterase 1C, Guanine nucleotide-binding protein subunit beta-4, Ubiquitin-like-conjugating enzyme ATG10, Protein SMG8, Putative bifunctional UDP-N-acetylglucosamine transferase and deubiquitinase ALG13, Protein naked cuticle homolog 1, Protein S100-A1, Paraneoplastic antigen Ma2, Transmembrane protein 106B, Hephaestin, POU domain, class 2, transcription factor 1, Maltase-glucoamylase, intestinal, Kelch domain-containing protein 8B, VWFA and cache domain-containing protein 1, Adenylate kinase isoenzyme 5, BTB/POZ domain-containing protein KCTD9, Ankyrin-3, TBC1 domain family member 8B, Intraflagellar transport protein 56, G-protein coupled receptor 56, Protocadherin Fat 3, Cortactin-binding protein 2, 5,6-dihydroxyindole-2-carboxylic acid oxidase, Multidrug and toxin extrusion protein 1, Peroxisome biogenesis factor 1, NADH dehydrogenase [ubiquinone] 1 alpha subcomplex subunit 9, mitochondrial, Ropporin-1A, Histone deacetylase 11, Collagen alpha-1 (VIII) chain, Zinc finger HIT domain-containing protein 1, Citron Rho-interacting kinase, Uncharacterized protein C20orf194, Sodium/potassium/calcium exchanger 1, Paired box protein Pax-1, Homeobox protein TGIF1, Transmembrane 9 superfamily member 4, CUB and sushi domain-containing protein 1, FRAS1-related extracellular matrix protein 1, Leucine-rich repeat protein 1, Protein FAM127B, 2-hydroxyacylsphingosine 1-beta-galactosyltransferase, Glioma tumor suppressor candidate region gene 1 protein, Tectonic-1, Zinc finger protein 618, Palmitoyl-protein thioesterase 1, Serine/threonine-protein kinase 36, Tetratricopeptide repeat protein 31, Neurobeachin, Adenosylhomocysteinase 3, Sickle tail protein homolog, Fibrocystin, Mastermind-like protein 2, Frizzled-8, Vesicle transport protein SFT2C, Pecanex-like protein 2, Suppression of tumorigenicity 5 protein, Zinc finger and BTB domain-containing protein 10, Matrix metalloproteinase-24, Peroxisomal biogenesis factor 19, Protein piccolo, Prostaglandin reductase 1, Electrogenic sodium bicarbonate cotransporter 4, Neuronal PAS domain-containing protein 3, Homeobox even-skipped homolog protein 2, Keratin, type II cytoskeletal 3, Protein Jumonji, Lipoprotein lipase, Interferon alpha-inducible protein 27, mitochondrial, Zinc finger ZZ-type and EF-hand domain-containing protein 1, Mesoderm induction early response protein 3, Equilibrative nucleoside transporter 1, Prominin-2, Zinc finger and BTB domain-containing protein 39, Heat shock 70 kDa protein 12A, Sodium- and chloride-dependent creatine transporter 1, Rho GTPase-activating protein 23, Ciliary neurotrophic factor, Sodium-dependent multivitamin transporter, Elastin, Bifunctional heparan sulfate N-deacetylase/N-sulfotransferase 3, 28 kDa heat- and acid-stable phosphoprotein, Receptor-type tyrosine-protein phosphatase T, Protein farnesyltransferase subunit beta, Contactin-associated protein-like 3B, DnaJ homolog subfamily B member 11, Actin-like protein 6B, G-protein coupled receptor 143, Purine nucleoside phosphorylase, Testis anion transporter 1, Disco-interacting protein 2 homolog C, Zinc transporter ZIP14, RNA pseudouridylate synthase domain-containing protein 1, E3 ubiquitin-protein ligase HERC2, Lysophosphatidic acid phosphatase type 6, Glucocorticoid modulatory element-binding protein 2, Complement receptor type 1, Fibrillin-2, Tyrosine-protein phosphatase non-receptor type substrate 1, Myosin-IIIb, Collagen alpha-2 (XI) chain, Collagen alpha-1 (III) chain, Collagen alpha-3 (IV) chain, REST corepressor 2, Collagen alpha-1 (V) chain, Tyrosine-protein phosphatase non-receptor type 21, FH2 domain-containing protein 1, CDK-activating kinase assembly factor MAT1, Alpha-1,3-mannosyl-glycoprotein 4-beta-N-acetylglucosaminyltransferase B, Protein-methionine sulfoxide oxidase MICAL1, A-kinase anchor protein 8, Ribosomal protein S6 kinase alpha-6, Keratin, type II cytoskeletal 71, PH-interacting protein, Polyadenylate-binding protein 2, Hemicentin-2, Complement C3, Biotinidase, T-cell immunomodulatory protein, Zinc finger CCCH domain-containing protein 14, Neuronal cell adhesion molecule, Ropporin-1B, Centrosomal protein C10orf90, Growth/differentiation factor 15, Sex comb on midleg-like protein 2, Echinoderm microtubule-associated protein-like 6, Fibrocystin-L, DIS3-like exonuclease 1, Carbonic anhydrase 14, Vesicle-trafficking protein SEC22c, Leucine-rich repeat-containing protein C10orf11, Zinc finger protein 879, UDP-galactose translocator, Alpha/beta hydrolase domain-containing protein 13, Protein EURL homolog, Porphobilinogen deaminase, Microtubule-associated proteins 1A/1B light chain 3B, Melanoma-derived growth regulatory protein, Platelet-derived growth factor D, Probable dimethyladenosine transferase, Ras association domain-containing protein 5, Consortin, Transcription factor Sp1, Derlin-2, Solute carrier family 25 member 35, Inositol 1,4,5-trisphosphate receptor type 2, Mannose-6-phosphate isomerase, RNA-binding Raly-like protein, Syntaxin-7, Exonuclease 3′-5′ domain-containing protein 2, Globoside alpha-1,3-N-acetylgalactosaminyltransferase 1, Acyl-CoA synthetase short-chain family member 3, mitochondrial, Pleckstrin homology domain-containing family H member 1, Mitochondrial tRNA-specific 2-thiouridylase 1, UDP-glucose 4-epimerase, Voltage-dependent calcium channel subunit alpha-2/delta-2, Kinesin-like protein KIF1B, Carbonic anhydrase-related protein, Tribbles homolog 1, Lecithin retinol acyltransferase, Tissue-type plasminogen activator, Laminin subunit beta-1, Zinc finger protein basonuclin-1, T-lymphoma invasion and metastasis-inducing protein 1, Adipocyte enhancer-binding protein 1, Estradiol 17-beta-dehydrogenase 11, LINE-1 retrotransposable element ORF2 protein, Zinc finger and SCAN domain-containing protein 25, AP2-associated protein kinase 1, Fibrous sheath-interacting protein 2, Heat shock factor protein 4, Leucine-rich repeat-containing G-protein coupled receptor 6, Interferon-induced transmembrane protein 10, E3 ubiquitin-protein ligase RNF13, Potassium/sodium hyperpolarization-activated cyclic nucleotide-gated channel 4, Protein wntless homolog, Integrin-alpha FG-GAP repeat-containing protein 2, Neprilysin, Leucine-rich repeat-containing protein 34, Armadillo repeat-containing X-linked protein 2, G protein-coupled receptor kinase 4, G protein-coupled receptor kinase 6, T-cell surface glycoprotein CD8 beta chain, Sorting nexin-13, Methylcrotonoyl-CoA carboxylase beta chain, mitochondrial, Elongator complex protein 4, Mitochondrial calcium uniporter regulator 1, Zinc finger protein 382, Ubiquitin-conjugating enzyme E2 N, Diacylglycerol kinase zeta, Protein unc-119 homolog A, Alpha-2-macroglobulin, Sprouty-related, EVH1 domain-containing protein 1, Zinc finger protein castor homolog 1, Protein-methionine sulfoxide oxidase MICAL3, Phosphorylase b kinase regulatory subunit beta, Tubulin alpha-1A chain, Multidrug resistance-associated protein 7, B-cell CLL/lymphoma 9 protein, Collagen alpha-1 (IV) chain, Nebulin, Serine/arginine-rich splicing factor 4, Unconventional myosin-VIIa, Calcium-binding mitochondrial carrier protein SCaMC-2, 28S ribosomal protein S2, mitochondrial, Upstream stimulatory factor 2, Sodium/potassium/calcium exchanger 5, Protein sidekick-1, Melanoma-associated antigen 6, Vesicle transport protein USE1, SLIT-ROBO Rho GTPase-activating protein 2C, Plexin-A3, E3 ubiquitin-protein ligase RNF139, Probable ATP-dependent RNA helicase DHX58, Serine/threonine-protein kinase Sgk3, Kin of IRRE-like protein 1, Lactoperoxidase, SH3 domain-binding protein 4, Centromere protein R, Pleckstrin homology domain-containing family M member 2, Atrial natriuretic peptide receptor 2, Laminin subunit beta-2, Zinc finger protein ZIC 1, Puratrophin-1, High affinity cAMP-specific and IBMX-insensitive 3′,5′-cyclic phosphodiesterase 8B, Threonine synthase-like 2, Interleukin-24, Phosphatidylinositol 4,5-bisphosphate 3-kinase catalytic subunit beta isoform, Neuron navigator 1, KDEL motif-containing protein 1, Ceramide synthase 1, COX assembly mitochondrial protein homolog, DnaJ homolog subfamily A member 4, Anion exchange protein 3, Adenylate cyclase type 1, Plexin-D1, Procollagen galactosyltransferase 1, Insulin-like growth factor 1 receptor, Transcriptional protein SWT1, Copine-9, Protein HEG homolog 1, Transmembrane protein 98, Zinc finger protein ZIC 2, RAC-gamma serine/threonine-protein kinase, Protein FAM184A, Transcription factor Dp-2, Non-receptor tyrosine-protein kinase TNK1, GPI mannosyltransferase 1, Solute carrier family 41 member 2, RNA-binding motif protein, X chromosome, Alpha-fetoprotein, Membrane progestin receptor alpha, Centrosomal protein of 135 kDa, Melanoma-associated antigen B1, Protein lifeguard 4, Zinc finger protein ZFAT, Zinc finger protein 92, Zinc finger protein 708, Digestive organ expansion factor homolog, Protein shisa-4, Alpha-2-macroglobulin-like protein 1, Collagen alpha-1 (XX) chain, Mitochondrial dicarboxylate carrier, Voltage-dependent calcium channel subunit alpha-2/delta-1, Thioredoxin domain-containing protein 15, Calpain-2 catalytic subunit, Protein-glutamine gamma-glutamyltransferase 5, CCR4-NOT transcription complex subunit 3, Putative RNA exonuclease NEF-sp, Torsin-1B, General transcription factor IIH subunit 3, RWD domain-containing protein 1, N-terminal kinase-like protein, Transmembrane and coiled-coil domain-containing protein 3, Contactin-associated protein-like 4, Armadillo repeat protein deleted in velo-cardio-facial syndrome, RNA-binding protein 20, Coiled-coil domain-containing protein 180, Protein Bop, Serine/threonine-protein kinase MRCK gamma, Probable palmitoyltransferase ZDHHC24, Zinc finger X-linked protein ZXDA, Zinc transporter ZIP1, Tastin, Mitochondrial dynamics protein MID49, Transmembrane protein 132B, Ephrin type-B receptor 3, Glypican-6, F-box only protein 46, Probable E3 SUMO-protein ligase RNF212, Matrix metalloproteinase-17, Serine/threonine-protein kinase 32A, Adhesion G-protein coupled receptor F3, Sorting nexin-10, BTB/POZ domain-containing protein 1, Phosphatidylinositol 5-phosphate 4-kinase type-2 beta, Constitutive coactivator of PPAR-gamma-like protein 2, Potassium/sodium hyperpolarization-activated cyclic nucleotide-gated channel 3, AT-hook-containing transcription factor, Legumain, Retinoic acid receptor RXR-beta, Mucin-19, Ubiquitin domain-containing protein UBFD1, Ras-related protein Rab-38, Bromodomain-containing protein 4, Cap-specific mRNA (nucleoside-2′—O—)-methyltransferase 1, Ubiquitin-associated protein 1, Periaxin, Protein O-mannosyl-transferase 1, Metallophosphoesterase MPPED2, NAD-dependent protein deacetylase sirtuin-2, NAD-dependent protein deacetylase sirtuin-3, mitochondrial, Peroxisome proliferator-activated receptor gamma coactivator-related protein 1, Zinc finger homeobox protein 2, Proline-rich transmembrane protein 3, Zinc transporter ZIP12, Phosphorylase b kinase regulatory subunit alpha, liver isoform, Caprin-2, Zinc finger with UFM1-specific peptidase domain protein, Protocadherin-15, POU domain, class 6, transcription factor 2, Insulin-like growth factor-binding protein complex acid labile subunit, Adenomatous polyposis coli protein 2, Thioredoxin reductase 2, mitochondrial, Kelch-like protein 29, DNA-binding protein RFXANK, GPI mannosyltransferase 2, Cleavage and polyadenylation specificity factor subunit 6, Myotubularin-related protein 12, SUN domain-containing ossification factor, Solute carrier family 25 member 34, NTF2-related export protein 2, Protein CLN8, Beta-galactosidase-1-like protein, Mitogen-activated protein kinase 1, EH domain-containing protein 3, 6.8 kDa mitochondrial proteolipid, Death-associated protein kinase 1, RB1-inducible coiled-coil protein 1, Exostosin-like 1, Nuclear factor related to kappa-B-binding protein, Zinc finger protein 512B, Dihydropyrimidinase-related protein 3, Inactive ubiquitin carboxyl-terminal hydrolase 53, Neuronal membrane glycoprotein M6-a, DNA-binding protein SATB1, Forkhead box protein C1, Serine/threonine-protein phosphatase 2A regulatory subunit B″ subunit alpha, RNA-binding motif, single-stranded-interacting protein 3, Protocadherin gamma-A9, RNA-binding protein Nova-2, Glyceraldehyde-3-phosphate dehydrogenase, testis-specific, CMP-sialic acid transporter, GPI ethanolamine phosphate transferase 3, Protein EFR3 homolog B, CUB and sushi domain-containing protein 3, Krueppel-like factor 15, Receptor-type tyrosine-protein phosphatase kappa, Sodium-dependent proline transporter, Protein phosphatase Slingshot homolog 1, Beta-Ala-His dipeptidase, Sushi repeat-containing protein SRPX, Calmodulin-regulated spectrin-associated protein 3, Tissue factor pathway inhibitor 2, Phosphoinositide 3-kinase regulatory subunit 5, SH3 and multiple ankyrin repeat domains protein 1, Homeobox protein SIX5, Putative exonuclease GOR, Uncharacterized protein KIAA0556, Transmembrane and TPR repeat-containing protein 1, SH2 domain-containing protein 3A, Shadow of prion protein, Mucin-5B, ATP synthase subunit d, mitochondrial, Transforming acidic coiled-coil-containing protein 2, Transmembrane protein 238, Serine/threonine-protein kinase WNK2, Acrosin, Disintegrin and metalloproteinase domain-containing protein 18, BAI1-associated protein 3, Serine/threonine-protein kinase ICK, Doublesex- and mab-3-related transcription factor A2, UPF0609 protein C4orf27, Single-stranded DNA-binding protein 3, Enolase-like protein ENO4, Dedicator of cytokinesis protein 6, Nuclear distribution protein nudE-like 1, Glycogenin-1, Scavenger receptor cysteine-rich type 1 protein M160, Stathmin-3, Mitogen-activated protein kinase kinase kinase kinase 5, Protein transport protein Sec24D, Proprotein convertase subtilisin/kexin type 7, Serine/threonine-protein phosphatase 1 regulatory subunit 10, Dynein heavy chain 8, axonemal, Dehydrogenase/reductase SDR family member 2, mitochondrial, Complement factor I, E3 ubiquitin-protein ligase TRIM63, Liprin-alpha-2, Protein Shroom4, Potassium voltage-gated channel subfamily H member 2, Rho GTPase-activating protein 31, Tetratricopeptide repeat protein 37, Interphotoreceptor matrix proteoglycan 1, Nodal modulator 1, Receptor-type tyrosine-protein phosphatase delta, Ribosome maturation protein SBDS, ATP-binding cassette sub-family A member 2, Zinc finger protein 423, Transcription factor SOX-5, Forkhead box protein D3, Protein NipSnap homolog 2, Uncharacterized protein C11orf96, Collagen alpha-2 (V) chain, Alpha-globin transcription factor CP2, Ellis-van Creveld syndrome protein, EMILIN-1, Keratin, type I cytoskeletal 24, Apolipoprotein E, Cysteine and glycine-rich protein 2, Protein fantom, Homeobox protein Hox-B9, Apolipoprotein C-II, Regulator of G-protein signaling 12, WD repeat-containing protein 90, YrdC domain-containing protein, mitochondrial, Zinc finger BED domain-containing protein 6, Desumoylating isopeptidase 1, Protein asteroid homolog 1, Mitochondrial 2-oxoglutarate/malate carrier protein, Glycosylated lysosomal membrane protein, Chondroitin sulfate synthase 2, 6-phosphofructo-2-kinase/fructose-2,6-bisphosphatase 2, VPS10 domain-containing receptor SorCS1, UPF0524 protein C3orf70, Thiosulfate sulfurtransferase/rhodanese-like domain-containing protein 2, Mannosyl-oligosaccharide 1,2-alpha-mannosidase IB, PDZ domain-containing protein 2, Growth arrest-specific protein 6, Homeobox protein Hox-A4, ETS homologous factor, DBIRD complex subunit ZNF326, Cyclin-dependent kinase 5 activator 1, Signal peptidase complex subunit 3, Protein Hook homolog 3, TGF-beta receptor type-1, Phosphatidylserine synthase 1, HLA class II histocompatibility antigen, DM beta chain, Solute carrier family 22 member 6, Mucolipin-1, Rab11 family-interacting protein 5, Translation initiation factor elF-2B subunit alpha, Ribosomal RNA-processing protein 8, Nidogen-2, Polycomb group RING finger protein 1, Major centromere autoantigen B, Transmembrane protein 121, F-box/LRR-repeat protein 7, HLA class I histocompatibility antigen, Cw-17 alpha chain, Zinc finger and BTB domain-containing protein 11, Heterogeneous nuclear ribonucleoprotein H2, FTS and Hook-interacting protein, Leucine-rich repeat LGI family member 3, Zinc finger protein 45, Leucine-rich repeat transmembrane neuronal protein 3, Ubiquitin carboxyl-terminal hydrolase 13, Motor neuron and pancreas homeobox protein 1, Transcription factor MafF, PR domain zinc finger protein 8, Armadillo repeat-containing protein 1, Phosphoglucomutase-1, Serine/threonine-protein phosphatase 2A regulatory subunit B″ subunit gamma, Microtubule-associated protein 9, Immunoglobulin superfamily member 3, Sal-like protein 1, Homeobox protein Hox-D9, Zinc finger protein 175, ATP-dependent RNA helicase DDX39A, Protein phosphatase 1J, Plasma protease C1 inhibitor, Protein phosphatase 1 regulatory subunit 3F, Transmembrane channel-like protein 4, Adenylate kinase 9, Raftlin-2, Cyclic AMP-dependent transcription factor ATF-6 alpha, Sestrin-2, Growth factor receptor-bound protein 10, Regulator of G-protein signaling 20, Cytokine receptor common subunit beta, Mannosyl-oligosaccharide 1,2-alpha-mannosidase IA, Uracil phosphoribosyltransferase homolog, Caspase-4, Vesicular glutamate transporter 2, Probable phospholipid-transporting ATPase IH, Protein LMBR1L, Metallophosphoesterase 1, Delphilin, Oxysterol-binding protein-related protein 5, Matrix metalloproteinase-14, Ethanolamine kinase 2, Protein phosphatase 1 regulatory subunit 21, Alpha-ketoglutarate-dependent dioxygenase alkB homolog 3, Coiled-coil domain-containing protein 91, Centrosomal protein of 290 kDa, Transcription factor HIVEP3, Transcription factor AP-2-epsilon, Arylsulfatase B, Membrane magnesium transporter 1, Protein YIPF4, Glutaminyl-peptide cyclotransferase, Zinc finger protein 160, Serine palmitoyltransferase 3, Aldehyde dehydrogenase, mitochondrial, Rho guanine nucleotide exchange factor 26, Sodium-dependent neutral amino acid transporter B (0) AT2, Immunoglobulin superfamily member 11, Collagen triple helix repeat-containing protein 1, Delta-like protein 3, RPA-interacting protein, Rho GTPase-activating protein 32, Zinc finger CCHC domain-containing protein 24, Very large A-kinase anchor protein, Ras-associating and dilute domain-containing protein, B-cell lymphoma 6 protein, Vasorin, Alpha-1D adrenergic receptor, Cyclin-dependent kinase-like 3, Neutrophil collagenase, Transducin-like enhancer protein 3, Protein LZIC, CXXC-type zinc finger protein 5, Zinc finger CCHC domain-containing protein 3, Zinc finger protein 518B, GDNF-inducible zinc finger protein 1, Phospholipase B-like 1, Glutathione reductase, mitochondrial, Histone-lysine N-methyltransferase SETD1B, Dimethyladenosine transferase 1, mitochondrial, PR domain zinc finger protein 2, Suppressor of tumorigenicity 7 protein, Semaphorin-3D, Retrotransposon gag domain-containing protein 4, E3 ubiquitin-protein ligase TRIM58, Triokinase/FMN cyclase, Alpha-1,6-mannosylglycoprotein 6-beta-N-acetylglucosaminyltransferase A, Guanine nucleotide exchange factor for Rab-3A, Large neutral amino acids transporter small subunit 1, SH3 domain-binding protein 5, NHL repeat-containing protein 2, Telomeric repeat-binding factor 1, Zinc finger protein 480, Zinc finger protein 98, Histone-lysine N-methyltransferase, H3 lysine-36 and H4 lysine-20 specific, Vascular endothelial growth factor receptor 2, Transmembrane protease serine 9, Ethanolaminephosphotransferase 1, WD repeat-containing protein 73, Calcium-dependent secretion activator 2, RING finger protein 150, Proteinase-activated receptor 1, Peptidyl-tRNA hydrolase 2, mitochondrial, Ethanolamine-phosphate phospho-lyase, Essential MCU regulator, mitochondrial, Vacuolar protein-sorting-associated protein 25, Histone acetyltransferase KAT2B, Uveal autoantigen with coiled-coil domains and ankyrin repeats, Serine/threonine-protein kinase ULK2, WD repeat-containing protein 5B, Bifunctional lysine-specific demethylase and histidyl-hydroxylase NO66, Ubiquitin-conjugating enzyme E2 G1, Cytoplasmic polyadenylation element-binding protein 2, Gamma-aminobutyric acid receptor subunit beta-2, Zinc finger protein 354B, E3 ubiquitin-protein ligase RNF169, Galactose-3-O-sulfotransferase 4, Myosin-IIIa, Mitogen-activated protein kinase kinase kinase 14, Signal-induced proliferation-associated 1-like protein 3, Runt-related transcription factor 1, Transmembrane protein 9, DNA annealing helicase and endonuclease ZRANB3, Ryanodine receptor 2, Diamine acetyltransferase 1, Transmembrane protein 231, Cartilage acidic protein 1, UPF0415 protein C7orf25, Protein NLRC3, Immunoglobulin superfamily DCC subclass member 4, Multidrug resistance-associated protein 6, Dynein heavy chain 17, axonemal, Protein phosphatase 1 regulatory subunit 12B, Small conductance calcium-activated potassium channel protein 2, Protein FAM13B, Serine/arginine-rich splicing factor 2, Probable tRNA methyltransferase 9-like protein, COP9 signalosome complex subunit 7b, Zinc finger protein 518A, Urocortin-2, Probable cytosolic iron-sulfur protein assembly protein CIAO1, Transmembrane protein 94, Protein-associating with the carboxyl-terminal domain of ezrin, Protein misato homolog 1, Protocadherin beta-8, Slit homolog 3 protein, Slit homolog 2 protein, Xylosyltransferase 1, Nectin-3, Endoglin, Solute carrier family 2, facilitated glucose transporter member 14, COMM domain-containing protein 7, Diacylglycerol O-acyltransferase 1, F-box/WD repeat-containing protein 9, Spectrin beta chain, non-erythrocytic 5, Mitochondrial pyruvate carrier 1, Anion exchange protein, Microtubule-associated protein, Large neutral amino acids transporter small subunit 2, Adhesion G protein-coupled receptor F5, Heat shock transcription factor, X-linked, Solute carrier family 26 member 10, ABCB9 protein, Cancer/testis antigen 55, Calcium-binding mitochondrial carrier protein SCaMC-1, N-acylglucosamine 2-epimerase, UBX domain-containing protein 6, Tripartite motif-containing protein 55, Polycystic kidney disease 2-like 1 protein, Zinc finger protein 529, Polynucleotide 5′-hydroxyl-kinase NOL9, Kidney mitochondrial carrier protein 1, Sprouty-related, EVH1 domain-containing protein 2, Leptin receptor gene-related protein, GDP-fucose protein O-fucosyltransferase 1, Solute carrier family 12 member 2, Coiled-coil domain-containing protein 34, MAGUK p55 subfamily member 5, Protein SSX5, ATP-binding cassette sub-family C member 8, Tyrosine-protein kinase receptor, Inositol-trisphosphate 3-kinase A, Thioredoxin domain-containing protein 16, Electroneutral sodium bicarbonate exchanger 1, E3 ubiquitin-protein ligase TRIM36, Maestro heat-like repeat-containing protein family member 7, Protein dopey-1, Serine/threonine-protein kinase A-Raf, Probable G-protein coupled receptor 158, PHD finger protein 20, Exportin-7, TBC1 domain family member 16, Homeodomain-interacting protein kinase 4, SLIT and NTRK-like protein 2, Bromo adjacent homology domain-containing 1 protein, Protocadherin Fat 2, HLA class I histocompatibility antigen, B-49 alpha chain, CASP8 and FADD-like apoptosis regulator, Neuroligin-3, Katanin p60 ATPase-containing subunit A1, Protein FAM72C, Nuclear receptor coactivator 1, Mediator of RNA polymerase II transcription subunit 8, Paired box protein Pax-2, Glutamyl aminopeptidase, Egl nine homolog 3, Protein-lysine 6-oxidase, Insulin-like growth factor-binding protein 3, Thrombospondin-1, Thrombospondin-2, Matrilysin, Thioredoxin-related transmembrane protein 4, ATP synthase subunit gamma, mitochondrial, Guanylate kinase, Calcium-binding mitochondrial carrier protein Aralar2, Iroquois-class homeodomain protein IRX-2, Bcl-2-binding component 3, Protein Shroom2, LRRN4 C-terminal-like protein, Neuronal pentraxin receptor, UBA-like domain-containing protein 1, Macrophage-capping protein, Malate dehydrogenase, cytoplasmic, Numb-like protein, Vesicle transport through interaction with t-SNAREs homolog 1B, Protein SFI1 homolog, Metalloproteinase inhibitor 2, ALK tyrosine kinase receptor, MAD2L1-binding protein, Ewing's tumor-associated antigen 1, Rho-related GTP-binding protein RhoQ, Serine dehydratase-like, Kv channel-interacting protein 2, Phosphatidylinositol 3-kinase regulatory subunit beta, Tropomodulin-1, Beta-1,4-glucuronyltransferase 1, 17-beta-hydroxysteroid dehydrogenase 14, TATA box-binding protein-like protein 1, Ribonuclease pancreatic, NADPH oxidase 5, Spliceosome-associated protein CWC15 homolog, Serine/threonine-protein kinase PRP4 homolog, Cytoglobin, Homer protein homolog 3, Metastasis suppressor protein 1, 1-acyl-sn-glycerol-3-phosphate acyltransferase gamma, Neuralized-like protein 4, Coiled-coil domain-containing protein 154, HRAS-like suppressor 3, Neuroblastoma breakpoint family member 6, Separin, Fucose mutarotase, Ankyrin repeat domain-containing protein SOWAHC, Protein AAR2 homolog, Atherin, Patatin-like phospholipase domain-containing protein 7, CD276 antigen, Cytoplasmic polyadenylation element-binding protein 1, E3 ubiquitin-protein ligase MSL2, Transient receptor potential cation channel subfamily M member 1, Suppressor of IKBKE 1, Centrosomal protein of 68 kDa, Amino-terminal enhancer of split, SH2B adapter protein 3, Protein argonaute-1, Oxidative stress-induced growth inhibitor 1, Apolipoprotein D, Semaphorin-5A, Nephrocystin-3, F-BAR domain only protein 2, Vacuolar-sorting protein SNF8, Septin-4, Eukaryotic translation initiation factor 3 subunit J, RanBP-type and C3HC4-type zinc finger-containing protein 1, Mitochondrial import inner membrane translocase subunit Tim13, cDNA FLJ78342, Armadillo repeat-containing X-linked protein 5, Adenosine 3′-phospho 5′-phosphosulfate transporter 2, RING finger protein 37, Zinc finger protein 28 homolog, Proline-rich protein 13, Interleukin-1 receptor accessory protein, Glutamate receptor ionotropic, NMDA 2A, Pleckstrin homology domain-containing family A member 1, Hyaluronidase-2, 72 kDa type IV collagenase, Calcineurin subunit B type 1, Protein phosphatase 1B, Delta-1-pyrroline-5-carboxylate synthase, 28S ribosomal protein S22, mitochondrial, Probable ATP-dependent RNA helicase DDX58, Trimethyllysine dioxygenase, mitochondrial, Pantothenate kinase 2, mitochondrial, R3H and coiled-coil domain-containing protein 1, CUGBP Elav-like family member 5, Probable fibrosin-1, Microtubule-associated serine/threonine-protein kinase 4, Calcium/calmodulin-dependent protein kinase kinase 2, Glycogen [starch] synthase, muscle, EPM2A-interacting protein 1, Coiled-coil domain-containing protein 22, Zinc finger protein 1 homolog, KAT8 regulatory NSL complex subunit 2, GTPase KRas, Cyclin-G1, Regulator of nonsense transcripts 3B, Telomerase-binding protein EST1A, Nuclear factor of activated T-cells, cytoplasmic 3, Nucleolar protein 4-like, Gamma-glutamylaminecyclotransferase, Bcl-2-like protein 12, Methyltransferase-like protein 13, Methylthioribose-1-phosphate isomerase, Apoptogenic protein 1, mitochondrial, UTP-glucose-1-phosphate uridylyltransferase, G-protein coupled receptor 126, Zinc finger CCCH-type with G patch domain-containing protein, C2 domain-containing protein 5, Cytoplasmic polyadenylation element-binding protein 4, UPF0489 protein C5orf22, Intermediate filament family orphan 1, Nuclear receptor subfamily 4 group A member 2, Peptidyl-glycine alpha-amidating monooxygenase, Ethanolamine-phosphate cytidylyltransferase, Zinc finger CCCH domain-containing protein 13, Putative GTP-binding protein 6, WD repeat domain-containing protein 83, DNA excision repair protein ERCC-8, Serine/threonine-protein kinase N3, MOB kinase activator 2, Ankyrin repeat and BTB/POZ domain-containing protein 1, Kaptin, Caveolin-1, Death effector domain-containing protein, Spindle and kinetochore-associated protein 1, Elongation factor G, mitochondrial, Coenzyme Q-binding protein COQ10 homolog B, mitochondrial, Transmembrane protein 168, PRKR-interacting protein 1, RIB43A-like with coiled-coils protein 2, TATA box-binding protein-associated factor RNA polymerase I subunit C, DCN1-like protein 4, Peptidyl-prolyl cis-trans isomerase H, Glypican-1, Cat eye syndrome critical region protein 5, Cystathionine gamma-lyase, Protein GREB1, ATP-dependent DNA helicase Q4, Metal transporter CNNM3, Nucleoside diphosphate kinase, mitochondrial, Small integral membrane protein 8, N-lysine methyltransferase SMYD2, E3 ubiquitin-protein ligase Praja-1, TNF receptor-associated factor 5, LIX1-like protein, Renalase, Trafficking protein particle complex subunit 12, Protein mago nashi homolog 2, Transmembrane protein 150C, NADH dehydrogenase [ubiquinone] 1 alpha subcomplex subunit 11, Alpha- and gamma-adaptin-binding protein p34, Ribosome-releasing factor 2, mitochondrial, Zinc finger protein 322, AF4/FMR2 family member 3, Shugoshin-like 2, NEDD4-binding protein 1, Arf-GAP with Rho-GAP domain, ANK repeat and PH domain-containing protein 2, Peroxisomal NADH pyrophosphatase NUDT12, Mixed lineage kinase domain-like protein, MRG/MORF4L-binding protein, Tyrosine-protein phosphatase non-receptor type 3, Prostacyclin synthase, Protein FAM46D, Transcriptional repressor NF-X1, Oligodendrocyte transcription factor 2, FYVE and coiled-coil domain-containing protein 1, Tripartite motif-containing protein 42, Centrosomal protein of 112 kDa, THO complex subunit 3, Uncharacterized protein C20orf96, LisH domain-containing protein FOPNL, Cyclin-dependent kinase 17, Histone-lysine N-methyltransferase SUV420H1, Serine/threonine-protein kinase Nek2, RNA polymerase II elongation factor ELL2, Serine/threonine-protein kinase TAO3, F-box only protein 34, DNA replication complex GINS protein PSF2, Kinetochore-associated protein DSN1 homolog, Inositol-3-phosphate synthase 1, 15-hydroxyprostaglandin dehydrogenase [NAD (+)], Mitogen-activated protein kinase 8, THO complex subunit 1, Dual specificity protein phosphatase 19, Protein fem-1 homolog B, Prolyl endopeptidase FAP, 28S ribosomal protein S18b, mitochondrial, Serine/threonine-protein kinase Nek3, Cell division cycle-associated protein 7, Dual specificity protein kinase TTK, ER degradation-enhancing alpha-mannosidase-like protein 2, GATA zinc finger domain-containing protein 1, Ceramide synthase 4, Leucine-rich repeat-containing protein 9, Cytochrome b5 domain-containing protein 1, Coiled-coil domain-containing protein 158, Transcriptional enhancer factor TEF-1, OTU domain-containing protein 7B, Exonuclease 1, Lactosylceramide alpha-2,3-sialyltransferase, HLA class I histocompatibility antigen, A-66 alpha chain, YLP motif-containing protein 1, Alpha-1,3-mannosyl-glycoprotein 2-beta-N-acetylglucosaminyltransferase, Exocyst complex component 8, Tudor domain-containing protein 7, Putative pre-mRNA-splicing factor ATP-dependent RNA helicase DHX32, Dephospho-CoA kinase domain-containing protein, Telomeric repeat-binding factor 2, Uncharacterized protein C7orf43, Nucleoside diphosphate kinase homolog 5, Alpha-aminoadipic semialdehyde synthase, mitochondrial, TBC1 domain family member 10A, GRIP and coiled-coil domain-containing protein 1, Mitochondrial Rho GTPase 1, Vacuolar protein-sorting-associated protein 36, Transmembrane protein 260, HAUS augmin-like complex subunit 2, dTDP-D-glucose 4,6-dehydratase, S-phase kinase-associated protein 2, DNA repair protein complementing XP-A cells, Protein LTV1 homolog, UPF0462 protein C4orf33, Alpha-centractin, LIM domain-binding protein 3, Transient receptor potential cation channel subfamily M member 7, ETS-related transcription factor Elf-2, Ribosome-recycling factor, mitochondrial, Carnitine O-acetyltransferase, Serine-tRNA ligase, mitochondrial, E3 ubiquitin-protein ligase RFWD3, Rho GTPase-activating protein 26, Pre-mRNA-splicing regulator WTAP, Uncharacterized protein C1orf112, 28S ribosomal protein S23, mitochondrial, Phosphoprotein associated with glycosphingolipid-enriched microdomains 1, Peroxisome proliferator-activated receptor delta, Trafficking kinesin-binding protein 1, Nuclear receptor 2C2-associated protein, Exocyst complex component 7, C—C motif chemokine 28, Myotonin-protein kinase, Condensin complex subunit 2, Protein phosphatase 1H, 5′-nucleotidase, cDNA FLJ60317, highly similar to Aminoacylase-1 (EC 3.5.1.14), Endophilin-B2, FAST kinase domain-containing protein 5, Zinc finger and SCAN domain-containing protein 30, Coiled-coil domain-containing protein 136, RCC1 and BTB domain-containing protein 2, Phosphatase and actin regulator 1, Aryl hydrocarbon receptor nuclear translocator 2, 2-methoxy-6-polyprenyl-1,4-benzoquinol methylase, mitochondrial, Alpha/beta hydrolase domain-containing protein 17A, SH3 and PX domain-containing protein 2A, Mitochondrial ribonuclease P protein 3, SH3 and PX domain-containing protein 2B, Protein phosphatase 1 regulatory subunit 37, Protein TMEPAI, Mitogen-activated protein kinase kinase kinase 11, Exosome complex component RRP43, Cofilin-2, Protein FRA10AC1, Protein CIP2A, CREB3 regulatory factor, Pseudopodium-enriched atypical kinase 1, ATP-binding cassette sub-family A member 5, Phospholipid scramblase 2, Translation initiation factor elF-2B subunit gamma, Ras association domain-containing protein 8, Ras-related GTP-binding protein D, Pachytene checkpoint protein 2 homolog, Estradiol 17-beta-dehydrogenase 1, Ubiquitin-associated protein 1-like, MAGEC3 protein, Protein FAM118A, Procollagen C-endopeptidase enhancer 2, mRNA turnover protein 4 homolog, Protein NATD1, Protein FAM135B, Meckel syndrome type 1 protein, Lactadherin, Putative butyrophilin subfamily 2 member A3, Butyrophilin subfamily 2 member A1, Interleukin-1 receptor-associated kinase 4, Protein FAM111B, NADH-ubiquinone oxidoreductase 75 kDa subunit, mitochondrial, Proton myo-inositol cotransporter, Transcription factor TFIIIB component B″ homolog, Xenotropic and polytropic retrovirus receptor 1, Prostaglandin E synthase 2, Ribonucleoprotein PTB-binding 2, Teneurin-4, EH domain-binding protein 1-like protein 1, Formin-binding protein 4, NGFI-A-binding protein 1, Glutamate decarboxylase 1, Putative ATP-dependent RNA helicase TDRD9, DCN1-like protein 5, 3 beta-hydroxysteroid dehydrogenase type 7, Tetratricopeptide repeat protein 5, Diacylglycerol kinase theta, 39S ribosomal protein L21, mitochondrial, Radial spoke head 10 homolog B2, Transcription factor SOX-13, Unconventional myosin-IXb, DDB1- and CUL4-associated factor 7, Tyrosine-protein kinase ABL1, Muscular LMNA-interacting protein, rRNA methyltransferase 2, mitochondrial, Nucleoside diphosphate kinase 7, Kinesin-like protein KIF14, Melanoma-associated antigen C1, Phosphatidylinositol 3,4,5-trisphosphate 3-phosphatase and dual-specificity protein phosphatase PTEN, Apolipoprotein B-100, Probable tRNA (uracil-O (2)-)-methyltransferase, Polyphosphoinositide phosphatase, Protein argonaute-3, Protein FAM102B, Probable guanine nucleotide exchange factor MCF2L2, Tubulin polyglutamylase complex subunit 1, Nephrocystin-4, Cleft lip and palate transmembrane protein 1-like protein, TNF receptor-associated factor 4, FAD-dependent oxidoreductase domain-containing protein 2, Zinc finger and BTB domain-containing protein 7A, WD repeat-containing protein 89, Calcium-transporting ATPase type 2C member 1, Complement factor H-related protein 2, Leucine zipper putative tumor suppressor 2, Probable N-acetyltransferase 16, Ornithine aminotransferase, mitochondrial, Polypeptide N-acetylgalactosaminyltransferase 16, 2′-5′-oligoadenylate synthase-like protein, Solute carrier family 25 member 33, U7 snRNA-associated Sm-like protein LSm10, Autophagy-related protein 2 homolog A, BMP and activin membrane-bound inhibitor homolog, Bifunctional lysine-specific demethylase and histidyl-hydroxylase MINA, Uncharacterized protein KIAA1841, Stromal membrane-associated protein 2, Protein FAM98A, CAP-Gly domain-containing linker protein 3, Protein SCAI, Anoctamin-4, HLA class I histocompatibility antigen, B-50 alpha chain, Phytanoyl-CoA dioxygenase, peroxisomal, Dyslexia-associated protein KIAA0319-like protein, 28S ribosomal protein S16, mitochondrial, Retinol dehydrogenase 8, 39S ribosomal protein L41, mitochondrial, Mitochondrial intermediate peptidase, Protein FAM83D, MpV17 transgene, murine homolog, glomerulosclerosis, isoform CRA_f, Sorcin, Putative germ cell-less protein-like 1-like, Protein-glutamine gamma-glutamyltransferase 6, Transforming growth factor-beta receptor-associated protein 1, Sex comb on midleg-like protein 4, Insulin-like growth factor-binding protein 7, Putative RNA-binding protein Luc7-like 1, Monocarboxylate transporter 5, Cadherin-19, Putative heat shock protein HSP 90-beta-3, G protein-coupled receptor kinase 5, Retinol dehydrogenase 14, UBX domain-containing protein 2A, Histone H3-like centromeric protein A, UPF0536 protein C12orf66, Putative ATP-dependent RNA helicase TDRD12, NADH-ubiquinone oxidoreductase chain 4, Thiamin pyrophosphokinase 1, Sulfotransferase 1C2, Zinc finger SWIM domain-containing protein 3, Catenin delta-2, Transient receptor potential cation channel subfamily A member 1, Alstrom syndrome protein 1, Tubulin alpha-3C/D chain, 40S ribosomal protein S20, DNA Adenine glycosylase, Protein O-linked-mannose beta-1,2-N-acetylglucosaminyltransferase 1, CD63 antigen, Zinc finger protein DZIP1, Discoidin, CUB and LCCL domain-containing protein 1, Protein pelota homolog, Tubulin polyglutamylase TTLL5, S-methyl-5′-thioadenosine phosphorylase, Serologically defined colon cancer antigen 8, Cytoplasmic protein NCK2, Alpha-1,6-mannosylglycoprotein 6-beta-N-acetylglucosaminyltransferase B, Iroquois-class homeodomain protein IRX-5, Succinate dehydrogenase [ubiquinone] flavoprotein subunit, mitochondrial, Tetratricopeptide repeat protein 38, Aprataxin, Sodium-dependent phosphate transporter 1, Oxidoreductase-like domain-containing protein 1, P protein, Protein bicaudal C homolog 1, Voltage-gated potassium channel subunit beta-1, Regulator of telomere elongation helicase 1, Probable phospholipid-transporting ATPase IIB, Sideroflexin-1, Phosphoribosylformylglycinamidine synthase, Tetratricopeptide repeat protein 39B, Uncharacterized protein KIAA1210, N-acyl-aromatic-L-amino acid amidohydrolase (carboxylate-forming), Transforming growth factor beta receptor type 3, Metalloproteinase inhibitor 4, Beta-adrenergic receptor kinase 2, Dipeptidyl peptidase 4, Protein SMG5, P antigen family member 5, Carbohydrate sulfotransferase 9, Zinc finger and SCAN domain-containing protein 21, Zinc finger protein 7, Zinc finger protein 430, Xaa-Pro dipeptidase, Protein ECT2, Protein FAM161A, NF-kappa-B inhibitor zeta, Zinc finger protein 860, Rho guanine nucleotide exchange factor 40, Ras-related protein Ral-A, Ras-related protein Rab-17, Loss of heterozygosity 12 chromosomal region 1 protein, Ras-related protein Rab-13, Ras-related protein Rab-34, Filamin A-interacting protein 1-like, Nuclear receptor subfamily 4 group A member 3, Armadillo repeat-containing X-linked protein 1, CD302 antigen, Zinc finger protein 141, Tudor domain-containing protein 3, RanBP2-like and GRIP domain-containing protein 3, Creatine kinase S-type, mitochondrial, Dynein heavy chain 5, axonemal, E3 ubiquitin-protein ligase UBR3, WD repeat and HMG-box DNA-binding protein 1, Retinaldehyde-binding protein 1, Ubiquitin-conjugating enzyme E2 Q1, S-adenosylmethionine decarboxylase proenzyme, RUN and FYVE domain-containing protein 2, Bardet-Biedl syndrome 5 protein, Treslin, Gap junction alpha-3 protein, Dual specificity tyrosine-phosphorylation-regulated kinase 3, Transient receptor potential cation channel subfamily M member 2, MICAL-like protein 1, Aryl hydrocarbon receptor nuclear translocator, 5-demethoxyubiquinone hydroxylase, mitochondrial, Round spermatid basic protein 1, Glutathione S-transferase theta-2B, EF-hand calcium-binding domain-containing protein 14, DnaJ homolog subfamily C member 4, Protein Simiate, 60S ribosomal protein L35a, LON peptidase N-terminal domain and RING finger protein 2, Bifunctional UDP-N-acetylglucosamine 2-epimerase/N-acetylmannosamine kinase, Alternative protein MKKS, TBC1 domain family member 15, PHD finger-like domain-containing protein 5A, Tumor necrosis factor receptor superfamily member 14, Protein PRR5-ARHGAP8, Mitochondrial inner membrane protease ATP23 homolog, Huntingtin-interacting protein 1-related protein, Proteasome subunit alpha type-1, Transcription factor IIIA, Poly(A)-specific ribonuclease PARN-like domain-containing protein 1, Myosin regulatory light chain 10, Serine/threonine-protein phosphatase 2A activator, Caspase-2, SLIT-ROBO Rho GTPase-activating protein 1, B-cell CLL/lymphoma 7 protein family member B, Uncharacterized protein C10orf88, 39S ribosomal protein L51, mitochondrial, Zinc finger CCHC-type and RNA-binding motif-containing protein 1, DNA helicase MCM8, Fc receptor-like protein 3, Tripartite motif-containing protein 35, Rho GTPase-activating protein 11B, Ribosomal protein S6 kinase alpha-2, Dual specificity protein phosphatase 3, Transmembrane protein 8A, Serine protease 56, Connector enhancer of kinase suppressor of ras 3, Protein FAM167B, Coiled-coil domain-containing protein 77, Hydrocephalus-inducing protein homolog, Serine beta-lactamase-like protein LACTB, mitochondrial, Solute carrier family 40 member 1, Lysosomal-associated transmembrane protein 4B, Histone deacetylase complex subunit SAP30L, Lipoxygenase homology domain-containing protein 1, Alpha-1-antichymotrypsin, Granulocyte-macrophage colony-stimulating factor receptor subunit alpha, Probable serine carboxypeptidase CPVL, Teashirt homolog 3, Interleukin-13 receptor subunit alpha-2, Sorting nexin-21, Torsin-1A-interacting protein 2, isoform IFRG15, DST protein, Carboxypeptidase N catalytic chain, Aspartate beta-hydroxylase domain-containing protein 1, Protein FAM69B, Ectonucleotide pyrophosphatase/phosphodiesterase family member 1, Coiled-coil domain-containing protein 13, Zinc finger protein 703, Low affinity immunoglobulin gamma Fc region receptor II-b, Putative stereocilin-like protein, EF-hand calcium-binding domain-containing protein 6, Zinc finger and BTB domain-containing protein 34, Glutathione S-transferase theta-1, Amphoterin-induced protein 1, Delta and Notch-like epidermal growth factor-related receptor, Synaptosomal-associated protein 23, Inactive rhomboid protein 2, Thymidine phosphorylase, Olfactory receptor 4M2, Protein mago nashi homolog, Nidogen-1, Prostate tumor-overexpressed gene 1 protein, ADP-ribosylation factor-like protein 5B, TBC1 domain family member 7, SEC14-like protein 2, ATP synthase subunit e, mitochondrial, NGFI-A-binding protein 2, Peptidase inhibitor 15, Small glutamine-rich tetratricopeptide repeat-containing protein alpha, Leucine-rich repeat-containing protein 4C, RNA polymerase-associated protein RTF1 homolog, Transcription initiation factor IIA subunit 2, Pseudouridine-5′-phosphatase, Zinc finger protein 583, Zinc finger protein 280D, DNA-directed RNA polymerase III subunit RPC10, Phenylalanine-tRNA ligase beta subunit, Fructose-bisphosphate aldolase C, Short/branched chain specific acyl-CoA dehydrogenase, mitochondrial, Geranylgeranyl transferase type-2 subunit beta, tRNA (guanine (37)-N1)-methyltransferase, Probable crossover junction endonuclease EME2, Neuronal acetylcholine receptor subunit alpha-3, Carbohydrate sulfotransferase 5, Tyrosine-protein phosphatase non-receptor type 20, Leucine-rich repeat-containing protein 15, Methyltransferase-like protein 25, Histone-lysine N-methyltransferase SUV39H1, PH and SEC7 domain-containing protein 3, Zinc finger and BTB domain-containing protein 37, Chromosome-associated kinesin KIF4A, Voltage-gated potassium channel subunit beta-2, Sodium/myo-inositol cotransporter, Kelch-like protein 42, Putative E3 ubiquitin-protein ligase UNKL, Interleukin-13 receptor subunit alpha-1, Centrosomal protein of 295 kDa, Sec1 family domain-containing protein 2, Xylulose kinase, Uncharacterized protein KIAA0930, Guanine nucleotide exchange factor DBS, ALX homeobox protein 1, Vacuolar protein sorting-associated protein 72 homolog, Beta-citrylglutamate synthase B, 60S ribosomal protein L3-like, Protein orai-2, B-cell lymphoma 3 protein, Serine/threonine-protein kinase Nek9, Protein lin-9 homolog, N-alpha-acetyltransferase 11, Intersectin-2, Ras-responsive element-binding protein 1, Cytoplasmic dynein 1 intermediate chain 1, Dexamethasone-induced Ras-related protein 1, Transmembrane channel-like protein 6, Rab-like protein 3, DNA mismatch repair protein Msh3, POM121 and ZP3 fusion protein, Transmembrane protein 230, Serine/threonine-protein phosphatase 2A regulatory subunit B″ subunit beta, Peroxisome biogenesis factor 10, Actin filament-associated protein 1-like 1, Choline kinase alpha, Uncharacterized protein C1orf21, Synaptonemal complex central element protein 1, Ribosomal protein 63, mitochondrial, RNA-binding E3 ubiquitin-protein ligase MEX3C, Ankyrin repeat and SOCS box protein 4, Long-chain fatty acid transport protein 3, Nuclear RNA export factor 1, Potassium voltage-gated channel subfamily G member 3, Coiled-coil domain-containing protein 138, Uncharacterized protein C19orf60, Homeobox protein cut-like 1, Armadillo repeat-containing protein 2, 28S ribosomal protein S5, mitochondrial, Chromatin assembly factor 1 subunit A, Rho guanine nucleotide exchange factor 39, Transcription factor SPT20 homolog, E3 ubiquitin-protein ligase RNF14, Glioma tumor suppressor candidate region gene 2 protein, Dehydrodolichyl diphosphate syntase complex subunit DHDDS, Nuclear receptor-interacting protein 3, Beta-1,3-N-acetylglucosaminyltransferase radical fringe, Transmembrane protein 51, Scavenger receptor class A member 5, Protein FAM167A, Protogenin, EF-hand domain-containing protein D2, Coiled-coil domain-containing protein 144A, Cryptochrome-2, ADP-ribosylation factor-like protein 4D, Partitioning defective 6 homolog beta, HCG2002594, isoform CRA_c, Leucine-rich repeat and WD repeat-containing protein 1, 60S ribosomal protein L39, Meiotic nuclear division protein 1 homolog, cDNA FLJ57726, highly similar to Heterogeneous nuclear ribonucleoprotein H3, Mesencephalic astrocyte-derived neurotrophic factor, Arginine/serine-rich coiled-coil protein 2, Cytochrome P450 2U1, THAP domain-containing protein 1, Hom s 2, Protein CREG2, FLYWCH-type zinc finger-containing protein 1, Rhomboid-like protein, Serine/threonine-protein kinase VRK2, Acyl-coenzyme A thioesterase THEM4, UHRF1-binding protein 1, EWS RNA-binding protein variant 6, Testis-specific Y-encoded protein 1, Butyrophilin subfamily 2 member A2, CDKN2AIP N-terminal-like protein, HIRA-interacting protein 3, Protein FAM199X, Multivesicular body subunit 12B, Spindle and centriole-associated protein 1, COBW domain-containing protein 2, Glycerol kinase, (E3-independent) E2 ubiquitin-conjugating enzyme, Uncharacterized protein KIAA1211, Histone-lysine N-methyltransferase SETMAR, Arginine vasopressin-induced protein 1, Chondroitin sulfate synthase 3, Caspase-9, SHC-transforming protein 3, Tumor protein D53, ENTH domain-containing protein 1, Uncharacterized protein C19orf52, 14-3-3 protein sigma, B-cell CLL/lymphoma 7 protein family member A, ATPase family AAA domain-containing protein 3A, Charged multivesicular body protein 1b, Platelet-activating factor acetylhydrolase 2, cytoplasmic, ADP-ribosylation factor GTPase-activating protein 1, NADH dehydrogenase [ubiquinone] 1 alpha subcomplex subunit 6, Methyltransferase-like protein 8, Follistatin-related protein 5, ATP-binding cassette sub-family B member 6, mitochondrial, Protein fem-1 homolog C, Ankyrin repeat domain-containing protein 20B, Ventricular zone-expressed PH domain-containing protein homolog 1, Gap junction beta-1 protein, Vitamin K epoxide reductase complex subunit 1, Frataxin, mitochondrial, E3 ubiquitin-protein ligase TRIM32, Protein maestro, Receptor-interacting serine/threonine-protein kinase 1, 2′-5′-oligoadenylate synthase 2, Regulator of nonsense transcripts 2, ATP-sensitive inward rectifier potassium channel 10, Microtubule-associated tumor suppressor 1, Metalloproteinase inhibitor 3, Homeobox protein SEBOX, Nuclear receptor subfamily 4 group A member 1, Carboxypeptidase M, Small glutamine-rich tetratricopeptide repeat-containing protein beta, Alpha-aminoadipic semialdehyde dehydrogenase, Cysteine protease ATG4C, IL6ST nirs variant 1, 60S ribosomal protein L38, Transcription cofactor HES-6, Uncharacterized protein C17orf98, RING finger protein 10, Alpha-crystallin B chain, Probable ATP-dependent RNA helicase DHX40, Transcobalamin-1, Protein argonaute-2, Protein argonaute-4, Pleckstrin homology-like domain family A member 2, Arginine/serine-rich protein 1, Tubulin-specific chaperone E, ELL-associated factor 1, Phosphatase and actin regulator, F-box-like/WD repeat-containing protein TBL1XR1, Osteopontin, Carbohydrate sulfotransferase 11, Olfactory receptor 52E1, HBS1-like protein, Zinc finger protein 43, COMM domain-containing protein 10, Complement component 1 Q subcomponent-binding protein, mitochondrial, Transcription initiation factor TFIID subunit 6, Transcription initiation factor TFIID subunit 7-like, Latent-transforming growth factor beta-binding protein 2, Zinc finger protein 280B, N-acetylglucosamine-1-phosphodiester alpha-N-acetylglucosaminidase, Myb-related protein B, Zinc finger protein 212, Calcium uptake protein 1, mitochondrial, E3 ubiquitin-protein ligase ZNRF1, Phosphomevalonate kinase, Mitochondrial basic amino acids transporter, Protein tweety homolog 2, BMP-2-inducible protein kinase, Histone acetyltransferase KAT7, Ras-related protein Rab-6B, BTB/POZ domain-containing protein 9, Lipid phosphate phosphatase-related protein type 3, Fanconi anemia group A protein, Ran-specific GTPase-activating protein, 39S ribosomal protein L48, mitochondrial, CTP synthase 1, Zinc finger MYM-type protein 6, Protein tweety homolog 3, Interleukin-1 receptor-associated kinase 1, Nuclear distribution protein nudE homolog 1, Krueppel-like factor 5, Bcl-2-related protein A1, CDC42 small effector protein 2, GRAM domain-containing protein 1A, Centrosomal protein of 131 kDa, Inositol hexakisphosphate and diphosphoinositol-pentakisphosphate kinase 2, Presequence protease, mitochondrial, Uncharacterized membrane protein C19orf24, MAM and LDL-receptor class A domain-containing protein 1, NADH-ubiquinone oxidoreductase chain 2, DBH-like monooxygenase protein 1, Biliverdin reductase A, Tetraspanin-14, NADH-ubiquinone oxidoreductase chain 4L, Calcium permeable stress-gated cation channel 1, 60S ribosomal protein L14, WW domain-containing adapter protein with coiled-coil, Poly [ADP-ribose] polymerase 11, KN motif and ankyrin repeat domain-containing protein 4, Methyl-CpG-binding domain protein 6, IQ domain-containing protein G, Glutamate receptor ionotropic, kainate 5, Apoptosis-stimulating of p53 protein 1, Transformer-2 protein homolog beta, Succinyl-CoA ligase [ADP/GDP-forming] subunit alpha, mitochondrial, Neurofilament light polypeptide, Aminoacyl tRNA synthase complex-interacting multifunctional protein 2, Protein FAM73B, Volume-regulated anion channel subunit LRRC8B, Olfactory receptor 51G2, Ubiquitin carboxyl-terminal hydrolase 24, Integrin alpha-2, DnaJ homolog subfamily B member 1, Prostaglandin E2 receptor EP4 subtype, Transmembrane protein 186, RNA-binding protein Musashi homolog 2, Phosphatidylinositol 3,4,5-trisphosphate 5-phosphatase 2, Sodium/iodide cotransporter, Protocadherin-18, Trafficking protein particle complex subunit 8, Protocadherin alpha-1, NF-kappa-B inhibitor epsilon, Peroxisomal trans-2-enoyl-CoA reductase, Protein GPR108, ADP/ATP translocase 1, Uncharacterized protein C4orf36, MAM domain-containing glycosylphosphatidylinositol anchor protein 1, Natriuretic peptides A, PAB-dependent poly(A)-specific ribonuclease subunit PAN3, Zinc finger protein with KRAB and SCAN domains 2, Uncharacterized protein C11orf63, Short-chain-specific acyl-CoA dehydrogenase, mitochondrial, Tyrosine-protein kinase TXK, Lymphocyte antigen 6E, OX-2 membrane glycoprotein, Annexin A9, Pappalysin-1, Thiosulfate sulfurtransferase, Threonine-tRNA ligase, mitochondrial, Zinc finger protein 362, Beta-catenin-interacting protein 1, Lysyl oxidase homolog 4, HLA class I histocompatibility antigen, Cw-8 alpha chain, Unconventional myosin-Vb, Unconventional myosin-XIX, GPI inositol-deacylase, Methyl-CpG-binding domain protein 4, PDZ and LIM domain protein 2, Sphingosine-1-phosphate lyase 1, CBP80/20-dependent translation initiation factor, Nuclear receptor ROR-beta, Sulfhydryl oxidase 2, Partner of Y14 and mago, Plexin-A1, Sialomucin core protein 24, Neural cell adhesion molecule L1-like protein, Lysosome membrane protein 2, ATP-binding cassette sub-family A member 1, Signal-regulatory protein delta.

[0110] According to preferred embodiments, the at least one antigenic peptide or protein encoded by the at least one coding region of the artificial nucleic acid molecule, preferably RNA, of the invention, may be derived from a mutated tumor antigen selected from ZFHX3 (R1893G), XPO1 (E571K), VHL (S111N; S65*; S68*), VHL (L89H), UBR5 (E2121K), U2AF1 (S34F), TSC2 (splice variant), TRRAP (S722F), TP53 (A159P; A159V; A161T; C135F; C135Y; C141Y; C176F; C176Y; C229Y; C238F; C238Y; C242A; C242F; C275F; C275Y; C277F; D259Y; D281N; D281Y; E198*; E204*; E221*; E224D; E271K; E285*; E285K; E286K; E294*; E298*; E56*; F134L; G154A; G244C; G244D; G244S; G245C; G245D; G245S; G245V; G262V; G266*; G266E; G266R; G266V; H179L; H179R; H179Y; H193L; H193P; H193R; H193Y; H214R; 1195T; 1255F; K132E; K132N; K132R; L130F; L194R; M2371; N239*; N239S; P151H; P151S; P152L; P177R; P250L; P278A; P278L; P278R; P278S; P27L; Q104*; Q136*; Q144*; Q167*; Q192*; Q317*; Q331*; R110L; R156P; R158G; R158H; R158L; R175G; R175H; R196*; R196P; R213*; R213Q; R248Q; R248W; R249G; R249M; R249S; R249W; R267P; R273C; R273H; R273L; R273P; R280G; R2801; R280K; R280T; R282W; R306*; R337C; R337L; R342*; S127F; S127Y; S183*; S2151; S215R; S241F; T125T; T155N; T155P; V122D; V157F; V173L; V173M; V216M; V272M; V274A; V73W; W146*; W91*; Y163C; Y205C; Y220C; Y234C; Y236C), STK11 (splice variant), STIP1 (splice variant), STAG2 (splice variant), SPOP (F133L), SPEN (R806T), SOX17 (S4031), SMO (L412F), SMARCA4 (G1232S; R1135W; T910M), SMARCA1 (splice variant), SMAD4 (R361C; R361H; R445*), SF3B1 (G742D; K700E), SETD2 (splice variant), SCAI (Q155H), RUNX1 (R201*), RRAS2 (Q72L), RQCD1 (P131L), RPSAP58 (Q111E), RNF43 (G659V), RHOA (E40Q), RHEB (Y35N), RB1 (R579*), RAC1 (P29S), PTPRB (D1778N), PTPN11 (G503V; T468M), PTEN (A328Q; P248T; Q298*; R130*; R130G; R130L; R130P; R130Q; R233*; R335*; S170N; T319*; Y27D), PPP6C (R301C; S307L), PPP2R1A (P179R; R183W), POLE (splice variant), PIK3R1 (G376R; K567E; N564D), PIK3CA (C420R; C901F; D350G; E110delE; E453K; E542K; E545A; E545G; E545K; E726K; E81K; G1049R; G118D; H1047L; H1047R; K111E; K111N; M10431; M1043V; N1044K; N345K; Q546K; Q546P; Q546R; R108H; R38H; R88Q; R93Q; V344G; V344M), PBRM1 (splice variant), PABPC3 (A313R), NRAS (G12C; G12D; G13D; G13R; Q61H; Q61K; Q61L; Q61R), NPM1 (Q289S; W288L), NOTCH1 (E2515V), NFE2L2 (D29H; E79Q; R34G), NF1 (K1661G; R440*), NCOR1 (splice variant), MYD88 (L265P), MYCN (P44L), MUC4 (H4205Q), MLL3 (splice variant), MLL2 (splice variant), MGA (R2435Q), MED12 (L1224F), MAX (H28R; R60Q), MAP2K4 (S184L), MAP2K1 (E203K; P124S), LRPPRC (splice variant), KRAS (A146T; G12A; G12C; G12D; G12F; G12R; G12S; G12V; G13C; G13D; K117N; Q61H; Q61K; Q61L; Q61R), KIT (D816V), KDR (S1100F), KDM6A (Q555*), ING1 (R339*), IDH2 (R140Q; R172K), IDH1 (R132C; R132G; R132H; R132S), HRAS (G12D; G13V; Q61K; Q61R), HIST1H3B (E74K), HERC2 (splice variant), GNAS (R201C), GATA3 (P409A), FRG1 (E176*), FLT3 (D835Y), FGFR3 (S249C), FGFR2 (N550K; S252W), FBXW7 (G423V; R465C; R465H; R479Q; R505C; R505G), FAT1 (splice variant), FANCD2 (splice variant), ERBB4 (R711C), ERBB3 (D297Y; V104L; V104M), ERBB2 (D769Y; L755S; R678Q; S310F; V8421), EP300 (D1399N), EIF2AK3 (R911E), EGFR (A289T; A289V; G598V; L858R; L861Q; R108K; R222C), EEF1B2 (S43G), DNMT3A (R882C; R882H), CUL3 (splice variant), CUL1 (E485K), CTNNB1 (D32N; D32Y; G34E; G34R; S33C; S33F; S33Y; S37A; S37C; S37F; S37Y; S45F; T41A; T411), CTCF (R448*), CSNK2A1 (H236R), CREBBP (R1446C), CR1 (E2220*; R2194*), CNOT3 (E20K), CLOCK (L123*), CLCC1 (P406Q), CLASP2 (M965W), CIC (R215W), CHD8 (splice variant), CHD4 (R1162W; R975H), CEP290 (1556N), CDKN2A (D84N; E120*; E88*; H83Y; P114L; P48L; Q50*; R58*; R80*; W110*), CDH1 (splice variant), CARM1 (A202V), BRAF (G466V; K601E; N581S; V600E; V600K), BAP1 (splice variant), B2M (L15F), ATRX (R1426*), ATM (splice variant), ARID2 (S297F), ARID1A (R1276*; R1335*; R1989*; R2158*; R693*, ARFGAP3 (N299M), APC (E1374*; F1491L; Q1367*; Q1378*; R1114*; R1450*; R213*; R216*; R302*; R564*; R805*; R876*; S1346*; T1556N), ALK (F1174L; R1275Q), AKT1 (E17K), ACVR2A (K437R), Prostate-specific antigen precursor, Kita-kyushu lung cancer antigen 1, Trophoblast glycoprotein, Cyclin-dependent kinase inhibitor 2A, Cyclin-dependent kinase inhibitor 2A, isoforms 1/2/3, multiple tumor suppressor 1/cyclin-dependent kinase 4 inhibitor p16, GTPase NRas or a fragment, variant or derivative of any one of said mutated tumor antigens, or any combination thereof. (Sequence changes at protein level with an asterix are described as amino acid deletion introducing an immediate translation stop codon).

[0111] According to preferred embodiments, the artificial nucleic acid molecule according to the invention may encode in its at least one encoding region at least one antigenic peptide or protein comprising or consisting of an amino acid sequence according to any one of SEQ ID NOs: 3719-27945; 76420-76439, 76440-76474 or a fragment, variant or derivative of any one of said sequences, preferably comprising or consisting of an amino acid sequence having, in increasing order of preference, at least 5%, 10%, 20%, 30%, 40%, 50%, 60%, 70%, 80%, 85%, 86%, 87%, 88%, 89%, 90%, 91%, 92%, 93%, 94%, 95%, 96%, 97%, 98%, or 99%, preferably of at least 70%, more preferably of at least 80%, even more preferably at least 85%, even more preferably of at least 90% and most preferably of at least 95% or even 97%, sequence identity to any of these sequences.

[0112] According to preferred embodiments, artificial nucleic acid molecule according to the invention may encode in its at least one coding region at least one antigenic peptide or protein comprising or consisting of an amino acid sequence according to SEQ ID NOs: 1-504 in patent application WO2017182634 (as listed in Table 1) or a fragment, variant or derivative of any one of said sequences, preferably comprising or consisting of an amino acid sequence having, in increasing order of preference, at least 5%, 10%, 20%, 30%, 40%, 50%, 60%, 70%, 80%, 85%, 86%, 87%, 88%, 89%, 90%, 91%, 92%, 93%, 94%, 95%, 96%, 97%, 98%, or 99%, preferably of at least 70%, more preferably of at least 80%, even more preferably at least 85%, even more preferably of at least 90% and most preferably of at least 95% or even 97%, sequence identity to any of these sequences.

[0113] Accordingly, the coding region of the artificial nucleic acid molecule according to the invention may preferably comprise a nucleic acid sequence according to any one of SEQ ID NOs: 27946-52172; 76495-76514, 52173-76399; 76570-76589, 76515-76549, 76590-76624 or a fragment, variant or derivative of any one of said sequences, preferably comprising or consisting of a nucleic acid sequence having, in increasing order of preference, at least 5%, 10%, 20%, 30%, 40%, 50%, 60%, 70%, 80%, 85%, 86%, 87%, 88%, 89%, 90%, 91%, 92%, 93%, 94%, 95%, 96%, 97%, 98%, or 99%, preferably of at least 70%, more preferably of at least 80%, even more preferably at least 85%, even more preferably of at least 90% and most preferably of at least 95% or even 97%, sequence identity to any of these sequences.

[0114] According to preferred embodiments, the artificial nucleic acid molecule according to the invention may comprise in its at least one coding region at least one nucleic acid sequence according to SEQ ID NOs: 505-4536 in patent application WO2017182634 (as listed in Table 1) or a fragment, variant or derivative of any one of said sequences, preferably comprising or consisting of a nucleic acid sequence having, in increasing order of preference, at least 5%, 10%, 20%, 30%, 40%, 50%, 60%, 70%, 80%, 85%, 86%, 87%, 88%, 89%, 90%, 91%, 92%, 93%, 94%, 95%, 96%, 97%, 98%, or 99%, preferably of at least 70%, more preferably of at least 80%, even more preferably at least 85%, even more preferably of at least 90% and most preferably of at least 95% or even 97%, sequence identity to any of these sequences.

[0115] According to particularly preferred embodiments, the artificial nucleic acid molecule, preferably RNA, of the invention may encode in its at least one coding region an antigenic peptide or protein derived from a tumor antigen selected from BRAF, PIK3CA, KRAS, IDH1, TP53, NRAS, AKTI, SF3B1, CDKN2A, RPSAP58, EGFR, NY-ESO1, MUC-1, 5T4, Her2, MAGE-A3, LY6K, CEACAM6, CEA, MCAK, KK-LC1, Gastrin, VEGFR2, MMP-7, MPHOSPH1, MAGE-A4, MAGE-A1, MAGE-C1, PRAME, Survivin, MAGE-A9, MAGE-C2, FGFR2, WT1, PSA, PSMA, Prostate-specific antigen precursor, Kita-kyushu lung cancer antigen 1, Trophoblast glycoprotein, Cyclin-dependent kinase inhibitor 2A, Cyclin-dependent kinase inhibitor 2A, isoforms 1/2/3, multiple tumor suppressor 1/cyclin-dependent kinase 4 inhibitor p16, GTPase NRas, or a fragment, variant or derivative of any one of said tumor antigens, or any combination thereof.

### Bacterial, Viral, Protozoal, Fungal Antigens

[0116] According to further preferred embodiments, the artificial nuclei acid molecule, preferably RNA, according to the invention encodes, in its at least one coding region, at least one antigenic peptide or protein derived from a bacterial, viral, protozoal or fungal antigen.

[0117] Preferably, said at least one antigenic peptide or protein encoded by the at least one coding region of the artificial nucleic acid molecule, preferably RNA, of the invention, may be derived from a bacterial, viral, protozoal or fungal antigen derived from Agrobacterium tumefaciens, Ajellomyces dermatitidis ATCC 60636, Alphapapillomavirus 10, Andes orthohantavirus, Andes virus CHI-7913, Aspergillus terreus NIH2624, Avian hepatitis E virus, Babesia microti, Bacillus anthracis, Bacteria, Betacoronavirus England 1, Blattella germanica, Bordetella pertussis, Borna disease virus Giessen strain He/80, Borrelia burgdorferi B31, Borrelia burgdorferi CA12, Borrelia burgdorferi N40, Borrelia burgdorferi ZS7, Borrelia garinii IP90, Borrelia hermsii, Borreliella afzelii, Borreliella burgdorferi, Borreliella garinii, Bos taurus, Brucella melitensis, Brugia malayi, Bundibugyo ebolavirus, Burkholderia pseudomallei, Burkholderia pseudomallei K96243, Campylobacter jejuni, Campylobacter upsaliensis, Candida albicans, Cavia porcellus, Chikungunya virus, Chikungunya virus MY/08/065, Chikungunya virus Singapore/11/2008, Chikungunya virus strain LR2006_OPY1 IMT/Reunion Island/2006, Chikungunya virus strain S27-African prototype, Chlamydia pneumoniae, Chlamydia trachomatis, Chlamydia trachomatis Serovar D, Chlamydiae, Clostridioides difficile, Clostridium difficile BI/NAP1/027, Clostridium tetani, Convict Creek 107 virus, Corynebacterium diphtheriae, Cowpox virus (Brighton Red) White-pock, Coxsackievirus A16, Coxsackievirus A9, Coxsackievirus B1, Coxsackievirus B2, Coxsackievirus B3, Coxsackievirus B4, Crimean-Congo hemorrhagic fever orthonairovirus, Cryptosporidium parvum, Dengue virus, Dengue virus 1, Dengue virus 1 Nauru/West Pac/1974, Dengue virus 1 PVP159, Dengue virus 1 Singapore/S275/1990, Dengue virus 2, Dengue virus 2 D2/SG/05K4155DK1/2005, Dengue virus 2 Jamaica/1409/1983, Dengue virus 2 Puerto Rico/PR159-S1/1969, Dengue virus 2 strain 43, Dengue virus 2 Thailand/16681/84, Dengue virus 2 Thailand/NGS-C/1944, Dengue virus 3, Dengue virus 4, Dengue virus 4 Dominica/814669/1981, Dengue virus 4 Thailand/0348/1991, Dengue virus type 1 Hawaii, Ebola virus-Mayinga, Zaire, 1976, Ebolavirus, Echinococcus granulosus, Echinococcus multilocularis, Echovirus E11, Echovirus E9, Ehrlichia canis str. Jake, Ehrlichia chaffeensis, Ehrlichia chaffeensis str. Arkansas, Entamoeba histolytica, Entamoeba histolytica YS-27, Enterococcus faecium, Enterovirus A, Enterovirus A71, Enterovirus C, Escherichia coli, Fasciola gigantica, Fasciola hepatica, Four Corners hantavirus, Francisella tularensis, Francisella tularensis subsp. holarctica LVS, Francisella tularensis subsp. tularensis SCHU S4, Gambierdiscus toxicus, GB virus C, Glossina morsitans morsitans, Gnathostoma binucleatum, Gp160, H1N1 subtype, H5N1 subtype, Haemophilus influenzae NTHi 1128, Haemophilus influenzae Serotype B, Haemophilus influenzae Subtype 1H, Hantaan orthohantavirus, Hantaan virus 76-118, HBV genotype D, Helicobacter pylori, Helicobacter pylori 26695, Heligmosomoides polygyrus, Hepatitis B virus, Hepatitis B virus adr4, Hepatitis B virus ayw/France/Tiollais/1979, Hepatitis B virus genotype D, Hepatitis B virus subtype adr, Hepatitis B virus subtype adw, Hepatitis B virus subtype adw2, Hepatitis B virus subtype adyw, Hepatitis B virus subtype AYR, Hepatitis B virus subtype ayw, Hepatitis C virus, Hepatitis C virus (isolate 1), Hepatitis C virus (isolate BK), Hepatitis C virus (isolate Con1), Hepatitis C virus (isolate Glasgow), Hepatitis C virus (isolate H), Hepatitis C virus (isolate H77), Hepatitis C virus (isolate HC-G9), Hepatitis C virus (isolate HCV-K3a/650), Hepatitis C virus (isolate Japanese), Hepatitis C virus (isolate JK049), Hepatitis C virus (isolate NZL1), Hepatitis C virus (isolate Taiwan), Hepatitis C virus genotype 1, Hepatitis C virus genotype 2, Hepatitis C virus genotype 3, Hepatitis C virus genotype 4, Hepatitis C virus genotype 5, Hepatitis C virus genotype 6, Hepatitis C virus HCT18, Hepatitis C virus HCV-KF, Hepatitis C virus isolate HC-J1, Hepatitis C virus isolate HC-J6, Hepatitis C virus isolate HC-J8, Hepatitis C virus JFH-1, Hepatitis C virus subtype 1a, Hepatitis C virus subtype 1a Chiron Corp., Hepatitis C virus subtype 1b, Hepatitis C virus subtype 1b AD78, Hepatitis C virus subtype 1b isolate BE-11, Hepatitis C virus subtype 1b JK1, Hepatitis C virus subtype 2a, Hepatitis C virus subtype 2b, Hepatitis C virus subtype 3a, Hepatitis C virus subtype 5a, Hepatitis C virus subtype 6a, Hepatitis delta virus, Hepatitis delta virus TW2667, Hepatitis E virus, Hepatitis E virus (strain Burma), Hepatitis E virus (strain Mexico), Hepatitis E virus SAR-55, Hepatitis E virus type 3 Kernow-C1, Hepatitis E virus type 4 JAK-Sai, Hepatovirus A, Heron hepatitis B virus, Herpes simplex virus (type 1/strain 17), Herpesviridae, HIV-1 CRF01_AE, HIV-1 group O, HIV-1 M: A, HIV-1 M: B, HIV-1 M: B_89.6, HIV-1 M: B_HXB2R, HIV-1 M: B_MN, HIV-1 M: C, HIV-1 M: CRF01_AE, HIV-1 M: G, HIV-1 O_ANT70, Human adenovirus 11, Human adenovirus 2, Human adenovirus 40, Human adenovirus 5, Human alphaherpesvirus 1, Human alphaherpesvirus 2, Human alphaherpesvirus 3, Human betaherpesvirus 5, Human betaherpesvirus 6B, Human bocavirus 1, Human bocavirus 2, Human bocavirus 3, Human coronavirus 229E, Human coronavirus OC43, Human endogenous retrovirus, Human endogenous retrovirus H, Human endogenous retrovirus K, Human enterovirus 71 Subgenogroup C4, Human gammaherpesvirus 4, Human gammaherpesvirus 8, Human hepatitis A virus Hu/Australia/HM175/1976, Human herpesvirus 1 strain KOS, Human herpesvirus 2 strain 333, Human herpesvirus 2 strain HG52, Human herpesvirus 3 H-551, Human herpesvirus 3 strain Oka vaccine, Human herpesvirus 4 strain B95-8, Human herpesvirus 4 type 1, Human herpesvirus 4 type 2, Human herpesvirus 5 strain AD169, Human herpesvirus 5 strain Towne, Human herpesvirus 6 (strain Uganda-1102), Human herpesvirus 7 strain JI, Human immunodeficiency virus 1, Human immunodeficiency virus 2, Human immunodeficiency virus type 1 (isolate YU2), Human immunodeficiency virus type 1 (JRCSF ISOLATE), Human immunodeficiency virus type 1 (NEW YORK-5 ISOLATE), Human immunodeficiency virus type 1 (SF162 ISOLATE), Human immunodeficiency virus type 1 (SF33 ISOLATE), Human immunodeficiency virus type 1 BH10, Human metapneumovirus, Human orthopneumovirus, Human papillomavirus, Human papillomavirus type 11, Human papillomavirus type 16, Human papillomavirus type 18, Human papillomavirus type 29, Human papillomavirus type 31, Human papillomavirus type 33, Human papillomavirus type 35, Human papillomavirus type 39, Human papillomavirus type 44, Human papillomavirus type 45, Human papillomavirus type 51, Human papillomavirus type 52, Human papillomavirus type 58, Human papillomavirus type 59, Human papillomavirus type 6, Human papillomavirus type 68, Human papillomavirus type 6b, Human papillomavirus type 73, Human parainfluenza 3 virus (strain NIH 47885), Human parechovirus 1, Human parvovirus 4, Human parvovirus B19, Human poliovirus 1, Human poliovirus 1 Mahoney, Human poliovirus 3, Human polyomavirus 1, Human respiratory syncytial virus (strain RSB1734), Human respiratory syncytial virus (strain RSB6190), Human respiratory syncytial virus (strain RSB6256), Human respiratory syncytial virus (strain RSB642), Human respiratory syncytial virus (subgroup B/strain 18537), Human respiratory syncytial virus A, Human respiratory syncytial virus A strain Long, Human respiratory syncytial virus A2, Human respiratory syncytial virus S2, Human respirovirus 3, Human rhinovirus A89, Human rotavirus A, Human T-cell lymphotrophic virus type 1 (Caribbean isolate), Human T-cell lymphotrophic virus type 1 (isolate MT-2), Human T-cell lymphotrophic virus type 1 (strain ATK), Human T-cell lymphotropic virus type 1 (african isolate), Human T-lymphotropic virus 1, Human T-lymphotropic virus 2, Influenza A virus, Influenza A virus (A/Anhui/1/2005 (H5N1)), Influenza A virus (A/Anhui/PA-1/2013 (H7N9)), Influenza A virus (A/Argentina/3779/94 (H3N2)), Influenza A virus (A/Auckland/1/2009 (H1N1)), Influenza A virus (A/Bar-headed Goose/Qinghai/61/05 (H5N1)), Influenza A virus (A/Brevig Mission/1/1918 (H1N1)), Influenza A virus (A/California/04/2009 (H1N1)), Influenza A virus (A/California/07/2009 (H1N1)), Influenza A virus (A/California/08/2009 (H1N1)), Influenza A virus (A/California/10/1978 (H1N1)), Influenza A virus (A/Christchurch/2/1988 (H3N2)), Influenza A virus (A/Cordoba/3278/96 (H3N2)), Influenza A virus (A/France/75/97 (H3N2)), Influenza A virus (A/Fujian/411/2002 (H3N2)), Influenza A virus (A/Hong Kong/01/2009 (H1N1)), Influenza A virus (A/Hong Kong/1/1968 (H3N2)), Influenza A virus (A/Indonesia/CDC699/2006 (H5N1)), Influenza A virus (A/Iran/1/1957 (H2N2)), Influenza A virus (A/Memphis/13/1978 (H1N1)), Influenza A virus (A/Memphis/4/1980 (H3N2)), Influenza A virus (A/Nanchang/58/1993 (H3N2)), Influenza A virus (A/New York/232/2004 (H3N2)), Influenza A virus (A/New_York/15/94 (H3N2)), Influenza A virus (A/New_York/17/94 (H3N2)), Influenza A virus (A/Ohio/3/95 (H3N2)), Influenza A virus (A/Otago/5/2005 (H1N1)), Influenza A virus (A/Puerto Rico/8/1934 (H1N1)), Influenza A virus (A/Shangdong/5/94 (H3N2)), Influenza A virus (A/Solomon Islands/3/2006 (Egg passage) (H1N1)), Influenza A virus (A/South Carolina/1/1918 (H1N1)), Influenza A virus (A/swine/Hong Kong/126/1982 (H3N2)), Influenza A virus (A/swine/Iowa/15/1930 (H1N1)), Influenza A virus (A/Sydney/05/97-like (H3N2)), Influenza A virus (A/Texas/1/1977 (H3N2)), Influenza A virus (A/Udorn/307/1972 (H3N2)), Influenza A virus (A/Uruguay/716/2007 (H3N2)), Influenza A virus (A/USSR/26/1985 (H3N2)), Influenza A virus (A/Viet Nam/1203/2004 (H5N1)), Influenza A virus (A/Vietnam/1194/2004 (H5N1)), Influenza A virus (A/Wellington/75/2006 (H1N1)), Influenza A virus (A/Vilson-Smith/1933 (H1N1)), Influenza A virus (A/Wuhan/359/1995 (H3N2)), Influenza A virus (STRAIN A/EQUINE/NEW MARKET/76), Influenza B virus, Japanese encephalitis virus, Japanese encephalitis virus strain Nakayama, Japanese encephalitis virus Vellore P20778, JC polyomavirus, Junin mammarenavirus, Klebsiella pneumoniae, Kumlinge virus, Lake Victoria marburgvirus-Popp, Lassa mammarenavirus, Lassa virus Josiah, Leishmania, Leishmania aethiopica, Leishmania braziliensis, Leishmania braziliensis MHOM/BR/75/M2904, Leishmania chagasi, Leishmania donovani, Leishmania infantum, Leishmania major, Leishmania major strain Friedlin, Leishmania panamensis, Leishmania pifanoi, Leptospira interrogans, Leptospira interrogans serovar Australis, Leptospira interrogans serovar Copenhageni, Leptospira interrogans serovar Copenhageni str. Fiocruz L1-130, Leptospira interrogans serovar Lai, Leptospira interrogans serovar Lai str. HY-1, Leptospira interrogans serovar Pomona, Little cherry virus 1, Lymphocytic choriomeningitis mammarenavirus, Measles morbillivirus, Measles virus strain Edmonston, Merkel cell polyomavirus, Mobala mammarenavirus, Modified Vaccinia Ankara virus, Moraxella catarrhalis O35E, Mupapillomavirus 1, Mus musculus, Mycobacterium, Mycobacterium abscessus, Mycobacterium avium, Mycobacterium avium serovar 8, Mycobacterium avium subsp. paratuberculosis, Mycobacterium bovis AN5, Mycobacterium bovis BCG, Mycobacterium bovis BCG str. Pasteur 1173P2, Mycobacterium fortuitum subsp. fortuitum, Mycobacterium gilvum, Mycobacterium intracellulare, Mycobacterium kansasii, Mycobacterium leprae, Mycobacterium leprae TN, Mycobacterium marinum, Mycobacterium neoaurum, Mycobacterium phlei, Mycobacterium smegmatis, Mycobacterium tuberculosis, Mycobacterium tuberculosis CDCl551, Mycobacterium tuberculosis H37Ra, Mycobacterium tuberculosis H37Rv, Mycobacterium ulcerans, Mycoplasma pneumoniae, Mycoplasma pneumoniae FH, Mycoplasma pneumoniae M129, Necator americanus, Neisseria gonorrhoeae, Neisseria meningitidis serogroup B H44/76, Nipah henipavirus, Norovirus genogroup 2 Camberwell 1890, Onchocerca volvulus, Orientia tsutsugamushi, Oryctolagus cuniculus, Pan troglodytes, Paracoccidioides brasiliensis, Paracoccidioides brasiliensis B339, Plasmodium falciparum, Plasmodium falciparum 3D7, Plasmodium falciparum 7G8, Plasmodium falciparum FC27/Papua New Guinea, Plasmodium falciparum FCR-3/Gambia, Plasmodium falciparum isolate WELLCOME, Plasmodium falciparum K1, Plasmodium falciparum LE5, Plasmodium falciparum Mad20/Papua New Guinea, Plasmodium falciparum NF54, Plasmodium falciparum Palo Alto/Uganda, Plasmodium falciparum RO-33, Plasmodium reichenowi, Plasmodium vivax, Plasmodium vivax NK, Plasmodium vivax Sal-1, Plasmodium vivax strain Belem, Plasmodium vivax-like sp., Porphyromonas gingivalis, Porphyromonas gingivalis 381, Porphyromonas gingivalis OMZ 409, Prevotella sp. oral taxon 472 str. F0295, Pseudomonas aeruginosa, Puumala orthohantavirus, Puumala virus (strain Umea/hu), Puumala virus sotkamo/v-2969/81, Pythium insidiosum, Ravn virus-Ravn, Kenya, 1987, Respiratory syncytial virus, Rhodococcus fascians, Rhodococcus hoagii, Rubella virus, Rubella virus strain M33, Rubella virus strain Therien, Rubella virus vaccine strain RA27/3, Saccharomyces cerevisiae, Saimiriine gammaherpesvirus 2, Salmonella enterica subsp. enterica serovar Typhi, Salmonella ‘group A’, Salmonella ‘group D’, Salmonella sp. ‘group B’, Sapporo rat virus, SARS coronavirus, SARS coronavirus BJ01, SARS coronavirus TJF, SARS coronavirus Tor2, SARS coronavirus Urbani, Schistosoma, Schistosoma japonicum, Schistosoma mansoni, Schistosoma mansoni Puerto Rico, Sin Nombre orthohantavirus, Sindbis virus, Staphylococcus aureus, Staphylococcus aureus subsp. aureus COL, Staphylococcus aureus subsp. aureus MRSA252, Streptococcus, Streptococcus mutans, Streptococcus mutans MT 8148, Streptococcus oralis, Streptococcus pneumoniae, Streptococcus pyogenes, Streptococcus pyogenes serotype M24, Streptococcus pyogenes serotype M3 D58, Streptococcus pyogenes serotype M5, Streptococcus pyogenes serotype M6, Streptococcus sp. ‘group A’, Taenia crassiceps, Taenia saginata, Taenia solium, Tick-borne encephalitis virus, Toxocara canis, Toxoplasma gondii, Toxoplasma gondii ME49, Toxoplasma gondii RH, Toxoplasma gondii type I, Toxoplasma gondii type II, Toxoplasma gondii type III, Toxoplasma gondii VEG, Treponema pallidum, Treponema pallidum subsp. pallidum str. Nichols, Trichomonas vaginalis, Triticum aestivum, Trypanosoma brucei brucei, Trypanosoma brucei gambiense, Trypanosoma cruzi, Trypanosoma cruzi Dm28c, Trypanosoma cruzi strain CL Brener, Vaccinia virus, Vesicular stomatitis virus, Vibrio cholerae, West Nile virus, West Nile virus NY-99, Wuchereria bancrofti, Yellow fever virus 17D/Tiantan, Yersinia enterocolitica, Zaire ebolavirus, Zika virus, or a fragment, variant or derivative of any one of said bacterial, viral, protozoal, fungal antigens, or any combination thereof.

### Allogeneic Antigens

[0118] According to further preferred embodiments, the artificial nuclei acid molecule, preferably RNA, according to the invention encodes, in its at least one coding region, at least one antigenic peptide or protein derived from an allogeneic antigen.

[0119] An “allogeneic antigen” or “alloantigen” or “isoantigen” is an antigen existing in alternative (allelic) forms in a species, and can therefore induce alloimmunity (or isoimmunity) in members of the same species, e.g. upon blood transfusion, tissue or organ transplantation, or sometimes pregnancy. Typical allogeneic antigens include histocompatibility antigens and blood group antigens. In the context of the present invention, allogeneic antigens are preferably of human origin. The provision of an artificial nucleic acid, preferably RNA, encoding an antigenic protein or peptide derived from an allogeneic antigen can, for instance, be used to induce immune tolerance towards said allogeneic antigen.

[0120] Preferably, the at least one antigenic peptide or protein encoded by the at least one coding region of the artificial nucleic acid molecule, preferably RNA, of the invention, may be derived from an allogeneic antigen derived or selected from UDP-glucuronosyltransferase 2B17 precursor, MHC class I antigen HLA-A2, Coagulation factor VIII precursor, coagulation factor VIII, Thrombopoietin precursor (Megakaryocyte colony-stimulating factor) (Myeloproliferative leukemia virus oncogene ligand) (C-mpl ligand) (ML) (Megakaryocyte growth and development factor) (MGDF), Integrin beta-3, histocompatibility (minor) HA-1, SMCY, thymosin beta-4, Y-chromosomal, Histone demethylase UTY, HLA class II histocompatibility antigen, DP (W2) beta chain, lysine-specific demethylase 5D isoform 1, myosin-Ig, Probable ubiquitin carboxyl-terminal hydrolase FAF-Y, Pro-cathepsin H, DRB1, MHC DR beta DRw13 variant, HLA class II histocompatibility antigen, DRB1-15 beta chain, HLA class II histocompatibility antigen, DRB1-1 beta chain precursor, Minor histocompatibility protein HMSD variant form, HLA-DR3, Chain B, Hla-Dr1 (Dra, Drb1 0101) Human Class Ii Histocompatibility Protein (Extracellular Domain) Complexed With Endogenous Peptide, MHC classII HLA-DRB1, MHC class I HLA-A, human leukocyte antigen B, RAS protein activator like-3, anoctamin-9, ATP-dependent RNA helicase DDX3Y, Protocadherin-11 Y-linked, KIAA0020, platelet glycoprotein IIIa leucine-33 form-specific antibody light chain variable region, dead box, Y isoform, ATP-dependent RNA helicase DDX3X isoform 2, HLA-DRB1 protein, truncated integrin beta 3, glycoprotein IIIa, platelet membrane glycoprotein IIb, Carbonic anhydrase 1, HLA class I histocompatibility antigen, A-11 alpha chain precursor, HLA-A11 antigen A11.2, HLA class I histocompatibility antigen, A-68 alpha chain, MHC HLA-B51, MHC class I antigen HLA-A30, HLA class I histocompatibility antigen, A-1 alpha chain precursor variant, HLA class I histocompatibility antigen B-57, MHC class I antigen, MHC class II antigen, MHC HLA-DR-beta cell surface glycoprotein, DR7 beta-chain glycoprotein, MHC DR-beta, lymphocyte antigen, collagen type V alpha 1, collagen alpha-2 (V) chain preproprotein, sp110 nuclear body protein isoform d, integrin, alpha 2b (platelet glycoprotein IIb of IIb/IIIa complex, antigen CD41), isoform CRA_c, 40S ribosomal protein S4, Y isoform 1, uncharacterized protein KIAA1551, factor VIII, UDP-glucuronosyltransferase 2B17, HLA class I histocompatibility antigen, A-2 alpha chain, Thrombopoietin, Minor histocompatibility protein HA-1, Lysine-specific demethylase 5D, HLA class II histocompatibility antigen, DP beta 1 chain, Unconventional myosin-Ig, HLA class II histocompatibility antigen, DRB1-13 beta chain, HLA class II histocompatibility antigen, DRB1-1 beta chain, HLA class II histocompatibility antigen, DRB1-3 chain, HLA class I histocompatibility antigen, B-46 alpha chain, Pumilio homolog 3, ATP-dependent RNA helicase DDX3X, Integrin alpha-IIb, HLA class I histocompatibility antigen, A-11 alpha chain, HLA class I histocompatibility antigen, B-51 alpha chain, HLA class I histocompatibility antigen, A-30 alpha chain, HLA class I histocompatibility antigen, A-1 alpha chain, HLA class I histocompatibility antigen, B-57 alpha chain, HLA class I histocompatibility antigen, B-40 alpha chain, HLA class II histocompatibility antigen, DRB1-7 beta chain, HLA class II histocompatibility antigen, DRB1-12 beta chain, Collagen alpha-1 (V) chain, Collagen alpha-2 (V) chain, Sp110 nuclear body protein, or a fragment, variant or derivative of any one of said allogeneic antigens, or any combination thereof.

### Autoantigens

[0121] According to further preferred embodiments, the artificial nuclei acid molecule, preferably RNA, according to the invention encodes, in its at least one coding region, at least one antigenic peptide or protein derived from an autoantigen.

[0122] An “autoantigen” an endogenous “self-” antigen that—despite being a normal body constituent—induces an autoimmune reaction in the host. In the context of the present invention, autoantigens are preferably of human origin. The provision of an artificial nucleic acid, preferably RNA, encoding an antigenic protein or peptide derived from an autoantigen can, for instance, be used to induce immune tolerance towards said autoantigen.

[0123] Preferably, the at least one antigenic peptide or protein encoded by the at least one coding region of the artificial nucleic acid molecule, preferably RNA, of the invention, may encode an antigenic peptide or protein derived from an autoantigen derived or selected from 60 kDa chaperonin 2, Lipoprotein LpqH, Melanoma antigen recognized by T-cells 1, MHC class I polypeptide-related sequence A, Parent Protein, Structural polyprotein, Tyrosinase, Myelin proteolipid protein, Epstein-Barr nuclear antigen 1, Envelope glycoprotein GP350, Genome polyprotein, Collagen alpha-1 (II) chain, Aggrecan core protein, Melanocyte-stimulating hormone receptor, Acetylcholine receptor subunit alpha, 60 kDa heat shock protein, mitochondrial, Histone H4, Myosin-11, Glutamate decarboxylase 2, 60 kDa chaperonin, PqqC-like protein, Thymosin beta-10, Myelin basic protein, Epstein-Barr nuclear antigen 4, Melanocyte protein PMEL, HLA class II histocompatibility antigen, DQ beta 1 chain, Latent membrane protein 2, Integrin beta-3, Nucleoprotein, 60S ribosomal protein L10, Protein BOLF1, 60S acidic ribosomal protein P2, Latent membrane protein 1, Collagen alpha-2 (VI) chain, Exodeoxyribonuclease V, Gamma, Trans-activator protein BZLF1, S-arrestin, HLA class I histocompatibility antigen, A-3 alpha chain, Protein CT_579, Matrin-3, Envelope glycoprotein B, ATP-dependent zinc metalloprotease FtsH, U1 small nuclear ribonucleoprotein 70 kDa, CD48 antigen, Tubulin beta chain, Actin, cytoplasmic 1, Epstein-Barr nuclear antigen 3, NEDD4 family-interacting protein 1, 60S ribosomal protein L28, Immediate-early protein 2, Insulin, isoform 2, Keratin, type II cytoskeletal 3, Matrix protein 1, Histone H2A.Z, mRNA export factor ICP27 homolog, Small nuclear ribonucleoprotein-associated proteins B and B′, Large cysteine-rich periplasmic protein OmcB, Smoothelin, Small nuclear ribonucleoprotein Sm D1, Acetylcholine receptor subunit epsilon, Invasin repeat family phosphatase, Alpha-crystallin B chain, HLA class II histocompatibility antigen, DRB1-13 beta chain, HLA class II histocompatibility antigen, DRB1-4 beta chain, Dihydrolipoyllysine-residue acetyltransferase component of pyruvate dehydrogenase complex, mitochondrial, Keratin, type I cytoskeletal 18, Epstein-Barr nuclear antigen 6, Protein Tax-1, Vimentin, Keratin, type I cytoskeletal 16, Keratin, type I cytoskeletal 10, HLA class I histocompatibility antigen, B-27 alpha chain, Thyroglobulin, Acetylcholine receptor subunit gamma, Chaperone protein Dnak, Protein U24, Na(+)-translocating NADH-quinone reductase subunit A, 65 kDa phosphoprotein, Probable ATP-dependent Clp protease ATP-binding subunit, Probable outer membrane protein PmpC, Heat shock 70 kDa protein 1B, Hemagglutinin, Tetanus toxin, Enolase, Ras-associated and pleckstrin homology domains-containing protein 1, Keratin, type II cytoskeletal 7, Myosin-9, Histone H1-like protein Hc1, Envelope glycoprotein gp160, Urease subunit beta, Vasoactive intestinal polypeptide receptor 1, Viral interleukin-10 homolog, Histone H3.3, Replication protein A 32 kDa subunit, Probable outer membrane protein PmpD, Insulin-2, L-dopachrome tautomerase, Keratin, type I cytoskeletal 9, Envelope glycoprotein H, DNA polymerase catalytic subunit, Beta-2-glycoprotein 1, Envelope glycoprotein gp62, Serum albumin, Major DNA-binding protein, HLA class I histocompatibility antigen, A-2 alpha chain, Myeloblastin, POTE ankyrin domain family member I, Protein E7, Predicted Efflux Protein, Replication and transcription activator, Gag-Pro-Pol polyprotein, Capsid protein VP26, Major capsid protein, Apoptosis regulator BHRF1, Epstein-Barr nuclear antigen 2, HLA class I histocompatibility antigen, B-7 alpha chain, Calreticulin, Gamma-secretase C-terminal fragment 59, Insulin, Glucose-6-phosphatase 2, Islet amyloid polypeptide, Receptor-type tyrosine-protein phosphatase N2, Receptor-type tyrosine-protein phosphatase-like N, Islet cell autoantigen 1, Bos d 6, Glutamate decarboxylase 1, 60S ribosomal protein L29, 28S ribosomal protein S31, mitochondrial, HLA class II histocompatibility antigen, DRB1-16 beta chain, Collagen alpha-3 (IV) chain, Glucose-6-phosphatase, Glucose-6-phosphatase 3, Collagen alpha-5 (IV) chain, Protein Nef, Glial fibrillary acidic protein, Fibrillin-1, Tenascin, Stromelysin-1, Interstitial collagenase, Calpain-2 catalytic subunit, Chondroitin sulfate proteoglycan 4, Fibrinogen beta chain, Chaperone protein DnaJ, Chitinase-3-like protein 1, Matrix metalloproteinase-16, DNA topoisomerase 1, Follistatin-related protein 1, Ig gamma-1 chain C region, Ig gamma-3 chain C region, Collagen alpha-2 (XI) chain, Desmoglein-3, Fibrinogen alpha chain, Filaggrin, T-cell receptor beta chain V region CTL-L17, T-cell receptor beta-1 chain C region, Ig heavy chain V-I region EU, Collagen alpha-1 (IV) chain, HLA class I histocompatibility antigen, Cw-7 alpha chain, HLA class I histocompatibility antigen, B-35 alpha chain, HLA class I histocompatibility antigen, B-38 alpha chain, High mobility group protein B2, Ig heavy chain V-II region ARH-77, HLA class II histocompatibility antigen, DR beta 4 chain, Ig kappa chain C region, Alpha-enolase, Lysosomal-associated transmembrane protein 5, HLA class I histocompatibility antigen, B-52 alpha chain, Heterogeneous nuclear ribonucleoproteins A2/B1, T-cell receptor beta chain V region YT35, Ig gamma-4 chain C region, T-cell receptor beta-2 chain C region, DnaJ homolog subfamily B member 2, DnaJ homolog subfamily A member 1, Ig kappa chain V-IV region Len, Ig heavy chain V-II region OU, Ig kappa chain V-IV region B17, 2′,3′-cyclic-nucleotide 3′-phosphodiesterase, Ig heavy chain V-II region MCE, Ig kappa chain V-III region HIC, Ig heavy chain V-II region COR, Myelin-oligodendrocyte glycoprotein, Ig kappa chain V-II region RPMI 6410, Ig kappa chain V-II region GM607, Immunoglobulin lambda-like polypeptide 5, Ig heavy chain V-II region WAH, Biotin-protein ligase, Oligodendrocyte-myelin glycoprotein, Transaldolase, DNA helicase/primase complex-associated protein, Interferon beta, Myelin-associated oligodendrocyte basic protein, Myelin-associated glycoprotein, Fusion glycoprotein F0, Myelin protein P0, Ig lambda chain V-II region MGC, DNA primase, Minor capsid protein L2, Myelin P2 protein, Peripheral myelin protein 22, Retinol-binding protein 3, Butyrophilin subfamily 1 member A1, Alkaline nuclease, Claudin-11, N-acetylmuramoyl-L-alanine amidase CwIH, GTPase Der, Possible transposase, ABC transporter, ATP-binding protein, putative, Collagen alpha-2 (IV) chain, Calpastatin, Ig kappa chain V-III region SIE, E3 ubiquitin-protein ligase TRIM68, Glutamate receptor ionotropic, NMDA 2A, Spectrin alpha chain, non-erythrocytic 1, Lupus La protein, Complement C1q subcomponent subunit A, U1 small nuclear ribonucleoprotein A, 60 kDa SS-A/Ro ribonucleoprotein, DNA repair protein XRCC4, Histone H3-like centromeric protein A, Histone H1.4, Putative HTLV-1-related endogenous sequence, HLA class II histocompatibility antigen, DRB1-3 chain, HLA class II histocompatibility antigen, DRB1-1 beta chain, Small nuclear ribonucleoprotein Sm D3, Tumor necrosis factor receptor superfamily member 6, Phosphomannomutase/phosphoglucomutase, Tripartite terminase subunit UL15, Proteasome subunit beta type-3, Proliferating cell nuclear antigen, Inner capsid protein sigma-2, Histone H2B type 1, E3 ubiquitin-protein ligase TRIM21, DNA-directed RNA polymerase II subunit RPB1, X-ray repair cross-complementing protein 6, U1 small nuclear ribonucleoprotein C, Caspase-8, 60S ribosomal protein L7, 5-hydroxytryptamine receptor 4, Small nuclear ribonucleoprotein-associated protein N, Exportin-1, 60S acidic ribosomal protein P0, Neurofilament heavy polypeptide, putative env, T-cell receptor alpha chain C region, T-cell receptor alpha chain V region CTL-L17, RNA polymerase sigma factor SigA, Small nuclear ribonucleoprotein Sm D2, Immunoglobulin iota chain, Ig kappa chain V-III region WOL, Histone H2B type 1-F/J/L, High mobility group protein B1, X-ray repair cross-complementing protein 5, Muscarinic acetylcholine receptor M3, Major viral transcription factor ICP4, Voltage-dependent P/Q-type calcium channel subunit alpha-1A, Heat shock protein HSP 90-beta, DNA topoisomerase 2-beta, Histone H3.1, Tumor necrosis factor ligand superfamily member 6, Phospho-N-acetylmuramoyl-pentapeptide-transferase, Hemoglobin subunit alpha, Apolipoprotein E, CD99 antigen, ATP synthase subunit beta, mitochondrial, Acetylcholine receptor subunit delta, Acyl-CoA dehydrogenase family member 10, KN motif and ankyrin repeat domain-containing protein 3, SAM and SH3 domain-containing protein 1, Elongation factor 1-alpha 1, GTP-binding nuclear protein Ran, Myosin-7, Sal-like protein 1, IgGFc-binding protein, E3 ubiquitin-protein ligase SIAH1, Muscleblind-like protein 2, Annexin A1, Protein PET117 homolog, mitochondrial, Nuclear ubiquitous casein and cyclin-dependent kinase substrate 1, Pleiotropic regulator 1, NADH dehydrogenase [ubiquinone] 1 alpha subcomplex subunit 3, Guanine nucleotide-binding protein G(o) subunit alpha, Microtubule-associated protein 1B, L-serine dehydratase/L-threonine deaminase, Centromere protein J, SH3 and multiple ankyrin repeat domains protein 3, Fumarate hydratase, mitochondrial, Cofilin-1, Rho GTPase-activating protein 9, Phosphatidate cytidylyltransferase 1, Neurofilament light polypeptide, Calsyntenin-1, GPI transamidase component PIG-T, Perilipin-3, Protein unc-13 homolog D, WD40 repeat-containing protein SMU1, Neurofilament medium polypeptide, Protein S100-B, Carboxypeptidase E, Neurexin-2-beta, NAD-dependent protein deacetylase sirtuin-2, Tripartite motif-containing protein 40, Neurexin-1-beta, Annexin A11, Hemoglobin subunit beta, Glyceraldehyde-3-phosphate dehydrogenase, Histidine triad nucleotide-binding protein 3, ATP synthase subunit e, mitochondrial, 10 kDa heat shock protein, mitochondrial, Cellular tumor antigen p53, Leukocyte-associated immunoglobulin-like receptor 1, Tubulin alpha-1B chain, Splicing factor, proline- and glutamine-rich, Olfactory receptor 10A4, Histone H2B type 2-F, Calmodulin, RNA-binding protein Raly, Phosphoinositide-3-kinase-interacting protein 1, Alpha-2-macroglobulin, Glycogen phosphorylase, brain form, THO complex subunit 4, Neuroblast differentiation-associated protein AHNAK, Phosphoserine aminotransferase, Mitochondrial folate transporter/carrier, Sentrin-specific protease 3, Cytosolic Fe—S cluster assembly factor NUBP2, Histone deacetylase 7, Serine/threonine-protein phosphatase 2A 55 kDa regulatory subunit B alpha isoform, Serine/threonine-protein phosphatase 2A regulatory subunit B″ subunit alpha, Gelsolin, Insulin-like growth factor II, Tight junction protein ZO-1, Hsc70-interacting protein, FXYD domain-containing ion transport regulator 6, AP-1 complex subunit mu-1, Syntenin-1, NADH dehydrogenase [ubiquinone] iron-sulfur protein 7, mitochondrial, Low-density lipoprotein receptor, LIM domain transcription factor LMO4, Spectrin beta chain, non-erythrocytic 1, ATP-binding cassette sub-family A member 2, NADH dehydrogenase [ubiquinone] 1 subunit C2, SPARC-like protein 1, Electron transfer flavoprotein subunit alpha, mitochondrial, Glutamate dehydrogenase 1, mitochondrial, Complexin-2, Protein-serine O-palmitoleoyltransferase porcupine, Plexin domain-containing protein 2, Threonine synthase-like 2, Testican-2, C—X—C chemokine receptor type 1, Arachidonate 5-lipoxygenase-activating protein, Neuroguidin, Fatty acid 2-hydroxylase, Nuclear factor 1 X-type, LanC-like protein 1, Glutamine synthetase, Lysosome-associated membrane glycoprotein 1, Apolipoprotein A-I, Alpha-adducin, Guanine nucleotide-binding protein G(I)/G(S)/G(T) subunit beta-3, Integral membrane protein GPR137B, Ubiquilin-1, Aldose reductase, Clathrin light chain B, V-type proton ATPase subunit F, Apolipoprotein D, 40S ribosomal protein SA, Bcl-2-associated transcription factor 1, Phosphatidate cytidylyltransferase 2, ATP synthase-coupling factor 6, mitochondrial, Receptor tyrosine-protein kinase erbB-2, Echinoderm microtubule-associated protein-like 5, Phosphatidylethanolamine-binding protein 1, Myc box-dependent-interacting protein 1, Membrane-associated phosphatidylinositol transfer protein 1, 40S ribosomal protein S29, Small acidic protein, Galectin-3-binding protein, Fatty acid synthase, Baculoviral IAP repeat-containing protein 5, Septin-2, cAMP-dependent protein kinase type II-alpha regulatory subunit, Reelin, Apoptosis facilitator Bcl-2-like protein 14, Staphylococcal nuclease domain-containing protein 1, Methyl-CpG-binding domain protein 2, Transformation/transcription domain-associated protein, Transcription factor HES-1, Protein transport protein Sec23B, Paralemmin-2, C—C motif chemokine 15, Sodium/potassium-transporting ATPase subunit alpha-1, Stathmin, Heterogeneous nuclear ribonucleoprotein L-like, Nodal modulator 3, Interferon-induced GTP-binding protein Mx2, Integrin alpha-D, Low-density lipoprotein receptor-related protein 5-like protein, Macrophage migration inhibitory factor, Ferritin light chain, Dihydropyrimidinase-related protein 2, Neuronal membrane glycoprotein M6-b, ATP-binding cassette sub-family A member 5, Synaptosomal-associated protein 25, Insulin-like growth factor I, Ankyrin repeat domain-containing protein 29, Protein spinster homolog 3, Peflin, Contactin-1, Microfibril-associated glycoprotein 3, von Willebrand factor, Small nuclear ribonucleoprotein G, Interleukin-12 receptor subunit beta-1, Epoxide hydrolase 1, Cytochrome b-c1 complex subunit 10, Monoglyceride lipase, Serotransferrin, Alpha-synuclein, Cytosolic non-specific dipeptidase, Transgelin-2, Testisin, Fms-related tyrosine kinase 3 ligand, Noelin-2, Serine/threonine-protein kinase DCLK1, Interferon alpha-2, Acetylcholine receptor subunit beta, Histone H2A type 1, Beta-2 adrenergic receptor, Putrescine aminotransferase, Interferon alpha-1/13, Protein NEDD1, DnaJ homolog subfamily B member 1, Tubulin beta-6 chain, Non-histone chromosomal protein HMG-17, Polyprotein, Exosome component 10, Natural cytotoxicity triggering receptor 3 ligand 1, Gag polyprotein, Band 3 anion transport protein, Protease, Histidine-tRNA ligase, cytoplasmic, Collagen alpha-1 (XVII) chain, Envoplakin, Histone H2B type 1-C/E/F/G/I, Diaminopimelate decarboxylase, Histone H2B type 2-E, Cytochrome P450 2D6, Dihydrolipoyllysine-residue succinyltransferase component of 2-oxoglutarate dehydrogenase complex, Histone H2B type 1-H, Thyroid peroxidase, Proline-rich transmembrane protein 2, Periplakin, Integrin alpha-6, Dystonin, Desmoplakin, Histone H2B type 1-J, Histone H2B type 1-B, 6,7-dimethyl-8-ribityllumazine synthase, Thyrotropin receptor, Integrin alpha-IIb, Nuclear pore membrane glycoprotein 210, Protein U2, DST protein, Plectin, SII0397 protein, Bos d 10, Outer capsid protein VP4, 5,6-dihydroxyindole-2-carboxylic acid oxidase, O-phosphoseryl-tRNA (Sec) selenium transferase, ATP-dependent Clp protease proteolytic subunit, Lymphocyte activation gene 3 protein, Phosphoprotein 85, L1 protein, Actin, alpha skeletal muscle, Dihydrolipoyl dehydrogenase, Dihydrolipoyllysine-residue succinyltransferase component of 2-oxoglutarate dehydrogenase complex, mitochondrial, Liver carboxylesterase 1, Dihydrolipoyllysine-residue acetyltransferase component of pyruvate dehydrogenase complex, Acetyltransferase component of pyruvate dehydrogenase complex, Pyruvate dehydrogenase protein X component, mitochondrial, Dihydrolipoamide acetyltransferase, Protein disulfide-isomerase A3, Flotillin-2, Beta-galactosidase, TSHR protein, Lipoamide acyltransferase component of branched-chain alpha-keto acid dehydrogenase complex, mitochondrial, Nuclear autoantigen Sp-100, Desmoglein-1, Glucagon receptor, Membrane glycoprotein US8, Sodium/iodide cotransporter, ORF2, Capsid protein, Uncharacterized protein LF3, Formimidoyltransferase-cyclodeaminase, Core-capsid bridging protein, Neurovirulence factor ICP34.5, Probable RNA-binding protein, Cholesterol side-chain cleavage enzyme, mitochondrial, Histone H1.0, Non-histone chromosomal protein HMG-14, Histone H5, 60S acidic ribosomal protein P1, Pyruvate dehydrogenase E1 component subunit alpha, somatic form, mitochondrial, Leiomodin-1, Uncharacterized protein RP382, Uncharacterized protein U95, (Type IV) pilus assembly protein PilB, 2-succinylbenzoate-CoA ligase, TAZ protein, Tafazzin, Putative lactose-specific phosphotransferase system (PTS), IIBC component, Claudin-17, Pericentriolar material 1 protein, Yop proteins translocation protein L, Laminin subunit alpha-1, A disintegrin and metalloproteinase with thrombospondin motifs 13, Keratin, type I cytoskeletal 14, Coagulation factor VIII, Keratin, type I cytoskeletal 17, Neutrophil defensin 1, Ig alpha-1 chain C region, BRCA1-associated RING domain protein 1, Trinucleotide repeat-containing gene 6A protein, Thrombopoietin, Plasminogen-binding protein PgbA, Steroid 17-alpha-hydroxylase/17,20 lyase, Nucleolar RNA helicase 2, Histone H2B type 1-N, Steroid 21-hydroxylase, UreB, Melanin-concentrating hormone receptor 1, Blood group Rh (CE) polypeptide, HLA class II histocompatibility antigen, DP beta 1 chain, Platelet glycoprotein Ib alpha chain, Muscarinic acetylcholine receptor M1, Outer capsid glycoprotein VP7, Fibronectin, HLA class I histocompatibility antigen, B-8 alpha chain, AhpC, Cytoskeleton-associated protein 5, Sucrase-isomaltase, intestinal, Leukotriene B4 receptor 2, Glutathione peroxidase 2, Collagen alpha-1 (VII) chain, Nucleosome assembly protein 1-like 4, Alanine-tRNA ligase, cytoplasmic, Extracellular calcium-sensing receptor, Major centromere autoantigen B, Large tegument protein deneddylase, Blood group Rh (D) polypeptide, Kininogen-1, Peroxiredoxin-2, Ezrin, DNA replication and repair protein RecF, Keratin, type II cytoskeletal 6C, Trigger factor, Serpin B5, Heat shock protein beta-1, Protein-arginine deiminase type-4, Potassium-transporting ATPase alpha chain 1, Potassium-transporting ATPase subunit beta, Forkhead box protein E3, Condensin-2 complex subunit D3, Myotonin-protein kinase, Zinc transporter 8, ABC transporter, substrate-binding protein, putative, Aquaporin-4, Cartilage intermediate layer protein 1, HLA class II histocompatibility antigen, DR beta 5 chain, Small nuclear ribonucleoprotein F, Small nuclear ribonucleoprotein E, Ig kappa chain V-V region L7, Ig heavy chain Mem5, Ig heavy chain V-III region J606, Hemoglobin subunit delta, Collagen alpha-1 (XV) chain, 78 kDa glucose-regulated protein, 60S ribosomal protein L22, Alpha-1-acid glycoprotein 1, Malate dehydrogenase, mitochondrial, 60S ribosomal protein L8, Serine protease HTRA2, mitochondrial, 60S ribosomal protein L23a, Complement C3, Collagen alpha-1 (XII) chain, Angiotensinogen, Protein S100-A9, Annexin A2, Alpha-actinin-4, HLA class II histocompatibility antigen, DQ alpha 1 chain, Apolipoprotein A-IV, Actin, aortic smooth muscle, HLA class II histocompatibility antigen, DP alpha 1 chain, Creatine kinase B-type, HLA class II histocompatibility antigen, DR beta 3 chain, Histone H1x, Heterogeneous nuclear ribonucleoprotein U-like protein 2, Basement membrane-specific heparan sulfate proteoglycan core protein, Cadherin-5, 40S ribosomal protein S13, Alpha-1-antitrypsin, Multimerin-2, Centromere protein F, 40S ribosomal protein S18, 40S ribosomal protein S25, Na(+)/H(+) exchange regulatory cofactor NHE-RF1, Actin, cytoplasmic 2, Hemoglobin subunit gamma-1, Hemoglobin subunit gamma-2, Protein NipSnap homolog 3A, Cathepsin D, 1-phosphatidylinositol 4,5-bisphosphate phosphodiesterase epsilon-1, 40S ribosomal protein S17, Apolipoprotein B-100, Histone H2B type 1-K, Collagen alpha-1 (1) chain, Collagen alpha-2 (I) chain, 3-hydroxyacyl-CoA dehydrogenase type-2, 60S ribosomal protein L27, Histone H1.2, Nidogen-2, Cadherin-1, 60S ribosomal protein L27a, HLA class II histocompatibility antigen, DR alpha chain, Dipeptidyl peptidase 1, Ubiquitin-40S ribosomal protein S27a, Citrate synthase, mitochondrial, Tax1-binding protein 1, Myeloperoxidase, Plexin domain-containing protein 1, Glycogen synthase, [Pyruvate dehydrogenase [acetyl-transferring]]-phosphatase 1, mitochondrial, Phorbol-12-myristate-13-acetate-induced protein 1, Peroxiredoxin-5, mitochondrial, 14-3-3 protein zeta/delta, ATP synthase subunit d, mitochondrial, Vitronectin, Lipopolysaccharide-binding protein, Ig heavy chain V-III region GAL, Protein CREG1, 60S ribosomal protein L6, Stabilin-1, Plasma protease C1 inhibitor, Ig kappa chain V-III region VG, Inter-alpha-trypsin inhibitor heavy chain H4, Alpha-1B-glycoprotein, Tartrate-resistant acid phosphatase type 5, Sulfhydryl oxidase 1, Complement component C6, Glycogen phosphorylase, muscle form, SH3 domain-binding glutamic acid-rich-like protein 3, Transforming protein RhoA, Albumin, isoform CRA_k, V-type proton ATPase subunit G 1, Flavin reductase (NADPH), Heat shock cognate 71 kDa protein, Lipoprotein lipase, Plasminogen, Annexin, Syntaxin-7, Transmembrane glycoprotein NMB, Coagulation factor XIII A chain, Apolipoprotein A-II, N-acetylglucosamine-6-sulfatase, Complement C1q subcomponent subunit B, Protein S100-A10, Microfibril-associated glycoprotein 4, 72 kDa type IV collagenase, Collagen alpha-1 (XI) chain, Cathepsin B, Palmitoyl-protein thioesterase 1, Macrosialin, Histone H1.1, Histone H1.5, Fibromodulin, Thrombospondin-1, Rho GDP-dissociation inhibitor 2, Alpha-galactosidase A, Superoxide dismutase [Cu—Zn], HLA class I histocompatibility antigen, alpha chain E, Phosphatidylcholine-sterol acyltransferase, Legumain, Low affinity immunoglobulin gamma Fc region receptor II-c, Fructose-bisphosphate aldolase A, Cytochrome c oxidase subunit 8A, mitochondrial, Pyruvate kinase PKM, Endoglin, Target of Nesh-SH3, Cytochrome c oxidase subunit 5A, mitochondrial, EGF-containing fibulin-like extracellular matrix protein 2, Epididymal secretory protein E1, Cathepsin S, Annexin A5, Allograft inflammatory factor 1, Decorin, Complement C1s subcomponent, Low affinity immunoglobulin gamma Fc region receptor II-b, Leucine-rich alpha-2-glycoprotein, Lysosomal alpha-glucosidase, Disintegrin and metalloproteinase domain-containing protein 9, Transthyretin, Malate dehydrogenase, cytoplasmic, Filamin-A, Retinoic acid receptor responder protein 1, T-cell surface glycoprotein CD4, Procollagen-lysine, 2-oxoglutarate 5-dioxygenase 1, Fibrinogen gamma chain, Collagen alpha-2 (V) chain, Cystatin-B, Lysosomal protective protein, Granulins, Collagen alpha-1 (XIV) chain, C-reactive protein, Beta-1,4-galactosyltransferase 1, Prolow-density lipoprotein receptor-related protein 1, Ig heavy chain V-III region 23, Phosphoglycerate kinase 1, Alpha-2-antiplasmin, V-set and immunoglobulin domain-containing protein 4, Probable serine carboxypeptidase CPVL, NEDD8, Ganglioside GM2 activator, Clusterin, Alpha-2-HS-glycoprotein, HLA class I histocompatibility antigen, B-37 alpha chain, Adenosine deaminase CECR1, HLA class II histocompatibility antigen, DRB1-11 beta chain, Monocyte differentiation antigen CD14, Erythrocyte band 7 integral membrane protein, Profilin-1, E3 ubiquitin-protein ligase TRIM9, Tripartite motif-containing protein 67, TNF receptor-associated factor 1, Alpha-crystallin A chain, Mitotic checkpoint serine/threonine-protein kinase BUB1, TATA-binding protein-associated factor 2N, Cyclin-F, Centromere protein C, Apoptosis regulator Bcl-2, 2-oxoisovalerate dehydrogenase subunit beta, mitochondrial, Coilin, Nucleoplasmin-3, Homeobox protein Hox-A1, Serine/threonine-protein kinase Chk1, Mitotic checkpoint protein BUB3, Deoxyribonuclease-1, rRNA 2′-O-methyltransferase fibrillarin, Histone H1.3, DNA-directed RNA polymerase III subunit RPC1, DNA-directed RNA polymerase III subunit RPC2, Centromere-associated protein E, Kinesin-like protein KIF11, Histone H4-like protein type G, Tyrosine 3-monooxygenase, ABC transporter, permease/ATP-binding protein, Translation initiation factor IF-1, Protein FAN, Reticulon-4 receptor, Myeloid cell nuclear differentiation antigen, Glucose-6-phosphate isomerase, High affinity immunoglobulin gamma Fc receptor I, Tryptophan 5-hydroxylase 1, Tryptophan 5-hydroxylase 2, Secretory phospholipase A2 receptor, Aquaporin TIP4-1, Histone H2B type F-S, Histone H2AX, Histone H2A type 1-C, ATP-sensitive inward rectifier potassium channel 10, pVII, hypothetical protein TTV27_gp4, hypothetical protein TTV25_gp2, Alpha-1D adrenergic receptor, Alpha-1B adrenergic receptor, Packaging protein 3, hypothetical protein TTV14_gp2, KRR1 small subunit processome component homolog, Bestrophin-4, Alpha-2C adrenergic receptor, Uncharacterized ORF3 protein, Retinoic acid receptor beta, Retinoic acid receptor alpha, B-cell lymphoma 3 protein, Carbohydrate sulfotransferase 8, Harmonin, Prolactin-releasing peptide receptor, Sphingosine 1-phosphate receptor 1, Acyl-CoA-binding domain-containing protein 5, ORF1, hypothetical protein TTMV3_gp2, Mitochondrial import inner membrane translocase subunit Tim17-B, hypothetical protein TTV2_gp2, Absent in melanoma 1 protein, hypothetical protein TTV28_gp1, hypothetical protein TTV26_gp2, hypothetical protein TTV4_gp2, hypothetical protein TTV28_gp4, Mesencephalic astrocyte-derived neurotrophic factor, hypothetical protein TTMV7_gp2, hypothetical protein TTV19_gp2, pORF1, Pre-histone-like nucleoprotein, hypothetical protein TTV8_gp4, hypothetical protein TTV16_gp2, hypothetical protein TTV15_gp2, ORF2/4 protein, P2X purinoceptor 2, membrane glycoprotein E3 CR1-beta, D (2) dopamine receptor, Toll-like receptor 9, Phosphatidylcholine transfer protein, Transcription factor HIVEP2, Probable peptidylarginine deiminase, 60S ribosomal protein L9, Integrin beta-4, Keratin, type II cytoskeletal 1, Chromogranin-A, Histone H3.1t, Voltage-dependent L-type calcium channel subunit alpha-1D, Heat shock 70 kDa protein 1-like, ABC transporter related, UDP-N-acetylglucosamine pyrophosphorylase, Protein GREB1, Aldo/keto reductase, Component of the TOM (Translocase of outer membrane) complex, Excinuclease ABC C subunit domain protein, Phosphoenolpyruvate carboxylase, Arylacetamide deacetylase-like 4, Dynein heavy chain 10, axonemal, Putative Uracil-DNA glycosylase, Spore germination protein PE, Teneurin-1, Putative dehydrogenase, Polysaccharide biosynthesis protein, VCBS, Glutamate/aspartate transport system permease protein GItK, Noggin, Sclerostin, HLA class I histocompatibility antigen, A-30 alpha chain, HLA class I histocompatibility antigen, A-69 alpha chain, HLA class I histocompatibility antigen, B-15 alpha chain, Glutamate receptor ionotropic, NMDA 1, NarH, 40S ribosomal protein S21, Ceruloplasmin, 3-hydroxy-3-methylglutaryl-coenzyme A reductase, 60S ribosomal protein L30, HLA class II histocompatibility antigen gamma chain, HLA class I histocompatibility antigen, Cw-6 alpha chain, HLA class I histocompatibility antigen, Cw-16 alpha chain, Lysosomal alpha-mannosidase, Heat shock protein HSP 90-alpha, Histone H3.2, Histone H2A.J, Voltage-dependent T-type calcium channel subunit alpha-1G, Syncytin-1, Cathelicidin antimicrobial peptide, Tubulin beta-3 chain, Stress-70 protein, mitochondrial, Probable 1,4-alpha-glucan branching enzyme Rv3031, Nuclease-sensitive element-binding protein 1, Complement factor H-related protein 1, Glutaredoxin-1, Gamma-enolase, Platelet-derived growth factor receptor alpha, Collagen alpha-1 (VIII) chain, Matrix metalloproteinase-25, Interferon regulatory factor 5, Cytochrome c oxidase subunit 7C, mitochondrial, Heat shock-related 70 kDa protein 2, Cysteine-rich protein 1, NADH dehydrogenase [ubiquinone] flavoprotein 2, mitochondrial, Glutathione S-transferase P, HLA class I histocompatibility antigen, A-68 alpha chain, HLA class II histocompatibility antigen, DM beta chain, Fructose-bisphosphate aldolase C, Beta-2-microglobulin, Cytochrome c oxidase subunit 5B, mitochondrial, Heat shock 70 kDa protein 13, ATP synthase protein 8, 60S ribosomal protein L13a, TRNA nucleotidyltransferase family enzyme, Ferredoxin-dependent glutamate synthase 2, Alkaline phosphatase, tissue-nonspecific isozyme, SLAM family member 5, Slit homolog 3 protein, Transforming growth factor-beta-induced protein ig-h3, Mannose-binding protein C, Calpain-1 catalytic subunit, Actin, gamma-enteric smooth muscle, Creatine kinase M-type, Protein THEM6, Histone-lysine N-methyltransferase ASH1L, C2 calcium-dependent domain-containing protein 4A, Ras association domain-containing protein 10, Hepatocyte cell adhesion molecule, ADAMTS-like protein 5, HLA class II histocompatibility antigen, DRB1-15 beta chain, Anoctamin-2, Phosphoglycerate mutase 1, Por secretion system protein porV (Pg27, IptO), Beta-enolase, Receptor antigen A, 3-oxoacyl-[acyl-carrier-protein] synthase 2, Putative heat shock protein HSP 90-beta 2, Radixin, Tubulin beta-1 chain, Vacuolar protein sorting-associated protein 26A, Serine/threonine-protein phosphatase 5, Catalase, Transketolase, Protein S100-A1, Alpha-centractin, Tubulin beta-4A chain, Beta-centractin, Probable phosphoglycerate mutase 4, Beta-actin-like protein 2, Tubulin beta-4B chain, Phosphoglycerate mutase 2, Alpha-internexin, Tubulin beta-2A chain, Dihydropyrimidinase-related protein 3, Putative heat shock protein HSP 90-beta-3, Fructose-bisphosphate aldolase B, Protein P, Endoplasmin, ATP synthase subunit O, mitochondrial, Heat shock 70 kDa protein 6, Glyceraldehyde-3-phosphate dehydrogenase, testis-specific, Nascent polypeptide-associated complex subunit alpha-2, Carbonic anhydrase 2, Annexin A6, E3 ubiquitin-protein ligase RNF13, Myeloid-derived growth factor, Tyrosine-protein phosphatase non-receptor type substrate 1, Laminin subunit gamma-1, Trichohyalin, Thrombospondin-2, Sialoadhesin, GTPase IMAP family member 1, C4b-binding protein alpha chain, Voltage-dependent anion-selective channel protein 1, Hemopexin, Complement C5, FYVE, RhoGEF and PH domain-containing protein 2, Haptoglobin, Cytochrome P450 1B1, Titin, Myeloma-overexpressed gene 2 protein, Adipocyte enhancer-binding protein 1, Protein-glutamine gamma-glutamyltransferase 2, Protein Trim21, ADAMTS-like protein 3, N-alpha-acetyltransferase 16, NatA auxiliary subunit, Transforming growth factor beta-1, Elastin, Protein disulfide-isomerase A5, Plastin-2, Leukocyte immunoglobulin-like receptor subfamily B member 1, Histamine H2 receptor, Elongation factor 2, Caveolin-1, Ig gamma-2 chain C region, Immunoglobulin superfamily containing leucine-rich repeat protein, 40S ribosomal protein S9, Prolyl 4-hydroxylase subunit alpha-1, Endoplasmic reticulum-Golgi intermediate compartment protein 1, Tetranectin, Serine protease HTRA1, Heterogeneous nuclear ribonucleoprotein A1, Phosducin-like protein 3, Ig lambda chain V-VI region EB4, Fibronectin type III domain-containing protein 1, Keratin, type II cytoskeletal 2 epidermal, Ferritin heavy chain, Y-box-binding protein 3, Complement C4-B, HLA class I histocompatibility antigen, Cw-15 alpha chain, HLA class I histocompatibility antigen, B-42 alpha chain, Collagen alpha-1 (V) chain, HLA class I histocompatibility antigen, B-73 alpha chain, Integral membrane protein 2B, Lysosome-associated membrane glycoprotein 3, Proteoglycan 4, Ribosomal protein S6 kinase alpha-6, Metalloproteinase inhibitor 2, HLA class II histocompatibility antigen, DRB1-12 beta chain, ATP-sensitive inward rectifier potassium channel 15, Vitamin D-binding protein, Osteopontin, Deoxynucleotidyltransferase terminal-interacting protein 2, Olfactory receptor 5K4, Myosin light chain kinase 2, skeletal/cardiac muscle, Non-POU domain-containing octamer-binding protein, Ubiquilin-2, HLA class I histocompatibility antigen, B-51 alpha chain, Minor histocompatibility antigen H13, Glycophorin-C, Eosinophil cationic protein, SWI/SNF complex subunit SMARCC2, Macrophage mannose receptor 1, tRNA-splicing ligase RtcB homolog, Reticulocalbin-2, Heterogeneous nuclear ribonucleoprotein L, 40S ribosomal protein S30, Collagen alpha-3 (VI) chain, Matrix metalloproteinase-14, Antithrombin-III, 60S ribosomal protein L10a, Retinol-binding protein 4, Heterogeneous nuclear ribonucleoprotein R, Lithostathine-1-alpha, Ret finger protein-like 2, Zinc-alpha-2-glycoprotein, Carboxypeptidase Q, HLA class I histocompatibility antigen, B-56 alpha chain, Chondroadherin, Cysteine-rich protein 2, Prosaposin, Complement component C9, Apolipoprotein C-II, Protocadherin-16, Leukocyte immunoglobulin-like receptor subfamily B member 4, Galactokinase, Complement factor H, Uncharacterized protein YEL014C, Glycerophosphocholine phosphodiesterase GPCPD1, Echinoderm microtubule-associated protein-like 6, or a fragment, variant or derivative of any one of said autoantigens, or any combination thereof.

### Allergens

[0124] According to further preferred embodiments, the artificial nuclei acid molecule, preferably RNA, according to the invention encodes, in its at least one coding region, at least one antigenic peptide or protein derived from an allergen. An “allergen” is any substance, in particular a protein or peptide, which induces allergy, an abnormal immune reaction of the body to a (previously encountered) foreign substance typically introduced by inhalation, ingestion, injection, or skin contact.

[0125] Preferably, the at least one antigenic peptide or protein encoded by the at least one coding region of the artificial nucleic acid molecule, preferably RNA, of the invention, may be derived from an allergen derived or selected from Allergen Pen n 18, Antigen Name, Ara h 2.01 allergen, Melanoma antigen recognized by T-cells 1, Non-specific lipid-transfer protein precursor (LTP) (Allergen Mal d 3), ovalbumin, Parvalbumin beta, Pollen allergen Lol p VA precursor, Pollen allergen Phl p 5b precursor, pru p 1, Pollen allergen Phl p 5a, Der p 1 allergen precursor, Pollen allergen KBG 60 precursor, major allergen Tur c1-Turbo cornutus, Mite group 2 allergen Lep d 2 precursor, Lep D 2 precursor, Major latex allergen Hev b 5, major allergen Cor a 1.0401, Major pollen allergen Art v 1 precursor, Major pollen allergen Bet v 1-A, Beta-lactoglobulin precursor, Alpha-amylase inhibitor 0.28 precursor (CIII) (WMAI-1), group V allergen Phl p 5.0203 precursor, Polygalacturonase precursor, pollen allergen Phl pl, Der f 2 allergen, Probable non-specific lipid-transfer protein 2 precursor, Venom allergen 5 precursor, Pollen allergen Phl p 1 precursor, group V allergen, Chain A, Crystal Structure Of The Calcium-Binding Pollen Allergen Phl P 7 (Polcalcin) At 1.75 Angstroem, Tri r 2 allergen, Pathogenesis-related protein precursor, Globin CTT-III precursor, Major allergen Alt a 1, 13S globulin seed storage protein 3 precursor (Legumin-like protein 3) (Allergen Fag e 1), Lit v 1 tropomyosin, Rubber elongation factor protein, Ovomucoid precursor, Small rubber particle protein, Mag3, Allergen Ara h 1, clone P41B precursor, 13S globulin seed storage protein 1 precursor (Legumin-like protein 1), Pollen allergen Lol p 1 precursor, Major pollen allergen Jun a 1 precursor, Sugi basic protein precursor, profilin, Globin CTT-IV precursor, alkaline serine protease, Glycinin, Conglutin-7 precursor, 2S protein 1, Globin CTT-VI precursor, Ribonuclease mitogillin precursor, Major pollen allergen Cyn d 1, Melanocyte-stimulating hormone receptor, P34 probable thiol protease precursor, Vicilin-like protein, Major allergen Equ c 1 precursor, major allergen Bet v 1, Major allergen Can f 1 precursor, Bd 30K (34 kDa maturing seed protein), Major pollen allergen, Major pollen allergen Hol I 1 precursor, Kappa-casein precursor, major allergen Dau c 1/1, Stress-induced protein SAM22, Major allergen Api g 1, Glycinin G2 precursor, allergen Arah3/Arah4, Der f 1 allergen, Peptidase 1 precursor (Mite group 1 allergen Eur m 1) (Allergen Eur m I), Oryzin precursor, alpha S1 casein, Major pollen allergen Cha o 1 precursor, Non-specific lipid-transfer protein 1, collagen, type I, alpha 2, Der P 1, Peptidase 1 precursor (Major mite fecal allergen Der p 1) (Allergen Der p I), pollen allergen Bet v 1, Phospholipase A2 precursor, Mite group 2 allergen Der p 2, Allergen Mag, Major urinary protein precursor, Major allergen I polypeptide chain 2 precursor, Pen a 1 allergen, Fag e 1, Serum albumin precursor, Pollen allergen Amb a 3, putative alpha-amylase inhibitor 0.28, Albumin seed storage protein, 2S sulfur-rich seed storage protein precursor (Allergen Ber e 1), seed storage protein SSP2, Pro-hevein precursor, pollen allergen, Der p 2 allergen precursor, 2S seed storage protein 1 precursor, prohevein, 2s albumin, major allergen I, polypeptide chain 1, Major allergen I polypeptide chain 1 precursor, Cry j IB precursor, Mite group 2 allergen Der f 2 precursor, beta-casein precursor, Lep D 2 allergen precursor, Allergen Cry j 2 (Pollen allergen), KIAA1224 protein, Hydrophobic seed protein, Allergen Bos d 2 precursor, Allergen II, Mite group 2 allergen Der p 2 precursor, Mite allergen Blo t 5, Peptidase 1 precursor (Major mite fecal allergen Der f 1) (Allergen Der f I), Par j, Can f I, Pollen allergen Lol p 2-A (Lol p II-A), Paramyosin, Alpha-S2-casein precursor, P34 probable thiol protease, beta-lactoglobulin, major allergen Phl p 5, Chain A, Structure Of Erythrocruorin In Different Ligand States Refined At 1.4 Angstroms Resolution, Globin CTT-VIII, Major allergen Asp f 2 precursor, tropomyosin, core protein [Hepatitis B virus], Omega gliadin storage protein, Alpha/beta-gliadin A-V, group 14 allergen protein, Pollen allergen Amb a 1.1 precursor, Glycinin G1 precursor, Pollen allergen Amb a 2 precursor, Cry j 1 precursor, allergen Ziz m 1, Glycine-rich cell wall structural protein 1.8 precursor, Putative pectate lyase 17 precursor, pectate lyase, Pectate lyase precursor, Probable pectate lyase 18 precursor, major allergen beta-lactoglobulin, Major allergen Mal d 1, Alpha-S1-casein precursor, 2S seed storage protein 1, plectrovirus spv1-r8a2b orf 14 transmembrane protein, allergen I/a, Allergen Cr-PI, Probable non-specific lipid-transfer protein 1, Cr-PII allergen, melanoma antigen gp100, Alpha-lactalbumin precursor, Chain A, Anomalous Substructure Of Alpha-Lactalbumin, Pilosulin-1 precursor (Major allergen Myr p 1) (Myr p I), Pollen allergen Lol p 3 (Lol p III), Lipocalin 1 (tear prealbumin), Major pollen allergen Cup a 1, Melanocyte protein Pmel 17 precursor, major house dust allergen, Non-specific lipid-transfer protein 1 (LTP 1) (Major allergen Pru d 3), Non-specific lipid-transfer protein 1 (LTP 1) (Major allergen Pru ar 3), Pollen allergen Lol p 1, alpha-gliadin, Cr-PII, albumin, Alpha-S1-casein, major allergen I, Ribonuclease mitogillin, beta-casein, UA3-recognized allergen, 2S sulfur-rich seed storage protein 1, unnamed protein product, Polygalacturonase, Major allergen Pru av 1, Der p 1 allergen, lyase allergen, Major pollen allergen Bet v 1-F/I, Gamma-gliadin precursor, 5-hydroxytryptamine receptor 2C (5-HT-2C) (Serotonin receptor 2C) (5-HT2C) (5-HTR2C) (5HT-1C), omega-5 gliadin, Enolase 1 (2-phosphoglycerate dehydratase) (2-phospho-D-glycerate hydro-lyase), Probable non-specific lipid-transfer protein, Allergen Sin a 1, Glutenin, low molecular weight subunit precursor, Major Peanut Allergen Ara H 1, mal d 3, Eukaryotic translation initiation factor 3 subunit D, tyrosinase-related protein-2, PC4 and SFRS1-interacting protein, RAD51-like 1 isoform 1, Antimicrobial peptide 2, Proteasome subunit alpha type-3, Neurofilament heavy polypeptide (NF-H) (Neurofilament triplet H protein) (200 kDa neurofilament protein), Superoxide dismutase, Major pollen allergen Cor a 1 isoforms 5, 6, 11 and 16, cherry-allergen PRUA1, Allergen Asp f 4 precursor, Chain A, Tertiary Structure Of The Major House Dust Mite Allergen Der P 2, Nmr, 10 Structures, RNA-binding protein NOB1, Dermatan-sulfate epimerase precursor, Squamous cell carcinoma antigen recognized by T-cells 3, Peptidyl-prolyl cis-trans isomerase B precursor, Probable glycosidase crf1, Chain A, Birch Pollen Profilin, Profilin-1, avenin precursor (clone pAv122)-oat, gamma 3 avenin, coeliac immunoreactive protein 2, CIP-2, prolamin 2 {N-terminal}, avenin gamma-3-small naked oat (fragment), major pollen allergen Ole e 1, Cytochrome P450 3A1, Ole e 1 protein, Ole e 1.0102 protein, Der f 2, GroEL-like chaperonin, major allergen Arah1, manganese superoxide dismutase, beta-1,3-glucanase-like protein, Ara h 1 allergen, Major allergen Alt a 1 precursor, Bla g 4 allergen, Per a 4 allergen variant 1, Lyc e 2.0101, pectate lyase 2, allergen, hypothetical protein, Probable pectate lyase P59, Pollen allergen Amb a 1.4, Patatin-2-Kuras 1, calcium-binding protein, vicilin seed storage protein, major allergenic protein Mal f4, pel protein, ripening-related pectate lyase, pectate lyase/Amb allergen, Bet v 4, Polcalcin Bet v 4, Mite allergen Der f 6, Allergen Alt a 2, Extracellular elastinolytic metalloproteinase, pectate lyase-like protein, Pectate lyase E, Profilin-2, Venom allergen 5, Cucumisin, Putative peroxiredoxin, putative pectate lyase precursor, Serum albumin, pollen allergen Phl p 11, serine (or cysteine) proteinase inhibitor, clade B (ovalbumin), member 3, Allergen Bla g 4 precursor (Bla g IV), Allergen Pen n 13, Hyaluronidase A, pectate lyase homolog, putative allergen Cup a 1, Major pollen allergen Jun v 1, putative allergen jun o 1, Pollen allergen Amb a 1.2, Probable pectate lyase 13, P8 protein, Cytochrome c, Glucan endo-1,3-beta-glucosidase, basic vacuolar isoform, 13S globulin, beta-1,3-glucanase, beta-1, 3-glucananse, Glutenin, high molecular weight subunit DX5 precursor, X-type HMW glutenin, Glutenin, high molecular weight subunit DX5, high-molecular-weight glutenin subunit 1Dx2.1, high molecular weight glutenin subunit, 11S globulin-like protein, seed storage protein, alpha-L-Fucp-(1→3)-[alpha-D-Manp-(1→6)-[beta-D-Xylp-(1→2)]-beta-D-Manp-(1→4)-beta-D-GlcpNAc-(1→4)]-D-GlcpNAc, beta casein B, type 1 non-specific lipid transfer protein precursor, Fas AMA, Caspase-8 precursor, H antigen glycoprotein, H antigen gl, Heat shock protein HSP 90-beta, dihydrolipoamide S-acetyltransferase (E2 component of pyruvate dehydrogenase complex), isoform CRA_a, Group V allergen Phl p 5.0103 precursor, Phl p6 allergen precursor, Group V allergen Phl p 5, Major pollen allergen Phl p 4 precursor, Pollen allergen Phl p V, Phl p 3 allergen, Pollen allergen Phl pl precursor, Chain A, Crystal Structure Of Phl P 1, A Major Timothy Grass Pollen Allergen, Pollen allergen Phl p 4, Profilin-3, Profilin-2/4, Pollen allergen Phl p 2, Phl p6 IgE binding fragment, Phlp5, Chain N, Crystal Structure Of Phl P 6, A Major Timothy Grass Pollen Allergen Co-Crystallized With Zinc, group V allergen Phl p 5.0206 precursor, allergenic protein, Major allergen Ani s 1, allergen Ana o 2, ENSP-like protein, BW 16 kDa allergen, alpha2 (1) collagen, collagen a2 (1), type 1 collagen alpha 2, Cyn d 1, Major pollen allergen Aln g 1 (Allergen Aln g I), allergen Len c 1.0101, galactomannan, Aspartic protease Bla g 2, alcohol dehydrogenase, lipid transfer protein precursor, alpha/beta gliadin precursor, Der f 7 allergen, Der p 7 allergen polypeptide, non-specific lipid transfer protein, Major allergen I polypeptide chain 1, prunin 1 precursor, prunin 2 precursor, 11S legumin protein, Ara h 7 allergen precursor, vicilin-like protein precursor, allergen Arah6, parvalbumin like 2, parvalbumin like 1, casein kappa, Ribosomal biogenesis protein LAS1L, Pen c 1, SchS21 protein, Inactive hyaluronidase B, Mup1 protein, Macrophage migration inhibitory factor, Eukaryotic translation initiation factor 2 subunit 3, CR2/CD21/C3d/Epstein-Barr virus receptor precursor, DNA topoisomerase 2-alpha, pollen allergen Cyn d 23, major allergen Bla g 1.02, pectin methylesterase allergenic protein, major allergen Pha a 5 isoform, 2S albumin seed storage protein, aldehyde dehydrogenase (NAD+), pollen allergen Poa p 5, Bla g 1.02 variant allergen, partial, Major pollen allergen Lol p 5b, allergen Bla g 6.0301, protein disulfide isomerase, putative mannitol dehydrogenase, pollen allergen Lol p 4, Aspartic protease pep1, enolase, IgE-binding protein, Minor allergen Alt a 5, HDM allergen, Chain A, Crystal Structure Of An Mbp-Der P 7 Fusion Protein, allergen Bla g 6.0201, major allergen Bla g 1.0101, alpha-amylase, minor allergen, ribosomal protein P2, metalloprotease (MEP), autophagic serine protease Alp2, allergenic isoflavone reductase-like protein Bet v 6.0102, Chain A, Crystal Structure Of The Complex Of Antibody And The Allergen Bla G 2, minor allergen, thioredoxin TrxA, enolase, allergen Cla h 6, glutathione-S-transferase, molecular chaperone and allergen Mod-E/Hsp90/Hsp1, major allergen Asp F2, Mite allergen Der p 3, Chain B, Crystal Structure Of Aspergillus fumigatus Mnsod, Glutathione S-transferase (GST class-sigma) (Major allergen Bla g 5), Minor allergen Cla h 7, unknown protein, allergenic cerato-platanin Asp F13, art v 2 allergen, Polcalcin Aln g 4, major allergen and cytotoxin AspF1, pollen allergen Que a 1 isoform, trypsin-like serine protease, Mite group 6 allergen Der p 6, allergen Asp F7, cell wall protein PhiA, 60 kDa allergen Der f 18p, hsp70, Sal k 3 pollen allergen, acidic ribosomal protein P2, Chain B, Crystal Structure Of The Nadp-Dependent Mannitol Dehydrogenase From Cladosporium herbarum, Art v 3.0301 allergen precursor, 60S ribosomal protein L3, Der p 20 allergen, Pollen allergen Sal k 1, Per a 6 allergen, gelsolin-like allergen Der f 16, Chain A, Structural Characterization Of The Tetrameric Form Of The Major Cat Allergen Fel D 1, Glutathione S-transferase, Fel d 4 allergen, Major pollen allergen Dac g 4, Group I allergen Ant o I (Form 1), pollen, allergen Bla g 6.0101, cystatin, Mite allergen Der p 5, allergen Fra e 1, allergen Asp F4, major antigen-like protein, PR5 allergen Cup s 3.1 precursor, heat shock protein, allergen precursor, arginine esterase precursor, Sal k 4 pollen allergen, 60S acidic ribosomal protein P1, pollen allergen Jun o 4, Polcalcin Cyn d 7, group I pollen allergen, peptidyl-prolyl cis-trans isomerase/cyclophilin, putative, profilin 2, pollen allergen Cyn d 15, Der f 13 allergen, Can f 2, peroxisomal-like protein, peptidylprolyl isomerase (cyclophilin), MHC class II antigen, BETV4 protein, Major pollen allergen Pla I 1, peptidase, MPA3 allergen, plantain pollen major allergen, Pla I 1.0103, major allergen Bla g 1.0101, partial, Pollen allergen Amb p 5a, Der f 16 allergen, Pollen allergen Dac g 2, IgE-binding protein C-terminal fragment (148 AA), Pollen allergen Dac g 3, PPIase, rAsp f 9, Mite allergen Der p 7, thioredoxin, hydrolase, Major pollen allergen Pha a 1, Der p 13 allergen, Chain B, X-Ray Structure Of Der P 2, The Major House Dust Mite Allergen, oleosin 3, Peptidyl-prolyl cis-trans isomerase, Chain A, Crystal Structure Of A Major House Dust Mite Allergen, Derf 2, Chain A, Crystal Structure Of Major Allergens, Bla G 4 From Cockroaches, Amb a 1-like protein, D-type LMW glutenin subunit, Glutathione S-transferase 2, acidic Cyn d 1 isoallergen isoform 4 precursor, albumin seed storage protein precursor, tyrosine 3-monooxygenase isoform b, N-glycoprotein, FAD-linked oxidoreductase BG60, Blot 21 allergen, Ubiquitin D, Nucleoporin Nup37, Non-POU domain-containing octamer-binding protein, Transcription elongation factor SPT5, Major allergen Mal d 1 (Ypr10 protein), Serpin-Z2B, Pas n 1 allergen precursor, arginine kinase, Lit v 3 allergen myosin light chain, sarcoplasmic calcium-binding protein, alpha subunit of beta conglycinin, prunin, allergen Cry j 2, Plexin-A4, Non-specific lipid-transfer protein, Low molecular weight glutenin subunit precursor, gamma-gliadin, friend of GATA-1, Wilms tumor protein, Ubiquitin-conjugating enzyme E2 C, Fatty acid synthase, Histone H4, Fructose-bisphosphate aldolase A, oxidoreductase, lactoglobulin beta, immunoglobulin gamma 3 heavy chain constant region, Phlp5 precursor, dust mite allergen precursor, heat shock protein 70, Major allergen I polypeptide chain 2, alpha-lactalbumin precursor protein, 30 kDa pollen allergen, group 5 allergen precursor, group 1 allergen Dac g 1.01 precursor, uncharacterized protein, unknown Timothy grass protein, kappa-casein, alpha-S1 casein, SXP/RAL-2 family protein, Lipocalin-1 precursor, alpha purothionin, major allergen Bet v 1.01A, P2 protein, Osmotin, Major Peanut Allergen Ara H 2, Der f 3 allergen, Conglutin, Ara h 6 allergen, Cathelicidin antimicrobial peptide, cholinesterase, Per a 2 allergen, Submaxillary gland androgen-regulated protein 3B, chitinase, partial, allergen Can f 4 precursor, Can f 4 variant allergen precursor, nascent polypeptide-associated complex subunit alpha-2, Polcalcin Phl p 7 (Calcium-binding pollen allergen Phl p 7) (P7), Der p II allergen, main allergen Ara h1, allergen Ara h 2.02, fatty acid binding protein, glutamate receptor, glycinin A3B4 subunit, profilin isoallergen 2, Pollen allergen Amb p 5b, calcium-binding protein isoallergen 2, calcium-binding protein isoallergen 1, cysteine protease, profilin isoallergen 1, ragweed homologue of Art v 1 precursor, Amb p 5, ragweed homologue of Art v 1 (isoform 1), partial, antigen E, putative pectate lyase precursor, partial, Pollen allergen Amb a 5, Amb p V allergen, hemocyanin subunit 6, major pollen allergen Cha o 2, trichohyalin, aspartyl endopeptidase, NCRA10, allergen bla g 8, vitellogenin, NCRA3, NCRA4, allergen Bla g 3 isoform 2 precursor, partial, NCRA2, NCRA13, NCRA8, NCRA1, Bla g 11, receptor for activated protein kinase C-like, NCRA5, NCRA14, triosephosphate isomerase, NCRA12, NCRA7, NCRA11, trypsin, triosephosphate isomerase, partial, NCRA6, structural protein, NCRA15, NCRA9, NCRA16, Der f 4 allergen, Der f 5 allergen, Phl p6 allergen, Der f Gal d 2 allergen, Derp_19830, glucosylceramidase, carboxypeptidase, Der f 8 allergen, partial, fructose bisphosphate aldolase, ATP synthase, Der f Alt a 10 allergen, glutamine synthetase, Derp_c23425, myosin, Der f 8 allergen, LytFM, Der f 11 allergen, serine protease, glutathione transferase mu, triose-phosphate isomerase, ubiquinol-cytochrome c reductase binding protein-like protein, ferritin, isomerase, filamin C, Der p 5, Mag44, partial, venom, muscle specific protein, Der f 5.02 allergen, Mag44, Derp_c21462, group 18 allergen protein, Derf_c9409, napin-type 2S albumin 1 precursor, napin-type 2S albumin 3, isoflavone reductase-like protein CJP-6, Pectate lyase 1, allergen Cry j 2, partial, Major allergen Dau c 1, Filamin-C, putative, Pis v 5.0101 allergen 11S globulin precusor, Pis v 5, 48-kDa glycoprotein precursor, vicilin, or a variant, fragment or derivative of any of said allergens, or any combination thereof.

### Signal Peptide (SIG)

[0126] According to preferred embodiments, the artificial nucleic acid molecule, preferably RNA, of the invention further encodes, in its at least one coding region, at least one signal peptide.

[0127] A “signal peptide” (sometimes referred to as signal sequence, targeting signal, localization signal, localization sequence, transit peptide, leader sequence or leader peptide) is typically a short (5-30 amino acids long) N-terminal peptide.

[0128] According to preferred embodiments, the nucleic acid sequence encoding said at least one signal peptide may be fused (in frame) to a nucleic acid sequence encoding the at least one IRSTₑₚₘ-derived amino acid sequence or the at least one antigenic peptide or protein. Therefore, expression of the artificial nucleic acid molecule, preferably RNA, of the invention may preferably result in a fusion protein comprising the at least one signal peptide joined to (optionally via appropriate peptide linkers) said IRSTₑₚₘ-derived amino acid sequence and/or said antigenic protein or peptide. Said additional amino acid sequence preferably directs the antigenic peptide or protein to the plasma membrane, where antigenic peptides or proteins are preferably anchored via the TM domain and recycled to MHC class I and more preferably MHC class II processing compartments, resulting in both enhanced MHC class I and preferably MHC class II presentation. The signal peptide is envisaged to preferably mediate or support the transport of the antigenic construct (in) to a defined cellular compartment, in particular the external side of the plasma membrane.

[0129] Generally, the present invention envisages the combination of any of the signal peptides described herein with any of the antigenic peptides or proteins, any of the IRSTₑₚₘ-derived additional amino acid sequences, any of the linkers, in any suitable order, in the antigenic fusion proteins encoded by the artificial nucleic acid molecules, preferably RNAs, of the invention.

[0130] According to preferred embodiments, the artificial nucleic acid molecule, preferably RNA, of the invention may encode in its at least one coding region at least one signal peptide selected from the signal peptides indicated in Table 4 below, or a (preferably functional) fragment, variant or derivative of any of said signal peptides.

TABLE 4
Signal peptides

| | | | | | | | | SEQ ID |
|---|---|---|---|---|---|---|---|---|
| | | | | | | | | NO: wt |
| | | | | | | | | and |
| | | | | | | | | optimized |
| | | | | Amino | SEQ | | | nucleic |
| | UniProt | Short | | Acid | ID NO | Full | | acid |
| # | Identifier | Name | Protein names | position | (AA) | length | Gene names | sequence |
| 76 | P14207 | FOLR2 | Folate receptor beta (FR-beta) | 1-16 | 1 | 255 | FOLR2 | 209, 417, |
| | | | (Folate receptor 2) (Folate | | | | | 625, 833, |
| | | | receptor, fetal/placental) | | | | | 1041, |
| | | | (Placental folate-binding protein) | | | | | 1249, |
| | | | (FBP) | | | | | 1457, |
| | | | | | | | | 1665, |
| | | | | | | | | 1873, |
| | | | | | | | | 2081, |
| | | | | | | | | 2289, |
| | | | | | | | | 2497, 2705 |
| 77 | O75787 | RENR | Renin receptor (ATPase H(+)- | 1-16 | 2 | 350 | ATP6AP2 ATP6IP2 | 210, 418, |
| | | | transporting lysosomal | | | | CAPER ELDF10 | 626, 834, |
| | | | accessory protein 2) (ATPase | | | | HT028 MSTP009 | 1042, |
| | | | H(+)-transporting lysosomal- | | | | PSEC0072 | 1250, |
| | | | interacting protein 2) (ER- | | | | | 1458, |
| | | | localized type I transmembrane | | | | | 1666, |
| | | | adaptor) (Embryonic liver | | | | | 1874, |
| | | | differentiation factor 10) (N14F) | | | | | 2082, |
| | | | (Renin/prorenin receptor) | | | | | 2290, |
| | | | (Vacuolar ATP synthase | | | | | 2498, 2706 |
| | | | membrane sector-associated | | | | | |
| | | | protein M8-9) (ATP6M8-9) (V- | | | | | |
| | | | ATPase M8.9 subunit) | | | | | |
| 78 | P07359 | GP1BA | Platelet glycoprotein Ib alpha | 1-16 | 3 | 652 | GP1BA | 211, 419, |
| | | | chain (GP-Ib alpha) (GPlb- | | | | | 627, 835, |
| | | | alpha) (GPIbA) (Glycoprotein | | | | | 1043, |
| | | | Ibalpha) (Antigen CD42b-alpha) | | | | | 1251, |
| | | | (CD antigen CD42b) [Cleaved | | | | | 1459, |
| | | | into: Glycocalicin] | | | | | 1667, |
| | | | | | | | | 1875, |
| | | | | | | | | 2083, |
| | | | | | | | | 2291, |
| | | | | | | | | 2499, 2707 |
| 79 | P08637 | FCG3A | Low affinity immunoglobulin | 1-16 | 4 | 254 | FCGR3A CD16A | 212, 420, |
| | | | gamma Fc region receptor III-A | | | | FCG3 FCGR3 | 628, 836, |
| | | | (CD16a antigen) (Fc-gamma | | | | IGFR3 | 1044, |
| | | | RIII-alpha) (Fc-gamma RIII) (Fc- | | | | | 1252, |
| | | | gamma RIIIa) (FcRIII) (FcRIIIa) | | | | | 1460, |
| | | | (FcR-10) (IgG Fc receptor III-2) | | | | | 1668, |
| | | | (CD antigen CD16a) | | | | | 1876, |
| | | | | | | | | 2084, |
| | | | | | | | | 2292, |
| | | | | | | | | 2500, 2708 |
| 8081 | P07237 | PDIA1 | Protein disulfide-isomerase | 1-17 | 5 | 508 | P4HB ERBA2L PDI | 213, 421, |
| | | | (PDI) (EC 5.3.4.1) (Cellular | | | | PDIA1 PO4DB | 629, 837, |
| | | | thyroid hormone-binding protein) | | | | | 1045, |
| | | | (Prolyl 4-hydroxylase subunit | | | | | 1253, |
| | | | beta) (p55) | | | | | 1461, |
| | | | | | | | | 1669, |
| | | | | | | | | 1877 |
| | | | | | | | | 2085, |
| | | | | | | | | 2293, |
| | | | | | | | | 2501, 2709 |
| 82 | O60911 | CATL2 | Cathepsin L2 (EC 3.4.22.43) | 1-17 | 6 | 334 | CTSV CATL2 | 214, 422, |
| | | | (Cathepsin U) (Cathepsin V) | | | | CTSL2 CTSU | 630, 838, |
| | | | | | | | UNQ268/PRO305 | 1046 |
| | | | | | | | | 1254, |
| | | | | | | | | 1462, |
| | | | | | | | | 1670, |
| | | | | | | | | 1878, |
| | | | | | | | | 2086, |
| | | | | | | | | 2294, |
| | | | | | | | | 2502, 2710 |
| 83 | P20138 | CD33 | Myeloid cell surface antigen | 1-17 | 7 | 364 | CD33 SIGLEC3 | 215, 423, |
| | | | CD33 (Sialic acid-binding Ig-like | | | | | 631, 839, |
| | | | lectin 3) (Siglec-3) (gp67) (CD | | | | | 1047, |
| | | | antigen CD33) | | | | | 1255, |
| | | | | | | | | 1463, |
| | | | | | | | | 1671, |
| | | | | | | | | 1879, |
| | | | | | | | | 2087, |
| | | | | | | | | 2295, |
| | | | | | | | | 2503, 2711 |
| 8485 | P27797 | CALR | Calreticulin (CRP55) (Calregulin) | 1-17 | 8 | 417 | CALR CRTC | 216, 424, |
| | | | (Endoplasmic reticulum resident | | | | | 632, 840, |
| | | | protein 60) (ERp60) (HACBP) | | | | | 1048, |
| | | | (grp60) | | | | | 1256, |
| | | | | | | | | 1464, |
| | | | | | | | | 1672, |
| | | | | | | | | 1880, |
| | | | | | | | | 2088, |
| | | | | | | | | 2296, |
| | | | | | | | | 2504, 2712 |
| 86 | P10747 | CD28 | T-cell-specific surface | 1-18 | 9 | 220 | CD28 | 217, 425, |
| | | | glycoprotein CD28 (TP44) (CD | | | | | 633, 841, |
| | | | antigen CD28) | | | | | 1049, |
| | | | | | | | | 1257, |
| | | | | | | | | 1465, |
| | | | | | | | | 1673, |
| | | | | | | | | 1881, |
| | | | | | | | | 2089, |
| | | | | | | | | 2297, |
| | | | | | | | | 2505, 2713 |
| 87 | O75487 | GPC4 | Glypican-4 (K-glypican) | 1-18 | 10 | 556 | GPC4 | 218, 426, |
| | | | [Cleaved into: Secreted | | | | UNQ474/PRO937 | 634, 842, |
| | | | glypican-4] | | | | | 1050, |
| | | | | | | | | 1258, |
| | | | | | | | | 1466, |
| | | | | | | | | 1674, |
| | | | | | | | | 1882, |
| | | | | | | | | 20920, |
| | | | | | | | | 2298, |
| | | | | | | | | 2506, 2714 |
| 8889 | P07996 | TSP1 | Thrombospondin-1 | 1-18 | 11 | 1170 | THBS1 TSP TSP1 | 219, 427, |
| | | | | | | | | 635, 843, |
| | | | | | | | | 1051, |
| | | | | | | | | 1259, |
| | | | | | | | | 1467, |
| | | | | | | | | 1675, |
| | | | | | | | | 1883, |
| | | | | | | | | 2091, |
| | | | | | | | | 2299, |
| | | | | | | | | 2507, 2715 |
| 90 | P22748 | CAH4 | Carbonic anhydrase 4 (EC | 1-18 | 12 | 312 | CA4 | 220, 428, |
| | | | 4.2.1.1) (Carbonate dehydratase | | | | | 636, 844, |
| | | | IV) (Carbonic anhydrase IV) | | | | | 1052, |
| | | | (CA-IV) | | | | | 1260, |
| | | | | | | | | 1468, |
| | | | | | | | | 1676, |
| | | | | | | | | 1884, |
| | | | | | | | | 2092, |
| | | | | | | | | 2300, |
| | | | | | | | | 2508, 2716 |
| 91 | Q15762 | CD226 | CD226 antigen (DNAX | 1-18 | 13 | 336 | CD226 DNAM1 | 221, 429, |
| | | | accessory molecule 1) (DNAM- | | | | | 637, 845, |
| | | | 1) (CD antigen CD226) | | | | | 1053, |
| | | | | | | | | 1261, |
| | | | | | | | | 1469, |
| | | | | | | | | 1677, |
| | | | | | | | | 1885, |
| | | | | | | | | 2093, |
| | | | | | | | | 2301, |
| | | | | | | | | 2509, 2717 |
| 9293 | P30273 | FCERG | High affinity immunoglobulin | 1-18 | 14 | 86 | FCER1G | 222, 430, |
| | | | epsilon receptor subunit gamma | | | | | 638, 846, |
| | | | (Fc receptor gamma-chain) | | | | | 1054, |
| | | | (FcRgamma) (Fc-epsilon RI- | | | | | 1262, |
| | | | gamma) (IgE Fc receptor | | | | | 1470, |
| | | | subunit gamma) (FceRI gamma) | | | | | 1678, |
| | | | | | | | | 1886, |
| | | | | | | | | 2094, |
| | | | | | | | | 2302, |
| | | | | | | | | 2510, 2718 |
| 94 | P38570 | ITAE | Integrin alpha-E (HML-1 antigen) | 1-18 | 15 | 1179 | ITGAE | 223, 431, |
| | | | (Integrin alpha-IEL) (Mucosal | | | | | 639, 847, |
| | | | lymphocyte 1 antigen) (CD | | | | | 1055, |
| | | | antigen CD103) [Cleaved into: | | | | | 1263, |
| | | | Integrin alpha-E light chain; | | | | | 1471, |
| | | | Integrin alpha-E heavy chain] | | | | | 1679, |
| | | | | | | | | 1887, |
| | | | | | | | | 2095, |
| | | | | | | | | 2303, |
| | | | | | | | | 2511, 2719 |
| 95 | Q01638 | ILRL1 | Interleukin-1 receptor-like 1 | 1-18 | 16 | 556 | IL1RL1 DER4 ST2 | 224, 432, |
| | | | (Protein ST2) | | | | T1 | 640, 848, |
| | | | | | | | | 1056, |
| | | | | | | | | 1264, |
| | | | | | | | | 1472, |
| | | | | | | | | 1680, |
| | | | | | | | | 1888, |
| | | | | | | | | 2096, |
| | | | | | | | | 2304, |
| | | | | | | | | 2512, 2720 |
| 96 | Q9NZQ7 | PD1L1 | Programmed cell death 1 ligand | 1-18 | 17 | 290 | CD274 B7H1 | 225, 433, |
| | | | 1 (PD-L1) (PDCD1 ligand 1) | | | | PDCD1L1 | 641, 849, |
| | | | (Programmed death ligand 1) | | | | PDCD1LG1 PDL1 | 1057, |
| | | | (B7 homolog 1) (B7-H1) (CD | | | | | 1265, |
| | | | antigen CD274) | | | | | 1473, |
| | | | | | | | | 1681, |
| | | | | | | | | 1889, |
| | | | | | | | | 2097, |
| | | | | | | | | 2305, |
| | | | | | | | | 2513, 2712 |
| 97 | P30443 | HLA-A | HLA class I histocompatibility | 1-18 | 76948 | 365 | HLA-A HLAA | 76952, |
| | | | antigen, A-1 alpha chain (MHC | | | | | 76956, |
| | | | class I antigen A*1) | | | | | 76960, |
| | | | | | | | | 76964, |
| | | | | | | | | 76968, |
| | | | | | | | | 76972, |
| | | | | | | | | 76976, |
| | | | | | | | | 76980, |
| | | | | | | | | 76984 |
| | | | | | | | | 76988, |
| | | | | | | | | 76992, |
| | | | | | | | | 76996, |
| | | | | | | | | 77000 |
| 98 | Q6GPI1 | CTRB2 | Chymotrypsinogen B2 | 1-18 | 76949 | 263 | CTRB2 | 76953, |
| | | | | | | | | 76957, |
| | | | | | | | | 76961, |
| | | | | | | | | 76965, |
| | | | | | | | | 76969, |
| | | | | | | | | 76973, |
| | | | | | | | | 76977, |
| | | | | | | | | 76981, |
| | | | | | | | | 76985, |
| | | | | | | | | 76989, |
| | | | | | | | | 76993, |
| | | | | | | | | 76997, |
| | | | | | | | | 77001 |
| 99 | P02768 | ALB | Serum albumin (ALB) (ALBU) | 1-18 | 76950 | 609 | ALB ALBU HSA | 76954, |
| | | | (humanes serum albumin) | | | | | 76958, |
| | | | | | | | | 76962, |
| | | | | | | | | 76966, |
| | | | | | | | | 76970, |
| | | | | | | | | 76974, |
| | | | | | | | | 76978, |
| | | | | | | | | 76982, |
| | | | | | | | | 76986, |
| | | | | | | | | 76990 |
| | | | | | | | | 76994, |
| | | | | | | | | 76998, |
| | | | | | | | | 77002 |
| 100 | AAB59424.1 | IGHE | Ig heavy chain epsilon-1 (V-D-J | 1-18 | 76951 | 574 | IgE, IgHE | 76955, |
| | | | region) | | | | | 76959, |
| | | | | | | | | 76963, |
| | | | | | | | | 76967, |
| | | | | | | | | 76971, |
| | | | | | | | | 76975, |
| | | | | | | | | 76979, |
| | | | | | | | | 76983, |
| | | | | | | | | 76987, |
| | | | | | | | | 76991, |
| | | | | | | | | 76995, |
| | | | | | | | | 76999, |
| | | | | | | | | 77003 |
| 101 | P13591 | NCAM1 | Neural cell adhesion molecule 1 | 1-19 | 18 | 858 | NCAM1 NCAM | 226, 434, |
| | | | (N-CAM-1) (NCAM-1) (CD | | | | | 642, 850, |
| | | | antigen CD56) | | | | | 1058, |
| | | | | | | | | 1266, |
| | | | | | | | | 1474, |
| | | | | | | | | 1682, |
| | | | | | | | | 1890, |
| | | | | | | | | 2098, |
| | | | | | | | | 2306, |
| | | | | | | | | 2514, 2722 |
| 102 | P26842 | CD27 | CD27 antigen (CD27L receptor) | 1-19 | 19 | 260 | CD27 TNFRSF7 | 227, 435, |
| | | | (T-cell activation antigen CD27) | | | | | 643, 851, |
| | | | (T14) (Tumor necrosis factor | | | | | 1059, |
| | | | receptor superfamily member 7) | | | | | 1267, |
| | | | (CD antigen CD27) | | | | | 1475, |
| | | | | | | | | 1683, |
| | | | | | | | | 1891, |
| | | | | | | | | 2099, |
| | | | | | | | | 2307, |
| | | | | | | | | 2515, 2723 |
| 103 | P15391 | CD19 | B-lymphocyte antigen CD19 (B- | 1-19 | 20 | 556 | CD19 | 228, 436, |
| | | | lymphocyte surface antigen B4) | | | | | 644, 852, |
| | | | (Differentiation antigen CD19) | | | | | 1060, |
| | | | (T-cell surface antigen Leu-12) | | | | | 1268, |
| | | | (CD antigen CD19) | | | | | 1476, |
| | | | | | | | | 1684, |
| | | | | | | | | 1892, |
| | | | | | | | | 2100, |
| | | | | | | | | 2308, |
| | | | | | | | | 2516, 2724 |
| 104 | Q8NI17 | IL31R | Interleukin-31 receptor subunit | 1-19 | 21 | 732 | IL31RA CRL3 GPL | 229, 437, |
| | | | alpha (IL-31 receptor subunit | | | | UNQ6368/ | 645, 853, |
| | | | alpha) (IL-31R subunit alpha) | | | | PRO21073/ | 1061, |
| | | | (IL-31 R-alpha) (IL-31RA) | | | | PRO21384 | 1269, |
| | | | (Cytokine receptor-like 3) (GLM- | | | | | 1477, |
| | | | R) (hGLM-R) (Gp130-like | | | | | 1685, |
| | | | monocyte receptor) (Gp130-like | | | | | 1893, |
| | | | receptor) (ZcytoR17) | | | | | 2101, |
| | | | | | | | | 2309, |
| | | | | | | | | 2517, 2725 |
| 105 | P08571 | CD14 | Monocyte differentiation antigen | 1-19 | 22 | 375 | CD14 | 230, 438, |
| | | | CD14 (Myeloid cell-specific | | | | | 646, 854, |
| | | | leucine-rich glycoprotein) (CD | | | | | 1062, |
| | | | antigen CD14) [Cleaved into: | | | | | 1270, |
| | | | Monocyte differentiation antigen | | | | | 1478, |
| | | | CD14, urinary form; Monocyte | | | | | 1686, |
| | | | differentiation antigen CD14, | | | | | 1894, |
| | | | membrane-bound form] | | | | | 2102, |
| | | | | | | | | 2310, |
| | | | | | | | | 2518, 2726 |
| 106 | P05154 | IPSP | Plasma serine protease inhibitor | 1-19 | 23 | 406 | SERPINA5 PCI | 231, 439, |
| | | | (Acrosomal serine protease | | | | PLANH3 PROCI | 647, 855, |
| | | | inhibitor) (Plasminogen activator | | | | | 1063, |
| | | | inhibitor 3) (PAI-3) (PAI3) | | | | | 1271, |
| | | | (Protein C inhibitor) (PCI) | | | | | 1479, |
| | | | (Serpin A5) | | | | | 1687, |
| | | | | | | | | 1895, |
| | | | | | | | | 2103, |
| | | | | | | | | 2311, |
| | | | | | | | | 2519, 2727 |
| 107 | P02787 | TRFE | Serotransferrin (Transferrin) | 1-19 | 24 | 698 | TF PRO1400 | 232, 440, |
| | | | (Beta-1 metal-binding globulin) | | | | | 648, 856, |
| | | | (Siderophilin) | | | | | 1064, |
| | | | | | | | | 1272, |
| | | | | | | | | 1480, |
| | | | | | | | | 1688, |
| | | | | | | | | 1896, |
| | | | | | | | | 2104, |
| | | | | | | | | 2312, |
| | | | | | | | | 2520, 2728 |
| 108 | P02671 | FIBA | Fibrinogen alpha chain [Cleaved | 1-19 | 25 | 866 | FGA | 233, 441, |
| | | | into: Fibrinopeptide A; | | | | | 649, 857, |
| | | | Fibrinogen alpha chain] | | | | | 1065, |
| | | | | | | | | 1273, |
| | | | | | | | | 1481, |
| | | | | | | | | 1689, |
| | | | | | | | | 1897, |
| | | | | | | | | 2105, |
| | | | | | | | | 2313, |
| | | | | | | | | 2521, 2729 |
| 109 | P04216 | THY1 | Thy-1 membrane glycoprotein | 1-19 | 26 | 161 | THY1 | 234, 442, |
| | | | (CDw90) (Thy-1 antigen) (CD | | | | | 650, 858, |
| | | | antigen CD90) | | | | | 1066, |
| | | | | | | | | 1274, |
| | | | | | | | | 1482, |
| | | | | | | | | 1690, |
| | | | | | | | | 1898, |
| | | | | | | | | 2106, |
| | | | | | | | | 2314, |
| | | | | | | | | 2522, 2730 |
| 110 | P00747 | PLMN | Plasminogen (EC 3.4.21.7) | 1-19 | 27 | 810 | PLG | 235, 443, |
| | | | [Cleaved into: Plasmin heavy | | | | | 651, 859, |
| | | | chain A; Activation peptide; | | | | | 1067, |
| | | | Angiostatin; Plasmin heavy | | | | | 1275, |
| | | | chain A, short form; Plasmin | | | | | 1483, |
| | | | light chain B] | | | | | 1691, |
| | | | | | | | | 1899, |
| | | | | | | | | 2107, |
| | | | | | | | | 2315, |
| | | | | | | | | 2523, 2731 |
| 111 | P01764 | HV323 | Immunoglobulin heavy variable | 1-19 | 28 | 117 | IGHV3-23 | 236, 444, |
| | | | 3-23 (Ig heavy chain V-III region | | | | | 652, 860, |
| | | | LAY) (Ig heavy chain V-III region | | | | | 1068, |
| | | | POM) (Ig heavy chain V-III | | | | | 1276, |
| | | | region TEI) (Ig heavy chain V-III | | | | | 1484, |
| | | | region TIL) (Ig heavy chain V-III | | | | | 1692, |
| | | | region TUR) (Ig heavy chain V- | | | | | 1900, |
| | | | IlI region VH26) (Ig heavy chain | | | | | 2108, |
| | | | V-III region WAS) (Ig heavy | | | | | 2316, |
| | | | chain V-III region ZAP) | | | | | 2524, 2732 |
| 112 | P16150 | LEUK | Leukosialin | 1-19 | 29 | 400 | SPN CD43 | 237, 445, |
| | | | (Galactoglycoprotein) (GALGP) | | | | | 653, 861, |
| | | | (Leukocyte sialoglycoprotein) | | | | | 1069, |
| | | | (Sialophorin) (CD antigen CD43) | | | | | 1277, |
| | | | | | | | | 1485, |
| | | | | | | | | 1693, |
| | | | | | | | | 1901, |
| | | | | | | | | 2109, |
| | | | | | | | | 2317, |
| | | | | | | | | 2525, 2733 |
| 113 | Q6DN72 | FCRL6 | Fc receptor-like protein 6 (FcR- | 1-19 | 30 | 434 | FCRL6 FCRH6 | 238, 446, |
| | | | like protein 6) (FcRL6) (Fc | | | | | 654, 862, |
| | | | receptor homolog 6) (FcRH6) | | | | | 1070, |
| | | | (IFGP6) | | | | | 1278, |
| | | | | | | | | 1486, |
| | | | | | | | | 1694, |
| | | | | | | | | 1902, |
| | | | | | | | | 2110, |
| | | | | | | | | 2318, |
| | | | | | | | | 2526, 2734 |
| 114 | Q01151 | CD83 | CD83 antigen (hCD83) (B-cell | 1-19 | 31 | 205 | CD83 | 239, 447, |
| | | | activation protein) (Cell surface | | | | | 655, 863, |
| | | | protein HB15) (CD antigen | | | | | 1071, |
| | | | CD83) | | | | | 1279, |
| | | | | | | | | 1487, |
| | | | | | | | | 1695, |
| | | | | | | | | 1903, |
| | | | | | | | | 2111, |
| | | | | | | | | 2319, |
| | | | | | | | | 2527, 2735 |
| 115 | P07093 | GDN | Glia-derived nexin (GDN) | 1-19 | 32 | 398 | SERPINE2 PI7 | 240, 448, |
| | | | (Peptidase inhibitor 7) (PI-7) | | | | PN1 | 656,864, |
| | | | (Protease nexin 1) (PN-1) | | | | | 1072, |
| | | | (Protease nexin I) (Serpin E2) | | | | | 1280, |
| | | | | | | | | 1488, |
| | | | | | | | | 1696, |
| | | | | | | | | 1904, |
| | | | | | | | | 2112, |
| | | | | | | | | 2320, |
| | | | | | | | | 2528, 2736 |
| 116 | Q8WWQ8 | STAB2 | Stabilin-2 (FAS1 EGF-like and | 1-19 | 33 | 2551 | STAB2 FEEL2 | 241, 449, |
| | | | X-link domain-containing | | | | FELL FEX2 HARE | 657, 865, |
| | | | adhesion molecule 2) (Fasciclin, | | | | | 1073, |
| | | | EGF-like, laminin-type EGF-like | | | | | 1281, |
| | | | and link domain-containing | | | | | 1489, |
| | | | scavenger receptor 2) (FEEL-2) | | | | | 1697, |
| | | | (Hyaluronan receptor for | | | | | 1905, |
| | | | endocytosis) [Cleaved into: 190 | | | | | 2113, |
| | | | kDa form stabilin-2 (190 kDa | | | | | 2321, |
| | | | hyaluronan receptor for | | | | | 2529, 2737 |
| | | | endocytosis)] | | | | | |
| 117 | Q13291 | SLAF1 | Signaling lymphocytic activation | 1-20 | 34 | 335 | SLAMF1 SLAM | 242, 450, |
| | | | molecule (CDw150) (IPO-3) | | | | | 658, 866, |
| | | | (SLAM family member 1) (CD | | | | | 1074, |
| | | | antigen CD150) | | | | | 1282, |
| | | | | | | | | 1490, |
| | | | | | | | | 1698, |
| | | | | | | | | 1906, |
| | | | | | | | | 2114, |
| | | | | | | | | 2322, |
| | | | | | | | | 2530, 2738 |
| 118 | P35225 | IL13 | Interleukin-13 (IL-13) | 1-20 | 35 | 146 | IL13 NC30 | 243, 451, |
| | | | | | | | | 659, 867, |
| | | | | | | | | 1075, |
| | | | | | | | | 1283, |
| | | | | | | | | 1491, |
| | | | | | | | | 1699, |
| | | | | | | | | 1907, |
| | | | | | | | | 2115, |
| | | | | | | | | 2323, |
| | | | | | | | | 2531, 2739 |
| 119 | P25942 | TNR5 | Tumor necrosis factor receptor | 1-20 | 36 | 277 | CD40 TNFRSF5 | 244, 452, |
| | | | superfamily member 5 (B-cell | | | | | 660, 868, |
| | | | surface antigen CD40) (Bp50) | | | | | 1076, |
| | | | (CD40L receptor) (CDw40) (CD | | | | | 1284, |
| | | | antigen CD40) | | | | | 1492, |
| | | | | | | | | 1700, |
| | | | | | | | | 1908, |
| | | | | | | | | 2116, |
| | | | | | | | | 2324, |
| | | | | | | | | 2532, 2740 |
| 120 | P52803 | EFNA5 | Ephrin-A5 (AL-1) (EPH-related | 1-20 | 37 | 228 | EFNA5 EPLG7 | 245, 453, |
| | | | receptor tyrosine kinase ligand | | | | LERK7 | 661,869, |
| | | | 7) (LERK-7) | | | | | 1077, |
| | | | | | | | | 1285, |
| | | | | | | | | 1493, |
| | | | | | | | | 1701, |
| | | | | | | | | 1909, |
| | | | | | | | | 2117, |
| | | | | | | | | 2325 |
| | | | | | | | | 2533, 2741 |
| 121 | Q15116 | PDCD1 | Programmed cell death protein 1 | 1-20 | 38 | 288 | PDCD1 PD1 | 246, 454, |
| | | | (Protein PD-1) (hPD-1) (CD | | | | | 662, 870, |
| | | | antigen CD279) | | | | | 1078, |
| | | | | | | | | 1286 |
| | | | | | | | | 1494, |
| | | | | | | | | 1702, |
| | | | | | | | | 1910, |
| | | | | | | | | 2118, |
| | | | | | | | | 2326, |
| | | | | | | | | 2534, 2742 |
| 122 | P05556 | ITB1 | Integrin beta-1 (Fibronectin | 1-20 | 39 | 798 | ITGB1 FNRB | 247, 455, |
| | | | receptor subunit beta) | | | | MDF2 MSK12 | 663, 871, |
| | | | (Glycoprotein IIa) (GPIIA) (VLA- | | | | | 1079, |
| | | | 4 subunit beta) (CD antigen | | | | | 1287, |
| | | | CD29) | | | | | 1495, |
| | | | | | | | | 1703, |
| | | | | | | | | 1911, |
| | | | | | | | | 2119, |
| | | | | | | | | 2327, |
| | | | | | | | | 2535, 2743 |
| 123 | Q12891 | HYAL2 | Hyaluronidase-2 (Hyal-2) (EC | 1-20 | 40 | 473 | HYAL2 LUCA2 | 248, 456, |
| | | | 3.2.1.35) | | | | | 664, 872, |
| | | | (Hyaluronoglucosaminidase-2) | | | | | 1080, |
| | | | (Lung carcinoma protein 2) | | | | | 1288, |
| | | | (LuCa-2) | | | | | 1496, |
| | | | | | | | | 1704, |
| | | | | | | | | 1912, |
| | | | | | | | | 2120 |
| | | | | | | | | 2328, |
| | | | | | | | | 2536, 2744 |
| 124 | Q8IV16 | HDBP1 | Glycosylphosphatidylinositol- | 1-20 | 41 | 184 | GPIHBP1 HBP1 | 249, 457, |
| | | | anchored high density | | | | | 665, 873, |
| | | | lipoprotein-binding protein 1 | | | | | 1081, |
| | | | (GPI-HBP1) (GPI-anchored | | | | | 1289 |
| | | | HDL-binding protein 1) (High | | | | | 1497, |
| | | | density lipoprotein-binding | | | | | 1705, |
| | | | protein 1) | | | | | 1913, |
| | | | | | | | | 2121, |
| | | | | | | | | 2329, |
| | | | | | | | | 2537, 2745 |
| 125 | Q03167 | TGBR3 | Transforming growth factor beta | 1-20 | 42 | 851 | TGFBR3 | 250, 458, |
| | | | receptor type 3 (TGF-beta | | | | | 666, 874, |
| | | | receptor type 3) (TGFR-3) | | | | | 1082, |
| | | | (Betaglycan) (Transforming | | | | | 1290, |
| | | | growth factor beta receptor III) | | | | | 1498 |
| | | | (TGF-beta receptor type III) | | | | | 1706, |
| | | | | | | | | 1914, |
| | | | | | | | | 2122, |
| | | | | | | | | 2330, |
| | | | | | | | | 2538, 2746 |
| 126 | Q14246 | AGRE1 | Adhesion G protein-coupled | 1-20 | 43 | 886 | ADGRE1 EMR1 | 251, 459, |
| | | | receptor E1 (EGF-like module | | | | TM7LN3 | 667, 875, |
| | | | receptor 1) (EGF-like module- | | | | | 1083, |
| | | | containing mucin-like hormone | | | | | 1291, |
| | | | receptor-like 1) (EMR1 hormone | | | | | 1499, |
| | | | receptor) | | | | | 1707, |
| | | | | | | | | 1915, |
| | | | | | | | | 2123, |
| | | | | | | | | 2331, |
| | | | | | | | | 2539, 2747 |
| 127 | P16871 | IL7RA | Interleukin-7 receptor subunit | 1-20 | 44 | 459 | IL7R | 252, 460, |
| | | | alpha (IL-7 receptor subunit | | | | | 668, 876, |
| | | | alpha) (IL-7R subunit alpha) (IL- | | | | | 1084, |
| | | | 7R-alpha) (IL-7RA) (CDw127) | | | | | 1292, |
| | | | (CD antigen CD127) | | | | | 1500, |
| | | | | | | | | 1708 |
| | | | | | | | | 1916, |
| | | | | | | | | 2124, |
| | | | | | | | | 2332, |
| | | | | | | | | 2540, 2748 |
| 128 | P61769 | B2MG | Beta-2-microglobulin [Cleaved | 1-20 | 45 | 119 | B2M CDABP0092 | 253, 461, |
| | | | into: Beta-2-microglobulin form | | | | HDCMA22P | 669, 877, |
| | | | pl 5.3] | | | | | 1085, |
| | | | | | | | | 1293, |
| | | | | | | | | 1501, |
| | | | | | | | | 1709, |
| | | | | | | | | 1917, |
| | | | | | | | | 2125, |
| | | | | | | | | 2333, |
| | | | | | | | | 2541, 2749 |
| 129 | Q9Y6W8 | ICOS | Inducible T-cell costimulator | 1-20 | 46 | 199 | ICOS AILIM | 254, 462, |
| | | | (Activation-inducible lymphocyte | | | | | 670, 878, |
| | | | immunomediatory molecule) | | | | | 1086, |
| | | | (CD antigen CD278) | | | | | 1294, |
| | | | | | | | | 1502, |
| | | | | | | | | 1710, |
| | | | | | | | | 1918, |
| | | | | | | | | 2126, |
| | | | | | | | | 2334, |
| | | | | | | | | 2542, 2750 |
| 130 | P10966 | CD8B | T-cell surface glycoprotein CD8 | 1-21 | 47 | 210 | CD8B CD8B1 | 255, 463, |
| | | | beta chain (CD antigen CD8b) | | | | | 671, 879, |
| | | | | | | | | 1087, |
| | | | | | | | | 1295, |
| | | | | | | | | 1503, |
| | | | | | | | | 1711, |
| | | | | | | | | 1919, |
| | | | | | | | | 2127, |
| | | | | | | | | 2335, |
| | | | | | | | | 2543, 2751 |
| 131 | Q9BZW8 | CD244 | Natural killer cell receptor 2B4 | 1-21 | 48 | 370 | CD244 2B4 | 256, 464, |
| | | | (NK cell activation-inducing | | | | | 672, 880, |
| | | | ligand) (NAIL) (NK cell type I | | | | | 1088, |
| | | | receptor protein 2B4) (NKR2B4) | | | | | 1296, |
| | | | (h2B4) (SLAM family member 4) | | | | | 1504, |
| | | | (SLAMF4) (Signaling | | | | | 1712, |
| | | | lymphocytic activation molecule | | | | | 1920, |
| | | | 4) (CD antigen CD244) | | | | | 2128, |
| | | | | | | | | 2336, |
| | | | | | | | | 2544, 2752 |
| 132 | P02778 | CXL10 | C-X-C motif chemokine 10 (10 | 1-21 | 49 | 98 | CXCL10 INP10 | 257, 465, |
| | | | kDa interferon gamma-induced | | | | SCYB10 | 673, 881, |
| | | | protein) (Gamma-IP10) (IP-10) | | | | | 1089, |
| | | | (Small-inducible cytokine B10) | | | | | 1297, |
| | | | [Cleaved into: CXCL10(1-73)] | | | | | 1505, |
| | | | | | | | | 1713, |
| | | | | | | | | 1921, |
| | | | | | | | | 2129, |
| | | | | | | | | 2337, |
| | | | | | | | | 2545, 2753 |
| 133 | P18564 | ITB6 | Integrin beta-6 | 1-21 | 50 | 788 | ITGB6 | 258, 466, |
| | | | | | | | | 674, 882, |
| | | | | | | | | 1090, |
| | | | | | | | | 1298, |
| | | | | | | | | 1506, |
| | | | | | | | | 1714, |
| | | | | | | | | 1922, |
| | | | | | | | | 2130, |
| | | | | | | | | 2338, |
| | | | | | | | | 2546, 2754 |
| 134 | O14525 | ASTN1 | Astrotactin-1 | 1-21 | 51 | 1302 | ASTN1 ASTN | 259, 467, |
| | | | | | | | KIAA0289 | 675, 883, |
| | | | | | | | | 1091, |
| | | | | | | | | 1299, |
| | | | | | | | | 1507, |
| | | | | | | | | 1715, |
| | | | | | | | | 1923, |
| | | | | | | | | 2131, |
| | | | | | | | | 2339, |
| | | | | | | | | 2547, 2755 |
| 135 | P01130 | LDLR | Low-density lipoprotein receptor | 1-21 | 52 | 860 | LDLR | 260, 468, |
| | | | (LDL receptor) | | | | | 676, 884, |
| | | | | | | | | 1092, |
| | | | | | | | | 1300, |
| | | | | | | | | 1508, |
| | | | | | | | | 1716, |
| | | | | | | | | 1924, |
| | | | | | | | | 2132, |
| | | | | | | | | 2340, |
| | | | | | | | | 2548, 2756 |
| 136 | P01732 | CD8A | T-cell surface glycoprotein CD8 | 1-21 | 53 | 235 | CD8A MAL | 261, 469, |
| | | | alpha chain (T-lymphocyte | | | | | 677, 885, |
| | | | differentiation antigen T8/Leu-2) | | | | | 1093, |
| | | | (CD antigen CD8a) | | | | | 1301, |
| | | | | | | | | 1509, |
| | | | | | | | | 1717, |
| | | | | | | | | 1925, |
| | | | | | | | | 2133, |
| | | | | | | | | 2341, |
| | | | | | | | | 2549, 2757 |
| 137 | P48061 | SDF1 | Stromal cell-derived factor 1 | 1-21 | 54 | 93 | CXCL12 SDF1 | 262, 470, |
| | | | (SDF-1) (hSDF-1) (C-X-C motif | | | | SDF1A SDF1B | 678, 886, |
| | | | chemokine 12) (Intercrine | | | | | 1094, |
| | | | reduced in hepatomas) (IRH) | | | | | 1302, |
| | | | (hIRH) (Pre-B cell growth- | | | | | 1510, |
| | | | stimulating factor) (PBSF) | | | | | 1718, |
| | | | [Cleaved into: SDF-1-beta(3-72); | | | | | 1926, |
| | | | SDF-1-alpha(3-67)] | | | | | 2134, |
| | | | | | | | | 2342, |
| | | | | | | | | 2550, 2758 |
| 138 | P01589 | IL2RA | Interleukin-2 receptor subunit | 1-21 | 55 | 272 | IL2RA | 263, 471, |
| | | | alpha (IL-2 receptor subunit | | | | | 679, 887, |
| | | | alpha) (IL-2-RA) (IL-2R subunit | | | | | 1095, |
| | | | alpha) (IL2-RA) (TAC antigen) | | | | | 1303, |
| | | | (p55) (CD antigen CD25) | | | | | 1511, |
| | | | | | | | | 1719, |
| | | | | | | | | 1927, |
| | | | | | | | | 2135, |
| | | | | | | | | 2343, |
| | | | | | | | | 2551, 2759 |
| 139 | Q86T13 | CLC14 | C-type lectin domain family 14 | 1-21 | 56 | 490 | CLEC14A | 264, 472, |
| | | | member A (Epidermal growth | | | | C14orf27 EGFR5 | 680, 888, |
| | | | factor receptor 5) (EGFR-5) | | | | UNQ236/PRO269 | 1096, |
| | | | | | | | | 1304, |
| | | | | | | | | 1512, |
| | | | | | | | | 1720, |
| | | | | | | | | 1928, |
| | | | | | | | | 2136, |
| | | | | | | | | 2344, |
| | | | | | | | | 2552, 2760 |
| 140 | Q5DIDO | UROL1 | Uromodulin-like 1 (Olfactorin) | 1-21 | 57 | 1318 | UMODL1 | 265, 473, |
| | | | | | | | | 681, 889, |
| | | | | | | | | 1097, |
| | | | | | | | | 1305, |
| | | | | | | | | 1513, |
| | | | | | | | | 1721, |
| | | | | | | | | 1929, |
| | | | | | | | | 2137, |
| | | | | | | | | 2345, |
| | | | | | | | | 2553, 2761 |
| 141 | P40189 | IL6RB | Interleukin-6 receptor subunit | 1-22 | 58 | 918 | IL6ST | 266, 474, |
| | | | beta (IL-6 receptor subunit beta) | | | | | 682, 890, |
| | | | (IL-6R subunit beta) (IL-6R-beta) | | | | | 1098, |
| | | | (IL-6RB) (CDw130) (Interleukin- | | | | | 1306, |
| | | | 6 signal transducer) (Membrane | | | | | 1514, |
| | | | glycoprotein 130) (gp130) | | | | | 1722, |
| | | | (Oncostatin-M receptor subunit | | | | | 1930, |
| | | | alpha) (CD antigen CD130) | | | | | 2138, |
| | | | | | | | | 2346, |
| | | | | | | | | 2554, 2762 |
| 142 | Q86YL7 | PDPN | Podoplanin (Aggrus) | 1-22 | 59 | 162 | PDPN GP36 | 267, 475, |
| | | | (Glycoprotein 36) (Gp36) | | | | PSEC0003 | 683, 891, |
| | | | (PA2.26 antigen) (T1-alpha) | | | | PSEC0025 | 1099, |
| | | | (T1A) | | | | | 1307, |
| | | | | | | | | 1515, |
| | | | | | | | | 1723, |
| | | | | | | | | 1931, |
| | | | | | | | | 2139, |
| | | | | | | | | 2347, |
| | | | | | | | | 2555, 2763 |
| 143 | P55075 | FGF8 | Fibroblast growth factor 8 (FGF- | 1-22 | 60 | 233 | FGF8 AIGF | 268, 476, |
| | | | 8) (Androgen-induced growth | | | | | 684, 892, |
| | | | factor) (AIGF) (Heparin-binding | | | | | 1100, |
| | | | growth factor 8) (HBGF-8) | | | | | 1308, |
| | | | | | | | | 1516, |
| | | | | | | | | 1724, |
| | | | | | | | | 1932, |
| | | | | | | | | 2140, |
| | | | | | | | | 2348, |
| | | | | | | | | 2556, 2764 |
| 144 | Q30201 | HFE | Hereditary hemochromatosis | 1-22 | 61 | 348 | HFE HLAH | 269, 477, |
| | | | protein (HLA-H) | | | | | 685, 893, |
| | | | | | | | | 1101, |
| | | | | | | | | 1309, |
| | | | | | | | | 1517, |
| | | | | | | | | 1725, |
| | | | | | | | | 1933, |
| | | | | | | | | 2141, |
| | | | | | | | | 2349, |
| | | | | | | | | 2557, 2765 |
| 145 | P07766 | CD3E | T-cell surface glycoprotein CD3 | 1-22 | 62 | 207 | CD3E T3E | 270, 478, |
| | | | epsilon chain (T-cell surface | | | | | 686, 894, |
| | | | antigen T3/Leu-4 epsilon chain) | | | | | 1102, |
| | | | (CD antigen CD3e) | | | | | 1310, |
| | | | | | | | | 1518, |
| | | | | | | | | 1726, |
| | | | | | | | | 1934, |
| | | | | | | | | 2142, |
| | | | | | | | | 2350, |
| | | | | | | | | 2558, 2766 |
| 146 | P18827 | SDC1 | Syndecan-1 (SYND1) (CD | 1-22 | 63 | 310 | SDC1 SDC | 271, 479, |
| | | | antigen CD138) | | | | | 687, 895, |
| | | | | | | | | 1103, |
| | | | | | | | | 1311, |
| | | | | | | | | 1519, |
| | | | | | | | | 1727, |
| | | | | | | | | 1935, |
| | | | | | | | | 2143, |
| | | | | | | | | 2351, |
| | | | | | | | | 2559, 2767 |
| 147 | P55290 | CAD13 | Cadherin-13 (Heart cadherin) | 1-22 | 64 | 713 | CDH13 CDHH | 272, 480, |
| | | | (H-cadherin) (P105) (Truncated | | | | | 688, 896, |
| | | | cadherin) (T-cad) (T-cadherin) | | | | | 1104, |
| | | | | | | | | 1312, |
| | | | | | | | | 1520, |
| | | | | | | | | 1728, |
| | | | | | | | | 1936, |
| | | | | | | | | 2144, |
| | | | | | | | | 2352, |
| | | | | | | | | 2560, 2768 |
| 148 | P37173 | TGFR2 | TGF-beta receptor type-2 | 1-22 | 65 | 567 | TGFBR2 | 273, 481, |
| | | | (TGFR-2) (EC 2.7.11.30) (TGF- | | | | | 689, 897, |
| | | | beta type II receptor) | | | | | 1105, |
| | | | (Transforming growth factor-beta | | | | | 1313, |
| | | | receptor type II) (TGF-beta | | | | | 1521, |
| | | | receptor type II) (TbetaR-II) | | | | | 1729, |
| | | | | | | | | 1937, |
| | | | | | | | | 2145, |
| | | | | | | | | 2353, |
| | | | | | | | | 2561,2769 |
| 149 | Q07325 | CXCL9 | C-X-C motif chemokine 9 | 1-22 | 66 | 125 | CXCL9 CMK MIG | 274, 482, |
| | | | (Gamma-interferon-induced | | | | SCYB9 | 690, 898, |
| | | | monokine) (Monokine induced | | | | | 1106, |
| | | | by interferon-gamma) (HuMIG) | | | | | 1314, |
| | | | (MIG) (Small-inducible cytokine | | | | | 1522, |
| | | | B9) | | | | | 1730, |
| | | | | | | | | 1938, |
| | | | | | | | | 2146, |
| | | | | | | | | 2354, |
| | | | | | | | | 2562, 2770 |
| 150 | P04156 | PRIO | Major prion protein (PrP) | 1-22 | 67 | 253 | PRNP ALTPRP | 275, 483, |
| | | | (ASCR) (PrP27-30) (PrP33-35C) | | | | PRIP PRP | 691, 899, |
| | | | (CD antigen CD230) | | | | | 1107, |
| | | | | | | | | 1315, |
| | | | | | | | | 1523, |
| | | | | | | | | 1731, |
| | | | | | | | | 1939, |
| | | | | | | | | 2147, |
| | | | | | | | | 2355, |
| | | | | | | | | 2563, 2771 |
| 151 | P31785 | IL2RG | Cytokine receptor common | 1-22 | 68 | 369 | IL2RG | 276, 484, |
| | | | subunit gamma (Interleukin-2 | | | | | 692, 900, |
| | | | receptor subunit gamma) (IL-2 | | | | | 1108, |
| | | | receptor subunit gamma) (IL-2R | | | | | 1316, |
| | | | subunit gamma) (IL-2RG) | | | | | 1524, |
| | | | (gammaC) (p64) (CD antigen | | | | | 1732, |
| | | | CD132) | | | | | 1940, |
| | | | | | | | | 2148, |
| | | | | | | | | 2356, |
| | | | | | | | | 2564, 2772 |
| 152 | P01579 | IFNG | Interferon gamma (IFN-gamma) | 1-23 | 69 | 166 | IFNG | 277, 485, |
| | | | (Immune interferon) | | | | | 693, 901, |
| | | | | | | | | 1109, |
| | | | | | | | | 1317, |
| | | | | | | | | 1525, |
| | | | | | | | | 1733, |
| | | | | | | | | 1941, |
| | | | | | | | | 2149, |
| | | | | | | | | 2357, |
| | | | | | | | | 2565, 2773 |
| 153 | P23229 | ITA6 | Integrin alpha-6 (CD49 antigen- | 1-23 | 70 | 1130 | ITGA6 | 278, 486, |
| | | | like family member F) (VLA-6) | | | | | 694, 902, |
| | | | (CD antigen CD49f) [Cleaved | | | | | 1110, |
| | | | into: Integrin alpha-6 heavy | | | | | 1318, |
| | | | chain; Integrin alpha-6 light | | | | | 1526, |
| | | | chain; Processed integrin alpha- | | | | | 1734, |
| | | | 6 (Alpha6p)] | | | | | 1942, |
| | | | | | | | | 2150, |
| | | | | | | | | 2358, |
| | | | | | | | | 2566, 2774 |
| 154 | O60494 | CUBN | Cubilin (460 kDa receptor) | 1-23 | 71 | 3623 | CUBN IFCR | 279, 487, |
| | | | (Intestinal intrinsic factor | | | | | 695, 903, |
| | | | receptor) (Intrinsic factor- | | | | | 1111, |
| | | | cobalamin receptor) (Intrinsic | | | | | 1319, |
| | | | factor-vitamin B12 receptor) | | | | | 1527, |
| | | | | | | | | 1735, |
| | | | | | | | | 1943, |
| | | | | | | | | 2151, |
| | | | | | | | | 2359, |
| | | | | | | | | 2567, 2775 |
| 155 | P08575 | PTPRC | Receptor-type tyrosine-protein | 1-23 | 72 | 1304 | PTPRC CD45 | 280, 488, |
| | | | phosphatase C (EC 3.1.3.48) | | | | | 696, 904, |
| | | | (Leukocyte common antigen) (L- | | | | | 1112, |
| | | | CA) (T200) (CD antigen CD45) | | | | | 1320, |
| | | | | | | | | 1528, |
| | | | | | | | | 1736, |
| | | | | | | | | 1944, |
| | | | | | | | | 2152, |
| | | | | | | | | 2360, |
| | | | | | | | | 2568, 2776 |
| 156 | Q8IWY4 | SCUB1 | Signal peptide, CUB and EGF- | 1-23 | 73 | 988 | SCUBE1 | 281, 489, |
| | | | like domain-containing protein 1 | | | | | 697, 905, |
| | | | | | | | | 1113, |
| | | | | | | | | 1321, |
| | | | | | | | | 1529, |
| | | | | | | | | 1737, |
| | | | | | | | | 1945, |
| | | | | | | | | 2153, |
| | | | | | | | | 2361, |
| | | | | | | | | 2569, 2777 |
| 157 | Q08431 | MFGM | Lactadherin (Breast epithelial | 1-23 | 74 | 387 | MFGE8 | 282, 490, |
| | | | antigen BA46) (HMFG) (MFGM) | | | | | 698, 906, |
| | | | (Milk fat globule-EGF factor 8) | | | | | 1114, |
| | | | (MFG-E8) (SED1) [Cleaved into: | | | | | 1322, |
| | | | Lactadherin short form; Medin] | | | | | 1530, |
| | | | | | | | | 1738, |
| | | | | | | | | 1946, |
| | | | | | | | | 2154, |
| | | | | | | | | 2362, |
| | | | | | | | | 2570, 2778 |
| 158 | Q99665 | 112R2 | Interleukin-12 receptor subunit | 1-23 | 75 | 862 | IL12RB2 | 283, 491, |
| | | | beta-2 (IL-12 receptor subunit | | | | | 699, 907, |
| | | | beta-2) (IL-12R subunit beta-2) | | | | | 1115, |
| | | | (IL-12R-beta-2) (IL-12RB2) | | | | | 1323, |
| | | | | | | | | 1531, |
| | | | | | | | | 1739, |
| | | | | | | | | 1947, |
| | | | | | | | | 2155, |
| | | | | | | | | 2363, |
| | | | | | | | | 2571, 2779 |
| 159 | Q6Q8B3 | MO2R2 | Cell surface glycoprotein CD200 | 1-23 | 76 | 271 | CD200R1L | 284, 492, |
| | | | receptor 2 (CD200 cell surface | | | | CD200R2 | 700, 908, |
| | | | glycoprotein receptor-like 2) | | | | | 1116, |
| | | | (CD200 receptor-like 2) | | | | | 1324, |
| | | | (HuCD200R2) (CD200 cell | | | | | 1532, |
| | | | surface glycoprotein receptor- | | | | | 1740, |
| | | | like a) (CD200RLa) (Cell surface | | | | | 1948, |
| | | | glycoprotein CD200 receptor 1- | | | | | 2156, |
| | | | like) (Cell surface glycoprotein | | | | | 2364, |
| | | | OX2 receptor 2) | | | | | 2572, 2780 |
| 160 | Q07011 | TNR9 | Tumor necrosis factor receptor | 1-23 | 77 | 255 | TNFRSF9 CD137 | 285, 493, |
| | | | superfamily member 9 (4-1BB | | | | ILA | 701, 909, |
| | | | ligand receptor) (CDw137) (T- | | | | | 1117, |
| | | | cell antigen 4-1BB homolog) (T- | | | | | 1325, |
| | | | cell antigen ILA) (CD antigen | | | | | 1533, |
| | | | CD137) | | | | | 1741, |
| | | | | | | | | 1949, |
| | | | | | | | | 2157, |
| | | | | | | | | 2365, |
| | | | | | | | | 2573, 2781 |
| 161 | Q8NHL6 | LIRB1 | Leukocyte immunoglobulin-like | 1-23 | 78 | 650 | LILRB1 ILT2 LIR1 | 286, 494, |
| | | | receptor subfamily B member 1 | | | | MIR7 | 702, 910, |
| | | | (LIR-1) (Leukocyte | | | | | 1118, |
| | | | immunoglobulin-like receptor 1) | | | | | 1326, |
| | | | (CD85 antigen-like family | | | | | 1534, |
| | | | member J) (Immunoglobulin-like | | | | | 1742, |
| | | | transcript 2) (ILT-2) | | | | | 1950, |
| | | | (Monocyte/macrophage | | | | | 2158, |
| | | | immunoglobulin-like receptor 7) | | | | | 2366, |
| | | | (MIR-7) (CD antigen CD85j) | | | | | 2574, 2782 |
| 162 | P36894 | BMR1A | Bone morphogenetic protein | 1-23 | 79 | 532 | BMPR1A | 287, 495, |
| | | | receptor type-1A (BMP type-1A | | | | ACVRLK3 ALK3 | 703, 911, |
| | | | receptor) (BMPR-1A) (EC | | | | | 1119, |
| | | | 2.7.11.30) (Activin receptor-like | | | | | 1327, |
| | | | kinase 3) (ALK-3) | | | | | 1535, |
| | | | (Serine/threonine-protein kinase | | | | | 1743, |
| | | | receptor R5) (SKR5) (CD | | | | | 1951, |
| | | | antigen CD292) | | | | | 2159, |
| | | | | | | | | 2367, |
| | | | | | | | | 2575, 2783 |
| 163 | Q16552 | IL17 | Interleukin-17A (IL-17) (IL-17A) | 1-23 | 80 | 155 | IL17A CTLA8 IL17 | 288, 496, |
| | | | (Cytotoxic T-lymphocyte- | | | | | 704, 912, |
| | | | associated antigen 8) (CTLA-8) | | | | | 1120, |
| | | | | | | | | 1328, |
| | | | | | | | | 1536, |
| | | | | | | | | 1744, |
| | | | | | | | | 1952, |
| | | | | | | | | 2160, |
| | | | | | | | | 2368, |
| | | | | | | | | 2576, 2784 |
| 164 | P42081 | CD86 | T-lymphocyte activation antigen | 1-23 | 8 | 329 | CD86 CD28LG2 | 289, 497, |
| | | | CD86 (Activation B7-2 antigen) | | | | | 705, 913, |
| | | | (B70) (BU63) (CTLA-4 counter- | | | | | 1121, |
| | | | receptor B7.2) (FUN-1) (CD | | | | | 1329, |
| | | | antigen CD86) | | | | | 1537, |
| | | | | | | | | 1745, |
| | | | | | | | | 1953, |
| | | | | | | | | 2161, |
| | | | | | | | | 2369, |
| | | | | | | | | 2577, 2785 |
| 165 | P43121 | MUC18 | Cell surface glycoprotein | 1-23 | 82 | 646 | MCAM MUC18 | 290, 498, |
| | | | MUC18 (Cell surface | | | | | 706, 914, |
| | | | glycoprotein P1H12) (Melanoma | | | | | 1122, |
| | | | cell adhesion molecule) | | | | | 1330, |
| | | | (Melanoma-associated antigen | | | | | 1538, |
| | | | A32) (Melanoma-associated | | | | | 1746, |
| | | | antigen MUC18) (S-endo 1 | | | | | 1954, |
| | | | endothelial-associated antigen) | | | | | 2162, |
| | | | (CD antigen CD146) | | | | | 2370, |
| | | | | | | | | 2578, 2786 |
| 166 | O00206 | TLR4 | Toll-like receptor 4 (hToll) (CD | 1-23 | 83 | 839 | TLR4 | 291, 499, |
| | | | antigen CD284) | | | | | 707, 915, |
| | | | | | | | | 1123, |
| | | | | | | | | 1331, |
| | | | | | | | | 1539, |
| | | | | | | | | 1747, |
| | | | | | | | | 1955, |
| | | | | | | | | 2163, |
| | | | | | | | | 2371, |
| | | | | | | | | 2579, 2787 |
| 167 | P42701 | 112R1 | Interleukin-12 receptor subunit | 1-23 | 84 | 662 | IL12RB1 IL12R | 292, 500, |
| | | | beta-1 (IL-12 receptor subunit | | | | IL 12RB | 708, 916, |
| | | | beta-1) (IL-12R subunit beta-1) | | | | | 1124, |
| | | | (IL-12R-beta-1) (IL-12RB1) (IL- | | | | | 1332, |
| | | | 12 receptor beta component) | | | | | 1540, |
| | | | (CD antigen CD212) | | | | | 1748, |
| | | | | | | | | 1956, |
| | | | | | | | | 2164, |
| | | | | | | | | 2372, |
| | | | | | | | | 2580, 2788 |
| 168 | P06729 | CD2 | T-cell surface antigen CD2 | 1-24 | 85 | 351 | CD2 SRBC | 293, 501, |
| | | | (Erythrocyte receptor) (LFA-2) | | | | | 709, 917, |
| | | | (LFA-3 receptor) (Rosette | | | | | 1125, |
| | | | receptor) (T-cell surface antigen | | | | | 1333, |
| | | | T11/Leu-5) (CD antigen CD2) | | | | | 1541, |
| | | | | | | | | 1749, |
| | | | | | | | | 1957, |
| | | | | | | | | 2165, |
| | | | | | | | | 2373, |
| | | | | | | | | 2581, 2789 |
| 169 | P15328 | FOLR1 | Folate receptor alpha (FR-alpha) | 1-24 | 86 | 257 | FOLR1 FOLR | 294, 502, |
| | | | (Adult folate-binding protein) | | | | | 710, 918, |
| | | | (FBP) (Folate receptor 1) (Folate | | | | | 1126, |
| | | | receptor, adult) (KB cells FBP) | | | | | 1334, |
| | | | (Ovarian tumor-associated | | | | | 1542, |
| | | | antigen MOv18) | | | | | 1750, |
| | | | | | | | | 1958, |
| | | | | | | | | 2166, |
| | | | | | | | | 2374, |
| | | | | | | | | 2582, 2790 |
| 170 | P05112 | IL4 | Interleukin-4 (IL-4) (B-cell | 1-24 | 87 | 153 | IL4 | 295, 503, |
| | | | stimulatory factor 1) (BSF-1) | | | | | 711, 919, |
| | | | (Binetrakin) (Lymphocyte | | | | | 1127, |
| | | | stimulatory factor 1) (Pitrakinra) | | | | | 1335, |
| | | | | | | | | 1543, |
| | | | | | | | | 1751, |
| | | | | | | | | 1959, |
| | | | | | | | | 2167, |
| | | | | | | | | 2375, |
| | | | | | | | | 2583, 2791 |
| 171 | P06127 | CD5 | T-cell surface glycoprotein CD5 | 1-24 | 88 | 495 | CD5 LEU1 | 296, 504, |
| | | | (Lymphocyte antigen T1/Leu-1) | | | | | 712, 920, |
| | | | (CD antigen CD5) | | | | | 1128, |
| | | | | | | | | 1336, |
| | | | | | | | | 1544, |
| | | | | | | | | 1752, |
| | | | | | | | | 1960, |
| | | | | | | | | 2168, |
| | | | | | | | | 2376, |
| | | | | | | | | 2584, 2792 |
| 172 | P32248 | CCR7 | C—C chemokine receptor type 7 | 1-24 | 89 | 378 | CCR7 CMKBR7 | 297, 505, |
| | | | (C—C CKR-7) (CC-CKR-7) (CCR- | | | | EBI1 EVI1 | 713, 921, |
| | | | 7) (BLR2) (CDw197) (Epstein- | | | | | 1129, |
| | | | Barr virus-induced G-protein | | | | | 1337, |
| | | | coupled receptor 1) (EBI1) | | | | | 1545, |
| | | | (EBV-induced G-protein coupled | | | | | 1753, |
| | | | receptor 1) (MIP-3 beta | | | | | 1961, |
| | | | receptor) (CD antigen CD197) | | | | | 2169, |
| | | | | | | | | 2377, |
| | | | | | | | | 2585, 2793 |
| 173 | Q7Z7D3 | VTCN1 | V-set domain-containing T-cell | 1-24 | 90 | 282 | VTCN1 B7H4 | 298, 506, |
| | | | activation inhibitor 1 (B7 | | | | UNQ659/PRO1291 | 714, 922, |
| | | | homolog 4) (B7-H4) (B7h.5) | | | | | 1130, |
| | | | (Immune costimulatory protein | | | | | 1338, |
| | | | B7-H4) (Protein B7S1) (T-cell | | | | | 1546, |
| | | | costimulatory molecule B7x) | | | | | 1754, |
| | | | | | | | | 1962, |
| | | | | | | | | 2170, |
| | | | | | | | | 2378, |
| | | | | | | | | 2586, 2794 |
| 174 | P54756 | EPHA5 | Ephrin type-A receptor 5 (EC | 1-24 | 91 | 1037 | EPHA5 BSK EHK1 | 299, 507, |
| | | | 2.7.10.1) (Brain-specific kinase) | | | | HEK7 TYRO4 | 715, 923, |
| | | | (EPH homology kinase 1) (EHK- | | | | | 1131, |
| | | | 1) (EPH-like kinase 7) (EK7) | | | | | 1339, |
| | | | (hEK7) | | | | | 1547, |
| | | | | | | | | 1755, |
| | | | | | | | | 1963, |
| | | | | | | | | 2171, |
| | | | | | | | | 2379, |
| | | | | | | | | 2587, 2795 |
| 175 | Q92823 | NRCAM | Neuronal cell adhesion molecule | 1-24 | 92 | 1304 | NRCAM KIAA0343 | 300, 508, |
| | | | (Nr-CAM) (Neuronal surface | | | | | 716, 924, |
| | | | protein Bravo) (hBravo) | | | | | 1132, |
| | | | (NgCAM-related cell adhesion | | | | | 1340, |
| | | | molecule) (Ng-CAM-related) | | | | | 1548, |
| | | | | | | | | 1756, |
| | | | | | | | | 1964, |
| | | | | | | | | 2172, |
| | | | | | | | | 2380, |
| | | | | | | | | 2588, 2796 |
| 176 | P19320 | VCAM1 | Vascular cell adhesion protein 1 | 1-24 | 93 | 739 | VCAM1 | 301, 509, |
| | | | (V-CAM 1) (VCAM-1) (INCAM- | | | | | 717, 925, |
| | | | 100) (CD antigen CD106) | | | | | 1133, |
| | | | | | | | | 1341, |
| | | | | | | | | 1549, |
| | | | | | | | | 1757, |
| | | | | | | | | 1965, |
| | | | | | | | | 2173, |
| | | | | | | | | 2381, |
| | | | | | | | | 2589, 2797 |
| 177 | Q86UN2 | R4RL1 | Reticulon-4 receptor-like 1 | 1-24 | 94 | 441 | RTN4RL1 NGRH2 | 302, 510, |
| | | | (Nogo receptor-like 2) (Nogo-66 | | | | NGRL2 | 718, 926, |
| | | | receptor homolog 2) (Nogo-66 | | | | | 1134, |
| | | | receptor-related protein 3) | | | | | 1342, |
| | | | (NgR3) | | | | | 1550, |
| | | | | | | | | 1758, |
| | | | | | | | | 1966, |
| | | | | | | | | 2174, |
| | | | | | | | | 2382, |
| | | | | | | | | 2590, 2798 |
| 178 | P33151 | CADH5 | Cadherin-5 (7B4 antigen) | 1-25 | 95 | 784 | CDH5 | 303, 511, |
| | | | (Vascular endothelial cadherin) | | | | | 719, 927, |
| | | | (VE-cadherin) (CD antigen | | | | | 1135, |
| | | | CD144) | | | | | 1343, |
| | | | | | | | | 1551, |
| | | | | | | | | 1759, |
| | | | | | | | | 1967, |
| | | | | | | | | 2175, |
| | | | | | | | | 2383, |
| | | | | | | | | 2591, 2799 |
| 179 | P17813 | EGLN | Endoglin (CD antigen CD105) | 1-25 | 96 | 658 | ENG END | 304, 512, |
| | | | | | | | | 720, 928, |
| | | | | | | | | 1136, |
| | | | | | | | | 1344, |
| | | | | | | | | 1552, |
| | | | | | | | | 1760, |
| | | | | | | | | 1968, |
| | | | | | | | | 2176, |
| | | | | | | | | 2384, |
| | | | | | | | | 2592, 2800 |
| 180 | P25445 | TNR6 | Tumor necrosis factor receptor | 1-25 | 97 | 335 | FAS APT1 FAS1 | 305, 513, |
| | | | superfamily member 6 (Apo-1 | | | | TNFRSF6 | 721, 929, |
| | | | antigen) (Apoptosis-mediating | | | | | 1137, |
| | | | surface antigen FAS) (FASLG | | | | | 1345, |
| | | | receptor) (CD antigen CD95) | | | | | 1553, |
| | | | | | | | | 1761, |
| | | | | | | | | 1969, |
| | | | | | | | | 2177, |
| | | | | | | | | 2385, |
| | | | | | | | | 2593, 2801 |
| 181 | P01730 | CD4 | T-cell surface glycoprotein CD4 | 1-25 | 98 | 458 | CD4 | 306, 514, |
| | | | (T-cell surface antigen T4/Leu-3) | | | | | 722, 930, |
| | | | (CD antigen CD4) | | | | | 1138, |
| | | | | | | | | 1346, |
| | | | | | | | | 1554, |
| | | | | | | | | 1762, |
| | | | | | | | | 1970, |
| | | | | | | | | 2178, |
| | | | | | | | | 2386, |
| | | | | | | | | 2594, 2802 |
| 182 | Q685J3 | MUC17 | Mucin-17 (MUC-17) (Small | 1-25 | 99 | 4493 | MUC17 MUC3 | 307, 515, |
| | | | intestinal mucin-3) (MUC-3) | | | | | 723, 931, |
| | | | | | | | | 1139, |
| | | | | | | | | 1347, |
| | | | | | | | | 1555, |
| | | | | | | | | 1763, |
| | | | | | | | | 1971, |
| | | | | | | | | 2179, |
| | | | | | | | | 2387, |
| | | | | | | | | 2595, 2803 |
| 183 | P17787 | ACHB2 | Neuronal acetylcholine receptor | 1-25 | 100 | 502 | CHRNB2 | 308, 516, |
| | | | subunit beta-2 | | | | | 724, 932, |
| | | | | | | | | 1140, |
| | | | | | | | | 1348, |
| | | | | | | | | 1556, |
| | | | | | | | | 1764, |
| | | | | | | | | 1972, |
| | | | | | | | | 2180, |
| | | | | | | | | 2388, |
| | | | | | | | | 2596, 2804 |
| 184 | Q6UQ28 | PLET1 | Placenta-expressed transcript 1 | 1-25 | 101 | 207 | PLET1 C11orf34 | 309, 517, |
| | | | protein | | | | | 725, 933, |
| | | | | | | | | 1141, |
| | | | | | | | | 1349, |
| | | | | | | | | 1557, |
| | | | | | | | | 1765, |
| | | | | | | | | 1973, |
| | | | | | | | | 2181, |
| | | | | | | | | 2389, |
| | | | | | | | | 2597, 2805 |
| 185 | P13987 | CD59 | CD59 glycoprotein (1F5 antigen) | 1-25 | 102 | 128 | CD59 MIC11 MIN1 | 310, 518, |
| | | | (20 kDa homologous restriction | | | | MIN2 MIN3 MSK21 | 726, 934, |
| | | | factor) (HRF-20) (HRF20) (MAC- | | | | | 1142, |
| | | | inhibitory protein) (MAC-IP) | | | | | 1350, |
| | | | (MEM43 antigen) (Membrane | | | | | 1558, |
| | | | attack complex inhibition factor) | | | | | 1766, |
| | | | (MACIF) (Membrane inhibitor of | | | | | 1974, |
| | | | reactive lysis) (MIRL) (Protectin) | | | | | 2182, |
| | | | (CD antigen CD59) | | | | | 2390, |
| | | | | | | | | 2598, 2806 |
| 186 | P10721 | KIT | Mast/stem cell growth factor | 1-25 | 103 | 976 | KIT SCFR | 311, 519, |
| | | | receptor Kit (SCFR) (EC | | | | | 727, 935, |
| | | | 2.7.10.1) (Piebald trait protein) | | | | | 1143, |
| | | | (PBT) (Proto-oncogene c-Kit) | | | | | 1351, |
| | | | (Tyrosine-protein kinase Kit) | | | | | 1559, |
| | | | (p145 c-kit) (v-kit Hardy- | | | | | 1767, |
| | | | Zuckerman 4 feline sarcoma | | | | | 1975, |
| | | | viral oncogene homolog) (CD | | | | | 2183, |
| | | | antigen CD117) | | | | | 2391, |
| | | | | | | | | 2599, 2807 |
| 187 | P12319 | FCERA | High affinity immunoglobulin | 1-25 | 104 | 257 | FCER1A FCE1A | 312, 520, |
| | | | epsilon receptor subunit alpha | | | | | 728, 936, |
| | | | (Fc-epsilon RI-alpha) (FcERI) | | | | | 1144, |
| | | | (IgE Fc receptor subunit alpha) | | | | | 1352, |
| | | | | | | | | 1560, |
| | | | | | | | | 1768, |
| | | | | | | | | 1976, |
| | | | | | | | | 2184, |
| | | | | | | | | 2392, |
| | | | | | | | | 2600, 2808 |
| 188 | Q9BZR6 | RTN4R | Reticulon-4 receptor (Nogo | 1-26 | 105 | 473 | RTN4R NOGOR | 313, 521, |
| | | | receptor) (NgR) (Nogo-66 | | | | UNQ330/PRO526 | 729, 937, |
| | | | receptor) | | | | | 1145, |
| | | | | | | | | 1353, |
| | | | | | | | | 1561, |
| | | | | | | | | 1769, |
| | | | | | | | | 1977, |
| | | | | | | | | 2185, |
| | | | | | | | | 2393, |
| | | | | | | | | 2601,2809 |
| 189 | P25063 | CD24 | Signal transducer CD24 (Small | 1-26 | 106 | 80 | CD24 CD24A | 314, 522, |
| | | | cell lung carcinoma cluster 4 | | | | | 730, 938, |
| | | | antigen) (CD antigen CD24) | | | | | 1146, |
| | | | | | | | | 1354, |
| | | | | | | | | 1562, |
| | | | | | | | | 1770, |
| | | | | | | | | 1978, |
| | | | | | | | | 2186, |
| | | | | | | | | 2394, |
| | | | | | | | | 2602, 2810 |
| 190 | Q9NR97 | TLR8 | Toll-like receptor 8 (CD antigen | 1-26 | 107 | 1041 | TLR8 | 315, 523, |
| | | | CD288) | | | | UNQ249/PRO286 | 731, 939, |
| | | | | | | | | 1147, |
| | | | | | | | | 1355, |
| | | | | | | | | 1563, |
| | | | | | | | | 1771, |
| | | | | | | | | 1979, |
| | | | | | | | | 2187, |
| | | | | | | | | 2395, |
| | | | | | | | | 2603, 2811 |
| 191 | Q8N131 | PORIM | Porimin (Keratinocytes- | 1-26 | 108 | 208 | TMEM123 KCT3 | 316, 524, |
| | | | associated transmembrane | | | | PSEC0111 | 732, 940, |
| | | | protein 3) (KCT-3) (Pro-oncosis | | | | UNQ641/PRO1271 | 1148, |
| | | | receptor inducing membrane | | | | | 1356, |
| | | | injury) (Transmembrane protein | | | | | 1564, |
| | | | 123) | | | | | 1772, |
| | | | | | | | | 1980, |
| | | | | | | | | 2188, |
| | | | | | | | | 2396, |
| | | | | | | | | 2604, 2812 |
| 192 | P49771 | FLT3L | Fms-related tyrosine kinase 3 | 1-26 | 109 | 235 | FLT3LG | 317, 525, |
| | | | ligand (Flt3 ligand) (FIt3L) (SL | | | | | 733, 941, |
| | | | cytokine) | | | | | 1149, |
| | | | | | | | | 1357, |
| | | | | | | | | 1565, |
| | | | | | | | | 1773, |
| | | | | | | | | 1981, |
| | | | | | | | | 2189, |
| | | | | | | | | 2397, |
| | | | | | | | | 2605, 2813 |
| 193 | P02679 | FIBG | Fibrinogen gamma chain | 1-26 | 110 | 453 | FGG PRO2061 | 318, 526, |
| | | | | | | | | 734, 942, |
| | | | | | | | | 1150, |
| | | | | | | | | 1358, |
| | | | | | | | | 1566, |
| | | | | | | | | 1774, |
| | | | | | | | | 1982, |
| | | | | | | | | 2190, |
| | | | | | | | | 2398, |
| | | | | | | | | 2606, 2814 |
| 194 | P14784 | IL2RB | Interleukin-2 receptor subunit | 1-26 | 111 | 551 | IL2RB | 319, 527, |
| | | | beta (IL-2 receptor subunit beta) | | | | | 735, 943, |
| | | | (IL-2R subunit beta) (IL-2RB) | | | | | 1151, |
| | | | (High affinity IL-2 receptor | | | | | 1359, |
| | | | subunit beta) (p70-75) (p75) (CD | | | | | 1567, |
| | | | antigen CD122) | | | | | 1775, |
| | | | | | | | | 1983, |
| | | | | | | | | 2191, |
| | | | | | | | | 2399, |
| | | | | | | | | 2607, 2815 |
| 195 | P05362 | ICAM1 | Intercellular adhesion molecule | 1-27 | 112 | 532 | ICAM1 | 320, 528, |
| | | | 1 (ICAM-1) (Major group | | | | | 736, 944, |
| | | | rhinovirus receptor) (CD antigen | | | | | 1152, |
| | | | CD54) | | | | | 1360, |
| | | | | | | | | 1568, |
| | | | | | | | | 1776, |
| | | | | | | | | 1984, |
| | | | | | | | | 2192, |
| | | | | | | | | 2400, |
| | | | | | | | | 2608, 2816 |
| 196 | Q13740 | CD166 | CD166 antigen (Activated | 1-27 | 113 | 583 | ALCAM MEMD | 321, 529, |
| | | | leukocyte cell adhesion | | | | | 737, 945, |
| | | | molecule) (CD antigen CD166) | | | | | 1153, |
| | | | | | | | | 1361, |
| | | | | | | | | 1569, |
| | | | | | | | | 1777, |
| | | | | | | | | 1985, |
| | | | | | | | | 2193, |
| | | | | | | | | 2401, |
| | | | | | | | | 2609, 2817 |
| 197 | Q13443 | ADAM9 | Disintegrin and | 1-28 | 114 | 819 | ADAM9 KIAA0021 | 322, 530, |
| | | | metalloproteinase domain- | | | | MCMP MDC9 | 738, 946, |
| | | | containing protein 9 (ADAM 9) | | | | MLTNG | 1154, |
| | | | (EC 3.4.24.-) (Cellular | | | | | 1362, |
| | | | disintegrin-related protein) | | | | | 1570, |
| | | | (Meltrin-gamma) | | | | | 1778, |
| | | | (Metalloprotease/disintegrin/ | | | | | 1986, |
| | | | cysteine-rich protein 9) (Myeloma | | | | | 2194, |
| | | | cell metalloproteinase) | | | | | 2402, |
| | | | | | | | | 2610, 2818 |
| 198 | P14151 | LYAM1 | L-selectin (CD62 antigen-like | 1-28 | 115 | 372 | SELL LNHR | 323, 531, |
| | | | family member L) (Leukocyte | | | | LYAM1 | 739, 947, |
| | | | adhesion molecule 1) (LAM-1) | | | | | 1155, |
| | | | (Leukocyte surface antigen Leu- | | | | | 1363, |
| | | | 8) (Leukocyte-endothelial cell | | | | | 1571, |
| | | | adhesion molecule 1) (LECAM1) | | | | | 1779, |
| | | | (Lymph node homing receptor) | | | | | 1987, |
| | | | (TQ1) (gp90-MEL) (CD antigen | | | | | 2195, |
| | | | CD62L) | | | | | 2403, |
| | | | | | | | | 2611, 2819 |
| 199 | P56199 | ITA1 | Integrin alpha-1 (CD49 antigen- | 1-28 | 116 | 1179 | ITGA1 | 324, 532, |
| | | | like family member A) (Laminin | | | | | 740, 948, |
| | | | and collagen receptor) (VLA-1) | | | | | 1156, |
| | | | (CD antigen CD49a) | | | | | 1364, |
| | | | | | | | | 1572, |
| | | | | | | | | 1780, |
| | | | | | | | | 1988, |
| | | | | | | | | 2196, |
| | | | | | | | | 2404, |
| | | | | | | | | 2612, 2820 |
| 200 | P11279 | LAMP1 | Lysosome-associated | 1-28 | 117 | 417 | LAMP1 | 325, 533, |
| | | | membrane glycoprotein 1 | | | | | 741, 949, |
| | | | (LAMP-1) (Lysosome-associated | | | | | 1157, |
| | | | membrane protein 1) (CD107 | | | | | 1365, |
| | | | antigen-like family member A) | | | | | 1573, |
| | | | (CD antigen CD107a) | | | | | 1781, |
| | | | | | | | | 1989, |
| | | | | | | | | 2197, |
| | | | | | | | | 2405, |
| | | | | | | | | 2613, 2821 |
| 201 | P40259 | CD79B | B-cell antigen receptor complex- | 1-28 | 118 | 229 | CD79B B29 IGB | 326, 534, |
| | | | associated protein beta chain | | | | | 742, 950, |
| | | | (B-cell-specific glycoprotein B29) | | | | | 1158, |
| | | | (Ig-beta) (Immunoglobulin- | | | | | 1366, |
| | | | associated B29 protein) (CD | | | | | 1574, |
| | | | antigen CD79b) | | | | | 1782, |
| | | | | | | | | 1990 |
| | | | | | | | | 2198, |
| | | | | | | | | 2406, |
| | | | | | | | | 2614, 2822 |
| 202 | P43681 | ACHA4 | Neuronal acetylcholine receptor | 1-28 | 119 | 627 | CHRNA4 NACRA4 | 327, 535, |
| | | | subunit alpha-4 | | | | | 743, 951, |
| | | | | | | | | 1159, |
| | | | | | | | | 1367, |
| | | | | | | | | 1575, |
| | | | | | | | | 1783, |
| | | | | | | | | 1991, |
| | | | | | | | | 2199, |
| | | | | | | | | 2407, |
| | | | | | | | | 2615, 2823 |
| 203 | P18627 | LAG3 | Lymphocyte activation gene 3 | 1-28 | 120 | 525 | LAG3 FDC | 328, 536, |
| | | | protein (LAG-3) (Protein FDC) | | | | | 744, 952, |
| | | | (CD antigen CD223) | | | | | 1160, |
| | | | | | | | | 1368, |
| | | | | | | | | 1576, |
| | | | | | | | | 1784, |
| | | | | | | | | 1992, |
| | | | | | | | | 2200, |
| | | | | | | | | 2408, |
| | | | | | | | | 2616, 2824 |
| 204 | Q5ZPR3 | CD276 | CD276 antigen (4lg-B7-H3) (B7 | 1-28 | 121 | 534 | CD276 B7H3 | 329, 537, |
| | | | homolog 3) (B7-H3) | | | | PSEC0249 | 745, 953, |
| | | | (Costimulatory molecule) (CD | | | | UNQ309/PRO352 | 1161, |
| | | | antigen CD276) | | | | | 1369, |
| | | | | | | | | 1577, |
| | | | | | | | | 1785, |
| | | | | | | | | 1993, |
| | | | | | | | | 2201, |
| | | | | | | | | 2409, |
| | | | | | | | | 2617, 2825 |
| 205 | P23415 | GLRA1 | Glycine receptor subunit alpha-1 | 1-28 | 122 | 457 | GLRA1 | 330, 538, |
| | | | (Glycine receptor 48 kDa | | | | | 746, 954, |
| | | | subunit) (Glycine receptor | | | | | 1162, |
| | | | strychnine-binding subunit) | | | | | 1370, |
| | | | | | | | | 1578, |
| | | | | | | | | 1786, |
| | | | | | | | | 1994, |
| | | | | | | | | 2202, |
| | | | | | | | | 2410, |
| | | | | | | | | 2618, 2826 |
| 206 | Q8TD46 | MO2R1 | Cell surface glycoprotein CD200 | 1-28 | 123 | 325 | CD200R1 CD200R | 331, 539, |
| | | | receptor 1 (CD200 cell surface | | | | CRTR2 MOX2R | 747,955, |
| | | | glycoprotein receptor) (Cell | | | | OX2R | 1163, |
| | | | surface glycoprotein OX2 | | | | UNQ2522/PRO6015 | 1371, |
| | | | receptor 1) | | | | | 1579, |
| | | | | | | | | 1787, |
| | | | | | | | | 1995, |
| | | | | | | | | 2203, |
| | | | | | | | | 2411, |
| | | | | | | | | 2619, 2827 |
| 207 | P17301 | ITA2 | Integrin alpha-2 (CD49 antigen- | 1-29 | 124 | 1181 | ITGA2 CD49B | 332, 540, |
| | | | like family member B) (Collagen | | | | | 748, 956, |
| | | | receptor) (Platelet membrane | | | | | 1164, |
| | | | glycoprotein la) (GPIa) (VLA-2 | | | | | 1372, |
| | | | subunit alpha) (CD antigen | | | | | 1580, |
| | | | CD49b) | | | | | 1788, |
| | | | | | | | | 1996, |
| | | | | | | | | 2204, |
| | | | | | | | | 2412, |
| | | | | | | | | 2620, 2828 |
| 208 | P12821 | ACE | Angiotensin-converting enzyme | 1-29 | 125 | 1306 | ACE DCP DCP1 | 333, 541, |
| | | | (ACE) (EC 3.2.1.-) (EC 3.4.15.1) | | | | | 749, 957, |
| | | | (Dipeptidyl carboxypeptidase I) | | | | | 1165, |
| | | | (Kininase II) (CD antigen | | | | | 1373, |
| | | | CD143) [Cleaved into: | | | | | 1581, |
| | | | Angiotensin-converting enzyme, | | | | | 1789, |
| | | | soluble form] | | | | | 1997 |
| | | | | | | | | 2205, |
| | | | | | | | | 2413, |
| | | | | | | | | 2621, 2829 |
| 209 | Q14118 | DAG1 | Dystroglycan (Dystrophin- | 1-29 | 126 | 895 | DAG1 | 334, 542, |
| | | | associated glycoprotein 1) | | | | | 750, 958, |
| | | | [Cleaved into: Alpha- | | | | | 1166, |
| | | | dystroglycan (Alpha-DG); Beta- | | | | | 1374, |
| | | | dystroglycan (Beta-DG)] | | | | | 1582, |
| | | | | | | | | 1790, |
| | | | | | | | | 1998, |
| | | | | | | | | 2206, |
| | | | | | | | | 2414, |
| | | | | | | | | 2622, 2830 |
| 210 | P05231 | IL6 | Interleukin-6 (IL-6) (B-cell | 1-29 | 127 | 212 | IL6 IFNB2 | 335, 543, |
| | | | stimulatory factor 2) (BSF-2) | | | | | 751, 959, |
| | | | (CTL differentiation factor) | | | | | 1167, |
| | | | (CDF) (Hybridoma growth factor) | | | | | 1375, |
| | | | (Interferon beta-2) (IFN-beta-2) | | | | | 1583, |
| | | | | | | | | 1791, |
| | | | | | | | | 1999, |
| | | | | | | | | 2207, |
| | | | | | | | | 2415, |
| | | | | | | | | 2623, 2831 |
| 211 | O00602 | FCN1 | Ficolin-1 (Collagen/fibrinogen | 1-29 | 128 | 326 | FCN1 FCNM | 336, 544, |
| | | | domain-containing protein 1) | | | | | 752, 960, |
| | | | (Ficolin-A) (Ficolin-alpha) (M- | | | | | 1168, |
| | | | ficolin) | | | | | 1376, |
| | | | | | | | | 1584, |
| | | | | | | | | 1792, |
| | | | | | | | | 2000, |
| | | | | | | | | 2208, |
| | | | | | | | | 2416, |
| | | | | | | | | 2624, 2832 |
| 212 | Q9Y6Q6 | TNR11 | Tumor necrosis factor receptor | 1-29 | 129 | 616 | TNFRSF11A | 337, 545, |
| | | | superfamily member 11A | | | | RANK | 753, 961, |
| | | | (Osteoclast differentiation factor | | | | | 1169, |
| | | | receptor) (ODFR) (Receptor | | | | | 1377, |
| | | | activator of NF-KB) (CD antigen | | | | | 1585, |
| | | | CD265) | | | | | 1793, |
| | | | | | | | | 2001, |
| | | | | | | | | 2209, |
| | | | | | | | | 2417, |
| | | | | | | | | 2625, 2833 |
| 213 | Q9ULI3 | HEG1 | Protein HEG homolog 1 | 1-29 | 130 | 1381 | HEG1 KIAA1237 | 338, 546, |
| | | | | | | | | 754, 962, |
| | | | | | | | | 1170, |
| | | | | | | | | 1378, |
| | | | | | | | | 1586, |
| | | | | | | | | 1794, |
| | | | | | | | | 2002, |
| | | | | | | | | 2210, |
| | | | | | | | | 2418, |
| | | | | | | | | 2626, 2834 |
| 214 | Q8NBP7 | PCSK9 | Proprotein convertase | 1-30 | 131 | 692 | PCSK9 NARC1 | 339, 547, |
| | | | subtilisin/kexin type 9 (EC | | | | PSEC0052 | 755, 963, |
| | | | 3.4.21.-) (Neural apoptosis- | | | | | 1171, |
| | | | regulated convertase 1) (NARC- | | | | | 1379, |
| | | | 1) (Proprotein convertase 9) | | | | | 1587, |
| | | | (PC9) (Subtilisin/kexin-like | | | | | 1795, |
| | | | protease PC9) | | | | | 2003, |
| | | | | | | | | 2211, |
| | | | | | | | | 2419, |
| | | | | | | | | 2627, 2835 |
| 215 | P02675 | FIBB | Fibrinogen beta chain [Cleaved | 1-30 | 132 | 491 | FGB | 340, 548, |
| | | | into: Fibrinopeptide B; | | | | | 756, 964, |
| | | | Fibrinogen beta chain] | | | | | 1172, |
| | | | | | | | | 1380, |
| | | | | | | | | 1588, |
| | | | | | | | | 1796, |
| | | | | | | | | 2004, |
| | | | | | | | | 2212, |
| | | | | | | | | 2420, |
| | | | | | | | | 2628, 2836 |
| 216 | P06756 | ITAV | Integrin alpha-V (Vitronectin | 1-30 | 133 | 1048 | ITGAV MSK8 | 341, 549, |
| | | | receptor subunit alpha) (CD | | | | VNRA | 757, 965, |
| | | | antigen CD51) [Cleaved into: | | | | | 1173, |
| | | | Integrin alpha-V heavy chain; | | | | | 1381, |
| | | | Integrin alpha-V light chain] | | | | | 1589, |
| | | | | | | | | 1797, |
| | | | | | | | | 2005, |
| | | | | | | | | 2213, |
| | | | | | | | | 2421, |
| | | | | | | | | 2629, 2837 |
| 217 | O60609 | GFRA3 | GDNF family receptor alpha-3 | 1-31 | 134 | 400 | GFRA3 | 342, 550, |
| | | | (GDNF receptor alpha-3) | | | | UNQ339/PRO538/ | 758,966, |
| | | | (GDNFR-alpha-3) (GFR-alpha- | | | | PRO3664 | 1174, |
| | | | 3) | | | | | 1382, |
| | | | | | | | | 1590, |
| | | | | | | | | 1798, |
| | | | | | | | | 2006, |
| | | | | | | | | 2214, |
| | | | | | | | | 2422, |
| | | | | | | | | 2630, 2838 |
| 218 | P50895 | BCAM | Basal cell adhesion molecule | 1-31 | 135 | 628 | BCAM LU MSK19 | 343, 551, |
| | | | (Auberger B antigen) (B-CAM | | | | | 759, 967, |
| | | | cell surface glycoprotein) | | | | | 1175, |
| | | | (F8/G253 antigen) (Lutheran | | | | | 1383, |
| | | | antigen) (Lutheran blood group | | | | | 1591, |
| | | | glycoprotein) (CD antigen | | | | | 1799, |
| | | | CD239) | | | | | 2007, |
| | | | | | | | | 2215, |
| | | | | | | | | 2423, |
| | | | | | | | | 2631, 2839 |
| 219 | P28906 | CD34 | Hematopoietic progenitor cell | 1-31 | 136 | 385 | CD34 | 344, 552, |
| | | | antigen CD34 (CD antigen | | | | | 760, 968, |
| | | | CD34) | | | | | 1176, |
| | | | | | | | | 1384, |
| | | | | | | | | 1592, |
| | | | | | | | | 1800, |
| | | | | | | | | 2008, |
| | | | | | | | | 2216, |
| | | | | | | | | 2424, |
| | | | | | | | | 2632, 2840 |
| 220 | P08514 | ITA2B | Integrin alpha-IIb (GPalpha IIb) | 1-31 | 137 | 1039 | ITGA2B GP2B | 345, 553, |
| | | | (GPIlb) (Platelet membrane | | | | ITGAB | 761, 969, |
| | | | glycoprotein IIb) (CD antigen | | | | | 1177, |
| | | | CD41) [Cleaved into: Integrin | | | | | 1385, |
| | | | alpha-IIb heavy chain; Integrin | | | | | 1593, |
| | | | alpha-IIb light chain, form 1; | | | | | 1801, |
| | | | Integrin alpha-IIb light chain, | | | | | 2009, |
| | | | form 2] | | | | | 2217, |
| | | | | | | | | 2425, |
| | | | | | | | | 2633, 2841 |
| 221 | P00742 | FA10 | Coagulation factor X (EC | 1-31 | 138 | 488 | F10 | 346, 554, |
| | | | 3.4.21.6) (Stuart factor) (Stuart- | | | | | 762, 970, |
| | | | Prower factor) [Cleaved into: | | | | | 1178, |
| | | | Factor X light chain; Factor X | | | | | 1386, |
| | | | heavy chain; Activated factor Xa | | | | | 1594, |
| | | | heavy chain] | | | | | 1802, |
| | | | | | | | | 2010, |
| | | | | | | | | 2218, |
| | | | | | | | | 2426, |
| | | | | | | | | 2634, 2842 |
| 222 | P26006 | ITA3 | Integrin alpha-3 (CD49 antigen- | 1-32 | 139 | 1051 | ITGA3 MSK18 | 347, 555, |
| | | | like family member C) (FRP-2) | | | | | 763, 971, |
| | | | (Galactoprotein B3) (GAPB3) | | | | | 1179, |
| | | | (VLA-3 subunit alpha) (CD | | | | | 1387, |
| | | | antigen CD49c) [Cleaved into: | | | | | 1595, |
| | | | Integrin alpha-3 heavy chain; | | | | | 1803, |
| | | | Integrin alpha-3 light chain] | | | | | 2011, |
| | | | | | | | | 2219, |
| | | | | | | | | 2427, |
| | | | | | | | | 2635, 2843 |
| 223 | P13726 | TF | Tissue factor (TF) (Coagulation | 1-32 | 140 | 295 | F3 | 348, 556, |
| | | | factor III) (Thromboplastin) (CD | | | | | 764, 972, |
| | | | antigen CD142) | | | | | 1180, |
| | | | | | | | | 1388, |
| | | | | | | | | 1596, |
| | | | | | | | | 1804, |
| | | | | | | | | 2012, |
| | | | | | | | | 2220, |
| | | | | | | | | 2428, |
| | | | | | | | | 2636, 2844 |
| 224 | P11912 | CD79A | B-cell antigen receptor complex- | 1-32 | 141 | 226 | CD79A IGA MB1 | 349, 557, |
| | | | associated protein alpha chain | | | | | 765, 973, |
| | | | (Ig-alpha) (MB-1 membrane | | | | | 1181, |
| | | | glycoprotein) (Membrane-bound | | | | | 1389, |
| | | | immunoglobulin-associated | | | | | 1597, |
| | | | protein) (Surface IgM-associated | | | | | 1805, |
| | | | protein) (CD antigen CD79a) | | | | | 2013, |
| | | | | | | | | 2221, |
| | | | | | | | | 2429, |
| | | | | | | | | 2637, 2845 |
| 225 | Q9H6X2 | ANTR1 | Anthrax toxin receptor 1 (Tumor | 1-32 | 142 | 564 | ANTXR1 ATR | 350, 558, |
| | | | endothelial marker 8) | | | | TEM8 | 766, 974, |
| | | | | | | | | 1182, |
| | | | | | | | | 1390, |
| | | | | | | | | 1598, |
| | | | | | | | | 1806, |
| | | | | | | | | 2014, |
| | | | | | | | | 2222, |
| | | | | | | | | 2430, |
| | | | | | | | | 2638, 2846 |
| 226 | Q8IWK6 | AGRA3 | Adhesion G protein-coupled | 1-33 | 143 | 1321 | ADGRA3 GPR125 | 351, 559, |
| | | | receptor A3 (G-protein coupled | | | | UNQ556/PRO1113 | 767, 975, |
| | | | receptor 125) | | | | | 1183, |
| | | | | | | | | 1391, |
| | | | | | | | | 1599, |
| | | | | | | | | 1807, |
| | | | | | | | | 2015, |
| | | | | | | | | 2223, |
| | | | | | | | | 2431, |
| | | | | | | | | 2639, 2847 |
| 227 | P58335 | ANTR2 | Anthrax toxin receptor 2 | 1-33 | 144 | 489 | ANTXR2 CMG2 | 352, 560, |
| | | | (Capillary morphogenesis gene | | | | | 768, 976, |
| | | | 2 protein) (CMG-2) | | | | | 1184, |
| | | | | | | | | 1392, |
| | | | | | | | | 1600, |
| | | | | | | | | 1808, |
| | | | | | | | | 2016, |
| | | | | | | | | 2224, |
| | | | | | | | | 2432, |
| | | | | | | | | 2640, 2848 |
| 228 | P06731 | CEAM5 | Carcinoembryonic antigen- | 1-34 | 145 | 702 | CEACAM5 CEA | 353, 561, |
| | | | related cell adhesion molecule 5 | | | | | 769, 977, |
| | | | (Carcinoembryonic antigen) | | | | | 1185, |
| | | | (CEA) (Meconium antigen 100) | | | | | 1393, |
| | | | (CD antigen CD66e) | | | | | 1601, |
| | | | | | | | | 1809, |
| | | | | | | | | 2017, |
| | | | | | | | | 2225, |
| | | | | | | | | 2433, |
| | | | | | | | | 2641, 2849 |
| 229 | P33681 | CD80 | T-lymphocyte activation antigen | 1-34 | 146 | 288 | CD80 CD28LG | 354, 562, |
| | | | CD80 (Activation B7-1 antigen) | | | | CD28LG1 LAB7 | 770, 978, |
| | | | (BB1) (CTLA-4 counter-receptor | | | | | 1186, |
| | | | B7.1) (B7) (CD antigen CD80) | | | | | 1394, |
| | | | | | | | | 1602, |
| | | | | | | | | 1810, |
| | | | | | | | | 2018, |
| | | | | | | | | 2226, |
| | | | | | | | | 2434, |
| | | | | | | | | 2642, 2850 |
| 230 | P38567 | HYALP | Hyaluronidase PH-20 (Hyal- | 1-35 | 147 | 509 | SPAM1 HYAL3 | 355, 563, |
| | | | PH20) (EC 3.2.1.35) | | | | PH20 | 771, 979, |
| | | | (Hyaluronoglucosaminidase PH- | | | | | 1187, |
| | | | 20) (Sperm adhesion molecule | | | | | 1395, |
| | | | 1) (Sperm surface protein PH- | | | | | 1603, |
| | | | 20) | | | | | 1811, |
| | | | | | | | | 2019, |
| | | | | | | | | 2227, |
| | | | | | | | | 2435, |
| | | | | | | | | 2643, 2851 |
| 231 | P16410 | CTLA4 | Cytotoxic T-lymphocyte protein 4 | 1-35 | 148 | 223 | CTLA4 CD152 | 356, 564, |
| | | | (Cytotoxic T-lymphocyte- | | | | | 772, 980, |
| | | | associated antigen 4) (CTLA-4) | | | | | 1188, |
| | | | (CD antigen CD152) | | | | | 1396, |
| | | | | | | | | 1604, |
| | | | | | | | | 1812, |
| | | | | | | | | 2020, |
| | | | | | | | | 2228, |
| | | | | | | | | 2436, |
| | | | | | | | | 2644, 2852 |
| 232 | P15814 | IGLL1 | Immunoglobulin lambda-like | 1-37 | 149 | 213 | IGLL1 IGL1 | 357, 565, |
| | | | polypeptide 1 (CD179 antigen- | | | | | 773, 981, |
| | | | like family member B) (Ig | | | | | 1189, |
| | | | lambda-5) (Immunoglobulin | | | | | 1397, |
| | | | omega polypeptide) | | | | | 1605, |
| | | | (Immunoglobulin-related protein | | | | | 1813, |
| | | | 14.1) (CD antigen CD179b) | | | | | 2021 |
| | | | | | | | | 2229, |
| | | | | | | | | 2437, |
| | | | | | | | | 2645, 2853 |
| 233 | Q92956 | TNR14 | Tumor necrosis factor receptor | 1-38 | 150 | 283 | TNFRSF14 HVEA | 358, 566, |
| | | | superfamily member 14 (Herpes | | | | HVEM | 774, 982, |
| | | | virus entry mediator A) | | | | UNQ329/PRO509 | 1190, |
| | | | (Herpesvirus entry mediator A) | | | | | 1398, |
| | | | (HveA) (Tumor necrosis factor | | | | | 1606, |
| | | | receptor-like 2) (TR2) (CD | | | | | 1814, |
| | | | antigen CD270) | | | | | 2022, |
| | | | | | | | | 2230, |
| | | | | | | | | 2438, |
| | | | | | | | | 2646, 2854 |
| 234 | Q86VB7 | C163A | Scavenger receptor cysteine- | 1-41 | 151 | 1156 | CD163 M130 | 359, 567, |
| | | | rich type 1 protein M130 | | | | | 775, 983, |
| | | | (Hemoglobin scavenger | | | | | 1191, |
| | | | receptor) (CD antigen CD163) | | | | | 1399, |
| | | | [Cleaved into: Soluble CD163 | | | | | 1607, |
| | | | (sCD163)] | | | | | 1815 |
| | | | | | | | | 2023, |
| | | | | | | | | 2231, |
| | | | | | | | | 2439, |
| | | | | | | | | 2647, 2855 |
| 235 | P08648 | ITA5 | Integrin alpha-5 (CD49 antigen- | 1-41 | 152 | 1049 | ITGA5 FNRA | 360, 568, |
| | | | like family member E) | | | | | 776, 984, |
| | | | (Fibronectin receptor subunit | | | | | 1192, |
| | | | alpha) (Integrin alpha-F) (VLA-5) | | | | | 1400, |
| | | | (CD antigen CD49e) [Cleaved | | | | | 1608, |
| | | | into: Integrin alpha-5 heavy | | | | | 1816, |
| | | | chain; Integrin alpha-5 light | | | | | 2024, |
| | | | chain] | | | | | 2232, |
| | | | | | | | | 2440, |
| | | | | | | | | 2648, 2856 |
| 236 | P16109 | LYAM3 | P-selectin (CD62 antigen-like | 1-41 | 153 | 830 | SELP GMRP | 361, 569, |
| | | | family member P) (Granule | | | | GRMP | 777, 985, |
| | | | membrane protein 140) (GMP- | | | | | 1193, |
| | | | 140) (Leukocyte-endothelial cell | | | | | 1401, |
| | | | adhesion molecule 3) (LECAM3) | | | | | 1609, |
| | | | (Platelet activation dependent | | | | | 1817, |
| | | | granule-external membrane | | | | | 2025, |
| | | | protein) (PADGEM) (CD antigen | | | | | 2233, |
| | | | CD62P) | | | | | 2441, |
| | | | | | | | | 2649, 2857 |
| 237 | O75326 | SEM7A | Semaphorin-7A (CDw108) (JMH | 1-44 | 154 | 666 | SEMA7A CD108 | 362, 570, |
| | | | blood group antigen) (John- | | | | SEMAL | 778, 986, |
| | | | Milton-Hargen human blood | | | | | 1194, |
| | | | group Ag) (Semaphorin-K1) | | | | | 1402, |
| | | | (Sema K1) (Semaphorin-L) | | | | | 1610, |
| | | | (Sema L) (CD antigen CD108) | | | | | 1818, |
| | | | | | | | | 2026, |
| | | | | | | | | 2234, |
| | | | | | | | | 2442, |
| | | | | | | | | 2650, 2858 |
| 238 | Q8N2Q7 | NLGN1 | Neuroligin-1 | 1-45 | 155 | 840 | NLGN1 KIAA1070 | 363, 571, |
| | | | | | | | | 779, 987, |
| | | | | | | | | 1195, |
| | | | | | | | | 1403, |
| | | | | | | | | 1611, |
| | | | | | | | | 1819, |
| | | | | | | | | 2027, |
| | | | | | | | | 2235, |
| | | | | | | | | 2443, |
| | | | | | | | | 2651, 2859 |
| 239 | Q86UN3 | R4RL2 | Reticulon-4 receptor-like 2 | 1-46 | 156 | 420 | RTN4RL2 NGRH1 | 364, 572, |
| | | | (Nogo receptor-like 3) (Nogo-66 | | | | NGRL3 | 780, 988, |
| | | | receptor homolog 1) (Nogo-66 | | | | | 1196, |
| | | | receptor-related protein 2) | | | | | 1404, |
| | | | (NgR2) | | | | | 1612, |
| | | | | | | | | 1820, |
| | | | | | | | | 2028, |
| | | | | | | | | 2236, |
| | | | | | | | | 2444, |
| | | | | | | | | 2652, 2860 |

[0131] Accordingly, in preferred embodiments, the artificial nucleic acid molecule, preferably RNA, of the invention may encode in its at least one coding region an amino acid sequence comprising or consisting of an amino acid sequence as defined by any one of SEQ ID NOs: 1-156, 76948-76951, or a (preferably functional) fragment, variant or derivative of any one of said sequences, preferably comprising or consisting of an amino acid sequence having at least 5%, 10%, 20%, 30%, 40%, 50%, 60%, 70%, 80%, 85%, 86%, 87%, 88%, 89%, 90%, 91%, 92%, 93%, 94%, 95%, 96%, 97%, 98%, or 99%, preferably of at least 70%, more preferably of at least 80%, even more preferably at least 85%, even more preferably of at least 90% and most preferably of at least 95% or even 97%, sequence identity to any of these sequences.

[0132] Accordingly, in preferred embodiments, the artificial nucleic acid molecule, preferably RNA, of the invention may comprise, in its at least one coding region, a nucleic acid sequence comprising or consisting of a nucleic acid sequence as defined by any one of SEQ ID NOs: 209-364, 417-572, 625-780, 833-988, 1041-1196, 1249-1404, 1457-1612, 1665-1820, 1873-2028, 2081-2236, 2289-2444, 2497-2652, 2705-2860, 76952-77003 or a (preferably functional) fragment, variant or derivative of any one of said sequences, preferably comprising or consisting of a nucleic acid sequence having at least 5%, 10%, 20%, 30%, 40%, 50%, 60%, 70%, 80%, 85%, 86%, 87%, 88%, 89%, 90%, 91%, 92%, 93%, 94%, 95%, 96%, 97%, 98%, or 99%, preferably of at least 70%, more preferably of at least 80%, even more preferably at least 85%, even more preferably of at least 90% and most preferably of at least 95% or even 97%, sequence identity to any of these sequences.

### Linker (L)

[0133] According to preferred embodiments, the at least one coding region of the artificial nucleic acid molecule according to the invention further encodes e. at least one linker.

[0134] The term “linker” preferably refers to peptide linkers, i.e. typically short (i.e. comprising 1-150 amino acids, preferably 1-50 amino acids, more preferably 1 to 20 amino acids), linear amino acid sequences connecting or linking two polypeptide sequences. Linkers according to the invention may be derived from any protein of human, animal, plant, bacterial or viral origin. Linkers according to the invention may be naturally occurring or artificial (i.e. synthetic or non-naturally occurring) linkers. Preferably, the linker(s) is/are non-immunogenic, i.e. do not trigger an immune response. Linkers may be employed to connect or link at least two components of the antigenic fusion protein encoded by the artificial nucleic acid molecule, preferably RNA, of the invention. The coding region of the artificial nucleic acid molecule according to the invention may encode at least one linker, or a plurality of at least 2, 3, 4, 5, 6, 7, 8, 9 or 10 identical or different linkers, as described herein. In case a plurality of linkers is encoded by the artificial nucleic acid molecule it is particularly preferred that the linkers differ in their amino acid sequence and/or nucleic acid sequence encoding the respective linkers.

[0135] Peptide linkers of interest are generally known in the art and may be classified into three types: flexible linkers, rigid linkers, and cleavable linkers. Flexible linkers are usually applied when the joined polypeptide sequences require a certain degree of movement or interaction. They are generally rich in small, non-polar (e.g. Gly) or polar (e.g. Ser or Thr) amino acids to provide good flexibility and solubility, and support the mobility of the connected polypeptide sequences. Exemplary flexible linker arm sequences typically contain about 4 to about 10 glycine residues. The incorporation of Ser or Thr may maintain the stability of the linker in aqueous solutions by forming hydrogen bonds with water molecules, and therefore reduces unfavorable interactions between the linker and the protein moieties.

[0136] The most commonly used flexible linkers have sequences consisting primarily of stretches of Gly and Ser residues (“GS” linker). An example of the most widely used flexible linker has the sequence of (Gly-Gly-Gly-Gly-Ser)ₙ. By adjusting the copy number “n”, the length of this GS linker can be optimized to achieve appropriate separation of the protein domains, or to maintain necessary inter-domain interactions. Aside from GS linkers, many other flexible linkers are known in the art. These flexible linkers are also rich in small or polar amino acids such as Gly and Ser, but may contain additional amino acids such as Thr and Ala to maintain flexibility, as well as polar amino acids such as Lys and Glu to improve solubility. Rigid linkers may be employed to ensure separation of the joined polypeptide sequences and reduce interference or sterical hindrance. Cleavable linkers, on the other hand, can be introduced to release free functional domains in vivo. For instance, the cleavable linkers may be Arg-Arg or Lys-Lys that is sensitive to cleavage with an enzyme such as cathepsin or trypsin. Chen et al. Adv Drug Deliv Rev. 2013 Oct. 15; 65(10): 1357-1369 reviews the most commonly used peptide linkers and their applications, and is incorporated herein by reference in its entirety. Linkers of interest in the context of the present invention are inter alia disclosed in WO 2002/014478, WO 2001/008636, WO 2013/171505, WO 2008/017517 and WO 1997/047648, which are incorporated by reference in their entirety as well.

[0137] According to preferred embodiments, the artificial nucleic acid molecule, preferably RNA, of the invention encodes, in its at least one coding region, at least one linker, which is preferably a non-immunogenic linker, optionally comprising or consisting of an amino acid sequence selected from: SGGSGGSGG, RR, LL, GGGGSGGGGT, GGGGSGGGG, GPSL, GSTVAAPS, TVAAPSGS, GSTVAAPSGS, GGGGS, TVAAPS, GS, PAS, PAVPPP, TVSDVP, TGLDSP, HYGAEALERAG, AAY, AAAA, G, SG, GGS, GSG, SGG, GGG, GGGS, SGGG, GGGGSGS, GGGGSGGS, GGGGSGGGGS, GGGGSGGGGSGGGGS, AKTTPKLEEGEFSEAR, AKTTPKLEEGEFSEARV, AKTTPKLGG, SAKTTPKLGG, AKTTPKLEEGEFSEARV, SAKTTP, SAKTTPKLGG, RADAAP, RADAAPTVS, RADAAAAGGPGS, RADAAAAGGGGS, SAKTTP, SAKTTPKLGG, SAKTTPKLEEGEFSEARV, ADAAP, ADAAPTVSIFPP, TVAAP, TVAAPSVFIFPP, QPKAAP, QPKAAPSVTLFPP, AKTTPP, AKTTPPSVTPLAP, AKTTAP, AKTTAPSVYPLAP, ASTKGP, ASTKGPSVFPLAP, GENKVEYAPALMALS, GPAKELTPLKEAKVS and GHEAAAVMQVQYPAS.

[0138] According to preferred embodiments, the artificial nucleic acid molecule, preferably RNA, of the invention encodes, in its at least one coding region, at least one linker, which is preferably a non-immunogenic linker, optionally comprising or consisting of an amino acid sequence according to any one of SEQ ID NOs: 2937, 76400-76418, 77018-77058. Accordingly, the artificial nucleic acid molecule, preferably RNA, of the invention preferably comprises, in its at least one coding region, a nucleic acid sequence comprising or consisting of a nucleic acid sequence according to any one of SEQ ID NOs: 2936, 76494, 76569, 76475-76493, 76550-76568, 77059-77061 or a (preferably functional) fragment, variant or derivative thereof, preferably comprising or consisting of a nucleic acid sequence having at least 5%, 10%, 20%, 30%, 40%, 50%, 60%, 70%, 80%, 85%, 86%, 87%, 88%, 89%, 90%, 91%, 92%, 93%, 94%, 95%, 96%, 97%, 98%, or 99%, preferably of at least 70%, more preferably of at least 80%, even more preferably at least 85%, even more preferably of at least 90% and most preferably of at least 95% or even 97%, sequence identity to any one of said sequences.

### T Helper Epitopes (TH)

[0139] The at least one coding region of the artificial nucleic acid molecule, preferably RNA, of the invention may preferably further encode f. at least one T helper epitope.

[0140] According to preferred embodiments, the nucleic acid sequence encoding said at least one T helper epitope may be fused (in frame) to a nucleic acid sequence encoding the at least one IRSTₑₚₘ-derived amino acid sequence or the at least one antigenic peptide or protein. Therefore, expression of the artificial nucleic acid molecule, preferably RNA, of the invention may preferably result in a fusion protein comprising the at least one T helper epitope joined to (optionally via appropriate peptide linkers) said IRSTₑₚₘ-derived amino acid sequence and/or said antigenic protein or peptide. The expressed antigenic fusion protein is processed and its fragments (including the T helper epitopes) are loaded onto MHC molecules, where they are presented to and recognized by antigen-specific T cells.

[0141] The artificial nucleic acid molecule according to the invention may encode in its at least one coding region one or a plurality of two or more T helper epitopes. Generally, the present invention envisages the combination of any of the T helper epitopes described herein with any of the antigenic peptides or proteins, any of the IRSTₑₚₘ-derived additional amino acid sequences, any of the linkers, and any of the signal peptides, in any suitable order, in the antigenic fusion proteins encoded by the artificial nucleic acid molecules, preferably RNAs, of the invention.

[0142] The term “T helper epitope” refers to an antigenic determinant capable of binding to MHC molecules, preferably MHC Class II molecules, thereby being recognized by CD4⁺ T helper (Th) cells. Preferably, such T helper epitopes induce or enhance CD4⁺ Th cell activation, differentiation, and/or proliferation (commonly referred to as “CD4⁺ Th cell responses”). Activated CD4⁺ Th cells are may preferably (1) (directly or indirectly) induce or enhance cytotoxic T lymphocyte (CTL) differentiation, and/or proliferation (“CTL responses”), and/or (2) (directly or indirectly) induce or enhance antibody-producing plasma cell differentiation, and/or proliferation (“B cell responses”). In this respect, “directly or indirectly” means that activated CD4⁺ Th cells may induce or enhance the respective immune responses either via direct interaction with target cells or precursors thereof (e.g. B cells) or indirectly via interacting with other cells (e.g. dendritic cells) that in turn directly interact with target cells or precursors thereof (e.g. naïve CD8⁺ T cells).

[0143] Thus, T helper epitopes may advantageously be used to induce or enhance CD4⁺ Th cell responses, CTL responses (preferably including increased cell-mediated immunity and enhanced, e.g., anti-tumor or anti-viral immune responses) and/or to induce or enhance B cell responses (preferably including increased antibody production and enhanced, e.g., anti-bacterial immune responses) to the antigenic peptide or protein encoded by the artificial nucleic acid molecule, preferably RNA, of the invention.

[0144] T helper epitopes according to the invention may be derived from any protein of human, animal, plant, bacterial or viral origin. T helper epitopes according to the invention may be naturally occurring or artificial (i.e. synthetic or non-naturally occurring) epitopes. It may be preferred to employ generic T helper cell epitopes, i.e. promiscuous or permissive (generic) T helper epitopes, which are capable of interacting with a majority of MHC class II haplotypes, and thus preferably induce or enhance Th cell responses, CTL responses or B cell responses in the majority of the human or other mammalian populations.

[0145] In the context of the present invention, preferred T helper epitopes include the T helper epitopes disclosed in WO 2001/062284, WO 2010/023247, WO 2004/058297, WO 2004/000873 and WO 2006/113792.

[0146] Particularly preferred T helper cell epitopes in the context of the present invention include naturally occurring or artificial T helper epitopes derived from PADRE; Hepatitis C virus (Core); Hepatitis C virus (E1); Hepatitis C virus (E2); Hepatitis C virus (NS2); Hepatitis C virus (NS3); Hepatitis C virus (NS4); Hepatitis C virus (NS4a); Hepatitis C virus (NS4b); Hepatitis C virus (NS5a); Hepatitis C virus (NS5b); Influenza A; Measles virus (F protein); Canine distemper virus (Fusion protein); Mucin-1; foot-and-mouth disease virus (VP3); foot-and-mouth disease virus; Clostridium tetani); Human immunodeficiency virus 1 (gp120 protein); Human immunodeficiency virus 1 (gag protein); Human immunodeficiency virus 1 (envelope glycoprotein); Tetanus Toxid; Human papilloma virus 16 (E17); Diphtheria toxoid; P. falciparum (CS) or a functional fragment, variant or derivative thereof.

[0147] “PADRE” (pan DR epitope peptides”) as described in WO 95/07707 and in Alexander J et al., 1994, Immunity 1:751-761, with or without carrying D-amino acids in the C- and N-termini, are preferred T helper epitopes in the context of the present invention.

[0148] According to preferred embodiments, the artificial nucleic acid molecule, preferably RNA, of the invention encodes, in its at least one coding region, at least one T helper epitope comprising or consisting of an amino acid sequence according to any one of SEQ ID NOs: 3083-3294, or a (preferably functional) fragment, variant or derivative of any one of said sequences, preferably comprising or consisting of an amino acid sequence having at least 5%, 10%, 20%, 30%, 40%, 50%, 60%, 70%, 80%, 85%, 86%, 87%, 88%, 89%, 90%, 91%, 92%, 93%, 94%, 95%, 96%, 97%, 98%, or 99%, preferably of at least 70%, more preferably of at least 80%, even more preferably at least 85%, even more preferably of at least 90% and most preferably of at least 95% or even 97%, sequence identity to any one of said sequences.

[0149] Accordingly, the artificial nucleic acid molecule, preferably RNA, of the invention preferably comprises, in its at least one coding region, a nucleic acid sequence comprising or consisting of a nucleic acid sequence according to any one of SEQ ID Nos: 3295-3506, 3507-3718, or a (preferably functional) fragment, variant or derivative of any one of said sequences, preferably comprising or consisting of a nucleic acid sequence having at least 5%, 10%, 20%, 30%, 40%, 50%, 60%, 70%, 80%, 85%, 86%, 87%, 88%, 89%, 90%, 91%, 92%, 93%, 94%, 95%, 96%, 97%, 98%, or 99%, preferably of at least 70%, more preferably of at least 80%, even more preferably at least 85%, even more preferably of at least 90% and most preferably of at least 95% or even 97%, sequence identity to any one of said sequences.

### Antigenic Fusion Proteins

[0150] As indicated above, the artificial nucleic acid molecules, preferably RNAs, of the invention may encode, in their at least one encoding region, at least one antigenic fusion protein as defined herein. Said antigenic fusion protein may preferably be expressed (in particular translated) in the cytoplasm of recipient host cells, processed into fragments and loaded onto MHC class I and preferably also MHC class II molecules. The different components of the antigenic fusion protein each preferably fulfil a different functional role. Presentation of antigens/epitopes typically requires degradation of the antigenic fusion protein in the endosomal lysosomal compartment. The IRSTₑₚₘ-derived additional amino acid sequence (in particular TM and optionally CD domains) preferably direct trafficking of the fused antigenic peptides or proteins to the plasma membrane, and via recycling to desired MHC processing compartments, where they are degraded and loaded onto MHC class I and in particular also MHC class II molecules for presentation to antigen-specific T cells. T helper epitopes preferably enhance the T helper cell response. Without wishing to be bound by specific theory, it is thought that CD4⁺ T cell help is critical for effective induction of CTL responses and anti-tumor immunity. Preferably, the unique design of the inventive artificial nucleic acid molecules, preferably RNAs, provide for simultaneous MHC I and MHC II presentation, and achieves both CD4⁺ and CD8⁺ T cell responses, resulting in increased overall immune responses and an enhanced therapeutic/prophylactic effect.

[0151] According to preferred embodiments, the artificial nucleic acid molecule, preferably RNA, of the invention comprises at least one coding region of the following Formula (I), preferably in 5′→3′ direction:

[chemical structure]

[0152] wherein
[0153] “SIG” encodes a signal peptide, preferably as defined elsewhere herein,
[0154] “L” encodes a linker sequence, preferably as defined elsewhere herein,
[0155] “AN” encodes each independently an antigenic peptide or protein, preferably as defined elsewhere herein,
[0156] “TH” encodes a T helper epitope, preferably as defined elsewhere herein,
[0157] “TMD/TMCD” encodes an amino acid sequence derived from an immune response signal transduction protein located in the external plasma membrane, preferably a transmembrane domain, preferably as defined elsewhere herein, and optionally a cytoplasmic domain,
[0158] b, d, m, n, o is each independently an integer selected from 0, 1, 2, 3, 4, 5, 6, 7, 8, 9, and 10,
[0159] a, c, e, p is each independently an integer selected from 1, 2, 3, 4, 5, 6, 7, 8, 9 and 10.

[0160] Preferably, a, e, and p may be 1—i.e., the artificial nucleic acid molecule, preferably RNA, of the invention encodes in its at least one coding region a signal peptide, as defined elsewhere herein, connected (optionally via a suitable peptide linker as defined elsewhere) herein to an antigenic peptide or protein as defined elsewhere herein, which is (optionally via a suitable peptide linker as defined elsewhere herein) connected to an IRSTₑₚₘ-derived transmembrane domain (optionally connected to cytoplasmic domain) as defined elsewhere herein. More preferably, a b, c, d, e, m, n, o and p may each be 1, i.e. the coding region of the artificial nucleic acid molecule, preferably RNA, of the invention encodes one of each of the components described herein. The individual components of the antigenic fusion protein (SIG, L, AN, TH, TMD/TMCD) may be arranged (and thus encoded) in any suitable order.

### RNAs

[0161] The inventive artificial nucleic acid molecule may preferably be an RNA. It will be understood that the term “RNA” refers to ribonucleic acid molecules characterized by the specific succession of their nucleotides joined to form said molecules (i.e. their RNA sequence). The term “RNA” may thus be used to refer to RNA molecules or RNA sequences as will be readily understood by the skilled person in the respective context. For instance, the term “RNA” as used in the context of the invention preferably refers to an RNA molecule (said molecule being characterized, inter alia, by its particular RNA sequence). The term “RNA” in the context of sequence modifications will be understood to relate to modified RNA sequences, but typically also includes the resulting RNA molecules (which are modified with regard to their RNA sequence).

[0162] In preferred embodiments, the RNA may be an mRNA, a viral RNA or a replicon RNA, preferably an mRNA.

[0163] In embodiments, the artificial RNA is a circular RNA. As used herein, “circular RNA” or “circRNA” has to be understood as a circular polynucleotide that can encode at least one antigenic peptide or protein as defined herein. E.g., said circular RNA may comprise at least one coding sequence encoding at least one antigenic peptide or protein derived from LASV or a fragment or variant thereof. Further, said circRNA may comprise at least one 3′-UTR and/or 5′-UTR as defined herein. The production of circRNAs can be performed using various methods provided in the art. E.g., U.S. Pat. No. 6,210,931 teaches a method of synthesizing circRNAs by inserting DNA fragments into a plasmid containing sequences having the capability of spontaneous cleavage and self-circularization. U.S. Pat. No. 5,773,244 teaches producing circRNAs by making a DNA construct encoding an RNA cyclase ribozyme, expressing the DNA construct as RNA, and then allowing the RNA to self-splice, which produces a circRNA free from intron in vitro. WO1992/001813 teaches a process of making single strand circular nucleic acids by synthesizing a linear polynucleotide, combining the linear nucleotide with a complementary linking oligonucleotide under hybridization conditions, and ligating the linear polynucleotide. The person skilled in the art may also use methods provided in WO2015/034925 or WO2016/011222 to produce circular RNA. Accordingly, methods for producing circular RNA as provided in U.S. Pat. Nos. 6,210,931, 5,773,244, WO1992/001813, WO2015/034925 and WO2016/011222 may suitably be used to generate the artificial RNA, i.e. the circRNA of the invention.

[0164] In embodiments, the artificial RNA is a replicon RNA. The term “replicon RNA” will be recognized and understood by the person of ordinary skill in the art, and is e.g. intended to be an optimized self-replicating artificial RNA. Such constructs may include replication elements (replicase) derived from e.g. alphaviruses and the substitution of the structural virus proteins with the artificial nucleic acid of interest. Alternatively, the replicase may be provided on an independent nucleic acid construct comprising a replicase sequence derived from e.g. Semliki forest virus (SFV), Sindbis virus (SIN), Venezuelan equine Encephalitis virus (VEE), Ross-River virus (RRV), or other viruses belonging to the alphavirus family. Downstream of the replicase may be a sub-genomic promoter that controls replication of the artificial RNA of the first aspect.

[0165] In particularly preferred embodiments the artificial nucleic acid of the present invention is an RNA, more preferably an mRNA.

[0166] The term “mRNA” (abbreviation of “messenger RNA”) will be recognized and understood by the person of ordinary skill in the art, and is e.g. intended to be a ribonucleic acid molecule, i.e. a polymer consisting of nucleotides. These nucleotides are usually connected to each other along a so-called backbone. The backbone is formed by phosphodiester bonds between the sugar, i.e. ribose, of a first and a phosphate moiety of a second, adjacent monomer. The specific succession of the monomers is called the RNA-sequence. The mRNA usually provides the coding sequence that is translated into an amino-acid sequence of a particular peptide or protein. Typically, an mRNA comprises a 5′ cap structure, UTR elements, and a 3′ poly(A) sequence.

[0167] The artificial RNA, preferably the mRNA of the invention may be prepared using any method known in the art, including chemical synthesis such as e.g. solid phase RNA synthesis, as well as in vitro methods, such as RNA in vitro transcription reactions.

[0168] In a preferred embodiment, the artificial RNA, preferably the mRNA is obtained by RNA in vitro transcription.

[0169] Accordingly, the RNA of the invention is an in vitro transcribed RNA, preferably an in vitro-transcribed mRNA.

### Mono-, Bi- or Multicistronic RNAs

[0170] The artificial nucleic acid molecule, preferably RNA, may be mono-, bi-, or multicistronic, preferably as defined herein. “Bi- or multicistronic” RNAs typically comprise two (bicistronic) or more (multicistronic) open reading frames (ORF). An “open reading frame” is a sequence of codons that is translatable into a peptide or protein.

[0171] The ORFs in a bi- or multicistronic artificial nucleic acid molecule, may be identical or different from each other. “Identical” ORFs share a % sequence identity of 100%, and encode identical antigenic fusion proteins, whereas “different” ORFs share a % sequence identity of less than 100%, such as 99% or less, 90% or less, 80% or less, 70% or less, 60% or less, 50% or less, 40% or less, 30% or less, 20% or less, 10% or less, 5% or less, or 2% or less, and encode identical (due to the degeneracy of the genetic code) or different antigenic fusion proteins.

[0172] It may be preferred that “bi- or multicistronic” artificial nucleic acid molecules, preferably RNAs, encode different antigenic fusion proteins. For example, bi- or even multicistronic artificial nucleic acid molecules, preferably RNAs, may each encode, for example, at least two, three, four, five, six or more (preferably different) antigenic fusion proteins as defined herein.

[0173] The ORFs in a bi- or multicistronic artificial nucleic acid molecule, preferably RNA, encoding two or more (identical or different) antigenic fusion proteins as defined herein, may be separated by at least one IRES (internal ribosomal entry site) sequence. The term “IRES” (internal ribosomal entry site) refers to an RNA sequence that allows for translation initiation. An IRES can function as a sole ribosome binding site, but it can also serve to provide a bi- or even multicistronic artificial nucleic acid molecule, preferably RNA as defined above, which encodes several (identical or different) antigenic fusion proteins, which are to be translated by the ribosomes independently of one another.

[0174] Examples of IRES sequences, which can be used according to the invention, are those derived from picornaviruses (e.g. FMDV), pestiviruses (CFFV), polioviruses (PV), encephalomyocarditis viruses (ECMV), foot and mouth disease viruses (FMDV), hepatitis C viruses (HCV), classical swine fever viruses (CSFV), mouse leukoma virus (MLV), simian immunodeficiency viruses (SIV) or cricket paralysis viruses (CrPV).

[0175] Preferably, the artificial nucleic acid molecule, preferably RNA, comprises a length of about 50 to about 20000, or 100 to about 20000 nucleotides, preferably of about 250 to about 20000 nucleotides, more preferably of about 500 to about 10000, even more preferably of about 500 to about 5000.

[0176] The artificial nucleic acid molecule, preferably RNA, of the invention may further be single stranded or double stranded. When provided as a double stranded RNA, the artificial nucleic acid molecule preferably comprises a sense and a corresponding antisense strand.

### Nucleic Acid Modifications

[0177] Artificial nucleic acid molecules, preferably RNAs, of the invention, may be provided in the form of modified nucleic acids. Suitable nucleic acid modifications envisaged in the context of the present invention are described below.

[0178] Preferably, the at least one artificial nucleic acid molecule, preferably RNA (sequence) of the invention, is modified as defined herein. A “modification” as defined herein preferably leads to a stabilization of said artificial nucleic acid molecule, preferably RNA. More preferably, the invention thus provides a “stabilized” artificial nucleic acid molecule, preferably RNA.

[0179] Preferably, the artificial nucleic acid molecule, preferably RNA, of the invention may thus be provided as a “stabilized” artificial nucleic acid molecule, preferably RNA, in particular mRNA, i.e. which is essentially resistant to in vivo degradation (e.g. by an exo- or endo-nuclease).

[0180] Such stabilization can be achieved, for example, by a modified phosphate backbone of the artificial nucleic acid molecule, preferably RNA. A backbone modification in connection with the present invention is a modification in which phosphates of the backbone of the nucleotides contained in said artificial nucleic acid molecule, preferably RNA, are chemically modified. Nucleotides that may be preferably used in this connection contain e.g. a phosphorothioate-modified phosphate backbone, preferably at least one of the phosphate oxygens contained in the phosphate backbone being replaced by a sulfur atom. Stabilized artificial nucleic acid molecule, preferably RNAs, may further include, for example: non-ionic phosphate analogues, such as, for example, alkyl and aryl phosphonates, in which the charged phosphonate oxygen is replaced by an alkyl or aryl group, or phosphodiesters and alkylphosphotriesters, in which the charged oxygen residue is present in alkylated form. Such backbone modifications typically include, without implying any limitation, modifications from the group consisting of methylphosphonates, phosphoramidates and phosphorothioates (e.g. cytidine-5′-O-(1-thiophosphate)).

[0181] In the following, specific modifications are described, which are preferably capable of “stabilizing” the artificial nucleic acid molecule, preferably RNA, of the invention.

### Chemical Modifications

[0182] The term “modification” as used herein may refer to chemical modifications comprising backbone modifications as well as sugar modifications or base modifications.

[0183] In this context, a “modified” artificial nucleic acid molecule, preferably RNA, may contain nucleotide analogues/modifications (modified nucleotides or nucleosides), e.g. backbone modifications, sugar modifications or base modifications.

[0184] A backbone modification in connection with the present invention is a modification, in which phosphates of the backbone of the nucleotides contained in said artificial nucleic acid molecule, preferably RNA herein are chemically modified. A sugar modification in connection with the present invention is a chemical modification of the sugar of the nucleotides of the artificial nucleic acid molecule, preferably RNA. Furthermore, a base modification in connection with the present invention is a chemical modification of the base moiety of the nucleotides of the artificial nucleic acid molecule, preferably RNA. In this context, nucleotide analogues or modifications are preferably selected from nucleotide analogues, which are applicable for transcription and/or translation.

### Sugar Modifications:

[0185] (Chemically) modified nucleic acids, in particular artificial nucleic acid molecules according to the invention, may comprise sugar modifications, i.e., nucleosides/nucleotides that are modified in their sugar moiety.

[0186] For example, the 2′ hydroxyl group (OH) can be modified or replaced with a number of different “oxy” or “deoxy” substituents. Examples of “oxy”-2′ hydroxyl group modifications include, but are not limited to, alkoxy or aryloxy (—OR, e.g., R═H, alkyl, cycloalkyl, aryl, aralkyl, heteroaryl or sugar); polyethyleneglycols (PEG), —O(CH₂CH₂O)ₙCH₂CH₂OR; “locked” nucleic acids (LNA) in which the 2′ hydroxyl is connected, e.g., by a methylene bridge, to the 4′ carbon of the same ribose sugar; and amino groups (—O-amino, wherein the amino group, e.g., NRR, can be alkylamino, dialkylamino, heterocyclyl, arylamino, diarylamino, heteroarylamino, or diheteroaryl amino, ethylene diamine, polyamino) or aminoalkoxy.

[0187] “Deoxy” modifications include hydrogen, amino (e.g. NH₂; alkylamino, dialkylamino, heterocyclyl, arylamino, diaryl amino, heteroaryl amino, diheteroaryl amino, or amino acid); or the amino group can be attached to the sugar through a linker, wherein the linker comprises one or more of the atoms C, N, and O.

[0188] The sugar group can also contain one or more carbons that possess the opposite stereochemical configuration than that of the corresponding carbon in ribose. Thus, a modified artificial nucleic acid molecule, preferably RNA can include nucleotides containing, for instance, arabinose as the sugar.

### Backbone Modifications:

[0189] (Chemically) modified nucleic acids, in particular artificial nucleic acid molecules according to the invention, may comprise backbone modifications, i.e., nucleosides/nucleotides that are modified in their phosphate backbone.

[0190] The phosphate groups of the backbone can be modified by replacing one or more of the oxygen atoms with a different substituent. Further, the modified nucleosides and nucleotides can include the full replacement of an unmodified phosphate moiety with a modified phosphate as described herein.

[0191] Examples of modified phosphate groups include, but are not limited to, phosphorothioate, phosphoroselenates, borano phosphates, borano phosphate esters, hydrogen phosphonates, phosphoroamidates, alkyl or aryl phosphonates and phosphotriesters. Phosphorodithioates have both non-linking oxygens replaced by sulfur. The phosphate linker can also be modified by the replacement of a linking oxygen with nitrogen (bridged phosphoroamidates), sulfur (bridged phosphorothioates) and carbon (bridged methylene-phosphonates).

### Base Modifications:

[0192] (Chemically) modified nucleic acids, in particular artificial nucleic acid molecules according to the invention, may comprise (nucleo-) base modifications, i.e., nucleosides/nucleotides that are modified in their nucleobase moiety.

[0193] Examples of nucleobases found in RNA include, but are not limited to, adenine, guanine, cytosine and uracil. For example, the nucleosides and nucleotides described herein can be chemically modified on the major groove face. In some embodiments, the major groove chemical modifications can include an amino group, a thiol group, an alkyl group, or a halo group.

[0194] The artificial nucleic acid molecule, preferably RNA, of the invention may comprise modified nucleosides selected from 2-amino-6-chloropurineriboside-5′-triphosphate, 2-Aminopurine-riboside-5′-triphosphate; 2-aminoadenosine-5′-triphosphate, 2′-Amino-2′-deoxycytidine-triphosphate, 2-thiocytidine-5′-triphosphate, 2-thiouridine-5′-triphosphate, 2′-Fluorothymidine-5′-triphosphate, 2′-O-Methyl-inosine-5′-triphosphate 4-thiouridine-5′-triphosphate, 5-aminoallylcytidine-5′-triphosphate, 5-aminoallyluridine-5′-triphosphate, 5-bromocytidine-5′-triphosphate, 5-bromouridine-5′-triphosphate, 5-Bromo-2′-deoxycytidine-5′-triphosphate, 5-Bromo-2′-deoxyuridine-5′-triphosphate, 5-iodocytidine-5′-triphosphate, 5-Iodo-2′-deoxycytidine-5′-triphosphate, 5-iodouridine-5′-triphosphate, 5-Iodo-2′-deoxyuridine-5′-triphosphate, 5-methylcytidine-5′-triphosphate, 5-methyluridine-5′-triphosphate, 5-Propynyl-2′-deoxycytidine-5′-triphosphate, 5-Propynyl-2′-deoxyuridine-5′-triphosphate, 6-azacytidine-5′-triphosphate, 6-azauridine-5′-triphosphate, 6-chloropurineriboside-5′-triphosphate, 7-deazaadenosine-5′-triphosphate, 7-deazaguanosine-5′-triphosphate, 8-azaadenosine-5′-triphosphate, 8-azidoadenosine-5′-triphosphate, benzimidazole-riboside-5′-triphosphate, N1-methyladenosine-5′-triphosphate, N1-methylguanosine-5′-triphosphate, N6-methyladenosine-5′-triphosphate, O6-methylguanosine-5′-triphosphate, pseudouridine-5′-triphosphate, or puromycin-5′-triphosphate, xanthosine-5′-triphosphate. Particular preference is given to nucleotides for base modifications selected from the group of base-modified nucleotides consisting of 5-methylcytidine-5′-triphosphate, 7-deazaguanosine-5′-triphosphate, 5-bromocytidine-5′-triphosphate, and pseudouridine-5′-triphosphate, or combinations thereof.

[0195] The artificial nucleic acid molecule, preferably RNA, of the invention may comprise modified nucleosides selected from pyridin-4-one ribonucleoside, 5-aza-uridine, 2-thio-5-aza-uridine, 2-thiouridine, 4-thio-pseudouridine, 2-thio-pseudouridine, 5-hydroxyuridine, 3-methyluridine, 5-carboxymethyl-uridine, 1-carboxymethyl-pseudouridine, 5-propynyl-uridine, 1-propynyl-pseudouridine, 5-taurinomethyluridine, 1-taurinomethyl-pseudouridine, 5-taurinomethyl-2-thio-uridine, 1-taurinomethyl-4-thio-uridine, 5-methyl-uridine, 1-methyl-pseudouridine, 4-thio-1-methyl-pseudouridine, 2-thio-1-methyl-pseudouridine, 1-methyl-1-deaza-pseudouridine, 2-thio-1-methyl-1-deaza-pseudouridine, dihydrouridine, dihydropseudouridine, 2-thio-dihydrouridine, 2-thio-dihydropseudouridine, 2-methoxyuridine, 2-methoxy-4-thio-uridine, 4-methoxy-pseudouridine, and 4-methoxy-2-thio-pseudouridine, or combinations thereof.

[0196] The artificial nucleic acid molecule, preferably RNA, of the invention may comprise modified nucleosides selected from 5-aza-cytidine, pseudoisocytidine, 3-methyl-cytidine, N4-acetylcytidine, 5-formylcytidine, N4-methylcytidine, 5-hydroxymethylcytidine, 1-methyl-pseudoisocytidine, pyrrolo-cytidine, pyrrolo-pseudoisocytidine, 2-thio-cytidine, 2-thio-5-methyl-cytidine, 4-thio-pseudoisocytidine, 4-thio-1-methyl-pseudoisocytidine, 4-thio-1-methyl-1-deaza-pseudoisocytidine, 1-methyl-1-deaza-pseudoisocytidine, zebularine, 5-aza-zebularine, 5-methyl-zebularine, 5-aza-2-thio-zebularine, 2-thio-zebularine, 2-methoxy-cytidine, 2-methoxy-5-methyl-cytidine, 4-methoxy-pseudoisocytidine, and 4-methoxy-1-methyl-pseudoisocytidine, or combinations thereof.

[0197] The artificial nucleic acid molecule, preferably RNA, of the invention may comprise modified nucleosides selected from 2-aminopurine, 2, 6-diaminopurine, 7-deaza-adenine, 7-deaza-8-aza-adenine, 7-deaza-2-aminopurine, 7-deaza-8-aza-2-aminopurine, 7-deaza-2,6-diaminopurine, 7-deaza-8-aza-2,6-diaminopurine, 1-methyladenosine, N6-methyladenosine, N6-isopentenyladenosine, N6-(cis-hydroxyisopentenyl) adenosine, 2-methylthio-N6-(cis-hydroxyisopentenyl) adenosine, N6-glycinylcarbamoyladenosine, N6-threonylcarbamoyladenosine, 2-methylthio-N6-threonyl carbamoyladenosine, N6,N6-dimethyladenosine, 7-methyladenine, 2-methylthio-adenine, and 2-methoxy-adenine, or combinations thereof.

[0198] The artificial nucleic acid molecule, preferably RNA, of the invention may comprise modified nucleosides selected from inosine, 1-methyl-inosine, wyosine, wybutosine, 7-deaza-guanosine, 7-deaza-8-aza-guanosine, 6-thio-guanosine, 6-thio-7-deaza-guanosine, 6-thio-7-deaza-8-aza-guanosine, 7-methyl-guanosine, 6-thio-7-methyl-guanosine, 7-methylinosine, 6-methoxy-guanosine, 1-methylguanosine, N2-methylguanosine, N2,N2-dimethylguanosine, 8-oxo-guanosine, 7-methyl-8-oxo-guanosine, 1-methyl-6-thio-guanosine, N2-methyl-6-thio-guanosine, and N2,N2-dimethyl-6-thio-guanosine, or combinations thereof.

[0199] The artificial nucleic acid molecule, preferably RNA, of the invention may comprise nucleotides modified on the major groove face, e.g. by replacing hydrogen on C-5 of uracil with a methyl group or a halo group, optionally selected from 5′-O-(1-thiophosphate)-adenosine, 5′-O-(1-thiophosphate)-cytidine, 5′-O-(1-thiophosphate)-guanosine, 5′-O-(1-thiophosphate)-uridine or 5′-O-(1-thiophosphate)-pseudouridine.

[0200] The artificial nucleic acid molecule, preferably RNA, of the invention may comprise nucleoside modifications selected from 6-aza-cytidine, 2-thio-cytidine, α-thio-cytidine, Pseudo-iso-cytidine, 5-aminoallyl-uridine, 5-iodo-uridine, N1-methyl-pseudouridine, 5,6-dihydrouridine, α-thio-uridine, 4-thio-uridine, 6-aza-uridine, 5-hydroxy-uridine, deoxy-thymidine, 5-methyl-uridine, Pyrrolo-cytidine, inosine, α-thio-guanosine, 6-methyl-guanosine, 5-methyl-cytidine, 8-oxo-guanosine, 7-deaza-guanosine, N1-methyl-adenosine, 2-amino-6-Chloro-purine, N6-methyl-2-amino-purine, Pseudo-iso-cytidine, 6-Chloro-purine, N6-methyl-adenosine, α-thio-adenosine, 8-azido-adenosine, 7-deaza-adenosine.

[0201] Alternatively, a “modified” artificial nucleic acid molecule, preferably RNA, may comprise none of the chemical modifications (or any other of chemical modification) described herein. Such modified artificial nucleic acids, may nevertheless comprise a lipid modification or a sequence modification as described below.

### Lipid Modifications

[0202] Artificial nucleic acid molecules, preferably RNAs, of the invention may preferably contain at least one lipid modification. Such a lipid-modified artificial nucleic acid molecule, preferably RNA of the invention typically comprises (i) an artificial nucleic acid molecule, preferably RNA as defined herein, (ii) at least one linker covalently linked with said artificial nucleic acid molecule, preferably RNA, and (iii) at least one lipid covalently linked with the respective linker.

[0203] Alternatively, the lipid-modified artificial nucleic acid molecule, preferably RNA comprises at least one artificial nucleic acid molecule, preferably RNA and at least one (bifunctional) lipid covalently linked (without a linker) with said artificial nucleic acid molecule, preferably RNA.

[0204] Alternatively, the lipid-modified artificial nucleic acid molecule, preferably RNA, comprises (i) an artificial nucleic acid molecule, preferably RNA, (ii) at least one linker covalently linked with said artificial nucleic acid molecule, preferably RNA, and (iii) at least one lipid covalently linked with the respective linker, and also (iv) at least one (bifunctional) lipid covalently linked (without a linker) with said artificial nucleic acid molecule, preferably RNA.

[0205] In this context, it is particularly preferred that the lipid modification is present at the terminal ends of a linear artificial nucleic acid molecule, preferably RNA.

### Sequence Modifications

[0206] According to preferred embodiments, the artificial nucleic acid molecule, preferably RNA, of the invention may be “sequence-modified”, i.e. may comprise at least one sequence modification as described below. Without wishing to be bound by specific theory, such sequence modifications may increase stability and/or enhance expression of the inventive artificial nucleic acid molecules, preferably RNAs.

### G/C Content Modification

[0207] According to preferred embodiments, the artificial nucleic acid molecule, preferably RNA, more preferably mRNA, of the invention, may be modified, and thus stabilized, by modifying its guanosine/cytosine (G/C) content, preferably by modifying the G/C content of the at least one coding sequence. In other words, the artificial nucleic acid molecule, preferably RNA, of the invention and preferably its sequence may be G/C modified.

[0208] A “G/C-modified” nucleic acid (preferably RNA) sequence typically refers to a nucleic acid (preferably RNA) comprising a nucleic acid (preferably RNA) sequence that is based on a modified wild-type nucleic acid (preferably RNA) sequence and comprises an altered number of guanosine and/or cytosine nucleotides as compared to said wild-type nucleic acid (preferably RNA) sequence. Such an altered number of G/C nucleotides may be generated by substituting codons containing adenosine or thymidine nucleotides by “synonymous” codons containing guanosine or cytosine nucleotides. Accordingly, the codon substitutions preferably do not alter the encoded amino acid residues, but exclusively alter the G/C content of the nucleic acid (preferably RNA).

[0209] In preferred embodiments, the G/C content of the coding sequence of the artificial nucleic acid molecule, preferably RNA, of the invention is modified, particularly increased, compared to the G/C content of the coding sequence of the respective wild-type, i.e. unmodified nucleic acid. The amino acid sequence encoded by the inventive artificial nucleic acid molecule, preferably RNA is preferably not modified as compared to the amino acid sequence encoded by the respective wild-type nucleic acid, preferably RNA.

[0210] Such modification of the inventive artificial nucleic acid molecule, preferably RNA is based on the fact that the sequence of any RNA region to be translated is important for efficient translation of said RNA. Thus, the composition of the RNA and the sequence of various nucleotides are important. In particular, sequences having an increased G (guanosine)/C (cytosine) content are more stable than sequences having an increased A (adenosine)/U (uracil) content.

[0211] According to the invention, the codons of the inventive artificial nucleic acid molecule, preferably RNA, may therefore preferably be varied compared to the respective wild-type nucleic acid, preferably RNA, while retaining the translated amino acid sequence, such that they include an increased amount of G/C nucleotides.

[0212] In respect to the fact that several codons code for one and the same amino acid (so-called degeneration of the genetic code), the most favourable codons for the stability can be determined (so-called alternative codon usage). Depending on the amino acid to be encoded by the inventive artificial nucleic acid molecule, preferably RNA, there are various possibilities for modification its nucleic acid sequence, compared to its wild-type sequence. In the case of amino acids, which are encoded by codons, which contain exclusively G or C nucleotides, no modification of the codon is necessary. Thus, the codons for Pro (CCC or CCG), Arg (CGC or CGG), Ala (GCC or GCG) and Gly (GGC or GGG) require no modification, since no A or U is present. In contrast, codons which contain A and/or U nucleotides can be modified by substitution of other codons, which code for the same amino acids but contain no A and/or U. Examples of these are: the codons for Pro can be modified from CCU or CCA to CCC or CCG; the codons for Arg can be modified from CGU or CGA or AGA or AGG to CGC or CGG; the codons for Ala can be modified from GCU or GCA to GCC or GCG; the codons for Gly can be modified from GGU or GGA to GGC or GGG. In other cases, although A or U nucleotides cannot be eliminated from the codons, it is however possible to decrease the A and U content by using codons which contain a lower content of A and/or U nucleotides. Examples of these are: the codons for Phe can be modified from UUU to UUC; the codons for Leu can be modified from UUA, UUG, CUU or CUA to CUC or CUG; the codons for Ser can be modified from UCU or UCA or AGU to UCC, UCG or AGC; the codon for Tyr can be modified from UAU to UAC; the codon for Cys can be modified from UGU to UGC; the codon for His can be modified from CAU to CAC; the codon for Gln can be modified from CAA to CAG; the codons for Ile can be modified from AUU or AUA to AUC; the codons for Thr can be modified from ACU or ACA to ACC or ACG; the codon for Asn can be modified from AAU to AAC; the codon for Lys can be modified from AAA to AAG; the codons for Val can be modified from GUU or GUA to GUC or GUG; the codon for Asp can be modified from GAU to GAC; the codon for Glu can be modified from GAA to GAG; the stop codon UAA can be modified to UAG or UGA. In the case of the codons for Met (AUG) and Trp (UGG), on the other hand, there is no possibility of sequence modification. The substitutions listed above can be used either individually or in all possible combinations to increase the G/C content of the inventive artificial nucleic acid sequence, preferably RNA sequence (or any other nucleic acid sequence as defined herein) compared to its particular wild-type nucleic acid sequence (i.e. the original sequence). Thus, for example, all codons for Thr occurring in the wild-type sequence can be modified to ACC (or ACG). Preferably, however, for example, combinations of the above substitution possibilities are used:
[0213] substitution of all codons coding for Thr in the original sequence (wild-type RNA) to ACC (or ACG) and
[0214] substitution of all codons originally coding for Ser to UCC (or UCG or AGC); substitution of all codons coding for Ile in the original sequence to AUC and
[0215] substitution of all codons originally coding for Lys to AAG and
[0216] substitution of all codons originally coding for Tyr to UAC; substitution of all codons coding for Val in the original sequence to GUC (or GUG) and
[0217] substitution of all codons originally coding for Glu to GAG and
[0218] substitution of all codons originally coding for Ala to GCC (or GCG) and
[0219] substitution of all codons originally coding for Arg to CGC (or CGG); substitution of all codons coding for Val in the original sequence to GUC (or GUG) and
[0220] substitution of all codons originally coding for Glu to GAG and
[0221] substitution of all codons originally coding for Ala to GCC (or GCG) and
[0222] substitution of all codons originally coding for Gly to GGC (or GGG) and
[0223] substitution of all codons originally coding for Asn to AAC; substitution of all codons coding for Val in the original sequence to GUC (or GUG) and
[0224] substitution of all codons originally coding for Phe to UUC and
[0225] substitution of all codons originally coding for Cys to UGC and
[0226] substitution of all codons originally coding for Leu to CUG (or CUC) and
[0227] substitution of all codons originally coding for Gln to CAG and
[0228] substitution of all codons originally coding for Pro to CCC (or CCG); etc.

[0229] Preferably, the G/C content of the coding sequence of the artificial nucleic acid molecule, preferably RNA, of the invention is increased by at least 7%, more preferably by at least 15%, particularly preferably by at least 20%, compared to the G/C content of the coding sequence of the respective wild-type nucleic acid, preferably RNA.

[0230] According to preferred embodiments, at least 5%, 10%, 20%, 30%, 40%, 50%, 60%, more preferably at least 70%, even more preferably at least 80% and most preferably at least 90%, 95% or even 100% of the substitutable codons in the coding region or the whole sequence of the wild type RNA sequence are substituted, thereby increasing the G/C content of said sequence.

[0231] In this context, it is particularly preferable to increase the G/C content of the artificial nucleic acid molecule, preferably RNA, of the invention, preferably of its at least one coding sequence, to the maximum (i.e. 100% of the substitutable codons) as compared to respective the wild-type nucleic acid, preferably RNA, sequence.

[0232] According to a preferred embodiment, the present invention provides a nucleic acid sequence, preferably RNA, comprising at least one coding sequence comprising or consisting of any one of the RNA sequences according to SEQ ID NOs: 417-624, 2915, 2916, 2932, 2935, 76671-76693, 76956-76959, 1249-1456, 76763-76785, 76972-76975, 1457-1664, 76786-76808, 76976-76979, 1665-1872, 76809-76831, 76980-76983, 1873-2080, 76832-76854, 76984-76987, 2081-2288, 76855-76877, 76988-76991, 2289-2496, 76878-76900, 76992-76995, 2497-2704, 76901-76923, 76996-76999, 2705-2912, 76924-76946, 77000-77003, 76947, 77004-77017, 77059-77061, 77066 or of a fragment or variant of any one of these sequences.

### Substitution of Rare Codons

[0233] A further preferred modification of the artificial nucleic acid molecule, preferably RNA, of the invention is based on the finding that the translation efficiency is also determined by a different frequency in the occurrence of tRNAs in cells. Thus, if so-called “rare codons” are present in the artificial nucleic acid molecule, preferably RNA, of the invention to an increased extent, the corresponding modified RNA sequence is translated to a significantly poorer degree than in the case where codons coding for relatively “frequent” tRNAs are present.

[0234] In some preferred embodiments, in modified artificial nucleic acid molecule, preferably RNAs defined herein, the region which codes for a protein is modified compared to the corresponding region of the wild-type nucleic acid, preferably RNA, such that at least one codon of the wild-type sequence, which codes for a tRNA which is relatively rare in the cell, is exchanged for a codon, which codes for a tRNA which is relatively frequent in the cell and carries the same amino acid as the relatively rare tRNA.

[0235] Thereby, the sequences of the artificial nucleic acid molecule, preferably RNA, of the invention is modified such that codons for which frequently occurring tRNAs are available are inserted. In other words, according to the invention, by this modification all codons of the wild-type sequence, which code for a tRNA which is relatively rare in the cell, can in each case be exchanged for a codon, which codes for a tRNA which is relatively frequent in the cell and which, in each case, carries the same amino acid as the relatively rare tRNA. Which tRNAs occur relatively frequently in the cell and which, in contrast, occur relatively rarely is known to a person skilled in the art; cf. e.g. Akashi, Curr. Opin. Genet. Dev. 2001, 11 (6): 660-666. The codons, which use for the particular amino acid the tRNA which occurs the most frequently, e.g. the Gly codon, which uses the tRNA, which occurs the most frequently in the (human) cell, are particularly preferred.

[0236] According to the invention, it is particularly preferable to link the sequential G/C content which is increased, in particular maximized, in the modified artificial nucleic acid molecule, preferably RNA, of the invention with the “frequent” codons without modifying the encoded amino acid sequence encoded by the coding sequence of said artificial nucleic acid molecule, preferably RNA. Such preferred embodiments allow the provision of a particularly efficiently translated and stabilized (modified) artificial nucleic acid molecule, preferably RNA (or any other nucleic acid as defined herein).

[0237] The determination of a modified artificial nucleic acid molecule, preferably RNA as described above (increased G/C content; exchange of tRNAs) can be carried out using the computer program explained in WO 02/098443, the disclosure content of which is included in its full scope in the present invention. Using this computer program, the nucleotide sequence of any desired nucleic acid, in particular RNA, can be modified with the aid of the genetic code or the degenerative nature thereof such that a maximum G/C content results, in combination with the use of codons which code for tRNAs occurring as frequently as possible in the cell, the amino acid sequence coded by the modified nucleic acid, in particular RNA, preferably not being modified compared to the non-modified sequence.

[0238] Alternatively, it is also possible to modify only the G/C content or only the codon usage compared to the original sequence. The source code in Visual Basic 6.0 (development environment used: Microsoft Visual Studio Enterprise 6.0 with Servicepack 3) is also described in WO 02/098443.

### A/U Content Modification

[0239] Preferably, the A/U content in the environment of the ribosome binding site of the artificial nucleic acid molecule, preferably RNA, of the invention is increased compared to the A/U content in the environment of the ribosome binding site of its respective wild-type nucleic acid, preferably RNA.

[0240] This modification (an increased A/U content around the ribosome binding site) increases the efficiency of ribosome binding to said artificial nucleic acid molecule, preferably RNA. An effective binding of the ribosomes to the ribosome binding site (Kozak sequence, SEQ ID NO: 3081) in turn has the effect of an efficient translation of the artificial nucleic acid molecule, preferably RNA.

### DSE Modifications

[0241] Preferably, the artificial nucleic acid molecule, preferably RNA, of the invention may be modified with respect to potentially destabilizing sequence elements. Particularly, the coding sequence and/or the 5′ and/or 3′ untranslated region of said artificial nucleic acid molecule, preferably RNA may be modified compared to the respective wild-type nucleic acid, preferably RNA (or said other wild-type nucleic acid) such that it contains no destabilizing sequence elements, the encoded amino acid sequence of the modified artificial nucleic acid molecule, preferably RNA preferably not being modified compared to its respective wild-type nucleic acid, preferably RNA (or said other wild-type nucleic acid).

[0242] It is known that, for example in sequences of eukaryotic RNAs, destabilizing sequence elements (DSE) occur, to which signal proteins bind and regulate enzymatic degradation of RNA in vivo. For further stabilization of the modified artificial nucleic acid molecule, preferably RNA, optionally in its at least one coding region, one or more such modifications compared to the corresponding region of the wild-type nucleic acid, preferably RNA, can therefore be carried out, so that no or substantially no destabilizing sequence elements are contained there.

[0243] According to the invention, DSE present in the untranslated regions (3′- and/or 5′-UTR) can also be eliminated from the artificial nucleic acid molecule, preferably RNA by such modifications. Such destabilizing sequences are e.g. AU-rich sequences (AURES), which occur in 3′-UTR sections of numerous unstable RNAs (Caput et al., Proc. Natl. Acad. Sci. USA 1986, 83:1670 to 1674). The artificial nucleic acid molecule, preferably RNA, of the invention is therefore preferably modified compared to the respective wild-type nucleic acid, preferably RNA (or said respective other wild-type nucleic acid) such that said artificial nucleic acid molecule, preferably RNA, contains no such destabilizing sequences. This also applies to those sequence motifs, which are recognized by possible endonucleases, e.g. the sequence GAACAAG, which is contained in the 3′-UTR segment of the gene encoding the transferrin receptor (Binder et al., EMBO J. 1994, 13:1969 to 1980). These sequence motifs are also preferably removed from said artificial nucleic acid molecule, preferably RNA.

### Sequences Adapted to Human Codon Usage:

[0244] A further preferred modification of the artificial nucleic acid molecule, preferably RNA, of the invention is based on the finding that codons encoding the same amino acid typically occur at different frequencies. According to further preferred embodiments, in the modified artificial nucleic acid molecule, preferably RNA, the coding sequence is modified compared to the corresponding region of the respective wild-type nucleic acid, preferably RNA such that the frequency of the codons encoding the same amino acid corresponds to the naturally occurring frequency of that codon according to the human codon usage as e.g. shown in Table 5.

[0245] For example, in the case of the amino acid alanine (Ala) present in an amino acid sequence encoded by the at least one coding sequence of the artificial nucleic acid molecule, preferably RNA, of the invention, the wild type coding sequence is preferably adapted in a way that the codon “GCC” is used with a frequency of 0.40, the codon “GCT” is used with a frequency of 0.28, the codon “GCA” is used with a frequency of 0.22 and the codon “GCG” is used with a frequency of 0.10 etc. (see Table 5).

TABLE 5
Human codon usage table

| Amino acid | codon | fraction | /1000 |
|---|---|---|---|
| Ala | GCG | 0.10 | 7.4 |
| Ala | GCA | 0.22 | 15.8 |
| Ala | GCT | 0.28 | 18.5 |
| Ala | GCC* | 0.40 | 27.7 |
| Cys | TGT | 0.42 | 10.6 |
| Cys | TGC* | 0.58 | 12.6 |
| Asp | GAT | 0.44 | 21.8 |
| Asp | GAC* | 0.56 | 25.1 |
| Glu | GAG* | 0.59 | 39.6 |
| Glu | GAA | 0.41 | 29.0 |
| Phe | TTT | 0.43 | 17.6 |
| Phe | TTC* | 0.57 | 20.3 |
| Gly | GGG | 0.23 | 16.5 |
| Gly | GGA | 0.26 | 16.5 |
| Gly | GGT | 0.18 | 10.8 |
| Gly | GGC* | 0.33 | 22.2 |
| His | CAT | 0.41 | 10.9 |
| His | CAC* | 0.59 | 15.1 |
| Ile | ATA | 0.14 | 7.5 |
| Ile | ATT | 0.35 | 16.0 |
| Ile | ATC* | 0.52 | 20.8 |
| Lys | AAG* | 0.60 | 31.9 |
| Lys | AAA | 0.40 | 24.4 |
| Leu | TTG | 0.12 | 12.9 |
| Leu | TTA | 0.06 | 7.7 |
| Leu | CTG* | 0.43 | 39.6 |
| Leu | CTA | 0.07 | 7.2 |
| Leu | CTT | 0.12 | 13.2 |
| Leu | CTC | 0.20 | 19.6 |
| Met | ATG* | 1 | 22.0 |
| Asn | AAT | 0.44 | 17.0 |
| Asn | AAC* | 0.56 | 19.1 |
| Pro | CCG | 0.11 | 6.9 |
| Pro | CCA | 0.27 | 16.9 |
| Pro | CCT | 0.29 | 17.5 |
| Pro | CCC* | 0.33 | 19.8 |
| Gln | CAG* | 0.73 | 34.2 |
| Gln | CAA | 0.27 | 12.3 |
| Arg | AGG | 0.22 | 12.0 |
| Arg | AGA* | 0.21 | 12.1 |
| Arg | CGG | 0.19 | 11.4 |
| Arg | CGA | 0.10 | 6.2 |
| Arg | CGT | 0.09 | 4.5 |
| Arg | CGC | 0.19 | 10.4 |
| Ser | AGT | 0.14 | 12.1 |
| Ser | AGC* | 0.25 | 19.5 |
| Ser | TCG | 0.06 | 4.4 |
| Ser | TCA | 0.15 | 12.2 |
| Ser | TCT | 0.18 | 15.2 |
| Ser | TCC | 0.23 | 17.7 |
| Thr | ACG | 0.12 | 6.1 |
| Thr | ACA | 0.27 | 15.1 |
| Thr | ACT | 0.23 | 13.1 |
| Thr | ACC* | 0.38 | 18.9 |
| Val | GTG* | 0.48 | 28.1 |
| Val | GTA | 0.10 | 7.1 |
| Val | GTT | 0.17 | 11.0 |
| Val | GTC | 0.25 | 14.5 |
| Trp | TGG* | 1 | 13.2 |
| Tyr | TAT | 0.42 | 12.2 |
| Tyr | TAC* | 0.58 | 15.3 |
| Stop | TGA* | 0.61 | 1.6 |
| Stop | TAG | 0.17 | 0.8 |
| Stop | TAA | 0.22 | 1.0 |

*most frequent codon

[0246] According to a preferred embodiment, the present invention provides a nucleic acid sequence, preferably RNA, most preferably mRNA, comprising at least one coding sequence comprising or consisting of any one of the RNA sequences according to SEQ ID NOs: 833-1040, 76717-76739, 76964-76967, or of a fragment or variant of any one of these sequences.

### Codon-Optimized Sequences:

[0247] As described above, preferably all codons of the wild-type sequence which code for a tRNA, which is relatively rare in the cell, may be exchanged for a codon which codes for a tRNA, which is relatively frequent in the cell and which, in each case, carries the same amino acid as the relatively rare tRNA.

[0248] Therefore, it is particularly preferred that the most frequent codons are used for each encoded amino acid (see Table 5, most frequent codons are marked with asterisks). Such an optimization procedure increases the codon adaptation index (CAI) and ultimately maximises the CAI. In the context of the invention, sequences with increased or maximized CAI are typically referred to as “codon-optimized” sequences and/or “CAI increased” and/or “maximized” sequences. Preferably, the artificial nucleic acid molecule, preferably RNA, of the invention may comprise at least one coding sequence, wherein the coding sequence is codon-optimized as described herein. More preferably, the codon adaptation index (CAI) of the at least one coding sequence is at least 0.5, at least 0.8, at least 0.9 or at least 0.95. Most preferably, the codon adaptation index (CAI) of the at least one coding sequence may be 1.

[0249] For example, in the case of the amino acid alanine (Ala) present in the amino acid sequence encoded by the at least one coding sequence of the artificial nucleic acid molecule, preferably RNA, of the invention, the wild type coding sequence is adapted in a way that the most frequent human codon “GCC” is always used for said amino acid, or for the amino acid Cysteine (Cys), the wild type sequence is adapted in a way that the most frequent human codon “TGC” is always used for said amino acid etc.

[0250] According to a preferred embodiment, the present invention provides a nucleic acid sequence, preferably RNA, most preferably mRNA, comprising at least one coding sequence comprising or consisting of any one of the RNA sequences according to SEQ ID NOs: 834-1248, 76740-76762, 76968-76971, or of a fragment or variant of any one of these sequences.

### C-Optimized Sequences:

[0251] Preferably, the artificial nucleic acid molecule, preferably RNA, of the invention may be modified by modifying, preferably increasing, the cytosine (C) content of said artificial nucleic acid molecule, preferably RNA, in particular in its at least one coding sequence.

[0252] Preferably, the C content of the coding sequence of the artificial nucleic acid molecule, preferably RNA, of the invention is modified, preferably increased, compared to the C content of the coding sequence of the respective wild-type (unmodified) nucleic acid. The amino acid sequence encoded by the at least one coding sequence of the artificial nucleic acid molecule, preferably RNA, of the invention is preferably not modified as compared to the amino acid sequence encoded by the respective wild-type nucleic acid, preferably RNA (or the respective other wild type nucleic acid).

[0253] Preferably, said modified artificial nucleic acid molecule, preferably RNA is modified such that at least 10%, 20%, 30%, 40%, 50%, 60%, 70% or 80%, or at least 90% of the theoretically possible maximum cytosine-content or even a maximum cytosine-content is achieved.

[0254] Preferably, at least 10%, 20%, 30%, 40%, 50%, 60%, 70%, 80%, 90% or even 100% of the codons of the wild-type nucleic acid, preferably RNA, sequence, which are “cytosine content optimizable” are replaced by codons having a higher cytosine-content than the ones present in the wild type sequence.

[0255] It may further be preferred that some of the codons of the wild type coding sequence may additionally be modified such that a codon for a relatively rare tRNA in the cell is exchanged by a codon for a relatively frequent tRNA in the cell, provided that the substituted codon for a relatively frequent tRNA carries the same amino acid as the relatively rare tRNA of the original wild type codon. Preferably, all of the codons for a relatively rare tRNA are replaced by a codon for a relatively frequent tRNA in the cell, except codons encoding amino acids, which are exclusively encoded by codons not containing any cytosine, or except for glutamine (Gln), which is encoded by two codons each containing the same number of cytosines.

[0256] It may be further preferred that the modified artificial nucleic acid molecule, preferably RNA is modified such that at least 80%, or at least 90% of the theoretically possible maximum cytosine-content or even a maximum cytosine-content is achieved by means of codons, which code for relatively frequent tRNAs in the cell, wherein the amino acid sequence remains unchanged.

[0257] Due to the naturally occurring degeneracy of the genetic code, more than one codon may encode a particular amino acid. Accordingly, 18 out of 20 naturally occurring amino acids are encoded by more than one codon (with Tryp and Met being an exception), e.g. by 2 codons (e.g. Cys, Asp, Glu), by three codons (e.g. Ile), by 4 codons (e.g. Al, Gly, Pro) or by 6 codons (e.g. Leu, Arg, Ser). However, not all codons encoding the same amino acid are utilized with the same frequency under in vivo conditions. Depending on each single organism, a typical codon usage profile is established.

[0258] The term “cytosine content-optimizable codon” as used within the context of the present invention refers to codons, which exhibit a lower content of cytosines than other codons encoding the same amino acid. Accordingly, any wild type codon, which may be replaced by another codon encoding the same amino acid and exhibiting a higher number of cytosines within that codon, is considered to be cytosine-optimizable (C-optimizable). Any such substitution of a C-optimizable wild type codon by the specific C-optimized codon within a wild type coding sequence increases its overall C-content and reflects a C-enriched modified RNA sequence.

[0259] Preferably, the artificial nucleic acid molecule, preferably RNA, of the invention, and in particular its at least one coding sequence, may comprise or consist of a C-maximized sequence containing C-optimized codons for all potentially C-optimizable codons. Accordingly, 100% or all of the theoretically replaceable C-optimizable codons are preferably replaced by C-optimized codons over the entire length of the coding sequence.

[0260] In this context, cytosine-content optimizable codons are codons, which contain a lower number of cytosines than other codons coding for the same amino acid.

[0261] Any of the codons GCG, GCA, GCU codes for the amino acid Ala, which may be exchanged by the codon GCC encoding the same amino acid, and/or
[0262] the codon UGU that codes for Cys may be exchanged by the codon UGC encoding the same amino acid, and/or
[0263] the codon GAU which codes for Asp may be exchanged by the codon GAC encoding the same amino acid, and/or
[0264] the codon that UUU that codes for Phe may be exchanged for the codon UUC encoding the same amino acid, and/or
[0265] any of the codons GGG, GGA, GGU that code Gly may be exchanged by the codon GGC encoding the same amino acid, and/or
[0266] the codon CAU that codes for His may be exchanged by the codon CAC encoding the same amino acid, and/or
[0267] any of the codons AUA, AUU that code for Ile may be exchanged by the codon AUC, and/or
[0268] any of the codons UUG, UUA, CUG, CUA, CUU coding for Leu may be exchanged by the codon CUC encoding the same amino acid, and/or
[0269] the codon AAU that codes for Asn may be exchanged by the codon AAC encoding the same amino acid, and/or
[0270] any of the codons CCG, CCA, CCU coding for Pro may be exchanged by the codon CCC encoding the same amino acid, and/or
[0271] any of the codons AGG, AGA, CGG, CGA, CGU coding for Arg may be exchanged by the codon CGC encoding the same amino acid, and/or
[0272] any of the codons AGU, AGC, UCG, UCA, UCU coding for Ser may be exchanged by the codon UCC encoding the same amino acid, and/or
[0273] any of the codons ACG, ACA, ACU coding for Thr may be exchanged by the codon ACC encoding the same amino acid, and/or
[0274] any of the codons GUG, GUA, GUU coding for Val may be exchanged by the codon GUC encoding the same amino acid, and/or
[0275] the codon UAU coding for Tyr may be exchanged by the codon UAC encoding the same amino acid.

[0276] In any of the above instances, the number of cytosines is increased by 1 per exchanged codon. Exchange of all non C-optimized codons (corresponding to C-optimizable codons) of the coding sequence results in a C-maximized coding sequence. In the context of the invention, at least 70%, preferably at least 80%, more preferably at least 90%, of the non C-optimized codons within the at least one coding sequence of the artificial nucleic acid molecule, preferably RNA, of the invention are replaced by C-optimized codons.

[0277] It may be preferred that for some amino acids the percentage of C-optimizable codons replaced by C-optimized codons is less than 70%, while for other amino acids the percentage of replaced codons is higher than 70% to meet the overall percentage of C-optimization of at least 70% of all C-optimizable wild type codons of the coding sequence.

[0278] Preferably, in a C-optimized artificial nucleic acid molecule, preferably RNA, at least 50% of the C-optimizable wild type codons for any given amino acid are replaced by C-optimized codons, e.g. any modified C-enriched RNA (or other nucleic acid, in particular RNA) preferably contains at least 50% C-optimized codons at C-optimizable wild type codon positions encoding any one of the above mentioned amino acids Ala, Cys, Asp, Phe, Gly, His, Ile, Leu, Asn, Pro, Arg, Ser, Thr, Val and Tyr, preferably at least 60%.

[0279] In this context codons encoding amino acids, which are not cytosine content-optimizable and which are, however, encoded by at least two codons, may be used without any further selection process. However, the codon of the wild type sequence that codes for a relatively rare tRNA in the cell, e.g. a human cell, may be exchanged for a codon that codes for a relatively frequent tRNA in the cell, wherein both code for the same amino acid.

[0280] Accordingly, the relatively rare codon GAA coding for Glu may be exchanged by the relative frequent codon GAG coding for the same amino acid, and/or
[0281] the relatively rare codon AAA coding for Lys may be exchanged by the relative frequent codon AAG coding for the same amino acid, and/or
[0282] the relatively rare codon CAA coding for Gln may be exchanged for the relative frequent codon CAG encoding the same amino acid.

[0283] In this context, the amino acids Met (AUG) and Trp (UGG), which are encoded by only one codon each, remain unchanged. Stop codons are not cytosine-content optimized, however, the relatively rare stop codons amber, ochre (UAA, UAG) may be exchanged by the relatively frequent stop codon opal (UGA).

[0284] The single substitutions listed above may be used individually as well as in all possible combinations in order to optimize the cytosine-content of the modified artificial nucleic acid molecule, preferably RNA, compared to the wild type sequence.

[0285] Accordingly, the at least one coding sequence as defined herein may be changed compared to the coding sequence of the respective wild type nucleic acid, preferably RNA, in such a way that an amino acid encoded by at least two or more codons, of which one comprises one additional cytosine, such a codon may be exchanged by the C-optimized codon comprising one additional cytosine, wherein the amino acid is preferably unaltered compared to the wild type sequence.

[0286] According to a preferred embodiment, the present invention provides a nucleic acid sequence, preferably RNA, most preferably mRNA, comprising at least one coding sequence comprising or consisting of any one of the RNA sequences according to SEQ ID NOs: 625-832, 76694-76716, 76960-76963, or of a fragment or variant of any one of these sequences.

### Combined Modifications

[0287] The sequence modifications described herein are particularly envisaged to be applied to the coding sequences of the artificial nucleic acid molecules, preferably RNAs, as described herein. The modifications (including chemical modifications, lipid modifications and sequence modifications) may, if suitable or necessary, be combined with each other in any combination, provided that the combined modifications do not interfere with each other, and preferably provided that the encoded antigenic fusion proteins preferably retain their desired functionality or property, as described herein above.

[0288] Preferably, artificial nucleic acids, preferably RNAs, according to the invention comprise at least one coding sequence as defined herein, wherein said coding sequence has been modified as described above, and encodes an antigenic fusion protein as defined herein.

[0289] According to preferred embodiments, the inventive artificial nucleic acid molecule, preferably RNA, comprises at least one coding sequence as defined herein, wherein (a) the G/C content of the at least one coding sequence of said artificial nucleic acid molecule, preferably RNA, is increased compared to the G/C content of the corresponding coding sequence of the corresponding wild-type nucleic acid (preferably RNA), and/or (b) wherein the C content of the at least one coding sequence of said artificial nucleic acid molecule, preferably RNA, is increased compared to the C content of the corresponding coding sequence of the corresponding wild-type nucleic acid (preferably RNA), and/or (c) wherein the codons in the at least one coding sequence of said artificial nucleic acid molecule, preferably RNA, are adapted to human codon usage, wherein the codon adaptation index (CAI) is preferably increased or maximized in the at least one coding sequence of said artificial nucleic acid molecule, preferably RNA, and wherein the amino acid sequence encoded by said artificial nucleic acid molecule, preferably RNA, is preferably not being modified compared to the amino acid sequence encoded by the corresponding wild-type nucleic acid (preferably RNA).

[0290] Preferably, the artificial nucleic acid molecule, preferably RNA, of the invention may comprise at least one coding region comprising or consisting of a nucleic acid sequence according to any one of SEQ ID NOs: 625-832, 76694-76716, 76960-76963, 833-1040, 76717-76739, 76964-76967, 417-624, 2915, 2916, 2932, 2935, 76671-76693, 76956-76959, 1249-1456, 76763-76785, 76972-76975, 1457-1664, 76786-76808, 76976-76979, 1665-1872, 76809-76831, 76980-76983, 1873-2080, 76832-76854, 76984-76987, 2081-2288, 76855-76877, 76988-76991, 2289-2496, 76878-76900, 76992-76995, 2497-2704, 76901-76923, 76996-76999, 2705-2912, 76924-76946, 77000-77003, 76947, 834-1248, 76740-76762, 76968-76971, 77004-77017, 77066, 76569, 76550-76568, 2936, 76494, 76475-76493, 77059-77061, 3295-3506, 3507-3718, 27946-52172, 76495-76514, 52173-76399; 76570-76589, or a (preferably functional) fragment, variant or derivative of any one of said sequences, preferably comprising or consisting of a nucleic acid sequence having at least 5%, 10%, 20%, 30%, 40%, 50%, 60%, 70%, 80%, 85%, 86%, 87%, 88%, 89%, 90%, 91%, 92%, 93%, 94%, 95%, 96%, 97%, 98%, or 99%, preferably of at least 70%, more preferably of at least 80%, even more preferably at least 85%, even more preferably of at least 90% and most preferably of at least 95% or even 97%, sequence identity to any one of said sequences.

### 5′ Cap

[0291] According to preferred embodiments, artificial nucleic acid molecules, preferably RNAs as defined herein, may be modified by the addition of a so-called “5′ cap” structure, which preferably stabilizes said artificial nucleic acid molecule, preferably RNA, as described herein.

[0292] Accordingly, in preferred embodiments, the artificial nucleic acid, preferably RNA, of the invention may comprise a 5′-cap structure, preferably m7G (m7G(5′)ppp(5′)G), cap0, cap1, cap2, a modified cap0 or a modified cap1 structure (generated using a cap analogue as defined below).

[0293] A “5′-cap” is an entity, typically a modified nucleotide entity, which generally “caps” the 5′-end of a mature mRNA. A 5′-cap may typically be formed by a modified nucleotide, particularly by a derivative of a guanine nucleotide. Preferably, the 5′-cap is linked to the 5′-terminus via a 5′-5′-triphosphate linkage. A 5′-cap may be methylated, e.g. m7GpppN, wherein N is the terminal 5′ nucleotide of the nucleic acid carrying the 5′-cap, typically the 5′-end of an mRNA. m7GpppN is the 5′-cap structure, which naturally occurs in mRNA transcribed by polymerase II and is therefore preferably not considered as modification comprised in a “modified” mRNA in this context. Accordingly, a “modified” artificial nucleic acid molecule, preferably RNA may comprise a m7GpppN as 5′-cap, but additionally said modified artificial nucleic acid molecule, preferably RNA, typically comprises at least one further modification as defined herein. Preferably, the 5′-cap is added using a 5′-5′-triphosphate linkage (also named m7GpppN). Further examples of 5′cap structures include glyceryl, inverted deoxy abasic residue (moiety), 4′,5′ methylene nucleotide, 1-(beta-D-erythrofuranosyl) nucleotide, 4′-thio nucleotide, carbocyclic nucleotide, 1,5-anhydrohexitol nucleotide, L-nucleotides, alpha-nucleotide, modified base nucleotide, threo-pentofuranosyl nucleotide, acyclic 3′,4′-seco nucleotide, acyclic 3,4-dihydroxybutyl nucleotide, acyclic 3,5 dihydroxypentyl nucleotide, 3′-3′-inverted nucleotide moiety, 3′-3′-inverted abasic moiety, 3′-2′-inverted nucleotide moiety, 3′-2′-inverted abasic moiety, 1,4-butanediol phosphate, 3′-phosphoramidate, hexylphosphate, aminohexyl phosphate, 3′-phosphate, 3′phosphorothioate, phosphorodithioate, or bridging or non-bridging methylphosphonate moiety. These modified 5′-cap structures are regarded as at least one modification in this context.

[0294] Particularly preferred “modified” 5′-cap structures are cap1 (methylation of the ribose of the adjacent nucleotide of m7G), cap2 (additional methylation of the ribose of the 2nd nucleotide downstream of the m7G), cap3 (additional methylation of the ribose of the 3rd nucleotide downstream of the m7G), cap4 (methylation of the ribose of the 4th nucleotide downstream of the m7G), ARCA (anti-reverse cap analogue, modified ARCA (e.g. phosphothioate modified ARCA), inosine, N1-methyl-guanosine, 2′-fluoro-guanosine, 7-deaza-guanosine, 8-oxo-guanosine, 2-amino-guanosine, LNA-guanosine, and 2-azido-guanosine.

[0295] According to preferred embodiments of the present invention, the artificial nucleic acid molecule, in particular RNA, comprises a 5′-Cap structure selected from m7GpppN or cap1.

[0296] A 5′-cap (cap0 or cap1) structure may be formed in chemical RNA synthesis or RNA in vitro transcription (co-transcriptional capping) using cap analogues.

[0297] The term “cap analogue” as used herein will be recognized and understood by the person of ordinary skill in the art, and is e.g. intended to refer to a non-polymerizable di-nucleotide that has cap functionality in that it facilitates translation or localization, and/or prevents degradation of a nucleic acid molecule, particularly of an RNA molecule, when incorporated at the 5′-end of the nucleic acid molecule. Non-polymerizable means that the cap analogue will be incorporated only at the 5′-terminus because it does not have a 5′ triphosphate and therefore cannot be extended in the 3′-direction by a template-dependent polymerase, particularly, by template-dependent RNA polymerase. Examples of cap analogues include, but are not limited to, a chemical structure selected from the group consisting of m7GpppG, m7GpppA, m7GpppC; unmethylated cap analogues (e.g. GpppG); dimethylated cap analogue (e.g. m2,7GpppG), trimethylated cap analogue (e.g. m2,2,7GpppG), dimethylated symmetrical cap analogues (e.g. m7Gpppm7G), or anti reverse cap analogues (e.g. ARCA; m7,2′OmeGpppG, m7,2′dGpppG, m7,3′OmeGpppG, m7,3′dGpppG and their tetraphosphate derivatives). Further cap analogues have been described previously (WO2008/016473, WO2008/157688, WO2009/149253, WO2011/015347, and WO2013/059475). Further suitable cap analogues in that context are described in WO2017/066793, WO2017/066781, WO2017/066791, WO2017/066789, WO2017/053297, WO2017/066782, WO2018075827 and WO2017/066797 wherein the disclosures referring to cap analogues are incorporated herewith by reference.

[0298] In embodiments, a modified cap1 structure is generated using a cap analogue as disclosed in WO2017/053297, WO2017/066793, WO2017/066781, WO2017/066791, WO2017/066789, WO2017/066782, WO2018075827 and WO2017/066797. In particular, any cap structures derivable from the structure disclosed in claim 1-5 of WO2017/053297 may be suitably used to co-transcriptionally generate a modified cap1 structure. Further, any cap structures derivable from the structure defined in claim 1 or claim 21 of WO2018075827 may be suitably used to co-transcriptionally generate a modified cap1 structure.

[0299] In preferred embodiments, the 5′-cap structure may suitably be added co-transcriptionally using cap-analogues as defined herein in an RNA in vitro transcription reaction as defined herein. Preferred cap-analogues in the context of the invention are m7G(5′)ppp(5′)G (m7G) or 3′-O-Me-m7G(5′)ppp(5′)G. Further preferred cap-analogues in the context of the invention are m7G(5′)ppp(5′)(2′OMeA)pG or m7G(5′)ppp(5′)(2′OMeG)pG to co-transcriptionally generate cap1 structures.

[0300] In other embodiments, the 5′-cap structure is added via enzymatic capping using capping enzymes (e.g. vaccinia virus capping enzymes and/or cap-dependent 2′-O methyltransferases) to generate cap0 or cap1 or cap2 structures. The 5′-cap structure (cap0 or cap1) may be added using immobilized capping enzymes and/or cap-dependent 2′-O methyltransferases using methods and means disclosed in WO2016/193226.

[0301] Accordingly, the RNA of the first aspect may comprise a 5′-cap structure, preferably m7G (m7G(5′)), m7G(5′)ppp(5′)(2′OMeA), or m7G(5′)ppp(5′)(2′OMeG).

### Poly(A)

[0302] According to further preferred embodiments, the artificial nucleic acid molecule, preferably RNA, of the invention may contain a poly(A) sequence.

[0303] A “poly(A) sequence”, also called “poly(A) tail” or “3′-poly(A) tail”, is typically understood to be a sequence of adenosine nucleotides, e.g., of up to about 400 adenosine nucleotides, e.g. from about 20 to about 400, preferably from about 50 to about 400, more preferably from about 50 to about 300, even more preferably from about 50 to about 250, most preferably from about 60 to about 250 adenosine nucleotides. As used herein, a poly(A) sequence may also comprise about 10 to 200 adenosine nucleotides, preferably about 10 to 100 adenosine nucleotides, more preferably about 40 to 80 adenosine nucleotides or even more preferably about 50 to 70 adenosine nucleotides. A poly(A) sequence is typically located at the 3′end of an RNA, in particular a mRNA.

[0304] Preferably, the artificial nucleic acid molecule, preferably RNA, of the invention may contain at its 3′ terminus a poly(A) tail of typically about 10 to 200 adenosine nucleotides, preferably about 10 to 100 adenosine nucleotides, more preferably about 40 to 80 adenosine nucleotides or even more preferably about 50 to 70 adenosine nucleotides.

[0305] Preferably, the poly(A) sequence in the artificial nucleic acid molecule, preferably RNA, of the invention may be derived from a DNA template by RNA in vitro transcription.

[0306] Alternatively, the poly(A) sequence may also be obtained in vitro by common methods of chemical-synthesis without being necessarily transcribed from a DNA-progenitor.

[0307] Moreover, poly(A) sequences, or poly(A) tails may be generated by enzymatic polyadenylation of the artificial nucleic acid molecule, preferably RNA, of the invention using commercially available polyadenylation kits and corresponding protocols known in the art. “Polyadenylation” is typically understood to be the addition of a poly(A) sequence to a nucleic acid molecule, such as an RNA molecule, e.g. to a premature mRNA. Polyadenylation may be induced by a so-called polyadenylation signal. This signal is preferably located within a stretch of nucleotides at the 3′-end of the mRNA to be polyadenylated.

[0308] A polyadenylation signal typically comprises a hexamer consisting of adenine and uracil/thymine nucleotides, preferably the hexamer sequence AAUAAA. Other sequences, preferably hexamer sequences, are also conceivable. Polyadenylation typically occurs during processing of a pre-mRNA (also called premature-mRNA). Typically, RNA maturation (from pre-mRNA to mature mRNA) comprises a step of polyadenylation.

[0309] Accordingly, the artificial nucleic acid molecule, preferably RNA, of the invention may comprise a polyadenylation signal which conveys polyadenylation to a (transcribed) RNA by specific protein factors (e.g. cleavage and polyadenylation specificity factor (CPSF), cleavage stimulation factor (CstF), cleavage factors I and II (CF I and CF II), poly(A) polymerase (PAP)). In this context, a consensus polyadenylation signal is preferred comprising the NN (U/T) ANA consensus sequence. In a particularly preferred aspect, the polyadenylation signal comprises one of the following sequences: AA (U/T) AAA or A (U/T) (U/T) AAA (wherein uridine is usually present in RNA and thymidine is usually present in DNA).

### Poly(C)

[0310] According to preferred embodiments, the artificial nucleic acid molecule, preferably RNA, of the invention may contain a poly(C) tail on the 3′ terminus of typically about 10 to 200 cytosine nucleotides, preferably about 10 to 100 cytosine nucleotides, more preferably about 20 to 70 cytosine nucleotides or even more preferably about 20 to 60 or even 10 to 40 cytosine nucleotides.

### UTRs

[0311] According to preferred embodiments, the artificial nucleic acid molecule, preferably RNA, of the invention may comprise at least one 5′- and/or 3′-UTR element. A “UTR element” comprises or consists of a nucleic acid sequence, which is derived from the 5′- or 3′-UTR of any naturally occurring gene or which is derived from a fragment, a homolog or a variant of the 5′- or 3′-UTR of a gene. Preferably, 5′- or 3′-UTR elements may be heterologous to the at least one coding sequence of said artificial nucleic acid molecule, preferably RNA. Even though 5′- or 3′-UTR elements derived from naturally occurring genes may be preferred, synthetically engineered UTR elements may also be used in the context of the present invention.

### 3′ UTR

[0312] The term “3′UTR element” typically refers to a nucleic acid sequence, which comprises or consists of a nucleic acid sequence that is derived from a 3′UTR or from a variant of a 3′UTR. Generally, the term “3′-UTR” refers to a part of a nucleic acid molecule, which is located 3′ (i.e. “downstream”) of an open reading frame and which is not translated into protein. In the context of the present invention, a 3′-UTR corresponds to a sequence which is located between the stop codon of the protein coding sequence, preferably immediately 3′ to the stop codon of the protein coding sequence, and optionally the poly(A) sequence of the artificial nucleic acid molecule, preferably RNA, of the invention.

[0313] The term “corresponds to” means that the 3′-UTR sequence may be an RNA sequence, such as in the mRNA sequence used for defining the 3′-UTR sequence, or a DNA sequence, which corresponds to such RNA sequence. In the context of the present invention, the term “a 3′-UTR of a gene”, such as “a 3′-UTR of a ribosomal protein gene”, is the sequence, which corresponds to the 3′-UTR of the mature mRNA derived from this gene, i.e. the mRNA obtained by transcription of the gene and maturation of the pre-mature mRNA. The term “3′-UTR of a gene” encompasses the DNA sequence and the RNA sequence (both sense and antisense strand and both mature and immature) of the 3′-UTR.

[0314] A 3′UTR element in the sense of the present invention may represent the 3′UTR of an RNA, preferably an mRNA. Thus, in the sense of the present invention, preferably, a 3′UTR element may be the 3′UTR of an RNA, preferably of an mRNA, or it may be the transcription template for a 3′UTR of an RNA. Thus, a 3′UTR element preferably is a nucleic acid sequence which corresponds to the 3′UTR of an RNA, preferably to the 3′UTR of an mRNA, such as an mRNA obtained by transcription of a genetically engineered vector construct. Preferably, the 3′UTR element fulfils the function of a 3′UTR or encodes a sequence which fulfils the function of a 3′UTR.

[0315] Preferably, the at least one 3′UTR element comprises or consists of a nucleic acid sequence derived from the 3′UTR of a chordate gene, preferably a vertebrate gene, more preferably a mammalian gene, most preferably a human gene, or from a variant of the 3′UTR of a chordate gene, preferably a vertebrate gene, more preferably a mammalian gene, most preferably a human gene.

[0316] Preferably, the artificial nucleic acid molecule, preferably RNA, of the invention comprises a 3′UTR element, which may be derivable from a gene that relates to an mRNA with an enhanced half-life (that provides a stable mRNA), for example a 3′UTR element as defined and described below. Preferably, the 3′-UTR element is a nucleic acid sequence derived from a 3′-UTR of a gene, which preferably encodes a stable mRNA, or from a homolog, a fragment or a variant of said gene

[0317] It may be particularly preferred that the 3′UTR element comprises or consists of a nucleic acid sequence, which is derived from a 3′UTR of a gene selected from the group consisting of an albumin gene, an alpha-globin gene, a beta-globin gene, a tyrosine hydroxylase gene, a lipoxygenase gene, and a collagen alpha gene, such as a collagen alpha 1(I) gene, or from a variant of a 3′UTR of a gene selected from the group consisting of an albumin gene, an alpha-globin gene, a beta-globin gene, a tyrosine hydroxylase gene, a lipoxygenase gene, and a collagen alpha gene, such as a collagen alpha 1(I) gene according to SEQ ID NO: 1369-1390 of the patent application WO2013/143700, whose disclosure is incorporated herein by reference, or from a homolog, a fragment or a variant thereof.

[0318] The term “a nucleic acid sequence which is derived from the 3′UTR of a [ . . . ] gene” preferably refers to a nucleic acid sequence which is based on the 3′UTR sequence of a [ . . . ] gene or on a part thereof, such as on the 3′UTR of an albumin gene, an alpha-globin gene, a beta-globin gene, a tyrosine hydroxylase gene, a lipoxygenase gene, or a collagen alpha gene, such as a collagen alpha 1(I) gene, preferably of an albumin gene or on a part thereof. This term includes sequences corresponding to the entire sequence of the variant of the 3′UTR of a gene, i.e. the full length variant 3′UTR sequence of a gene, and sequences corresponding to a fragment of the variant 3′UTR sequence of a gene. A fragment in this context preferably consists of a continuous stretch of nucleotides corresponding to a continuous stretch of nucleotides in the full-length variant 3′UTR, which represents at least 20%, preferably at least 30%, more preferably at least 40%, more preferably at least 50%, even more preferably at least 60%, even more preferably at least 70%, even more preferably at least 80%, and most preferably at least 90% of the full-length variant 3′UTR. Such a fragment of a variant, in the sense of the present invention, is preferably a functional fragment of a variant as described herein.

### Albumin-Derived 3′ UTRs

[0319] Preferably, the 3′UTR element may comprise or consist of a nucleic acid sequence which is derived from a 3′UTR of an albumin gene, preferably a vertebrate albumin gene, more preferably a mammalian albumin gene, most preferably a human albumin gene according to SEQ ID NO: 3073 or the corresponding RNA sequence (SEQ ID NO: 3074).

### Human Albumin 3′UTR SEQ ID NO: 3073:

[0320] CATCACATTT AAAAGCATCT CAGCCTACCA TGAGAATAAG AGAAAGAAAA TGAAGATCAA AAGCTTATTC ATCTGTTTTT CTTTTTCGTT GGTGTAAAGC CAACACCCTG TCTAAAAAAC ATAAATTTCT TTAATCATTT TGCCTCTTTT CTCTGTGCTT CAATTAATAA AAAATGGAAA GAATCT (corresponding to SEQ ID No: 1369 of the patent application PCT/EP2013/000938 published under WO2013/143700).

[0321] The artificial nucleic acid molecule, preferably RNA, of the invention may comprise a 3′-UTR element comprising a corresponding RNA sequence derived from the nucleic acids according to SEQ ID NOs: 1369-1390 of the patent application WO2013/143700 or a fragment, homolog or variant thereof.

[0322] Preferably, the 3′-UTR element may comprise the nucleic acid sequence derived from a fragment of the human albumin gene according to SEQ ID NO: 3075 or 3077:

### Albumin7 3′UTR

[0323] CATCACATTTAAAAGCATCTCAGCCTACCATGAGAATAAGAGAAAGAAAATGAAGATCAATAGCTTATTCATCTCT TTTTCTTTTTCGTTGGTGTAAAGCCAACACCCTGTCTAAAAAACATAAATTTCTTTAATCATTTTGCCTCTTTTCTCT GTGCTTCAATTAATAAAAAATGGAAAGAACCT (SEQ ID NO: 3075 corresponding to SEQ ID No: 1376 of the patent application WO2013/143700)

[0324] The 3′-UTR element of the artificial nucleic acid molecule, preferably RNA, of the invention may preferably comprise or consist of a corresponding RNA sequence of the nucleic acid sequence according to SEQ ID NO: 3076 or 3078.

### Globin-Derived 3′UTRs

[0325] In another particularly preferred embodiment, the 3′UTR element comprises or consists of a nucleic acid sequence which is derived from a 3′UTR of an alpha-globin gene, preferably a vertebrate alpha- or beta-globin gene, more preferably a mammalian alpha- or beta-globin gene, most preferably a human alpha- or beta-globin gene according to SEQ ID NO: 3065, 3067 or 3069 or the corresponding RNA sequences:

3′-UTR of Homo sapiens Hemoglobin, Alpha 1 (HBA1)

[0326] GCTGGAGCCTCGGTGGCCATGCTTCTTGCCCCTTGGGCCTCCCCCCAGCCCCTCCTCCCCTTCCTGCACCCGT ACCCCCGTGGTCTTTGAATAAAGTCTGAGTGGGCGGC (SEQ ID NO: 3065 corresponding to SEQ ID NO: 1370 of the patent application WO2013/143700)

3′-UTR of Homo sapiens Hemoglobin, Alpha 2 (HBA2) GCTGGAGCCTCGGTAGCCGTTCCTCCTGCCCGCTGGGCCTCCCAACGGGCCCTCCTCCCCTCCTTGCACCGGC CCTTCCTGGTCTTTGAATAAAGTCTGAGTGGGCAG (SEQ ID NO: 3067 corresponding to SEQ ID NO: 1371 of the patent application WO2013/143700)
3′-UTR of Homo sapiens Hemoglobin, Beta (HBB)

[0327] GCTCGCTTTCTTGCTGTCCAATTTCTATTAAAGGTTCCTTTGTTCCCTAAGTCCAACTACTAAACTGGGGGATATT ATGAAGGGCCTTGAGCATCTGGATTCTGCCTAATAAAAAACATTTATTTTCATTGC (SEQ ID NO: 3069 corresponding to SEQ ID NO: 1372 of the patent application WO2013/143700)

[0328] For example, the 3′UTR element may comprise or consist of the center, alpha-complex-binding portion of the 3′UTR of an alpha-globin gene, such as of a human alpha-globin gene, or a homolog, a fragment, or a variant of an alpha-globin gene, preferably according to SEQ ID NO: 3071:

### Center, Alpha-Complex-Binding Portion of the 3′UTR of an Alpha-Globin Gene (“Muag”):

[0329] GCCCGATGGGCCTCCCAACGGGCCCTCCTCCCCTCCTTGCACCG (SEQ ID NO: 3071 corresponding to SEQ ID NO: 1393 of the patent application WO2013/143700).

### 5′ UTR

[0330] A “5′-UTR” is typically understood to be a particular section of messenger RNA (mRNA). It is located 5′ of the open reading frame of the mRNA. Typically, the 5′-UTR starts with the transcriptional start site and ends one nucleotide before the start codon of the open reading frame. The 5′-UTR may comprise elements for controlling gene expression, also called regulatory elements. Such regulatory elements may be, for example, ribosomal binding sites. The 5′-UTR may be post-transcriptionally modified, for example by addition of a 5′-Cap. In the context of the present invention, a 5′-UTR corresponds to the sequence of a mature mRNA, which is located between the 5′-Cap and the start codon. Preferably, the 5′-UTR corresponds to the sequence, which extends from a nucleotide located 3′ to the 5′-Cap, preferably from the nucleotide located immediately 3′ to the 5′-Cap, to a nucleotide located 5′ to the start codon of the protein coding sequence, preferably to the nucleotide located immediately 5′ to the start codon of the protein coding sequence. The nucleotide located immediately 3′ to the 5′-Cap of a mature mRNA typically corresponds to the transcriptional start site. The term “corresponds to” means that the 5′-UTR sequence may be an RNA sequence, such as in the mRNA sequence used for defining the 5′-UTR sequence, or a DNA sequence, which corresponds to such RNA sequence. In the context of the present invention, the term “a 5′-UTR of a gene” is the sequence, which corresponds to the 5′-UTR of the mature mRNA derived from this gene, i.e. the mRNA obtained by transcription of the gene and maturation of the pre-mature mRNA. The term “5′-UTR of a gene” encompasses the DNA sequence and the RNA sequence of the 5′-UTR. By the inventive embodiments such a 5′-UTR may be provided 5′-terminal to the coding sequence. Its length is typically less than 500, 400, 300, 250 or less than 200 nucleotides. In other embodiments its length may be in the range of at least 10, 20, 30 or 40, preferably up to 100 or 150, nucleotides.

[0331] In the context of the present invention, 5′ UTRs comprising or consisting of a nucleic acid sequence, which is derived from the 5′UTR of a TOP gene or which is derived from a fragment, homolog or variant of the 5′UTR of a TOP gene, may be particularly preferred.

[0332] The 5′terminal oligopyrimidine tract (TOP) is typically a stretch of pyrimidine nucleotides located in the 5′ terminal region of a nucleic acid molecule, such as the 5′ terminal region of certain mRNA molecules or the 5′ terminal region of a functional entity, e.g. the transcribed region, of certain genes. The sequence starts with a cytidine, which usually corresponds to the transcriptional start site, and is followed by a stretch of usually about 3 to 30 pyrimidine nucleotides. For example, the TOP may comprise 3, 4, 5, 6, 7, 8, 9, 10, 11, 12, 13, 14, 15, 16, 17, 18, 19, 20, 21, 22, 23, 24, 25, 26, 27, 28, 29, 30 or even more nucleotides. The pyrimidine stretch and thus the 5′ TOP ends one nucleotide 5′ to the first purine nucleotide located downstream of the TOP. An mRNA that contains a 5′terminal oligopyrimidine tract is often referred to as “TOP mRNA”. Accordingly, genes that provide such messenger RNAs are referred to as “TOP genes”. TOP sequences have, for example, been found in genes and mRNAs encoding peptide elongation factors and ribosomal proteins.

[0333] TOP genes are typically characterized by the presence of a 5′ terminal oligopyrimidine tract (TOP). Furthermore, most TOP genes are characterized by a growth-associated translational regulation. However, also TOP genes with a tissue specific translational regulation are known. As defined above, the 5′UTR of a TOP gene corresponds to the sequence of a 5′UTR of a mature mRNA derived from a TOP gene, which preferably extends from the nucleotide located 3′ to the 5′-CAP to the nucleotide located 5′ to the start codon. A 5′UTR of a TOP gene typically does not comprise any start codons, preferably no upstream AUGs (uAUGs) or upstream open reading frames (uORFs). Therein, upstream AUGs and upstream open reading frames are typically understood to be AUGs and open reading frames that occur 5′ of the start codon (AUG) of the open reading frame that should be translated. The 5′UTRs of TOP genes are generally rather short. The lengths of 5′UTRs of TOP genes may vary between 20 nucleotides up to 500 nucleotides, and are typically less than about 200 nucleotides, preferably less than about 150 nucleotides, more preferably less than about 100 nucleotides. Exemplary 5′UTRs of TOP genes in the sense of the present invention are the nucleic acid sequences extending from the nucleotide at position 5 to the nucleotide located immediately 5′ to the start codon (e.g. the ATG) in the sequences according to SEQ ID NOs: 1-1363 of the patent application WO2013/143700, whose disclosure is incorporated herewith by reference. In this context, a particularly preferred fragment of a 5′UTR of a TOP gene is a 5′UTR of a TOP gene lacking the 5′TOP motif. The terms “5′UTR of a TOP gene” or “5′-TOP UTR” preferably refer to the 5′UTR of a naturally occurring TOP gene.

[0334] In the context of the present invention, a “TOP motif” is a nucleic acid sequence which corresponds to a 5′TOP as defined above. Thus, a TOP motif in the context of the present invention is preferably a stretch of pyrimidine nucleotides having a length of 3-30 nucleotides. Preferably, the TOP-motif consists of at least 3 pyrimidine nucleotides, preferably at least 4 pyrimidine nucleotides, preferably at least 5 pyrimidine nucleotides, more preferably at least 6 nucleotides, more preferably at least 7 nucleotides, most preferably at least 8 pyrimidine nucleotides, wherein the stretch of pyrimidine nucleotides preferably starts at its 5′end with a cytosine nucleotide. In TOP genes and TOP mRNAs, the TOP-motif preferably starts at its 5′end with the transcriptional start site and ends one nucleotide 5′ to the first purin residue in said gene or mRNA. A TOP motif in the sense of the present invention is preferably located at the 5′end of a sequence, which represents a 5′UTR, or at the 5′end of a sequence, which codes for a 5′UTR. Thus, preferably, a stretch of 3 or more pyrimidine nucleotides is called “TOP motif” in the sense of the present invention if this stretch is located at the 5′end of a respective sequence, such as the artificial nucleic acid molecule, the 5′UTR element of the artificial nucleic acid molecule, or the nucleic acid sequence which is derived from the 5′UTR of a TOP gene as described herein. In other words, a stretch of 3 or more pyrimidine nucleotides, which is not located at the 5′-end of a 5′UTR or a 5′UTR element but anywhere within a 5′UTR or a 5′UTR element, is preferably not referred to as “TOP motif”.

[0335] Preferably, the 5′UTR element of the artificial nucleic acid molecule, preferably RNA, of the invention may not comprise a TOP-motif or a 5′TOP, as defined above.

[0336] The nucleic acid sequence of the 5′UTR element, which is derived from a 5′UTR of a TOP gene, may preferably terminate at its 3′-end with a nucleotide located at position 1, 2, 3, 4, 5, 6, 7, 8, 9 or 10 upstream of the start codon (e.g. A (U/T) G) of the gene or mRNA it is derived from. Accordingly, the 5′UTR element may preferably not comprise any part of the protein coding sequence.

[0337] Therefore, preferably, the only amino acid coding part of the at least one artificial nucleic acid molecule, preferably RNA, of the invention may be provided by its coding region.

[0338] The nucleic acid sequence derived from the 5′UTR of a TOP gene may preferably be derived from a eukaryotic TOP gene, preferably a plant or animal TOP gene, more preferably a chordate TOP gene, even more preferably a vertebrate TOP gene, most preferably a mammalian TOP gene, such as a human TOP gene.

[0339] For example, the 5′UTR element may preferably be selected from 5′-UTR elements comprising or consisting of a nucleic acid sequence, which is derived from a nucleic acid sequence selected from the group consisting of SEQ ID Nos: 1-1363, SEQ ID NO: 1395, SEQ ID NO: 1421 and SEQ ID NO: 1422 of the patent application WO2013/143700, whose disclosure is incorporated herein by reference, from the homologs of SEQ ID NOs: 1-1363, SEQ ID NO: 1395, SEQ ID NO: 1421 and SEQ ID NO: 1422 of the patent application WO2013/143700, from a variant thereof, or preferably from a corresponding RNA sequence. The term “homologs of SEQ ID NOs: 1-1363, SEQ ID NO: 1395, SEQ ID NO: 1421 and SEQ ID NO: 1422 of the patent application WO2013/143700” refers to sequences of other species than Homo sapiens, which are homologous to the sequences according to SEQ ID NOs: 1-1363, SEQ ID NO: 1395, SEQ ID NO: 1421 and SEQ ID NO: 1422 of the patent application WO2013/143700.

[0340] Preferably, the 5′UTR element of the artificial nucleic acid molecule, preferably RNA, of the invention may comprise or consist of a nucleic acid sequence, which is derived from a nucleic acid sequence extending from nucleotide position 5 (i.e. the nucleotide that is located at position 5 in the sequence) to the nucleotide position immediately 5′ to the start codon (located at the 3′ end of the sequences), e.g. the nucleotide position immediately 5′ to the ATG sequence, of a nucleic acid sequence selected from SEQ ID NOs: 1-1363, SEQ ID NO: 1395, SEQ ID NO: 1421 and SEQ ID NO: 1422 of the patent application WO2013/143700, from the homologs of SEQ ID NOs: 1-1363, SEQ ID NO: 1395, SEQ ID NO: 1421 and SEQ ID NO: 1422 of the patent application WO2013/143700 from a variant thereof, or a corresponding RNA sequence. It is particularly preferred that the 5′ UTR element is derived from a nucleic acid sequence extending from the nucleotide position immediately 3′ to the 5′TOP to the nucleotide position immediately 5′ to the start codon (located at the 3′ end of the sequences), e.g. the nucleotide position immediately 5′ to the ATG sequence, of a nucleic acid sequence selected from SEQ ID NOs: 1-1363, SEQ ID NO: 1395, SEQ ID NO: 1421 and SEQ ID NO: 1422 of the patent application WO2013/143700, from the homologs of SEQ ID NOs: 1-1363, SEQ ID Nos: 1395, SEQ ID No: 1421 and SEQ ID NO: 1422 of the patent application WO2013/143700, from a variant thereof, or a corresponding RNA sequence.

[0341] It may be particularly preferred that the 5′UTR element comprises or consists of a nucleic acid sequence, which is derived from a 5′UTR of a TOP gene encoding a ribosomal protein or from a variant of a 5′UTR of a TOP gene encoding a ribosomal protein. For example, the 5′UTR element may preferably comprise or consist of a nucleic acid sequence, which is derived from a 5′UTR of a nucleic acid sequence according to any of SEQ ID NOs: 67, 170, 193, 244, 259, 554, 650, 675, 700, 721, 913, 1016, 1063, 1120, 1138, and 1284-1360 of the patent application WO2013/143700, a corresponding RNA sequence, a homolog thereof, or a variant thereof as described herein, preferably lacking the 5′TOP motif. As described above, the sequence extending from position 5 to the nucleotide immediately 5′ to the ATG (which is located at the 3′end of the sequences) corresponds to the 5′UTR of said sequences.

[0342] The artificial nucleic acid molecule, preferably RNA, of the invention may thus comprise a 5′UTR element, which comprises or consists of a nucleic acid sequence, which is derived from the 5′UTR of a vertebrate TOP gene, such as a mammalian, e.g. a human TOP gene, selected from RPSA, RPS2, RPS3, RPS3A, RPS4, RPS5, RPS6, RPS7, RPS8, RPS9, RPS10, RPS11, RPS12, RPS13, RPS14, RPS15, RPS15A, RPS16, RPS17, RPS18, RPS19, RPS20, RPS21, RPS23, RPS24, RPS25, RPS26, RPS27, RPS27A, RPS28, RPS29, RPS30, RPL3, RPL4, RPL5, RPL6, RPL7, RPL7A, RPL8, RPL9, RPL10, RPL10A, RPL11, RPL12, RPL13, RPL13A, RPL14, RPL15, RPL17, RPL18, RPL18A, RPL19, RPL21, RPL22, RPL23, RPL23A, RPL24, RPL26, RPL27, RPL27A, RPL28, RPL29, RPL30, RPL31, RPL32, RPL34, RPL35, RPL35A, RPL36, RPL36A, RPL37, RPL37A, RPL38, RPL39, RPL40, RPL41, RPLP0, RPLP1, RPLP2, RPLP3, RPLP0, RPLP1, RPLP2, EEF1A1, EEF1B2, EEF1D, EEF1G, EEF2, EIF3E, EIF3F, EIF3H, EIF2S3, EIF3C, EIF3K, EIF3EIP, EIF4A2, PABPC1, HNRNPA1, TPT1, TUBB1, UBA52, NPM1, ATP5G2, GNB2L1, NME2, UQCRB, or from a homolog or variant thereof, wherein preferably the 5′UTR element does not comprise a TOP-motif or the 5′TOP of said genes, and wherein optionally the 5′UTR element starts at its 5′-end with a nucleotide located at position 1, 2, 3, 4, 5, 6, 7, 8, 9 or 10 downstream of the 5′terminal oligopyrimidine tract (TOP) and wherein further optionally the 5′UTR element which is derived from a 5′UTR of a TOP gene terminates at its 3′-end with a nucleotide located at position 1, 2, 3, 4, 5, 6, 7, 8, 9 or 10 upstream of the start codon (A (U/T) G) of the gene it is derived from.

[0343] Preferably, the 5′UTR element may comprise or consist of a nucleic acid sequence, which is derived from the 5′UTR of a ribosomal protein Large 32 gene (RPL32), a ribosomal protein Large 35 gene (RPL35), a ribosomal protein Large 21 gene (RPL21), an ATP synthase, H+ transporting, mitochondrial F1 complex, alpha subunit 1, cardiac muscle (ATP5A1) gene, an hydroxysteroid (17-beta) dehydrogenase 4 gene (HSD17B4), an androgen-induced 1 gene (AIG1), cytochrome c oxidase subunit Vlc gene (COX6C), or a N-acylsphingosine amidohydrolase (acid ceramidase) 1 gene (ASAH1) or from a variant thereof, preferably from a vertebrate ribosomal protein Large 32 gene (RPL32), a vertebrate ribosomal protein Large 35 gene (RPL35), a vertebrate ribosomal protein Large 21 gene (RPL21), a vertebrate ATP synthase, H+ transporting, mitochondrial F1 complex, alpha subunit 1, cardiac muscle (ATP5A1) gene, a vertebrate hydroxysteroid (17-beta) dehydrogenase 4 gene (HSD17B4), a vertebrate androgen-induced 1 gene (AIG1), a vertebrate cytochrome c oxidase subunit Vlc gene (COX6C), or a vertebrate N-acylsphingosine amidohydrolase (acid ceramidase) 1 gene (ASAH1) or from a variant thereof, more preferably from a mammalian ribosomal protein Large 32 gene (RPL32), a ribosomal protein Large 35 gene (RPL35), a ribosomal protein Large 21 gene (RPL21), a mammalian ATP synthase, H+ transporting, mitochondrial F1 complex, alpha subunit 1, cardiac muscle (ATP5A1) gene, a mammalian hydroxysteroid (17-beta) dehydrogenase 4 gene (HSD17B4), a mammalian androgen-induced 1 gene (AIG1), a mammalian cyto-chrome c oxidase subunit Vlc gene (COX6C), or a mammalian N-acylsphingosine amidohydrolase (acid ceramidase) 1 gene (ASAH1) or from a variant thereof, most preferably from a human ribosomal protein Large 32 gene (RPL32), a human ribosomal protein Large 35 gene (RPL35), a human ribosomal protein Large 21 gene (RPL21), a human ATP syn-thase, H+ transporting, mitochondrial F1 complex, alpha subunit 1, cardiac muscle (ATP5A1) gene, a human hydroxysteroid (17-beta) dehydrogenase 4 gene (HSD17B4), a human androgen-induced 1 gene (AIG1), a human cytochrome c oxidase subunit Vlc gene (COX6C), or a human N-acylsphingosine amidohydrolase (acid ceramidase) 1 gene (ASAH1) or from a variant thereof, wherein preferably the 5′UTR element does not comprise the 5′TOP of said gene.

### ATP5A1 Derived 5′ UTR

[0344] Preferably, the artificial nucleic acid molecule, preferably RNA, of the invention may comprise a 5′UTR element which comprises or consists of a nucleic acid sequence, which is derived from a 5′UTR of a TOP gene encoding a mitochondrial ATP synthase subunit alpha or from a homolog or variant of a 5′UTR of a TOP gene encoding a mitochondrial ATP synthase subunit alpha, preferably lacking the 5′TOP motif.

[0345] In this context, the 5′UTR element preferably comprises or consists of a nucleic acid sequence which is derived from the 5′UTR of a mitochondrial ATP synthase subunit alpha gene, preferably from a vertebrate mitochondrial ATP synthase subunit alpha (ATP5A1) gene, more preferably from a mammalian mitochondrial ATP synthase subunit alpha (ATP5A1) gene, most preferably from a human mitochondrial ATP synthase subunit alpha (ATP5A1) gene, or from a variant of the 5′UTR of a mitochondrial ATP synthase subunit alpha gene, preferably from a vertebrate mitochondrial ATP synthase subunit alpha (ATP5A1) gene, more preferably from a mammalian mitochondrial ATP synthase subunit alpha (ATP5A1) gene, most preferably from a human mitochondrial ATP synthase subunit alpha (ATP5A1) gene, wherein preferably the 5′UTR element does not comprise the 5′TOP of said gene.

[0346] Accordingly, in a particularly preferred embodiment, the 5′UTR element comprises or consists of a nucleic acid sequence, which has an identity of at least about 40%, preferably of at least about 50%, preferably of at least about 60%, preferably of at least about 70%, more preferably of at least about 80%, more preferably of at least about 90%, even more preferably of at least about 95%, even more preferably of at least about 99% to the nucleic acid sequence according to SEQ ID NO: 3063 (5′-UTR of ATP5A1 lacking the 5′ terminal oligopyrimidine tract: GCGGCTCGGCCATTTTGTCCCAGTCAGTCCGGAGGCTGCGGCTGCAGAAGTACCGCCTGCGGAGTAACTGCAA AG; corresponding to SEQ ID NO: 1414 of the patent application WO2013/143700) or preferably to a corresponding RNA sequence, or wherein the at least one 5′UTR element comprises or consists of a fragment of a nucleic acid sequence which has an identity of at least about 40%, preferably of at least about 50%, preferably of at least about 60%, preferably of at least about 70%, more preferably of at least about 80%, more preferably of at least about 90%, even more preferably of at least about 95%, even more preferably of at least about 99% to the nucleic acid sequence according to SEQ ID NO: 3063 or more preferably to a corresponding RNA sequence, wherein, preferably, the fragment is as described above, i.e. being a continuous stretch of nucleotides representing at least 20% etc. of the full-length 5′UTR. Preferably, the fragment exhibits a length of at least about 20 nucleotides or more, preferably of at least about 30 nucleotides or more, more preferably of at least about 40 nucleotides or more. Preferably, the fragment is a functional fragment as described herein.

### L32 Derived 5′ UTR

[0347] Preferably, the artificial nucleic acid molecule, preferably RNA, of the invention may comprise a 5′UTR element which comprises or consists of a nucleic acid sequence, which is derived from a 5′UTR of a TOP gene encoding a ribosomal Large protein (RPL) or from a homolog or variant of a 5′UTR of a TOP gene encoding a ribosomal Large protein (RPL). For example, the 5′UTR element comprises or consists of a nucleic acid sequence, which is derived from a 5′UTR of a nucleic acid sequence according to any of SEQ ID NOs: 67, 259, 1284-1318, 1344, 1346, 1348-1354, 1357, 1358, 1421 and 1422 of the patent application WO2013/143700, a corresponding RNA sequence, a homolog thereof, or a variant thereof as described herein, preferably lacking the 5′TOP motif.

[0348] In this context, the 5′UTR element may preferably comprise or consist of a nucleic acid sequence which is derived from the 5′UTR of a ribosomal protein Large 32 gene, preferably from a vertebrate ribosomal protein Large 32 (L32) gene, more preferably from a mammalian ribosomal protein Large 32 (L32) gene, most preferably from a human ribosomal protein Large 32 (L32) gene, or from a variant of the 5′UTR of a ribosomal protein Large 32 gene, preferably from a vertebrate ribosomal protein Large 32 (L32) gene, more preferably from a mammalian ribosomal protein Large 32 (L32) gene, most preferably from a human ribosomal protein Large 32 (L32) gene, wherein preferably the 5′UTR element does not comprise the 5′TOP of said gene.

[0349] Accordingly, the 5′UTR element may preferably comprise or consist of a nucleic acid sequence, which has an identity of at least about 40%, preferably of at least about 50%, preferably of at least about 60%, preferably of at least about 70%, more preferably of at least about 80%, more preferably of at least about 90%, even more preferably of at least about 95%, even more preferably of at least about 99% to the nucleic acid sequence according to SEQ ID NO: 3061 (5′-UTR of human ribosomal protein Large 32 lacking the 5′ terminal oligopyrimidine tract: GGCGCTGCCTACGGAGGTGGCAGCCATCTCCTTCTCGGCATC; corresponding to SEQ ID NO: 1368 of the patent application WO2013/143700) or preferably to a corresponding RNA sequence, or wherein the at least one 5′UTR element comprises or consists of a fragment of a nucleic acid sequence which has an identity of at least about 40%, preferably of at least about 50%, preferably of at least about 60%, preferably of at least about 70%, more preferably of at least about 80%, more preferably of at least about 90%, even more preferably of at least about 95%, even more preferably of at least about 99% to the nucleic acid sequence according to SEQ ID NO: 3061 or more preferably to a corresponding RNA sequence, wherein, preferably, the fragment is as described above, i.e. being a continuous stretch of nucleotides representing at least 20% etc. of the full-length 5′UTR. Preferably, the fragment exhibits a length of at least about 20 nucleotides or more, preferably of at least about 30 nucleotides or more, more preferably of at least about 40 nucleotides or more. Preferably, the fragment is a functional fragment as described herein.

### Histone Stem-Loop

[0350] According to preferred embodiments, the artificial nucleic acid molecule, preferably RNA, of the invention comprises a histone stem-loop sequence/structure.

[0351] Such histone stem-loop sequences are preferably selected from histone stem-loop sequences as disclosed in WO 2012/019780, the disclosure of which is incorporated herewith by reference.

[0352] A histone stem-loop sequence, suitable to be used within the present invention, is preferably selected from at least one of the following formulae (II) or (III):

[chemical structure]

[chemical structure]

[0353] wherein:

| | |
|---|---|
| stem1 or stem2 bordering elements | is a consecutive sequence of 1 to 6, preferably of 2 to 6, more |
| N₁₋₆ | preferably of 2 to 5, even more preferably of 3 to 5, most preferably |
| | of 4 to 5 or 5 N, wherein each N is independently from another |
| | selected from a nucleotide selected from A, U, T, G and C, or a |
| | nucleotide analogue thereof; |
| stem1 [N₀₋₂GN₃₋₅] | is reverse complementary or partially reverse complementary with |
| | element stem2, and is a consecutive sequence between of 5 to 7 |
| | nucleotides; |
| | wherein N₀₋₂ is a consecutive sequence of 0 to 2, preferably of 0 |
| | to 1, more preferably of 1 N, wherein each N is independently from |
| | another selected from a nucleotide selected from A, U, T, G and C |
| | or a nucleotide analogue thereof; |
| | wherein N₃₋₅ is a consecutive sequence of 3 to 5, preferably of 4 |
| | to 5, more preferably of 4 N, wherein each N is independently from |
| | another selected from a nucleotide selected from A, U, T, G and C |
| | or a nucleotide analogue thereof, and |
| | wherein G is guanosine or an analogue thereof, and may be |
| | optionally replaced by a cytidine or an analogue thereof, provided |
| | that its complementary nucleotide cytidine in stem2 is replaced by |
| | guanosine; |
| loop sequence [N₀₋₄(U/T)N₀₋₄] | is located between elements stem1 and stem2, and is a |
| | consecutive sequence of 3 to 5 nucleotides, more preferably of 4 |
| | nucleotides; |
| | wherein each N₀₋₄ is independent from another a consecutive |
| | sequence of 0 to 4, preferably of 1 to 3, more preferably of 1 to 2 |
| | N, wherein each N is independently from another selected from a |
| | nucleotide selected from A, U, T, G and C or a nucleotide analogue |
| | thereof; and |
| | wherein U/T represents uridine, or optionally thymidine; |
| stem2 [N₃₋₅CN₀₋₂] | is reverse complementary or partially reverse complementary with |
| | element stem1, and is a consecutive sequence between of 5 to 7 |
| | nucleotides; |
| | wherein N₃₋₅ is a consecutive sequence of 3 to 5, preferably of 4 |
| | to 5, more preferably of 4 N, wherein each N is independently from |
| | another selected from a nucleotide selected from A, U, T, G and C |
| | or a nucleotide analogue thereof; |
| | wherein N₀₋₂ is a consecutive sequence of 0 to 2, preferably of 0 |
| | to 1, more preferably of 1 N, wherein each N is independently from |
| | another selected from a nucleotide selected from A, U, T, G or C |
| | or a nucleotide analogue thereof; and |
| | wherein C is cytidine or an analogue thereof, and may be |
| | optionally replaced by a guanosine or an analogue thereof |
| | provided that its complementary nucleoside guanosine in stem1 is |
| | replaced by cytidine; |

[0354] wherein
[0355] stem1 and stem2 are capable of base pairing with each other forming a reverse complementary sequence, wherein base pairing may occur between stem1 and stem2, e.g. by Watson-Crick base pairing of nucleotides A and U/T or G and C or by non-Watson-Crick base pairing e.g. wobble base pairing, reverse Watson-Crick base pairing, Hoogsteen base pairing, reverse Hoogsteen base pairing or are capable of base pairing with each other forming a partially reverse complementary sequence, wherein an incomplete base pairing may occur between stem1 and stem2, on the basis that one ore more bases in one stem do not have a complementary base in the reverse complementary sequence of the other stem.

[0356] According to a further preferred embodiment, the artificial nucleic acid molecule, preferably RNA, of the invention may comprise at least one histone stem-loop sequence according to at least one of the following specific formulae (IIa) or (IIIa):
[0357] formula (IIa) (stem-loop sequence without stem bordering elements):

[chemical structure]

[0358] formula (IIIa) (stem-loop sequence with stem bordering elements):

[chemical structure]

[0359] wherein:
[0360] N, C, G, T and U are as defined above.

[0361] According to a further more particularly preferred embodiment, the artificial nucleic acid molecule, preferably RNA, of the invention may comprise at least one histone stem-loop sequence according to at least one of the following specific formulae (IIb) or (IIIb):

[chemical structure]

[0362] formula (IIIb) (stem-loop sequence with stem bordering elements):

[chemical structure]

[0363] wherein:
[0364] N, C, G, T and U are as defined above.

[0365] A particularly preferred histone stem-loop sequence is the sequence CAAAGGCTCTTTTCAGAGCCACCA (SEQ ID NO: 3079) or more preferably the corresponding RNA sequence CAAAGGCUCUUUUCAGAGCCACCA (SEQ ID NO: 3080).

### Constructs

[0366] The artificial nucleic acid molecule, preferably RNA, of the invention, which comprises at least one coding sequence as defined herein preferably comprises at least one 5′ UTR and/or at least one 3′ UTR as described herein, and optionally at least one histone stem-loop.

[0367] The 3′ UTR of the artificial nucleic acid molecule, preferably RNA, of the invention (or any other nucleic acid, in particular RNA, as defined herein) may further comprise a poly(A) and/or a poly(C) sequence as defined herein. The single elements of the 3′ UTR may occur therein in any order from 5′ to 3′ along the sequence of the artificial nucleic acid molecule, preferably RNA, of the invention.

[0368] In addition, further elements as described herein, may also be contained, such as a stabilizing sequence as defined herein (e.g. derived from the UTR of a globin gene), IRES sequences, etc. Each of the elements may also be repeated in the artificial nucleic acid molecule, preferably RNA, of the invention at least once (particularly in di- or multicistronic constructs), e.g. twice or more. As an example, the single elements may be present in the artificial nucleic acid molecule, preferably RNA, of the invention in the following order:
[0369] 5′-coding sequence-histone stem-loop-poly(A)/(C) sequence-3′; or
[0370] 5′-coding sequence-poly(A)/(C) sequence-histone stem-loop-3′; or
[0371] 5′-coding sequence-histone stem-loop-polyadenylation signal-3′; or
[0372] 5′-coding sequence-polyadenylation signal-histone stem-loop-3′; or
[0373] 5′-coding sequence-histone stem-loop-histone stem-loop-poly(A)/(C) sequence-3′; or
[0374] 5′-coding sequence-histone stem-loop-histone stem-loop-polyadenylation signal-3′; or
[0375] 5′-coding sequence-stabilizing sequence-poly(A)/(C) sequence-histone stem-loop-3′; or
[0376] 5′-coding sequence-stabilizing sequence-poly(A)/(C) sequence-poly(A)/(C) sequence-histone stem-loop-3′; etc.

[0377] According to further embodiments, the artificial nucleic acid molecule, preferably RNA, preferably further comprises at least one of the following structural elements: a histone-stem-loop structure, preferably a histone-stem-loop in its 3′ untranslated region; a 5′-cap structure; a poly-A tail; or a poly(C) sequence.

[0378] According to some embodiments, in addition to the (poly-)peptides or proteins described herein, a further peptide or protein is encoded by the at least one coding sequence as defined herein, wherein the further peptide or protein is preferably no histone protein, no reporter protein (e.g. Luciferase, GFP and its variants (such as eGFP, RFP or BFP), and/or no marker or selection protein, including alpha-globin, galactokinase and Xanthine: Guanine phosphoribosyl transferase (GPT), hypoxanthine-guanine phosphoribosyltransferase (HGPRT), beta-galactosidase, galactokinase, alkaline phosphatase, secreted embryonic alkaline phosphatase (SEAP) or a resistance gene (such as a resistance gene against neomycin, puromycin, hygromycin and zeocin). In preferred embodiments, the artificial nucleic acid molecule, preferably RNA, does not encode a reporter gene or a marker gene. In preferred embodiments, the artificial nucleic acid molecule, preferably RNA, does not encode luciferase. In other embodiments, the artificial nucleic acid molecule, preferably RNA, does not encode GFP or a variant thereof.

[0379] Specifically, artificial nucleic acid molecules, in particular RNAs, according to the invention may comprise preferably in 5′ to 3′ direction, the following elements:
[0380] a) a 5′-CAP structure, preferably m7GpppN or Cap1
[0381] b) a 5′-UTR element, which comprises or consists of a nucleic acid sequence, which is derived from a 5′-UTR as defined herein, preferably comprising a nucleic acid sequence corresponding to the nucleic acid sequence according to SEQ ID NO: 3061, 3063, or a homolog, fragment or variant thereof;
[0382] c) at least one coding sequence as defined herein;
[0383] d) a 3′-UTR element, which comprises or consists of a nucleic acid sequence, which is derived from a 3′-UTR as defined herein, preferably comprising a nucleic acid sequence corresponding to the nucleic acid sequence according to SEQ ID NO: 3065, 3067, 3069, 3071, 3073, 3075, 3077, or a homolog, a fragment or a variant thereof,
[0384] e) optionally a poly(A) tail, preferably consisting of 10 to 1000, 10 to 500, 10 to 300 10 to 200, 10 to 100, 40 to 80 or 50 to 70 adenosine nucleotides,
[0385] f) optionally a poly(C) tail, preferably consisting of 10 to 200, 10 to 100, 20 to 70, 20 to 60 or 10 to 40 cytosine nucleotides, and
[0386] g) optionally a histone stem-loop.

### Complexation

[0387] According to some embodiments of the present invention, the artificial nucleic acid molecule, preferably RNA, of the invention, and/or any other nucleic acid disclosed herein (e.g. immunostimulatory nucleic acids) may be provided in a “naked” form, i.e. without being associated with any further vehicle, transfection or complexation agent for increasing the transfection efficiency and/or the immunostimulatory properties of said artificial nucleic acid molecule, preferably RNA, or of any other nucleic acid.

[0388] According to other preferred embodiments, the artificial nucleic acid molecule, preferably RNA, of the invention, and/or any other nucleic acid disclosed herein (e.g. immunostimulatory nucleic acids) is/are provided in a complexed form. Therein, the at least artificial nucleic acid molecule, preferably RNA, or any other nucleic acid disclosed herein may be associated with a suitable vehicle, transfection or complexation agent for increasing the transfection efficiency and/or the immunostimulatory properties of said artificial nucleic acid molecule, preferably RNA, or said other nucleic acid.

[0389] According to preferred embodiments, said artificial nucleic acid molecule, preferably RNA, and/or said other nucleic acid(s)) is/are complexed or associated with one or more (poly-)cationic compounds, preferably with (poly-)cationic polymers, (poly-)cationic peptides or proteins, e.g. protamine, (poly-)cationic polysaccharides and/or [(poly-)cationic] lipids. In this context, the terms “complexed” or “associated” refer to the essentially stable combination of said artificial nucleic acid molecule, preferably RNA, or said other nucleic acid, with one or more of the aforementioned compounds into larger complexes or assemblies without covalent binding.

### Lipids

[0390] According to preferred embodiments, the artificial nucleic acid molecule, preferably RNA, or any other nucleic acid disclosed herein, is complexed with one or more lipids, thereby forming lipid nanoparticles, lipoplexes and/or preferably liposomes.

[0391] Therefore, the artificial nucleic acid molecule, preferably RNA, of the invention and/or any other nucleic acid disclosed herein may be provided in the form of a lipid-based formulation, in particular in the form of liposomes, lipoplexes, and/or lipid nanoparticles comprising said artificial nucleic acid molecule, preferably RNA, and/or said other nucleic acid disclosed herein.

[0392] The term “lipid nanoparticle”, also referred to as “LNP”, is not restricted to any particular morphology, and include any morphology generated when a cationic lipid and optionally one or more further lipids are combined, e.g. in an aqueous environment and/or in the presence of RNA. For example, a liposome, a lipid complex, a lipoplex and the like are within the scope of a lipid nanoparticle (LNP).

### Lipid Nanoparticles

[0393] The artificial nucleic acid molecule, preferably RNA, of the invention, or any other nucleic acid disclosed herein, may be complexed or associated with lipids (in particular cationic and/or neutral lipids) to form one or more lipid nanoparticles.

[0394] Preferably, lipid nanoparticles (LNPs) comprise: (a) at least one artificial nucleic acid molecule, preferably RNA, of the invention or any other nucleic acid disclosed herein, (b) a cationic lipid, (c) an aggregation reducing agent (such as polyethylene glycol (PEG) lipid or PEG-modified lipid), (d) optionally a non-cationic lipid (such as a neutral lipid), and (e) optionally, a sterol. In particular, LNPs may comprise, in addition to the at least one artificial nucleic acid molecule, preferably RNA, of the invention, and/or any other nucleic acid disclosed herein (i) at least one cationic lipid; (ii) a neutral lipid; (iii) a sterol, e.g., cholesterol; and (iv) a PEG-lipid, in a molar ratio of about 20-60% cationic lipid: 5-25% neutral lipid: 25-55% sterol; 0.5-15% PEG-lipid.

[0395] The artificial nucleic acid molecule, preferably RNA, of the invention and/or any other nucleic acid disclosed herein, may be formulated in an aminoalcohol lipidoid. Aminoalcohol lipidoids which may be used in the present invention may be prepared by the methods described in U.S. Pat. No. 8,450,298, herein incorporated by reference in its entirety.

[0396] LNPs typically comprise a cationic lipid and one or more excipient selected from neutral lipids, charged lipids, steroids and polymer conjugated lipids (e.g. PEGylated lipid). The RNA may be encapsulated in the lipid portion of the LNP or an aqueous space enveloped by some or the entire lipid portion of the LNP. The RNA or a portion thereof may also be associated and complexed with the LNP. An LNP may comprise any lipid capable of forming a particle to which the nucleic acids are attached, or in which the one or more nucleic acids are encapsulated. Preferably, the LNP comprising nucleic acids comprises one or more cationic lipids, and one or more stabilizing lipids. Stabilizing lipids include neutral lipids and PEGylated lipids.

[0397] The cationic lipid of an LNP may be cationisable, i.e. it becomes protonated as the pH is lowered below the pK of the ionizable group of the lipid, but is progressively more neutral at higher pH values. At pH values below the pK, the lipid is then able to associate with negatively charged nucleic acids. In certain embodiments, the cationic lipid comprises a zwitterionic lipid that assumes a positive charge on pH decrease.

### (i) Cationic Lipids

[0398] LNPs may include any cationic lipid suitable for forming a lipid nanoparticle. Preferably, the cationic lipid carries a net positive charge at about physiological pH.

[0399] The cationic lipid may be an amino lipid. As used herein, the term “amino lipid” is meant to include those lipids having one or two fatty acid or fatty alkyl chains and an amino head group (including an alkylamino or dialkylamino group) that may be protonated to form a cationic lipid at physiological pH.

[0400] The cationic lipid may be, for example, N,N-dioleyl-N,N-dimethylammonium chloride (DODAC), N,N-distearyl-N,N-dimethylammonium bromide (DDAB), 1,2-dioleoyltrimethyl ammonium propane chloride (DOTAP) (also known as N-(2,3-dioleoyloxy) propyl)-N,N,N-trimethylammonium chloride and 1,2-Dioleyloxy-3-trimethylaminopropane chloride salt), N-(1-(2,3-dioleyloxy) propyl)-N,N,N-trimethylammonium chloride (DOTMA), N,N-dimethyl-2,3-dioleyloxy) propylamine (DODMA), 1,2-DiLinoleyloxy-N,N-dimethylaminopropane (DLinDMA), 1,2-Dilinolenyloxy-N,N-dimethylaminopropane (DLenDMA), 1,2-di-ylinolenyloxy-N,N-dimethylaminopropane (γ-DLenDMA), 1,2-Dilinoleylcarbamoyloxy-3-dimethylaminopropane (DLin-C-DAP), 1,2-Dilinoleyoxy-3-(dimethylamino) acetoxypropane (DLin-DAC), 1,2-Dilinoleyoxy-3-morpholinopropane (DLin-MA), 1,2-Dilinoleoyl-3-dimethylaminopropane (DLinDAP), 1,2-Dilinoleylthio-3-dimethylaminopropane (DLin-S-DMA), 1-Linoleoyl-2-linoleyloxy-3-dimethylaminopropane (DLin-2-DMAP), 1,2-Dilinoleyloxy-3-trimethylaminopropane chloride salt (DLin-TMA·Cl), 1,2-Dilinoleoyl-3-trimethyl-aminopropane chloride salt (DLin-TAP·Cl), 1,2-Dilinoleyloxy-3-(N-methylpiperazino) propane (DLin-MPZ), or 3-(N,N-Dilinoleylamino)-1,2-propanediol (DLinAP), 3-(N,N-Dioleylamino)-1,2-propanedio (DOAP), 1,2-Dilinoleyloxo-3-(2-N,N-dimethylamino) ethoxypropane (DLin-EG-DMA), 2,2-Dilinoleyl-4-dimethylaminomethyl-[1,3]-dioxolane (DLin-K-DMA) or analogs thereof, (3aR,5s,6aS)-N,N-dimethyl-2,2-di((9Z,12Z)-octadeca-9,12-dienyl)tetrahydro-3aH-cyclopenta-[d][1,3]dioxol-5-amine, (6Z,9Z,28Z,31Z)-heptatriaconta-6,9,28,31-tetraen-19-yl 4-(dimethylamino)butanoate (MC3), 1,1′-(2-(4-(2-((2-(bis(2-hydroxydodecyl)amino)ethyl) (2-hydroxydodecyl)amino)ethyl) piperazin-1-yl)ethylazanediyl)-didodecan-2-ol (C12-200), 2,2-dilinoleyl-4-(2-dimethylaminoethyl)-[1,3]-dioxolane (DLin-K-C2-DMA), 2,2-dilinoleyl-4-dimethylaminomethyl-[1,3]-dioxolane (DLin-K-DMA), (6Z,9Z,28Z,31Z)-heptatriaconta-6,9,28,31-tetraen-19-yl 4-(di-methylamino)butanoate (DLin-M-C3-DMA), 3-((6Z,9Z,28Z,31Z)-heptatriaconta-6,9,28,31-tetraen-19-yloxy)-N,N-dimethylpropan-1-amine (MC3 Ether), 4-((6Z,9Z,28Z,31Z)-heptatriaconta-6,9,28,31-tetraen-19-yloxy)-N,N-dimethyl-butan-1-amine (MC4 Ether), or any combination of any of the foregoing.

[0401] Other cationic lipids include, but are not limited to, N,N-distearyl-N,N-dimethylammonium bromide (DDAB), 3P—(N—(N′,N′-dimethylaminoethane)-carbamoyl) cholesterol (DC-Chol), N-(1-(2,3-dioleyloxy) propyl)-N-2-(spermine-carboxamido)ethyl)-N,N-dimethylammonium trifluoracetate (DOSPA), dioctadecylamidoglycyl carboxyspermine (DOGS), 1,2-dileoyl-sn-3-phosphoethanolamine (DOPE), 1,2-dioleoyl-3-dimethylammonium propane (DODAP), N-(1,2-dimyristyloxyprop-3-yl)-N,N-dimethyl-N-hydroxyethyl ammonium bromide (DMRIE), and 2,2-Dilinoleyl-4-dimethylaminoethyl-[1,3]-dioxolane (XTC). Additionally, commercial preparations of cationic lipids can be used, such as, e.g., LIPOFECTIN (including DOTMA and DOPE, available from GIBCO/BRL), and LIPOFECTAMINE (comprising DOSPA and DOPE, available from GIBCO/BRL).

[0402] Other suitable cationic lipids are disclosed in International Publication Nos. WO 09/086558, WO 09/127060, WO 10/048536, WO 10/054406, WO 10/088537, WO 10/129709, and WO 2011/153493; U.S. Patent Publication Nos. 2011/0256175, 2012/0128760, and 2012/0027803; U.S. Pat. No. 8,158,601; and Love et al, PNAS, 107(5), 1864-69, 2010.

[0403] In some embodiments, the lipid is selected from the group consisting of 98N12-5, C12-200, and ckk-E12.

[0404] In another embodiment, ionizable lipids can also be the compounds as disclosed in WO2015/074085A1 (i.e. ATX-001 to ATX-032 or the compounds as specified in claims 1-26), U.S. Appl. Nos. 61/905,724 and Ser. No. 15/614,499 or U.S. Pat. Nos. 9,593,077 and 9,567,296 hereby incorporated by reference in their entirety.

[0405] In that context, any lipid derived from generic Formula (LNP-I)

[chemical structure]

wherein, R₁ and R₂ are the same or different, each a linear or branched alkyl consisting of 1 to 9 carbons, an alkenyl or alkynyl consisting of 2 to 11 carbons, L₁ and L₂ are the same or different, each a linear alkylene or alkenylene consisting of 5 to 18 carbons, or forming a heterocycle with N, X₁ is a bond, or is —CO—O— whereby -L₂-CO—O—R₂ is formed, X₂ is S or O, L₃ is a bond or a linear or branched alkylene consisting of 1 to 6 carbons, or forming a heterocycle with N, R₃ is a linear or branched alkylene consisting of 1 to 6 carbons, and R₄ and R₅ are the same or different, each hydrogen or a linear or branched alkyl consisting of 1 to 6 carbons; or a pharmaceutically acceptable salt thereof may be suitably used.

[0406] In other embodiments, suitable cationic lipids can also be the compounds as disclosed in WO2017/117530A1 (i.e. lipids 13, 14, 15, 16, 17, 18, 19, 20, or the compounds as specified in the claims), hereby incorporated by reference in its entirety.

[0407] In that context, any lipid derived from generic Formula (LNP-II)

[chemical structure]

[0408] wherein
[0409] X is a linear or branched alkylene or alkenylene, monocyclic, bicyclic, or tricyclic arene or heteroarene;
[0410] Y is a bond, an ethene, or an unsubstituted or substituted aromatic or heteroaromatic ring; Z is S or 0;
[0411] L is a linear or branched alkylene of 1 to 6 carbons;
[0412] R₃ and R₄ are independently a linear or branched alkyl of 1 to 6 carbons;
[0413] R₁ and R₂ are independently a linear or branched alkyl or alkenyl of 1 to 20 carbons; r is 0 to 6; and
[0414] m, n, p, and q are independently 1 to 18;
[0415] wherein when n=q, m=p, and R₁=R₂, then X and Y differ;
[0416] wherein when X=Y, n=q, m=p, then R₁ and R₂ differ;
[0417] wherein when X=Y, n=q, and R₁=R₂, then m and p differ; and
[0418] wherein when X=Y, m=p, and R₁=R₂, then n and q differ;
[0419] or a pharmaceutically acceptable salt thereof.

[0420] In preferred embodiments, a lipid may be used derived from Formula (LNP-II), wherein, X is a bond, linear or branched alkylene, alkenylene, or monocyclic, bicyclic, or tricyclic arene or heteroarene; Y is a monocyclic, bicyclic, or tricyclic arene or heteroarene; Z is S or O; L is a linear or branched alkylene of 1 to 6 carbons; R₃ and R₄ are independently a linear or branched alkyl of 1 to 6 carbons; R₁ and R₂ are independently a linear or branched alkyl or alkenyl of 1 to 20 carbons; r is 0 to 6; and m, n, p, and q are independently 1 to 18; or a pharmaceutically acceptable salt thereof may be suitably used.

[0421] In preferred embodiments, ionizable lipids may also be selected from the lipid compounds disclosed in PCT application PCT/EP2017/077517 (i.e. lipid compounds derived form Formula I, II, and III of PCT/EP2017/077517, or lipid compounds as specified in claims 1 to 12 of PCT/EP2017/077517), the disclosure of PCT/EP2017/077517 hereby incorporated by reference in its entirety. In that context, lipid compounds disclosed in Table 7 of PCT/EP2017/077517 (e.g. lipid compounds derived from Formula 1-1 to 1-41) and lipid compounds disclosed in Table 8 of PCT/EP2017/077517 (e.g. lipid compounds derived from Formula II-1 to II-36) may be suitably used in the context of the invention. Accordingly, Formula I-1 to Formula I-41 and Formula II-1 to Formula II-36 of PCT/EP2017/077517, and the specific disclosure relating thereto, are herewith incorporated by reference.

[0422] In particularly preferred embodiments of the second aspect, a suitable lipid may be a cationic lipid according to Formula (LNP-III)

[chemical structure]

or a pharmaceutically acceptable salt, tautomer, prodrug or stereoisomer thereof, wherein, R¹, R², R³, L¹, L², G¹, G², and G³ are as below.

[0423] Formula (LNP-III) is further defined in that:
[0424] one of L¹ or L² is —O(C═O)—, —(C═O)O—, —C(═O)—, —O—, —S(O)ₓ—, —S—S—, —C(═O)S—, SC(═O)—, —NR^{a}C(═O)—, —C(═O)NR^{a}—, —NR^{a}C(═O)NR^{a}—, —OC(═O)NR^{a}— or —NR^{a}C(═O)O—, and the other of L¹ or L² is —O(C═O)—, —(C═O)O—, —C(═O)—, —O—, —S(O)ₓ—, —S—S—, —C(═O)S—, SC(═O)—, —NR^{a}C(═O)—, —C(═O)NR^{a}—, —NR^{a}C(═O)NR^{a}—, —OC(═O)NR^{a}— or —NR^{a}C(═O)O— or a direct bond;
[0425] G¹ and G² are each independently unsubstituted C₁-C₁₂ alkylene or C₁-C₁₂ alkenylene;
[0426] G³ is C₁-C₂₄ alkylene, C₁-C₂₄ alkenylene, C₃-C₈ cycloalkylene, C₃-C₈ cycloalkenylene;
[0427] R^{a} is H or C₁-C₁₂ alkyl;
[0428] R¹ and R² are each independently C₆-C₂₄ alkyl or C₆-C₂₄ alkenyl;
[0429] R³ is H, OR₅, CN, —C(═O)OR₄, —OC(═O)R⁴ or —NR₅C(═O)R⁴;
[0430] R⁴ is C₁-C₁₂ alkyl;
[0431] R⁵ is H or C₁-C₆ alkyl; and
[0432] x is 0, 1 or 2.

[0433] In some of the foregoing embodiments of Formula (LNP-III), the lipid has one of the following structures (LNP-IIIA) or (LNP-IIIB):

[chemical structure]

[0434] wherein:
[0435] A is a 3 to 8-membered cycloalkyl or cycloalkylene ring; R⁶ is, at each occurrence, independently H, OH or C₁-C₂₄ alkyl;
[0436] n is an integer ranging from 1 to 15.

[0437] In some of the foregoing embodiments of Formula (LNP-III), the lipid has structure (LNP-IIIA), and in other embodiments, the lipid has structure (LNP-IIIB).

[0438] In other embodiments of Formula (LNP-III), the lipid has one of the following structures (LNP-IIIC) or (LNP-IIID):

[chemical structure]

wherein y and z are each independently integers ranging from 1 to 12.

[0439] In any of the foregoing embodiments of Formula (LNP-III), one of L¹ or L² is —O(C═O)—. For example, in some embodiments each of L¹ and L² are —O(C═O)—. In some different embodiments of any of the foregoing, L¹ and L² are each independently —(C═O)O— or —O(C═O)—. For example, in some embodiments each of L¹ and L² is (C═O)O—.

[0440] In preferred embodiments, the cationic lipid of the LNP is a compound of Formula (LNP-III), wherein:
[0441] L¹ and L² are each independently —O(C═O)— or (C═O)—O—;
[0442] G³ is C₁-C₂₄ alkylene or C₁-C₂₄ alkenylene; and
[0443] R³ is H or OR₅.

[0444] In some different embodiments of Formula (LNP-III), the lipid has one of the following structures (LNP-IIIE) or (LNP-IIIF):

[chemical structure]

[0445] In some of the foregoing embodiments of Formula (LNP-III), the lipid has one of the following structures (LNP-IIIG), (LNP-IIIH), (LNP-IIII), or (LNP-IIIJ):

[chemical structure]

[0446] In some of the foregoing embodiments of Formula (LNP-III), n is an integer ranging from 2 to 12, for example from 2 to 8 or from 2 to 4. In some embodiments, n is 3, 4, 5 or 6. In some embodiments, n is 3. In some embodiments, n is 4.

[0447] In some embodiments, n is 5. In some embodiments, n is 6. In some other of the foregoing embodiments of Formula (LNP-III), y and z are each independently an integer ranging from 2 to 10. For example, in some embodiments, y and z are each independently an integer ranging from 4 to 9 or from 4 to 6. In some of the foregoing embodiments of Formula (LNP-III), R⁶ is H. In other of the foregoing embodiments, R⁶ is C₁-C₂₄ alkyl. In other embodiments, R⁶ is OH. In some embodiments of Formula (LNP-III), G³ is unsubstituted. In other embodiments, G³ is substituted. In various different embodiments, G³ is linear C₁-C₂₄ alkylene or linear C₁-C₂₄ alkenylene. In some other foregoing embodiments of Formula (LNP-III), R¹ or R², or both, is C₆-C₂₄ alkenyl. For example, in some embodiments, R¹ and R² each, independently have the following structure:

[chemical structure]

[0448] wherein:
[0449] R^{7a} and R^{7b} are, at each occurrence, independently H or C₁-C₁₂ alkyl; and a is an integer from 2 to 12, wherein R^{7a}, R^{7b} and a are each selected such that R¹ and R² each independently comprise from 6 to 20 carbon atoms. For example, in some embodiments a is an integer ranging from 5 to 9 or from 8 to 12. In some of the foregoing embodiments of Formula (LNP-III), at least one occurrence of R^{7a} is H. For example, in some embodiments, R^{7a} is H at each occurrence. In other different embodiments of the foregoing, at least one occurrence of R^{7b} is C₁-C₈ alkyl. For example, in some embodiments, C₁-C₈ alkyl is methyl, ethyl, n-propyl, iso-propyl, n-butyl, iso-butyl, tert-butyl, n-hexyl or n-octyl.

[0450] In different embodiments of Formula (LNP-III), R¹ or R², or both, has one of the following structures:

[chemical structure]

[0451] In preferred embodiments, the cationic lipid of the LNP is a compound of formula (LNP-III), wherein:
[0452] L¹ and L² are each independently —O(C═O)— or (C═O)—O—; and
[0453] R¹ and R² each independently have one of the following structures:

[chemical structure]

[0454] In some of the foregoing embodiments of Formula (LNP-III), R³ is OH, CN, —C(═O)OR⁴, —OC(═O)R⁴ or —NHC(═O)R⁴. In some embodiments, R⁴ is methyl or ethyl.

[0455] In preferred embodiments of the second aspect, the cationic lipid of the LNP is a compound of Formula (LNP-III), wherein R³ is OH.

[0456] In particularly preferred embodiment, the artificial nucleic acid, preferably RNA of the first aspect is complexed with one or more lipids thereby forming lipid nanoparticles (LNP), wherein the LNP is selected from structures (LNP-III-1) to (LNP-III-36) (see Table 6).

TABLE 6
Representative lipid compounds derived from Formula (LNP-III)

| No. | Structure |
|---|---|
| LNP-III-1 | [chemical structure] |
| LNP-III-2 | [chemical structure] |
| LNP-III-3 | [chemical structure] |
| LNP-III-4 | [chemical structure] |
| LNP-III-5 | [chemical structure] |
| LNP-III-6 | [chemical structure] |
| LNP-III-7 | [chemical structure] |
| LNP-III-8 | [chemical structure] |
| LNP-III-9 | [chemical structure] |
| LNP-III-10 | [chemical structure] |
| LNP-III-11 | [chemical structure] |
| LNP-III-12 | [chemical structure] |
| LNP-III-13 | [chemical structure] |
| LNP-III-14 | [chemical structure] |
| LNP-III-15 | [chemical structure] |
| LNP-III-16 | [chemical structure] |
| LNP-III-17 | [chemical structure] |
| LNP-III-18 | [chemical structure] |
| LNP-III-19 | [chemical structure] |
| LNP-III-20 | [chemical structure] |
| LNP-III-21 | [chemical structure] |
| LNP-III-22 | [chemical structure] |
| LNP-III-23 | [chemical structure] |
| LNP-III-24 | [chemical structure] |
| LNP-III-25 | [chemical structure] |
| LNP-III-26 | [chemical structure] |
| LNP-III-27 | [chemical structure] |
| LNP-III-28 | [chemical structure] |
| LNP-III-29 | [chemical structure] |
| LNP-III-30 | [chemical structure] |
| LNP-III-31 | [chemical structure] |
| LNP-III-32 | [chemical structure] |
| LNP-III-33 | [chemical structure] |
| LNP-III-34 | [chemical structure] |
| LNP-III-35 | [chemical structure] |
| LNP-III-36 | [chemical structure] |

[0457] In some embodiments, the LNPs comprise a lipid of Formula (LNP-III), an artificial nucleic acid, preferably RNA of the first aspect, and one or more excipient selected from neutral lipids, steroids and PEGylated lipids. In some embodiments the lipid of Formula (LNP-III) is compound (LNP-III-3). In some embodiments the lipid of Formula (LNP-III) is compound (LNP-III-7).

[0458] In preferred embodiments, the LNP comprises a cationic lipid selected from:

[chemical structure]

[0459] In particularly preferred embodiment, the artificial nucleic acid, preferably RNA of the first aspect is complexed with one or more lipids thereby forming lipid nanoparticles (LNP), wherein the LNP comprises the following cationic lipid (lipid according to Formula LNP-III-3 of Table 6):

[chemical structure]

[0460] In certain embodiments, the cationic lipid as defined herein, preferably as disclosed in Table 6, more preferably cationic lipid compound LNP-III-3, is present in the LNP in an amount from about 30 to about 95 mole percent, relative to the total lipid content of the LNP. If more than one cationic lipid is incorporated within the LNP, such percentages apply to the combined cationic lipids.

[0461] In one embodiment, the cationic lipid is present in the LNP in an amount from about 30 to about 70 mole percent. In one embodiment, the cationic lipid is present in the LNP in an amount from about 40 to about 60 mole percent, such as about 40, 41, 42, 43, 44, 45, 46, 47, 48, 49, 50, 51, 52, 53, 54, 55, 56, 57, 58, 59 or 60 mole percent, respectively. In embodiments, the cationic lipid is present in the LNP in an amount from about 47 to about 48 mole percent, such as about 47.0, 47.1, 47.2, 47.3, 47.4, 47.5, 47.6, 47.7, 47.8, 47.9, 50.0 mole percent, respectively, wherein 47.7 mole percent are particularly preferred.

[0462] In some embodiments, the cationic lipid is present in a ratio of from about 20 mol % to about 70 or 75 mol % or from about 45 to about 65 mol % or about 20, 25, 30, 35, 40, 45, 50, 55, 60, 65, or about 70 mol % of the total lipid present in the LNP. In further embodiments, the LNPs comprise from about 25% to about 75% on a molar basis of cationic lipid, e.g., from about 20 to about 70%, from about 35 to about 65%, from about 45 to about 65%, about 60%, about 57.5%, about 57.1%, about 50% or about 40% on a molar basis (based upon 100% total moles of lipid in the lipid nanoparticle). In some embodiments, the ratio of cationic lipid to nucleic acid, preferably to the artificial RNA of the first aspect, is from about 3 to about 15, such as from about 5 to about 13 or from about 7 to about 11.

[0463] In some embodiments of the invention the LNP comprises a combination or mixture of any the lipids described above.

[0464] Other suitable (cationic) lipids are disclosed in WO2009/086558, WO2009/127060, WO2010/048536, WO2010/054406, WO2010/088537, WO2010/129709, WO2011/153493, US2011/0256175, US2012/0128760, US2012/0027803, U.S. Pat. No. 8,158,601, WO2016118724, WO2016118725, WO2017070613, WO2017070620, WO2017099823, and WO2017112865. In that context, the disclosures of WO2009/086558, WO2009/127060, WO2010/048536, WO2010/054406, WO2010/088537, WO2010/129709, WO2011/153493, US2011/0256175, US2012/0128760, US2012/0027803, U.S. Pat. No. 8,158,601, WO2016118724, WO2016118725, WO2017070613, WO2017070620, WO2017099823, and WO2017112865 specifically relating to (cationic) lipids suitable for LNPs are incorporated herewith by reference.

[0465] In some embodiments, amino or cationic lipids as defined herein have at least one protonatable or deprotonatable group, such that the lipid is positively charged at a pH at or below physiological pH (e.g. pH 7.4), and neutral at a second pH, preferably at or above physiological pH. It will, of course, be understood that the addition or removal of protons as a function of pH is an equilibrium process, and that the reference to a charged or a neutral lipid refers to the nature of the predominant species and does not require that all of lipids have to be present in the charged or neutral form. Lipids having more than one protonatable or deprotonatable group, or which are zwitterionic, are not excluded and may likewise suitable in the context of the present invention.

[0466] In some embodiments, the protonatable lipids have a pKa of the protonatable group in the range of about 4 to about 11, e.g., a pKa of about 5 to about 7.

[0467] LNPs can comprise two or more (different) cationic lipids. The cationic lipids may be selected to contribute different advantageous properties. For example, cationic lipids that differ in properties such as amine pKa, chemical stability, half-life in circulation, half-life in tissue, net accumulation in tissue, or toxicity can be used in the LNP. In particular, the cationic lipids can be chosen so that the properties of the mixed-LNP are more desirable than the properties of a single-LNP of individual lipids.

[0468] The amount of the permanently cationic lipid or lipidoid may be selected taking the amount of the nucleic acid cargo into account. In one embodiment, these amounts are selected such as to result in an N/P ratio of the nanoparticle(s) or of the composition in the range from about 0.1 to about 20. In this context, the N/P ratio is defined as the mole ratio of the nitrogen atoms (“N”) of the basic nitrogen-containing groups of the lipid or lipidoid to the phosphate groups (“P”) of the RNA which is used as cargo. The N/P ratio may be calculated on the basis that, for example, 1 μg RNA typically contains about 3 nmol phosphate residues, provided that the RNA exhibits a statistical distribution of bases. The “N”-value of the lipid or lipidoid may be calculated on the basis of its molecular weight and the relative content of permanently cationic and—if present—cationisable groups.

[0469] LNP in vivo characteristics and behavior can be modified by addition of a hydrophilic polymer coating, e.g. polyethylene glycol (PEG), to the LNP surface to confer steric stabilization. Furthermore, LNPs can be used for specific targeting by attaching ligands (e.g. antibodies, peptides, and carbohydrates) to its surface or to the terminal end of the attached PEG chains (e.g. via PEGylated lipids).

[0470] In some embodiments, the LNPs comprise a polymer conjugated lipid. The term “polymer conjugated lipid” refers to a molecule comprising both a lipid portion and a polymer portion. An example of a polymer conjugated lipid is a PEGylated lipid. The term “PEGylated lipid” refers to a molecule comprising both a lipid portion and a polyethylene glycol portion. PEGylated lipids are known in the art and include 1-(monomethoxy-polyethyleneglycol)-2,3-dimyristoylglycerol (PEG-s-DMG) and the like.

[0471] Other suitable amino lipids include those having alternative fatty acid groups and other dialkylamino groups, including those in which the alkyl substituents are different (e.g., N-ethyl-N-methylamino-, and N-propyl-N-ethylamino-). In general, amino lipids having less saturated acyl chains are more easily sized, particularly when the complexes must be sized below about 0.3 microns, for purposes of filter sterilization. Amino lipids containing unsaturated fatty acids with carbon chain lengths in the range of C₁₄ to C₂₂

may be used. Other scaffolds can also be used to separate the amino group and the fatty acid or fatty alkyl portion of the amino lipid.

[0472] Amino or cationic lipids may have at least one protonatable or deprotonatable group, such that the lipid is positively charged at a pH at or below physiological pH (e.g. pH 7.4), and neutral at a second pH, preferably at or above physiological pH. It will, of course, be understood that the addition or removal of protons as a function of pH is an equilibrium process, and that the reference to a charged or a neutral lipid refers to the nature of the predominant species and does not require that all of the lipid be present in the charged or neutral form. Lipids that have more than one protonatable or deprotonatable group, or which are zwitterionic, are not excluded from use in the invention.

[0473] The protonatable lipids may have a pKa of the protonatable group in the range of about 4 to about 11, e.g., a pKa of about 5 to about 7.

[0474] LNPs may include two or more cationic lipids. The cationic lipids may be selected to contribute different advantageous properties. For example, cationic lipids that differ in properties such as amine pKa, chemical stability, half-life in circulation, half-life in tissue, net accumulation in tissue, or toxicity may be used in the LNP. In particular, the cationic lipids may be chosen so that the properties of the mixed-LNP are more desirable than the properties of a single-LNP of individual lipids.

[0475] The cationic lipid may be present in a ratio of from about 20 mol % to about 70 or 75 mol % or from about 45 to about 65 mol % or about 20, 25, 30, 35, 40, 45, 50, 55, 60, 65, or about 70 mol % of the total lipid present in the LNP. LNPs may comprise from about 25% to about 75% on a molar basis of cationic lipid, e.g., from about 20 to about 70%, from about 35 to about 65%, from about 45 to about 65%, about 60%, about 50% or about 40% on a molar basis (based upon 100% total moles of lipid in the lipid nanoparticle). The ratio of cationic lipid to nucleic acid may be from about 3 to about 15, such as from about 5 to about 13 or from about 7 to about 11. Specifically, the liposome may have a molar ratio of nitrogen atoms in the cationic lipid to the phosphates in the RNA (N:P ratio) of between 1:1 and 20:1 as described in International Publication No. WO 2013/006825 A1, herein incorporated by reference in its entirety. Alternatively, the liposome may have a N:P ratio of greater than 20:1 or less than 1:1.

### (ii) Neutral and Non-Cationic Lipids

[0476] The non-cationic lipid may be a neutral lipid, an anionic lipid, or an amphipathic lipid. Neutral lipids, when present, may be selected any of a number of lipid species which exist either in an uncharged or neutral zwitterionic form at physiological pH. Such lipids include, for example, diacylphosphatidylcholine, diacylphosphatidylethanolamine, ceramide, sphingomyelin, dihydrosphingomyelin, cephalin, and cerebrosides. The selection of neutral lipids for use in the particles described herein is generally guided by consideration of, e.g., LNP size and stability of the LNP in the bloodstream. Preferably, the neutral lipid is a lipid having two acyl groups (e.g., diacylphosphatidylcholine and diacylphosphatidylethanolamine).

[0477] Neutral lipids may contain saturated fatty acids with carbon chain lengths in the range of C₁₀ to C₂₀. In other embodiments, neutral lipids with mono or diunsaturated fatty acids with carbon chain lengths in the range of C₁₀ to C₂₀ are used. Additionally or alternatively, neutral lipids having mixtures of saturated and unsaturated fatty acid chains may be used.

[0478] Suitable neutral lipids include, but are not limited to, distearoylphosphatidylcholine (DSPC), dioleoylphosphatidylcholine (DOPC), dipalmitoylphosphatidylcholine (DPPC), dioleoylphosphatidylglycerol (DOPG), dipalmitoylphosphatidylglycerol (DPPG), dioleoyl-phosphatidylethanolamine (DOPE), palmitoyloleoylphosphatidylcholine (POPC), palmitoyloleoyl-phosphatidylethanolamine (POPE), dioleoyl-phosphatidylethanolamine 4-(N-maleimidomethyl)-cyclohexane-1-carboxylate (DOPE-mal), dipalmitoyl phosphatidyl ethanolamine (DPPE), dimyristoylphosphoethanolamine (DMPE), dimyristoyl phosphatidylcholine (DMPC), distearoyl-phosphatidyl-ethanolamine (DSPE), SM, 16-0-monomethyl PE, 16-O-dimethyl PE, 18-1-trans PE, 1-stearoyl-2-oleoyl-phosphatidyethanolamine (SOPE), cholesterol, or a mixture thereof. Anionic lipids suitable for use in LNPs include, but are not limited to, phosphatidylglycerol, cardiolipin, diacyl-phosphatidylserine, diacylphosphatidic acid, N-dodecanoyl phosphatidylethanoloamine, N-succinyl phosphatidyl-ethanolamine, N-glutaryl phosphatidylethanolamine, lysylphosphatidylglycerol, and other anionic modifying groups joined to neutral lipids.

[0479] Amphipathic lipids refer to any suitable material, wherein the hydrophobic portion of the lipid material orients into a hydrophobic phase, while the hydrophilic portion orients toward the aqueous phase. Such compounds include, but are not limited to, phospholipids, aminolipids, and sphingolipids. Representative phospholipids include sphingomyelin, phosphatidylcholine, phosphatidylethanolamine, phosphatidylserine, phosphatidylinositol, phosphatidic acid, palmitoyl-oleoyl phosphatdylcholine, lysophosphatidylcholine, lysophosphatidylethanolamine, dipalmitoylphosphatidylcholine, dioleoylphosphatidylcholine, distearoylphosphatidylcholine, or dilinoleoylphosphatidylcholine. Other phosphorus-lacking compounds, such as sphingolipids, glycosphingolipid families, diacylglycerols, and beta-acyloxyacids, can also be used.

[0480] In some embodiments, the LNPs comprise a neutral lipid selected from DSPC, DPPC, DMPC, DOPC, POPC, DOPE and SM. In various embodiments, the molar ratio of the cationic lipid to the neutral lipid ranges from about 2:1 to about 8:1.

[0481] In preferred embodiments the neutral lipid is 1,2-distearoyl-sn-glycero-3-phosphocholine (DSPC). The molar ratio of the cationic lipid to DSPC may be in the range from about 2:1 to 8:1.

[0482] The non-cationic lipid may be present in a ratio of from about 5 mol % to about 90 mol %, about 5 mol % to about 10 mol %, about 5, 10, 15, 20, 25, 30, 35, 40, 45, 50, 55, 60, 65, 70, 75, 80, 85, or about 90 mol % of the total lipid present in the LNP.

[0483] LNPs may comprise from about 0% to about 15 or 45% on a molar basis of neutral lipid, e.g., from about 3 to about 12% or from about 5 to about 10%. For instance, LNPs may include about 15%, about 10%, about 7.5%, or about 7.1% of neutral lipid on a molar basis (based upon 100% total moles of lipid in the LNP).

(iii) Sterols

[0484] The sterol may preferably be cholesterol.

[0485] The sterol may be present in a ratio of about 10 mol % to about 60 mol % or about 25 mol % to about 40 mol % of the LNP. The sterol may be present in a ratio of about 10, 15, 20, 25, 30, 35, 40, 45, 50, 55, or about 60 mol % of the total lipid present in the LNP. LNPs may comprise from about 5% to about 50% on a molar basis of the sterol, e.g., about 15% to about 45%, about 20% to about 40%, about 48%, about 40%, about 38.5%, about 35%, about 34.4%, about 31.5% or about 31% on a molar basis (based upon 100% total moles of lipid in the LNP).

### (iv) Aggregation Reducing Agents

[0486] The aggregation reducing agent may be a lipid capable of reducing aggregation.

[0487] Examples of such lipids include, but are not limited to, polyethylene glycol (PEG)-modified lipids, monosialoganglioside Gml, and polyamide oligomers (PAO) such as those described in U.S. Pat. No. 6,320,017, which is incorporated by reference in its entirety. Other compounds with uncharged, hydrophilic, steric-barrier moieties, which prevent aggregation during formulation, like PEG, Gml or ATTA, can also be coupled to lipids. ATTA-lipids are described, e.g., in U.S. Pat. No. 6,320,017, and PEG-lipid conjugates are described, e.g., in U.S. Pat. Nos. 5,820,873, 5,534,499 and 5,885,613, each of which is incorporated by reference in its entirety.

[0488] The aggregation reducing agent may be, for example, selected from a polyethyleneglycol (PEG)-lipid including, without limitation, a PEG-diacylglycerol (DAG), a PEG-dialkylglycerol, a PEG-dialkyloxypropyl (DAA), a PEG-phospholipid, a PEG-ceramide (Cer), or a mixture thereof (such as PEG-Cer₁₄ or PEG-Cer₂₀). The PEG-DAA conjugate may be, for example, a PEG-dilauryloxypropyl (C₁₂), a PEG-dimyristyloxypropyl (C₁₄), a PEG-dipalmityloxypropyl (C₁₆), or a PEG-distearyloxypropyl (C₁₈). Other pegylated-lipids include, but are not limited to, polyethylene glycol-didimyristoyl glycerol (C₁₄-PEG or PEG-C₁₄, where PEG has an average molecular weight of 2000 Da) (PEG-DMG); (R)-2,3-bis(octadecyloxy) propyl-1-(methoxy poly(ethyleneglycol) 2000) propylcarbamate) (PEG-DSG); PEG-carbamoyl-1,2-dimyristyloxypropylamine, in which PEG has an average molecular weight of 2000 Da (PEG-cDMA); N-Acetylgalactosamine-((R)-2,3-bis(octadecyloxy) propyl-1-(methoxy poly(ethylene glycol) 2000) propylcarbamate)) (GalNAc-PEG-DSG); mPEG (mw2000)-diastearoylphosphatidyl-ethanolamine (PEG-DSPE); and polyethylene glycol-dipalmitoylglycerol (PEG-DPG).

[0489] Preferably, the aggregation reducing agent may be selected from PEG-DMG or PEG-c-DMA.

[0490] In preferred embodiments the artificial nucleic acid, preferably RNA of the first aspect is complexed with one or more lipids thereby forming lipid nanoparticles (LNP), wherein the LNP additionally comprises a PEGylated lipid with the Formula (LNP-IV):

[chemical structure]

or a pharmaceutically acceptable salt, tautomer or stereoisomer thereof, wherein R⁸ and R⁹ are each independently a straight or branched, saturated or unsaturated alkyl chain containing from 10 to 30 carbon atoms, wherein the alkyl chain is optionally interrupted by one or more ester bonds; and w has mean value ranging from 30 to 60.

[0491] In some of the foregoing embodiments of the PEGylated lipid according to Formula (LNP-IV), R⁸ and R⁹ are not both n-octadecyl when w is 42. In some other embodiments, R⁸ and R⁹ are each independently a straight or branched, saturated or unsaturated alkyl chain containing from 10 to 18 carbon atoms. In some embodiments, R⁸ and R⁹ are each independently a straight or branched, saturated or unsaturated alkyl chain containing from 12 to 16 carbon atoms. In some embodiments, R⁸ and R⁹ are each independently a straight or branched, saturated or unsaturated alkyl chain containing 12 carbon atoms. In some embodiments, R⁸ and R⁹ are each independently a straight or branched, saturated or unsaturated alkyl chain containing 14 carbon atoms. In other embodiments, R⁸ and R⁹ are each independently a straight or branched, saturated or unsaturated alkyl chain containing 16 carbon atoms. In still more embodiments, R⁸ and R⁹ are each independently a straight or branched, saturated or unsaturated alkyl chain containing 18 carbon atoms. In still other embodiments, R⁸ is a straight or branched, saturated or unsaturated alkyl chain containing 12 carbon atoms and R⁹ is a straight or branched, saturated or unsaturated alkyl chain containing 14 carbon atoms.

[0492] In various embodiments, w spans a range that is selected such that the PEG portion of the PEGylated lipid according to Formula (LNP-IV) has an average molecular weight of about 400 to about 6000 g/mol. In some embodiments, the average w is about 50.

[0493] In preferred embodiments of the second aspect, R⁸ and R⁹ of the PEGylated lipid according to Formula (LNP-IV) are saturated alkyl chains.

[0494] In a particularly preferred embodiment of the second aspect, the artificial RNA of the first aspect is complexed with one or more lipids thereby forming lipid nanoparticles (LNP), wherein the LNP additionally comprises a PEGylated lipid, wherein the PEG lipid is of Formula (LNP-IVa)

[chemical structure]

wherein n has a mean value ranging from 30 to 60, such as about 28 to about 32, about 30 to about 34, 32 to about 36, about 34 to about 38, 36 to about 40, about 38 to about 42, 40 to about 44, about 42 to about 46, 44 to about 48, about 46 to about 50, 48 to about 52, about 50 to about 54, 52 to about 56, about 54 to about 58, 56 to about 60, about 58 to about 62. In preferred embodiments, n is about 45, 46, 47, 48, 49, 50, 51, 52, 53, 54. In a most preferred embodiment n has a mean value of 49.

[0495] In other embodiments, the PEGylated lipid has one of the following structures:

[chemical structure]

wherein n is an integer selected such that the average molecular weight of the PEGylated lipid is about 2500 g/mol, most preferably n is about 49.

[0496] Further examples of PEG-lipids suitable in that context are provided in US20150376115A1 and WO2015199952, each of which is incorporated by reference in its entirety.

[0497] In some embodiments, LNPs include less than about 3, 2, or 1 mole percent of PEG or PEG-modified lipid, based on the total moles of lipid in the LNP. In further embodiments, LNPs comprise from about 0.1% to about 20% of the PEG-modified lipid on a molar basis, e.g., about 0.5 to about 10%, about 0.5 to about 5%, about 10%, about 5%, about 3.5%, about 3%, about 2.5%, about 2%, about 1.5%, about 1%, about 0.5%, or about 0.3% on a molar basis (based on 100% total moles of lipids in the LNP). In preferred embodiments, LNPs comprise from about 1.0% to about 2.0% of the PEG-modified lipid on a molar basis, e.g., about 1.2 to about 1.9%, about 1.2 to about 1.8%, about 1.3 to about 1.8%, about 1.4 to about 1.8%, about 1.5 to about 1.8%, about 1.6 to about 1.8%, in particular about 1.4%, about 1.5%, about 1.6%, about 1.7%, about 1.8%, about 1.9%, most preferably 1.7% (based on 100% total moles of lipids in the LNP). In various embodiments, the molar ratio of the cationic lipid to the PEGylated lipid ranges from about 100:1 to about 25:1.

### LNP Composition

[0498] The composition of LNPs may be influenced by, inter alia, the selection of the cationic lipid component, the degree of cationic lipid saturation, the nature of the PEGylation, the ratio of all components and biophysical parameters such as its size. In one example by Semple et al. (Semple et al. Nature Biotech. 2010 28:172-176; herein incorporated by reference in its entirety), the LNP composition was composed of 57.1% cationic lipid, 7.1% dipalmitoylphosphatidylcholine, 34.3% cholesterol, and 1.4% PEG-c-DMA (Basha et al. Mol Ther. 2011 19:2186-2200; herein incorporated by reference in its entirety).

[0499] LNPs may comprise from about 35 to about 45% cationic lipid, from about 40% to about 50% cationic lipid, from about 50% to about 60% cationic lipid and/or from about 55% to about 65% cationic lipid. The ratio of lipid to nucleic acid may range from about 5:1 to about 20:1, from about 10:1 to about 25:1, from about 15:1 to about 30:1 and/or at least 30:1.

[0500] The average molecular weight of the PEG moiety in the PEG-modified lipids can range from about 500 to about 8,000 Daltons (e.g., from about 1,000 to about 4,000 Daltons). In one preferred embodiment, the average molecular weight of the PEG moiety is about 2,000 Daltons.

[0501] The concentration of the aggregation reducing agent may range from about 0.1 to about 15 mol %, per 100% total moles of lipid in the LNP. In some embodiments, LNPs include less than about 3, 2, or 1 mole percent of PEG or PEG-modified lipid, based on the total moles of lipid in the LNP. In further embodiments, LNPs comprise from about 0.1% to about 20% of the PEG-modified lipid on a molar basis, e.g., about 0.5 to about 10%, about 0.5 to about 5%, about 10%, about 5%, about 3.5%, about 1.5%, about 0.5%, or about 0.3% on a molar basis (based on 100% total moles of lipids in the LNP).

[0502] Different LNPs having varying molar ratios of cationic lipid, non-cationic (or neutral) lipid, sterol (e.g., cholesterol), and aggregation reducing agent (such as a PEG-modified lipid) on a molar basis (based upon the total moles of lipid in the lipid nanoparticles) as depicted in Table 7 below. In preferred embodiments, the lipid nanoparticle formulation of the invention consists essentially of a lipid mixture in molar ratios of about 20-70% cationic lipid: 5-45% neutral lipid: 20-55% cholesterol, 0.5-15% PEG-modified lipid, more preferably in molar ratios of about 20-60% cationic lipid: 5-25% neutral lipid: 25-55% cholesterol: 0.5-15% PEG-modified lipid.

TABLE 7
Lipid-based formulations

| | Molar ratio of Lipids | | | |
|---|---|---|---|---|
| | (based upon 100% total moles of lipid in the lipid nanoparticle) | | | |
| | | Non- | | Aggregation |
| | | Cationic (or | | Reducing Agent |
| # | Cationic Lipid | Neutral) Lipid | Sterol | (e.g., PEG-lipid) |
| 1 | from about | from about | from about | from about 0.1% to |
| | 35% to | 3% to | 15% to | about 10% |
| | about 65% | about 12% | about 45% | (preferably from |
| | | or 15% | | about 0.5% to |
| | | | | about 2% or 3% |
| 2 | from about | from about | from about | from about 0.1% to |
| | 20% to | 5% to | 20% to | about 10% |
| | about 70% | about 45% | about 55% | (preferably from |
| | | | | about 0.5% to |
| | | | | about 2% or 3% |
| 3 | from about | from about | from about | from about 0.1% to |
| | 45% to | 5% to | 5% to | about 3% |
| | about 65% | about 10% | about 45% | |
| 4 | from about | from about | from about | from about 0.1% to |
| | 20% to | 5% to | 25% to | about 5% |
| | about 60% | about 25% | about 40% | (preferably from |
| | | | | about 0.1% to |
| | | | | about 3%) |
| 5 | about 40% | about 10% | from about | about 10% |
| | | | 25% to | |
| | | | about 55% | |
| 6 | about 35% | about 15% | | about 10% |
| 7 | about 52% | about 13% | | about 5% |
| 8 | about 50% | about 10% | | about 1.5% |

[0503] LNPs may occur as liposomes or lipoplexes as described in further detail below.

[0504] Preferably, lipid nanoparticles (LNPs) comprise: (a) at least one artificial nucleic acid, preferably RNA, (b) a cationic lipid, (c) an aggregation reducing agent (such as polyethylene glycol (PEG) lipid or PEG-modified lipid), (d) optionally a non-cationic lipid (such as a neutral lipid), and (e) optionally, a sterol.

[0505] In some embodiments, the LNPs comprise a lipid of Formula (LNP-III), an artificial nucleic acid, preferably RNA as defined above, a neutral lipid, a steroid and a PEGylated lipid. In preferred embodiments, the lipid of Formula (LNP-III) is lipid compound (LNP-III-3), the neutral lipid is DSPC, the steroid is cholesterol, and the PEGylated lipid is the compound of Formula (LNP-IVa).

[0506] In a preferred embodiment the LNP consists essentially of (i) at least one cationic lipid; (ii) a neutral lipid; (iii) a sterol, e.g., cholesterol; and (iv) a PEG-lipid, e.g. PEG-DMG or PEG-CDMA, in a molar ratio of about 20-60% cationic lipid: 5-25% neutral lipid: 25-55% sterol; 0.5-15% PEG-lipid.

[0507] In particularly preferred embodiments of the second aspect, the artificial nucleic acid, preferably RNA of the first aspect is complexed with one or more lipids thereby forming lipid nanoparticles (LNP), wherein the LNP essentially consists of
[0508] (i) at least one cationic lipid as defined herein, preferably a lipid of Formula (LNP-III), more preferably lipid (LNP-III-3);
[0509] (ii) a neutral lipid as defined herein, preferably 1,2-distearoyl-sn-glycero-3-phosphocholine (DSPC);
[0510] (iii) a steroid or steroid analogue as defined herein, preferably cholesterol; and
[0511] (iv) a PEG-lipid as defined herein, e.g. PEG-DMG or PEG-cDMA, preferably a PEGylated lipid of Formula (LNP-IVa), wherein (i) to (iv) are in a molar ratio of about 20-60% cationic lipid: 5-25% neutral lipid: 25-55% sterol; 0.5-15% PEG-lipid.

[0512] In one preferred embodiment, the lipid nanoparticle comprises: a cationic lipid with Formula (LNP-III) and/or PEG lipid with Formula (LNP-IV), optionally a neutral lipid, preferably 1,2-distearoyl-sn-glycero-3-phosphocholine (DSPC) and optionally a steroid, preferably cholesterol, wherein the molar ratio of the cationic lipid to DSPC is optionally in the range from about 2:1 to 8:1, wherein the molar ratio of the cationic lipid to cholesterol is optionally in the range from about 2:1 to 1:1.

[0513] In a particular preferred embodiment, the lipid nanoparticles (LNPs), have a molar ratio of approximately 50:10:38.5:1.5, preferably 47.5:10:40.8:1.7 or more preferably 47.4:10:40.9:1.7 (i.e. proportion (mol %) of cationic lipid (preferably lipid LNP-III-3), DSPC, cholesterol and PEG-lipid ((preferably PEG-lipid of Formula (LNP-IVa) with n=49); solubilized in ethanol).

[0514] The total amount of nucleic acid, preferably RNA in the lipid nanoparticles may vary and is defined depending on the e.g. RNA to total lipid w/w ratio. In one embodiment of the invention the artificial nucleic acid, preferably RNA to total lipid ratio is less than 0.06 w/w, preferably between 0.03 w/w and 0.04 w/w.

### LNP Size

[0515] According to some embodiments, LNPs have a median diameter size of from about 50 nm to about 300 nm, such as from about 50 nm to about 250 nm, for example, from about 50 nm to about 200 nm.

[0516] According to some embodiments, smaller LNPs may be used. Such particles may comprise a diameter from below 0.1 um up to 100 nm such as, but not limited to, less than 0.1 um, less than 1.0 um, less than 5 um, less than 10 um, less than 15 um, less than 20 um, less than 25 um, less than 30 um, less than 35 um, less than 40 um, less than 50 um, less than 55 um, less than 60 um, less than 65 um, less than 70 um, less than 75 um, less than 80 um, less than 85 um, less than 90 um, less than 95 um, less than 100 um, less than 125 um, less than 150 um, less than 175 um, less than 200 um, less than 225 um, less than 250 um, less than 275 um, less than 300 um, less than 325 um, less than 350 um, less than 375 um, less than 400 um, less than 425 um, less than 450 um, less than 475 um, less than 500 um, less than 525 um, less than 550 um, less than 575 um, less than 600 um, less than 625 um, less than 650 um, less than 675 um, less than 700 um, less than 725 um, less than 750 um, less than 775 um, less than 800 um, less than 825 um, less than 850 um, less than 875 um, less than 900 um, less than 925 um, less than 950 um, less than 975 um, In another embodiment, nucleic acids may be delivered using smaller LNPs which may comprise a diameter from about 1 nm to about 100 nm, from about 1 nm to about 10 nm, about 1 nm to about 20 nm, from about 1 nm to about 30 nm, from about 1 nm to about 40 nm, from about 1 nm to about 50 nm, from about 1 nm to about 60 nm, from about 1 nm to about 70 nm, from about 1 nm to about 80 nm, from about 1 nm to about 90 nm, from about 5 nm to about from 100 nm, from about 5 nm to about 10 nm, about 5 nm to about 20 nm, from about 5 nm to about 30 nm, from about 5 nm to about 40 nm, from about 5 nm to about 50 nm, from about 5 nm to about 60 nm, from about 5 nm to about 70 nm, from about 5 nm to about 80 nm, from about 5 nm to about 90 nm, about 10 to about 50 nM, from about 20 to about 50 nm, from about 30 to about 50 nm, from about 40 to about 50 nm, from about 20 to about 60 nm, from about 30 to about 60 nm, from about 40 to about 60 nm, from about 20 to about 70 nm, from about 30 to about 70 nm, from about 40 to about 70 nm, from about 50 to about 70 nm, from about 60 to about 70 nm, from about 20 to about 80 nm, from about 30 to about 80 nm, from about 40 to about 80 nm, from about 50 to about 80 nm, from about 60 to about 80 nm, from about 20 to about 90 nm, from about 30 to about 90 nm, from about 40 to about 90 nm, from about 50 to about 90 nm, from about 60 to about 90 nm and/or from about 70 to about 90 nm.

[0517] According to some embodiments, the LNP may have a diameter greater than 100 nm, greater than 150 nm, greater than 200 nm, greater than 250 nm, greater than 300 nm, greater than 350 nm, greater than 400 nm, greater than 450 nm, greater than 500 nm, greater than 550 nm, greater than 600 nm, greater than 650 nm, greater than 700 nm, greater than 750 nm, greater than 800 nm, greater than 850 nm, greater than 900 nm, greater than 950 nm or greater than 1000 nm.

[0518] According to other embodiments, LNPs have a single mode particle size distribution (i.e., they are not bi- or poly-modal).

### Other Components

[0519] LNPs may further comprise one or more lipids and/or other components in addition to those mentioned above.

[0520] Other lipids may be included in the liposome compositions for a variety of purposes, such as to prevent lipid oxidation or to attach ligands onto the liposome surface. Any of a number of lipids may be present in LNPs, including amphipathic, neutral, cationic, and anionic lipids. Such lipids can be used alone or in combination.

[0521] Additional components that may be present in a LNP include bilayer stabilizing components such as polyamide oligomers (see, e.g., U.S. Pat. No. 6,320,017, which is incorporated by reference in its entirety), peptides, proteins, and detergents.

### Liposomes

[0522] In some embodiments, artificial nucleic acid molecules, preferably RNAs, or any other nucleic acid disclosed herein, are formulated/provided as liposomes.

[0523] Cationic lipid-based liposomes are able to complex with negatively charged nucleic acids (e.g. RNAs) via electrostatic interactions, resulting in complexes that offer biocompatibility, low toxicity, and the possibility of the large-scale production required for in vivo clinical applications. Liposomes can fuse with the plasma membrane for uptake; once inside the cell, the liposomes are processed via the endocytic pathway and the nucleic acid is then released from the endosome/carrier into the cytoplasm. Liposomes have long been perceived as drug delivery vehicles because of their superior biocompatibility, given that liposomes are basically analogs of biological membranes, and can be prepared from both natural and synthetic phospholipids (Int J Nanomedicine. 2014; 9:1833-1843).

[0524] Liposomes typically consist of a lipid bilayer that can be composed of cationic, anionic, or neutral (phospho) lipids and cholesterol, which encloses an aqueous core. Both the lipid bilayer and the aqueous space can incorporate hydrophobic or hydrophilic compounds, respectively. Liposomes may have one or more lipid membranes. Liposomes can be single-layered, referred to as unilamellar, or multi-layered, referred to as multilamellar.

[0525] Liposome characteristics and behaviour in vivo can be modified by addition of a hydrophilic polymer coating, e.g. polyethylene glycol (PEG), to the liposome surface to confer steric stabilization. Furthermore, liposomes can be used for specific targeting by attaching ligands (e.g., antibodies, peptides, and carbohydrates) to its surface or to the terminal end of the attached PEG chains (Front Pharmacol. 2015 Dec. 1; 6:286).

[0526] Liposomes are typically present as spherical vesicles and can range in size from 20 nm to a few microns.

[0527] Liposomes can be of different sizes such as, but not limited to, a multilamellar vesicle (MLV) which may be hundreds of nanometers in diameter and may contain a series of concentric bilayers separated by narrow aqueous compartments, a small unicellular vesicle (SUV) which may be smaller than 50 nm in diameter, and a large unilamellar vesicle (LUV) which may be between 50 and 500 nm in diameter. Liposome design may include, but is not limited to, opsonins or ligands in order to improve the attachment of liposomes to unhealthy tissue or to activate events such as, but not limited to, endocytosis. Liposomes may contain a low or a high pH in order to improve the delivery of the pharmaceutical formulations.

[0528] As a non-limiting example, liposomes such as synthetic membrane vesicles may be prepared by the methods, apparatus and devices described in US Patent Publication No. US20130177638, US20130177637, US20130177636, US20130177635, US20130177634, US20130177633, US20130183375, US20130183373 and US20130183372, the contents of each of which are herein incorporated by reference in its entirety. The artificial nucleic acid molecule, preferably RNA, of the invention, and/or any other nucleic acid disclosed herein, may be encapsulated by the liposome and/or it may be contained in an aqueous core which may then be encapsulated by the liposome (see International Pub. Nos. WO2012031046, WO2012031043, WO2012030901 and WO2012006378 and US Patent Publication No. US20130189351, US20130195969 and US20130202684; the contents of each of which are herein incorporated by reference in their entirety).

[0529] In some embodiments, the artificial nucleic acid molecule, preferably RNA, of the invention or any other nucleic acid disclosed herein, may be formulated in liposomes such as, but not limited to, DiLa2 liposomes (Marina Biotech, Bothell, WA), SMARTICLES® (Marina Biotech, Bothell, WA), neutral DOPC (1,2-dioleoyl-sn-glycero-3-phosphocholine) based liposomes (e.g., siRNA delivery for ovarian cancer (Landen et al. Cancer Biology & Therapy 2006 5 (12) 1708-1713); herein incorporated by reference in its entirety) and hyaluronan-coated liposomes (Quiet Therapeutics, Israel).

### Lipoplexes

[0530] According to some embodiments, artificial nucleic acid molecule, preferably RNAs, and/or any other nucleic acid disclosed herein, are provided/formulated as lipoplexes, i.e. cationic lipid bilayers sandwiched between nucleic acid layers.

[0531] Cationic lipids, such as DOTAP, (1,2-dioleoyl-3-trimethylammonium-propane) and DOTMA (N-[1-(2,3-dioleoyloxy) propyl]-N,N,N-trimethyl-ammonium methyl sulfate) can form complexes or lipoplexes with negatively charged nucleic acids to form nanoparticles by electrostatic interaction, providing high in vitro transfection efficiency.

### Nanoliposomes

[0532] According to some embodiments, artificial nucleic acid molecule, preferably RNAs, or any other nucleic acid disclosed herein, are provided/formulated as neutral lipid-based nanoliposomes such as 1,2-dioleoyl-sn-glycero-3-phosphatidylcholine (DOPC)-based nanoliposomes (Adv Drug Deliv Rev. 2014 February; 66:110-116).

### Emulsions

[0533] According to some embodiments, artificial nucleic acid molecule, preferably RNAs, and/or any other nucleic acid disclosed herein, are provided/formulated as emulsions. In another embodiment, said artificial nucleic acid molecule, preferably RNAs, or any other nucleic acid disclosed herein, are formulated in a cationic oil-in-water emulsion where the emulsion particle comprises an oil core and a cationic lipid which can interact with the nucleic acid(s) anchoring the molecule to the emulsion particle (see International Pub. No. WO2012006380; herein incorporated by reference in its entirety). In some embodiments, said artificial nucleic acid molecule, preferably RNA, or any other nucleic acid disclosed herein, is formulated in a water-in-oil emulsion comprising a continuous hydrophobic phase in which the hydrophilic phase is dispersed. As a non-limiting example, the emulsion may be made by the methods described in International Publication No. WO201087791, the contents of which are herein incorporated by reference in its entirety.

### (Poly-)Cationic Compounds and Polymeric Carriers

[0534] According to preferred embodiments, the artificial nucleic acid molecule, preferably RNA, of the invention, and/or any other nucleic acid disclosed herein, is complexed or associated with a cationic or polycationic compound (“(poly-)cationic compound”) and/or a polymeric carrier.

[0535] The term “(poly-)cationic compound” typically refers to a charged molecule, which is positively charged (cation) at a pH value typically from 1 to 9, preferably at a pH value of or below 9 (e.g. from 5 to 9), of or below 8 (e.g. from 5 to 8), of or below 7 (e.g. from 5 to 7), most preferably at a physiological pH, e.g. from 7.3 to 7.4.

[0536] Accordingly, a “(poly-)cationic compound” may be any positively charged compound or polymer, preferably a cationic peptide or protein, which is positively charged under physiological conditions, particularly under physiological conditions in vivo. A “(poly-)cationic peptide or protein” may contain at least one positively charged amino acid, or more than one positively charged amino acid, e.g. selected from Arg, His, Lys or Orn, as described below.

### (Poly-)Cationic Amino Acids, Peptides and Proteins

[0537] (Poly-)cationic compounds being particularly preferred agents for complexation or association of the artificial nucleic acid molecule, preferably RNA, of the invention, or any other nucleic acid disclosed herein, include protamine, nucleoline, spermine or spermidine, or other cationic peptides or proteins, such as poly-L-lysine (PLL), poly-arginine, basic polypeptides, cell penetrating peptides (CPPs), including HIV-binding peptides, HIV-1 Tat (HIV), Tat-derived peptides, Penetratin, VP22 derived or analog peptides, HSV VP22 (Herpes simplex), MAP, KALA or protein transduction domains (PTDs), PpT620, prolin-rich peptides, arginine-rich peptides, lysine-rich peptides, MPG-peptide(s), Pep-1, L-oligomers, Calcitonin peptide(s), Antennapedia-derived peptides (particularly from Drosophila antennapedia), pAntp, plsl, FGF, Lactoferrin, Transportan, Buforin-2, Bac715-24, SynB, SynB (1), pVEC, hCT-derived peptides, SAP, or histones. More preferably, the artificial nucleic acid molecule, preferably RNA, of the invention, or any other nucleic acid disclosed herein, is complexed with protamine or oligofectamine, most preferably with protamine. Alternatively or additionally, such cationic or polycationic peptides or proteins may be selected from proteins or peptides of the following general formula (CAT-I):

[chemical structure]

[0538] wherein l+m+n+o+x=8-15, and l, m, n or o independently of each other may be any number selected from 0, 1, 2, 3, 4, 5, 6, 7, 8, 9, 10, 11, 12, 13, 14 or 15, provided that the overall content of Arg, Lys, His and Orn represents at least 50% of all amino acids of the oligopeptide; and Xaa may be any amino acid selected from native (=naturally occurring) or non-native amino acids except of Arg, Lys, His or Orn; and x may be any number selected from 0, 1, 2, 3 or 4, provided, that the overall content of Xaa does not exceed 50% of all amino acids of the oligopeptide. Particularly preferred cationic peptides in this context are e.g. Arg₇, Arg₈, Arg₉, H₃R₉, R₉H₃, H₃R₉H₃, YSSR₉SSY, (RKH)₄, Y(RKH)₂R, etc.

[0539] In this context the disclosure of WO 2009/030481 is incorporated herewith by reference.

### (Poly-)Cationic Polysaccharides

[0540] Further preferred (poly-)cationic compounds for complexation of or association with the artificial nucleic acid molecule, preferably RNA, of the invention or any other nucleic acid disclosed herein include (poly-)cationic polysaccharides, e.g. chitosan, polybrene, cationic polymers, e.g. polyethyleneimine (PEI).

### (Poly-)Cationic Lipids

[0541] Further preferred (poly-)cationic compounds for complexation of or association with the artificial nucleic acid molecule, preferably RNA, of the invention or any other nucleic acid disclosed herein include (poly-)cationic lipids, e.g. DOTMA: [1-(2,3-sioleyloxy) propyl)]-N,N,N-trimethylammonium chloride, DMRIE, di-C14-amidine, DOTIM, SAINT, DC-Chol, BGTC, CTAP, DOPC, DODAP, DOPE: Dioleyl phosphatidylethanol-amine, DOSPA, DODAB, DOIC, DMEPC, DOGS: Dioctadecylamidoglicylspermin, DIMRI: Dimyristo-oxypropyl dimethyl hydroxyethyl ammonium bromide, DOTAP: dioleoyloxy-3-(trimethylammonio) propane, DC-6-14: O,O-ditetradecanoyl-N-(alpha-trimethylammonio-acetyl)-diethanolamine chloride, CLIP1: rac-[(2,3-dioctadecyloxypropyl)(2-hydroxyethyl)]-dimethylammonium chloride, CLIP6: rac-[2 (2,3-dihexadecyloxypropyl-oxymethyloxy)ethyl]trimethylammonium, CLIP9: rac-[2(2,3-dihexadecyl-oxypropyl-oxysuccinyloxy)ethyl]-trimethylammonium, or oligofectamine.

### (Poly-)Cationic Polymers

[0542] Further preferred (poly-)cationic compounds for complexation of or association with the artificial nucleic acid molecule, preferably RNA, of the invention or any other nucleic acid disclosed herein, include (poly-)cationic polymers, e.g. modified polyaminoacids, such as beta-aminoacid-polymers or reversed polyamides, etc., modified polyethylenes, such as PVP (poly(N-ethyl-4-vinylpyridinium bromide)), etc., modified acrylates, as such pDMAEMA (poly(dimethylaminoethyl methylacrylate)), etc., modified amidoamines such as pAMAM (poly(amidoamine)), etc., modified polybetaaminoester (PBAE), such as diamine end modified 1,4 butanediol diacrylate-co-5-amino-1-pentanol polymers, etc., dendrimers, such as polypropylamine dendrimers or pAMAM based dendrimers, etc., polyimine(s), such as PEI: poly(ethyleneimine), poly(propyleneimine), etc., polyallylamine, sugar backbone based polymers, such as cyclodextrin based polymers, dextran based polymers, chitosan, etc., silan backbone based polymers, such as PMOXA-PDMS copolymers, etc., or blockpolymers consisting of a combination of one or more cationic blocks (e.g. selected from a cationic polymer as mentioned above) and of one or more hydrophilic or hydrophobic blocks (e.g. polyethyleneglycole).

### Polymeric Carriers

[0543] According to preferred embodiments, artificial nucleic acid molecule, preferably RNA, of the invention or any other nucleic acid disclosed herein, may be complexed or associated with a polymeric carrier.

[0544] A “polymeric carrier” used according to the invention might be a polymeric carrier formed by disulfide-crosslinked cationic components. The disulfide-crosslinked cationic components may be the same or different from each other. The polymeric carrier may also contain further components.

[0545] It is also particularly preferred that the polymeric carrier used according to the present invention comprises mixtures of cationic peptides, proteins or polymers and optionally further components as defined herein, which are crosslinked by disulfide bonds as described herein. In this context, the disclosure of WO 2012/013326 is incorporated herewith by reference.

[0546] In this context, the cationic components, which form basis for the polymeric carrier by disulfide-crosslinkage, are typically selected from any suitable (poly-)cationic peptide, protein or polymer suitable for this purpose, particular any (poly-)cationic peptide, protein or polymer capable of complexing, and thereby preferably condensing, the artificial nucleic acid molecule, preferably RNA, of the invention, or any other nucleic acid as disclosed herein. The (poly-) cationic peptide, protein or polymer, is preferably a linear molecule, however, branched (poly-)cationic peptides, proteins or polymers may also be used.

[0547] Every disulfide-crosslinking (poly-)cationic protein, peptide or polymer of the polymeric carrier, which may be used to complex the artificial nucleic acid molecule, preferably RNA, or any other nucleic acid disclosed herein, preferably contains at least one —SH moiety, most preferably at least one cysteine residue or any further chemical group exhibiting an —SH moiety, capable of forming a disulfide linkage upon condensation with at least one further (poly-)cationic protein, peptide or polymer as cationic component of the polymeric carrier as mentioned herein. The polymeric carrier, which may be used to complex the artificial nucleic acid molecule, preferably RNA, of the invention, or any other nucleic acid disclosed herein, may thus preferably be formed by disulfide-crosslinked (poly-)cationic components

### Polymeric Carriers Comprising (Poly-)Cationic Peptides or Proteins

[0548] According to one first alternative, at least one (poly-)cationic component of the polymeric carrier, which may be used to complex the artificial nucleic acid molecule, preferably RNA, or any other nucleic acid disclosed herein, may be selected from (poly-)cationic peptides or proteins. Such (poly-)cationic peptides or proteins preferably exhibit a length of about 3 to 100 amino acids, preferably a length of about 3 to 50 amino acids, more preferably a length of about 3 to 25 amino acids, e.g. a length of about 3 to 10, 5 to 15, 10 to 20 or 15 to 25 amino acids. Alternatively or additionally, such (poly-)cationic peptides or proteins may exhibit a molecular weight of about 0.01 kDa to about 100 kDa, including a molecular weight of about 0.5 kDa to about 100 kDa, preferably of about 10 kDa to about 50 kDa, even more preferably of about 10 kDa to about 30 kDa.

[0549] In the specific case that the cationic component of the polymeric carrier comprises a (poly-)cationic peptide or protein, the cationic properties of the (poly-)cationic peptide or protein or of the entire polymeric carrier, if the polymeric carrier is entirely composed of (poly-)cationic peptides or proteins, may be determined upon its content of cationic amino acids. Preferably, the content of cationic amino acids in the (poly-)cationic peptide or protein and/or the polymeric carrier is at least 10%, 20%, or 30%, preferably at least 40%, more preferably at least 50%, 60% or 70%, but also preferably at least 80%, 90%, or even 95%, 96%, 97%, 98%, 99% or 100%, most preferably at least 30%, 40%, 50%, 60%, 70%, 80%, 90%, 95%, 96%, 97%, 98%, 99% or 100%, or may be in the range of about 10% to 90%, more preferably in the range of about 15% to 75%, even more preferably in the range of about 20% to 50%, e.g. 20, 30, 40 or 50%, or in a range formed by any two of the afore mentioned values, provided, that the content of all amino acids, e.g. cationic, lipophilic, hydrophilic, aromatic and further amino acids, in the (poly-)cationic peptide or protein, or in the entire polymeric carrier, if the polymeric carrier is entirely composed of cationic or polycationic peptides or proteins, is 100%. According to a preferred embodiment, the (poly-)cationic peptide or protein of the polymeric carrier, when defined according to formula {(Arg)ₗ; (Lys)ₘ; (His)ₙ; (Orn)ₒ; (Xaa)ₓ} (formula (CAT-I)) as shown above and which comprise or are additionally modified to comprise at least one —SH moeity, may be, without being restricted thereto, selected from subformula (CAT-Ia):

[chemical structure]

wherein (Arg)ₗ; (Lys)ₘ; (His)ₙ; (Orn)ₒ; and x are as defined herein, Xaa′ is any amino acid selected from native (=naturally occurring) or non-native amino acids except of Arg, Lys, His, Orn or Cys and y is any number selected from 0, 1, 2, 3, 4, 5, 6, 7, 8, 9, 10, 11, 12, 13, 14, 15, 16, 17, 18, 19, 20, 21-30, 31-40, 41-50, 51-60, 61-70, 71-80 and 81-90, provided that the overall content of Arg (Arginine), Lys (Lysine), His (Histidine) and Orn (Ornithine) represents at least 10% of all amino acids of the oligopeptide.

[0550] This embodiment may apply to situations, wherein the (poly-)cationic peptide or protein of the polymeric carrier, e.g. when defined according to empirical formula (Arg)ₗ; (Lys)ₘ; (His)ₙ; (Orn)ₒ; (Xaa)ₓ (formula (CAT-I)) as shown above, comprises or has been modified with at least one cysteine as —SH moiety in the above meaning such that the cationic or polycationic peptide as cationic component carries at least one cysteine, which is capable to form a disulfide bond with other components of the polymeric carrier.

[0551] Examples may comprise any of the following sequences:

[0552] Cys(Arg₇) (SEQ ID NO: 3048), Cys(Arg₈) (SEQ ID NO: 3049), Cys(Arg₉) (SEQ ID NO: 3050), Cys(Arg₁₀) (SEQ ID NO: 3051), Cys(Arg₁₁) (SEQ ID NO: 3052), Cys(Arg₁₂) (SEQ ID NO: 3047), Cys(Arg₁₃) (SEQ ID NO: 3053), Cys(Arg₁₄) (SEQ ID NO: 3054), Cys(Arg₁₅) (SEQ ID NO: 3055), Cys(Arg₁₆) (SEQ ID NO: 3056), Cys(Arg₁₇) (SEQ ID NO: 3057), Cys(Arg₁₈) (SEQ ID NO: 3058), Cys(Arg₁₉) (SEQ ID NO: 3059), Cys(Arg₂₀) (SEQ ID NO: 3060).

[0553] According to another particularly preferred embodiment, the (poly-)cationic peptide or protein of the polymeric carrier, when defined according to formula {(Arg)ₗ; (Lys)ₘ; (His)ₙ; (Orn)ₒ; (Xaa)ₓ} (formula (CAT-I)) as shown above, may be, without being restricted thereto, selected from subformula (CAT-Ib):

[chemical structure]

[0554] wherein empirical formula {(Arg)ₗ; (Lys)ₘ; (His)ₙ; (Orn)ₒ; (Xaa)ₓ} (formula (CAT-I) is as defined herein and forms a core of an amino acid sequence according to (semiempirical) formula (CAT-II) and wherein Cys1 and Cys2 are cysteines proximal to, or terminal to (Arg)ₗ; (Lys)ₘ; (His)ₙ; (Orn)ₒ; (Xaa)ₓ. Examples may comprise any of the above sequences flanked by two Cys and following sequences:
[0555] Cys(Arg₇)Cys (SEQ ID NO: 3033), Cys(Arg₈)Cys (SEQ ID NO: 3034), Cys(Arg₉)Cys (SEQ ID NO: 3035), Cys(Arg₁₀)Cys (SEQ ID NO: 3036), Cys(Arg₁₁)Cys (SEQ ID NO: 3037), Cys(Arg₁₂)Cys (SEQ ID NO: 3046), Cys(Arg₁₃)Cys (SEQ ID NO: 3038), Cys(Arg₁₄)Cys (SEQ ID NO: 3039), Cys(Arg₁₅)Cys (SEQ ID NO: 3040), Cys(Arg₁₆)Cys (SEQ ID NO: 3041), Cys(Arg₁₇)Cys (SEQ ID NO: 3042), Cys(Arg₁₈)Cys (SEQ ID NO: 3043), Cys(Arg₁₉)Cys (SEQ ID NO: 3044), Cys(Arg₂₀)Cys (SEQ ID NO: 3045).

[0556] This embodiment may apply to situations, wherein the (poly-)cationic peptide or protein of the polymeric carrier, e.g. when defined according to empirical formula (Arg)ₗ; (Lys)ₘ; (His)ₙ; (Orn)ₒ; (Xaa)ₓ (CAT-I) as shown above, has been modified with at least two cysteines as —SH moieties in the above meaning such that the cationic or polycationic peptide of the polymeric carrier cargo complex as cationic component carries at least two (terminal) cysteines, which are capable to form a disulfide bond with other components of the polymeric carrier.

[0557] In a preferred embodiment, the polymeric carrier is formed by, comprises or consists of the peptide CysArg₁₂Cys (CRRRRRRRRRRRRC) (SEQ ID NO: 3046) or CysArg₁₂ (CRRRRRRRRRRRR) (SEQ ID NO: 3047).

### Polymeric Carriers Comprising Non-Peptidic Polymers

[0558] According to a second alternative, at least one (poly-)cationic component of the polymeric carrier may be selected from e.g. any (non-peptidic) (poly-)cationic polymer suitable in this context, provided that this (non-peptidic) (poly-)cationic polymer exhibits or is modified to exhibit at least one —SH-moiety, which provides for a disulfide bond linking the (poly-) cationic polymer with another component of the polymeric carrier as defined herein. Thus, likewise as defined herein, the polymeric carrier may comprise the same or different (poly-)cationic polymers.

[0559] In the specific case that the cationic component of the polymeric carrier comprises a (non-peptidic) (poly-)cationic polymer the cationic properties of the (non-peptidic) (poly-)cationic polymer may be determined upon its content of cationic charges when compared to the overall charges of the components of the cationic polymer. Preferably, the content of cationic charges in the cationic polymer at a (physiological) pH as defined herein is at least 10%, 20%, or 30%, preferably at least 40%, more preferably at least 50%, 60% or 70%, but also preferably at least 80%, 90%, or even 95%, 96%, 97%, 98%, 99% or 100%, most preferably at least 30%, 40%, 50%, 60%, 70%, 80%, 90%, 95%, 96%, 97%, 98%, 99% or 100%, or may be in the range of about 10% to 90%, more preferably in the range of about 30% to 100%, even preferably in the range of about 50% to 100%, e.g. 50, 60, 70, 80%, 90% or 100%, or in a range formed by any two of the afore mentioned values, provided, that the content of all charges, e.g. positive and negative charges at a (physiological) pH as defined herein, in the entire cationic polymer is 100%.

[0560] Preferably, the (non-peptidic) cationic component of the polymeric carrier represents a (poly-)cationic polymer, typically exhibiting a molecular weight of about 0.1 or 0.5 kDa to about 100 kDa, preferably of about 1 kDa to about 75 kDa, more preferably of about 5 kDa to about 50 kDa, even more preferably of about 5 kDa to about 30 kDa, or a molecular weight of about 10 kDa to about 50 kDa, even more preferably of about 10 kDa to about 30 kDa. Additionally, the (non-peptidic) (poly-)cationic polymer typically exhibits at least one —SH-moiety, which is capable to form a disulfide linkage upon condensation with either other cationic components or other components of the polymeric carrier as defined herein.

[0561] In the above context, the (non-peptidic) cationic component of the polymeric carrier may be selected from acrylates, modified acrylates, such as pDMAEMA (poly(dimethylaminoethyl methylacrylate)), chitosanes, aziridines or 2-ethyl-2-oxazoline (forming oligo ethylenimines or modified oligoethylenimines), polymers obtained by reaction of bisacrylates with amines forming oligo beta aminoesters or poly amido amines, or other polymers like polyesters, polycarbonates, etc. Each molecule of these (non-peptidic) cationic or polycationic polymers typically exhibits at least one —SH-moiety, wherein these at least one —SH-moiety may be introduced into the (non-peptidic) cationic or polycationic polymer by chemical modifications, e.g. using imonothiolan, 3-thio propionic acid or introduction of —SH-moieties containing amino acids, such as cysteine or any further (modified) amino acid. Such-SH-moieties are preferably as already defined above.

[0562] The disulfide-crosslinked cationic components may be the same or different from each other. The polymeric carrier can also contain further components. It is also particularly preferred that the polymeric carrier used according to the present invention comprises mixtures of cationic peptides, proteins or polymers and optionally further components as defined herein, which are crosslinked by disulfide bonds as described herein. In this context, the disclosure of WO 2012/013326 is incorporated herewith by reference.

[0563] In this context, the cationic components, which form basis for the polymeric carrier by disulfide-crosslinkage, are typically selected from any suitable cationic or polycationic peptide, protein or polymer suitable for this purpose, particular any cationic or polycationic peptide, protein or polymer capable to complex the artificial nucleic acid molecule, preferably RNA, of the invention and/or any other nucleic acid disclosed herein for use as described herein, and thereby preferably condensing said artificial nucleic acid, and/or said other nucleic acid. The cationic or polycationic peptide, protein or polymer, is preferably a linear molecule. However, branched cationic or polycationic peptides, proteins or polymers may also be used.

[0564] Every disulfide-crosslinking cationic or polycationic protein, peptide or polymer of the polymeric carrier, which may be used to complex the artificial nucleic acid molecule, preferably RNA, of the invention and/or any other nucleic acid disclosed herein for use as described herein contains at least one —SH moiety, most preferably at least one cysteine residue or any further chemical group exhibiting an —SH moiety, capable to form a disulfide linkage upon condensation with at least one further cationic or polycationic protein, peptide or polymer as cationic component of the polymeric carrier as mentioned herein.

[0565] As defined above, the polymeric carrier, which may be used to complex the artificial nucleic acid molecule, preferably RNA, of the invention and/or any other nucleic acid disclosed herein for use as described herein may be formed by disulfide-crosslinked cationic (or polycationic) components.

[0566] A complex of a nucleic acid, such as the artificial nucleic acid, preferably RNA, of the invention and/or any other nucleic acid disclosed herein for use as described herein, complexed with such polymeric carriers are also referred to herein as “polymeric carrier cargo complexes”. According to preferred embodiments, the artificial nucleic acid molecule, preferably RNA, of the invention or any other nucleic acid disclosed herein (preferably an isRNA, preferably comprising or consisting of an RNA sequence corresponding to SEQ ID NO: 2938-3032), may be provided in the form of a polymeric carrier cargo complex, formed by a polymeric carrier, preferably comprising disulfide-crosslinked cationic peptides, preferably Cys-Arg₁₂, and/or Cys-Arg₁₂-Cys, and said artificial nucleic acid molecule, preferably RNA, or said other nucleic acid.

[0567] According to further embodiments, the polymeric carrier may be selected from a polymeric carrier molecule according to generic formula (CAT-II):

[chemical structure]

[0568] wherein,
[0569] P¹ and P³ are different or identical to each other and represent a linear or branched hydrophilic polymer chain, each P¹ and P³ exhibiting at least one —SH-moiety, capable to form a disulfide linkage upon condensation with component P², or alternatively with (AA), (AA)ₓ, or [(AA)ₓ]_{z} if such components are used as a linker between P¹ and P² or P³ and P²) and/or with further components (e.g. (AA), (AA)ₓ, [(AA)ₓ]_{z} or L), the linear or branched hydrophilic polymer chain selected independent from each other from polyethylene glycol (PEG), poly-N-(2-hydroxypropyl) methacrylamide, poly-2-(methacryloyloxy)ethyl phosphorylcholines, poly(hydroxyalkyl L-asparagine), poly(2-(methacryloyloxy)ethyl phosphorylcholine), hydroxyethylstarch or poly(hydroxyalkyl L-glutamine), wherein the hydrophilic polymer chain exhibits a molecular weight of about 1 kDa to about 100 kDa, preferably of about 2 kDa to about 25 kDa; or more preferably of about 2 kDa to about 10 kDa, e.g. about 5 kDa to about 25 kDa or 5 kDa to about 10 kDa;
[0570] P² is a (poly-)cationic peptide or protein, e.g. as defined above for the polymeric carrier formed by disulfide-crosslinked cationic components, and preferably having a length of about 3 to about 100 amino acids, more preferably having a length of about 3 to about 50 amino acids, even more preferably having a length of about 3 to about 25 amino acids, e.g. a length of about 3 to 10, 5 to 15, 10 to 20 or 15 to 25 amino acids, more preferably a length of about 5 to about 20 and even more preferably a length of about 10 to about 20; or is a (poly-)cationic polymer, e.g. as defined above for the polymeric carrier formed by disulfide-crosslinked cationic components, typically having a molecular weight of about 0.5 kDa to about 30 kDa, including a molecular weight of about 1 kDa to about 20 kDa, even more preferably of about 1.5 kDa to about 10 kDa, or having a molecular weight of about 0.5 kDa to about 100 kDa, including a molecular weight of about 10 kDa to about 50 kDa, even more preferably of about 10 kDa to about 30 kDa;
[0571] each P² exhibiting at least two-SH-moieties, capable to form a disulfide linkage upon condensation with further components P² or component(s) P¹ and/or P³ or alternatively with further components (e.g. (AA), (AA)ₓ, or [(AA)ₓ]_{z});
[0572] —S—S— is a (reversible) disulfide bond (the brackets are omitted for better readability), wherein S preferably represents sulphur or a —SH carrying moiety, which has formed a (reversible) disulfide bond. The (reversible) disulfide bond is preferably formed by condensation of —SH-moieties of either components P¹ and P², P² and P², or P² and P³, or optionally of further components as defined herein (e.g. L, (AA), (AA)ₓ, [(AA)ₓ]_{z}, etc); The —SH-moiety may be part of the structure of these components or added by a modification as defined below;
[0573] L is an optional ligand, which may be present or not, and may be selected independent from the other from RGD, Transferrin, Folate, a signal peptide or signal sequence, a localization signal or sequence, a nuclear localization signal or sequence (NLS), an antibody, a cell penetrating peptide, (e.g. TAT or KALA), a ligand of a receptor (e.g. cytokines, hormones, growth factors etc), small molecules (e.g. carbohydrates like mannose or galactose or synthetic ligands), small molecule agonists, inhibitors or antagonists of receptors (e.g. RGD peptidomimetic analogues), or any further protein as defined herein, etc.;
[0574] n is an integer, typically selected from a range of about 1 to 50, preferably from a range of about 1, 2 or 3 to 30, more preferably from a range of about 1, 2, 3, 4, or 5 to 25, or a range of about 1, 2, 3, 4, or 5 to 20, or a range of about 1, 2, 3, 4, or 5 to 15, or a range of about 1, 2, 3, 4, or 5 to 10, including e.g. a range of about 4 to 9, 4 to 10, 3 to 20, 4 to 20, 5 to 20, or 10 to 20, or a range of about 3 to 15, 4 to 15, 5 to 15, or 10 to 15, or a range of about 6 to 11 or 7 to 10. Most preferably, n is in a range of about 1, 2, 3, 4, or 5 to 10, more preferably in a range of about 1, 2, 3, or 4 to 9, in a range of about 1, 2, 3, or 4 to 8, or in a range of about 1, 2, or 3 to 7.

[0575] In this context, the disclosure of WO 2011/026641 is incorporated herewith by reference. Each of hydrophilic polymers P¹ and P³ typically exhibits at least one —SH-moiety, wherein the at least one —SH-moiety is capable to form a disulfide linkage upon reaction with component P² or with component (AA) or (AA)ₓ, if used as linker between P¹ and P² or P³ and P² as defined below and optionally with a further component, e.g. L and/or (AA) or (AA)ₓ, e.g. if two or more —SH-moieties are contained. The following subformulae “P¹-S—S-P²” and “P²-S—S-P³” within generic formula (CAT-II) above (the brackets are omitted for better readability), wherein any of S, P¹ and P³ are as defined herein, typically represent a situation, wherein one —SH-moiety of hydrophilic polymers P¹ and P³ was condensed with one —SH-moiety of component P² of generic formula (CAT-II) above, wherein both sulphurs of these-SH-moieties form a disulfide bond —S—S— as defined herein in formula (CAT-II). These —SH-moieties are typically provided by each of the hydrophilic polymers P¹ and P³, e.g. via an internal cysteine or any further (modified) amino acid or compound which carries a —SH moiety. Accordingly, the subformulae “P¹-S—S-P²” and “P²-S—S-P³” may also be written as “P¹-Cys-Cys-P²” and “P²-Cys-Cys-P³”, if the —SH-moiety is provided by a cysteine, wherein the term Cys-Cys represents two cysteines coupled via a disulfide bond, not via a peptide bond. In this case, the term “—S—S—” in these formulae may also be written as “−S—Cys”, as “-Cys-S” or as “-Cys-Cys-”. In this context, the term “-Cys-Cys-” does not represent a peptide bond but a linkage of two cysteines via their —SH-moieties to form a disulfide bond. Accordingly, the term “-Cys-Cys-” also may be understood generally as “-(Cys-S)—(S-Cys)-”, wherein in this specific case S indicates the sulphur of the —SH-moiety of cysteine. Likewise, the terms “—S-Cys” and “—Cys-S” indicate a disulfide bond between a —SH containing moiety and a cysteine, which may also be written as “—S—(S-Cys)” and “-(Cys-S)—S”. Alternatively, the hydrophilic polymers P¹ and P³ may be modified with a —SH moiety, preferably via a chemical reaction with a compound carrying a —SH moiety, such that each of the hydrophilic polymers P¹ and P³ carries at least one such —SH moiety. Such a compound carrying a —SH moiety may be e.g. an (additional) cysteine or any further (modified) amino acid, which carries a —SH moiety. Such a compound may also be any non-amino compound or moiety, which contains or allows to introduce a —SH moiety into hydrophilic polymers P¹ and P³ as defined herein. Such non-amino compounds may be attached to the hydrophilic polymers P¹ and P³ of formula (CAT-II) of the polymeric carrier according to the present invention via chemical reactions or binding of compounds, e.g. by binding of a 3-thio propionic acid or thioimolane, by amide formation (e.g. carboxylic acids, sulphonic acids, amines, etc), by Michael addition (e.g maleinimide moieties, α,β-unsatured carbonyls, etc), by click chemistry (e.g. azides or alkines), by alkene/alkine methatesis (e.g. alkenes or alkines), imine or hydrozone formation (aldehydes or ketons, hydrazins, hydroxylamins, amines), complexation reactions (avidin, biotin, protein G) or components which allow Sn-type substitution reactions (e.g halogenalkans, thiols, alcohols, amines, hydrazines, hydrazides, sulphonic acid esters, oxyphosphonium salts) or other chemical moieties which can be utilized in the attachment of further components. A particularly preferred PEG derivate in this context is alpha-Methoxy-omega-mercapto poly(ethylene glycol). In each case, the SH-moiety, e.g. of a cysteine or of any further (modified) amino acid or compound, may be present at the terminal ends or internally at any position of hydrophilic polymers P¹ and P³. As defined herein, each of hydrophilic polymers P¹ and P³ typically exhibits at least one —SH-moiety preferably at one terminal end, but may also contain two or even more —SH-moieties, which may be used to additionally attach further components as defined herein, preferably further functional peptides or proteins e.g. a ligand, an amino acid component (AA) or (AA)ₓ, antibodies, cell penetrating peptides or enhancer peptides (e.g. TAT, KALA), etc.

### Weight Ratio and N/P Ratio

[0576] In some embodiments of the invention, the artificial nucleic acid molecule, preferably RNA (or said other nucleic acid) is associated with or complexed with a (poly-)cationic compound or a polymeric carrier, optionally in a weight ratio selected from a range of about 6:1 (w/w) to about 0.25:1 (w/w), more preferably from about 5:1 (w/w) to about 0.5:1 (w/w), even more preferably of about 4:1 (w/w) to about 1:1 (w/w) or of about 3:1 (w/w) to about 1:1 (w/w), and most preferably a ratio of about 3:1 (w/w) to about 2:1 (w/w) of nucleic acid to (poly-)cationic compound and/or polymeric carrier; or optionally in a nitrogen/phosphate (N/P) ratio of nucleic acid to (poly-)cationic compound and/or polymeric carrier in the range of about 0.1-10, preferably in a range of about 0.3-4 or 0.3-1, and most preferably in a range of about 0.5-1 or 0.7-1, and even most preferably in a range of about 0.3-0.9 or 0.5-0.9. More preferably, the N/P ratio of the at least one artificial nucleic acid molecule, preferably RNA, to the one or more polycations is in the range of about 0.1 to 10, including a range of about 0.3 to 4, of about 0.5 to 2, of about 0.7 to 2 and of about 0.7 to 1.5.

[0577] The artificial nucleic acid molecule, preferably RNA, of the invention can also be associated with a vehicle, transfection or complexation agent for increasing the transfection efficiency of said artificial nucleic acid molecule, preferably RNA. In this context, it is particularly preferred that the inventive (pharmaceutical) composition comprises the artificial nucleic acid molecule, preferably RNA that is complexed at least partially with a (poly-)cationic compound and/or a polymeric carrier, preferably cationic proteins or peptides. In this context, the disclosure of WO 2010/037539 and WO 2012/113513 is incorporated herewith by reference. “Partially” means that only a part of said artificial nucleic acid molecule, preferably RNA is complexed with a (poly-)cationic compound and/or polymeric carrier, while the rest of said artificial nucleic acid molecule, preferably RNA is present in uncomplexed form (“free”).

[0578] Preferably, the molar ratio of the complexed artificial nucleic acid molecule, preferably RNA to the free artificial nucleic acid molecule, preferably RNA is selected from a molar ratio of about 0.001:1 to about 1:0.001, including a ratio of about 1:1. More preferably the ratio of complexed artificial nucleic acid molecule, preferably RNA to free artificial nucleic acid molecule, preferably RNA is selected from a range of about 5:1 (w/w) to about 1:10 (w/w), more preferably from a range of about 4:1 (w/w) to about 1:8 (w/w), even more preferably from a range of about 3:1 (w/w) to about 1:5 (w/w) or 1:3 (w/w), and most preferably the ratio of complexed artificial nucleic acid molecule, preferably RNA to free artificial nucleic acid molecule, preferably RNA is selected from a ratio of about 1:1 (w/w).

[0579] The complexed artificial nucleic acid molecule, preferably RNA, of the invention is preferably prepared according to a first step by complexing the artificial nucleic acid molecule, preferably RNA with a (poly-)cationic compound and/or with a polymeric carrier, preferably as defined herein, in a specific ratio to form a stable complex. In this context, it is highly preferable, that no free (poly-)cationic compound or polymeric carrier or only a negligibly small amount thereof remains in the fraction of the complexed artificial nucleic acid molecule, preferably RNA after complexing said artificial nucleic acid molecule, preferably RNA. Accordingly, the ratio of the artificial nucleic acid molecule, preferably RNA and the (poly-)cationic compound and/or the polymeric carrier in the fraction of the complexed RNA is typically selected in a range so that the artificial nucleic acid molecule, preferably RNA is entirely complexed and no free (poly-)cationic compound or polymeric carrier or only a negligibly small amount thereof remains in said fraction.

[0580] Preferably, the ratio of the artificial nucleic acid molecule, preferably RNA, to the (poly-)cationic compound and/or the polymeric carrier, preferably as defined herein, is selected from a range of about 6:1 (w/w) to about 0.25:1 (w/w), more preferably from about 5:1 (w/w) to about 0.5:1 (w/w), even more preferably of about 4:1 (w/w) to about 1:1 (w/w) or of about 3:1 (w/w) to about 1:1 (w/w), and most preferably a ratio of about 3:1 (w/w) to about 2:1 (w/w).

[0581] Alternatively, the ratio of the artificial nucleic acid molecule, preferably RNA, to the (poly-)cationic compound and/or the polymeric carrier may also be calculated on the basis of the nitrogen/phosphate ratio (N/P-ratio) of the entire complex. In the context of the present invention, an N/P-ratio is preferably in the range of about 0.1-10, preferably in a range of about 0.3-4 and most preferably in a range of about 0.5-2 or 0.7-2 regarding the ratio of artificial nucleic acid molecule, preferably RNA, to (poly-)cationic compound and/or polymeric carrier, preferably as defined herein, in the complex, and most preferably in a range of about 0.7-1.5, 0.5-1 or 0.7-1, and even most preferably in a range of about 0.3-0.9 or 0.5-0.9, preferably provided that the (poly-)cationic compound in the complex is a (poly-)cationic protein or peptide and/or the polymeric carrier as defined above.

[0582] In other embodiments, artificial nucleic acid molecule, preferably RNA, may be provided and used in free or naked form without being associated with any further vehicle, transfection or complexation agent.

### (Pharmaceutical) Composition

[0583] In a further aspect, the present invention provides a composition comprising the artificial nucleic acid molecule, preferably RNA, according to the invention, and at least one pharmaceutically acceptable carrier and/or excipient. The composition according to the invention is preferably provided as a pharmaceutical composition or as a vaccine.

[0584] A “vaccine” is typically understood to be a prophylactic or therapeutic material providing at least one antigen, preferably an antigenic peptide or protein. “Providing at least on antigen” means, for example, that the vaccine comprises the antigen or that the vaccine comprises a molecule that, e.g., codes for the antigen.

[0585] The (pharmaceutical) composition or vaccine according to the invention comprises at least one artificial nucleic acid molecule, preferably RNA, comprising at least one coding sequence encoding an antigenic peptide or protein. Said antigenic peptide or protein may preferably be derived from a tumor antigen, a bacterial, viral, fungal or protozoal antigen, an autoantigen, an allergen, or an allogenic antigen. Its expression and presentation to the immune system may preferably induce an immune response towards the tumor antigen, or the bacterial, viral, fungal or protozoal antigen, or may induce immune tolerance towards the autoantigen, allergen or allogenic antigen.

[0586] The (pharmaceutical) composition or vaccines of the invention preferably comprises at least one, preferably a plurality of at least two artificial nucleic acid molecules, preferably RNAs, as described herein. Said plurality of at least two artificial nucleic acid molecules, preferably RNAs, may be monocistronic, bicistronic or multicistronic as described herein.

[0587] Each of the artificial nucleic acid molecules, preferably RNAs, of the (pharmaceutical) composition or vaccine of the invention may encode at least one, or a plurality of at least two (identical or different) antigenic fusion proteins as defined herein. “Different” artificial nucleic acid species in a pharmaceutical composition may encode “different” IRSTₑₚₘ-derived amino acid sequences, “different” signal peptides, “different” T helper epitopes, “different” linkers, or preferably “different” antigenic peptides or proteins”

[0588] Accordingly, in some embodiments of the invention, the (pharmaceutical) composition or vaccine of the invention comprises a plurality of at least two artificial nucleic acid molecules, preferably RNAs, as described herein, wherein preferably at least two of said plurality of artificial nucleic acid molecules encode a different antigenic peptide or protein, preferably as described herein, or fragment, variant or derivative thereof.

[0589] The (pharmaceutical) composition or vaccine of the invention may further comprise at least one pharmaceutically acceptable excipient, carrier, adjuvant or further component (e.g. additional active agents, and the like), as described herein.

### Pharmaceutically Acceptable Excipients and Carriers

[0590] Preferably, the (pharmaceutical) composition according to the invention comprises at least one pharmaceutically acceptable carrier and/or excipient. The term “pharmaceutically acceptable” refers to a compound or agent that is compatible with the one or more active agent(s) (here: artificial nucleic acid molecule, preferably RNA) and does not interfere with and/or substantially reduce their pharmaceutical activities. Pharmaceutically acceptable carriers and/or excipient preferably have sufficiently high purity and sufficiently low toxicity to make them suitable for administration to a subject to be treated.

### Excipients

[0591] Pharmaceutically acceptable excipients can exhibit different functional roles and include, without limitation, diluents, fillers, bulking agents, carriers, disintegrants, binders, lubricants, glidants, coatings, solvents and co-solvents, buffering agents, preservatives, adjuvants, anti-oxidants, wetting agents, anti-foaming agents, thickening agents, sweetening agents, flavouring agents and humectants.

[0592] For (pharmaceutical) compositions in liquid form, useful pharmaceutically acceptable excipients in general include solvents, diluents or carriers such as (pyrogen-free) water, (isotonic) saline solutions such phosphate or citrate buffered saline, fixed oils, vegetable oils, such as, for example, groundnut oil, cottonseed oil, sesame oil, olive oil, corn oil, ethanol, polyols (for example, glycerol, propylene glycol, polyetheylene glycol, and the like); lecithin; surfactants; preservatives such as benzyl alcohol, parabens, chlorobutanol, phenol, ascorbic acid, thimerosal, and the like; isotonic agents such as sugars, polyalcohols such as manitol, sorbitol, or sodium chloride; aluminum monostearate or gelatin; antioxidants such as ascorbic acid or sodium bisulfite; chelating agents such as ethylenediaminetetraacetic acid (EDTA); buffers such as acetates, citrates or phosphates and agents for the adjustment of tonicity such as sodium chloride or dextrose. pH can be adjusted with acids or bases, such as hydrochloric acid or sodium hydroxide. Buffers may be hypertonic, isotonic or hypotonic with reference to the specific reference medium, i.e. the buffer may have a higher, identical or lower salt content with reference to the specific reference medium, wherein preferably such concentrations of the aforementioned salts may be used, which do not lead to damage of cells due to osmosis or other concentration effects. Reference media are e.g. liquids occurring in “in vivo” methods, such as blood, lymph, cytosolic liquids, or other body liquids, or e.g. liquids, which may be used as reference media in “in vitro” methods, such as common buffers or liquids. Such common buffers or liquids are known to a skilled person. Ringer-Lactate solution is particularly preferred as a liquid basis.

[0593] For (pharmaceutical) compositions in (semi-) solid form, useful pharmaceutically acceptable excipients include binders such as microcrystalline cellulose, gum tragacanth or gelatin; starch or lactose; sugars, such as, for example, lactose, glucose and sucrose; starches, such as, for example, corn starch or potato starch; cellulose and its derivatives, such as, for example, sodium carboxymethylcellulose, ethylcellulose, cellulose acetate; disintegrants such as alginic acid; lubricants such as magnesium stearate; glidants such as stearic acid, magnesium stearate; calcium sulphate, colloidal silicon dioxide and the like; sweetening agents such as sucrose or saccharin; and/or flavoring agents such as peppermint, methyl salicylate, or orange flavoring.

### Carriers

[0594] Suitable pharmaceutically acceptable carriers are typically chosen based on the formulation of the (pharmaceutical) composition.

[0595] Liquid (pharmaceutical) compositions administered via injection and in particular via i.v. injection should be sterile and stable under the conditions of manufacture and storage. Such compositions are typically formulated as parenterally acceptable aqueous solutions that are pyrogen-free, have suitable pH, are isotonic and maintain stability of the active ingredient(s).

[0596] Particularly useful pharmaceutically acceptable carriers for liquid (pharmaceutical) compositions according to the invention include water, typically pyrogen-free water; isotonic saline or buffered (aqueous) solutions, e.g phosphate, citrate etc. buffered solutions. Particularly for injection of the inventive (pharmaceutical) compositions, water or preferably a buffer, more preferably an aqueous buffer, may be used, containing a sodium salt, preferably at least 50 mM of a sodium salt, a calcium salt, preferably at least 0.01 mM of a calcium salt, and optionally a potassium salt, preferably at least 3 mM of a potassium salt.

[0597] According to preferred embodiments, the sodium, calcium and, optionally, potassium salts may occur in the form of their halogenides, e.g. chlorides, iodides, or bromides, in the form of their hydroxides, carbonates, hydrogen carbonates, or sulfates, etc. Without being limited thereto, examples of sodium salts include e.g. NaCl, NaI, NaBr, Na₂CO₃, NaHCO₃, Na₂SO₄, examples of the optional potassium salts include e.g. KCl, KI, KBr, K₂CO₃, KHCO₃, K₂SO₄, and examples of calcium salts include e.g. CaCl₂), Cal₂, CaBr₂, CaCO₃, CaSO₄, Ca(OH)₂. Furthermore, organic anions of the aforementioned cations may be contained in the buffer.

[0598] According to more preferred embodiments, the buffer suitable for injection purposes as defined above, may contain salts selected from sodium chloride (NaCl), calcium chloride (CaCl₂)) and optionally potassium chloride (KCl), wherein further anions may be present additional to the chlorides. CaCl₂) can also be replaced by another salt like KCl. Typically, the salts in the injection buffer are present in a concentration of at least 50 mM sodium chloride (NaCl), at least 3 mM potassium chloride (KCl) and at least 0.01 mM calcium chloride (CaCl₂)). The injection buffer may be hypertonic, isotonic or hypotonic with reference to the specific reference medium, i.e. the buffer may have a higher, identical or lower salt content with reference to the specific reference medium, wherein preferably such concentrations of the afore mentioned salts may be used, which do not lead to damage of cells due to osmosis or other concentration effects. Reference media are e.g. in “in vivo” methods occurring liquids such as blood, lymph, cytosolic liquids, or other body liquids, or e.g. liquids, which may be used as reference media in “in vitro” methods, such as common buffers or liquids. Such common buffers or liquids are known to a skilled person. Ringer-Lactate solution is particularly preferred as a liquid basis.

### Complexation

[0599] The artificial nucleic acid molecule, preferably RNA, of the invention, and/or optionally any other nucleic acid, forming part of the inventive (pharmaceutical) composition or vaccine may be provided in “complexed” or “naked” form as described elsewhere herein, or a mixture thereof.

[0600] According to preferred embodiments, the artificial nucleic acid molecule(s), preferably RNA(s), of the (pharmaceutical) composition or vaccine of the invention, or any other nucleic acid disclosed herein, is/are complexed with one or more cationic or polycationic compounds, preferably with cationic or polycationic polymers, cationic or polycationic peptides or proteins, e.g. protamine, cationic or polycationic polysaccharides and/or cationic or polycationic lipids.

[0601] Means and methods for providing “complexed” artificial nucleic acid molecules, preferably RNAs, are described in the section headed “Complexation” and are equally applicable to the (pharmaceutical) compositions and vaccines of the invention, mutatis mutandis. Specifically, artificial nucleic acid molecule(s), preferably RNA(s), and/or optionally any other nucleic acid, forming part of the inventive (pharmaceutical) composition or vaccine may be complexed with lipids, (poly-)cationic compounds and carriers, preferably selected from (poly-)cationic amino acids, peptides and proteins, (poly-)cationic polysaccharides, (poly-)cationic lipids, (poly-)cationic polymers, or polymeric carriers as described above.

[0602] According to preferred embodiments, the artificial nucleic acid molecule(s), preferably RNA(s), and/or optionally any other nucleic acid, forming part of the inventive (pharmaceutical) composition or vaccine may be complexed with a polymeric carrier formed by disulfide-crosslinked cationic components, preferably disulfide-crosslinked cationic peptides, preferably comprising peptides according to formula (CAT-I), (CAT-Ia) and/or (CAT-Ib) and/or a compound according to formula (Cat-II) (L-P¹-S—[S-P²-S]ₙ—S-P³-L) as described above.

### Formulation

[0603] Generally, (pharmaceutical) compositions for topical administration can be formulated as creams, ointments, gels, pastes or powders. (Pharmaceutical) compositions for oral administration can be formulated as tablets, capsules, liquids, powders or in a sustained release format. However, according to preferred embodiments, the inventive (pharmaceutical) composition is administered parenterally, in particular via intradermal or intramuscular injection, and is accordingly formulated in liquid or lyophilized form for parenteral administration as discussed elsewhere herein. Parenteral formulations are typically stored in vials, IV bags, ampoules, cartridges, or prefilled syringes and can be administered as injections, inhalants, or aerosols, with injections being preferred.

### Lyophilized Formulations

[0604] In further preferred embodiments, the (pharmaceutical) composition or vaccine is provided in lyophilized form. Preferably, the lyophilized (pharmaceutical) composition or vaccine is reconstituted in a suitable buffer, advantageously based on an aqueous carrier, prior to administration, e.g. Ringer-Lactate solution, which is preferred, Ringer solution, a phosphate buffer solution. In some embodiments, the (pharmaceutical) composition according to the invention contains at least two, three, four, five, six or more artificial nucleic acid molecules, preferably RNAs, which are provided separately in lyophilized form (optionally together with at least one further additive) and which are preferably reconstituted separately in a suitable buffer (such as Ringer-Lactate solution) prior to their use so as to allow individual administration of each of said artificial nucleic acid molecule, preferably RNAs.

### Liquid Formulations

[0605] In further preferred embodiments, the (pharmaceutical) composition is provided in the form of a saline or a lipid-based formulation. Lipid-based formulations may comprise liposomes, lipoplexes, nanoliposomes and lipid nanoparticles which are described above in the section headed “Complexation”.

### Adjuvants

[0606] According to further embodiments, the (pharmaceutical) composition or vaccine of the invention may further comprise at least one adjuvant.

[0607] An “adjuvant” or “adjuvant component” in the broadest sense is typically a pharmacological and/or immunological agent that may modify, e.g. enhance, the effect of other active agents, e.g. therapeutic agents or vaccines. In this context, an “adjuvant” may be understood as any compound, which is suitable to support administration and delivery of the composition according to the invention. Specifically, an adjuvant may preferably enhance the immunostimulatory properties of the (pharmaceutical) composition or vaccine to which it is added. Furthermore, such adjuvants may, without being bound thereto, initiate or increase an immune response of the innate immune system, i.e. a non-specific immune response.

[0608] “Adjuvants” typically do not elicit an adaptive immune response. Insofar, “adjuvants” do not qualify as antigens. In other words, when administered, the inventive (pharmaceutical) composition or vaccine typically initiates an adaptive immune response due to an antigenic peptide or protein, which is encoded by the at least one coding sequence of the artificial nucleic acid molecule, preferably RNA, contained in said (pharmaceutical) composition or vaccine. Additionally, an adjuvant present in the (pharmaceutical) composition or vaccine may generate an (supportive) innate immune response.

[0609] Suitable adjuvants may be selected from any adjuvant known to a skilled person and suitable for the present case, i.e. supporting the induction of an immune response in a mammal, and include, without limitation, TDM, MDP, muramyl dipeptide, pluronics, alum solution, aluminium hydroxide, ADJUMER™ (polyphosphazene); aluminium phosphate gel; glucans from algae; algammulin; aluminium hydroxide gel (alum); highly protein-adsorbing aluminium hydroxide gel; low viscosity aluminium hydroxide gel; AF or SPT (emulsion of squalane (5%), Tween 80 (0.2%), Pluronic L¹²¹ (1.25%), phosphate-buffered saline, pH 7.4); AVRIDINE™ (propanediamine); BAY R¹⁰⁰⁵™ ((N-(2-deoxy-2-L-leucylamino-b-D-glucopyranosyl)-N-octadecyl-dodecanoyl-amide hydroacetate); CALCITRIOL™ (1-alpha,25-dihydroxy-vitamin D3); calcium phosphate gel; CAP™ (calcium phosphate nanoparticles); cholera holotoxin, cholera-toxin-A1-protein-A-D-fragment fusion protein, sub-unit B of the cholera toxin; CRL 1005 (block copolymer P¹²⁰⁵); cytokine-containing liposomes; DDA (dimethyldioctadecylammonium bromide); DHEA (dehydroepiandrosterone); DMPC (dimyristoylphosphatidylcholine); DMPG (dimyristoylphosphatidylglycerol); DOC/alum complex (deoxycholic acid sodium salt); Freund “s complete adjuvant; Freund” s incomplete adjuvant; gamma inulin; Gerbu adjuvant (mixture of: i) N-acetylglucosaminyl-(P¹-4)-N-acetylmuramyl-L-alanyl-D-glutamine (GMDP), ii) dimethyldioctadecylammonium chloride (DDA), iii) zinc-L-proline salt complex (ZnPro-8); GM-CSF); GMDP (N-acetylglucosaminyl-(b1-4)-N-acetylmuramyl-L-alanyl-D-isoglutamine); imiquimod (1-(2-methypropyl)-1H-imidazo[4,5-c]quinoline-4-amine); ImmTher™ (N-acetylglucosaminyl-N-acetylmuramyl-L-Ala-D-isoGlu-L-Ala-glycerol dipalmitate); DRVs (immunoliposomes prepared from dehydration-rehydration vesicles); interferon-gamma; interleukin-1beta; interleukin-2; interleukin-7; interleukin-12; ISCOMS™; ISCOPREP 7.0.3.™; liposomes; LOXORIBINE™ (7-allyl-8-oxoguanosine); LT oral adjuvant (E. coli labile enterotoxin-protoxin); microspheres and microparticles of any composition; MF59™; (squalene-water emulsion); MONTANIDE ISA 51™ (purified incomplete Freund “s adjuvant); MONTANIDE ISA 720™ (metabolisable oil adjuvant); MPL™ (3-Q-desacyl-4”-monophosphoryl lipid A); MTP-PE and MTP-PE liposomes ((N-acetyl-L-alanyl-D-isoglutaminyl-L-alanine-2-(1,2-dipalmitoyl-sn-glycero-3-(hydroxyphosphoryloxy))-ethylamide, monosodium salt); MURAMETIDE™ (Nac-Mur-L-Ala-D-Gln-OCH3); MURAPALMITINE™ and D-MURAPALMITINE™ (Nac-Mur-L-Thr-D-isoGln-sn-glyceroldipalmitoyl); NAGO (neuraminidase-galactose oxidase); nanospheres or nanoparticles of any composition; NISVs (non-ionic surfactant vesicles); PLEURANT (β-glucan); PLGA, PGA and PLA (homo- and co-polymers of lactic acid and glycolic acid; microspheres/nanospheres); PLURONIC L¹²¹™; PMMA (polymethyl methacrylate); PODDS™ (proteinoid microspheres); polyethylene carbamate derivatives; poly-rA: poly-rU (polyadenylic acid-polyuridylic acid complex); polysorbate 80 (Tween 80); protein cochleates (Avanti Polar Lipids, Inc., Alabaster, AL); STIMULON™ (QS-21); Quil-A (Quil-A saponin); S-28463 (4-amino-otec-dimethyl-2-ethoxymethyl-1H-imidazo[4,5 c]quinoline-1-ethanol); SAF-1™ (“Syntex adjuvant formulation”); Sendai proteoliposomes and Sendai-containing lipid matrices; Span-85 (sorbitan trioleate); Specol (emulsion of Marcol 52, Span 85 and Tween 85); squalene or Robane® (2,6,10,15,19,23-hexamethyltetracosan and 2,6,10,15,19,23-hexamethyl-2,6,10,14,18,22-tetracosahexane); stearyltyrosine (octadecyltyrosine hydrochloride); Theramide (N-acetylglucosaminyl-N-acetylmuramyl-L-Ala-D-isoGlu-L-Ala-dipalmitoxypropylamide); Theronyl-MDP (Termurtide™ or [thr 1]-MDP; N-acetylmuramyl-L-threonyl-D-isoglutamine); Ty particles (Ty-VLPs or virus-like particles); Walter-Reed liposomes (liposomes containing lipid A adsorbed on aluminium hydroxide), and lipopeptides, including Pam3Cys, in particular aluminium salts, such as Adju-phos, Alhydrogel, Rehydragel; emulsions, including CFA, SAF, IFA, MF59, Provax, TiterMax, Montanide, Vaxfectin; copolymers, including Optivax (CRL1005), L121, Poloaxmer4010), etc.; liposomes, including Stealth, cochleates, including BIORAL; plant derived adjuvants, including QS21, Quil A, Iscomatrix, ISCOM; adjuvants suitable for costimulation including Tomatine, biopolymers, including PLG, PMM, Inulin; microbe derived adjuvants, including Romurtide, DETOX, MPL, CWS, Mannose, CpG nucleic acid sequences, CpG7909, ligands of human TLR 1-10, ligands of murine TLR 1-13, ISS-1018, IC31, Imidazoquinolines, Ampligen, Ribi529, IMOxine, IRIVs, VLPs, cholera toxin, heat-labile toxin, Pam3Cys, Flagellin, GPI anchor, LNFPIII/Lewis X, antimicrobial peptides, UC-1V150, RSV fusion protein, cdiGMP; and adjuvants suitable as antagonists including CGRP neuropeptide.

[0610] Suitable adjuvants may also be selected from (poly-)cationic compounds as described herein as complexation agents (cf. section headed “complexation”), in particular the (poly-)cationic peptides or proteins, (poly-)cationic polysaccharides, (poly-)cationic lipids, or polymeric carriers described herein. Associating or complexing the artificial nucleic acid molecule of the (pharmaceutical) composition or vaccine with (poly-)cationic compounds as defined may preferably provide adjuvant properties and confer a stabilizing effect.

[0611] The ratio of the artificial nucleic acid molecule, preferably RNA, to the (poly-)cationic compound in the adjuvant component may be calculated on the basis of the nitrogen/phosphate ratio (N/P-ratio) of the entire complex, i.e. the ratio of positively charged (nitrogen) atoms of the (poly-)cationic compound to the negatively charged phosphate atoms of the artificial nucleic acid molecule, preferably RNA.

[0612] In the following, when referring to “RNA”, it will be understood that the respective disclosure is applicable to other artificial nucleic acid molecules as well, mutatis mutandis.

[0613] For example, 1 μg of RNA may contain about 3 nmol phosphate residues, provided said RNA exhibits a statistical distribution of bases. Additionally, 1 μg of peptide typically contains about x nmol nitrogen residues, dependent on the molecular weight and the number of basic amino acids. When exemplarily calculated for (Arg)₉ (molecular weight 1424 g/mol, 9 nitrogen atoms), 1 μg (Arg)₉ contains about 700 pmol (Arg)₉ and thus 700×9=6300 pmol basic amino acids=6.3 nmol nitrogen atoms. For a mass ratio of about 1:1 RNA/(Arg)₉ an N/P ratio of about 2 can be calculated. When exemplarily calculated for protamine (molecular weight about 4250 g/mol, 21 nitrogen atoms, when protamine from salmon is used) with a mass ratio of about 2:1 with 2 μg of RNA, 6 nmol phosphate are to be calculated for the RNA; 1 μg protamine contains about 235 pmol protamine molecules and thus 235×21=4935 pmol basic nitrogen atoms=4.9 nmol nitrogen atoms. For a mass ratio of about 2:1 RNA/protamine an N/P ratio of about 0.81 can be calculated. For a mass ratio of about 8:1 RNA/protamine an N/P ratio of about 0.2 can be calculated. In the context of the present invention, an N/P-ratio is preferably in the range of about 0.1-10, preferably in a range of about 0.3-4 and most preferably in a range of about 0.5-2 or 0.7-2 regarding the ratio of RNA:peptide in the complex, and most preferably in the range of about 0.7-1.5.

[0614] The (pharmaceutical) composition or vaccine of the present invention may be obtained in two separate steps in order to obtain both, an efficient immunostimulatory effect and efficient translation of the artificial nucleic acid molecule, preferably RNA, comprised in said (pharmaceutical) composition or vaccine.

[0615] In a first step, an RNA is complexed with a (poly-)cationic compound in a specific ratio to form a stable complex (“complexed (RNA”). In this context, it is important, that no free (poly-)cationic compound or only a negligibly small amount remains in the fraction of the complexed RNA. Accordingly, the ratio of the RNA and the (poly-)cationic compound is typically selected in a range that the RNA is entirely complexed and no free (poly-)cationic compound or only a neglectably small amount remains in the composition. Preferably the ratio of the RNA to the (poly-)cationic compound is selected from a range of about 6:1 (w/w) to about 0.25:1 (w/w), more preferably from about 5:1 (w/w) to about 0.5:1 (w/w), even more preferably of about 4:1 (w/w) to about 1:1 (w/w) or of about 3:1 (w/w) to about 1:1 (w/w), and most preferably a ratio of about 3:1 (w/w) to about 2:1 (w/w).

[0616] In a second step, an RNA is added to the complexed RNA in order to obtain the (pharmaceutical) composition or vaccine of the invention. Therein, said added RNA is present as free RNA, preferably as free mRNA, which is not complexed by other compounds. Prior to addition, the free RNA is not complexed and will preferably not undergo any detectable or significant complexation reaction upon the addition to the complexed RNA. This is due to the strong binding of the (poly-)cationic compound to the complexed RNA. In other words, when the free RNA is added to the complexed RNA, preferably no free or substantially no free (poly-)cationic compound is present, which could form a complex with said free RNA. Accordingly, the free RNA of the inventive (pharmaceutical) composition or vaccine can efficiently be transcribed in vivo.

[0617] It may be preferred that the free RNA may be identical or different to the complexed RNA, depending on the specific requirements of therapy. Even more preferably, the free RNA, which is comprised in the inventive combination, (pharmaceutical) composition or vaccine, is identical to the complexed RNA, in other words, the combination, (pharmaceutical) composition or vaccine comprises an otherwise identical RNA in both free and complexed form.

[0618] In particularly preferred embodiments, the inventive (pharmaceutical) composition or vaccine thus comprises the RNA as defined herein, wherein said RNA is present in said (pharmaceutical) composition or vaccine partially as free RNA and partially as complexed RNA. Preferably, the RNA as defined herein, preferably an mRNA, is complexed as described above and the same (m) RNA is then added in the form of free RNA, wherein preferably the compound, which is used for complexing the epitope-encoding RNA is not present in free form in the composition at the moment of addition of the free RNA.

[0619] The ratio of the complexed RNA and the free RNA may be selected depending on the specific requirements of a particular therapy. Typically, the ratio of the complexed RNA and the free RNA is selected such that a significant stimulation of the innate immune system is elicited due to the presence of the complexed RNA. In parallel, the ratio is selected such that a significant amount of the free RNA can be provided in vivo leading to an efficient translation and concentration of the expressed antigenic fusion protein in vivo. Preferably the ratio of the complexed RNA to free RNA in the inventive (pharmaceutical) composition or vaccine is selected from a range of about 5:1 (w/w) to about 1:10 (w/w), more preferably from a range of about 4:1 (w/w) to about 1:8 (w/w), even more preferably from a range of about 3:1 (w/w) to about 1:5 (w/w) or 1:3 (w/w), and most preferably about 1:1 (w/w).

[0620] Additionally or alternatively, the ratio of the complexed RNA and the free RNA may be calculated on the basis of the nitrogen/phosphate ratio (N/P-ratio) of the entire RNA complex. In the context of the present invention, an N/P-ratio is preferably in the range of about 0.1-10, preferably in a range of about 0.3-4 and most preferably in a range of about 0.5-2 or 0.7-2 regarding the ratio of RNA:peptide in the complex, and most preferably in the range of about 0.7-1.5.

[0621] Additionally or alternatively, the ratio of the complexed RNA and the free RNA may also be selected on the basis of the molar ratio of both RNAs to each other. Typically, the molar ratio of the complexed RNA to the free RNA may be selected such, that the molar ratio suffices the above (w/w) and/or N/P-definitions. More preferably, the molar ratio of the complexed RNA to the free RNA may be selected e.g. from a molar ratio of about 0.001:1, 0.01:1, 0.1:1, 0.2:1, 0.3:1, 0.4:1, 0.5:1, 0.6:1, 0.7:1, 0.8:1, 0.9:1, 1:1, 1:0.9, 1:0.8, 1:0.7, 1:0.6, 1:0.5, 1:0.4, 1:0.3, 1:0.2, 1:0.1, 1:0.01, 1:0.001, etc. or from any range formed by any two of the above values, e.g. a range selected from about 0.001:1 to 1:0.001, including a range of about 0.01:1 to 1:0.001, 0.1:1 to 1:0.001, 0.2:1 to 1:0.001, 0.3:1 to 1:0.001, 0.4:1 to 1:0.001, 0.5:1 to 1:0.001, 0.6:1 to 1:0.001, 0.7:1 to 1:0.001, 0.8:1 to 1:0.001, 0.9:1 to 1:0.001, 1:1 to 1:0.001, 1:0.9 to 1:0.001, 1:0.8 to 1:0.001, 1:0.7 to 1:0.001, 1:0.6 to 1:0.001, 1:0.5 to 1:0.001, 1:0.4 to 1:0.001, 1:0.3 to 1:0.001, 1:0.2 to 1:0.001, 1:0.1 to 1:0.001, 1:0.01 to 1:0.001, or a range of about 0.01:1 to 1:0.01, 0.1:1 to 1:0.01, 0.2:1 to 1:0.01, 0.3:1 to 1:0.01, 0.4:1 to 1:0.01, 0.5:1 to 1:0.01, 0.6:1 to 1:0.01, 0.7:1 to 1:0.01, 0.8:1 to 1:0.01, 0.9:1 to 1:0.01, 1:1 to 1:0.01, 1:0.9 to 1:0.01, 1:0.8 to 1:0.01, 1:0.7 to 1:0.01, 1:0.6 to 1:0.01, 1:0.5 to 1:0.01, 1:0.4 to 1:0.01, 1:0.3 to 1:0.01, 1:0.2 to 1:0.01, 1:0.1 to 1:0.01, 1:0.01 to 1:0.01, or including a range of about 0.001:1 to 1:0.01, 0.001:1 to 1:0.1, 0.001:1 to 1:0.2, 0.001:1 to 1:0.3, 0.001:1 to 1:0.4, 0.001:1 to 1:0.5, 0.001:1 to 1:0.6, 0.001:1 to 1:0.7, 0.001:1 to 1:0.8, 0.001:1 to 1:0.9, 0.001:1 to 1:1, 0.001 to 0.9:1, 0.001 to 0.8:1, 0.001 to 0.7:1, 0.001 to 0.6:1, 0.001 to 0.5:1, 0.001 to 0.4:1, 0.001 to 0.3:1, 0.001 to 0.2:1, 0.001 to 0.1:1, or a range of about 0.01:1 to 1:0.01, 0.01:1 to 1:0.1, 0.01:1 to 1:0.2, 0.01:1 to 1:0.3, 0.01:1 to 1:0.4, 0.01:1 to 1:0.5, 0.01:1 to 1:0.6, 0.01:1 to 1:0.7, 0.01:1 to 1:0.8, 0.01:1 to 1:0.9, 0.01:1 to 1:1, 0.001 to 0.9:1, 0.001 to 0.8:1, 0.001 to 0.7:1, 0.001 to 0.6:1, 0.001 to 0.5:1, 0.001 to 0.4:1, 0.001 to 0.3:1, 0.001 to 0.2:1, 0.001 to 0.1:1, etc.

[0622] Even more preferably, the molar ratio of the complexed RNA to the free RNA may be selected e.g. from a range of about 0.01:1 to 1:0.01. Most preferably, the molar ratio of the complexed RNA to the free RNA may be selected e.g. from a molar ratio of about 1:1. Any of the above definitions with regard to (w/w) and/or N/P ratio may also apply.

[0623] According to preferred embodiments, the (pharmaceutical) composition or vaccine comprises another nucleic acid, preferably as an adjuvant.

[0624] Accordingly, the (pharmaceutical) composition or vaccine of the invention further comprises a non-coding nucleic acid, preferably RNA, selected from the group consisting of small interfering RNA (siRNA), antisense RNA (asRNA), circular RNA (circRNA), ribozymes, aptamers, riboswitches, immunostimulating RNA (isRNA), transfer RNA (tRNA), ribosomal RNA (rRNA), small nuclear RNA (snRNA), small nucleolar RNA (snoRNA), microRNA (miRNA), and Piwi-interacting RNA (piRNA).

[0625] In the context of the present invention, non-coding nucleic acids, preferably RNAs, of particular interest include “immune-stimulatory” or “is” nucleic acids, preferably RNAs. “Immune-stimulatory” or “is” nucleic acids or RNAs are typically employed as adjuvants in the (pharmaceutical) composition or vaccine according to the invention.

[0626] According to a particularly preferred embodiment, the adjuvant nucleic acid comprises a nucleic acid of the following formula (IS-I) or (IS-II):

[chemical structure]

wherein:

| | |
|---|---|
| G | is a nucleotide comprising guanine, uracil or an analogue of guanine or uracil; |
| X | is a nucleotide comprising guanine, uracil, adenine, thymine, cytosine or an analogue thereof; |
| I | is an integer from 1 to 40, |
| | wherein |
| | when I = 1 G is a nucleotide comprising guanine or an analogue thereof, |
| | when I > 1 at least 50% of the nucleotides comprise guanine or an analogue thereof; |
| m | is an integer and is at least 3; |
| | wherein |
| | when m = 3, X is a nucleotide comprising uracil or an analogue thereof, |
| | when m > 3, at least 3 successive nucleotides comprising uracils or analogues of uracil occur; |
| n | is an integer from 1 to 40, |
| | wherein |
| | when n = 1, G is a nucleotide comprising guanine or an analogue thereof, |
| | when n > 1, at least 50% of the nucleotides comprise guanine or an analogue thereof; |

[chemical structure]

wherein:

| | |
|---|---|
| C | is a nucleotide comprising cytosine, uracil or an analogue of cytosine or uracil; |
| X | is a nucleotide comprising guanine, uracil, adenine, thymine, cytosine or an analogue thereof; |
| l | is an integer from 1 to 40, |
| | wherein |
| | when I = 1, C is a nucleotide comprising cytosine or an analogue thereof, |
| | when I > 1, at least 50% of the nucleotides comprise cytosine or an analogue thereof; |
| m | is an integer and is at least 3; |
| | wherein |
| | when m = 3, X comprises uracil or an analogue thereof, |
| | when m > 3, at least 3 successive nucleotides comprise uracils or analogues of uracil occur; |
| n | is an integer from 1 to 40, |
| | wherein |
| | when n = 1, C is a nucleotide comprising cytosine or an analogue thereof, |
| | when n > 1, at least 50% of the nucleotides comprise cytosine or an analogue thereof. |

[0627] The nucleic acids of formula (IS-I) or (IS-II), which may be used as isRNA may be relatively short nucleic acid molecules with a typical length of approximately from 5 to 100 (but may also be longer than 100 nucleotides for specific embodiments, e.g. up to 200 nucleotides), from 5 to 90 or from 5 to 80 nucleotides, preferably a length of approximately from 5 to 70, more preferably a length of approximately from 8 to 60 and, more preferably a length of approximately from 15 to 60 nucleotides, more preferably from 20 to 60, most preferably from 30 to 60 nucleotides. If the isRNA has a maximum length of, for example, 100 nucleotides, m will typically be ≤98.

[0628] The number of nucleotides “G” in the nucleic acid of (IS-I) is determined by l or n. l and n, independently of one another, are each an integer from 1 to 40, wherein when l or n=1 G is a nucleotide comprising guanine or an analogue thereof, and when l or n>1 at least 50% of the nucleotides comprise guanine, or an analogue thereof.

[0629] For example, without implying any limitation, when l or n=4 Gl or Gn can be, for example, a GUGU, GGUU, UGUG, UUGG, GUUG, GGGU, GGUG, GUGG, UGGG or GGGG, etc.; when l or n=5 Gl or Gn can be, for example, a GGGUU, GGUGU, GUGGU, UGGGU, UGGUG, UGUGG, UUGGG, GUGUG, GGGGU, GGGUG, GGUGG, GUGGG, UGGGG, or GGGGG, etc.; etc.

[0630] A nucleotide adjacent to Xₘ in the nucleic acid of formula (IS-I) preferably does not comprise uracil.

[0631] Similarly, the number of nucleotides “C” in the nucleic acid of formula (IS-II) is determined by l or n. l and n, independently of one another, are each an integer from 1 to 40, wherein when l or n=1 C is a nucleotide comprising cytosine or an analogue thereof, and when l or n>1 at least 50% of the nucleotides comprise cytosine or an analogue thereof.

[0632] For example, without implying any limitation, when l or n=4, Cl or Cn can be, for example, a CUCU, CCUU, UCUC, UUCC, CUUC, CCCU, CCUC, CUCC, UCCC or CCCC, etc.; when l or n=5 Cl or Cn can be, for example, a CCCUU, CCUCU, CUCCU, UCCCU, UCCUC, UCUCC, UUCCC, CUCUC, CCCCU, CCCUC, CCUCC, CUCCC, UCCCC, or CCCCC, etc.

[0633] A nucleotide adjacent to Xₘ in the nucleic acid of formula (IS-II) preferably does not comprise uracil. Preferably, for formula (IS-I), when l or n>1, at least 60%, 70%, 80%, 90% or even 100% of the nucleotides comprise guanine or an analogue thereof, as defined above.

[0634] The remaining nucleotides to 100% (when nucleotides comprising guanine constitutes less than 100% of the nucleotides) in the flanking sequences G1 and/or Gn are uridine or an analogue thereof, as defined hereinbefore. Also preferably, l and n, independently of one another, are each an integer from 2 to 30, more preferably an integer from 2 to 20 and yet more preferably an integer from 2 to 15. The lower limit of l or n can be varied if necessary and is at least 1, preferably at least 2, more preferably at least 3, 4, 5, 6, 7, 8, 9 or 10. This definition applies correspondingly to formula (IS-II).

[0635] According to a further preferred embodiment, the isRNA as described herein consists of or comprises a nucleic acid of formula (IS-III) or (IS-IV):

[chemical structure]

wherein:

| | |
|---|---|
| G | is a nucleotide comprising guanine, uracil or an analogue of guanine or uracil, preferably |
| | comprising guanine or an analogue thereof; |
| X | is a nucleotide comprising guanine, uracil, adenine, thymine, cytosine, or an analogue thereof, |
| | preferably comprising uracil or an analogue thereof; |
| N | is a nucleic acid sequence having a length of about 4 to 50, preferably of about 4 to 40, more |
| | preferably of about 4 to 30 or 4 to 20 nucleic acids, each N independently being selected from |
| | a nucleotide comprising guanine, uracil, adenine, thymine, cytosine or an analogue thereof; |
| a | is an integer from 1 to 20, preferably from 1 to 15, most preferably from 1 to 10; |
| l | is an integer from 1 to 40, |
| | wherein when I = 1, G is a nucleotide comprising guanine or an analogue thereof, |
| | when I > 1, at least 50% of these nucleotides comprise guanine or an analogue thereof; |
| m | is an integer and is at least 3; |
| | wherein when m = 3, X is a nucleotide comprising uracil or an analogue thereof, and |
| | when m > 3, at least 3 successive nucleotides comprising uracils or analogues of uracils |
| | occur; |
| n | is an integer from 1 to 40, |
| | wherein when n = 1, G is a nucleotide comprising guanine or an analogue thereof, |
| | when n > 1, at least 50% of these nucleotides comprise guanine or an analogue thereof; |
| u,v | may be independently from each other an integer from 0 to 50, |
| | preferably wherein when u = 0, v ≥ 1, or when v = 0, u ≥ 1; |

wherein the nucleic acid molecule of (IS-III) has a length of at least 50 nucleotides, preferably of at least 100 nucleotides, more preferably of at least 150 nucleotides, even more preferably of at least 200 nucleotides and most preferably of at least 250 nucleotides.

[chemical structure]

wherein:

| | |
|---|---|
| C | is a nucleotide comprising cytosine, uracil or an analogue of cytosine or uracil, preferably cytosine or an |
| | analogue thereof; |
| X | is a nucleotide comprising guanine, uracil, adenine, thymine, cytosine or an analogue thereof, preferably |
| | comprising uracil or an analogue thereof; |
| N | is each a nucleic acid sequence having independent from each other a length of about 4 to 50, preferably of |
| | about 4 to 40, more preferably of about 4 to 30 or 4 to 20 nucleic acids, each N independently being selected |
| | from a nucleotide comprising guanine, uracil, adenine, thymine, cytosine or an analogue thereof; |
| a | is an integer from 1 to 20, preferably from 1 to 15, most preferably from 1 to 10; |
| l | is an integer from 1 to 40, |
| | wherein when I = 1, C is a nucleotide comprising cytosine or an analogue thereof, |
| | when l >1, at least 50% of these nucleotides comprise cytosine or an analogue thereof; |
| m | is an integer and is at least 3; |
| | wherein when m = 3, X is a nucleotide comprising uracil or an analogue thereof, |
| | when m >3, at least 3 successive nucleotides comprising uracils or analogues of uracil occur; |
| n | is an integer from 1 to 40, |
| | wherein when n = 1, C is a nucleotide comprising cytosine or an analogue thereof, |
| | when n >1, at least 50% of these nucleotides comprise cytosine or an analogue thereof. |
| u, V | may be independently from each other an integer from 0 to 50, |
| | preferably wherein when u = 0, v ≥ 1, or when v = 0, u ≥ 1; |

wherein the nucleic acid molecule of (IS-IV) according to the invention has a length of at least 50 nucleotides, preferably of at least 100 nucleotides, more preferably of at least 150 nucleotides, even more preferably of at least 200 nucleotides and most preferably of at least 250 nucleotides.

[0636] For formula (IS-IV), any of the definitions given above for elements N (i.e. Nᵤ and Nᵥ) and X (Xₘ), particularly the core structure as defined above, as well as for integers a, l, m, n, u and v, similarly apply to elements of formula (CAT-II) correspondingly, wherein in formula (IS-IV) the core structure is defined by CₗXₘCₙ. The definition of bordering elements Nᵤ and Nᵥ is identical to the definitions given above for Nᵤ and Nᵥ.

[0637] In particular in the context of formulas (IS-I)-(IS-IV) above, a “nucleotide” is understood as a molecule comprising or preferably consisting of a nitrogenous base (preferably selected from adenine (A), cytosine (C), guanine (G), thymine (T), or uracil (U), a pentose sugar (ribose or deoxyribose), and at least one phosphate group. “Nucleosides” consist of a nucleobase and a pentose sugar (i.e. could be referred to as “nucleotides without phosphate groups”). Thus, a “nucleotide” comprising a specific base (A, C, G, T or U) preferably also comprises the respective nucleoside (adenosine, cytidine, guanosine, thymidine or uridine, respectively) in addition to one (two, three or more) phosphate groups

[0638] That is, the term “nucleotides” includes nucleoside monophosphates (AMP, CMP, GMP, TMP and UMP), nucleoside diphosphates (ADP, CDP, GDP, TDP and UDP), nucleoside triphosphates (ATP, CTP, GTP, TTP and UTP). In the context of formulas (IS-I)-(IS-IV) above, nucleoside monophosphates are particularly preferred. The expression “a nucleotide comprising ( . . . ) or an analogue thereof” refers to modified nucleotides comprising a modified (phosphate) backbone, pentose sugar(s), or nucleobases. In this context, modifications of the nucleobases are particularly preferred. By way of example, when referring “to a nucleotide comprising guanine, uracil, adenine, thymine, cytosine or an analogue thereof”, the term “analogue thereof” refers to both the nucleotide and the recited nucleobases, preferably to the recited nucleobases.

[0639] In preferred embodiments, the (pharmaceutical) composition or vaccine of the invention comprises at least one immunostimulating RNA comprising or consisting of a nucleic acid sequence according to formula (IS-I) (GₗXₘGₙ), formula (IS-II) (CₗXₘCₙ), formula (IS-III) (NᵤGₗXₘGₙNᵥ)ₐ, and/or formula (IS-IV) (NᵤCₗXₘCₙNᵥ)ₐ). In particularly preferred embodiments, the (pharmaceutical) composition or vaccine of the invention comprises at least one immunostimulating RNA comprising or consisting of a nucleic acid sequence according to any one of SEQ ID NOs: 2938-3032.

[0640] In particularly preferred embodiments, the (pharmaceutical) composition or vaccine of the invention comprises a polymeric carrier cargo complex, formed by a polymeric carrier, preferably comprising disulfide-crosslinked cationic peptides, preferably Cys-Arg₁₂, and/or Cys-Arg₁₂-Cys, and at least one isRNA, preferably comprising or consisting of a nucleic acid sequence according to any one of SEQ ID NO: 2938-3032.

[0641] The (pharmaceutical) composition or vaccine of the invention may additionally contain one or more auxiliary substances in order to increase its immunogenicity or immunostimulatory capacity, if desired. A synergistic action of the inventive polymeric carrier cargo complex as defined herein and of an auxiliary substance, which may be optionally contained in the (pharmaceutical) composition or vaccine of the invention as defined herein, is preferably achieved thereby. Depending on the various types of auxiliary substances, various mechanisms can come into consideration in this respect. For example, compounds that permit the maturation of dendritic cells (DCs), for example lipopolysaccharides, TNF-alpha or CD40 ligand, form a first class of suitable auxiliary substances. In general, it is possible to use as auxiliary substance any agent that influences the immune system in the manner of a “danger signal” (LPS, GP96, etc.) or cytokines, such as GM-CFS, which allow an immune response to be enhanced and/or influenced in a targeted manner. Particularly preferred auxiliary substances are cytokines, such as monokines, lymphokines, interleukins or chemokines, that further promote the innate immune response, such as IL-1, IL-2, IL-3, IL-4, IL-5, IL-6, IL-7, IL-8, IL-9, IL-10, IL-12, IL-13, IL-14, IL-15, IL-16, IL-17, IL-18, IL-19, IL-20, IL-21, IL-22, IL-23, IL-24, IL-25, IL-26, IL-27, IL-28, IL-29, IL-30, IL-31, IL-32, IL-33, INF-alpha, IFN-beta, INF-gamma, GM-CSF, G-CSF, M-CSF, LT-beta or TNF-alpha, growth factors, such as hGH.

[0642] The (pharmaceutical) composition or vaccine of the invention may additionally contain any further compound, which is known to be immunostimulating due to its binding affinity (as ligands) to human Toll-like receptors TLR1, TLR2, TLR3, TLR4, TLR5, TLR6, TLR7, TLR8, TLR9, TLR10, or due to its binding affinity (as ligands) to murine Toll-like receptors TLR1, TLR2, TLR3, TLR4, TLR5, TLR6, TLR7, TLR8, TLR9, TLR10, TLR11, TLR12 or TLR13.

[0643] The (pharmaceutical) composition or vaccine of the invention may additionally contain CpG nucleic acids, in particular CpG-RNA or CpG-DNA. A CpG-RNA or CpG-DNA can be a single-stranded CpG-DNA (ss CpG-DNA), a double-stranded CpG-DNA (dsDNA), a single-stranded CpG-RNA (ss CpG-RNA) or a double-stranded CpG-RNA (ds CpG-RNA). The CpG nucleic acid is preferably in the form of CpG-RNA, more preferably in the form of single-stranded CpG-RNA (ss CpG-RNA). The CpG nucleic acid preferably contains at least one or more (mitogenic) cytosine/guanine dinucleotide sequence(s) (CpG motif(s)). According to a first preferred alternative, at least one CpG motif contained in these sequences, that is to say the C (cytosine) and the G (guanine) of the CpG motif, is unmethylated. All further cytosines or guanines optionally contained in these sequences can be either methylated or unmethylated. According to a further preferred alternative, however, the C (cytosine) and the G (guanine) of the CpG motif can also be present in methylated form.

### Kit

[0644] In a further aspect, the present invention relates to a kit or kit-of-parts comprising the artificial nucleic acid molecule, preferably RNA, and/or the (pharmaceutical) composition or vaccine of the invention, and optionally a liquid vehicle and/or optionally technical instructions with information on the administration and dosage of the artificial nucleic acid molecule or the composition.

[0645] Optionally, the kit-of-parts may comprise at least one further agent as defined herein in the context of the pharmaceutical composition, antimicrobial agents, RNAse inhibitors, solubilizing agents, buffers, or the like. In preferred embodiments, the kit may contain as a part Ringer-Lactate solution.

[0646] The kit or kit-of-parts may be a kit of two or more parts and typically comprises each of the components described herein in suitable containers. For example, each container may be in the form of vials, bottles, squeeze bottles, jars, sealed sleeves, envelopes or pouches, tubes or blister packages or any other suitable form provided the container is configured so as to prevent premature mixing of components. Each of the different components may be provided separately, or some of the different components may be provided together (i.e. in the same container). A container may also be a compartment or a chamber within a vial, a tube, a jar, or an envelope, or a sleeve, or a blister package or a bottle, provided that the contents of one compartment are not able to associate physically with the contents of another compartment prior to their deliberate mixing by a pharmacist or physician.

[0647] The kit may furthermore contain technical instructions with information on the administration and dosage of any of its components.

### Medical Use and Treatment

[0648] In a further aspect, the present invention provides the artificial nucleic acid molecule, preferably RNA, the (pharmaceutical) composition or vaccine, or the kit of the invention for human and also for veterinary medical purposes, preferably for human medical purposes.

[0649] According to a further aspect, the invention thus relates to the artificial nucleic acid molecule, preferably RNA, or the (pharmaceutical) composition or vaccine, or kit-of-parts for use as a medicament.

[0650] The artificial nucleic acid molecule, preferably RNA, or the (pharmaceutical) composition or kit-of-parts are inter alia provided for use in treatment and/or prophylaxis of cancer, infectious diseases including viral, bacterial, fungal or protozoal infections, autoimmune diseases, Graft-versus-host disease (GvHD) or allergies.

[0651] The term “treatment” or “treating” of a disease includes preventing or protecting against the disease (that is, causing the clinical symptoms not to develop); inhibiting the disease (i.e., arresting or suppressing the development of clinical symptoms; and/or relieving the disease (i.e., causing the regression of clinical symptoms). As will be appreciated, it is not always possible to distinguish between “preventing” and “suppressing” a disease or disorder since the ultimate inductive event or events may be unknown or latent. Accordingly, the term “prophylaxis” will be understood to constitute a type of “treatment” that encompasses both “preventing” and “suppressing”. The term “treatment” thus includes “prophylaxis”.

[0652] The term “subject”, “patient” or “individual” as used herein generally includes humans and non-human animals and preferably mammals (e.g., non-human primates, including marmosets, tamarins, spider monkeys, owl monkeys, vervet monkeys, squirrel monkeys, and baboons, macaques, chimpanzees, orangutans, gorillas; cows; horses; sheep; pigs; chicken; cats; dogs; mice; rat; rabbits; guinea pigs; etc.), including chimeric and transgenic animals and disease models. In the context of the present invention, the term “subject” preferably refers a non-human primate or a human, most preferably a human.

[0653] According to preferred embodiments, treatment of cancer, infectious diseases including viral, bacterial, fungal or protozoal infections, autoimmune diseases, Graft-versus-host disease (GvHD) or allergies is accomplished by administering, to a subject in need thereof, at least one artificial nucleic acid molecule, preferably RNA, (pharmaceutical) composition or vaccine, or kit according to the invention. Preferably, administration is accomplished parenterally, preferably intradermally, intramuscularly, intranodally, transdermally, subcutaneous or intratumorally. Preferably, injection is carried out by injection, e.g. using conventional needle injection or (needle-free) jet injection, preferably by using (needle-free) jet injection. Prior to administration, treatment may include an optional step of preparing said artificial nucleic acid molecule, preferably RNA, or the (pharmaceutical) composition or vaccine or kit.

[0654] The invention further relates to a method of treating cancer, infectious diseases including viral, bacterial, fungal or protozoal infections, autoimmune diseases, Graft-versus-host disease (GvHD) or allergies comprising the steps of (a) optionally preparing the artificial nucleic acid molecule, preferably RNA, or the (pharmaceutical) composition or vaccine or kit of the invention and (b) administering, to a subject in need thereof, at least one artificial nucleic acid molecule, preferably RNA, (pharmaceutical) composition or vaccine, or kit according to the invention.

[0655] The invention further relates to the use of the inventive artificial nucleic acid molecule, preferably RNA, or the (pharmaceutical) composition or kit, preferably for manufacturing a medicament for treating cancer, infectious diseases including viral, bacterial, fungal or protozoal infections, autoimmune diseases, Graft-versus-host disease (GvHD) or allergies.

### Administration Routes

[0656] The inventive artificial nucleic acid molecule, preferably RNA, or the (pharmaceutical) composition or vaccine or kit can be administered, for example, systemically or locally.

[0657] Routes for systemic administration in general include, for example, transdermal, oral, parenteral routes, including subcutaneous, intravenous, intramuscular, intraarterial, intradermal and intraperitoneal injections and/or intranasal administration routes.

[0658] Routes for local administration in general include, for example, topical administration routes but also intradermal, transdermal, subcutaneous, or intramuscular injections or intralesional, intratumoral, peritumoral, imaging guided loco-regional administration, intracranial, intrapulmonal, intracardial, intranodular and sublingual injections.

[0659] It is further conceivable to use different administration routes for different artificial nucleic acid molecules, preferably RNAs, of the invention, and/or different parts of the kit.

[0660] According to preferred embodiments, the artificial nucleic acid molecule, preferably RNA, or the (pharmaceutical) composition or vaccine or kit is administered parenterally, preferably intradermally, intramuscularly, intranodally, transdermally, imaging guided loco-regional administration or intratumorally. Preferably, said artificial nucleic acid molecule, preferably RNA, or the (pharmaceutical) composition or vaccine or kit is administered by injection, e.g. subcutaneous, intramuscular, intradermal or intratumoral injection, which may be needle-free and/or needle injection. Accordingly, in preferred embodiments, the medical use and/or method of treatment according to the present invention involves administration of said artificial nucleic acid molecule, preferably RNA, or the (pharmaceutical) composition or vaccine or kit by subcutaneous, intramuscular, intradermal or intratumoral injection. Such injection may be carried out by using conventional needle injection or (needle-free) jet injection, preferably by using (needle-free) jet injection.

### Administration Regimen

[0661] The artificial nucleic acid molecule, preferably RNA, (pharmaceutical) composition or vaccine or kit of the invention (or their components or parts) may be administered to a subject in need thereof several times a day, daily, every other day, weekly, or monthly; and may be administered sequentially or simultaneously, optionally via different administration routes as defined above.

[0662] According to some preferred embodiments, the artificial nucleic acid molecule, preferably RNA, (pharmaceutical) composition or vaccine or kit of the invention (or their components or parts) are administered simultaneously (i.e. at the same time via the same or different administrations routes).

[0663] According to other preferred embodiments, the artificial nucleic acid molecule, preferably RNA, (pharmaceutical) composition or vaccine or kit of the invention (or their components or parts) are administered separately (i.e. sequentially at different time points and/or via different administrations routes). Such a sequential administration scheme is also referred to as “time-staggered” administration.

### Dose

[0664] The artificial nucleic acid molecule, preferably RNA, (pharmaceutical) composition or vaccine or kit of the invention (or their components or parts) is/are preferably administered in a safe and therapeutically effective amount.

[0665] As used herein, “safe and therapeutically effective amount” means an amount of the active agent(s) that is sufficient to elicit a desired biological or medicinal response in a tissue, system, animal or human that is being sought. A “safe and therapeutically effective amount” is preferably sufficient for the inducing a positive modification of the disease to be treated, i.e. for alleviation of the symptoms of the disease being treated, reduction of disease progression, or prophylaxis of the symptoms of the disease being prevented. At the same time, however, a “safe and therapeutically effective amount” is small enough to avoid serious side-effects, that is to say to permit a sensible relationship between advantage and risk.

[0666] A “safe and therapeutically effective amount” will furthermore vary in connection with the particular condition to be treated and also with the age, physical condition, body weight, sex and diet of the patient to be treated, the severity of the condition, the duration of the treatment, the nature of the accompanying therapy, of the particular pharmaceutically acceptable carrier or excipient used, the treatment regimen and similar factors. It may further vary depending on whether the employed artificial nucleic acid molecule, preferably RNA, is monocistronic, bi- or even multicistronic.

[0667] Therapeutic efficacy and toxicity of active agents can be determined by standard pharmaceutical procedures in cell cultures or experimental animals, e.g., for determining the LD50 (the dose lethal to 50% of the population) and the ED50 (the dose therapeutically effective in 50% of the population). The dose ratio between toxic and therapeutic effects is the therapeutic index and can be expressed as the ratio LD50/ED50. Active agents which exhibit large therapeutic indices are generally preferred. The data obtained from the cell culture assays and animal studies can be used in formulating a range of dosage for use in humans. The dosage of such compounds lies preferably within a range of circulating concentrations that include the ED50 with little or no toxicity.

[0668] For instance, therapeutically effective doses of the inventive artificial nucleic acid molecule, preferably RNA, (pharmaceutical) composition or vaccine or kit described herein may range from about 0.001 mg to 10 mg, preferably from about 0.01 mg to 5 mg, more preferably from about 0.1 mg to 2 mg per dosage unit or from about 0.01 nmol to 1 mmol per dosage unit, in particular from 1 nmol to 1 mmol per dosage unit, preferably from 1 μmol to 1 mmol per dosage unit. It is also envisaged that the therapeutically effective dose of the inventive artificial nucleic acid molecule, preferably RNA, (pharmaceutical) composition or vaccine or kit may range (per kg body weight) from about 0.01 mg/kg to 10 g/kg, preferably from about 0.05 mg/kg to 5 g/kg, more preferably from about 0.1 mg/kg to 2.5 g/kg.

[0669] Safe and therapeutically effective amounts of the inventive artificial nucleic acid molecule, preferably RNA, (pharmaceutical) composition or vaccine or kit to be administered can be determined by routine experiments, e.g. by using animal models. Such models include, without implying any limitation, rabbit, sheep, mouse, rat, dog and non-human primate models.

### Diseases

### Cancer

[0670] In preferred embodiments, the artificial nucleic acid, preferably RNA, (pharmaceutical) composition or kit is used for treatment or prophylaxis of cancer.

[0671] In some embodiments, the artificial nucleic acid, preferably RNA, (pharmaceutical) composition or kit according to the invention may be used as a medicament, in particular for treatment of tumor or cancer diseases. In this context, treatment preferably involves intratumoral application, especially by intratumoral injection. Accordingly, the artificial nucleic acid, preferably RNA, (pharmaceutical) composition or kit according to the invention may be used for preparation of a medicament for treatment of tumor or cancer diseases, said medicament being particularly suitable for intratumoral application (administration) for treatment of tumor or cancer diseases.

[0672] Preferably, tumor and cancer diseases as mentioned herein are selected from tumor or cancer diseases which preferably include e.g. Acute lymphoblastic leukemia, Acute myeloid leukemia, Adrenocortical carcinoma, AIDS-related cancers, AIDS-related lymphoma, Anal cancer, Appendix cancer, Astrocytoma, Basal cell carcinoma, Bile duct cancer, Bladder cancer, Bone cancer, Osteosarcoma/Malignant fibrous histiocytoma, Brainstem glioma, Brain tumor, cerebellar astrocytoma, cerebral astrocytoma/malignant glioma, ependymoma, medulloblastoma, supratentorial primitive neuroectodermal tumors, visual pathway and hypothalamic glioma, Breast cancer, Bronchial adenomas/carcinoids, Burkitt lymphoma, childhood Carcinoid tumor, gastrointestinal Carcinoid tumor, Carcinoma of unknown primary, primary Central nervous system lymphoma, childhood Cerebellar astrocytoma, childhood Cerebral astrocytoma/Malignant glioma, Cervical cancer, Childhood cancers, Chronic lymphocytic leukemia, Chronic myelogenous leukemia, Chronic myeloproliferative disorders, Colon Cancer, Cutaneous T-cell lymphoma, Desmoplastic small round cell tumor, Endometrial cancer, Ependymoma, Esophageal cancer, Ewing's sarcoma in the Ewing family of tumors, Childhood Extracranial germ cell tumor, Extragonadal Germ cell tumor, Extrahepatic bile duct cancer, Intraocular melanoma, Retinoblastoma, Gallbladder cancer, Gastric (Stomach) cancer, Gastrointestinal Carcinoid Tumor, Gastrointestinal stromal tumor (GIST), extracranial, extragonadal, or ovarian Germ cell tumor, Gestational trophoblastic tumor, Glioma of the brain stem, Childhood Cerebral Astrocytoma, Childhood Visual Pathway and Hypothalamic Glioma, Gastric carcinoid, Hairy cell leukemia, Head and neck cancer, Heart cancer, Hepatocellular (liver) cancer, Hodgkin lymphoma, Hypopharyngeal cancer, childhood Hypothalamic and visual pathway glioma, Intraocular Melanoma, Islet Cell Carcinoma (Endocrine Pancreas), Kaposi sarcoma, Kidney cancer (renal cell cancer), Laryngeal Cancer, Leukemias, acute lymphoblastic Leukemia, acute myeloid Leukemia, chronic lymphocytic Leukemia, chronic myelogenous Leukemia, hairy cell Leukemia, Lip and Oral Cavity Cancer, Liposarcoma, Liver Cancer, Non-Small Cell Lung Cancer, Small Cell Lung Cancer, Lymphomas, AIDS-related Lymphoma, Burkitt Lymphoma, cutaneous T-Cell Lymphoma, Hodgkin Lymphoma, Non-Hodgkin Lymphomas, Primary Central Nervous System Lymphoma, Waldenström Macroglobulinemia, Malignant Fibrous Histiocytoma of Bone/Osteosarcoma, Childhood Medulloblastoma, Melanoma, Intraocular (Eye) Melanoma, Merkel Cell Carcinoma, Adult Malignant Mesothelioma, Childhood Mesothelioma, Metastatic Squamous Neck Cancer with Occult Primary, Mouth Cancer, Childhood Multiple Endocrine Neoplasia Syndrome, Multiple Myeloma/Plasma Cell Neoplasm, Mycosis Fungoides, Myelodysplastic Syndromes, Myelodysplastic/Myeloproliferative Diseases, Chronic Myelogenous Leukemia, Adult Acute Myeloid Leukemia, Childhood Acute Myeloid Leukemia, Multiple Myeloma (Cancer of the Bone-Marrow), Chronic Myeloproliferative Disorders, Nasal cavity and paranasal sinus cancer, Nasopharyngeal carcinoma, Neuroblastoma, Oral Cancer, Oropharyngeal cancer, Osteosarcoma/malignant fibrous histiocytoma of bone, Ovarian cancer, Ovarian epithelial cancer (Surface epithelial-stromal tumor), Ovarian germ cell tumor, Ovarian low malignant potential tumor, Pancreatic cancer, islet cell Pancreatic cancer, Paranasal sinus and nasal cavity cancer, Parathyroid cancer, Penile cancer, Pharyngeal cancer, Pheochromocytoma, Pineal astrocytoma, Pineal germinoma, childhood Pineoblastoma and supratentorial primitive neuroectodermal tumors, Pituitary adenoma, Plasma cell neoplasia/Multiple myeloma, Pleuropulmonary blastoma, Primary central nervous system lymphoma, Prostate cancer, Rectal cancer, Renal cell carcinoma (kidney cancer), Cancer of the Renal pelvis and ureter, Retinoblastoma, childhood Rhabdomyosarcoma, Salivary gland cancer, Sarcoma of the Ewing family of tumors, Kaposi Sarcoma, soft tissue Sarcoma, uterine Sarcoma, Sezary syndrome, Skin cancer (nonmelanoma), Skin cancer (melanoma), Merkel cell Skin carcinoma, Small intestine cancer, Squamous cell carcinoma, metastatic Squamous neck cancer with occult primary, childhood Supratentorial primitive neuroectodermal tumor, Testicular cancer, Throat cancer, childhood Thymoma, Thymoma and Thymic carcinoma, Thyroid cancer, childhood Thyroid cancer, Transitional cell cancer of the renal pelvis and ureter, gestational Trophoblastic tumor, Urethral cancer, endometrial Uterine cancer, Uterine sarcoma, Vaginal cancer, childhood Visual pathway and hypothalamic glioma, Vulvar cancer, Waldenstrom macroglobulinemia, and childhood Wilms tumor (kidney cancer).

[0673] Especially preferred examples of tumors or cancers that are suitable for intratumoral administration are prostate cancer, lung cancer, breast cancer, brain cancer, head and neck cancer, thyroid cancer, colon cancer, stomach cancer, liver cancer, pancreas cancer, ovary cancer, skin cancer, urinary bladder, uterus and cervix.

### Infectious Diseases

[0674] The inventive combination, pharmaceutical composition or kit may be used for treating infectious diseases. The term “infection” or “infectious disease” relates to the invasion and multiplication of microorganisms such as bacteria, viruses, and parasites that are not normally present within the body. An infection may cause no symptoms and be subclinical, or it may cause symptoms and be clinically apparent. An infection may remain localized, or it may spread through the blood or lymphatic system to become systemic. Infectious diseases in this context, preferably include viral, bacterial, fungal or protozoological infectious diseases.

### Combination Therapy

[0675] According to some preferred embodiments, the medical uses and treatment methods of the invention may include subjecting the patient to a combination therapy. Any therapy amenable for treating or preventing the diseases, disorders and conditions described herein (in particular cancer, infectious diseases, autoimmune diseases, graft-versus-host disease and allergies) may be combined with/employed in addition to the administration of the inventive artificial nucleic acid molecules, preferably RNAs, (pharmaceutical) composition or kit. Combination therapy may generally be effected prior to, simultaneously with, or subsequently to the administration of said artificial nucleic acid molecule, (pharmaceutical) composition or vaccine, or kit of the invention, and inter alia depends on the type and severity of the disease, disorder, or condition to be treated.

### Cancer

[0676] Treatment of cancer may, in addition to administration of the artificial nucleic acid molecule, (pharmaceutical) composition or vaccine, or kit of the invention, comprise one or more of the following: chemotherapy (e.g. first-line or second-line chemotherapy), radiotherapy, chemoradiation (combination of chemotherapy and radiotherapy), kinase inhibitors, antibody therapy and/or checkpoint modulators (e.g. CTLA4 inhibitors, PD1 pathway inhibitors) or inhibitors inducing expression of T cell epitopes associated with impaired peptide processing (TEIPPs) as disclosed in WO2012/089225. Accordingly, in some embodiments the subject receiving the inventive artificial nucleic acid molecule, (pharmaceutical) composition or vaccine may be a patient with cancer or tumor, who received or receives chemotherapy (e.g. first-line or second-line chemotherapy), radiotherapy, chemoradiation (combination of chemotherapy and radiotherapy), kinase inhibitors, antibody therapy and/or checkpoint modulators (e.g. CTLA4 inhibitors, PD1 pathway inhibitors) or inhibitors inducing expression of T cell epitopes associated with impaired peptide processing (TEIPPs) as disclosed in WO2012/089225, or a patient, who has achieved partial response or stable disease after having received one or more of the treatments specified above.

[0677] For instance, the subject receiving the inventive artificial nucleic acid molecule, preferably RNA, (pharmaceutical) composition or kit-of-parts may be a patient with cancer, preferably as defined herein, or a related condition, receiving chemotherapy (e.g. first-line or second-line chemotherapy), radiotherapy, chemoradiation (combination of chemotherapy and radiotherapy), tyrosine kinase inhibitors (e.g. EGFR tyrosine kinase inhibitors), antibody therapy and/or inhibitory and/or stimulatory checkpoint molecules (e.g. PD1, PD-L1 or CTLA4 inhibitors), or a patient, who has achieved partial response or stable disease after having received one or more of the treatments specified above. Or, the subject receiving the inventive artificial nucleic acid molecule, preferably RNA, (pharmaceutical) composition or kit-of-parts may be a patient with an infectious disease, preferably as defined herein, receiving antibiotic, antifungal or antiviral therapy.

[0678] In a further aspect, the present invention thus also relates to the use of the inventive artificial nucleic acid molecule, preferably RNA, (pharmaceutical) composition or kit-of-parts for supporting another therapy of cancer, an infectious disease, or any other disease amenable by treatment with said artificial nucleic acid molecule, (pharmaceutical) composition or kit.

[0679] “Support” of the treatment or prophylaxis of cancer may be any combination of a conventional cancer therapy method of such as surgery, radiation therapy, chemotherapy (e.g. first-line or second-line chemotherapy), chemoradiation, treatment with tyrosine kinase inhibitors, treatment with inhibitory and/or stimulatory checkpoint molecules, preferably PD1, PD-L1 or CTLA4 inhibitors, antibody therapy or any combination of these, and a therapy using the inventive inventive artificial nucleic acid molecule, preferably RNA, (pharmaceutical) composition or kit-of-parts as defined herein. Administration of the inventive artificial nucleic acid molecule, preferably RNA, (pharmaceutical) composition or kit-of-parts may be accomplished prior to, simultaneously and/or subsequently to administering another therapeutic or subjecting the patient to another therapy that is useful for treatment of the particular disease or condition to be treated.

### In Vitro Methods

[0680] In a further aspect, the invention relates to an in vitro cell culture or cell treatment method comprising (a) providing cells in vitro, (b) contacting said cells with the artificial nucleic acid molecule, preferably RNA, the (pharmaceutical) composition or vaccine, or the kit of the invention.

[0681] Without wishing to be bound by specific theory, said cell culture/treatment method is envisaged to be particularly useful for preparing antigen-presenting cells (APCs), such as dendritic cells (DCs), for subsequent T cell expansion in vitro or in vivo. The cells are preferably contacted with said artificial nucleic acid molecule, preferably RNA, (pharmaceutical) composition or vaccine or kit in a suitable cell culture medium. Step (b) may in particular include a step of transfecting the cells with the artificial nucleic acid molecules, preferably RNAs, optionally comprised by said (pharmaceutical) composition or vaccine, or kit. Transfection, i.e. the act of deliberately introducing the artificial nucleic acid molecules, preferably RNAs, into living cells, may for instance involve microinjection or electroporation. Upon introduction into the recipient cells, the artificial nucleic acid molecules, preferably RNAs, are preferably translated, yielding the antigenic fusion proteins of the invention, which are subsequently presented via the MHC complex.

### DESCRIPTION OF THE FIGURES

[0682] FIG. 1: General design of RNA constructs enabling the targeting of epitopes or antigens to MHC class I and II-containing cellular compartments.

[0683] FIG. 2: Induction of epitope-specific CD8+ T cells after vaccination with RNA encoding a murine Trp2 epitope with PADRE.

[0684] FIG. 3: Induction of epitope-specific CD8+ T cells after vaccination with RNA encoding a murine Trp2 epitope with IRSTₑₚₘ-(CTLA4) derived targeting sequence.

[0685] FIG. 4: Induction of epitope-specific CD8+ T cells after vaccination with RNA encoding an ovalbumin epitope with IRSTₑₚₘ-(CTLA4) derived targeting sequence.

[0686] FIG. 5: Vaccination with RNA encoding an OVA epitope with IRSTₑₚₘ (CTLA4)-derived targeting sequence induces a significant anti-tumor response in E.G⁷-OVA-tumor-bearing mice.

[0687] FIG. 6: Anti-tumor response induced by RNA encoding an OVA epitope with IRSTₑₚₘ-(CTLA4-) derived targeting sequence is superior in comparison to vaccination with the corresponding peptide plus adjuvant.

[0688] FIG. 7: Induction of epitope-specific CD8+ T cells after vaccination with mRNA encoding different ovalbumin epitopes with the CTLA4 targeting approach.

### EXAMPLES

### Example 1

[0689] C57BL/6 mice were injected intradermally (i.d.) at 4 sites with RNA constructs encoding an Trp2 epitope connected to a T cell helper epitope (PADRE) (64 μg RNA in 50 μl PBS). The Trp2 peptide SVYDFFVWL is a confirmed CD8⁺ T cell epitope.

[0690] On days 0, 3, 7, 10 and 14 of the experiment mice were injected i.d. with mRNA solved in Ringer Lactate buffer according to the Table 8 below. The total volume for intradermal vaccination was 80 μl and was distributed to 4 sites of injection. 6 days after the last vaccination an ICS was performed to evaluate epitope-specific CD8⁺ T cell responses. Therefore CD8⁺ T cells were stimulated with the corresponding peptide and as a control with an irrelevant peptide. In none of the groups epitope-specific CD8⁺ T cell responses were observed (FIG. 2).

TABLE 8
Groups, treatment and RNA dilution

| Groups | Constructs (amount of RNA) | No. of mice | SEQ ID NOS: |
|---|---|---|---|
| A | Trp2-PADRE (64 μg) | 6 | 2931 |
| B | Buffer | 6 | — |

### Example 2

[0691] C57BL/6 mice were injected intradermally (i.d.) at 4 sites with RNA constructs encoding an ovalbumin or Trp2 epitope connected to a T cell helper epitope (PADRE) with the CTLA4 targeting approach (64 μg RNA in 50 μl PBS). Peptides of ovalbumin (LESIINFEKLTE) and Trp2 (SVYDFFVWL) are known CD8⁺ T cell epitopes.

[0692] On days 0, 3, 7, 10 and 14 of the experiment mice were injected i.d. with RNA solved in Ringer Lactate buffer according to the Table 9 below. The total volume for intradermal vaccination was 80 μl and was distributed to 4 sites of injection. 6 days after the last vaccination an ICS was performed to evaluate epitope-specific CD8⁺ T cell responses. Therefore CD8⁺ T cells were stimulated with the corresponding peptide and as a control with an irrelevant peptide. In both groups epitope-specific CD8⁺ T cell responses were observed (FIGS. 3 and 4).

TABLE 9
Groups, treatment and RNA dilution

| Groups | Constructs (amount of RNA) | No. of mice | SEQ ID NOS: |
|---|---|---|---|
| A* | CTLA4-OVA-PADRE (64 μg) | 6 | 2913 |
| B | CTLA4-Trp2-PADRE (64 μg) | 6 | 2914 |
| C | Buffer | 6 | |

[0693] More specifically, constructs according to A preferably have the following structure: HsCTLA4(1-35)_Linker_GgOva(249-273)_Linker_PADRE_Linker_HsCTLA4(162-223)

### Example 3

[0694] C57BL/6 mice were injected subcutaneously (s.c.) with 3×10⁵ E.G7-OVA cells per mouse (in a volume of 100 μl PBS) on the right flank on day 0 of the experiment. At day 4 after tumor inoculation C57BL/6 mice were injected i.d. at 4 sites with RNA constructs encoding an epitope of ovalbumin (LESIINFEKLTE) and a T cell helper epitope (PADRE) with the CTLA4 targeting approach (64 μg RNA in 80 μl Ringer Lactate buffer). Two additional groups were vaccinated i.d. with ovalbumin full length protein encoded by mRNA (RNActive) (FIG. 5) or ovalbumin peptide in combination with RNAdjuvant (FIG. 6).

[0695] On days 0, 3, 7, 10 and 14 of the experiment mice were injected i.d. with RNA or peptide according to the Table 10 and 11 below.

[0696] Tumor growth was monitored by measuring the tumor size in three dimensions using a calliper. Tumor volume was calculated according to the following formula:

$$volume ( {mm}^{3} ) = \frac{length ( mm ) \times π \times {width}^{2} ( {mm}^{2} )}{6}$$

### Result:

[0697] Vaccination with RNA encoding an OVA epitope with the CTLA4 targeting approach induces a significant anti-tumor response in E.G7-OVA-tumor-bearing mice (FIGS. 5 and 6). Anti-tumor response induced by RNA encoding an OVA epitope with the targeting approach is superior in comparison to vaccination with the corresponding peptide plus an RNA-based adjuvant (RNAdjuvant) (FIG. 6).

TABLE 10
Groups, treatment and RNA dilution

| | | No. of | SEQ ID |
|---|---|---|---|
| Groups | Constructs (amount of RNA) | mice | NOS: |
| A | OVA RNActive (full length | 8 | 2935 |
| | protein) (32 μg) | | |
| B | CTLA4-OVA-PADRE (64 μg) | 8 | 2913 |
| C | Buffer | 8 | |
| A | OVA (peptide, 50 μg) + | 8 | 2927 + 3029 |
| | RNAdjuvant (50 μg) | | |
| B | CTLA4-OVA-PADRE (64 μg) | 8 | 2913 |
| C | Buffer | 8 | |

### Example 4

[0698] C57BL/6 mice were injected intradermally (i.d.) at 4 sites with mRNA constructs encoding different ovalbumin epitopes connected to a T cell helper epitope (PADRE) with the CTLA4 targeting approach (32 μg mRNA in 50 μl PBS). Short peptide of ovalbumin (LESIINFEKLTE) and long epitope of ovalbumin (EVSGLEQLESIINFEKLTEWTSSNV) covering the known CD8⁺ T cell epitope of ovalbumin.

[0699] On days 0, 7 and 14 of the experiment mice were injected i.d. with mRNA solved in Ringer Lactate buffer according to the Table 11 below. The total volume for intradermal vaccination was 80 μl and was distributed to 4 sites of injection. 6 days after the last vaccination an ICS was performed to evaluate epitope-specific CD8⁺ T cell responses. Therefore CD8⁺ T cells were stimulated with the corresponding peptide and as a control with media. In both groups epitope-specific CD8⁺ T cell responses were observed (FIG. 7).

TABLE 11
Groups, treatment and RNA dilution

| | | No. of | SEQ |
|---|---|---|---|
| Groups | Constructs (amount of RNA) | mice | ID NOS: |
| A | CTLA4-OVA-PADRE (long peptide) | 6 | 77062 |
| B | CTLA4-OVA-PADRE (short peptide) | 6 | 2913 |
| C | Buffer | 3 | — |

### Items

[0700] The present invention may be characterized by the following items:
[0701] 1. An artificial nucleic acid molecule comprising at least one coding region encoding
   [0702] a. at least one antigenic peptide or protein,
   [0703] and at least one additional amino acid sequence derived from at least one immune response activating signal transduction protein located in the external plasma membrane.
[0704] 2. The artificial nucleic acid molecule according to item 1, wherein said immune response activating signal transduction protein located in the external plasma membrane (IRSTₑₚₘ) is selected from CTLA4 (Cytotoxic T-lymphocyte protein 4), CD36 (Platelet glycoprotein 4), TRBC2 (T-cell receptor beta-2 chain C region), TRDC (T-cell receptor delta chain C region), TLR4 (Toll-like receptor 4), CD4 (T-cell surface glycoprotein CD4), TRBC1 (T-cell receptor beta-1 chain C region), CD3E (T-cell surface glycoprotein CD3 epsilon chain), PTPRC (Receptor-type tyrosine-protein phosphatase C), FCG3A (Low affinity immunoglobulin gamma Fc region receptor LNP-III-A), CD28 (T-cell-specific surface glycoprotein CD28), CD79A (B-cell antigen receptor complex-associated protein alpha chain), CD19 (B-lymphocyte antigen CD19), NKG2D (NKG2-D type II integral membrane protein), FCERG (High affinity immunoglobulin epsilon receptor subunit gamma), CD79B (B-cell antigen receptor complex-associated protein beta chain), CD86 (T-lymphocyte activation antigen CD86), CD226 (CD226 antigen), MUC17 (Mucin-17), CD209 (CD209 antigen), TLR8 (Toll-like receptor 8), or a variant, fragment or derivative of any of these proteins.
[0705] 3. The artificial nucleic acid molecule according to item 1 or 2, wherein said at least one additional amino acid sequence comprises or consists of:
   [0706] b. at least one transmembrane domain and optionally
   [0707] c. at least one cytoplasmic domain.
[0708] 4. The artificial nucleic acid molecule according to any one of the preceding items, wherein said at least one coding region further encodes
   [0709] d. at least one signal peptide.
[0710] 5. The artificial nucleic acid molecule according to any one of the preceding items, wherein said at least one antigenic peptide or protein is selected from or derived from tumor antigens, viral, bacterial, protozoal, fungal or allogenic antigens.
[0711] 6. The artificial nucleic acid molecule according to item 5, wherein said at least one antigenic peptide or protein comprises or consists of an amino acid sequence corresponding to any one of SEQ ID NOs: 3719-27945; 76420-76439, 76440-76474, or a fragment, variant or derivative thereof, and is optionally encoded by a nucleic acid sequence according to any one of SEQ ID NOs: 27946-52172; 76495-76514, 52173-76399; 76570-76589, 76515-76549, 76590-76624 or a fragment, variant or derivative of any one of said sequences.
[0712] 7. The artificial nucleic acid molecule according to item 5 or 6, wherein said tumor antigen is selected from BRAF, PIK3CA, KRAS, IDH1, TP53, NRAS, AKTI, SF3B1, CDKN2A, RPSAP58, EGFR, NY-ESO1, MUC-1, 5T4, Her2, MAGE-A3, LY6K, CEACAM6, CEA, MCAK, KK-LC1, Gastrin, VEGFR2, MMP-7, MPHOSPH1, MAGE-A4, MAGE-A1, MAGE-C1, PRAME, Survivin, MAGE-A9, MAGE-C2, FGFR2, WT1, PSA, PSMA, Prostate-specific antigen precursor, Kita-kyushu lung cancer antigen 1, Trophoblast glycoprotein, Cyclin-dependent kinase inhibitor 2A, Cyclin-dependent kinase inhibitor 2A, isoforms 1/2/3, multiple tumor suppressor 1/cyclin-dependent kinase 4 inhibitor p16, GTPase NRas or a fragment, variant or derivative of any of said tumor antigens, or any combination thereof.
[0713] 8. The artificial nucleic acid molecule according to any one of the preceding items wherein said IRSTₑₚₘ comprises or consists of an amino acid sequence corresponding to any one of SEQ ID NOs: 157-179, or a fragment, variant or derivative thereof, and is optionally encoded by a nucleic acid sequence corresponding to any one of SEQ ID NOs: 365-387, 573-595, 781-803, 989-1011, 1197-1219, 1405-1427, 1613-1635, 1821-1843, 2029-2051, 2237-2259, 2445-2467, 2653-2675, 2861-2883, or a fragment, variant or derivative of any one of said sequences.
[0714] 9. The artificial nucleic acid molecule according to any one of items 3 to 8, wherein the at least one additional amino acid sequence comprises or consists of at least one transmembrane domain and at least one cytoplasmic domain comprising or consisting of an amino acid sequence corresponding to any one of SEQ ID NOs: 76625-76647, or a fragment, variant or derivative thereof and is optionally encoded by a nucleic acid sequence corresponding to any one of SEQ ID NOs: 76648-76947, 77004-77017, 77066 or a fragment, variant or derivative of any one of said sequences.
[0715] 10. The artificial nucleic acid molecule according to any one of items 3 to 8, wherein the transmembrane domain comprises or consists of an amino acid sequence corresponding to any one of SEQ ID NOs: 180-208, or a fragment, variant or derivative thereof and is optionally encoded by a nucleic acid sequence corresponding to any one of SEQ ID NOs: 388-416, 596-624, 804-832, 1012-1040, 1220-1248, 1428-1456, 1636-1664, 1844-1872, 2052-2080, 2260-2288, 2468-2496, 2676-2704, 2884-2912, or a fragment, variant or derivative of any one of said sequences.
[0716] 11. The artificial nucleic acid molecule according to any one of items 4 to 10, wherein the signal peptide comprises or consists of an amino acid sequence corresponding to any one of SEQ ID NOs: 1-156, 76948-76951, or a fragment, variant or derivative thereof, and is optionally encoded by a nucleic acid sequence according to any one of SEQ ID NOs: 209-364, 76952-76955, 625-780, 76960-76963, 833-988, 76964-76967, 417-572, 76956-76959, 1249-1404, 76972-76975, 1457-1612, 76976-76979, 1665-1820, 76980-76983, 1873-2028, 76984-76987, 2081-2236, 76988-76991, 2289-2444, 76992-76995, 2497-2652, 76996-76999, 2705-2860, 77000-77003, 1041-1196, or 76968-76971 or a fragment, variant or derivative thereof.
[0717] 12. The artificial nucleic acid molecule according to any one of the preceding items, further encoding in its at least one coding region
   [0718] e. at least one linker.
[0719] 13. The artificial nucleic acid molecule according to item 12, wherein said linker is a non-immunogenic linker, optionally comprising or consisting of an amino acid sequence according to any one of SEQ ID NOs: 2937, 76400-76418, 77018-77058 optionally encoded by a nucleic acid sequence according to any one of SEQ ID NOs: 2936, 76494, 76569, 76475-76493, 76550-76568, 77059-77061 or a fragment, variant or derivative of any one of said sequences.
[0720] 14. The artificial nucleic acid molecule according to any one of the preceding items, wherein said at least one coding region further encodes
   [0721] f. at least one T helper epitope.
[0722] 15. The artificial nucleic acid molecule according to item 14, wherein said helper epitope sequence comprises or consists of an amino acid sequence corresponding to any one of SEQ ID NOs: 3083-3294, or a fragment, variant or derivative thereof, and is optionally encoded by a nucleic acid sequence according to any one of SEQ ID NOs: 3295-3506, 3507-3718, or a fragment, variant or derivative of any one of said sequences.
[0723] 16. The artificial nucleic acid molecule according to any one of the preceding items, comprising at least one coding region of the following Formula (I), preferably in 5′→3′ direction:

[chemical structure]

[0724] wherein
[0725] “SIG” encodes a signal peptide, preferably as defined in item 11,
[0726] “L” encodes a linker sequence, preferably as defined in item 13,
[0727] each “AN” encodes an identical or different antigenic peptide or protein, preferably as defined in item 5, 6 or 7,
[0728] “IM” encodes a helper epitope, preferably as defined in item 14 or 15,
[0729] “TMD/TMCD” encodes an amino acid sequence derived from an immune response signal transduction protein located in the external plasma membrane, preferably a transmembrane domain, preferably as defined in item 10, and optionally a cytoplasmic domain, preferably as defined in item 9
[0730] b, d, m, n, o is each independently an integer selected from 0, 1, 2, 3, 4, 5, 6, 7, 8, 9, and 10,
[0731] a, c, e, p is each independently an integer selected from 1, 2, 3, 4, 5, 6, 7, 8, 9 and 10.
[0732] 17. The artificial nucleic acid molecule according to any one of the preceding items, encoding in its at least one coding region at least one, or a plurality of at least two, three, four, five, six, seven, eight, nine or ten antigenic peptides or proteins, optionally selected from at least one antigenic peptide or protein according to item 5 or 6, or fragment, variant or derivative thereof, or a combination of said antigenic peptides or proteins, or their fragments, variants or derivatives.
[0733] 18. The artificial nucleic acid molecule according to any one of items 1 to 17, wherein said artificial nucleic acid molecule is an RNA.
[0734] 19. The artificial nucleic acid molecule according to item 18, wherein the RNA is an mRNA, a viral RNA, a replicon RNA, or a circular RNA.
[0735] 20. The artificial nucleic acid molecule, preferably RNA, according to any one of the preceding items, wherein the artificial nucleic acid molecule is mono-, bi-, or multicistronic.
[0736] 21. The artificial nucleic acid molecule, preferably RNA, according to any one of the preceding items, wherein said artificial nucleic acid molecule is modified, preferably stabilized.
[0737] 22. The artificial nucleic acid molecule, preferably RNA, according to any one of the preceding items, wherein
   [0738] the G/C content of the at least one coding region is increased compared to the G/C content of the corresponding coding sequence of the corresponding wild-type artificial nucleic acid, and/or wherein
   [0739] the C content of the at least one coding region is increased compared to the C content of the corresponding coding sequence of the corresponding wild-type artificial nucleic acid, and/or wherein
   [0740] the codons in the at least one coding region are adapted to human codon usage, wherein the codon adaptation index (CAI) is preferably increased or maximised in the at least one coding sequence of the artificial nucleic acid,
   [0741] wherein the amino acid sequence encoded by the artificial nucleic acid is preferably not being modified compared to the amino acid sequence encoded by the corresponding wild-type artificial nucleic acid.
[0742] 23. The artificial nucleic acid molecule, preferably RNA, according to item 22, wherein said at least one coding region comprises or consists of a nucleic acid sequence corresponding to any one of SEQ ID NOs: 417-2912, 76671-76947, 77004-77017, 77066.
[0743] 24. The artificial nucleic acid molecule, preferably RNA, according to any one of the preceding items, which comprises a 5′-CAP structure, preferably m7GpppN or Cap1.
[0744] 25. The artificial nucleic acid molecule, preferably RNA, according to any one of the preceding items, which comprises at least one histone stem-loop.
[0745] 26. The artificial nucleic acid molecule, preferably RNA, according to item 25, wherein the at least one histone stem-loop comprises a nucleic acid sequence according to the following formulae (II) or (III):

[chemical structure]

[0746] formula (III) (stem-loop sequence with stem bordering elements):

[chemical structure]

[0747] wherein:

| | |
|---|---|
| stem1 or stem2 bordering elements | is a consecutive sequence of 1 to 6, preferably of 2 to 6, |
| N₁₋₆ | more preferably of 2 to 5, even more preferably of 3 to 5, |
| | most preferably of 4 to 5 or 5 N, wherein each N is |
| | independently from another selected from a nucleotide |
| | selected from A, U, T, G and C, or a nucleotide analogue |
| | thereof; |
| stem1 [N₀₋₂GN₃₋₅] | is reverse complementary or partially reverse |
| | complementary with element stem2, and is a |
| | consecutive sequence between of 5 to 7 nucleotides; |
| | wherein N₀₋₂ is a consecutive sequence of 0 to 2, |
| | preferably of 0 to 1, more preferably of 1 N, wherein |
| | each N is independently from another selected from a |
| | nucleotide selected from A, U, T, G and C or a |
| | nucleotide analogue thereof; |
| | wherein N₃₋₅ is a consecutive sequence of 3 to 5, |
| | preferably of 4 to 5, more preferably of 4 N, wherein |
| | each N is independently from another selected from a |
| | nucleotide selected from A, U, T, G and C or a |
| | nucleotide analogue thereof, and |
| | wherein G is guanosine or an analogue thereof, and |
| | may be optionally replaced by a cytidine or an analogue |
| | thereof, provided that its complementary nucleotide |
| | cytidine in stem2 is replaced by guanosine; |
| loop sequence [N₀₋₄(U/T)N₀₋₄] | is located between elements stem1 and stem2, and is a |
| | consecutive sequence of 3 to 5 nucleotides, more |
| | preferably of 4 nucleotides; |
| | wherein each N₀₋₄ is independent from another a |
| | consecutive sequence of 0 to 4, preferably of 1 to 3, |
| | more preferably of 1 to 2 N, wherein each N is |
| | independently from another selected from a nucleotide |
| | selected from A, U, T, G and C or a nucleotide analogue |
| | thereof; and |
| | wherein U/T represents uridine, or optionally thymidine; |
| stem2 [N₃₋₅CN₀₋₂] | is reverse complementary or partially reverse |
| | complementary with element stem1, and is a |
| | consecutive sequence between of 5 to 7 nucleotides; |
| | wherein N₃₋₅ is a consecutive sequence of 3 to 5, |
| | preferably of 4 to 5, more preferably of 4 N, wherein |
| | each N is independently from another selected from a |
| | nucleotide selected from A, U, T, G and C or a |
| | nucleotide analogue thereof; |
| | wherein N₀₋₂ is a consecutive sequence of 0 to 2, |
| | preferably of 0 to 1, more preferably of 1 N, wherein |
| | each N is independently from another selected from a |
| | nucleotide selected from A, U, T, G and C or a |
| | nucleotide analogue thereof; and |
| | wherein C is cytidine or an analogue thereof, and may |
| | be optionally replaced by a guanosine or an analogue |
| | thereof provided that its complementary nucleotide |
| | guanosine in stem1 is replaced by cytidine; |

[0748] wherein
[0749] stem1 and stem2 are capable of base pairing with each other
[0750] forming a reverse complementary sequence, wherein base pairing may occur between stem1 and stem2, or
[0751] forming a partially reverse complementary sequence, wherein an incomplete base pairing may occur between stem1 and stem2.
[0752] 27. The artificial nucleic acid molecule, preferably RNA, according to item 25 or 26, wherein the at least one histone stem-loop comprises a nucleic acid sequence according to the following formulae (IIa) or (IIIa):

[chemical structure]

[0753] formula (IIa) (stem-loop sequence without stem bordering elements):
[0754] formula (IIIa) (stem-loop sequence with stem bordering elements):

[chemical structure]

[0755] 28. The artificial nucleic acid molecule, preferably RNA, according to any one of the preceding items, optionally comprising a poly(A) sequence, preferably comprising 10 to 200, 10 to 100, 40 to 80 or 50 to 70 adenosine nucleotides.
[0756] 29. The artificial nucleic acid molecule, preferably RNA, according to any one of the preceding items, optionally comprising a poly(C) sequence, preferably comprising 10 to 200, 10 to 100, 20 to 70, 20 to 60 or 10 to 40 cytosine nucleotides.
[0757] 30. The artificial nucleic acid molecule, preferably RNA, according to any one of the preceding items, which comprises, preferably in 5′ to 3′ direction, the following elements:
   [0758] a) a 5′-CAP structure, preferably m7GpppN, an ARCA Cap or Cap1
   [0759] b) optionally a 5′-UTR element, preferably comprising or consisting of a nucleic acid sequence, corresponding to the nucleic acid sequence according to SEQ ID NOs: 3061 or 3063 or a fragment, variant or corresponding RNA sequence thereof,
   [0760] c) at least one coding sequence as defined in any one of the preceding items,
   [0761] d) optionally a 3′-UTR element, preferably comprising or consisting of a nucleic acid sequence corresponding to the nucleic acid sequence according to SEQ ID NOs: 3065; 3067; 3069; 3071; 3073; 3075 or 3077, or a fragment, variant or corresponding RNA sequence thereof,
   [0762] e) optionally a poly(A) tail, preferably consisting of 10 to 1000, 10 to 500, 10 to 300 10 to 200, 10 to 100, 40 to 80 or 50 to 70 adenosine nucleotides,
   [0763] f) optionally a poly(C) tail, preferably consisting of 10 to 200, 10 to 100, 20 to 70, 20 to 60 or 10 to 40 cytosine nucleotides, and
   [0764] g) optionally a histone stem-loop, optionally comprising or consisting of a nucleic acid sequence corresponding to SEQ ID NO: 3079 or 3080.
[0765] 31. Composition comprising at least one artificial nucleic acid molecule, preferably RNA, according to any one of items 1 to 30 and a pharmaceutically acceptable carrier and/or excipient.
[0766] 32. Composition according to item 31 comprising a plurality of at least two artificial nucleic acid molecules according to any one of items 1 to 30, wherein preferably at least two of said plurality of artificial nucleic acid molecules encode a different antigenic peptide or protein, optionally selected from an antigenic peptide or protein as defined in item 5, 6 or 7, or a fragment, variant or derivative thereof.
[0767] 33. Composition according to item 31 or 32, wherein said composition is a pharmaceutical composition, optionally a vaccine.
[0768] 34. The (pharmaceutical) composition or vaccine according to item 33, wherein the artificial nucleic acid molecule, preferably RNA, is complexed with one or more cationic or polycationic compounds, preferably with cationic or polycationic polymers, cationic or polycationic peptides or proteins, e.g. protamine, cationic or polycationic polysaccharides and/or cationic or polycationic lipids.
[0769] 35. The (pharmaceutical) composition or vaccine according to item 34, wherein the cationic or polycationic compound is a polymeric carrier.
[0770] 36. The (pharmaceutical) composition or vaccine according to item 34, wherein the N/P ratio of the artificial nucleic acid molecule, preferably RNA, to the one or more cationic or polycationic compounds is in the range of about 0.1 to 10, including a range of about 0.3 to 4, of about 0.5 to 2, of about 0.7 to 2 and of about 0.7 to 1.5.
[0771] 37. The (pharmaceutical) composition or vaccine according to any one of items 31 to 36, wherein the artificial nucleic acid molecule, preferably RNA, is complexed with one or more lipids, thereby forming, lipid nanoparticles, lipoplexes and/or preferably liposomes.
[0772] 38. The (pharmaceutical) composition or vaccine according to any one of items 31 to 37, said composition further comprising a non-coding RNA selected from the group consisting of small interfering RNA (siRNA), antisense RNA (asRNA), circular RNA (circRNA), ribozymes, aptamers, riboswitches, immunostimulating RNA (isRNA), transfer RNA (TRNA), ribosomal RNA (rRNA), small nuclear RNA (snRNA), small nucleolar RNA (snoRNA), microRNA (miRNA), and Piwi-interacting RNA (piRNA).
[0773] 39. The (pharmaceutical) composition or vaccine according to item 38, wherein the immunostimulating RNA comprises at least one RNA sequence according to formula (IS-I) (GₗXₘGₙ), formula (IS-II) (CₗXₘCₙ), formula (IS-III) (NᵤGₗXₘGₙNᵥ)ₐ, and/or formula (IS-IV) (NᵤCₗXₘCₙNᵥ)ₐ).
[0774] 40. The (pharmaceutical) composition or vaccine according to item 39, wherein the immunostimulating RNA comprises at least one RNA sequence corresponding to any one of SEQ ID NOs: 2938-3032.
[0775] 41. The (pharmaceutical) composition or vaccine of any one of items 31 to 40, wherein the composition comprises a polymeric carrier cargo complex, formed by a polymeric carrier, preferably comprising disulfide-crosslinked cationic peptides, preferably Cys-Arg₁₂, and/or Cys-Arg₁₂-Cys, and an isRNA, preferably comprising or consisting of an RNA sequence corresponding to SEQ ID NOs: 2938-3032.
[0776] 42. Kit, preferably kit of parts, comprising the artificial nucleic acid molecule, preferably RNA, according to any one of items 1 to 30 or the (pharmaceutical) composition or vaccine according to any one of items 31 to 41, and optionally a liquid vehicle and/or optionally technical instructions with information on the administration and dosage of the artificial nucleic acid molecule or the composition.
[0777] 43. The kit according to item 42, wherein the kit contains as a part Ringer-Lactate solution.
[0778] 44. The artificial nucleic acid molecule, preferably RNA, according to any one of items 1 to 30, the (pharmaceutical) composition or vaccine according to any one of items 31 to 41, or the kit according to item 42 to 43 for use as a medicament.
[0779] 45. The artificial nucleic acid molecule, preferably RNA, according to any one of items 1 to 30, the (pharmaceutical) composition or vaccine according to any one of items 31 to 41, or the kit according to item 42 to 44 for use in a method of treatment or prophylaxis of cancer, infectious diseases including viral, bacterial, fungal or protozoal infections, autoimmune diseases, Graft-versus-host disease (GvHD) or allergies.
[0780] 46. The artificial nucleic acid molecule, preferably RNA, for the use according to item 45, wherein said use comprises (a) administering, to a subject in need thereof, said artificial nucleic acid molecule, preferably RNA, said (pharmaceutical) composition or vaccine, or said kit.
[0781] 47. The artificial nucleic acid molecule, preferably RNA, for the use according to item 46, wherein administration is accomplished parenterally, preferably intradermally, subcutaneously, intravenously, intramuscularly, intranodally, transdermally, or intratumorally.
[0782] 48. A method of treating or preventing cancer, autoimmune diseases, or infectious diseases including viral, bacterial, fungal or protozoal infections, wherein the method comprises administering, to a patient in need thereof, an effective amount of the artificial nucleic acid molecule, preferably RNA, according to any one of items 1 to 30, the (pharmaceutical) composition or vaccine according to any one of items 31 to 41, or the kit according to item 42 to 43.
[0783] 49. The use according to any one of items 44 to 47, or the method according to item 48, further comprising subjecting the patient to at least one or more of the following additional therapies: chemotherapy (e.g. first-line or second-line chemotherapy), radiotherapy, chemoradiation (combination of chemotherapy and radiotherapy), kinase inhibitors, antibody therapy and/or checkpoint modulators (e.g. CTLA4 inhibitors, PD1 pathway inhibitors) or inhibitors inducing expression of T cell epitopes associated with impaired peptide processing (TEIPPs).
[0784] 50. The use according to item 49, wherein said additional therapy is effected prior, simultaneously, or subsequently to the administration of said artificial nucleic acid molecule, (pharmaceutical) composition or vaccine, or kit.
[0785] 51. An in vitro cell culture or cell treatment method comprising (a) providing cells in vitro, (b) contacting said cells with the artificial nucleic acid molecule, preferably RNA, according to any one of items 1 to 30, the (pharmaceutical) composition or vaccine according to any one of items 31 to 41, or the kit according to item 42 to 43.

The application's sequence listing, which the Patent Office published only in electronic form, follows.

SEQUENCE LISTING (77066 sequences)

SEQ ID NO: 1 - protein, 16 aa, synthetic construct
  REGION 1..16: note = P14207_1-16
MVWKWMPLLLLLVCVA

SEQ ID NO: 2 - protein, 16 aa, synthetic construct
  REGION 1..16: note = O75787_1-16
MAVFVVLLALVAGVLG

SEQ ID NO: 3 - protein, 16 aa, synthetic construct
  REGION 1..16: note = P07359_1-16
MPLLLLLLLLPSPLHP

SEQ ID NO: 4 - protein, 16 aa, synthetic construct
  REGION 1..16: note = P08637_1-16
MWQLLLPTALLLLVSA

SEQ ID NO: 5 - protein, 17 aa, synthetic construct
  REGION 1..17: note = P07237_1-17
MLRRALLCLAVAALVRA

SEQ ID NO: 6 - protein, 17 aa, synthetic construct
  REGION 1..17: note = O60911_1-17
MNLSLVLAAFCLGIASA

SEQ ID NO: 7 - protein, 17 aa, synthetic construct
  REGION 1..17: note = P20138_1-17
MPLLLLLPLLWAGALAM

SEQ ID NO: 8 - protein, 17 aa, synthetic construct
  REGION 1..17: note = P27797_1-17
MLLSVPLLLGLLGLAVA

SEQ ID NO: 9 - protein, 18 aa, synthetic construct
  REGION 1..18: note = P10747_1-18
MLRLLLALNLFPSIQVTG

SEQ ID NO: 10 - protein, 18 aa, synthetic construct
  REGION 1..18: note = O75487_1-18
MARFGLPALLCTLAVLSA

SEQ ID NO: 11 - protein, 18 aa, synthetic construct
  REGION 1..18: note = P07996_1-18
MGLAWGLGVLFLMHVCGT

SEQ ID NO: 12 - protein, 18 aa, synthetic construct
  REGION 1..18: note = P22748_1-18
MRMLLALLALSAARPSAS

SEQ ID NO: 13 - protein, 18 aa, synthetic construct
  REGION 1..18: note = Q15762_1-18
MDYPTLLLALLHVYRALC

SEQ ID NO: 14 - protein, 18 aa, synthetic construct
  REGION 1..18: note = P30273_1-18
MIPAVVLLLLLLVEQAAA

SEQ ID NO: 15 - protein, 18 aa, synthetic construct
  REGION 1..18: note = P38570_1-18
MWLFHTLLCIASLALLAA

SEQ ID NO: 16 - protein, 18 aa, synthetic construct
  REGION 1..18: note = Q01638_1-18
MGFWILAILTILMYSTAA

SEQ ID NO: 17 - protein, 18 aa, synthetic construct
  REGION 1..18: note = Q9NZQ7_1-18
MRIFAVFIFMTYWHLLNA

SEQ ID NO: 18 - protein, 19 aa, synthetic construct
  REGION 1..19: note = P13591_1-19
MLQTKDLIWTLFFLGTAVS

SEQ ID NO: 19 - protein, 19 aa, synthetic construct
  REGION 1..19: note = P26842_1-19
MARPHPWWLCVLGTLVGLS

SEQ ID NO: 20 - protein, 19 aa, synthetic construct
  REGION 1..19: note = P15391_1-19
MPPPRLLFFLLFLTPMEVR

SEQ ID NO: 21 - protein, 19 aa, synthetic construct
  REGION 1..19: note = Q8NI17_1-19
MMWTWALWMLPSLCKFSLA

SEQ ID NO: 22 - protein, 19 aa, synthetic construct
  REGION 1..19: note = P08571_1-19
MERASCLLLLLLPLVHVSA

SEQ ID NO: 23 - protein, 19 aa, synthetic construct
  REGION 1..19: note = P05154_1-19
MQLFLLLCLVLLSPQGASL

SEQ ID NO: 24 - protein, 19 aa, synthetic construct
  REGION 1..19: note = P02787_1-19
MRLAVGALLVCAVLGLCLA

SEQ ID NO: 25 - protein, 19 aa, synthetic construct
  REGION 1..19: note = P02671_1-19
MFSMRIVCLVLSVVGTAWT

SEQ ID NO: 26 - protein, 19 aa, synthetic construct
  REGION 1..19: note = P04216_1-19
MNLAISIALLLTVLQVSRG

SEQ ID NO: 27 - protein, 19 aa, synthetic construct
  REGION 1..19: note = P00747_1-19
MEHKEVVLLLLLFLKSGQG

SEQ ID NO: 28 - protein, 19 aa, synthetic construct
  REGION 1..19: note = P01764_1-19
MEFGLSWLFLVAILKGVQC

SEQ ID NO: 29 - protein, 19 aa, synthetic construct
  REGION 1..19: note = P16150_1-19
MATLLLLLGVLVVSPDALG

SEQ ID NO: 30 - protein, 19 aa, synthetic construct
  REGION 1..19: note = Q6DN72_1-19
MLLWTAVLLFVPCVGKTVW

SEQ ID NO: 31 - protein, 19 aa, synthetic construct
  REGION 1..19: note = Q01151_1-19
MSRGLQLLLLSCAYSLAPA

SEQ ID NO: 32 - protein, 19 aa, synthetic construct
  REGION 1..19: note = P07093_1-19
MNWHLPLFLLASVTLPSIC

SEQ ID NO: 33 - protein, 19 aa, synthetic construct
  REGION 1..19: note = Q8WWQ8_1-19
MMLQHLVIFCLGLVVQNFC

SEQ ID NO: 34 - protein, 20 aa, synthetic construct
  REGION 1..20: note = Q13291_1-20
MDPKGLLSLTFVLFLSLAFG

SEQ ID NO: 35 - protein, 20 aa, synthetic construct
  REGION 1..20: note = P35225_1-20
MALLLTTVIALTCLGGFASP

SEQ ID NO: 36 - protein, 20 aa, synthetic construct
  REGION 1..20: note = P25942_1-20
MVRLPLQCVLWGCLLTAVHP

SEQ ID NO: 37 - protein, 20 aa, synthetic construct
  REGION 1..20: note = P52803_1-20
MLHVEMLTLVFLVLWMCVFS

SEQ ID NO: 38 - protein, 20 aa, synthetic construct
  REGION 1..20: note = Q15116_1-20
MQIPQAPWPVVWAVLQLGWR

SEQ ID NO: 39 - protein, 20 aa, synthetic construct
  REGION 1..20: note = P05556_1-20
MNLQPIFWIGLISSVCCVFA

SEQ ID NO: 40 - protein, 20 aa, synthetic construct
  REGION 1..20: note = Q12891_1-20
MRAGPGPTVTLALVLAVAWA

SEQ ID NO: 41 - protein, 20 aa, synthetic construct
  REGION 1..20: note = Q8IV16_1-20
MKALGAVLLALLLCGRPGRG

SEQ ID NO: 42 - protein, 20 aa, synthetic construct
  REGION 1..20: note = Q03167_1-20
MTSHYVIAIFALMSSCLATA

SEQ ID NO: 43 - protein, 20 aa, synthetic construct
  REGION 1..20: note = Q14246_1-20
MRGFNLLLFWGCCVMHSWEG

SEQ ID NO: 44 - protein, 20 aa, synthetic construct
  REGION 1..20: note = P16871_1-20
MTILGTTFGMVFSLLQVVSG

SEQ ID NO: 45 - protein, 20 aa, synthetic construct
  REGION 1..20: note = P61769_1-20
MSRSVALAVLALLSLSGLEA

SEQ ID NO: 46 - protein, 20 aa, synthetic construct
  REGION 1..20: note = Q9Y6W8_1-20
MKSGLWYFFLFCLRIKVLTG

SEQ ID NO: 47 - protein, 21 aa, synthetic construct
  REGION 1..21: note = P10966_1-21
MRPRLWLLLAAQLTVLHGNSV

SEQ ID NO: 48 - protein, 21 aa, synthetic construct
  REGION 1..21: note = Q9BZW8_1-21
MLGQVVTLILLLLLKVYQGKG

SEQ ID NO: 49 - protein, 21 aa, synthetic construct
  REGION 1..21: note = P02778_1-21
MNQTAILICCLIFLTLSGIQG

SEQ ID NO: 50 - protein, 21 aa, synthetic construct
  REGION 1..21: note = P18564_1-21
MGIELLCLFFLFLGRNDHVQG

SEQ ID NO: 51 - protein, 21 aa, synthetic construct
  REGION 1..21: note = O14525_1-21
MALAGLCALLACCWGPAAVLA

SEQ ID NO: 52 - protein, 21 aa, synthetic construct
  REGION 1..21: note = P01130_1-21
MGPWGWKLRWTVALLLAAAGT

SEQ ID NO: 53 - protein, 21 aa, synthetic construct
  REGION 1..21: note = P01732_1-21
MALPVTALLLPLALLLHAARP

SEQ ID NO: 54 - protein, 21 aa, synthetic construct
  REGION 1..21: note = P48061_1-21
MNAKVVVVLVLVLTALCLSDG

SEQ ID NO: 55 - protein, 21 aa, synthetic construct
  REGION 1..21: note = P01589_1-21
MDSYLLMWGLLTFIMVPGCQA

SEQ ID NO: 56 - protein, 21 aa, synthetic construct
  REGION 1..21: note = Q86T13_1-21
MRPAFALCLLWQALWPGPGGG

SEQ ID NO: 57 - protein, 21 aa, synthetic construct
  REGION 1..21: note = Q5DID0_1-21
MLRTSGLALLALVSAVGPSQA

SEQ ID NO: 58 - protein, 22 aa, synthetic construct
  REGION 1..22: note = P40189_1-22
MLTLQTWLVQALFIFLTTESTG

SEQ ID NO: 59 - protein, 22 aa, synthetic construct
  REGION 1..22: note = Q86YL7_1-22
MWKVSALLFVLGSASLWVLAEG

SEQ ID NO: 60 - protein, 22 aa, synthetic construct
  REGION 1..22: note = P55075_1-22
MGSPRSALSCLLLHLLVLCLQA

SEQ ID NO: 61 - protein, 22 aa, synthetic construct
  REGION 1..22: note = Q30201_1-22
MGPRARPALLLLMLLQTAVLQG

SEQ ID NO: 62 - protein, 22 aa, synthetic construct
  REGION 1..22: note = P07766_1-22
MQSGTHWRVLGLCLLSVGVWGQ

SEQ ID NO: 63 - protein, 22 aa, synthetic construct
  REGION 1..22: note = P18827_1-22
MRRAALWLWLCALALSLQPALP

SEQ ID NO: 64 - protein, 22 aa, synthetic construct
  REGION 1..22: note = P55290_1-22
MQPRTPLVLCVLLSQVLLLTSA

SEQ ID NO: 65 - protein, 22 aa, synthetic construct
  REGION 1..22: note = P37173_1-22
MGRGLLRGLWPLHIVLWTRIAS

SEQ ID NO: 66 - protein, 22 aa, synthetic construct
  REGION 1..22: note = Q07325_1-22
MKKSGVLFLLGIILLVLIGVQG

SEQ ID NO: 67 - protein, 22 aa, synthetic construct
  REGION 1..22: note = P04156_1-22
MANLGCWMLVLFVATWSDLGLC

SEQ ID NO: 68 - protein, 22 aa, synthetic construct
  REGION 1..22: note = P31785_1-22
MLKPSLPFTSLLFLQLPLLGVG

SEQ ID NO: 69 - protein, 23 aa, synthetic construct
  REGION 1..23: note = P01579_1-23
MKYTSYILAFQLCIVLGSLGCYC

SEQ ID NO: 70 - protein, 23 aa, synthetic construct
  REGION 1..23: note = P23229_1-23
MAAAGQLCLLYLSAGLLSRLGAA

SEQ ID NO: 71 - protein, 23 aa, synthetic construct
  REGION 1..23: note = O60494_1-23
MMNMSLPFLWSLLTLLIFAEVNG

SEQ ID NO: 72 - protein, 23 aa, synthetic construct
  REGION 1..23: note = P08575_1-23
MYLWLKLLAFGFAFLDTEVFVTG

SEQ ID NO: 73 - protein, 23 aa, synthetic construct
  REGION 1..23: note = Q8IWY4_1-23
MGAAAVRWHLCVLLALGTRGRLA

SEQ ID NO: 74 - protein, 23 aa, synthetic construct
  REGION 1..23: note = Q08431_1-23
MPRPRLLAALCGALLCAPSLLVA

SEQ ID NO: 75 - protein, 23 aa, synthetic construct
  REGION 1..23: note = Q99665_1-23
MAHTFRGCSLAFMFIITWLLIKA

SEQ ID NO: 76 - protein, 23 aa, synthetic construct
  REGION 1..23: note = Q6Q8B3_1-23
MSAPRLLISIIIMVSASSSSCMG

SEQ ID NO: 77 - protein, 23 aa, synthetic construct
  REGION 1..23: note = Q07011_1-23
MGNSCYNIVATLLLVLNFERTRS

SEQ ID NO: 78 - protein, 23 aa, synthetic construct
  REGION 1..23: note = Q8NHL6_1-23
MTPILTVLICLGLSLGPRTHVQA

SEQ ID NO: 79 - protein, 23 aa, synthetic construct
  REGION 1..23: note = P36894_1-23
MPQLYIYIRLLGAYLFIISRVQG

SEQ ID NO: 80 - protein, 23 aa, synthetic construct
  REGION 1..23: note = Q16552_1-23
MTPGKTSLVSLLLLLSLEAIVKA

SEQ ID NO: 81 - protein, 23 aa, synthetic construct
  REGION 1..23: note = P42081_1-23
MDPQCTMGLSNILFVMAFLLSGA

SEQ ID NO: 82 - protein, 23 aa, synthetic construct
  REGION 1..23: note = P43121_1-23
MGLPRLVCAFLLAACCCCPRVAG

SEQ ID NO: 83 - protein, 23 aa, synthetic construct
  REGION 1..23: note = O00206_1-23
MMSASRLAGTLIPAMAFLSCVRP

SEQ ID NO: 84 - protein, 23 aa, synthetic construct
  REGION 1..23: note = P42701_1-23
MEPLVTWVVPLLFLFLLSRQGAA

SEQ ID NO: 85 - protein, 24 aa, synthetic construct
  REGION 1..24: note = P06729_1-24
MSFPCKFVASFLLIFNVSSKGAVS

SEQ ID NO: 86 - protein, 24 aa, synthetic construct
  REGION 1..24: note = P15328_1-24
MAQRMTTQLLLLLVWVAVVGEAQT

SEQ ID NO: 87 - protein, 24 aa, synthetic construct
  REGION 1..24: note = P05112_1-24
MGLTSQLLPPLFFLLACAGNFVHG

SEQ ID NO: 88 - protein, 24 aa, synthetic construct
  REGION 1..24: note = P06127_1-24
MPMGSLQPLATLYLLGMLVASCLG

SEQ ID NO: 89 - protein, 24 aa, synthetic construct
  REGION 1..24: note = P32248_1-24
MDLGKPMKSVLVVALLVIFQVCLC

SEQ ID NO: 90 - protein, 24 aa, synthetic construct
  REGION 1..24: note = Q7Z7D3_1-24
MASLGQILFWSIISIIIILAGAIA

SEQ ID NO: 91 - protein, 24 aa, synthetic construct
  REGION 1..24: note = P54756_1-24
MRGSGPRGAGRRRPPSGGGDTPIT

SEQ ID NO: 92 - protein, 24 aa, synthetic construct
  REGION 1..24: note = Q92823_1-24
MQLKIMPKKKRLSAGRVPLILFLC

SEQ ID NO: 93 - protein, 24 aa, synthetic construct
  REGION 1..24: note = P19320_1-24
MPGKMVVILGASNILWIMFAASQA

SEQ ID NO: 94 - protein, 24 aa, synthetic construct
  REGION 1..24: note = Q86UN2_1-24
MLRKGCCVELLLLLVAAELPLGGG

SEQ ID NO: 95 - protein, 25 aa, synthetic construct
  REGION 1..25: note = P33151_1-25
MQRLMMLLATSGACLGLLAVAAVAA

SEQ ID NO: 96 - protein, 25 aa, synthetic construct
  REGION 1..25: note = P17813_1-25
MDRGTLPLAVALLLASCSLSPTSLA

SEQ ID NO: 97 - protein, 25 aa, synthetic construct
  REGION 1..25: note = P25445_1-25
MLGIWTLLPLVLTSVARLSSKSVNA

SEQ ID NO: 98 - protein, 25 aa, synthetic construct
  REGION 1..25: note = P01730_1-25
MNRGVPFRHLLLVLQLALLPAATQG

SEQ ID NO: 99 - protein, 25 aa, synthetic construct
  REGION 1..25: note = Q685J3_1-25
MPRPGTMALCLLTLVLSLLPPQAAA

SEQ ID NO: 100 - protein, 25 aa, synthetic construct
  REGION 1..25: note = P17787_1-25
MARRCGPVALLLGFGLLRLCSGVWG

SEQ ID NO: 101 - protein, 25 aa, synthetic construct
  REGION 1..25: note = Q6UQ28_1-25
MAVFHDMLLQPLGMFLCLSLQLSSA

SEQ ID NO: 102 - protein, 25 aa, synthetic construct
  REGION 1..25: note = P13987_1-25
MGIQGGSVLFGLLLVLAVFCHSGHS

SEQ ID NO: 103 - protein, 25 aa, synthetic construct
  REGION 1..25: note = P10721_1-25
MRGARGAWDFLCVLLLLLRVQTGSS

SEQ ID NO: 104 - protein, 25 aa, synthetic construct
  REGION 1..25: note = P12319_1-25
MAPAMESPTLLCVALLFFAPDGVLA

SEQ ID NO: 105 - protein, 26 aa, synthetic construct
  REGION 1..26: note = Q9BZR6_1-26
MKRASAGGSRLLAWVLWLQAWQVAAP

SEQ ID NO: 106 - protein, 26 aa, synthetic construct
  REGION 1..26: note = P25063_1-26
MGRAMVARLGLGLLLLALLLPTQIYS

SEQ ID NO: 107 - protein, 26 aa, synthetic construct
  REGION 1..26: note = Q9NR97_1-26
MENMFLQSSMLTCIFLLISGSCELCA

SEQ ID NO: 108 - protein, 26 aa, synthetic construct
  REGION 1..26: note = Q8N131_1-26
MGLGARGAWAALLLGTLQVLALLGAA

SEQ ID NO: 109 - protein, 26 aa, synthetic construct
  REGION 1..26: note = P49771_1-26
MTVLAPAWSPTTYLLLLLLLSSGLSG

SEQ ID NO: 110 - protein, 26 aa, synthetic construct
  REGION 1..26: note = P02679_1-26
MSWSLHPRNLILYFYALLFLSSTCVA

SEQ ID NO: 111 - protein, 26 aa, synthetic construct
  REGION 1..26: note = P14784_1-26
MAAPALSWRLPLLILLLPLATSWASA

SEQ ID NO: 112 - protein, 27 aa, synthetic construct
  REGION 1..27: note = P05362_1-27
MAPSSPRPALPALLVLLGALFPGPGNA

SEQ ID NO: 113 - protein, 27 aa, synthetic construct
  REGION 1..27: note = Q13740_1-27
MESKGASSCRLLFCLLISATVFRPGLG

SEQ ID NO: 114 - protein, 28 aa, synthetic construct
  REGION 1..28: note = Q13443_1-28
MGSGARFPSGTLRVRWLLLLGLVGPVLG

SEQ ID NO: 115 - protein, 28 aa, synthetic construct
  REGION 1..28: note = P14151_1-28
MIFPWKCQSTQRDLWNIFKLWGWTMLCC

SEQ ID NO: 116 - protein, 28 aa, synthetic construct
  REGION 1..28: note = P56199_1-28
MAPRPRARPGVAVACCWLLTVVLRCCVS

SEQ ID NO: 117 - protein, 28 aa, synthetic construct
  REGION 1..28: note = P11279_1-28
MAAPGSARRPLLLLLLLLLLGLMHCASA

SEQ ID NO: 118 - protein, 28 aa, synthetic construct
  REGION 1..28: note = P40259_1-28
MARLALSPVPSHWMVALLLLLSAEPVPA

SEQ ID NO: 119 - protein, 28 aa, synthetic construct
  REGION 1..28: note = P43681_1-28
MELGGPGAPRLLPPLLLLLGTGLLRASS

SEQ ID NO: 120 - protein, 28 aa, synthetic construct
  REGION 1..28: note = P18627_1-28
MWEAQFLGLLFLQPLWVAPVKPLQPGAE

SEQ ID NO: 121 - protein, 28 aa, synthetic construct
  REGION 1..28: note = Q5ZPR3_1-28
MLRRRGSPGMGVHVGAALGALWFCLTGA

SEQ ID NO: 122 - protein, 28 aa, synthetic construct
  REGION 1..28: note = P23415_1-28
MYSFNTLRLYLWETIVFFSLAASKEAEA

SEQ ID NO: 123 - protein, 28 aa, synthetic construct
  REGION 1..28: note = Q8TD46_1-28
MLCPWRTANLGLLLILTIFLVAASSSLC

SEQ ID NO: 124 - protein, 29 aa, synthetic construct
  REGION 1..29: note = P17301_1-29
MGPERTGAAPLPLLLVLALSQGILNCCLA

SEQ ID NO: 125 - protein, 29 aa, synthetic construct
  REGION 1..29: note = P12821_1-29
MGAASGRRGPGLLLPLPLLLLLPPQPALA

SEQ ID NO: 126 - protein, 29 aa, synthetic construct
  REGION 1..29: note = Q14118_1-29
MRMSVGLSLLLPLWGRTFLLLLSVVMAQS

SEQ ID NO: 127 - protein, 29 aa, synthetic construct
  REGION 1..29: note = P05231_1-29
MNSFSTSAFGPVAFSLGLLLVLPAAFPAP

SEQ ID NO: 128 - protein, 29 aa, synthetic construct
  REGION 1..29: note = O00602_1-29
MELSGATMARGLAVLLVLFLHIKNLPAQA

SEQ ID NO: 129 - protein, 29 aa, synthetic construct
  REGION 1..29: note = Q9Y6Q6_1-29
MAPRARRRRPLFALLLLCALLARLQVALQ

SEQ ID NO: 130 - protein, 29 aa, synthetic construct
  REGION 1..29: note = Q9ULI3_1-29
MASPRASRWPPPLLLLLLPLLLLPPAAPG

SEQ ID NO: 131 - protein, 30 aa, synthetic construct
  REGION 1..30: note = Q8NBP7_1-30
MGTVSSRRSWWPLPLLLLLLLLLGPAGARA

SEQ ID NO: 132 - protein, 30 aa, synthetic construct
  REGION 1..30: note = P02675_1-30
MKRMVSWSFHKLKTMKHLLLLLLCVFLVKS

SEQ ID NO: 133 - protein, 30 aa, synthetic construct
  REGION 1..30: note = P06756_1-30
MAFPPRRRLRLGPRGLPLLLSGLLLPLCRA

SEQ ID NO: 134 - protein, 31 aa, synthetic construct
  REGION 1..31: note = O60609_1-31
MVRPLNPRPLPPVVLMLLLLLPPSPLPLAAG

SEQ ID NO: 135 - protein, 31 aa, synthetic construct
  REGION 1..31: note = P50895_1-31
MEPPDAPAQARGAPRLLLLAVLLAAHPDAQA

SEQ ID NO: 136 - protein, 31 aa, synthetic construct
  REGION 1..31: note = P28906_1-31
MLVRRGARAGPRMPRGWTALCLLSLLPSGFM

SEQ ID NO: 137 - protein, 31 aa, synthetic construct
  REGION 1..31: note = P08514_1-31
MARALCPLQALWLLEWVLLLLGPCAAPPAWA

SEQ ID NO: 138 - protein, 31 aa, synthetic construct
  REGION 1..31: note = P00742_1-31
MGRPLHLVLLSASLAGLLLLGESLFIRREQA

SEQ ID NO: 139 - protein, 32 aa, synthetic construct
  REGION 1..32: note = P26006_1-32
MGPGPSRAPRAPRLMLCALALMVAAGGCVVSA

SEQ ID NO: 140 - protein, 32 aa, synthetic construct
  REGION 1..32: note = P13726_1-32
METPAWPRVPRPETAVARTLLLGWVFAQVAGA

SEQ ID NO: 141 - protein, 32 aa, synthetic construct
  REGION 1..32: note = P11912_1-32
MPGGPGVLQALPATIFLLFLLSAVYLGPGCQA

SEQ ID NO: 142 - protein, 32 aa, synthetic construct
  REGION 1..32: note = Q9H6X2_1-32
MATAERRALGIGFQWLSLATLVLICAGQGGRR

SEQ ID NO: 143 - protein, 33 aa, synthetic construct
  REGION 1..33: note = Q8IWK6_1-33
MEPPGRRRGRAQPPLLLPLSLLALLALLGGGGG

SEQ ID NO: 144 - protein, 33 aa, synthetic construct
  REGION 1..33: note = P58335_1-33
MVAERSPARSPGSWLFPGLWLLVLSGPGGLLRA

SEQ ID NO: 145 - protein, 34 aa, synthetic construct
  REGION 1..34: note = P06731_1-34
MESPSAPPHRWCIPWQRLLLTASLLTFWNPPTTA

SEQ ID NO: 146 - protein, 34 aa, synthetic construct
  REGION 1..34: note = P33681_1-34
MGHTRRQGTSPSKCPYLNFFQLLVLAGLSHFCSG

SEQ ID NO: 147 - protein, 35 aa, synthetic construct
  REGION 1..35: note = P38567_1-35
MGVLKFKHIFFRSFVKSSGVSQIVFTFLLIPCCLT

SEQ ID NO: 148 - protein, 35 aa, synthetic construct
  REGION 1..35: note = P16410_1-35
MACLGFQRHKAQLNLATRTWPCTLLFFLLFIPVFC

SEQ ID NO: 149 - protein, 37 aa, synthetic construct
  REGION 1..37: note = P15814_1-37
MRPGTGQGGLEAPGEPGPNLRQRWPLLLLGLAVVTHG

SEQ ID NO: 150 - protein, 38 aa, synthetic construct
  REGION 1..38: note = Q92956_1-38
MEPPGDWGPPPWRSTPKTDVLRLVLYLTFLGAPCYAPA

SEQ ID NO: 151 - protein, 41 aa, synthetic construct
  REGION 1..41: note = Q86VB7_1-41
MSKLRMVLLEDSGSADFRRHFVNLSPFTITVVLLLSACFVT

SEQ ID NO: 152 - protein, 41 aa, synthetic construct
  REGION 1..41: note = P08648_1-41
MGSRTPESPLHAVQLRWGPRRRPPLLPLLLLLLPPPPRVGG

SEQ ID NO: 153 - protein, 41 aa, synthetic construct
  REGION 1..41: note = P16109_1-41
MANCQIAILYQRFQRVVFGISQLLCFSALISELTNQKEVAA

SEQ ID NO: 154 - protein, 44 aa, synthetic construct
  REGION 1..44: note = O75326_1-44
MTPPPPGRAAPSAPRARVPGPPARLGLPLRLRLLLLLWAAAASA

SEQ ID NO: 155 - protein, 45 aa, synthetic construct
  REGION 1..45: note = Q8N2Q7_1-45
MALPRCTWPNYVWRAVMACLVHRGLGAPLTLCMLGCLLQAGHVLS

SEQ ID NO: 156 - protein, 46 aa, synthetic construct
  REGION 1..46: note = Q86UN3_1-46
MLPGLRRLLQAPASACLLLMLLALPLAAPSCPMLCTCYSSPPTVSC

SEQ ID NO: 157 - protein, 179 aa, synthetic construct
  REGION 1..179: note = A0A5B9
MDLKNVFPPEVAVFEPSEAEISHTQKATLVCLATGFYPDHVELSWWVNGKEVHSGVSTDPQPLKEQPALNDSRYCLSSRLRVSATFWQNPRNHFRCQVQFYGLSENDEWTQDRAKPVTQIVSAEAWGRADCGFTSESYQQGVLSATILYEILLGKATLYAVLVSALVLMAMVKRKDSRG

SEQ ID NO: 158 - protein, 154 aa, synthetic construct
  REGION 1..154: note = B7Z8K6
MSQPHTKPSVFVMKNGTNVACLVKEFYPKDIRINLVSSKKITEFDPAIVISPSGKYNAVKLGKYEDSNSVTCSVQHDNKTVHSTDFEVKTDSTDHVKPKETENTKQPSKSCHKPKAIVHTEKVNMMSLTVLGLRMLFAKTVAVNFLLTAKLFFL

SEQ ID NO: 159 - protein, 214 aa, synthetic construct
  REGION 1..214: note = B9A064
MRPKTGQVGCETPEELGPGPRQRWPLLLLGLAMVAHGLLRPMVAPQSGDPDPGASVGSSRSSLRSLWGRLLLQPSPQRADPRCWPRGFWSEPQSLCYVFGTGTKVTVLGQPKANPTVTLFPPSSEELQANKATLVCLISDFYPGAVTVAWKADGSPVKAGVETTKPSKQSNNKYAASSYLSLTPEQWKSHRSYSCQVTHEGSTVEKTVAPTECS

SEQ ID NO: 160 - protein, 839 aa, synthetic construct
  REGION 1..839: note = O00206
MMSASRLAGTLIPAMAFLSCVRPESWEPCVEVVPNITYQCMELNFYKIPDNLPFSTKNLDLSFNPLRHLGSYSFFSFPELQVLDLSRCEIQTIEDGAYQSLSHLSTLILTGNPIQSLALGAFSGLSSLQKLVAVETNLASLENFPIGHLKTLKELNVAHNLIQSFKLPEYFSNLTNLEHLDLSSNKIQSIYCTDLRVLHQMPLLNLSLDLSLNPMNFIQPGAFKEIRLHKLTLRNNFDSLNVMKTCIQGLAGLEVHRLVLGEFRNEGNLEKFDKSALEGLCNLTIEEFRLAYLDYYLDDIIDLFNCLTNVSSFSLVSVTIERVKDFSYNFGWQHLELVNCKFGQFPTLKLKSLKRLTFTSNKGGNAFSEVDLPSLEFLDLSRNGLSFKGCCSQSDFGTTSLKYLDLSFNGVITMSSNFLGLEQLEHLDFQHSNLKQMSEFSVFLSLRNLIYLDISHTHTRVAFNGIFNGLSSLEVLKMAGNSFQENFLPDIFTELRNLTFLDLSQCQLEQLSPTAFNSLSSLQVLNMSHNNFFSLDTFPYKCLNSLQVLDYSLNHIMTSKKQELQHFPSSLAFLNLTQNDFACTCEHQSFLQWIKDQRQLLVEVERMECATPSDKQGMPVLSLNITCQMNKTIIGVSVLSVLVVSVVAVLVYKFYFHLMLLAGCIKYGRGENIYDAFVIYSSQDEDWVRNELVKNLEEGVPPFQLCLHYRDFIPGVAIAANIIHEGFHKSRKVIVVVSQHFIQSRWCIFEYEIAQTWQFLSSRAGIIFIVLQKVEKTLLRQQVELYRLLSRNTYLEWEDSVLGRHIFWRRLRKALLDGKSWNPEGTVGTGCNWQEATSI

SEQ ID NO: 161 - protein, 458 aa, synthetic construct
  REGION 1..458: note = P01730
MNRGVPFRHLLLVLQLALLPAATQGKKVVLGKKGDTVELTCTASQKKSIQFHWKNSNQIKILGNQGSFLTKGPSKLNDRADSRRSLWDQGNFPLIIKNLKIEDSDTYICEVEDQKEEVQLLVFGLTANSDTHLLQGQSLTLTLESPPGSSPSVQCRSPRGKNIQGGKTLSVSQLELQDSGTWTCTVLQNQKKVEFKIDIVVLAFQKASSIVYKKEGEQVEFSFPLAFTVEKLTGSGELWWQAERASSSKSWITFDLKNKEVSVKRVTQDPKLQMGKKLPLHLTLPQALPQYAGSGNLTLALEAKTGKLHQEVNLVVMRATQLQKNLTCEVWGPTSPKLMLSLKLENKEAKVSKREKAVWVLNPEAGMWQCLLSDSGQVLLESNIKVLPTWSTPVQPMALIVLGGVAGLLLFIGLGIFFCVRCRHRRRQAERMSQIKRLLSEKKTCQCPHRFQKTCSPI

SEQ ID NO: 162 - protein, 178 aa, synthetic construct
  REGION 1..178: note = P01850
MEDLNKVFPPEVAVFEPSEAEISHTQKATLVCLATGFFPDHVELSWWVNGKEVHSGVSTDPQPLKEQPALNDSRYCLSSRLRVSATFWQNPRNHFRCQVQFYGLSENDEWTQDRAKPVTQIVSAEAWGRADCGFTSVSYQQGVLSATILYEILLGKATLYAVLVSALVLMAMVKRKDF

SEQ ID NO: 163 - protein, 207 aa, synthetic construct
  REGION 1..207: note = P07766
MQSGTHWRVLGLCLLSVGVWGQDGNEEMGGITQTPYKVSISGTTVILTCPQYPGSEILWQHNDKNIGGDEDDKNIGSDEDHLSLKEFSELEQSGYYVCYPRGSKPEDANFYLYLRARVCENCMEMDVMSVATIVIVDICITGGLLLLVYYWSKNRKAKAKPVTRGAGAGGRQRGQNKERPPPVPNPDYEPIRKGQRDLYSGLNQRRI

SEQ ID NO: 164 - protein, 1304 aa, synthetic construct
  REGION 1..1304: note = P08575
MYLWLKLLAFGFAFLDTEVFVTGQSPTPSPTGLTTAKMPSVPLSSDPLPTHTTAFSPASTFERENDFSETTTSLSPDNTSTQVSPDSLDNASAFNTTGVSSVQTPHLPTHADSQTPSAGTDTQTFSGSAANAKLNPTPGSNAISDVPGERSTASTFPTDPVSPLTTTLSLAHHSSAALPARTSNTTITANTSDAYLNASETTTLSPSGSAVISTTTIATTPSKPTCDEKYANITVDYLYNKETKLFTAKLNVNENVECGNNTCTNNEVHNLTECKNASVSISHNSCTAPDKTLILDVPPGVEKFQLHDCTQVEKADTTICLKWKNIETFTCDTQNITYRFQCGNMIFDNKEIKLENLEPEHEYKCDSEILYNNHKFTNASKIIKTDFGSPGEPQIIFCRSEAAHQGVITWNPPQRSFHNFTLCYIKETEKDCLNLDKNLIKYDLQNLKPYTKYVLSLHAYIIAKVQRNGSAAMCHFTTKSAPPSQVWNMTVSMTSDNSMHVKCRPPRDRNGPHERYHLEVEAGNTLVRNESHKNCDFRVKDLQYSTDYTFKAYFHNGDYPGEPFILHHSTSYNSKALIAFLAFLIIVTSIALLVVLYKIYDLHKKRSCNLDEQQELVERDDEKQLMNVEPIHADILLETYKRKIADEGRLFLAEFQSIPRVFSKFPIKEARKPFNQNKNRYVDILPYDYNRVELSEINGDAGSNYINASYIDGFKEPRKYIAAQGPRDETVDDFWRMIWEQKATVIVMVTRCEEGNRNKCAEYWPSMEEGTRAFGDVVVKINQHKRCPDYIIQKLNIVNKKEKATGREVTHIQFTSWPDHGVPEDPHLLLKLRRRVNAFSNFFSGPIVVHCSAGVGRTGTYIGIDAMLEGLEAENKVDVYGYVVKLRRQRCLMVQVEAQYILIHQALVEYNQFGETEVNLSELHPYLHNMKKRDPPSEPSPLEAEFQRLPSYRSWRTQHIGNQEENKSKNRNSNVIPYDYNRVPLKHELEMSKESEHDSDESSDDDSDSEEPSKYINASFIMSYWKPEVMIAAQGPLKETIGDFWQMIFQRKVKVIVMLTELKHGDQEICAQYWGEGKQTYGDIEVDLKDTDKSSTYTLRVFELRHSKRKDSRTVYQYQYTNWSVEQLPAEPKELISMIQVVKQKLPQKNSSEGNKHHKSTPLLIHCRDGSQQTGIFCALLNLLESAETEEVVDIFQVVKALRKARPGMVSTFEQYQFLYDVIASTYPAQNGQVKKNNHQEDKIEFDNEVDKVKQDANCVNPLGAPEKLPEAKEQAEGSEPTSGTEGPEHSVNGPASPALNQGS

SEQ ID NO: 165 - protein, 254 aa, synthetic construct
  REGION 1..254: note = P08637
MWQLLLPTALLLLVSAGMRTEDLPKAVVFLEPQWYRVLEKDSVTLKCQGAYSPEDNSTQWFHNESLISSQASSYFIDAATVDDSGEYRCQTNLSTLSDPVQLEVHIGWLLLQAPRWVFKEEDPIHLRCHSWKNTALHKVTYLQNGKGRKYFHHNSDFYIPKATLKDSGSYFCRGLFGSKNVSSETVNITITQGLAVSTISSFFPPGYQVSFCLVMVLLFAVDTGLYFSVKTNIRSSTRDWKDHKFKWRKDPQDK

SEQ ID NO: 166 - protein, 220 aa, synthetic construct
  REGION 1..220: note = P10747
MLRLLLALNLFPSIQVTGNKILVKQSPMLVAYDNAVNLSCKYSYNLFSREFRASLHKGLDSAVEVCVVYGNYSQQLQVYSKTGFNCDGKLGNESVTFYLQNLYVNQTDIYFCKIEVMYPPPYLDNEKSNGTIIHVKGKHLCPSPLFPGPSKPFWVLVVVGGVLACYSLLVTVAFIIFWVRSKRSRLLHSDYMNMTPRRPGPTRKHYQPYAPPRDFAAYRS

SEQ ID NO: 167 - protein, 226 aa, synthetic construct
  REGION 1..226: note = P11912
MPGGPGVLQALPATIFLLFLLSAVYLGPGCQALWMHKVPASLMVSLGEDAHFQCPHNSSNNANVTWWRVLHGNYTWPPEFLGPGEDPNGTLIIQNVNKSHGGIYVCRVQEGNESYQQSCGTYLRVRQPPPRPFLDMGEGTKNRIITAEGIILLFCAVVPGTLLLFRKRWQNEKLGLDAGDEYEDENLYEGLNLDDCSMYEDISRGLQGTYQDVGSLNIGDVQLEKP

SEQ ID NO: 168 - protein, 556 aa, synthetic construct [sequence omitted]

SEQ ID NO: 169 - protein, 223 aa, synthetic construct
  REGION 1..223: note = P16410
MACLGFQRHKAQLNLATRTWPCTLLFFLLFIPVFCKAMHVAQPAVVLASSRGIASFVCEYASPGKATEVRVTVLRQADSQVTEVCAATYMMGNELTFLDDSICTGTSSGNQVNLTIQGLRAMDTGLYICKVELMYPPPYYLGIGNGTQIYVIDPEPCPDSDFLLWILAAVSSGLFFYSFLLTAVSLSKMLKKRSPLTTGVYVKMPPTEPECEKQFQPYFIPIN

SEQ ID NO: 170 - protein, 472 aa, synthetic construct
  REGION 1..472: note = P16671
MGCDRNCGLIAGAVIGAVLAVFGGILMPVGDLLIQKTIKKQVVLEEGTIAFKNWVKTGTEVYRQFWIFDVQNPQEVMMNSSNIQVKQRGPYTYRVRFLAKENVTQDAEDNTVSFLQPNGAIFEPSLSVGTEADNFTVLNLAVAAASHIYQNQFVQMILNSLINKSKSSMFQVRTLRELLWGYRDPFLSLVPYPVTTTVGLFYPYNNTADGVYKVFNGKDNISKVAIIDTYKGKRNLSYWESHCDMINGTDAASFPPFVEKSQVLQFFSSDICRSIYAVFESDVNLKGIPVYRFVLPSKAFASPVENPDNYCFCTEKIISKNCTSYGVLDISKCKEGRPVYISLPHFLYASPDVSEPIDGLNPNEEEHRTYLDIEPITGFTLQFAKRLQVNLLVKPSEKIQVLKNLKRNYIVPILWLNETGTIGDEKANMFRSQVTGKINLLGLIEMILLSVGVVMFVAFMISYCACRSKTIK

SEQ ID NO: 171 - protein, 216 aa, synthetic construct
  REGION 1..216: note = P26718
MGWIRGRRSRHSWEMSEFHNYNLDLKKSDFSTRWQKQRCPVVKSKCRENASPFFFCCFIAVAMGIRFIIMVAIWSAVFLNSLFNQEVQIPLTESYCGPCPKNWICYKNNCYQFFDESKNWYESQASCMSQNASLLKVYSKEDQDLLKLVKSYHWMGLVHIPTNGSWQWEDGSILSPNLLTIIEMQKGDCALYASSFKGYIENCSTPNTYICMQRTV

SEQ ID NO: 172 - protein, 86 aa, synthetic construct
  REGION 1..86: note = P30273
MIPAVVLLLLLLVEQAAALGEPQLCYILDAILFLYGIVLTLLYCRLKIQVRKAAITSYEKSDGVYTGLSTRNQETYETLKHEKPPQ

SEQ ID NO: 173 - protein, 378 aa, synthetic construct
  REGION 1..378: note = P32248
MDLGKPMKSVLVVALLVIFQVCLCQDEVTDDYIGDNTTVDYTLFESLCSKKDVRNFKAWFLPIMYSIICFVGLLGNGLVVLTYIYFKRLKTMTDTYLLNLAVADILFLLTLPFWAYSAAKSWVFGVHFCKLIFAIYKMSFFSGMLLLLCISIDRYVAIVQAVSAHRHRARVLLISKLSCVGIWILATVLSIPELLYSDLQRSSSEQAMRCSLITEHVEAFITIQVAQMVIGFLVPLLAMSFCYLVIIRTLLQARNFERNKAIKVIIAVVVVFIVFQLPYNGVVLAQTVANFNITSSTCELSKQLNIAYDVTYSLACVRCCVNPFLYAFIGVKFRNDLFKLFKDLGCLSQEQLRQWSSCRHIRRSSMSVEAETTTTFSP

SEQ ID NO: 174 - protein, 229 aa, synthetic construct
  REGION 1..229: note = P40259
MARLALSPVPSHWMVALLLLLSAEPVPAARSEDRYRNPKGSACSRIWQSPRFIARKRGFTVKMHCYMNSASGNVSWLWKQEMDENPQQLKLEKGRMEESQNESLATLTIQGIRFEDNGIYFCQQKCNNTSEVYQGCGTELRVMGFSTLAQLKQRNTLKDGIIMIQTLLIILFIIVPIFLLLDKDDSKAGMEEDHTYEGLDIDQTATYEDIVTLRTGEVKWSVGEHPGQE

SEQ ID NO: 175 - protein, 329 aa, synthetic construct
  REGION 1..329: note = P42081
MDPQCTMGLSNILFVMAFLLSGAAPLKIQAYFNETADLPCQFANSQNQSLSELVVFWQDQENLVLNEVYLGKEKFDSVHSKYMGRTSFDSDSWTLRLHNLQIKDKGLYQCIIHHKKPTGMIRIHQMNSELSVLANFSQPEIVPISNITENVYINLTCSSIHGYPEPKKMSVLLRTKNSTIEYDGVMQKSQDNVTELYDVSISLSVSFPDVTSNMTIFCILETDKTRLLSSPFSIELEDPQPPPDHIPWITAVLPTVIICVMVFCLILWKWKKKKRPRNSYKCGTNTMEREESEQTKKREKIHIPERSDEAQRVFKSSKTSSCDKSDTCF

SEQ ID NO: 176 - protein, 336 aa, synthetic construct
  REGION 1..336: note = Q15762
MDYPTLLLALLHVYRALCEEVLWHTSVPFAENMSLECVYPSMGILTQVEWFKIGTQQDSIAIFSPTHGMVIRKPYAERVYFLNSTMASNNMTLFFRNASEDDVGYYSCSLYTYPQGTWQKVIQVVQSDSFEAAVPSNSHIVSEPGKNVTLTCQPQMTWPVQAVRWEKIQPRQIDLLTYCNLVHGRNFTSKFPRQIVSNCSHGRWSVIVIPDVTVSDSGLYRCYLQASAGENETFVMRLTVAEGKTDNQYTLFVAGGTVLLLLFVISITTIIVIFLNRRRRRERRDLFTESWDTQKAPNNYRSPISTSQPTNQSMDDTREDIYVNYPTFSRRPKTRV

SEQ ID NO: 177 - protein, 4493 aa, synthetic construct
  REGION 1..4493: note = Q685J3
MPRPGTMALCLLTLVLSLLPPQAAAEQDLSVNRAVWDGGGCISQGDVLNRQCQQLSQHVRTGSAANTATGTTSTNVVEPRMYLSCSTNPEMTSIESSVTSDTPGVSSTRMTPTESRTTSESTSDSTTLFPSSTEDTSSPTTPEGTDVPMSTPSEESISSTMAFVSTAPLPSFEAYTSLTYKVDMSTPLTTSTQASSSPTTPESTTIPKSTNSEGSTPLTSMPASTMKVASSEAITLLTTPVEISTPVTISAQASSSPTTAEGPSLSNSAPSGGSTPLTRMPLSVMLVVSSEASTLSTTPAATNIPVITSTEASSSPTTAEGTSIPTSTYTEGSTPLTSTPASTMPVATSEMSTLSITPVDTSTLVTTSTEPSSLPTTAEATSMLTSTLSEGSTPLTNMPVSTILVASSEASTTSTIPVDSKTFVTTASEASSSPTTAEDTSIATSTPSEGSTPLTSMPVSTTPVASSEASNLSTTPVDSKTQVTTSTEASSSPPTAEVNSMPTSTPSEGSTPLTSMSVSTMPVASSEASTLSTTPVDTSTPVTTSSEASSSSTTPEGTSIPTSTPSEGSTPLTNMPVSTRLVVSSEASTTSTTPADSNTFVTTSSEASSSSTTAEGTSMPTSTYSERGTTITSMSVSTTLVASSEASTLSTTPVDSNTPVTTSTEATSSSTTAEGTSMPTSTYTEGSTPLTSMPVNTTLVASSEASTLSTTPVDTSTPVTTSTEASSSPTTADGASMPTSTPSEGSTPLTSMPVSKTLLTSSEASTLSTTPLDTSTHITTSTEASCSPTTTEGTSMPISTPSEGSPLLTSIPVSITPVTSPEASTLSTTPVDSNSPVTTSTEVSSSPTPAEGTSMPTSTYSEGRTPLTSMPVSTTLVATSAISTLSTTPVDTSTPVTNSTEARSSPTTSEGTSMPTSTPGEGSTPLTSMPDSTTPVVSSEARTLSATPVDTSTPVTTSTEATSSPTTAEGTSIPTSTPSEGTTPLTSTPVSHTLVANSEASTLSTTPVDSNTPLTTSTEASSPPPTAEGTSMPTSTPSEGSTPLTRMPVSTTMVASSETSTLSTTPADTSTPVTTYSQASSSSTTADGTSMPTSTYSEGSTPLTSVPVSTRLVVSSEASTLSTTPVDTSIPVTTSTEASSSPTTAEGTSIPTSPPSEGTTPLASMPVSTTLVVSSEANTLSTTPVDSKTQVATSTEASSPPPTAEVTSMPTSTPGERSTPLTSMPVRHTPVASSEASTLSTSPVDTSTPVTTSAETSSSPTTAEGTSLPTSTTSEGSTLLTSIPVSTTLVTSPEASTLLTTPVDTKGPVVTSNEVSSSPTPAEGTSMPTSTYSEGRTPLTSIPVNTTLVASSAISILSTTPVDNSTPVTTSTEACSSPTTSEGTSMPNSNPSEGTTPLTSIPVSTTPVVSSEASTLSATPVDTSTPGTTSAEATSSPTTAEGISIPTSTPSEGKTPLKSIPVSNTPVANSEASTLSTTPVDSNSPVVTSTAVSSSPTPAEGTSIAISTPSEGSTALTSIPVSTTTVASSEINSLSTTPAVTSTPVTTYSQASSSPTTADGTSMQTSTYSEGSTPLTSLPVSTMLVVSSEANTLSTTPIDSKTQVTASTEASSSTTAEGSSMTISTPSEGSPLLTSIPVSTTPVASPEASTLSTTPVDSNSPVITSTEVSSSPTPAEGTSMPTSTYTEGRTPLTSITVRTTPVASSAISTLSTTPVDNSTPVTTSTEARSSPTTSEGTSMPNSTPSEGTTPLTSIPVSTTPVLSSEASTLSATPIDTSTPVTTSTEATSSPTTAEGTSIPTSTLSEGMTPLTSTPVSHTLVANSEASTLSTTPVDSNSPVVTSTAVSSSPTPAEGTSIATSTPSEGSTALTSIPVSTTTVASSETNTLSTTPAVTSTPVTTYAQVSSSPTTADGSSMPTSTPREGRPPLTSIPVSTTTVASSEINTLSTTLADTRTPVTTYSQASSSPTTADGTSMPTPAYSEGSTPLTSMPLSTTLVVSSEASTLSTTPVDTSTPATTSTEGSSSPTTAGGTSIQTSTPSERTTPLAGMPVSTTLVVSSEGNTLSTTPVDSKTQVTNSTEASSSATAEGSSMTISAPSEGSPLLTSIPLSTTPVASPEASTLSTTPVDSNSPVITSTEVSSSPIPTEGTSMQTSTYSDRRTPLTSMPVSTTVVASSAISTLSTTPVDTSTPVTNSTEARSSPTTSEGTSMPTSTPSEGSTPFTSMPVSTMPVVTSEASTLSATPVDTSTPVTTSTEATSSPTTAEGTSIPTSTLSEGTTPLTSIPVSHTLVANSEVSTLSTTPVDSNTPFTTSTEASSPPPTAEGTSMPTSTSSEGNTPLTRMPVSTTMVASFETSTLSTTPADTSTPVTTYSQAGSSPTTADDTSMPTSTYSEGSTPLTSVPVSTMPVVSSEASTHSTTPVDTSTPVTTSTEASSSPTTAEGTSIPTSPPSEGTTPLASMPVSTTPVVSSEAGTLSTTPVDTSTPMTTSTEASSSPTTAEDIVVPISTASEGSTLLTSIPVSTTPVASPEASTLSTTPVDSNSPVVTSTEISSSATSAEGTSMPTSTYSEGSTPLRSMPVSTKPLASSEASTLSTTPVDTSIPVTTSTETSSSPTTAKDTSMPISTPSEVSTSLTSILVSTMPVASSEASTLSTTPVDTRTLVTTSTGTSSSPTTAEGSSMPTSTPGERSTPLTNILVSTTLLANSEASTLSTTPVDTSTPVTTSAEASSSPTTAEGTSMRISTPSDGSTPLTSILVSTLPVASSEASTVSTTAVDTSIPVTTSTEASSSPTTAEVTSMPTSTPSETSTPLTSMPVNHTPVASSEAGTLSTTPVDTSTPVTTSTKASSSPTTAEGIVVPISTASEGSTLLTSIPVSTTPVASSEASTLSTTPVDTSIPVTTSTEGSSSPTTAEGTSMPISTPSEVSTPLTSILVSTVPVAGSEASTLSTTPVDTRTPVTTSAEASSSPTTAEGTSMPISTPGERRTPLTSMSVSTMPVASSEASTLSRTPADTSTPVTTSTEASSSPTTAEGTGIPISTPSEGSTPLTSIPVSTTPVAIPEASTLSTTPVDSNSPVVTSTEVSSSPTPAEGTSMPISTYSEGSTPLTGVPVSTTPVTSSAISTLSTTPVDTSTPVTTSTEAHSSPTTSEGTSMPTSTPSEGSTPLTYMPVSTMLVVSSEDSTLSATPVDTSTPVTTSTEATSSTTAEGTSIPTSTPSEGMTPLTSVPVSNTPVASSEASILSTTPVDSNTPLTTSTEASSSPPTAEGTSMPTSTPSEGSTPLTSMPVSTTTVASSETSTLSTTPADTSTPVTTYSQASSSPPIADGTSMPTSTYSEGSTPLTNMSFSTTPVVSSEASTLSTTPVDTSTPVTTSTEASLSPTTAEGTSIPTSSPSEGTTPLASMPVSTTPVVSSEVNTLSTTPVDSNTLVTTSTEASSSPTIAEGTSLPTSTTSEGSTPLSIMPLSTTPVASSEASTLSTTPVDTSTPVTTSSPTNSSPTTAEVTSMPTSTAGEGSTPLTNMPVSTTPVASSEASTLSTTPVDSNTFVTSSSQASSSPATLQVTTMRMSTPSEGSSSLTTMLLSSTYVTSSEASTPSTPSVDRSTPVTTSTQSNSTPTPPEVITLPMSTPSEVSTPLTIMPVSTTSVTISEAGTASTLPVDTSTPVITSTQVSSSPVTPEGTTMPIWTPSEGSTPLTTMPVSTTRVTSSEGSTLSTPSVVTSTPVTTSTEAISSSATLDSTTMSVSMPMEISTLGTTILVSTTPVTRFPESSTPSIPSVYTSMSMTTASEGSSSPTTLEGTTTMPMSTTSERSTLLTTVLISPISVMSPSEASTLSTPPGDTSTPLLTSTKAGSFSIPAEVTTIRISITSERSTPLTTLLVSTTLPTSFPGASIASTPPLDTSTTFTPSTDTASTPTIPVATTISVSVITEGSTPGTTIFIPSTPVTSSTADVFPATTGAVSTPVITSTELNTPSTSSSSTTTSFSTTKEFTTPAMTTAAPLTYVTMSTAPSTPRTTSRGCTTSASTLSATSTPHTSTSVTTRPVTPSSESSRPSTITSHTIPPTFPPAHSSTPPTTSASSTTVNPEAVTTMTTRTKPSTRTTSFPTVTTTAVPTNTTIKSNPTSTPTVPRTTTCFGDGCQNTASRCKNGGTWDGLKCQCPNLYYGELCEEVVSSIDIGPPETISAQMELTVTVTSVKFTEELKNHSSQEFQEFKQTFTEQMNIVYSGIPEYVGVNITKLRLGSVVVEHDVLLRTKYTPEYKTVLDNATEVVKEKITKVTTQQIMINDICSDMMCFNTTGTQVQNITVTQYDPEEDCRKMAKEYGDYFVVEYRDQKPYCISPCEPGFSVSKNCNLGKCQMSLSGPQCLCVTTETHWYSGETCNQGTQKSLVYGLVGAGVVLMLIILVALLMLVFRSKREVKRQKYRLSQLYKWQEEDSGPAPGTFQNIGFDICQDDDSIHLESIYSNFQPSLRHIDPETKIRIQRPQVMTTSF

SEQ ID NO: 178 - protein, 404 aa, synthetic construct
  REGION 1..404: note = Q9NNX6
MSDSKEPRLQQLGLLEEEQLRGLGFRQTRGYKSLAGCLGHGPLVLQLLSFTLLAGLLVQVSKVPSSISQEQSRQDAIYQNLTQLKAAVGELSEKSKLQEIYQELTQLKAAVGELPEKSKLQEIYQELTRLKAAVGELPEKSKLQEIYQELTWLKAAVGELPEKSKMQEIYQELTRLKAAVGELPEKSKQQEIYQELTRLKAAVGELPEKSKQQEIYQELTRLKAAVGELPEKSKQQEIYQELTQLKAAVERLCHPCPWEWTFFQGNCYFMSNSQRNWHDSITACKEVGAQLVVIKSAEEQNFLQLQSSRSNRFTWMGLSDLNQEGTWQWVDGSPLLPSFKQYWNRGEPNNVGEEDCAEFSGNGWNDDKCNLAKFWICKKSAASCSRDEEQFLSPAPATPNPPPA

SEQ ID NO: 179 - protein, 1041 aa, synthetic construct
  REGION 1..1041: note = Q9NR97
MENMFLQSSMLTCIFLLISGSCELCAEENFSRSYPCDEKKQNDSVIAECSNRRLQEVPQTVGKYVTELDLSDNFITHITNESFQGLQNLTKINLNHNPNVQHQNGNPGIQSNGLNITDGAFLNLKNLRELLLEDNQLPQIPSGLPESLTELSLIQNNIYNITKEGISRLINLKNLYLAWNCYFNKVCEKTNIEDGVFETLTNLELLSLSFNSLSHVPPKLPSSLRKLFLSNTQIKYISEEDFKGLINLTLLDLSGNCPRCFNAPFPCVPCDGGASINIDRFAFQNLTQLRYLNLSSTSLRKINAAWFKNMPHLKVLDLEFNYLVGEIASGAFLTMLPRLEILDLSFNYIKGSYPQHINISRNFSKLLSLRALHLRGYVFQELREDDFQPLMQLPNLSTINLGINFIKQIDFKLFQNFSNLEIIYLSENRISPLVKDTRQSYANSSSFQRHIRKRRSTDFEFDPHSNFYHFTRPLIKPQCAAYGKALDLSLNSIFFIGPNQFENLPDIACLNLSANSNAQVLSGTEFSAIPHVKYLDLTNNRLDFDNASALTELSDLEVLDLSYNSHYFRIAGVTHHLEFIQNFTNLKVLNLSHNNIYTLTDKYNLESKSLVELVFSGNRLDILWNDDDNRYISIFKGLKNLTRLDLSLNRLKHIPNEAFLNLPASLTELHINDNMLKFFNWTLLQQFPRLELLDLRGNKLLFLTDSLSDFTSSLRTLLLSHNRISHLPSGFLSEVSSLKHLDLSSNLLKTINKSALETKTTTKLSMLELHGNPFECTCDIGDFRRWMDEHLNVKIPRLVDVICASPGDQRGKSIVSLELTTCVSDVTAVILFFFTFFITTMVMLAALAHHLFYWDVWFIYNVCLAKVKGYRSLSTSQTFYDAYISYDTKDASVTDWVINELRYHLEESRDKNVLLCLEERDWDPGLAIIDNLMQSINQSKKTVFVLTKKYAKSWNFKTAFYLALQRLMDENMDVIIFILLEPVLQHSQYLRLRQRICKSSILQWPDNPKAEGLFWQTLRNVVLTENDSRYNNMYVDSIKQY

SEQ ID NO: 180 - protein, 22 aa, synthetic construct
  REGION 1..22: note = P16671_1_8-29
GLIAGAVIGAVLAVFGGILMPV

SEQ ID NO: 181 - protein, 27 aa, synthetic construct
  REGION 1..27: note = P32248_1_60-86
FLPIMYSIICFVGLLGNGLVVLTYIYF

SEQ ID NO: 182 - protein, 22 aa, synthetic construct
  REGION 1..22: note = P16671_2_440-461
LLGLIEMILLSVGVVMFVAFMI

SEQ ID NO: 183 - protein, 21 aa, synthetic construct
  REGION 1..21: note = P32248_2_96-116
YLLNLAVADILFLLTLPFWAY

SEQ ID NO: 184 - protein, 22 aa, synthetic construct
  REGION 1..22: note = P32248_3_131-152
LIFAIYKMSFFSGMLLLLCISI

SEQ ID NO: 185 - protein, 21 aa, synthetic construct
  REGION 1..21: note = P32248_4_171-191
VLLISKLSCVGIWILATVLSI

SEQ ID NO: 186 - protein, 28 aa, synthetic construct
  REGION 1..28: note = P32248_5_220-247
FITIQVAQMVIGFLVPLLAMSFCYLVII

SEQ ID NO: 187 - protein, 26 aa, synthetic construct
  REGION 1..26: note = P32248_6_264-289
VIIAVVVVFIVFQLPYNGVVLAQTVA

SEQ ID NO: 188 - protein, 18 aa, synthetic construct
  REGION 1..18: note = P32248_7_314-331
LACVRCCVNPFLYAFIGV

SEQ ID NO: 189 - protein, 23 aa, synthetic construct
  REGION 1..23: note = A0A5B9_145-167
TILYEILLGKATLYAVLVSALVL

SEQ ID NO: 190 - protein, 23 aa, synthetic construct
  REGION 1..23: note = B7Z8K6_130-152
LGLRMLFAKTVAVNFLLTAKLFF

SEQ ID NO: 191 - protein, 21 aa, synthetic construct
  REGION 1..21: note = O00206_632-652
TIIGVSVLSVLVVSVVAVLVY

SEQ ID NO: 192 - protein, 22 aa, synthetic construct
  REGION 1..22: note = P01730_397-418
MALIVLGGVAGLLLFIGLGIFF

SEQ ID NO: 193 - protein, 21 aa, synthetic construct
  REGION 1..21: note = P01850_151-171
ILLGKATLYAVLVSALVLMAM

SEQ ID NO: 194 - protein, 26 aa, synthetic construct
  REGION 1..26: note = P07766_127-152
VMSVATIVIVDICITGGLLLLVYYWS

SEQ ID NO: 195 - protein, 22 aa, synthetic construct
  REGION 1..22: note = P08575_576-597
ALIAFLAFLIIVTSIALLVVLY

SEQ ID NO: 196 - protein, 21 aa, synthetic construct
  REGION 1..21: note = P08637_209-229
VSFCLVMVLLFAVDTGLYFSV

SEQ ID NO: 197 - protein, 27 aa, synthetic construct
  REGION 1..27: note = P10747_153-179
FWVLVVVGGVLACYSLLVTVAFIIFWV

SEQ ID NO: 198 - protein, 22 aa, synthetic construct
  REGION 1..22: note = P11912_144-165
IITAEGIILLFCAVVPGTLLLF

SEQ ID NO: 199 - protein, 22 aa, synthetic construct
  REGION 1..22: note = P15391_292-313
VSAVTLAYLIFCLCSLVGILHL

SEQ ID NO: 200 - protein, 21 aa, synthetic construct
  REGION 1..21: note = P16410_162-182
FLLWILAAVSSGLFFYSFLLT

SEQ ID NO: 201 - protein, 21 aa, synthetic construct
  REGION 1..21: note = P26718_52-72
PFFFCCFIAVAMGIRFIIMVA

SEQ ID NO: 202 - protein, 21 aa, synthetic construct
  REGION 1..21: note = P30273_24-44
LCYILDAILFLYGIVLTLLYC

SEQ ID NO: 203 - protein, 21 aa, synthetic construct
  REGION 1..21: note = P40259_160-180
GIIMIQTLLIILFIIVPIFLL

SEQ ID NO: 204 - protein, 21 aa, synthetic construct
  REGION 1..21: note = P42081_248-268
WITAVLPTVIICVMVFCLILW

SEQ ID NO: 205 - protein, 21 aa, synthetic construct
  REGION 1..21: note = Q15762_255-275
GGTVLLLLFVISITTIIVIFL

SEQ ID NO: 206 - protein, 21 aa, synthetic construct
  REGION 1..21: note = Q685J3_4394-4414
LVGAGVVLMLIILVALLMLVF

SEQ ID NO: 207 - protein, 21 aa, synthetic construct
  REGION 1..21: note = Q9NNX6_38-58
LGHGPLVLQLLSFTLLAGLLV

SEQ ID NO: 208 - protein, 21 aa, synthetic construct
  REGION 1..21: note = Q9NR97_828-848
AVILFFFTFFITTMVMLAALA

SEQ ID NO: 209 - RNA, 48 nt, synthetic construct
  misc_feature 1..48: note = P14207_1-48
  source 1..48: mol_type = other RNA
atgtcactcagtgcttaccagagcgcgttgtctaccctgtaccgaaga

SEQ ID NO: 210 - RNA, 48 nt, synthetic construct
  misc_feature 1..48: note = O75787_1-48
  source 1..48: mol_type = other RNA
atggctgtgtttgtcgtgctcctggcgttggtggcgggtgttttgggg

SEQ ID NO: 211 - RNA, 48 nt, synthetic construct
  misc_feature 1..48: note = P07359_1-48
  source 1..48: mol_type = other RNA
atgcctctcctcctcttgctgctcctgctgccaagccccttacacccc

SEQ ID NO: 212 - RNA, 48 nt, synthetic construct
  misc_feature 1..48: note = P08637_1-48
  source 1..48: mol_type = other RNA
atgtggcagctgctcctcccaactgctctgctacttctagtttcagct

SEQ ID NO: 213 - RNA, 51 nt, synthetic construct
  misc_feature 1..51: note = P07237_1-51
  source 1..51: mol_type = other RNA
atgctgcgccgcgctctgctgtgcctggccgtggccgccctggtgcgcgcc

SEQ ID NO: 214 - RNA, 51 nt, synthetic construct
  misc_feature 1..51: note = O60911_1-51
  source 1..51: mol_type = other RNA
atgaatctttcgctcgtcctggctgccttttgcttgggaatagcctccgct

SEQ ID NO: 215 - RNA, 51 nt, synthetic construct
  misc_feature 1..51: note = P20138_1-51
  source 1..51: mol_type = other RNA
atgccgctgctgctactgctgcccctgctgtgggcaggggccctggctatg

SEQ ID NO: 216 - RNA, 51 nt, synthetic construct
  misc_feature 1..51: note = P27797_1-51
  source 1..51: mol_type = other RNA
atgctgctatccgtgccgctgctgctcggcctcctcggcctggccgtcgcc

SEQ ID NO: 217 - RNA, 54 nt, synthetic construct
  misc_feature 1..54: note = P10747_1-54
  source 1..54: mol_type = other RNA
atgctcaggctgctcttggctctcaacttattcccttcaattcaagtaacagga

SEQ ID NO: 218 - RNA, 54 nt, synthetic construct
  misc_feature 1..54: note = O75487_1-54
  source 1..54: mol_type = other RNA
atggcacggttcggcttgcccgcgcttctctgcaccctggcagtgctcagcgcc

SEQ ID NO: 219 - RNA, 54 nt, synthetic construct
  misc_feature 1..54: note = P07996_1-54
  source 1..54: mol_type = other RNA
atggggctggcctggggactaggcgtcctgttcctgatgcatgtgtgtggcacc

SEQ ID NO: 220 - RNA, 54 nt, synthetic construct
  misc_feature 1..54: note = P22748_1-54
  source 1..54: mol_type = other RNA
atgcggatgctgctggcgctcctggccctctccgcggcgcggccatcggccagt

SEQ ID NO: 221 - RNA, 54 nt, synthetic construct
  misc_feature 1..54: note = Q15762_1-54
  source 1..54: mol_type = other RNA
atggattatcctactttacttttggctcttcttcatgtatacagagctctatgt

SEQ ID NO: 222 - RNA, 54 nt, synthetic construct
  misc_feature 1..54: note = P30273_1-54
  source 1..54: mol_type = other RNA
atgattccagcagtggtcttgctcttactccttttggttgaacaagcagcggcc

SEQ ID NO: 223 - RNA, 54 nt, synthetic construct
  misc_feature 1..54: note = P38570_1-54
  source 1..54: mol_type = other RNA
atgtggctcttccacactctgctctgcatagccagcctggccctgctggccgct

SEQ ID NO: 224 - RNA, 54 nt, synthetic construct
  misc_feature 1..54: note = Q01638_1-54
  source 1..54: mol_type = other RNA
atggggttttggatcttagcaattctcacaattctcatgtattccacagcagca

SEQ ID NO: 225 - RNA, 54 nt, synthetic construct
  misc_feature 1..54: note = Q9NZQ7_1-54
  source 1..54: mol_type = other RNA
atgaggatatttgctgtctttatattcatgacctactggcatttgctgaacgca

SEQ ID NO: 226 - RNA, 57 nt, synthetic construct
  misc_feature 1..57: note = P13591_1-57
  source 1..57: mol_type = other RNA
atgctgcaaactaaggatctcatctggactttgtttttcctgggaactgcagtttct

SEQ ID NO: 227 - RNA, 57 nt, synthetic construct
  misc_feature 1..57: note = P26842_1-57
  source 1..57: mol_type = other RNA
atggcacggccacatccctggtggctgtgcgttctggggaccctggtggggctctca

SEQ ID NO: 228 - RNA, 57 nt, synthetic construct
  misc_feature 1..57: note = P15391_1-57
  source 1..57: mol_type = other RNA
atgccacctcctcgcctcctcttcttcctcctcttcctcacccccatggaagtcagg

SEQ ID NO: 229 - RNA, 57 nt, synthetic construct
  misc_feature 1..57: note = Q8NI17_1-57
  source 1..57: mol_type = other RNA
atgtgcatcaggcaactcaagtttttcaccacggcatgtgtctgtgaatgtccgcaa

SEQ ID NO: 230 - RNA, 57 nt, synthetic construct
  misc_feature 1..57: note = P08571_1-57
  source 1..57: mol_type = other RNA
atggagcgcgcgtcctgcttgttgctgctgctgctgccgctggtgcacgtctctgcg

SEQ ID NO: 231 - RNA, 57 nt, synthetic construct
  misc_feature 1..57: note = P05154_1-57
  source 1..57: mol_type = other RNA
atgcagctcttcctcctcttgtgcctggtgcttctcagccctcagggggcctccctt

SEQ ID NO: 232 - RNA, 57 nt, synthetic construct
  misc_feature 1..57: note = P02787_1-57
  source 1..57: mol_type = other RNA
atgaggctcgccgtgggagccctgctggtctgcgccgtcctggggctgtgtctggct

SEQ ID NO: 233 - RNA, 57 nt, synthetic construct
  misc_feature 1..57: note = P02671_1-57
  source 1..57: mol_type = other RNA
atgttttccatgaggatcgtctgcctggtcctaagtgtggtgggcacagcatggact

SEQ ID NO: 234 - RNA, 57 nt, synthetic construct
  misc_feature 1..57: note = P04216_1-57
  source 1..57: mol_type = other RNA
atgaacctggccatcagcatcgctctcctgctaacagtcttgcaggtctcccgaggg

SEQ ID NO: 235 - RNA, 57 nt, synthetic construct
  misc_feature 1..57: note = P00747_1-57
  source 1..57: mol_type = other RNA
atggaacataaggaagtggttcttctacttcttttatttctgaaatcaggtcaagga

SEQ ID NO: 236 - RNA, 57 nt, synthetic construct
  misc_feature 1..57: note = P01764_1-57
  source 1..57: mol_type = other RNA
atggagtttgggctgagctggctttttcttgtggctattttaaaaggtaattcatgg

SEQ ID NO: 237 - RNA, 57 nt, synthetic construct
  misc_feature 1..57: note = P16150_1-57
  source 1..57: mol_type = other RNA
atggccacgcttctccttctccttggggtgctggtggtaagcccagacgctctgggg

SEQ ID NO: 238 - RNA, 57 nt, synthetic construct
  misc_feature 1..57: note = Q6DN72_1-57
  source 1..57: mol_type = other RNA
atgctgctctggacggctgtgctgctctttgttccctgtgttgggaaaactgtctgg

SEQ ID NO: 239 - RNA, 57 nt, synthetic construct
  misc_feature 1..57: note = Q01151_1-57
  source 1..57: mol_type = other RNA
atgtcgcgcggcctccagcttctgctcctgagctgcgcctacagcctggctcccgcg

SEQ ID NO: 240 - RNA, 57 nt, synthetic construct
  misc_feature 1..57: note = P07093_1-57
  source 1..57: mol_type = other RNA
atgaactggcatctccccctcttcctcttggcctctgtgacgctgccttccatctgc

SEQ ID NO: 241 - RNA, 57 nt, synthetic construct
  misc_feature 1..57: note = Q8WWQ8_1-57
  source 1..57: mol_type = other RNA
atgatgctacaacatttagtaattttttgtcttggattggttgtacaaaatttctgc

SEQ ID NO: 242 - RNA, 60 nt, synthetic construct
  misc_feature 1..60: note = Q13291_1-60
  source 1..60: mol_type = other RNA
atggatcccaaggggctcctctccttgaccttcgtgctgtttctctccctggcttttggg

SEQ ID NO: 243 - RNA, 60 nt, synthetic construct
  misc_feature 1..60: note = P35225_1-60
  source 1..60: mol_type = other RNA
atgcatccgctcctcaatcctctcctgttggcactgggcctcatggcgcttttgttgacc

SEQ ID NO: 244 - RNA, 60 nt, synthetic construct
  misc_feature 1..60: note = P25942_1-60
  source 1..60: mol_type = other RNA
atggttcgtctgcctctgcagtgcgtcctctggggctgcttgctgaccgctgtccatcca

SEQ ID NO: 245 - RNA, 60 nt, synthetic construct
  misc_feature 1..60: note = P52803_1-60
  source 1..60: mol_type = other RNA
atgttgcacgtggagatgttgacgctggtgtttctggtgctctggatgtgtgtgttcagc

SEQ ID NO: 246 - RNA, 60 nt, synthetic construct
  misc_feature 1..60: note = Q15116_1-60
  source 1..60: mol_type = other RNA
atgcagatcccacaggcgccctggccagtcgtctgggcggtgctacaactgggctggcgg

SEQ ID NO: 247 - RNA, 60 nt, synthetic construct
  misc_feature 1..60: note = P05556_1-60
  source 1..60: mol_type = other RNA
atgaatttacaaccaattttctggattggactgatcagttcagtttgctgtgtgtttgct

SEQ ID NO: 248 - RNA, 60 nt, synthetic construct
  misc_feature 1..60: note = Q12891_1-60
  source 1..60: mol_type = other RNA
atgcgggcaggcccaggccccaccgttacattggccctggtgctggcggtgtcatgggcc

SEQ ID NO: 249 - RNA, 60 nt, synthetic construct
  misc_feature 1..60: note = Q8IV16_1-60
  source 1..60: mol_type = other RNA
atgaaggcgctcggggctgtcctgcttgccctcttgctgttcgggcggccagggagaggg

SEQ ID NO: 250 - RNA, 60 nt, synthetic construct
  misc_feature 1..60: note = Q03167_1-60
  source 1..60: mol_type = other RNA
atgacttcccattatgtgattgccatctttgccctgatgagctcctgtttagccactgca

SEQ ID NO: 251 - RNA, 60 nt, synthetic construct
  misc_feature 1..60: note = Q14246_1-60
  source 1..60: mol_type = other RNA
atgcgtggcttcaacctgctcctcttctggggatgttgtgttatgcacagctgggaaggg

SEQ ID NO: 252 - RNA, 60 nt, synthetic construct
  misc_feature 1..60: note = P16871_1-60
  source 1..60: mol_type = other RNA
atgacaattctaggtacaacttttggcatggttttttctttacttcaagtcgtttctgga

SEQ ID NO: 253 - RNA, 60 nt, synthetic construct
  misc_feature 1..60: note = P61769_1-60
  source 1..60: mol_type = other RNA
atgtctcgctccgtggccttagctgtgctcgcgctactctctctttctggcctggaggct

SEQ ID NO: 254 - RNA, 60 nt, synthetic construct
  misc_feature 1..60: note = Q9Y6W8_1-60
  source 1..60: mol_type = other RNA
atgaagtcaggcctctggtatttctttctcttctgcttgcgcattaaagttttaacagga

SEQ ID NO: 255 - RNA, 63 nt, synthetic construct
  misc_feature 1..63: note = P10966_1-63
  source 1..63: mol_type = other RNA
atgcggccgcggctgtggctcctcttggccgcgcagctgacagttctccatggcaactcagtc

SEQ ID NO: 256 - RNA, 63 nt, synthetic construct
  misc_feature 1..63: note = Q9BZW8_1-63
  source 1..63: mol_type = other RNA
atgctggggcaagtggtcaccctcatactcctcctgctcctcaaggtgtatcagggcaaagga

SEQ ID NO: 257 - RNA, 63 nt, synthetic construct
  misc_feature 1..63: note = P02778_1-63
  source 1..63: mol_type = other RNA
atgaatcaaactgccattctgatttgctgccttatctttctgactctaagtggcattcaagga

SEQ ID NO: 258 - RNA, 63 nt, synthetic construct
  misc_feature 1..63: note = P18564_1-63
  source 1..63: mol_type = other RNA
atggggattgaactgctttgcctgttctttctatttctaggaaggaatgatcacgtacaaggt

SEQ ID NO: 259 - RNA, 63 nt, synthetic construct
  misc_feature 1..63: note = O14525_1-63
  source 1..63: mol_type = other RNA
atggctttagccgggctctgcgccctgctcgcctgctgctgggggccggcggcggtgctggcc

SEQ ID NO: 260 - RNA, 63 nt, synthetic construct
  misc_feature 1..63: note = P01130_1-63
  source 1..63: mol_type = other RNA
atggggccctggggctggaaattgcgctggaccgtcgccttgctcctcgccgcggcggggact

SEQ ID NO: 261 - RNA, 63 nt, synthetic construct
  misc_feature 1..63: note = P01732_1-63
  source 1..63: mol_type = other RNA
atggccttaccagtgaccgccttgctcctgccgctggccttgctgctccacgccgccaggccg

SEQ ID NO: 262 - RNA, 63 nt, synthetic construct
  misc_feature 1..63: note = P48061_1-63
  source 1..63: mol_type = other RNA
atgaacgccaaggtcgtggtcgtgctggtcctcgtgctgaccgcgctctgcctcagcgacggg

SEQ ID NO: 263 - RNA, 63 nt, synthetic construct
  misc_feature 1..63: note = P01589_1-63
  source 1..63: mol_type = other RNA
atggattcatacctgctgatgtggggactgctcacgttcatcatggtgcctggctgccaggca

SEQ ID NO: 264 - RNA, 63 nt, synthetic construct
  misc_feature 1..63: note = Q86T13_1-63
  source 1..63: mol_type = other RNA
atgaggccggcgttcgccctgtgcctcctctggcaggcgctctggcccgggccgggcggcggc

SEQ ID NO: 265 - RNA, 63 nt, synthetic construct
  misc_feature 1..63: note = Q5DID0_1-63
  source 1..63: mol_type = other RNA
atgctcaggacctcggggctggcactgctggctctggtcagtgctgtgggcccaagccaggcc

SEQ ID NO: 266 - RNA, 66 nt, synthetic construct
  misc_feature 1..66: note = P40189_1-66
  source 1..66: mol_type = other RNA
atgctcaggacctcggggctggcactgctggctctggtcagtgctgtgggcccaagccaggccagc

SEQ ID NO: 267 - RNA, 66 nt, synthetic construct
  misc_feature 1..66: note = Q86YL7_1-66
  source 1..66: mol_type = other RNA
atgttgacgttgcagacttggctagtgcaagccttgtttattttcctcaccactgaatctacaggt

SEQ ID NO: 268 - RNA, 66 nt, synthetic construct
  misc_feature 1..66: note = P55075_1-66
  source 1..66: mol_type = other RNA
atgggcagcccccgctccgcgctgagctgcctgctgttgcacttgctggtcctctgcctccaagcc

SEQ ID NO: 269 - RNA, 66 nt, synthetic construct
  misc_feature 1..66: note = Q30201_1-66
  source 1..66: mol_type = other RNA
atgggcccgcgagccaggccggcgcttctcctcctgatgcttttgcagaccgcggtcctgcagggg

SEQ ID NO: 270 - RNA, 66 nt, synthetic construct
  misc_feature 1..66: note = P07766_1-66
  source 1..66: mol_type = other RNA
atgcagtcgggcactcactggagagttctgggcctctgcctcttatcagttggcgtttgggggcaa

SEQ ID NO: 271 - RNA, 66 nt, synthetic construct
  misc_feature 1..66: note = P18827_1-66
  source 1..66: mol_type = other RNA
atgaggcgcgcggcgctctggctctggctgtgcgcgctggcgctgagcctgcagccggccctgccg

SEQ ID NO: 272 - RNA, 66 nt, synthetic construct
  misc_feature 1..66: note = P55290_1-66
  source 1..66: mol_type = other RNA
atgcagccgagaactccgctcgttctgtgcgttctcctgtcccaggtgctgctgctaacatctgca

SEQ ID NO: 273 - RNA, 66 nt, synthetic construct
  misc_feature 1..66: note = P37173_1-66
  source 1..66: mol_type = other RNA
atgggtcgggggctgctcaggggcctgtggccgctgcacatcgtcctgtggacgcgtatcgccagc

SEQ ID NO: 274 - RNA, 66 nt, synthetic construct
  misc_feature 1..66: note = Q07325_1-66
  source 1..66: mol_type = other RNA
atgaagaaaagtggtgttcttttcctcttgggcatcatcttgctggttctgattggagtgcaagga

SEQ ID NO: 275 - RNA, 66 nt, synthetic construct
  misc_feature 1..66: note = P04156_1-66
  source 1..66: mol_type = other RNA
atggcgaaccttggctgctggatgctggttctctttgtggccacatggagtgacctgggcctctgc

SEQ ID NO: 276 - RNA, 66 nt, synthetic construct
  misc_feature 1..66: note = P31785_1-66
  source 1..66: mol_type = other RNA
atgttgaagccatcattaccattcacatccctcttattcctgcagctgcccctgctgggagtgggg

SEQ ID NO: 277 - RNA, 69 nt, synthetic construct
  misc_feature 1..69: note = P01579_1-69
  source 1..69: mol_type = other RNA
atgaaatatacaagttatatcttggcttttcagctctgcatcgttttgggttctcttggctgttactgc

SEQ ID NO: 278 - RNA, 69 nt, synthetic construct
  misc_feature 1..69: note = P23229_1-69
  source 1..69: mol_type = other RNA
atggccgccgccgggcagctgtgcttgctctacctgtcggcggggctcctgtcccggctcggcgcagcc

SEQ ID NO: 279 - RNA, 69 nt, synthetic construct
  misc_feature 1..69: note = O60494_1-69
  source 1..69: mol_type = other RNA
atgatgaacatgtctttaccttttctttggagtttgcttaccttattaatatttgctgaagtaaatggc

SEQ ID NO: 280 - RNA, 69 nt, synthetic construct
  misc_feature 1..69: note = P08575_1-69
  source 1..69: mol_type = other RNA
atgaccatgtatttgtggcttaaactcttggcatttggctttgcctttctggacacagaagtatttgtg

SEQ ID NO: 281 - RNA, 69 nt, synthetic construct
  misc_feature 1..69: note = Q8IWY4_1-69
  source 1..69: mol_type = other RNA
atgggcgcggcggccgtgcgctggcacttgtgcgtgctgctggccctgggcacacgcgggcggctggcc

SEQ ID NO: 282 - RNA, 69 nt, synthetic construct
  misc_feature 1..69: note = Q08431_1-69
  source 1..69: mol_type = other RNA
atgccgcgcccccgcctgctggccgcgctgtgcggcgcgctgctctgcgcccccagcctcctcgtcgcc

SEQ ID NO: 283 - RNA, 69 nt, synthetic construct
  misc_feature 1..69: note = Q99665_1-69
  source 1..69: mol_type = other RNA
atggcacatacttttagaggatgctcattggcatttatgtttataatcacgtggctgttgattaaagca

SEQ ID NO: 284 - RNA, 69 nt, synthetic construct
  misc_feature 1..69: note = Q6Q8B3_1-69
  source 1..69: mol_type = other RNA
atgtcagctccaagattactgatttccatcattatcatggtgtctgcttcaagtagttcatgcatgggt

SEQ ID NO: 285 - RNA, 69 nt, synthetic construct
  misc_feature 1..69: note = Q07011_1-69
  source 1..69: mol_type = other RNA
atgggaaacagctgttacaacatagtagccactctgttgctggtcctcaactttgagaggacaagatca

SEQ ID NO: 286 - RNA, 69 nt, synthetic construct
  misc_feature 1..69: note = Q8NHL6_1-69
  source 1..69: mol_type = other RNA
atgacccccatcctcacggtcctgatctgtctcgggctgagtctgggcccccggacccacgtgcaggca

SEQ ID NO: 287 - RNA, 69 nt, synthetic construct
  misc_feature 1..69: note = P36894_1-69
  source 1..69: mol_type = other RNA
atgcctcagctatacatttacatcagattattgggagcctatttgttcatcatttctcgtgttcaagga

SEQ ID NO: 288 - RNA, 69 nt, synthetic construct
  misc_feature 1..69: note = Q16552_1-69
  source 1..69: mol_type = other RNA
atgactcctgggaagacctcattggtgtcactgctactgctgctgagcctggaggccatagtgaaggca

SEQ ID NO: 289 - RNA, 69 nt, synthetic construct
  misc_feature 1..69: note = P42081_1-69
  source 1..69: mol_type = other RNA
atggatccccagtgcactatgggactgagtaacattctctttgtgatggccttcctgctctctggtgct

SEQ ID NO: 290 - RNA, 69 nt, synthetic construct
  misc_feature 1..69: note = P43121_1-69
  source 1..69: mol_type = other RNA
atggggcttcccaggctggtctgcgccttcttgctcgccgcctgctgctgctgtcctcgcgtcgcgggt

SEQ ID NO: 291 - RNA, 69 nt, synthetic construct
  misc_feature 1..69: note = O00206_1-69
  source 1..69: mol_type = other RNA
atgatgtctgcctcgcgcctggctgggactctgatcccagccatggccttcctctcctgcgtgagacca

SEQ ID NO: 292 - RNA, 69 nt, synthetic construct
  misc_feature 1..69: note = P42701_1-69
  source 1..69: mol_type = other RNA
atggagccgctggtgacctgggtggtccccctcctcttcctcttcctgctgtccaggcagggcgctgcc

SEQ ID NO: 293 - RNA, 72 nt, synthetic construct
  misc_feature 1..72: note = P06729_1-69
  source 1..72: mol_type = other RNA
atgagctttccatgtaaatttgtagccagcttccttctgattttcaatgtttcttccaaaggtgcagtctcc

SEQ ID NO: 294 - RNA, 72 nt, synthetic construct
  misc_feature 1..72: note = P15328_1-69
  source 1..72: mol_type = other RNA
atggctcagcggatgacaacacagctgctgctccttctagtgtgggtggctgtagtaggggaggctcagaca

SEQ ID NO: 295 - RNA, 72 nt, synthetic construct
  misc_feature 1..72: note = P05112_1-69
  source 1..72: mol_type = other RNA
atgggtctcacctcccaactgcttccccctctgttcttcctgctagcatgtgccggcaactttgtccacgga

SEQ ID NO: 296 - RNA, 72 nt, synthetic construct
  misc_feature 1..72: note = P06127_1-69
  source 1..72: mol_type = other RNA
atgcccatggggtctctgcaaccgctggccaccttgtacctgctggggatgctggtcgcttcctgcctcgga

SEQ ID NO: 297 - RNA, 72 nt, synthetic construct
  misc_feature 1..72: note = P32248_1-69
  source 1..72: mol_type = other RNA
atggacctggggaaaccaatgaaaagcgtgctggtggtggctctccttgtcattttccaggtatgcctgtgt

SEQ ID NO: 298 - RNA, 72 nt, synthetic construct
  misc_feature 1..72: note = Q7Z7D3_1-69
  source 1..72: mol_type = other RNA
atgttcagaggccggacagcagtgtttgctgatcaagtgatagttggcaatgcctctttgcggctgaaaaac

SEQ ID NO: 299 - RNA, 72 nt, synthetic construct
  misc_feature 1..72: note = P54756_1-69
  source 1..72: mol_type = other RNA
atgcggggctcggggccccggggtgcgggacgccggcggcccccaagcggcggcggcgacacccccatcacc

SEQ ID NO: 300 - RNA, 72 nt, synthetic construct
  misc_feature 1..72: note = Q92823_1-69
  source 1..72: mol_type = other RNA
atgcagcttaaaataatgccgaaaaagaagcgcttatctgcgggcagagtgcccctgattctcttcctgtgc

SEQ ID NO: 301 - RNA, 72 nt, synthetic construct
  misc_feature 1..72: note = P19320_1-69
  source 1..72: mol_type = other RNA
atgcctgggaagatggtcgtgatccttggagcctcaaatatactttggataatgtttgcagcttctcaagct

SEQ ID NO: 302 - RNA, 72 nt, synthetic construct
  misc_feature 1..72: note = Q86UN2_1-69
  source 1..72: mol_type = other RNA
atgcttcgcaaagggtgctgtgtggagttgctgctgctgttggtagctgcggagctgcccctgggtggtggc

SEQ ID NO: 303 - RNA, 75 nt, synthetic construct
  misc_feature 1..75: note = P33151_1-75
  source 1..75: mol_type = other RNA
atgcagaggctcatgatgctcctcgccacatcgggcgcctgcctgggcctgctggcagtggcagcagtggcagca

SEQ ID NO: 304 - RNA, 75 nt, synthetic construct
  misc_feature 1..75: note = P17813_1-75
  source 1..75: mol_type = other RNA
atggaccgcggcacgctccctctggctgttgccctgctgctggccagctgcagcctcagccccacaagtcttgca

SEQ ID NO: 305 - RNA, 75 nt, synthetic construct
  misc_feature 1..75: note = P25445_1-75
  source 1..75: mol_type = other RNA
atgctgggcatctggaccctcctacctctggttcttacgtctgttgctagattatcgtccaaaagtgttaatgcc

SEQ ID NO: 306 - RNA, 75 nt, synthetic construct
  misc_feature 1..75: note = P01730_1-75
  source 1..75: mol_type = other RNA
atgaaccggggagtcccttttaggcacttgcttctggtgctgcaactggcgctcctcccagcagccactcaggga

SEQ ID NO: 307 - RNA, 75 nt, synthetic construct
  misc_feature 1..75: note = Q685J3_1-75
  source 1..75: mol_type = other RNA
atgccaaggccagggaccatggcgctgtgtctgctgaccttggtcctctcgctcttgcccccacaagctgctgca

SEQ ID NO: 308 - RNA, 75 nt, synthetic construct
  misc_feature 1..75: note = P17787_1-75
  source 1..75: mol_type = other RNA
atggcccggcgctgcggccccgtggcgctgctccttggcttcggcctcctccggctgtgctcaggggtgtggggt

SEQ ID NO: 309 - RNA, 75 nt, synthetic construct
  misc_feature 1..75: note = Q6UQ28_1-75
  source 1..75: mol_type = other RNA
atggcagtcttccatgacatgctgctgcagccactggggatgtttctgtgcctcagtctgcagctttcttctgcc

SEQ ID NO: 310 - RNA, 75 nt, synthetic construct
  misc_feature 1..75: note = P13987_1-75
  source 1..75: mol_type = other RNA
atgggaatccaaggagggtctgtcctgttcgggctgctgctcgtcctggctgtcttctgccattcaggtcatagc

SEQ ID NO: 311 - RNA, 75 nt, synthetic construct
  misc_feature 1..75: note = P10721_1-75
  source 1..75: mol_type = other RNA
atgagaggcgctcgcggcgcctgggattttctctgcgttctgctcctactgcttcgcgtccagacaggctcttct

SEQ ID NO: 312 - RNA, 75 nt, synthetic construct
  misc_feature 1..75: note = P12319_1-75
  source 1..75: mol_type = other RNA
atggctcctgccatggaatcccctactctactgtgtgtagccttactgttcttcgctccagatggcgtgttagca

SEQ ID NO: 313 - RNA, 78 nt, synthetic construct
  misc_feature 1..78: note = Q9BZR6_1-78
  source 1..78: mol_type = other RNA
atgaagagggcgtccgctggagggagccggctgctggcatgggtgctgtggctgcaggcctggcaggtggcagcccca

SEQ ID NO: 314 - RNA, 78 nt, synthetic construct
  misc_feature 1..78: note = P25063_1-78
  source 1..78: mol_type = other RNA
atgggcagagcaatggtggccaggctcgggctggggctgctgctgctggcactgctcctacccacgcagatttattcc

SEQ ID NO: 315 - RNA, 78 nt, synthetic construct
  misc_feature 1..78: note = Q9NR97_1-78
  source 1..78: mol_type = other RNA
atgaaggagtcatctttgcaaaatagctcctgcagcctgggaaaggagactaaaaaggaaaacatgttccttcagtcg

SEQ ID NO: 316 - RNA, 78 nt, synthetic construct
  misc_feature 1..78: note = Q8N131_1-78
  source 1..78: mol_type = other RNA
atgggactcggcgcgcgaggtgcttgggccgcgctgctcctggggacgctgcaggtgctagcgctgctgggggccgcc

SEQ ID NO: 317 - RNA, 78 nt, synthetic construct
  misc_feature 1..78: note = P49771_1-78
  source 1..78: mol_type = other RNA
atgacagtgctggcgccagcctggagcccaacaacctatctcctcctgctgctgctgctgagctcgggactcagtggg

SEQ ID NO: 318 - RNA, 78 nt, synthetic construct
  misc_feature 1..78: note = P02679_1-78
  source 1..78: mol_type = other RNA
atgagttggtccttgcacccccggaatttaattctctacttctatgctcttttatttctctcttcaacatgtgtagca

SEQ ID NO: 319 - RNA, 78 nt, synthetic construct
  misc_feature 1..78: note = P14784_1-78
  source 1..78: mol_type = other RNA
atggcggcccctgctctgtcctggcgtctgcccctcctcatcctcctcctgcccctggctacctcttgggcatctgca

SEQ ID NO: 320 - RNA, 81 nt, synthetic construct
  misc_feature 1..81: note = P05362_1-81
  source 1..81: mol_type = other RNA
atggctcccagcagcccccggcccgcgctgcccgcactcctggtcctgctcggggctctgttcccaggacctggcaatgcc

SEQ ID NO: 321 - RNA, 81 nt, synthetic construct
  misc_feature 1..81: note = Q13740_1-81
  source 1..81: mol_type = other RNA
atggaatccaagggggccagttcctgccgtctgctcttctgcctcttgatctccgccaccgtcttcaggccaggccttgga

SEQ ID NO: 322 - RNA, 84 nt, synthetic construct
  misc_feature 1..84: note = Q13443_1-84
  source 1..84: mol_type = other RNA
atggggtctggcgcgcgctttccctcggggacccttcgtgtccggtggttgctgttgcttggcctggtgggcccagtcctcggt

SEQ ID NO: 323 - RNA, 84 nt, synthetic construct
  misc_feature 1..84: note = P14151_1-84
  source 1..84: mol_type = other RNA
atgggctgcagaagaactagagaaggaccaagcaaagccatgatatttccatggaaatgtcagagcacccagagggacttatgg

SEQ ID NO: 324 - RNA, 84 nt, synthetic construct
  misc_feature 1..84: note = P56199_1-84
  source 1..84: mol_type = other RNA
atggcccctcggccccgcgcccgcccaggggtcgctgtcgcctgctgctggctcctcactgttgttctacgctgctgcgtatca

SEQ ID NO: 325 - RNA, 84 nt, synthetic construct
  misc_feature 1..84: note = P11279_1-84
  source 1..84: mol_type = other RNA
atggcggcccccggcagcgcccggcgacccctgctgctgctactgctgttgctgctgctcggcctcatgcattgtgcgtcagca

SEQ ID NO: 326 - RNA, 84 nt, synthetic construct
  misc_feature 1..84: note = P40259_1-84
  source 1..84: mol_type = other RNA
atggccaggctggcgttgtctcctgtgcccagccactggatggtggcgttgctgctgctgctctcagcagctgagccagtacca

SEQ ID NO: 327 - RNA, 84 nt, synthetic construct
  misc_feature 1..84: note = P43681_1-84
  source 1..84: mol_type = other RNA
atggagctagggggccccggagcgccgcggctgctgccgccgctgctgctgcttctggggaccggcctcctgcgcgccagcagc

SEQ ID NO: 328 - RNA, 84 nt, synthetic construct
  misc_feature 1..84: note = P18627_1-84
  source 1..84: mol_type = other RNA
atgtgggaggctcagttcctgggcttgctgtttctgcagccgctttgggtggctccagtgaagcctctccagccaggggctgag

SEQ ID NO: 329 - RNA, 84 nt, synthetic construct
  misc_feature 1..84: note = Q5ZPR3_1-84
  source 1..84: mol_type = other RNA
atgctgcgtcggcggggcagccctggcatgggtgtgcatgtgggtgcagccctgggagcactgtggttctgcctcacaggagcc

SEQ ID NO: 330 - RNA, 84 nt, synthetic construct
  misc_feature 1..84: note = P23415_1-84
  source 1..84: mol_type = other RNA
atgtacagcttcaatactcttcgactctacctttgggagaccattgtattcttcagccttgctgcttctaaggaggctgaagct

SEQ ID NO: 331 - RNA, 84 nt, synthetic construct
  misc_feature 1..84: note = Q8TD46_1-84
  source 1..84: mol_type = other RNA
atgctctgcccttggagaactgctaacctagggctactgttgattttgactatcttcttagtggccgaagcggagggtgctgct

SEQ ID NO: 332 - RNA, 87 nt, synthetic construct
  misc_feature 1..87: note = P17301_1-87
  source 1..87: mol_type = other RNA
atggggccagaacggacaggggccgcgccgctgccgctgctgctggtgttagcgctcagtcaaggcattttaaattgttgtttggcc

SEQ ID NO: 333 - RNA, 87 nt, synthetic construct
  misc_feature 1..87: note = P12821_1-87
  source 1..87: mol_type = other RNA
atgggccagggttgggctactgcaggacttcccagcctcctcttcctgctgctctgctacgggcaccctctgctggtccccagccag

SEQ ID NO: 334 - RNA, 87 nt, synthetic construct
  misc_feature 1..87: note = Q14118_1-87
  source 1..87: mol_type = other RNA
atgaggatgtctgtgggcctctcgctgctgctgcccctctcggggaggacctttctcctcctgctctctgtggttatggctcagtcc

SEQ ID NO: 335 - RNA, 87 nt, synthetic construct
  misc_feature 1..87: note = P05231_1-87
  source 1..87: mol_type = other RNA
atgaactccttctccacaagcgccttcggtccagttgccttctccctggggctgctcctggtgttgcctgctgccttccctgcccca

SEQ ID NO: 336 - RNA, 87 nt, synthetic construct
  misc_feature 1..87: note = O00602_1-87
  source 1..87: mol_type = other RNA
atggagctgagtggagccaccatggcccgggggctcgctgtcctgctagtcttgttcctgcatatcaagaacctgcctgcccaggct

SEQ ID NO: 337 - RNA, 87 nt, synthetic construct
  misc_feature 1..87: note = Q9Y6Q6_1-87
  source 1..87: mol_type = other RNA
atggccccgcgcgcccggcggcgccgcccgctgttcgcgctgctgctgctctgcgcgctgctcgcccggctgcaggtggctttgcag

SEQ ID NO: 338 - RNA, 87 nt, synthetic construct
  misc_feature 1..87: note = Q9ULI3_1-87
  source 1..87: mol_type = other RNA
atggcctcgccgcgcgcctcgcggtggccgccgccgctcctgctgctgttgctgccgctgctgctgctgccgccggcggcccccggg

SEQ ID NO: 339 - RNA, 90 nt, synthetic construct
  misc_feature 1..90: note = Q8NBP7_1-90
  source 1..90: mol_type = other RNA
atgggcaccgtcagctccaggcggtcctggtggccgctgccactgctgctgctgctgctgctgctcctgggtcccgcgggcgcccgtgcg

SEQ ID NO: 340 - RNA, 90 nt, synthetic construct
  misc_feature 1..90: note = P02675_1-90
  source 1..90: mol_type = other RNA
atgaaaaggatggtttcttggagcttccacaaacttaaaaccatgaaacatctattattgctactattgtgtgtttttctagttaagtcc

SEQ ID NO: 341 - RNA, 90 nt, synthetic construct
  misc_feature 1..90: note = P06756_1-90
  source 1..90: mol_type = other RNA
atggcttttccgccgcggcgacggctgcgcctcggtccccgcggcctcccgcttcttctctcgggactcctgctacctctgtgccgcgcc

SEQ ID NO: 342 - RNA, 93 nt, synthetic construct
  misc_feature 1..93: note = O60609_1-93
  source 1..93: mol_type = other RNA
atggtgcgccccctgaacccgcgaccgctgccgcccgtagtcctgatgttgctgctgctgctgccgccgtcgccgctgcctctcgcagccgga

SEQ ID NO: 343 - RNA, 93 nt, synthetic construct
  misc_feature 1..93: note = P50895_1-93
  source 1..93: mol_type = other RNA
atggagcccccggacgcaccggcccaggcgcgcggggccccgcggctgctgttgctcgcagtcctgctggcggcgcacccagatgcccaggcg

SEQ ID NO: 344 - RNA, 93 nt, synthetic construct
  misc_feature 1..93: note = P28906_1-93
  source 1..93: mol_type = other RNA
atgctggtccgcaggggcgcgcgcgcagggcccaggatgccgcggggctggaccgcgctttgcttgctgagtttgctgccttctgggttcatg

SEQ ID NO: 345 - RNA, 93 nt, synthetic construct
  misc_feature 1..93: note = P08514_1-93
  source 1..93: mol_type = other RNA
atggccagagctttgtgtccactgcaagccctctggcttctggagtgggtgctgctgctcttgggaccttgtgctgcccctccagcctgggcc

SEQ ID NO: 346 - RNA, 93 nt, synthetic construct
  misc_feature 1..93: note = P00742_1-93
  source 1..93: mol_type = other RNA
atggggcgcccactgcacctcgtcctgctcagtgcctccctggctggcctcctgctgctcggggaaagtctgttcatccgcagggagcaggcc

SEQ ID NO: 347 - RNA, 96 nt, synthetic construct
  misc_feature 1..96: note = P26006_1-96
  source 1..96: mol_type = other RNA
atgggccccggccccagccgcgcgccccgcgccccacgcctgatgctctgtgcgctcgccttgatggtggcggccggcggctgcgtcgtctccgcc

SEQ ID NO: 348 - RNA, 96 nt, synthetic construct
  misc_feature 1..96: note = P13726_1-96
  source 1..96: mol_type = other RNA
atggagacccctgcctggccccgggtcccgcgccccgagaccgccgtcgctcggacgctcctgctcggctgggtcttcgcccaggtggccggcgct

SEQ ID NO: 349 - RNA, 96 nt, synthetic construct
  misc_feature 1..96: note = P11912_1-96
  source 1..96: mol_type = other RNA
atgcctgggggtccaggagtcctccaagctctgcctgccaccatcttcctcctcttcctgctgtctgctgtctacctgggccctgggtgccaggcc

SEQ ID NO: 350 - RNA, 96 nt, synthetic construct
  misc_feature 1..96: note = Q9H6X2_1-96
  source 1..96: mol_type = other RNA
atggccacggcggagcggagagccctcggcatcggcttccagtggctctctttggccactctggtgctcatctgcgccgggcaagggggacgcagg

SEQ ID NO: 351 - RNA, 99 nt, synthetic construct
  misc_feature 1..99: note = Q8IWK6_1-99
  source 1..99: mol_type = other RNA
atggagccacccggacgccggcggggccgcgcgcagccgccgctgttgctgccgctctcgctgttagcgctgctcgcgctgctgggaggcggcggcggc

SEQ ID NO: 352 - RNA, 99 nt, synthetic construct
  misc_feature 1..99: note = P58335_1-99
  source 1..99: mol_type = other RNA
atggtggcggagcggtccccggcccgcagccccgggagctggctgttccccgggctgtggctgttggtgctcagcggtcccggggggctgctgcgcgcc

SEQ ID NO: 353 - RNA, 102 nt, synthetic construct
  misc_feature 1..102: note = P06731_1-102
  source 1..102: mol_type = other RNA
atggagtctccctcggcccctccccacagatggtgcatcccctggcagaggctcctgctcacagcctcacttctaaccttctggaacccgcccaccactgcc

SEQ ID NO: 354 - RNA, 102 nt, synthetic construct
  misc_feature 1..102: note = P33681_1-102
  source 1..102: mol_type = other RNA
atgggccacacacggaggcagggaacatcaccatccaagtgtccatacctcaatttctttcagctcttggtgctggctggtctttctcacttctgttcaggt

SEQ ID NO: 355 - RNA, 105 nt, synthetic construct
  misc_feature 1..105: note = P38567_1-105
  source 1..105: mol_type = other RNA
atgggagtgctaaaattcaagcacatctttttcagaagctttgttaaatcaagtggagtatcccagatagttttcaccttccttctgattccatgttgcttgact

SEQ ID NO: 356 - RNA, 105 nt, synthetic construct
  misc_feature 1..105: note = P16410_1-105
  source 1..105: mol_type = other RNA
atggcttgccttggatttcagcggcacaaggctcagctgaacctggctaccaggacctggccctgcactctcctgttttttcttctcttcatccctgtcttctgc

SEQ ID NO: 357 - RNA, 111 nt, synthetic construct
  misc_feature 1..111: note = P15814_1-111
  source 1..111: mol_type = other RNA
atgaggccagggacaggccaggggggccttgaggcccctggtgagccaggccccaacctcaggcagcgctggcccctgctgctgctgggtctggccgtggtaacccatggc

SEQ ID NO: 358 - RNA, 114 nt, synthetic construct
  misc_feature 1..114: note = Q92956_1-114
  source 1..114: mol_type = other RNA
atggagcctcctggagactgggggcctcctccctggagatccacccccaaaaccgacgtcttgaggctggtgctgtatctcaccttcctgggagccccctgctacgccccagct

SEQ ID NO: 359 - RNA, 123 nt, synthetic construct
  misc_feature 1..123: note = Q86VB7_1-123
  source 1..123: mol_type = other RNA
atgagcaaactcagaatggtgctacttgaagactctggatctgctgacttcagaagacattttgtcaacttgagtcccttcaccattactgtggtcttacttctcagtgcctgttttgtcacc

SEQ ID NO: 360 - RNA, 123 nt, synthetic construct
  misc_feature 1..123: note = P08648_1-123
  source 1..123: mol_type = other RNA
atggggagccggacgccagagtcccctctccacgccgtgcagctgcgctggggcccccggcgccgacccccgctgctgccgctgctgttgctgctgctgccgccgccacccagggtcgggggc

SEQ ID NO: 361 - RNA, 123 nt, synthetic construct
  misc_feature 1..123: note = P16109_1-123
  source 1..123: mol_type = other RNA
atggccaactgccaaatagccatcttgtaccagagattccagagagtggtctttggaatttcccaactcctttgcttcagtgccctgatctctgaactaacaaaccagaaagaagtggcagca

SEQ ID NO: 362 - RNA, 132 nt, synthetic construct
  misc_feature 1..132: note = O75326_1-132
  source 1..132: mol_type = other RNA
atgacgcctcctccgcccggacgtgccgcccccagcgcaccgcgcgcccgcgtccctggcccgccggctcggttggggcttccgctgcggctgcggctgctgctgctgctctgggcggccgccgcctccgcc

SEQ ID NO: 363 - RNA, 135 nt, synthetic construct
  misc_feature 1..135: note = Q8N2Q7_1-135
  source 1..135: mol_type = other RNA
atggcactgcccagatgcacgtggccaaattatgtttggagagcagtgatggcatgcttggtacaccggggattgggtgccccattgactctctgtatgttgggatgtttgcttcaggctggccatgtgctatca

SEQ ID NO: 364 - RNA, 138 nt, synthetic construct
  misc_feature 1..138: note = Q86UN3_1-138
  source 1..138: mol_type = other RNA
atgctgcccgggctcaggcgcctgctgcaagctcccgcctcggcctgcctcctgctgatgctcctggccctgcccctggcggcccccagctgccccatgctctgcacctgctactcatccccgcccaccgtgagctgc

SEQ ID NO: 365 - RNA, 540 nt, synthetic construct
  misc_feature 1..540: note = A0A5B9
  source 1..540: mol_type = other RNA
atggacctgaaaaacgtgttcccacccgaggtcgctgtgtttgagccatcagaagcagagatctcccacacccaaaaggccacactggtgtgcctggccacaggcttctaccccgaccacgtggagctgagctggtgggtgaatgggaaggaggtgcacagtggggtcagcacagacccgcagcccctcaaggagcagcccgccctcaatgactccagatactgcctgagcagccgcctgagggtctcggccaccttctggcagaacccccgcaaccacttccgctgtcaagtccagttctacgggctctcggagaatgacgagtggacccaggatagggccaaacctgtcacccagatcgtcagcgccgaggcctggggtagagcagactgtggcttcacctccgagtcttaccagcaaggggtcctgtctgccaccatcctctatgagatcttgctagggaaggccaccttgtatgccgtgctggtcagtgccctcgtgctgatggccatggtcaagagaaaggattccagaggctag

SEQ ID NO: 366 - RNA, 465 nt, synthetic construct
  misc_feature 1..465: note = B7Z8K6
  source 1..465: mol_type = other RNA
atgagtcagcctcataccaaaccatccgtttttgtcatgaaaaatggaacaaatgtcgcttgtctggtgaaggaattctaccccaaggatataagaataaatctcgtgtcatccaagaagataacagagtttgatcctgctattgtcatctctcccagcgggaagtacaatgctgtcaagcttggtaaatatgaagattcaaattcagtgacatgttcagttcaacacgacaataaaactgtgcactccactgactttgaagtgaagacagattctacagatcacgtaaaaccaaaggaaactgaaaacacaaagcaaccttcaaagagctgccataaacccaaagccatagttcataccgagaaggtgaacatgatgtccctcacagtgcttgggctacgaatgctgtttgcaaagactgttgccgtcaattttctcttgactgccaagttatttttcttgtaa

SEQ ID NO: 367 - RNA, 645 nt, synthetic construct
  misc_feature 1..645: note = B9A064
  source 1..645: mol_type = other RNA
atgagacccaagacaggccaagtgggttgtgagacccctgaggagctgggccctggtcccaggcagcgctggcccctgctgctgctgggtctggccatggtcgcccatggcctgctgcgcccaatggttgcaccgcaaagcggggacccagaccctggagcctcagttggaagcagccgatccagcctgcggagcctgtggggcaggctcctgctccagcccagcccccagagagcagaccccaggtgctggccccgggggttttggtctgagcctcagtcactgtgttatgtcttcggaactgggaccaaggtcaccgtcctaggtcagcccaaggccaaccccactgtcactctgttcccgccctcctctgaggagctccaagccaacaaggccacactagtgtgtctgatcagtgacttctacccgggagctgtgacagtggcctggaaggcagatggcagccccgtcaaggcgggagtggagaccaccaaaccctccaaacagagcaacaacaagtacgcggccagcagctacctgagcctgacgcccgagcagtggaagtcccacagaagctacagctgccaggtcacgcatgaagggagcaccgtggagaagacagtggcccctacagaatgttcatag

SEQ ID NO: 368 - RNA, 2520 nt, synthetic construct
  misc_feature 1..2520: note = O00206
  source 1..2520: mol_type = other RNA
atgatgtctgcctcgcgcctggctgggactctgatcccagccatggccttcctctcctgcgtgagaccagaaagctgggagccctgcgtggaggtggttcctaatattacttatcaatgcatggagctgaatttctacaaaatccccgacaacctccccttctcaaccaagaacctggacctgagctttaatcccctgaggcatttaggcagctatagcttcttcagtttcccagaactgcaggtgctggatttatccaggtgtgaaatccagacaattgaagatggggcatatcagagcctaagccacctctctaccttaatattgacaggaaaccccatccagagtttagccctgggagccttttctggactatcaagtttacagaagctggtggctgtggagacaaatctagcatctctagagaacttccccattggacatctcaaaactttgaaagaacttaatgtggctcacaatcttatccaatctttcaaattacctgagtatttttctaatctgaccaatctagagcacttggacctttccagcaacaagattcaaagtatttattgcacagacttgcgggttctacatcaaatgcccctactcaatctctctttagacctgtccctgaaccctatgaactttatccaaccaggtgcatttaaagaaattaggcttcataagctgactttaagaaataattttgatagtttaaatgtaatgaaaacttgtattcaaggtctggctggtttagaagtccatcgtttggttctgggagaatttagaaatgaaggaaacttggaaaagtttgacaaatctgctctagagggcctgtgcaatttgaccattgaagaattccgattagcatacttagactactacctcgatgatattattgacttatttaattgtttgacaaatgtttcttcattttccctggtgagtgtgactattgaaagggtaaaagacttttcttataatttcggatggcaacatttagaattagttaactgtaaatttggacagtttcccacattgaaactcaaatctctcaaaaggcttactttcacttccaacaaaggtgggaatgctttttcagaagttgatctaccaagccttgagtttctagatctcagtagaaatggcttgagtttcaaaggttgctgttctcaaagtgattttgggacaaccagcctaaagtatttagatctgagcttcaatggtgttattaccatgagttcaaacttcttgggcttagaacaactagaacatctggatttccagcattccaatttgaaacaaatgagtgagttttcagtattcctatcactcagaaacctcatttaccttgacatttctcatactcacaccagagttgctttcaatggcatcttcaatggcttgtccagtctcgaagtcttgaaaatggctggcaattctttccaggaaaacttccttccagatatcttcacagagctgagaaacttgaccttcctggacctctctcagtgtcaactggagcagttgtctccaacagcatttaactcactctccagtcttcaggtactaaatatgagccacaacaacttcttttcattggatacgtttccttataagtgtctgaactccctccaggttcttgattacagtctcaatcacataatgacttccaaaaaacaggaactacagcattttccaagtagtctagctttcttaaatcttactcagaatgactttgcttgtacttgtgaacaccagagtttcctgcaatggatcaaggaccagaggcagctcttggtggaagttgaacgaatggaatgtgcaacaccttcagataagcagggcatgcctgtgctgagtttgaatatcacctgtcagatgaataagaccatcattggtgtgtcggtcctcagtgtgcttgtagtatctgttgtagcagttctggtctataagttctattttcacctgatgcttcttgctggctgcataaagtatggtagaggtgaaaacatctatgatgcctttgttatctactcaagccaggatgaggactgggtaaggaatgagctagtaaagaatttagaagaaggggtgcctccatttcagctctgccttcactacagagactttattcccggtgtggccattgctgccaacatcatccatgaaggtttccataaaagccgaaaggtgattgttgtggtgtcccagcacttcatccagagccgctggtgtatctttgaatatgagattgctcagacctggcagtttctgagcagtcgtgctggtatcatcttcattgtcctgcagaaggtggagaagaccctgctcaggcagcaggtggagctgtaccgccttctcagcaggaacacttacctggagtgggaggacagtgtcctggggcggcacatcttctggagacgactcagaaaagccctgctggatggtaaatcatggaatccagaaggaacagtgggtacaggatgcaattggcaggaagcaacatctatctga

SEQ ID NO: 369 - RNA, 1377 nt, synthetic construct
  misc_feature 1..1377: note = P01730
  source 1..1377: mol_type = other RNA
atgaaccggggagtcccttttaggcacttgcttctggtgctgcaactggcgctcctcccagcagccactcagggaaagaaagtggtgctgggcaaaaaaggggatacagtggaactgacctgtacagcttcccagaagaagagcatacaattccactggaaaaactccaaccagataaagattctgggaaatcagggctccttcttaactaaaggtccatccaagctgaatgatcgcgctgactcaagaagaagcctttgggaccaaggaaactttcccctgatcatcaagaatcttaagatagaagactcagatacttacatctgtgaagtggaggaccagaaggaggaggtgcaattgctagtgttcggattgactgccaactctgacacccacctgcttcaggggcagagcctgaccctgaccttggagagcccccctggtagtagcccctcagtgcaatgtaggagtccaaggggtaaaaacatacagggggggaagaccctctccgtgtctcagctggagctccaggatagtggcacctggacatgcactgtcttgcagaaccagaagaaggtggagttcaaaatagacatcgtggtgctagctttccagaaggcctccagcatagtctataagaaagagggggaacaggtggagttctccttcccactcgcctttacagttgaaaagctgacgggcagtggcgagctgtggtggcaggcggagagggcttcctcctccaagtcttggatcacctttgacctgaagaacaaggaagtgtctgtaaaacgggttacccaggaccctaagctccagatgggcaagaagctcccgctccacctcaccctgccccaggccttgcctcagtatgctggctctggaaacctcaccctggcccttgaagcgaaaacaggaaagttgcatcaggaagtgaacctggtggtgatgagagccactcagctccagaaaaatttgacctgtgaggtgtggggacccacctcccctaagctgatgctgagtttgaaactggagaacaaggaggcaaaggtctcgaagcgggagaaggcggtgtgggtgctgaaccctgaggcggggatgtggcagtgtctgctgagtgactcgggacaggtcctgctggaatccaacatcaaggttctgcccacatggtccaccccggtgcagccaatggccctgattgtgctggggggcgtcgccggcctcctgcttttcattgggctaggcatcttcttctgtgtcaggtgccggcaccgaaggcgccaagcagagcggatgtctcagatcaagagactcctcagtgagaagaagacctgccagtgtcctcaccggtttcagaagacatgtagccccatttga

SEQ ID NO: 370 - RNA, 537 nt, synthetic construct
  misc_feature 1..537: note = P01850
  source 1..537: mol_type = other RNA
atggaggacctgaacaaggtgttcccacccgaggtcgctgtgtttgagccatcagaagcagagatctcccacacccaaaaggccacactggtgtgcctggccacaggcttcttccctgaccacgtggagctgagctggtgggtgaatgggaaggaggtgcacagtggggtcagcacggacccgcagcccctcaaggagcagcccgccctcaatgactccagatactgcctgagcagccgcctgagggtctcggccaccttctggcagaacccccgcaaccacttccgctgtcaagtccagttctacgggctctcggagaatgacgagtggacccaggatagggccaaacccgtcacccagatcgtcagcgccgaggcctggggtagagcagactgtggctttacctcggtgtcctaccagcaaggggtcctgtctgccaccatcctctatgagatcctgctagggaaggccaccctgtatgctgtgctggtcagcgcccttgtgttgatggccatggtcaagagaaaggatttctga

SEQ ID NO: 371 - RNA, 624 nt, synthetic construct
  misc_feature 1..624: note = P07766
  source 1..624: mol_type = other RNA
atgcagtcgggcactcactggagagttctgggcctctgcctcttatcagttggcgtttgggggcaagatggtaatgaagaaatgggtggtattacacagacaccatataaagtctccatctctggaaccacagtaatattgacatgccctcagtatcctggatctgaaatactatggcaacacaatgataaaaacataggcggtgatgaggatgataaaaacataggcagtgatgaggatcacctgtcactgaaggaattttcagaattggagcaaagtggttattatgtctgctaccccagaggaagcaaaccagaagatgcgaacttttatctctacctgagggcaagagtgtgtgagaactgcatggagatggatgtgatgtcggtggccacaattgtcatagtggacatctgcatcactgggggcttgctgctgctggtttactactggagcaagaatagaaaggccaaggccaagcctgtgacacgaggagcgggtgctggcggcaggcaaaggggacaaaacaaggagaggccaccacctgttcccaacccagactatgagcccatccggaaaggccagcgggacctgtattctggcctgaatcagagacgcatctga

SEQ ID NO: 372 - RNA, 3915 nt, synthetic construct
  misc_feature 1..3915: note = P08575
  source 1..3915: mol_type = other RNA
atgtatttgtggcttaaactcttggcatttggctttgcctttctggacacagaagtatttgtgacagggcaaagcccaacaccttcccccactggattgactacagcaaagatgcccagtgttccactttcaagtgaccccttacctactcacaccactgcattctcacccgcaagcacctttgaaagagaaaatgacttctcagagaccacaacttctcttagtccagacaatacttccacccaagtatccccggactctttggataatgctagtgcttttaataccacaggtgtttcatcagtacagacgcctcaccttcccacgcacgcagactcgcagacgccctctgctggaactgacacgcagacattcagcggctccgccgccaatgcaaaactcaaccctaccccaggcagcaatgctatctcagatgtcccaggagagaggagtacagccagcacctttcctacagacccagtttccccattgacaaccaccctcagccttgcacaccacagctctgctgccttacctgcacgcacctccaacaccaccatcacagcgaacacctcagatgcctaccttaatgcctctgaaacaaccactctgagcccttctggaagcgctgtcatttcaaccacaacaatagctactactccatctaagccaacatgtgatgaaaaatatgcaaacatcactgtggattacttatataacaaggaaactaaattatttacagcaaagctaaatgttaatgagaatgtggaatgtggaaacaatacttgcacaaacaatgaggtgcataaccttacagaatgtaaaaatgcgtctgtttccatatctcataattcatgtactgctcctgataagacattaatattagatgtgccaccaggggttgaaaagtttcagttacatgattgtacacaagttgaaaaagcagatactactatttgtttaaaatggaaaaatattgaaacctttacttgtgatacacagaatattacctacagatttcagtgtggtaatatgatatttgataataaagaaattaaattagaaaaccttgaacccgaacatgagtataagtgtgactcagaaatactctataataaccacaagtttactaacgcaagtaaaattattaaaacagattttgggagtccaggagagcctcagattattttttgtagaagtgaagctgcacatcaaggagtaattacctggaatccccctcaaagatcatttcataattttaccctctgttatataaaagagacagaaaaagattgcctcaatctggataaaaacctgatcaaatatgatttgcaaaatttaaaaccttatacgaaatatgttttatcattacatgcctacatcattgcaaaagtgcaacgtaatggaagtgctgcaatgtgtcatttcacaactaaaagtgctcctccaagccaggtctggaacatgactgtctccatgacatcagataatagtatgcatgtcaagtgtaggcctcccagggaccgtaatggcccccatgaacgttaccatttggaagttgaagctggaaatactctggttagaaatgagtcgcataagaattgcgatttccgtgtaaaagatcttcaatattcaacagactacacttttaaggcctattttcacaatggagactatcctggagaaccctttattttacatcattcaacatcttataattctaaggcactgatagcatttctggcatttctgattattgtgacatcaatagccctgcttgttgttctctacaaaatctatgatctacataagaaaagatcctgcaatttagatgaacagcaggagcttgttgaaagggatgatgaaaaacaactgatgaatgtggagccaatccatgcagatattttgttggaaacttataagaggaagattgctgatgaaggaagactttttctggctgaatttcagagcatcccgcgggtgttcagcaagtttcctataaaggaagctcgaaagccctttaaccagaataaaaaccgttatgttgacattcttccttatgattataaccgtgttgaactctctgagataaacggagatgcagggtcaaactacataaatgccagctatattgatggtttcaaagaacccaggaaatacattgctgcacaaggtcccagggatgaaactgttgatgatttctggaggatgatttgggaacagaaagccacagttattgtcatggtcactcgatgtgaagaaggaaacaggaacaagtgtgcagaatactggccgtcaatggaagagggcactcgggcttttggagatgttgttgtaaagatcaaccagcacaaaagatgtccagattacatcattcagaaattgaacattgtaaataaaaaagaaaaagcaactggaagagaggtgactcacattcagttcaccagctggccagaccacggggtgcctgaggatcctcacttgctcctcaaactgagaaggagagtgaatgccttcagcaatttcttcagtggtcccattgtggtgcactgcagtgctggtgttgggcgcacaggaacctatatcggaattgatgccatgctagaaggcctggaagccgagaacaaagtggatgtttatggttatgttgtcaagctaaggcgacagagatgcctgatggttcaagtagaggcccagtacatcttgatccatcaggctttggtggaatacaatcagtttggagaaacagaagtgaatttgtctgaattacatccatatctacataacatgaagaaaagggatccacccagtgagccgtctccactagaggctgaattccagagacttccttcatataggagctggaggacacagcacattggaaatcaagaagaaaataaaagtaaaaacaggaattctaatgtcatcccatatgactataacagagtgccacttaaacatgagctggaaatgagtaaagagagtgagcatgattcagatgaatcctctgatgatgacagtgattcagaggaaccaagcaaatacatcaatgcatcttttataatgagctactggaaacctgaagtgatgattgctgctcagggaccactgaaggagaccattggtgacttttggcagatgatcttccaaagaaaagtcaaagttattgttatgctgacagaactgaaacatggagaccaggaaatctgtgctcagtactggggagaaggaaagcaaacatatggagatattgaagttgacctgaaagacacagacaaatcttcaacttatacccttcgtgtctttgaactgagacattccaagaggaaagactctcgaactgtgtaccagtaccaatatacaaactggagtgtggagcagcttcctgcagaacccaaggaattaatctctatgattcaggtcgtcaaacaaaaacttccccagaagaattcctctgaagggaacaagcatcacaagagtacacctctactcattcactgcagggatggatctcagcaaacgggaatattttgtgctttgttaaatctcttagaaagtgcggaaacagaagaggtagtggatatttttcaagtggtaaaagctctacgcaaagctaggccaggcatggtttccacattcgagcaatatcaattcctatatgacgtcattgccagcacctaccctgctcagaatggacaagtaaagaaaaacaaccatcaagaagataaaattgaatttgataatgaagtggacaaagtaaagcaggatgctaattgtgttaatccacttggtgccccagaaaagctccctgaagcaaaggaacaggctgaaggttctgaacccacgagtggcactgaggggccagaacattctgtcaatggtcctgcaagtccagctttaaatcaaggttcatag

SEQ ID NO: 373 - RNA, 765 nt, synthetic construct
  misc_feature 1..765: note = P08637
  source 1..765: mol_type = other RNA
atgtggcagctgctcctcccaactgctctgctacttctagtttcagctggcatgcggactgaagatctcccaaaggctgtggtgttcctggagcctcaatggtacagggtgctcgagaaggacagtgtgactctgaagtgccagggagcctactcccctgaggacaattccacacagtggtttcacaatgagagcctcatctcaagccaggcctcgagctacttcattgacgctgccacagtcgacgacagtggagagtacaggtgccagacaaacctctccaccctcagtgacccggtgcagctagaagtccatatcggctggctgttgctccaggcccctcggtgggtgttcaaggaggaagaccctattcacctgaggtgtcacagctggaagaacactgctctgcataaggtcacatatttacagaatggcaaaggcaggaagtattttcatcataattctgacttctacattccaaaagccacactcaaagacagcggctcctacttctgcagggggctttttgggagtaaaaatgtgtcttcagagactgtgaacatcaccatcactcaaggtttggcagtgtcaaccatctcatcattctttccacctgggtaccaagtctctttctgcttggtgatggtactcctttttgcagtggacacaggactatatttctctgtgaagacaaacattcgaagctcaacaagagactggaaggaccataaatttaaatggagaaaggaccctcaagacaaatga

SEQ ID NO: 374 - RNA, 663 nt, synthetic construct
  misc_feature 1..663: note = P10747
  source 1..663: mol_type = other RNA
atgctcaggctgctcttggctctcaacttattcccttcaattcaagtaacaggaaacaagattttggtgaagcagtcgcccatgcttgtagcgtacgacaatgcggtcaaccttagctgcaagtattcctacaatctcttctcaagggagttccgggcatcccttcacaaaggactggatagtgctgtggaagtctgtgttgtatatgggaattactcccagcagcttcaggtttactcaaaaacggggttcaactgtgatgggaaattgggcaatgaatcagtgacattctacctccagaatttgtatgttaaccaaacagatatttacttctgcaaaattgaagttatgtatcctcctccttacctagacaatgagaagagcaatggaaccattatccatgtgaaagggaaacacctttgtccaagtcccctatttcccggaccttctaagcccttttgggtgctggtggtggttggtggagtcctggcttgctatagcttgctagtaacagtggcctttattattttctgggtgaggagtaagaggagcaggctcctgcacagtgactacatgaacatgactccccgccgccccgggcccacccgcaagcattaccagccctatgccccaccacgcgacttcgcagcctatcgctcctga

SEQ ID NO: 375 - RNA, 681 nt, synthetic construct
  misc_feature 1..681: note = P11912
  source 1..681: mol_type = other RNA
atgcctgggggtccaggagtcctccaagctctgcctgccaccatcttcctcctcttcctgctgtctgctgtctacctgggccctgggtgccaggccctgtggatgcacaaggtcccagcatcattgatggtgagcctgggggaagacgcccacttccaatgcccgcacaatagcagcaacaacgccaacgtcacctggtggcgcgtcctccatggcaactacacgtggccccctgagttcttgggcccgggcgaggaccccaatggtacgctgatcatccagaatgtgaacaagagccatgggggcatatacgtgtgccgggtccaggagggcaacgagtcataccagcagtcctgcggcacctacctccgcgtgcgccagccgccccccaggcccttcctggacatgggggagggcaccaagaaccgaatcatcacagccgaggggatcatcctcctgttctgcgcggtggtgcctgggacgctgctgctgttcaggaaacgatggcagaacgagaagctcgggttggatgccggggatgaatatgaagatgaaaacctttatgaaggcctgaacctggacgactgctccatgtatgaggacatctcccggggcctccagggcacctaccaggatgtgggcagcctcaacataggagatgtccagctggagaagccgtga

SEQ ID NO: 376 - RNA, 1671 nt, synthetic construct
  misc_feature 1..1671: note = P15391
  source 1..1671: mol_type = other RNA
atgccacctcctcgcctcctcttcttcctcctcttcctcacccccatggaagtcaggcccgaggaacctctagtggtgaaggtggaagagggagataacgctgtgctgcagtgcctcaaggggacctcagatggccccactcagcagctgacctggtctcgggagtccccgcttaaacccttcttaaaactcagcctggggctgccaggcctgggaatccacatgaggcccctggccatctggcttttcatcttcaacgtctctcaacagatggggggcttctacctgtgccagccggggcccccctctgagaaggcctggcagcctggctggacagtcaatgtggagggcagcggggagctgttccggtggaatgtttcggacctaggtggcctgggctgtggcctgaagaacaggtcctcagagggccccagctccccttccgggaagctcatgagccccaagctgtatgtgtgggccaaagaccgccctgagatctgggagggagagcctccgtgtctcccaccgagggacagcctgaaccagagcctcagccaggacctcaccatggcccctggctccacactctggctgtcctgtggggtaccccctgactctgtgtccaggggccccctctcctggacccatgtgcaccccaaggggcctaagtcattgctgagcctagagctgaaggacgatcgcccggccagagatatgtgggtaatggagacgggtctgttgttgccccgggccacagctcaagacgctggaaagtattattgtcaccgtggcaacctgaccatgtcattccacctggagatcactgctcggccagtactatggcactggctgctgaggactggtggctggaaggtctcagctgtgactttggcttatctgatcttctgcctgtgttcccttgtgggcattcttcatcttcaaagagccctggtcctgaggaggaaaagaaagcgaatgactgaccccaccaggagattcttcaaagtgacgcctcccccaggaagcgggccccagaaccagtacgggaacgtgctgtctctccccacacccacctcaggcctcggacgcgcccagcgttgggccgcaggcctggggggcactgccccgtcttatggaaacccgagcagcgacgtccaggcggatggagccttggggtcccggagcccgccgggagtgggcccagaagaagaggaaggggagggctatgaggaacctgacagtgaggaggactccgagttctatgagaacgactccaaccttgggcaggaccagctctcccaggatggcagcggctacgagaaccctgaggatgagcccctgggtcctgaggatgaagactccttctccaacgctgagtcttatgagaacgaggatgaagagctgacccagccggtcgccaggacaatggacttcctgagccctcatgggtcagcctgggaccccagccgggaagcaacctccctggggtcccagtcctatgaggatatgagaggaatcctgtatgcagccccccagctccgctccattcggggccagcctggacccaatcatgaggaagatgcagactcttatgagaacatggataatcccgatgggccagacccagcctggggaggagggggccgcatgggcacctggagcaccaggtga

SEQ ID NO: 377 - RNA, 672 nt, synthetic construct
  misc_feature 1..672: note = P16410
  source 1..672: mol_type = other RNA
atggcttgccttggatttcagcggcacaaggctcagctgaacctggctaccaggacctggccctgcactctcctgttttttcttctcttcatccctgtcttctgcaaagcaatgcacgtggcccagcctgctgtggtactggccagcagccgaggcatcgccagctttgtgtgtgagtatgcatctccaggcaaagccactgaggtccgggtgacagtgcttcggcaggctgacagccaggtgactgaagtctgtgcggcaacctacatgatggggaatgagttgaccttcctagatgattccatctgcacgggcacctccagtggaaatcaagtgaacctcactatccaaggactgagggccatggacacgggactctacatctgcaaggtggagctcatgtacccaccgccatactacctgggcataggcaacggaacccagatttatgtaattgatccagaaccgtgcccagattctgacttcctcctctggatccttgcagcagttagttcggggttgtttttttatagctttctcctcacagctgtttctttgagcaaaatgctaaagaaaagaagccctcttacaacaggggtctatgtgaaaatgcccccaacagagccagaatgtgaaaagcaatttcagccttattttattcccatcaattga

SEQ ID NO: 378 - RNA, 1419 nt, synthetic construct
  misc_feature 1..1419: note = P16671
  source 1..1419: mol_type = other RNA
atgggctgtgaccggaactgtgggctcatcgctggggctgtcattggtgctgtcctggctgtgtttggaggtattctaatgccagttggagacctgcttatccagaagacaattaaaaagcaagttgtcctcgaagaaggtacaattgcttttaaaaattgggttaaaacaggcacagaagtttacagacagttttggatctttgatgtgcaaaatccacaggaagtgatgatgaacagcagcaacattcaagttaagcaaagaggtccttatacgtacagagttcgttttctagccaaggaaaatgtaacccaggacgctgaggacaacacagtctctttcctgcagcccaatggtgccatcttcgaaccttcactatcagttggaacagaggctgacaacttcacagttctcaatctggctgtggcagctgcatcccatatctatcaaaatcaatttgttcaaatgatcctcaattcacttattaacaagtcaaaatcttctatgttccaagtcagaactttgagagaactgttatggggctatagggatccatttttgagtttggttccgtaccctgttactaccacagttggtctgttttatccttacaacaatactgcagatggagtttataaagttttcaatggaaaagataacataagtaaagttgccataatcgacacatataaaggtaaaaggaatctgtcctattgggaaagtcactgcgacatgattaatggtacagatgcagcctcatttccaccttttgttgagaaaagccaggtattgcagttcttttcttctgatatttgcaggtcaatctatgctgtatttgaatccgacgttaatctgaaaggaatccctgtgtatagatttgttcttccatccaaggcctttgcctctccagttgaaaacccagacaactattgtttctgcacagaaaaaattatctcaaaaaattgtacatcatatggtgtgctagacatcagcaaatgcaaagaagggagacctgtgtacatttcacttcctcattttctgtatgcaagtcctgatgtttcagaacctattgatggattaaacccaaatgaagaagaacataggacatacttggatattgaacctataactggattcactttacaatttgcaaaacggctgcaggtcaacctattggtcaagccatcagaaaaaattcaagtattaaagaatctgaagaggaactatattgtgcctattctttggcttaatgagactgggaccattggtgatgagaaggcaaacatgttcagaagtcaagtaactggaaaaataaacctccttggcctgatagaaatgatcttactcagtgttggtgtggtgatgtttgttgcttttatgatttcatattgtgcatgcagatcgaaaacaataaaataa

SEQ ID NO: 379 - RNA, 651 nt, synthetic construct
  misc_feature 1..651: note = P26718
  source 1..651: mol_type = other RNA
atggggtggattcgtggtcggaggtctcgacacagctgggagatgagtgaatttcataattataacttggatctgaagaagagtgatttttcaacacgatggcaaaagcaaagatgtccagtagtcaaaagcaaatgtagagaaaatgcatctccattttttttctgctgcttcatcgctgtagccatgggaatccgtttcattattatggtagcaatatggagtgctgtattcctaaactcattattcaaccaagaagttcaaattcccttgaccgaaagttactgtggcccatgtcctaaaaactggatatgttacaaaaataactgctaccaattttttgatgagagtaaaaactggtatgagagccaggcttcttgtatgtctcaaaatgccagccttctgaaagtatacagcaaagaggaccaggatttacttaaactggtgaagtcatatcattggatgggactagtacacattccaacaaatggatcttggcagtgggaagatggctccattctctcacccaacctactaacaataattgaaatgcagaagggagactgtgcactctatgcctcgagctttaaaggctatatagaaaactgttcaactccaaatacgtacatctgcatgcaaaggactgtgtaa

SEQ ID NO: 380 - RNA, 261 nt, synthetic construct
  misc_feature 1..261: note = P30273
  source 1..261: mol_type = other RNA
atgattccagcagtggtcttgctcttactccttttggttgaacaagcagcggccctgggagagcctcagctctgctatatcctggatgccatcctgtttctgtatggaattgtcctcaccctcctctactgtcgactgaagatccaagtgcgaaaggcagctataaccagctatgagaaatcagatggtgtttacacgggcctgagcaccaggaaccaggagacttacgagactctgaagcatgagaaaccaccacagtag

SEQ ID NO: 381 - RNA, 1137 nt, synthetic construct
  misc_feature 1..1137: note = P32248
  source 1..1137: mol_type = other RNA
atggacctggggaaaccaatgaaaagcgtgctggtggtggctctccttgtcattttccaggtatgcctgtgtcaagatgaggtcacggacgattacatcggagacaacaccacagtggactacactttgttcgagtctttgtgctccaagaaggacgtgcggaactttaaagcctggttcctccctatcatgtactccatcatttgtttcgtgggcctactgggcaatgggctggtcgtgttgacctatatctatttcaagaggctcaagaccatgaccgatacctacctgctcaacctggcggtggcagacatcctcttcctcctgacccttcccttctgggcctacagcgcggccaagtcctgggtcttcggtgtccacttttgcaagctcatctttgccatctacaagatgagcttcttcagtggcatgctcctacttctttgcatcagcattgaccgctacgtggccatcgtccaggctgtctcagctcaccgccaccgtgcccgcgtccttctcatcagcaagctgtcctgtgtgggcatctggatactagccacagtgctctccatcccagagctcctgtacagtgacctccagaggagcagcagtgagcaagcgatgcgatgctctctcatcacagagcatgtggaggcctttatcaccatccaggtggcccagatggtgatcggctttctggtccccctgctggccatgagcttctgttaccttgtcatcatccgcaccctgctccaggcacgcaactttgagcgcaacaaggccatcaaggtgatcatcgctgtggtcgtggtcttcatagtcttccagctgccctacaatggggtggtcctggcccagacggtggccaacttcaacatcaccagtagcacctgtgagctcagtaagcaactcaacatcgcctacgacgtcacctacagcctggcctgcgtccgctgctgcgtcaaccctttcttgtacgccttcatcggcgtcaagttccgcaacgatctcttcaagctcttcaaggacctgggctgcctcagccaggagcagctccggcagtggtcttcctgtcggcacatccggcgctcctccatgagtgtggaggccgagaccaccaccaccttctccccatag

SEQ ID NO: 382 - RNA, 690 nt, synthetic construct
  misc_feature 1..690: note = P40259
  source 1..690: mol_type = other RNA
atggccaggctggcgttgtctcctgtgcccagccactggatggtggcgttgctgctgctgctctcagcagagccagtaccagcagccagatcggaggaccggtaccggaatcccaaaggtagtgcttgttcgcggatctggcagagcccacgtttcatagccaggaaacggggcttcacggtgaaaatgcactgctacatgaacagcgcctccggcaatgtgagctggctctggaagcaggagatggacgagaatccccagcagctgaagctggaaaagggccgcatggaagagtcccagaacgaatctctcgccaccctcaccatccaaggcatccggtttgaggacaatggcatctacttctgtcagcagaagtgcaacaacacctcggaggtctaccagggctgcggcacagagctgcgagtcatgggattcagcaccttggcacagctgaagcagaggaacacgctgaaggatggtatcatcatgatccagacgctgctgatcatcctcttcatcatcgtgcctatcttcctgctgctggacaaggatgacagcaaggctggcatggaggaagatcacacctacgagggcctggacattgaccagacagccacctatgaggacatagtgacgctgcggacaggggaagtgaagtggtctgtaggtgagcacccaggccaggagtga

SEQ ID NO: 383 - RNA, 990 nt, synthetic construct
  misc_feature 1..990: note = P42081
  source 1..990: mol_type = other RNA
atggatccccagtgcactatgggactgagtaacattctctttgtgatggccttcctgctctctggtgctgctcctctgaagattcaagcttatttcaatgagactgcagacctgccatgccaatttgcaaactctcaaaaccaaagcctgagtgagctagtagtattttggcaggaccaggaaaacttggttctgaatgaggtatacttaggcaaagagaaatttgacagtgttcattccaagtatatgggccgcacaagttttgattcggacagttggaccctgagacttcacaatcttcagatcaaggacaagggcttgtatcaatgtatcatccatcacaaaaagcccacaggaatgattcgcatccaccagatgaattctgaactgtcagtgcttgctaacttcagtcaacctgaaatagtaccaatttctaatataacagaaaatgtgtacataaatttgacctgctcatctatacacggttacccagaacctaagaagatgagtgttttgctaagaaccaagaattcaactatcgagtatgatggtgttatgcagaaatctcaagataatgtcacagaactgtacgacgtttccatcagcttgtctgtttcattccctgatgttacgagcaatatgaccatcttctgtattctggaaactgacaagacgcggcttttatcttcacctttctctatagagcttgaggaccctcagcctcccccagaccacattccttggattacagctgtacttccaacagttattatatgtgtgatggttttctgtctaattctatggaaatggaagaagaagaagcggcctcgcaactcttataaatgtggaaccaacacaatggagagggaagagagtgaacagaccaagaaaagagaaaaaatccatatacctgaaagatctgatgaagcccagcgtgtttttaaaagttcgaagacatcttcatgcgacaaaagtgatacatgtttttaa

SEQ ID NO: 384 - RNA, 1011 nt, synthetic construct
  misc_feature 1..1011: note = Q15762
  source 1..1011: mol_type = other RNA
atggattatcctactttacttttggctcttcttcatgtatacagagctctatgtgaagaggtgctttggcatacatcagttccctttgccgagaacatgtctctagaatgtgtgtatccatcaatgggcatcttaacacaggtggagtggttcaagatcgggacccagcaggattccatagccattttcagccctactcatggcatggtcataaggaagccctatgctgagagggtttactttttgaattcaacgatggcttccaataacatgactcttttctttcggaatgcctctgaagatgatgttggctactattcctgctctctttacacttacccacagggaacttggcagaaggtgatacaggtggttcagtcagatagttttgaggcagctgtgccatcaaatagccacattgtttcggaacctggaaagaatgtcacactcacttgtcagcctcagatgacgtggcctgtgcaggcagtgaggtgggaaaagatccagccccgtcagatcgacctcttaacttactgcaacttggtccatggcagaaatttcacctccaagttcccaagacaaatagtgagcaactgcagccacggaaggtggagcgtcatcgtcatccccgatgtcacagtctcagactcggggctttaccgctgctacttgcaggccagcgcaggagaaaacgaaaccttcgtgatgagattgactgtagccgagggtaaaaccgataaccaatataccctctttgtggctggagggacagttttattgttgttgtttgttatctcaattaccaccatcattgtcattttccttaacagaaggagaaggagagagagaagagatctatttacagagtcctgggatacacagaaggcacccaataactatagaagtcccatctctaccagtcaacctaccaatcaatccatggatgatacaagagaggatatttatgtcaactatccaaccttctctcgcagaccaaagactagagtttaa

SEQ ID NO: 385 - RNA, 13482 nt, synthetic construct
  misc_feature 1..13482: note = Q685J3
  source 1..13482: mol_type = other RNA
atgccaaggccagggaccatggcgctgtgtctgctgaccttggtcctctcgctcttgcccccacaagctgctgcagaacaggacctcagtgtgaacagggctgtgtgggatggaggagggtgcatctcccaaggggacgtcttgaaccgtcagtgccagcagctgtctcagcacgttaggacaggttctgcggcaaacaccgccacaggtacaacatctacaaatgtcgtggagccaagaatgtatttgagttgcagcaccaaccctgagatgacctcgattgagtccagtgtgacttcagacactcctggtgtctccagtaccaggatgacaccaacagaatccagaacaacttcagaatctaccagtgacagcaccacacttttccccagttctactgaagacacttcatctcctacaactcctgaaggcaccgacgtgcccatgtcaacaccaagtgaagaaagcatttcatcaacaatggcttttgtcagcactgcacctcttcccagttttgaggcctacacatctttaacatataaggttgatatgagcacacctctgaccacttctactcaggcaagttcatctcctactactcctgaaagcaccaccatacccaaatcaactaacagtgaaggaagcactccattaacaagtatgcctgccagcaccatgaaggtggccagttcagaggctatcacccttttgacaactcctgttgaaatcagcacacctgtgaccatttctgctcaagccagttcatctcctacaactgctgaaggtcccagcctgtcaaactcagctcctagtggaggaagcactccattaacaagaatgcctctcagcgtgatgctggtggtcagttctgaggctagcaccctttcaacaactcctgctgccaccaacattcctgtgatcacttctactgaagccagttcatctcctacaacggctgaaggcaccagcataccaacctcaacttatactgaaggaagcactccattaacaagtacgcctgccagcaccatgccggttgccacttctgaaatgagcacactttcaataactcctgttgacaccagcacacttgtgaccacttctactgaacccagttcacttcctacaactgctgaagctaccagcatgctaacctcaactcttagtgaaggaagcactccattaacaaatatgcctgtcagcaccatattggtggccagttctgaggctagcaccacttcaacaattcctgttgactccaaaacttttgtgaccactgctagtgaagccagctcatctcccacaactgctgaagataccagcattgcaacctcaactcctagtgaaggaagcactccattaacaagtatgcctgtcagcaccactccagtggccagttctgaggctagcaacctttcaacaactcctgttgactccaaaactcaggtgaccacttctactgaagccagttcatctcctccaactgctgaagttaacagcatgccaacctcaactcctagtgaaggaagcactccattaacaagtatgtctgtcagcaccatgccggtggccagttctgaggctagcaccctttcaacaactcctgttgacaccagcacacctgtgaccacttctagtgaagccagttcatcttctacaactcctgaaggtaccagcataccaacctcaactcctagtgaaggaagcactccattaacaaacatgcctgtcagcaccaggctggtggtcagttctgaggctagcaccacttcaacaactcctgctgactccaacacttttgtgaccacttctagtgaagctagttcatcttctacaactgctgaaggtaccagcatgccaacctcaacttacagtgaaagaggcactacaataacaagtatgtctgtcagcaccacactggtggccagttctgaggctagcaccctttcaacaactcctgttgactccaacactcctgtgaccacttcaactgaagccacttcatcttctacaactgcggaaggtaccagcatgccaacctcaacttatactgaaggaagcactccattaacaagtatgcctgtcaacaccacactggtggccagttctgaggctagcaccctttcaacaactcctgttgacaccagcacacctgtgaccacttcaactgaagccagttcctctcctacaactgctgatggtgccagtatgccaacctcaactcctagtgaaggaagcactccattaacaagtatgcctgtcagcaaaacgctgttgaccagttctgaggctagcaccctttcaacaactcctcttgacacaagcacacatatcaccacttctactgaagccagttgctctcctacaaccactgaaggtaccagcatgccaatctcaactcctagtgaaggaagtcctttattaacaagtatacctgtcagcatcacaccggtgaccagtcctgaggctagcaccctttcaacaactcctgttgactccaacagtcctgtgaccacttctactgaagtcagttcatctcctacacctgctgaaggtaccagcatgccaacctcaacttatagtgaaggaagaactcctttaacaagtatgcctgtcagcaccacactggtggccacttctgcaatcagcaccctttcaacaactcctgttgacaccagcacacctgtgaccaattctactgaagcccgttcgtctcctacaacttctgaaggtaccagcatgccaacctcaactcctggggaaggaagcactccattaacaagtatgcctgacagcaccacgccggtagtcagttctgaggctagaacactttcagcaactcctgttgacaccagcacacctgtgaccacttctactgaagccacttcatctcctacaactgctgaaggtaccagcataccaacctcgactcctagtgaaggaacgactccattaacaagcacacctgtcagccacacgctggtggccaattctgaggctagcaccctttcaacaactcctgttgactccaacactcctttgaccacttctactgaagccagttcacctcctcccactgctgaaggtaccagcatgccaacctcaactcctagtgaaggaagcactccattaacacgtatgcctgtcagcaccacaatggtggccagttctgaaacgagcacactttcaacaactcctgctgacaccagcacacctgtgaccacttattctcaagccagttcatcttctacaactgctgacggtaccagcatgccaacctcaacttatagtgaaggaagcactccactaacaagtgtgcctgtcagcaccaggctggtggtcagttctgaggctagcaccctttccacaactcctgtcgacaccagcatacctgtcaccacttctactgaagccagttcatctcctacaactgctgaaggtaccagcataccaacctcacctcccagtgaaggaaccactccgttagcaagtatgcctgtcagcaccacgctggtggtcagttctgaggctaacaccctttcaacaactcctgtggactccaaaactcaggtggccacttctactgaagccagttcacctcctccaactgctgaagttaccagcatgccaacctcaactcctggagaaagaagcactccattaacaagtatgcctgtcagacacacgccagtggccagttctgaggctagcaccctttcaacatctcccgttgacaccagcacacctgtgaccacttctgctgaaaccagttcctctcctacaaccgctgaaggtaccagcttgccaacctcaactactagtgaaggaagtactctattaacaagtatacctgtcagcaccacgctggtgaccagtcctgaggctagcacccttttaacaactcctgttgacactaaaggtcctgtggtcacttctaatgaagtcagttcatctcctacacctgctgaaggtaccagcatgccaacctcaacttatagtgaaggaagaactcctttaacaagtatacctgtcaacaccacactggtggccagttctgcaatcagcatcctttcaacaactcctgttgacaacagcacacctgtgaccacttctactgaagcctgttcatctcctacaacttctgaaggtaccagcatgccaaactcaaatcctagtgaaggaaccactccgttaacaagtatacctgtcagcaccacgccggtagtcagttctgaggctagcaccctttcagcaactcctgttgacaccagcacccctgggaccacttctgctgaagccacttcatctcctacaactgctgaaggtatcagcataccaacctcaactcctagtgaaggaaagactccattaaaaagtatacctgtcagcaacacgccggtggccaattctgaggctagcaccctttcaacaactcctgttgactctaacagtcctgtggtcacttctacagcagtcagttcatctcctacacctgctgaaggtaccagcatagcaatctcaacgcctagtgaaggaagcactgcattaacaagtatacctgtcagcaccacaacagtggccagttctgaaatcaacagcctttcaacaactcctgctgtcaccagcacacctgtgaccacttattctcaagccagttcatctcctacaactgctgacggtaccagcatgcaaacctcaacttatagtgaaggaagcactccactaacaagtttgcctgtcagcaccatgctggtggtcagttctgaggctaacaccctttcaacaacccctattgactccaaaactcaggtgaccgcttctactgaagccagttcatctacaaccgctgaaggtagcagcatgacaatctcaactcctagtgaaggaagtcctctattaacaagtatacctgtcagcaccacgccggtggccagtcctgaggctagcaccctttcaacaactcctgttgactccaacagtcctgtgatcacttctactgaagtcagttcatctcctacacctgctgaaggtaccagcatgccaacctcaacttatactgaaggaagaactcctttaacaagtataactgtcagaacaacaccggtggccagctctgcaatcagcaccctttcaacaactcccgttgacaacagcacacctgtgaccacttctactgaagcccgttcatctcctacaacttctgaaggtaccagcatgccaaactcaactcctagtgaaggaaccactccattaacaagtatacctgtcagcaccacgccggtactcagttctgaggctagcaccctttcagcaactcctattgacaccagcacccctgtgaccacttctactgaagccacttcgtctcctacaactgctgaaggtaccagcataccaacctcgactcttagtgaaggaatgactccattaacaagcacacctgtcagccacacgctggtggccaattctgaggctagcaccctttcaacaactcctgttgactctaacagtcctgtggtcacttctacagcagtcagttcatctcctacacctgctgaaggtaccagcatagcaacctcaacgcctagtgaaggaagcactgcattaacaagtatacctgtcagcaccacaacagtggccagttctgaaaccaacaccctttcaacaactcccgctgtcaccagcacacctgtgaccacttatgctcaagtcagttcatctcctacaactgctgacggtagcagcatgccaacctcaactcctagggaaggaaggcctccattaacaagtatacctgtcagcaccacaacagtggccagttctgaaatcaacaccctttcaacaactcttgctgacaccaggacacctgtgaccacttattctcaagccagttcatctcctacaactgctgatggtaccagcatgccaaccccagcttatagtgaaggaagcactccactaacaagtatgcctctcagcaccacgctggtggtcagttctgaggctagcactctttccacaactcctgttgacaccagcactcctgccaccacttctactgaaggcagttcatctcctacaactgcaggaggtaccagcatacaaacctcaactcctagtgaacggaccactccattagcaggtatgcctgtcagcactacgcttgtggtcagttctgagggtaacaccctttcaacaactcctgttgactccaaaactcaggtgaccaattctactgaagccagttcatctgcaaccgctgaaggtagcagcatgacaatctcagctcctagtgaaggaagtcctctactaacaagtatacctctcagcaccacgccggtggccagtcctgaggctagcaccctttcaacaactcctgttgactccaacagtcctgtgatcacttctactgaagtcagttcatctcctatacctactgaaggtaccagcatgcaaacctcaacttatagtgacagaagaactcctttaacaagtatgcctgtcagcaccacagtggtggccagttctgcaatcagcaccctttcaacaactcctgttgacaccagcacacctgtgaccaattctactgaagcccgttcatctcctacaacttctgaaggtaccagcatgccaacctcaactcctagtgaaggaagcactccattcacaagtatgcctgtcagcaccatgccggtagttacttctgaggctagcaccctttcagcaactcctgttgacaccagcacacctgtgaccacttctactgaagccacttcatctcctacaactgctgaaggtaccagcataccaacttcaactcttagtgaaggaacgactccattaacaagtatacctgtcagccacacgctggtggccaattctgaggttagcaccctttcaacaactcctgttgactccaacactcctttcactacttctactgaagccagttcacctcctcccactgctgaaggtaccagcatgccaacctcaacttctagtgaaggaaacactccattaacacgtatgcctgtcagcaccacaatggtggccagttttgaaacaagcacactttctacaactcctgctgacaccagcacacctgtgactacttattctcaagccggttcatctcctacaactgctgacgatactagcatgccaacctcaacttatagtgaaggaagcactccactaacaagtgtgcctgtcagcaccatgccggtggtcagttctgaggctagcacccattccacaactcctgttgacaccagcacacctgtcaccacttctactgaagccagttcatctcctacaactgctgaaggtaccagcataccaacctcacctcctagtgaaggaaccactccgttagcaagtatgcctgtcagcaccacgccggtggtcagttctgaggctggcaccctttccacaactcctgttgacaccagcacacctatgaccacttctactgaagccagttcatctcctacaactgctgaagatatcgtcgtgccaatctcaactgctagtgaaggaagtactctattaacaagtatacctgtcagcaccacgccagtggccagtcctgaggctagcaccctttcaacaactcctgttgactccaacagtcctgtggtcacttctactgaaatcagttcatctgctacatccgctgaaggtaccagcatgcctacctcaacttatagtgaaggaagcactccattaagaagtatgcctgtcagcaccaagccgttggccagttctgaggctagcactctttcaacaactcctgttgacaccagcatacctgtcaccacttctactgaaaccagttcatctcctacaactgcaaaagataccagcatgccaatctcaactcctagtgaagtaagtacttcattaacaagtatacttgtcagcaccatgccagtggccagttctgaggctagcaccctttcaacaactcctgttgacaccaggacacttgtgaccacttccactggaaccagttcatctcctacaactgctgaaggtagcagcatgccaacctcaactcctggtgaaagaagcactccattaacaaatatacttgtcagcaccacgctgttggccaattctgaggctagcaccctttcaacaactcctgttgacaccagcacacctgtcaccacttctgctgaagccagttcttctcctacaactgctgaaggtaccagcatgcgaatctcaactcctagtgatggaagtactccattaacaagtatacttgtcagcaccctgccagtggccagttctgaggctagcaccgtttcaacaactgctgttgacaccagcatacctgtcaccacttctactgaagccagttcctctcctacaactgctgaagttaccagcatgccaacctcaactcctagtgaaacaagtactccattaactagtatgcctgtcaaccacacgccagtggccagttctgaggctggcaccctttcaacaactcctgttgacaccagcacacctgtgaccacttctactaaagccagttcatctcctacaactgctgaaggtatcgtcgtgccaatctcaactgctagtgaaggaagtactctattaacaagtatacctgtcagcaccacgccggtggccagttctgaggctagcaccctttcaacaactcctgttgataccagcatacctgtcaccacttctactgaaggcagttcttctcctacaactgctgaaggtaccagcatgccaatctcaactcctagtgaagtaagtactccattaacaagtatacttgtcagcaccgtgccagtggccggttctgaggctagcaccctttcaacaactcctgttgacaccaggacacctgtcaccacttctgctgaagctagttcttctcctacaactgctgaaggtaccagcatgccaatctcaactcctggcgaaagaagaactccattaacaagtatgtctgtcagcaccatgccggtggccagttctgaggctagcaccctttcaagaactcctgctgacaccagcacacctgtgaccacttctactgaagccagttcctctcctacaactgctgaaggtaccggcataccaatctcaactcctagtgaaggaagtactccattaacaagtatacctgtcagcaccacgccagtggccattcctgaggctagcaccctttcaacaactcctgttgactccaacagtcctgtggtcacttctactgaagtcagttcatctcctacacctgctgaaggtaccagcatgccaatctcaacttatagtgaaggaagcactccattaacaggtgtgcctgtcagcaccacaccggtgaccagttctgcaatcagcaccctttcaacaactcctgttgacaccagcacacctgtgaccacttctactgaagcccattcatctcctacaacttctgaaggtaccagcatgccaacctcaactcctagtgaaggaagtactccattaacatatatgcctgtcagcaccatgctggtagtcagttctgaggatagcaccctttcagcaactcctgttgacaccagcacacctgtgaccacttctactgaagccacttcatctacaactgctgaaggtaccagcattccaacctcaactcctagtgaaggaatgactccattaactagtgtacctgtcagcaacacgccggtggccagttctgaggctagcatcctttcaacaactcctgttgactccaacactcctttgaccacttctactgaagccagttcatctcctcccactgctgaaggtaccagcatgccaacctcaactcctagtgaaggaagcactccattaacaagtatgcctgtcagcaccacaacggtggccagttctgaaacgagcaccctttcaacaactcctgctgacaccagcacacctgtgaccacttattctcaagccagttcatctcctccaattgctgacggtactagcatgccaacctcaacttatagtgaaggaagcactccactaacaaatatgtctttcagcaccacgccagtggtcagttctgaggctagcaccctttccacaactcctgttgacaccagcacacctgtcaccacttctactgaagccagtttatctcctacaactgctgaaggtaccagcataccaacctcaagtcctagtgaaggaaccactccattagcaagtatgcctgtcagcaccacgccggtggtcagttctgaggttaacaccctttcaacaactcctgtggactccaacactctggtgaccacttctactgaagccagttcatctcctacaatcgctgaaggtaccagcttgccaacctcaactactagtgaaggaagcactccattatcaattatgcctctcagtaccacgccggtggccagttctgaggctagcaccctttcaacaactcctgttgacaccagcacacctgtgaccacttcttctccaaccaattcatctcctacaactgctgaagttaccagcatgccaacatcaactgctggtgaaggaagcactccattaacaaatatgcctgtcagcaccacaccggtggccagttctgaggctagcaccctttcaacaactcctgttgactccaacacttttgttaccagttctagtcaagccagttcatctccagcaactcttcaggtcaccactatgcgtatgtctactccaagtgaaggaagctcttcattaacaactatgctcctcagcagcacatatgtgaccagttctgaggctagcacaccttccactccttctgttgacagaagcacacctgtgaccacttctactcagagcaattctactcctacacctcctgaagttatcaccctgccaatgtcaactcctagtgaagtaagcactccattaaccattatgcctgtcagcaccacatcggtgaccatttctgaggctggcacagcttcaacacttcctgttgacaccagcacacctgtgatcacttctacccaagtcagttcatctcctgtgactcctgaaggtaccaccatgccaatctggacgcctagtgaaggaagcactccattaacaactatgcctgtcagcaccacacgtgtgaccagctctgagggtagcaccctttcaacaccttctgttgtcaccagcacacctgtgaccacttctactgaagccatttcatcttctgcaactcttgacagcaccaccatgtctgtgtcaatgcccatggaaataagcacccttgggaccactattcttgtcagtaccacacctgttacgaggtttcctgagagtagcaccccttccataccatctgtttacaccagcatgtctatgaccactgcctctgaaggcagttcatctcctacaactcttgaaggcaccaccaccatgcctatgtcaactacgagtgaaagaagcactttattgacaactgtcctcatcagccctatatctgtgatgagtccttctgaggccagcacactttcaacacctcctggtgataccagcacacctttgctcacctctaccaaagccggttcattctccatacctgctgaagtcactaccatacgtatttcaattaccagtgaaagaagcactccattaacaactctccttgtcagcaccacacttccaactagctttcctggggccagcatagcttcgacacctcctcttgacacaagcacaacttttaccccttctactgacactgcctcaactcccacaattcctgtagccaccaccatatctgtatcagtgatcacagaaggaagcacacctgggacaaccatttttattcccagcactcctgtcaccagttctactgctgatgtctttcctgcaacaactggtgctgtatctacccctgtgataacttccactgaactaaacacaccatcaacctccagtagtagtaccaccacatctttttcaactactaaggaatttacaacacccgcaatgactactgcagctcccctcacatatgtgaccatgtctactgcccccagcacacccagaacaaccagcagaggctgcactacttctgcatcaacgctttctgcaaccagtacacctcacacctctacttctgtcaccacccgtcctgtgaccccttcatcagaatccagcaggccgtcaacaattacttctcacaccatcccacctacatttcctcctgctcactccagtacacctccaacaacctctgcctcctccacgactgtgaaccctgaggctgtcaccaccatgaccaccaggacaaaacccagcacacggaccacttccttccccacggtgaccaccaccgctgtccccacgaatactacaattaagagcaaccccacctcaactcctactgtgccaagaaccacaacatgctttggagatgggtgccagaatacggcctctcgctgcaagaatggaggcacctgggatgggctcaagtgccagtgtcccaacctctattatggggagttgtgtgaggaggtggtcagcagcattgacatagggccaccggagactatctctgcccaaatggaactgactgtgacagtgaccagtgtgaagttcaccgaagagctaaaaaaccactcttcccaggaattccaggagttcaaacagacattcacggaacagatgaatattgtgtattccgggatccctgagtatgtcggggtgaacatcacaaagctacgtcttggcagtgtggtggtggagcatgacgtcctcctaagaaccaagtacacaccagaatacaagacagtattggacaatgccaccgaagtagtgaaagagaaaatcacaaaagtgaccacacagcaaataatgattaatgatatttgctcagacatgatgtgtttcaacaccactggcacccaagtgcaaaacattacggtgacccagtacgaccctgaagaggactgccggaagatggccaaggaatatggagactacttcgtagtggagtaccgggaccagaagccatactgcatcagcccctgtgagcctggcttcagtgtctccaagaactgtaacctcggcaagtgccagatgtctctaagtggacctcagtgcctctgcgtgaccacggaaactcactggtacagtggggagacctgtaaccagggcacccagaagagtctggtgtacggcctcgtgggggcaggggtcgtgctgatgctgatcatcctggtagctctcctgatgctcgttttccgctccaagagagaggtgaaacggcaaaagtacagattgtctcagttatacaagtggcaagaagaggacagtggaccagctcctgggaccttccaaaacattggctttgacatctgccaagatgatgattccatccacctggagtccatctatagtaatttccagccctccttgagacacatagaccctgaaacaaagatccgaattcagaggcctcaggtaatgacgacatcattttaa

SEQ ID NO: 386 - RNA, 1215 nt, synthetic construct
  misc_feature 1..1215: note = Q9NNX6
  source 1..1215: mol_type = other RNA
atgagtgactccaaggaaccaagactgcagcagctgggcctcctggaggaggaacagctgagaggccttggattccgacagactcgaggatacaagagcttagcagggtgtcttggccatggtcccctggtgctgcaactcctctccttcacgctcttggctgggctccttgtccaagtgtccaaggtccccagctccataagtcaggaacaatccaggcaagacgcgatctaccagaacctgacccagcttaaagctgcagtgggtgagctctcagagaaatccaagctgcaggagatctaccaggagctgacccagctgaaggctgcagtgggtgagcttccagagaaatctaagctgcaggagatctaccaggagctgacccggctgaaggctgcagtgggtgagcttccagagaaatctaagctgcaggagatctaccaggagctgacctggctgaaggctgcagtgggtgagcttccagagaaatctaagatgcaggagatctaccaggagctgactcggctgaaggctgcagtgggtgagcttccagagaaatctaagcagcaggagatctaccaggagctgacccggctgaaggctgcagtgggtgagcttccagagaaatctaagcagcaggagatctaccaggagctgacccggctgaaggctgcagtgggtgagcttccagagaaatctaagcagcaggagatctaccaggagctgacccagctgaaggctgcagtggaacgcctgtgccacccctgtccctgggaatggacattcttccaaggaaactgttacttcatgtctaactcccagcggaactggcacgactccatcaccgcctgcaaagaagtgggggcccagctcgtcgtaatcaaaagtgctgaggagcagaacttcctacagctgcagtcttccagaagtaaccgcttcacctggatgggactttcagatctaaatcaggaaggcacgtggcaatgggtggacggctcacctctgttgcccagcttcaagcagtattggaacagaggagagcccaacaacgttggggaggaagactgcgcggaatttagtggcaatggctggaacgacgacaaatgtaatcttgccaaattctggatctgcaaaaagtccgcagcctcctgctccagggatgaagaacagtttctttctccagcccctgccaccccaaacccccctcctgcgtag

SEQ ID NO: 387 - RNA, 3126 nt, synthetic construct
  misc_feature 1..3126: note = Q9NR97
  source 1..3126: mol_type = other RNA
atggaaaacatgttccttcagtcgtcaatgctgacctgcattttcctgctaatatctggttcctgtgagttatgcgccgaagaaaatttttctagaagctatccttgtgatgagaaaaagcaaaatgactcagttattgcagagtgcagcaatcgtcgactacaggaagttccccaaacggtgggcaaatatgtgacagaactagacctgtctgataatttcatcacacacataacgaatgaatcatttcaagggctgcaaaatctcactaaaataaatctaaaccacaaccccaatgtacagcaccagaacggaaatcccggtatacaatcaaatggcttgaatatcacagacggggcattcctcaacctaaaaaacctaagggagttactgcttgaagacaaccagttaccccaaataccctctggtttgccagagtctttgacagaacttagtctaattcaaaacaatatatacaacataactaaagagggcatttcaagacttataaacttgaaaaatctctatttggcctggaactgctattttaacaaagtttgcgagaaaactaacatagaagatggagtatttgaaacgctgacaaatttggagttgctatcactatctttcaattctctttcacacgtgccacccaaactgccaagctccctacgcaaactttttctgagcaacacccagatcaaatacattagtgaagaagatttcaagggattgataaatttaacattactagatttaagcgggaactgtccgaggtgcttcaatgccccatttccatgcgtgccttgtgatggtggtgcttcaattaatatagatcgttttgcttttcaaaacttgacccaacttcgatacctaaacctctctagcacttccctcaggaagattaatgctgcctggtttaaaaatatgcctcatctgaaggtgctggatcttgaattcaactatttagtgggagaaatagcctctggggcatttttaacgatgctgccccgcttagaaatacttgacttgtcttttaactatataaaggggagttatccacagcatattaatatttccagaaacttctctaaacttttgtctctacgggcattgcatttaagaggttatgtgttccaggaactcagagaagatgatttccagcccctgatgcagcttccaaacttatcgactatcaacttgggtattaattttattaagcaaatcgatttcaaacttttccaaaatttctccaatctggaaattatttacttgtcagaaaacagaatatcaccgttggtaaaagatacccggcagagttatgcaaatagttcctcttttcaacgtcatatccggaaacgacgctcaacagattttgagtttgacccacattcgaacttttatcatttcacccgtcctttaataaagccacaatgtgctgcttatggaaaagccttagatttaagcctcaacagtattttcttcattgggccaaaccaatttgaaaatcttcctgacattgcctgtttaaatctgtctgcaaatagcaatgctcaagtgttaagtggaactgaattttcagccattcctcatgtcaaatatttggatttgacaaacaatagactagactttgataatgctagtgctcttactgaattgtccgacttggaagttctagatctcagctataattcacactatttcagaatagcaggcgtaacacatcatctagaatttattcaaaatttcacaaatctaaaagttttaaacttgagccacaacaacatttatactttaacagataagtataacctggaaagcaagtccctggtagaattagttttcagtggcaatcgccttgacattttgtggaatgatgatgacaacaggtatatctccattttcaaaggtctcaagaatctgacacgtctggatttatcccttaataggctgaagcacatcccaaatgaagcattccttaatttgccagcgagtctcactgaactacatataaatgataatatgttaaagttttttaactggacattactccagcagtttcctcgtctcgagttgcttgacttacgtggaaacaaactactctttttaactgatagcctatctgactttacatcttcccttcggacactgctgctgagtcataacaggatttcccacctaccctctggctttctttctgaagtcagtagtctgaagcacctcgatttaagttccaatctgctaaaaacaatcaacaaatccgcacttgaaactaagaccaccaccaaattatctatgttggaactacacggaaacccctttgaatgcacctgtgacattggagatttccgaagatggatggatgaacatctgaatgtcaaaattcccagactggtagatgtcatttgtgccagtcctggggatcaaagagggaagagtattgtgagtctggagctaacaacttgtgtttcagatgtcactgcagtgatattatttttcttcacgttctttatcaccaccatggttatgttggctgccctggctcaccatttgttttactgggatgtttggtttatatataatgtgtgtttagctaaggtaaaaggctacaggtctctttccacatcccaaactttctatgatgcttacatttcttatgacaccaaagatgcctctgttactgactgggtgataaatgagctgcgctaccaccttgaagagagccgagacaaaaacgttctcctttgtctagaggagagggattgggacccgggattggccatcatcgacaacctcatgcagagcatcaaccaaagcaagaaaacagtatttgttttaaccaaaaaatatgcaaaaagctggaactttaaaacagctttttacttggctttgcagaggctaatggatgagaacatggatgtgattatatttatcctgctggagccagtgttacagcattctcagtatttgaggctacggcagcggatctgtaagagctccatcctccagtggcctgacaacccgaaggcagaaggcttgttttggcaaactctgagaaatgtggtcttgactgaaaatgattcacggtataacaatatgtatgtcgattccattaagcaatactaa

SEQ ID NO: 388 - RNA, 66 nt, synthetic construct
  misc_feature 1..66: note = P16671_1_22-87
  source 1..66: mol_type = other RNA
gggctcatcgctggggctgtcattggtgctgtcctggctgtgtttggaggtattctaatgccagtt

SEQ ID NO: 389 - RNA, 81 nt, synthetic construct
  misc_feature 1..81: note = P32248_1_178-258
  source 1..81: mol_type = other RNA
ttcctccctatcatgtactccatcatttgtttcgtgggcctactgggcaatgggctggtcgtgttgacctatatctatttc

SEQ ID NO: 390 - RNA, 66 nt, synthetic construct
  misc_feature 1..66: note = P16671_2_1318-1383
  source 1..66: mol_type = other RNA
ctccttggcctgatagaaatgatcttactcagtgttggtgtggtgatgtttgttgcttttatgatt

SEQ ID NO: 391 - RNA, 63 nt, synthetic construct
  misc_feature 1..63: note = P32248_2_286-348
  source 1..63: mol_type = other RNA
tacctgctcaacctggcggtggcagacatcctcttcctcctgacccttcccttctgggcctac

SEQ ID NO: 392 - RNA, 66 nt, synthetic construct
  misc_feature 1..66: note = P32248_3_391-456
  source 1..66: mol_type = other RNA
ctcatctttgccatctacaagatgagcttcttcagtggcatgctcctacttctttgcatcagcatt

SEQ ID NO: 393 - RNA, 63 nt, synthetic construct
  misc_feature 1..63: note = P32248_4_511-573
  source 1..63: mol_type = other RNA
gtccttctcatcagcaagctgtcctgtgtgggcatctggatactagccacagtgctctccatc

SEQ ID NO: 394 - RNA, 84 nt, synthetic construct
  misc_feature 1..84: note = P32248_5_658-741
  source 1..84: mol_type = other RNA
tttatcaccatccaggtggcccagatggtgatcggctttctggtccccctgctggccatgagcttctgttaccttgtcatcatc

SEQ ID NO: 395 - RNA, 78 nt, synthetic construct
  misc_feature 1..78: note = P32248_6_790-867
  source 1..78: mol_type = other RNA
gtgatcatcgctgtggtcgtggtcttcatagtcttccagctgccctacaatggggtggtcctggcccagacggtggcc

SEQ ID NO: 396 - RNA, 54 nt, synthetic construct
  misc_feature 1..54: note = P32248_7_940-993
  source 1..54: mol_type = other RNA
ctggcctgcgtccgctgctgcgtcaaccctttcttgtacgccttcatcggcgtc

SEQ ID NO: 397 - RNA, 69 nt, synthetic construct
  misc_feature 1..69: note = A0A5B9_433-501
  source 1..69: mol_type = other RNA
accatcctctatgagatcttgctagggaaggccaccttgtatgccgtgctggtcagtgccctcgtgctg

SEQ ID NO: 398 - RNA, 69 nt, synthetic construct
  misc_feature 1..69: note = B7Z8K6_388-456
  source 1..69: mol_type = other RNA
cttgggctacgaatgctgtttgcaaagactgttgccgtcaattttctcttgactgccaagttatttttc

SEQ ID NO: 399 - RNA, 63 nt, synthetic construct
  misc_feature 1..63: note = O00206_1894-1956
  source 1..63: mol_type = other RNA
accatcattggtgtgtcggtcctcagtgtgcttgtagtatctgttgtagcagttctggtctat

SEQ ID NO: 400 - RNA, 66 nt, synthetic construct
  misc_feature 1..66: note = P01730_1189-1254
  source 1..66: mol_type = other RNA
atggccctgattgtgctggggggcgtcgccggcctcctgcttttcattgggctaggcatcttcttc

SEQ ID NO: 401 - RNA, 63 nt, synthetic construct
  misc_feature 1..63: note = P01850_453-513
  source 1..63: mol_type = other RNA
atcctgctagggaaggccaccctgtatgctgtgctggtcagcgcccttgtgttgatggccatg

SEQ ID NO: 402 - RNA, 78 nt, synthetic construct
  misc_feature 1..78: note = P07766_379-456
  source 1..78: mol_type = other RNA
gtgatgtcggtggccacaattgtcatagtggacatctgcatcactgggggcttgctgctgctggtttactactggagc

SEQ ID NO: 403 - RNA, 66 nt, synthetic construct
  misc_feature 1..66: note = P08575_1726-1791
  source 1..66: mol_type = other RNA
gcactgatagcatttctggcatttctgattattgtgacatcaatagccctgcttgttgttctctac

SEQ ID NO: 404 - RNA, 63 nt, synthetic construct
  misc_feature 1..63: note = P08637_625-687
  source 1..63: mol_type = other RNA
agggggctttttgggagtaaaaatgtgtcttcagagactgtgaacatcaccatcactcaaggt

SEQ ID NO: 405 - RNA, 81 nt, synthetic construct
  misc_feature 1..81: note = P10747_457-537
  source 1..81: mol_type = other RNA
ttttgggtgctggtggtggttggtggagtcctggcttgctatagcttgctagtaacagtggcctttattattttctgggtg

SEQ ID NO: 406 - RNA, 66 nt, synthetic construct
  misc_feature 1..66: note = P11912_432-495
  source 1..66: mol_type = other RNA
atcatcacagccgaggggatcatcctcctgttctgcgcggtggtgcctgggacgctgctgctgttc

SEQ ID NO: 407 - RNA, 66 nt, synthetic construct
  misc_feature 1..66: note = P15391_874-939
  source 1..66: mol_type = other RNA
gtctcagctgtgactttggcttatctgatcttctgcctgtgttcccttgtgggcattcttcatctt

SEQ ID NO: 408 - RNA, 63 nt, synthetic construct
  misc_feature 1..63: note = P16410_484-546
  source 1..63: mol_type = other RNA
ttcctcctctggatccttgcagcagttagttcggggttgtttttttatagctttctcctcaca

SEQ ID NO: 409 - RNA, 63 nt, synthetic construct
  misc_feature 1..63: note = P26718_154-216
  source 1..63: mol_type = other RNA
ccattttttttctgctgcttcatcgctgtagccatgggaatccgtttcattattatggtagca

SEQ ID NO: 410 - RNA, 63 nt, synthetic construct
  misc_feature 1..63: note = P30273_70-132
  source 1..63: mol_type = other RNA
ctctgctatatcctggatgccatcctgtttctgtatggaattgtcctcaccctcctctactgt

SEQ ID NO: 411 - RNA, 63 nt, synthetic construct
  misc_feature 1..63: note = P40259_478-540
  source 1..63: mol_type = other RNA
gatggtatcatcatgatccagacgctgctgatcatcctcttcatcatcgtgcctatcttcctg

SEQ ID NO: 412 - RNA, 63 nt, synthetic construct
  misc_feature 1..63: note = P42081_742-804
  source 1..63: mol_type = other RNA
tggattacagctgtacttccaacagttattatatgtgtgatggttttctgtctaattctatgg

SEQ ID NO: 413 - RNA, 63 nt, synthetic construct
  misc_feature 1..63: note = Q15762_763-825
  source 1..63: mol_type = other RNA
ggagggacagttttattgttgttgtttgttatctcaattaccaccatcattgtcattttcctt

SEQ ID NO: 414 - RNA, 63 nt, synthetic construct
  misc_feature 1..63: note = Q685J3_13180-13242
  source 1..63: mol_type = other RNA
ctcgtgggggcaggggtcgtgctgatgctgatcatcctggtagctctcctgatgctcgttttc

SEQ ID NO: 415 - RNA, 63 nt, synthetic construct
  misc_feature 1..63: note = Q9NNX6_112-174
  source 1..63: mol_type = other RNA
cttggccatggtcccctggtgctgcaactcctctccttcacgctcttggctgggctccttgtc

SEQ ID NO: 416 - RNA, 63 nt, synthetic construct
  misc_feature 1..63: note = Q9NR97_2482-2544
  source 1..63: mol_type = other RNA
gcagtgatattatttttcttcacgttctttatcaccaccatggttatgttggctgccctggct

SEQ ID NO: 417 - RNA, 48 nt, synthetic construct
  misc_feature 1..48: note = P14207_1-16
  source 1..48: mol_type = other RNA
atggtgtggaagtggatgcccctgctcctgctgctcgtctgcgtggcc

SEQ ID NO: 418 - RNA, 48 nt, synthetic construct
  misc_feature 1..48: note = O75787_1-16
  source 1..48: mol_type = other RNA
atggccgtgttcgtcgtgctgctcgccctggtggcgggcgtcctgggg

SEQ ID NO: 419 - RNA, 48 nt, synthetic construct
  misc_feature 1..48: note = P07359_1-16
  source 1..48: mol_type = other RNA
atgcccctgctcctgctgctcctgctgctcccgagccccctgcacccc

SEQ ID NO: 420 - RNA, 48 nt, synthetic construct
  misc_feature 1..48: note = P08637_1-16
  source 1..48: mol_type = other RNA
atgtggcagctgctcctgcccaccgccctgctcctgctggtgagcgcc

SEQ ID NO: 421 - RNA, 51 nt, synthetic construct
  misc_feature 1..51: note = P07237_1-17
  source 1..51: mol_type = other RNA
atgctgcgccgggccctcctgtgcctggccgtggcggccctcgtccgcgcc

SEQ ID NO: 422 - RNA, 51 nt, synthetic construct
  misc_feature 1..51: note = O60911_1-17
  source 1..51: mol_type = other RNA
atgaacctgagcctcgtgctggccgccttctgcctgggcatcgcgtccgcc

SEQ ID NO: 423 - RNA, 51 nt, synthetic construct
  misc_feature 1..51: note = P20138_1-17
  source 1..51: mol_type = other RNA
atgcccctgctcctgctgctcccgctgctgtgggccggcgccctcgcgatg

SEQ ID NO: 424 - RNA, 51 nt, synthetic construct
  misc_feature 1..51: note = P27797_1-17
  source 1..51: mol_type = other RNA
atgctgctcagcgtgcccctgctgctcggcctgctggggctcgccgtcgcc

SEQ ID NO: 425 - RNA, 54 nt, synthetic construct
  misc_feature 1..54: note = P10747_1-18
  source 1..54: mol_type = other RNA
atgctgcgcctcctgctggccctcaacctgttccccagcatccaggtgaccggc

SEQ ID NO: 426 - RNA, 54 nt, synthetic construct
  misc_feature 1..54: note = O75487_1-18
  source 1..54: mol_type = other RNA
atggcccgcttcggcctgcccgccctcctgtgcaccctggcggtgctcagcgcc

SEQ ID NO: 427 - RNA, 54 nt, synthetic construct
  misc_feature 1..54: note = P07996_1-18
  source 1..54: mol_type = other RNA
atgggcctggcctgggggctcggcgtgctgttcctgatgcacgtctgcgggacc

SEQ ID NO: 428 - RNA, 54 nt, synthetic construct
  misc_feature 1..54: note = P22748_1-18
  source 1..54: mol_type = other RNA
atgcgcatgctgctcgccctgctggccctcagcgcggcccggccctccgccagc

SEQ ID NO: 429 - RNA, 54 nt, synthetic construct
  misc_feature 1..54: note = Q15762_1-18
  source 1..54: mol_type = other RNA
atggactaccccaccctgctcctggccctgctccacgtgtaccgcgccctgtgc

SEQ ID NO: 430 - RNA, 54 nt, synthetic construct
  misc_feature 1..54: note = P30273_1-18
  source 1..54: mol_type = other RNA
atgatccccgccgtggtcctgctcctgctgctcctggtggagcaggccgcggcc

SEQ ID NO: 431 - RNA, 54 nt, synthetic construct
  misc_feature 1..54: note = P38570_1-18
  source 1..54: mol_type = other RNA
atgtggctgttccacaccctcctgtgcatcgccagcctggccctcctggcggcc

SEQ ID NO: 432 - RNA, 54 nt, synthetic construct
  misc_feature 1..54: note = Q01638_1-18
  source 1..54: mol_type = other RNA
atgggcttctggatcctggccatcctcaccatcctgatgtacagcaccgccgcg

SEQ ID NO: 433 - RNA, 54 nt, synthetic construct
  misc_feature 1..54: note = Q9NZQ7_1-18
  source 1..54: mol_type = other RNA
atgcgcatcttcgccgtgttcatcttcatgacctactggcacctcctgaacgcc

SEQ ID NO: 434 - RNA, 57 nt, synthetic construct
  misc_feature 1..57: note = P13591_1-19
  source 1..57: mol_type = other RNA
atgctgcagaccaaggacctcatctggaccctgttcttcctgggcacggccgtgagc

SEQ ID NO: 435 - RNA, 57 nt, synthetic construct
  misc_feature 1..57: note = P26842_1-19
  source 1..57: mol_type = other RNA
atggcccgcccccacccgtggtggctgtgcgtgctcggcaccctggtcgggctgagc

SEQ ID NO: 436 - RNA, 57 nt, synthetic construct
  misc_feature 1..57: note = P15391_1-19
  source 1..57: mol_type = other RNA
atgcccccgccccgcctcctgttcttcctgctgttcctcacccccatggaggtgcgg

SEQ ID NO: 437 - RNA, 57 nt, synthetic construct
  misc_feature 1..57: note = Q8NI17_1-19
  source 1..57: mol_type = other RNA
atgatgtggacctgggccctgtggatgctccccagcctgtgcaagttctccctggcc

SEQ ID NO: 438 - RNA, 57 nt, synthetic construct
  misc_feature 1..57: note = P08571_1-19
  source 1..57: mol_type = other RNA
atggagcgcgccagctgcctgctcctgctgctcctgcccctggtgcacgtctccgcc

SEQ ID NO: 439 - RNA, 57 nt, synthetic construct
  misc_feature 1..57: note = P05154_1-19
  source 1..57: mol_type = other RNA
atgcagctgttcctcctgctgtgcctcgtgctgctgagcccccagggcgcctccctc

SEQ ID NO: 440 - RNA, 57 nt, synthetic construct
  misc_feature 1..57: note = P02787_1-19
  source 1..57: mol_type = other RNA
atgcgcctggccgtgggcgccctcctggtctgcgcggtgctggggctctgcctggcc

SEQ ID NO: 441 - RNA, 57 nt, synthetic construct
  misc_feature 1..57: note = P02671_1-19
  source 1..57: mol_type = other RNA
atgttcagcatgcgcatcgtgtgcctggtcctctccgtggtgggcaccgcctggacc

SEQ ID NO: 442 - RNA, 57 nt, synthetic construct
  misc_feature 1..57: note = P04216_1-19
  source 1..57: mol_type = other RNA
atgaacctggccatcagcatcgccctcctgctgaccgtgctccaggtctcccgcggc

SEQ ID NO: 443 - RNA, 57 nt, synthetic construct
  misc_feature 1..57: note = P00747_1-19
  source 1..57: mol_type = other RNA
atggagcacaaggaggtggtcctgctcctgctgctgttcctcaagagcggccagggg

SEQ ID NO: 444 - RNA, 57 nt, synthetic construct
  misc_feature 1..57: note = P01764_1-19
  source 1..57: mol_type = other RNA
atggagttcggcctgagctggctgttcctcgtggccatcctgaagggggtccagtgc

SEQ ID NO: 445 - RNA, 57 nt, synthetic construct
  misc_feature 1..57: note = P16150_1-19
  source 1..57: mol_type = other RNA
atggccaccctgctcctgctgctcggcgtgctggtcgtgagccccgacgccctgggg

SEQ ID NO: 446 - RNA, 57 nt, synthetic construct
  misc_feature 1..57: note = Q6DN72_1-19
  source 1..57: mol_type = other RNA
atgctgctctggaccgccgtgctgctgttcgtcccctgcgtgggcaagaccgtgtgg

SEQ ID NO: 447 - RNA, 57 nt, synthetic construct
  misc_feature 1..57: note = Q01151_1-19
  source 1..57: mol_type = other RNA
atgagccgcggcctgcagctcctgctgctctcctgcgcctacagcctggcccccgcg

SEQ ID NO: 448 - RNA, 57 nt, synthetic construct
  misc_feature 1..57: note = P07093_1-19
  source 1..57: mol_type = other RNA
atgaactggcacctccccctgttcctgctggccagcgtgaccctcccgtccatctgc

SEQ ID NO: 449 - RNA, 57 nt, synthetic construct
  misc_feature 1..57: note = Q8WWQ8_1-19
  source 1..57: mol_type = other RNA
atgatgctgcagcacctcgtgatcttctgcctgggcctggtcgtgcagaacttctgc

SEQ ID NO: 450 - RNA, 60 nt, synthetic construct
  misc_feature 1..60: note = Q13291_1-20
  source 1..60: mol_type = other RNA
atggaccccaagggcctgctcagcctgaccttcgtgctgttcctctccctggccttcggg

SEQ ID NO: 451 - RNA, 60 nt, synthetic construct
  misc_feature 1..60: note = P35225_1-20
  source 1..60: mol_type = other RNA
atggccctgctcctgaccaccgtgatcgccctgacgtgcctcggcgggttcgcgagcccc

SEQ ID NO: 452 - RNA, 60 nt, synthetic construct
  misc_feature 1..60: note = P25942_1-20
  source 1..60: mol_type = other RNA
atggtgcgcctgcccctccagtgcgtcctgtggggctgcctgctcaccgccgtgcacccg

SEQ ID NO: 453 - RNA, 60 nt, synthetic construct
  misc_feature 1..60: note = P52803_1-20
  source 1..60: mol_type = other RNA
atgctgcacgtggagatgctcaccctggtcttcctggtgctctggatgtgcgtgttcagc

SEQ ID NO: 454 - RNA, 60 nt, synthetic construct
  misc_feature 1..60: note = Q15116_1-20
  source 1..60: mol_type = other RNA
atgcagatcccccaggccccgtggcccgtggtctgggccgtgctgcagctcggctggcgc

SEQ ID NO: 455 - RNA, 60 nt, synthetic construct
  misc_feature 1..60: note = P05556_1-20
  source 1..60: mol_type = other RNA
atgaacctgcagcccatcttctggatcggcctcatcagctccgtgtgctgcgtcttcgcc

SEQ ID NO: 456 - RNA, 60 nt, synthetic construct
  misc_feature 1..60: note = Q12891_1-20
  source 1..60: mol_type = other RNA
atgcgcgccggccccgggccgaccgtgaccctggccctcgtcctggcggtggcctgggcc

SEQ ID NO: 457 - RNA, 60 nt, synthetic construct
  misc_feature 1..60: note = Q8IV16_1-20
  source 1..60: mol_type = other RNA
atgaaggccctgggcgccgtgctcctggcgctgctcctgtgcgggcgccccggccggggg

SEQ ID NO: 458 - RNA, 60 nt, synthetic construct
  misc_feature 1..60: note = Q03167_1-20
  source 1..60: mol_type = other RNA
atgaccagccactacgtgatcgccatcttcgccctgatgtccagctgcctcgcgaccgcc

SEQ ID NO: 459 - RNA, 60 nt, synthetic construct
  misc_feature 1..60: note = Q14246_1-20
  source 1..60: mol_type = other RNA
atgcgcggcttcaacctgctcctgttctgggggtgctgcgtgatgcacagctgggagggc

SEQ ID NO: 460 - RNA, 60 nt, synthetic construct
  misc_feature 1..60: note = P16871_1-20
  source 1..60: mol_type = other RNA
atgaccatcctgggcaccacgttcgggatggtgttcagcctcctgcaggtcgtgtccggc

SEQ ID NO: 461 - RNA, 60 nt, synthetic construct
  misc_feature 1..60: note = P61769_1-20
  source 1..60: mol_type = other RNA
atgagccgctccgtggccctggccgtcctcgcgctgctgagcctctccggcctggaggcc

SEQ ID NO: 462 - RNA, 60 nt, synthetic construct
  misc_feature 1..60: note = Q9Y6W8_1-20
  source 1..60: mol_type = other RNA
atgaagagcggcctgtggtacttcttcctcttctgcctgcgcatcaaggtgctgaccggg

SEQ ID NO: 463 - RNA, 63 nt, synthetic construct
  misc_feature 1..63: note = P10966_1-21
  source 1..63: mol_type = other RNA
atgcgcccccggctgtggctcctgctggccgcccagctcaccgtgctgcacggcaacagcgtc

SEQ ID NO: 464 - RNA, 63 nt, synthetic construct
  misc_feature 1..63: note = Q9BZW8_1-21
  source 1..63: mol_type = other RNA
atgctgggccaggtggtcaccctcatcctgctgctcctgctgaaggtgtaccaggggaagggc

SEQ ID NO: 465 - RNA, 63 nt, synthetic construct
  misc_feature 1..63: note = P02778_1-21
  source 1..63: mol_type = other RNA
atgaaccagaccgccatcctgatctgctgcctcatcttcctgaccctgagcggcatccagggg

SEQ ID NO: 466 - RNA, 63 nt, synthetic construct
  misc_feature 1..63: note = P18564_1-21
  source 1..63: mol_type = other RNA
atgggcatcgagctgctctgcctgttcttcctgttcctcgggcgcaacgaccacgtgcagggc

SEQ ID NO: 467 - RNA, 63 nt, synthetic construct
  misc_feature 1..63: note = O14525_1-21
  source 1..63: mol_type = other RNA
atggccctggccggcctctgcgcgctgctggcctgctgctgggggcccgccgccgtgctcgcc

SEQ ID NO: 468 - RNA, 63 nt, synthetic construct
  misc_feature 1..63: note = P01130_1-21
  source 1..63: mol_type = other RNA
atgggcccctgggggtggaagctgcgctggaccgtggccctcctgctggccgcggccggcacc

SEQ ID NO: 469 - RNA, 63 nt, synthetic construct
  misc_feature 1..63: note = P01732_1-21
  source 1..63: mol_type = other RNA
atggccctgcccgtgaccgccctcctgctgccgctcgcgctgctgctccacgccgcccgcccc

SEQ ID NO: 470 - RNA, 63 nt, synthetic construct
  misc_feature 1..63: note = P48061_1-21
  source 1..63: mol_type = other RNA
atgaacgccaaggtggtcgtggtgctggtcctcgtgctgaccgccctgtgcctcagcgacggc

SEQ ID NO: 471 - RNA, 63 nt, synthetic construct
  misc_feature 1..63: note = P01589_1-21
  source 1..63: mol_type = other RNA
atggacagctacctgctcatgtggggcctgctgaccttcatcatggtgcccgggtgccaggcc

SEQ ID NO: 472 - RNA, 63 nt, synthetic construct
  misc_feature 1..63: note = Q86T13_1-21
  source 1..63: mol_type = other RNA
atgcgccccgccttcgccctgtgcctcctgtggcaggcgctgtggccgggccccgggggcggg

SEQ ID NO: 473 - RNA, 63 nt, synthetic construct
  misc_feature 1..63: note = Q5DID0_1-21
  source 1..63: mol_type = other RNA
atgctgcgcaccagcggcctcgccctgctggccctcgtgtccgcggtcgggcccagccaggcc

SEQ ID NO: 474 - RNA, 66 nt, synthetic construct
  misc_feature 1..66: note = P40189_1-22
  source 1..66: mol_type = other RNA
atgctgaccctccagacctggctggtgcaggccctgttcatcttcctcacgaccgagagcaccggc

SEQ ID NO: 475 - RNA, 66 nt, synthetic construct
  misc_feature 1..66: note = Q86YL7_1-22
  source 1..66: mol_type = other RNA
atgtggaaggtgagcgccctcctgttcgtcctgggctccgccagcctgtgggtgctcgcggagggg

SEQ ID NO: 476 - RNA, 66 nt, synthetic construct
  misc_feature 1..66: note = P55075_1-22
  source 1..66: mol_type = other RNA
atgggcagcccccgctccgccctgagctgcctcctgctgcacctcctggtgctgtgcctccaggcc

SEQ ID NO: 477 - RNA, 66 nt, synthetic construct
  misc_feature 1..66: note = Q30201_1-22
  source 1..66: mol_type = other RNA
atgggcccccgcgcccggccggccctgctcctgctgatgctcctgcagaccgcggtgctgcagggg

SEQ ID NO: 478 - RNA, 66 nt, synthetic construct
  misc_feature 1..66: note = P07766_1-22
  source 1..66: mol_type = other RNA
atgcagagcggcacccactggcgcgtgctggggctctgcctgctgtccgtcggcgtgtgggggcag

SEQ ID NO: 479 - RNA, 66 nt, synthetic construct
  misc_feature 1..66: note = P18827_1-22
  source 1..66: mol_type = other RNA
atgcgccgggccgccctgtggctctggctgtgcgcgctggccctcagcctgcagcccgccctgccg

SEQ ID NO: 480 - RNA, 66 nt, synthetic construct
  misc_feature 1..66: note = P55290_1-22
  source 1..66: mol_type = other RNA
atgcagccccgcaccccgctggtgctctgcgtcctgctgagccaggtgctcctgctgacctccgcc

SEQ ID NO: 481 - RNA, 66 nt, synthetic construct
  misc_feature 1..66: note = P37173_1-22
  source 1..66: mol_type = other RNA
atgggccgcgggctgctccggggcctgtggcccctgcacatcgtgctctggacccgcatcgccagc

SEQ ID NO: 482 - RNA, 66 nt, synthetic construct
  misc_feature 1..66: note = Q07325_1-22
  source 1..66: mol_type = other RNA
atgaagaagagcggcgtgctgttcctcctggggatcatcctgctcgtcctgatcggcgtgcagggg

SEQ ID NO: 483 - RNA, 66 nt, synthetic construct
  misc_feature 1..66: note = P04156_1-22
  source 1..66: mol_type = other RNA
atggccaacctgggctgctggatgctcgtgctgttcgtcgccacctggagcgacctggggctctgc

SEQ ID NO: 484 - RNA, 66 nt, synthetic construct
  misc_feature 1..66: note = P31785_1-22
  source 1..66: mol_type = other RNA
atgctgaagcccagcctcccgttcacctccctgctgttcctccagctgcccctgctcggcgtgggg

SEQ ID NO: 485 - RNA, 69 nt, synthetic construct
  misc_feature 1..69: note = P01579_1-23
  source 1..69: mol_type = other RNA
atgaagtacaccagctacatcctggccttccagctctgcatcgtgctgggctccctggggtgctactgc

SEQ ID NO: 486 - RNA, 69 nt, synthetic construct
  misc_feature 1..69: note = P23229_1-23
  source 1..69: mol_type = other RNA
atggccgccgcgggccagctgtgcctcctgtacctgagcgccgggctcctgtcccgcctgggcgccgcc

SEQ ID NO: 487 - RNA, 69 nt, synthetic construct
  misc_feature 1..69: note = O60494_1-23
  source 1..69: mol_type = other RNA
atgatgaacatgagcctgcccttcctctggtccctgctgaccctcctgatcttcgccgaggtgaacggc

SEQ ID NO: 488 - RNA, 69 nt, synthetic construct
  misc_feature 1..69: note = P08575_1-23
  source 1..69: mol_type = other RNA
atgtacctgtggctcaagctgctggccttcggcttcgccttcctcgacaccgaggtgttcgtcaccggg

SEQ ID NO: 489 - RNA, 69 nt, synthetic construct
  misc_feature 1..69: note = Q8IWY4_1-23
  source 1..69: mol_type = other RNA
atgggcgccgccgcggtgcgctggcacctgtgcgtcctcctggccctggggacccggggccgcctcgcc

SEQ ID NO: 490 - RNA, 69 nt, synthetic construct
  misc_feature 1..69: note = Q08431_1-23
  source 1..69: mol_type = other RNA
atgccccgcccgcggctgctcgccgccctgtgcggcgcgctgctctgcgcccccagcctgctggtggcc

SEQ ID NO: 491 - RNA, 69 nt, synthetic construct
  misc_feature 1..69: note = Q99665_1-23
  source 1..69: mol_type = other RNA
atggcccacaccttccgcggctgcagcctggccttcatgttcatcatcacctggctcctgatcaaggcg

SEQ ID NO: 492 - RNA, 69 nt, synthetic construct
  misc_feature 1..69: note = Q6Q8B3_1-23
  source 1..69: mol_type = other RNA
atgagcgccccccgcctgctcatctccatcatcatcatggtgagcgcctccagctccagctgcatgggc

SEQ ID NO: 493 - RNA, 69 nt, synthetic construct
  misc_feature 1..69: note = Q07011_1-23
  source 1..69: mol_type = other RNA
atgggcaacagctgctacaacatcgtggccaccctgctcctggtcctgaacttcgagcgcacccggtcc

SEQ ID NO: 494 - RNA, 69 nt, synthetic construct
  misc_feature 1..69: note = Q8NHL6_1-23
  source 1..69: mol_type = other RNA
atgacccccatcctgaccgtgctcatctgcctgggcctgagcctcgggccgcgcacgcacgtccaggcc

SEQ ID NO: 495 - RNA, 69 nt, synthetic construct
  misc_feature 1..69: note = P36894_1-23
  source 1..69: mol_type = other RNA
atgccccagctgtacatctacatccgcctcctgggcgcctacctgttcatcatcagccgggtgcagggg

SEQ ID NO: 496 - RNA, 69 nt, synthetic construct
  misc_feature 1..69: note = Q16552_1-23
  source 1..69: mol_type = other RNA
atgacccccggcaagaccagcctggtgtccctcctgctgctcctgagcctggaggccatcgtcaaggcc

SEQ ID NO: 497 - RNA, 69 nt, synthetic construct
  misc_feature 1..69: note = P42081_1-23
  source 1..69: mol_type = other RNA
atggacccccagtgcaccatgggcctgagcaacatcctcttcgtgatggccttcctgctgtccggggcc

SEQ ID NO: 498 - RNA, 69 nt, synthetic construct
  misc_feature 1..69: note = P43121_1-23
  source 1..69: mol_type = other RNA
atgggcctgccccgcctcgtgtgcgccttcctgctggccgcgtgctgctgctgcccgcgggtcgccggg

SEQ ID NO: 499 - RNA, 69 nt, synthetic construct
  misc_feature 1..69: note = O00206_1-23
  source 1..69: mol_type = other RNA
atgatgagcgcctcccgcctggccggcaccctcatccccgcgatggccttcctgagctgcgtgcggccg

SEQ ID NO: 500 - RNA, 69 nt, synthetic construct
  misc_feature 1..69: note = P42701_1-23
  source 1..69: mol_type = other RNA
atggagcccctggtgacctgggtcgtgccgctcctgttcctgttcctcctgagccgccagggcgccgcc

SEQ ID NO: 501 - RNA, 72 nt, synthetic construct
  misc_feature 1..72: note = P06729_1-24
  source 1..72: mol_type = other RNA
atgagcttcccctgcaagttcgtggcctccttcctgctcatcttcaacgtcagctccaagggcgccgtgagc

SEQ ID NO: 502 - RNA, 72 nt, synthetic construct
  misc_feature 1..72: note = P15328_1-24
  source 1..72: mol_type = other RNA
atggcccagcgcatgaccacccagctgctcctgctgctcgtgtgggtcgccgtggtgggcgaggcgcagacg

SEQ ID NO: 503 - RNA, 72 nt, synthetic construct
  misc_feature 1..72: note = P05112_1-24
  source 1..72: mol_type = other RNA
atgggcctgaccagccagctcctgcccccgctgttcttcctcctggcctgcgccgggaacttcgtgcacggc

SEQ ID NO: 504 - RNA, 72 nt, synthetic construct
  misc_feature 1..72: note = P06127_1-24
  source 1..72: mol_type = other RNA
atgcccatgggcagcctgcagccgctcgccaccctgtacctgctcgggatgctggtggcctcctgcctgggc

SEQ ID NO: 505 - RNA, 72 nt, synthetic construct
  misc_feature 1..72: note = P32248_1-24
  source 1..72: mol_type = other RNA
atggacctgggcaagcccatgaagagcgtgctcgtcgtggccctgctggtgatcttccaggtctgcctctgc

SEQ ID NO: 506 - RNA, 72 nt, synthetic construct
  misc_feature 1..72: note = Q7Z7D3_1-24
  source 1..72: mol_type = other RNA
atggccagcctgggccagatcctcttctggtccatcatcagcatcatcatcatcctggccggggcgatcgcc

SEQ ID NO: 507 - RNA, 72 nt, synthetic construct
  misc_feature 1..72: note = P54756_1-24
  source 1..72: mol_type = other RNA
atgcgcggcagcgggccccggggcgccgggcgccggcgcccgccctccggcgggggcgacacccccatcacc

SEQ ID NO: 508 - RNA, 72 nt, synthetic construct
  misc_feature 1..72: note = Q92823_1-24
  source 1..72: mol_type = other RNA
atgcagctgaagatcatgcccaagaagaagcgcctcagcgccggccgggtgccgctgatcctgttcctctgc

SEQ ID NO: 509 - RNA, 72 nt, synthetic construct
  misc_feature 1..72: note = P19320_1-24
  source 1..72: mol_type = other RNA
atgcccggcaagatggtggtcatcctgggggccagcaacatcctctggatcatgttcgccgcgtcccaggcc

SEQ ID NO: 510 - RNA, 72 nt, synthetic construct
  misc_feature 1..72: note = Q86UN2_1-24
  source 1..72: mol_type = other RNA
atgctgcgcaagggctgctgcgtggagctcctgctgctcctggtcgccgccgagctgcccctcgggggcggg

SEQ ID NO: 511 - RNA, 75 nt, synthetic construct
  misc_feature 1..75: note = P33151_1-25
  source 1..75: mol_type = other RNA
atgcagcgcctgatgatgctcctggccaccagcggcgcctgcctggggctcctggcggtggccgccgtcgccgcc

SEQ ID NO: 512 - RNA, 75 nt, synthetic construct
  misc_feature 1..75: note = P17813_1-25
  source 1..75: mol_type = other RNA
atggaccgcggcaccctgcccctcgccgtggccctgctgctcgcgagctgctccctgagcccgacctccctggcc

SEQ ID NO: 513 - RNA, 75 nt, synthetic construct
  misc_feature 1..75: note = P25445_1-25
  source 1..75: mol_type = other RNA
atgctgggcatctggaccctcctgcccctggtgctcaccagcgtcgcccgcctgtccagcaagtccgtgaacgcc

SEQ ID NO: 514 - RNA, 75 nt, synthetic construct
  misc_feature 1..75: note = P01730_1-25
  source 1..75: mol_type = other RNA
atgaaccgcggcgtgcccttccggcacctcctgctggtcctgcagctcgccctgctgccggccgcgacccagggg

SEQ ID NO: 515 - RNA, 75 nt, synthetic construct
  misc_feature 1..75: note = Q685J3_1-25
  source 1..75: mol_type = other RNA
atgccccgccccggcaccatggccctgtgcctcctgaccctggtgctcagcctgctgccgccccaggccgcggcc

SEQ ID NO: 516 - RNA, 75 nt, synthetic construct
  misc_feature 1..75: note = P17787_1-25
  source 1..75: mol_type = other RNA
atggcccgccggtgcggccccgtggccctgctcctggggttcggcctgctccgcctgtgcagcggggtctggggc

SEQ ID NO: 517 - RNA, 75 nt, synthetic construct
  misc_feature 1..75: note = Q6UQ28_1-25
  source 1..75: mol_type = other RNA
atggccgtgttccacgacatgctgctccagcccctgggcatgttcctgtgcctcagcctgcagctgtccagcgcc

SEQ ID NO: 518 - RNA, 75 nt, synthetic construct
  misc_feature 1..75: note = P13987_1-25
  source 1..75: mol_type = other RNA
atgggcatccagggcgggagcgtgctgttcgggctcctgctggtcctcgccgtgttctgccactccggccacagc

SEQ ID NO: 519 - RNA, 75 nt, synthetic construct
  misc_feature 1..75: note = P10721_1-25
  source 1..75: mol_type = other RNA
atgcgcggcgcccgcggggcctgggacttcctgtgcgtgctcctgctgctcctgcgggtccagaccggcagctcc

SEQ ID NO: 520 - RNA, 75 nt, synthetic construct
  misc_feature 1..75: note = P12319_1-25
  source 1..75: mol_type = other RNA
atggcccccgccatggagagcccgaccctgctctgcgtggcgctgctgttcttcgcccccgacggcgtcctcgcc

SEQ ID NO: 521 - RNA, 78 nt, synthetic construct
  misc_feature 1..78: note = Q9BZR6_1-26
  source 1..78: mol_type = other RNA
atgaagcgcgccagcgccggcgggtcccggctgctcgcgtgggtgctgtggctgcaggcctggcaggtcgccgccccc

SEQ ID NO: 522 - RNA, 78 nt, synthetic construct
  misc_feature 1..78: note = P25063_1-26
  source 1..78: mol_type = other RNA
atgggccgcgccatggtggcccggctggggctcggcctgctgctcctggcgctgctcctgcccacccagatctacagc

SEQ ID NO: 523 - RNA, 78 nt, synthetic construct
  misc_feature 1..78: note = Q9NR97_1-26
  source 1..78: mol_type = other RNA
atggagaacatgttcctgcagagctccatgctgacctgcatcttcctcctgatcagcggctcctgcgagctctgcgcc

SEQ ID NO: 524 - RNA, 78 nt, synthetic construct
  misc_feature 1..78: note = Q8N131_1-26
  source 1..78: mol_type = other RNA
atgggcctgggggcccgcggcgcctgggcggccctcctgctggggaccctccaggtgctggccctgctcggcgccgcc

SEQ ID NO: 525 - RNA, 78 nt, synthetic construct
  misc_feature 1..78: note = P49771_1-26
  source 1..78: mol_type = other RNA
atgaccgtgctggcccccgcctggagcccgaccacgtacctcctgctgctcctgctgctctccagcggcctgtccggg

SEQ ID NO: 526 - RNA, 78 nt, synthetic construct
  misc_feature 1..78: note = P02679_1-26
  source 1..78: mol_type = other RNA
atgagctggtccctgcacccccgcaacctcatcctgtacttctacgccctgctcttcctgagctccacctgcgtggcc

SEQ ID NO: 527 - RNA, 78 nt, synthetic construct
  misc_feature 1..78: note = P14784_1-26
  source 1..78: mol_type = other RNA
atggccgcccccgcgctgagctggcgcctcccgctgctgatcctcctgctgcccctcgccacctcctgggccagcgcc

SEQ ID NO: 528 - RNA, 81 nt, synthetic construct
  misc_feature 1..81: note = P05362_1-27
  source 1..81: mol_type = other RNA
atggcccccagctccccgcgccccgccctgcccgcgctcctggtgctgctcggcgccctgttccccgggccgggcaacgcc

SEQ ID NO: 529 - RNA, 81 nt, synthetic construct
  misc_feature 1..81: note = Q13740_1-27
  source 1..81: mol_type = other RNA
atggagagcaagggcgcctccagctgccgcctcctgttctgcctgctgatctccgccaccgtgttccggcccgggctcggc

SEQ ID NO: 530 - RNA, 84 nt, synthetic construct
  misc_feature 1..84: note = Q13443_1-28
  source 1..84: mol_type = other RNA
atgggcagcggggcccgcttcccctccggcaccctgcgggtgcgctggctcctgctgctcgggctggtcggcccggtgctgggg

SEQ ID NO: 531 - RNA, 84 nt, synthetic construct
  misc_feature 1..84: note = P14151_1-28
  source 1..84: mol_type = other RNA
atgatcttcccctggaagtgccagagcacccagcgcgacctgtggaacatcttcaagctctggggctggaccatgctgtgctgc

SEQ ID NO: 532 - RNA, 84 nt, synthetic construct
  misc_feature 1..84: note = P56199_1-28
  source 1..84: mol_type = other RNA
atggcgccccgcccgcgggcccgccccggcgtggccgtcgcctgctgctggctgctcaccgtggtgctgcggtgctgcgtcagc

SEQ ID NO: 533 - RNA, 84 nt, synthetic construct
  misc_feature 1..84: note = P11279_1-28
  source 1..84: mol_type = other RNA
atggccgcccccggcagcgcgcgccggccgctgctcctgctgctcctgctgctcctgctggggctcatgcactgcgcctccgcc

SEQ ID NO: 534 - RNA, 84 nt, synthetic construct
  misc_feature 1..84: note = P40259_1-28
  source 1..84: mol_type = other RNA
atggcccgcctggccctcagccccgtgccgtcccactggatggtcgcgctgctgctcctgctgagcgccgagcccgtgcccgcc

SEQ ID NO: 535 - RNA, 84 nt, synthetic construct
  misc_feature 1..84: note = P43681_1-28
  source 1..84: mol_type = other RNA
atggagctgggcgggcccggcgccccgcgcctcctgccccccctgctcctgctgctcgggaccggcctgctgcgggccagctcc

SEQ ID NO: 536 - RNA, 84 nt, synthetic construct
  misc_feature 1..84: note = P18627_1-28
  source 1..84: mol_type = other RNA
atgtgggaggcccagttcctgggcctcctgttcctgcagcccctctgggtggccccggtcaagcccctgcagcccggggcggag

SEQ ID NO: 537 - RNA, 84 nt, synthetic construct
  misc_feature 1..84: note = Q5ZPR3_1-28
  source 1..84: mol_type = other RNA
atgctgcgccggcgcggcagccccgggatgggcgtgcacgtcggggccgccctcggcgcgctgtggttctgcctgaccggggcc

SEQ ID NO: 538 - RNA, 84 nt, synthetic construct
  misc_feature 1..84: note = P23415_1-28
  source 1..84: mol_type = other RNA
atgtacagcttcaacaccctgcgcctctacctgtgggagaccatcgtgttcttctccctggccgccagcaaggaggcggaggcc

SEQ ID NO: 539 - RNA, 84 nt, synthetic construct
  misc_feature 1..84: note = Q8TD46_1-28
  source 1..84: mol_type = other RNA
atgctgtgcccctggcgcaccgccaacctcggcctgctgctcatcctgaccatcttcctggtggccgcgagctccagcctctgc

SEQ ID NO: 540 - RNA, 87 nt, synthetic construct
  misc_feature 1..87: note = P17301_1-29
  source 1..87: mol_type = other RNA
atgggccccgagcgcaccggggccgccccgctgcccctcctgctggtgctcgcgctgagccagggcatcctgaactgctgcctcgcc

SEQ ID NO: 541 - RNA, 87 nt, synthetic construct
  misc_feature 1..87: note = P12821_1-29
  source 1..87: mol_type = other RNA
atgggcgccgccagcgggcgccggggccccgggctgctcctgccgctgcccctcctgctgctcctgccgccccagcccgcgctggcc

SEQ ID NO: 542 - RNA, 87 nt, synthetic construct
  misc_feature 1..87: note = Q14118_1-29
  source 1..87: mol_type = other RNA
atgcgcatgagcgtgggcctgtccctcctgctgcccctctgggggcggaccttcctgctgctcctgagcgtcgtgatggcccagtcc

SEQ ID NO: 543 - RNA, 87 nt, synthetic construct
  misc_feature 1..87: note = P05231_1-29
  source 1..87: mol_type = other RNA
atgaacagcttctccaccagcgccttcggccccgtggccttctccctggggctcctgctggtcctcccggcggccttccccgccccc

SEQ ID NO: 544 - RNA, 87 nt, synthetic construct
  misc_feature 1..87: note = O00602_1-29
  source 1..87: mol_type = other RNA
atggagctgagcggcgccaccatggcccgcgggctcgcggtgctgctggtcctcttcctgcacatcaagaacctgcccgcccaggcc

SEQ ID NO: 545 - RNA, 87 nt, synthetic construct
  misc_feature 1..87: note = Q9Y6Q6_1-29
  source 1..87: mol_type = other RNA
atggcgccccgcgcccggcgccggcgcccgctgttcgccctcctgctgctctgcgccctgctggcccggctccaggtggccctgcag

SEQ ID NO: 546 - RNA, 87 nt, synthetic construct
  misc_feature 1..87: note = Q9ULI3_1-29
  source 1..87: mol_type = other RNA
atggccagcccccgcgcctcccggtggcccccgcccctgctcctgctgctcctgcccctgctcctgctgccgcccgcggcccccggc

SEQ ID NO: 547 - RNA, 90 nt, synthetic construct
  misc_feature 1..90: note = Q8NBP7_1-30
  source 1..90: mol_type = other RNA
atgggcaccgtgagctcccgccggagctggtggcccctgccgctcctgctgctcctgctgctcctgctggggcccgccggcgcccgcgcg

SEQ ID NO: 548 - RNA, 90 nt, synthetic construct
  misc_feature 1..90: note = P02675_1-30
  source 1..90: mol_type = other RNA
atgaagcgcatggtgagctggtccttccacaagctgaagaccatgaagcacctcctgctgctcctgctgtgcgtgttcctcgtcaagagc

SEQ ID NO: 549 - RNA, 90 nt, synthetic construct
  misc_feature 1..90: note = P06756_1-30
  source 1..90: mol_type = other RNA
atggccttcccgccccgccggcgcctgcggctcggcccccgcgggctgcccctgctcctgagcggcctgctcctgcccctgtgccgggcc

SEQ ID NO: 550 - RNA, 93 nt, synthetic construct
  misc_feature 1..93: note = O60609_1-31
  source 1..93: mol_type = other RNA
atggtgcgccccctgaacccccggcccctcccgcccgtcgtgctgatgctgctcctgctgctcccgcccagccccctgcccctggccgccggc

SEQ ID NO: 551 - RNA, 93 nt, synthetic construct
  misc_feature 1..93: note = P50895_1-31
  source 1..93: mol_type = other RNA
atggagcccccggacgcccccgcccaggcgcgcggcgcgccccggctgctcctgctggccgtgctcctggccgcccaccccgacgcccaggcc

SEQ ID NO: 552 - RNA, 93 nt, synthetic construct
  misc_feature 1..93: note = P28906_1-31
  source 1..93: mol_type = other RNA
atgctggtgcgccggggcgcccgcgccgggccccggatgccgcgcggctggaccgcgctctgcctgctgagcctcctgccctccgggttcatg

SEQ ID NO: 553 - RNA, 93 nt, synthetic construct
  misc_feature 1..93: note = P08514_1-31
  source 1..93: mol_type = other RNA
atggcccgcgccctgtgccccctccaggcgctgtggctgctcgagtgggtgctgctgctcctgggcccctgcgccgccccgcccgcctgggcc

SEQ ID NO: 554 - RNA, 93 nt, synthetic construct
  misc_feature 1..93: note = P00742_1-31
  source 1..93: mol_type = other RNA
atgggccgccccctgcacctcgtgctgctgagcgcctccctcgccgggctgctgctcctgggcgagagcctgttcatccggcgcgagcaggcg

SEQ ID NO: 555 - RNA, 96 nt, synthetic construct
  misc_feature 1..96: note = P26006_1-32
  source 1..96: mol_type = other RNA
atgggccccgggcccagccgcgccccgcgggcgccccgcctgatgctctgcgccctggccctgatggtggccgccggcgggtgcgtcgtgtccgcc

SEQ ID NO: 556 - RNA, 96 nt, synthetic construct
  misc_feature 1..96: note = P13726_1-32
  source 1..96: mol_type = other RNA
atggagacccccgcctggccgcgcgtgccccggcccgagaccgccgtcgcgcgcacgctgctcctgggctgggtgttcgcccaggtggccggggcc

SEQ ID NO: 557 - RNA, 96 nt, synthetic construct
  misc_feature 1..96: note = P11912_1-32
  source 1..96: mol_type = other RNA
atgcccggcgggccgggcgtgctgcaggccctccccgccaccatcttcctgctgttcctcctgagcgcggtctacctggggcccggctgccaggcc

SEQ ID NO: 558 - RNA, 96 nt, synthetic construct
  misc_feature 1..96: note = Q9H6X2_1-32
  source 1..96: mol_type = other RNA
atggccaccgccgagcgccgggcgctgggcatcgggttccagtggctcagcctggccaccctggtgctcatctgcgccggccagggcgggcgccgg

SEQ ID NO: 559 - RNA, 99 nt, synthetic construct
  misc_feature 1..99: note = Q8IWK6_1-33
  source 1..99: mol_type = other RNA
atggagcccccgggccgccggcgcgggcgggcccagccccccctgctcctgcccctgagcctcctggccctgctcgcgctgctgggcgggggcgggggc

SEQ ID NO: 560 - RNA, 99 nt, synthetic construct
  misc_feature 1..99: note = P58335_1-33
  source 1..99: mol_type = other RNA
atggtggccgagcgcagccccgcccggtccccgggcagctggctgttccccgggctctggctgctggtcctctccggccccgggggcctgctgcgcgcg

SEQ ID NO: 561 - RNA, 102 nt, synthetic construct
  misc_feature 1..102: note = P06731_1-34
  source 1..102: mol_type = other RNA
atggagagcccctccgccccgccccaccgctggtgcatcccctggcagcggctgctcctgaccgccagcctgctcaccttctggaacccgcccacgaccgcg

SEQ ID NO: 562 - RNA, 102 nt, synthetic construct
  misc_feature 1..102: note = P33681_1-34
  source 1..102: mol_type = other RNA
atgggccacacccgccggcaggggaccagcccctccaagtgcccgtacctgaacttcttccagctcctggtgctggccggcctcagccacttctgctccggg

SEQ ID NO: 563 - RNA, 105 nt, synthetic construct
  misc_feature 1..105: note = P38567_1-35
  source 1..105: mol_type = other RNA
atgggcgtgctgaagttcaagcacatcttcttccgcagcttcgtcaagtccagcggggtgtcccagatcgtgttcaccttcctcctgatcccctgctgcctgacc

SEQ ID NO: 564 - RNA, 105 nt, synthetic construct
  misc_feature 1..105: note = P16410_1-35
  source 1..105: mol_type = other RNA
atggcctgcctgggcttccagcgccacaaggcccagctcaacctggcgacccggacctggccctgcacgctcctgttcttcctgctgttcatcccggtgttctgc

SEQ ID NO: 565 - RNA, 111 nt, synthetic construct
  misc_feature 1..111: note = P15814_1-37
  source 1..111: mol_type = other RNA
atgcgccccggcaccgggcagggcgggctggaggccccgggcgagcccgggcccaacctccggcagcgctggcccctgctgctcctgggcctggccgtggtcacccacggc

SEQ ID NO: 566 - RNA, 114 nt, synthetic construct
  misc_feature 1..114: note = Q92956_1-38
  source 1..114: mol_type = other RNA
atggagcccccgggcgactgggggcccccgccctggcgcagcacccccaagaccgacgtgctgcggctcgtcctgtacctgacgttcctcggcgccccctgctacgcccccgcg

SEQ ID NO: 567 - RNA, 123 nt, synthetic construct
  misc_feature 1..123: note = Q86VB7_1-41
  source 1..123: mol_type = other RNA
atgagcaagctgcgcatggtgctcctggaggactccggcagcgccgacttccggcgccacttcgtcaacctgtcccccttcaccatcaccgtggtgctcctgctgagcgcctgcttcgtcacg

SEQ ID NO: 568 - RNA, 123 nt, synthetic construct
  misc_feature 1..123: note = P08648_1-41
  source 1..123: mol_type = other RNA
atgggctcccgcacccccgagagccccctgcacgccgtgcagctccggtgggggccccgccggcgcccgcccctgctgcccctcctgctgctcctgctgcccccgccgccccgggtcggcggg

SEQ ID NO: 569 - RNA, 123 nt, synthetic construct
  misc_feature 1..123: note = P16109_1-41
  source 1..123: mol_type = other RNA
atggccaactgccagatcgccatcctgtaccagcgcttccagcgggtggtcttcggcatcagccagctcctgtgcttctccgcgctgatcagcgagctcaccaaccagaaggaggtggccgcc

SEQ ID NO: 570 - RNA, 132 nt, synthetic construct
  misc_feature 1..132: note = O75326_1-44
  source 1..132: mol_type = other RNA
atgaccccgcccccgcccggccgcgccgcccccagcgcgccccgggcccgcgtgcccgggccgcccgcccggctgggcctccccctgcgcctgcggctcctgctgctcctgtgggccgccgcggcctccgcc

SEQ ID NO: 571 - RNA, 135 nt, synthetic construct
  misc_feature 1..135: note = Q8N2Q7_1-45
  source 1..135: mol_type = other RNA
atggccctgccccgctgcacctggccgaactacgtgtggcgggccgtcatggcctgcctcgtgcaccgcggcctgggggcgcccctgaccctctgcatgctgggctgcctgctccaggccgggcacgtgctgagc

SEQ ID NO: 572 - RNA, 138 nt, synthetic construct
  misc_feature 1..138: note = Q86UN3_1-46
  source 1..138: mol_type = other RNA
atgctgcccggcctccgccggctgctgcaggccccggccagcgcgtgcctcctgctgatgctcctggccctgcccctcgccgccccctcctgccccatgctgtgcacctgctacagctccccgcccaccgtgagctgc

SEQ ID NO: 573 - RNA, 540 nt, synthetic construct
  misc_feature 1..540: note = A0A5B9
  source 1..540: mol_type = other RNA
atggacctgaagaacgtgttcccgcccgaggtcgccgtgttcgagcccagcgaggccgagatctcccacacccagaaggcgaccctcgtgtgcctggccacgggcttctaccccgaccacgtcgagctgagctggtgggtgaacgggaaggaggtgcactccggcgtcagcaccgacccccagccgctcaaggagcagcccgccctgaacgactcccgctactgcctgagctcccggctccgcgtgagcgccaccttctggcagaacccccggaaccacttccgctgccaggtgcagttctacgggctgtccgagaacgacgagtggacccaggaccgggccaagcccgtcacgcagatcgtgagcgcggaggcctggggccgcgccgactgcgggttcacctccgagagctaccagcagggcgtgctgtccgccaccatcctctacgagatcctgctgggcaaggcgaccctctacgccgtcctggtgagcgccctggtgctcatggccatggtcaagcggaaggactcccgcgggtga

SEQ ID NO: 574 - RNA, 465 nt, synthetic construct
  misc_feature 1..465: note = B7Z8K6
  source 1..465: mol_type = other RNA
atgagccagccccacaccaagccgtccgtgttcgtcatgaagaacggcaccaacgtggcctgcctggtgaaggagttctaccccaaggacatccgcatcaacctcgtcagctccaagaagatcacggagttcgaccccgccatcgtgatcagcccctccgggaagtacaacgcggtgaagctgggcaagtacgaggacagcaactccgtgacctgcagcgtccagcacgacaacaagaccgtgcactccaccgacttcgaggtcaagacggacagcaccgaccacgtgaagccgaaggagaccgagaacaccaagcagccctccaagagctgccacaagcccaaggccatcgtgcacacggagaaggtcaacatgatgtccctgaccgtgctcgggctgcggatgctgttcgccaagaccgtggccgtcaacttcctcctgaccgccaagctgttcttcctctga

SEQ ID NO: 575 - RNA, 645 nt, synthetic construct
  misc_feature 1..645: note = B9A064
  source 1..645: mol_type = other RNA
atgcgccccaagaccggccaggtggggtgcgagaccccggaggagctgggccccgggccccggcagcgctggcccctcctgctgctcggcctggccatggtcgcccacgggctgctccggccgatggtggcgccccagagcggcgaccccgaccccggcgcctccgtggggagctcccgcagctccctgcggagcctgtggggccgcctcctgctgcagccgagcccccagcgggccgacccccgctgctggccccgggggttctggtccgagccgcagtccctctgctacgtcttcggcacggggaccaaggtgaccgtgctgggccagcccaaggccaaccccaccgtcacgctgttcccgcccagctccgaggagctccaggccaacaaggcgaccctggtgtgcctgatcagcgacttctaccccggcgccgtgaccgtcgcctggaaggccgacgggtcccccgtgaaggcgggcgtggagaccacgaagcccagcaagcagtccaacaacaagtacgccgccagctcctacctcagcctgaccccggagcagtggaagtcccaccgcagctacagctgccaggtcacccacgaggggtccaccgtggagaagacggtggcccccaccgagtgcagctga

SEQ ID NO: 576 - RNA, 2520 nt, synthetic construct
  misc_feature 1..2520: note = O00206
  source 1..2520: mol_type = other RNA
atgatgagcgcctcccgcctggccggcaccctcatccccgcgatggccttcctgagctgcgtgcggccggagtcctgggagccctgcgtcgaggtggtgcccaacatcacctaccagtgcatggagctgaacttctacaagatccccgacaacctcccgttcagcacgaagaacctggacctgtccttcaaccccctccgccacctggggagctactccttcttcagcttccccgagctgcaggtcctcgacctgtcccggtgcgagatccagaccatcgaggacggcgcctaccagagcctgtcccacctcagcaccctgatcctgaccgggaaccccatccagtccctcgccctgggcgccttcagcgggctgtccagcctccagaagctggtggcggtggagacgaacctggcctccctcgagaacttcccgatcggccacctgaagaccctgaaggagctcaacgtcgcccacaacctgatccagagcttcaagctgcccgagtacttctccaacctcaccaacctggagcacctggacctcagcagcaacaagatccagtccatctactgcaccgacctgcgcgtgctgcaccagatgcccctcctgaacctgagcctcgacctgtccctgaaccccatgaacttcatccagccgggcgccttcaaggagatccggctccacaagctgacgctgcgcaacaacttcgacagcctcaacgtgatgaagacctgcatccaggggctggcgggcctggaggtccaccggctcgtgctgggggagttccgcaacgagggcaacctggagaagttcgacaagtccgccctcgaggggctgtgcaacctgaccatcgaggagttccggctggcctacctcgactactacctggacgacatcatcgacctgttcaactgcctcaccaacgtgagctccttcagcctggtctccgtgacgatcgagcgcgtgaaggacttcagctacaacttcggctggcagcacctggagctcgtcaactgcaagttcggccagttccccaccctgaagctgaagtccctcaagcggctgaccttcaccagcaacaagggcgggaacgccttctccgaggtggacctgcccagcctcgagttcctggacctgtcccgcaacgggctcagcttcaagggctgctgctcccagagcgacttcggcacgacctccctgaagtacctggacctcagcttcaacggggtgatcaccatgagctccaacttcctgggcctggagcagctcgagcacctggacttccagcacagcaacctgaagcagatgtccgagttcagcgtcttcctctccctgcggaacctgatctacctcgacatcagccacacccacacgcgcgtggccttcaacgggatcttcaacggcctgtccagcctggaggtgctcaagatggcggggaactccttccaggagaacttcctgcccgacatcttcaccgagctgcggaacctcaccttcctggacctgagccagtgccagctcgagcagctgtccccgaccgccttcaacagcctgtccagcctccaggtcctgaacatgtcccacaacaacttcttcagcctggacacgttcccctacaagtgcctcaactccctccaggtgctggactacagcctgaaccacatcatgaccagcaagaagcaggagctgcagcacttcccctccagcctggccttcctcaacctgacccagaacgacttcgcctgcacgtgcgagcaccagtccttcctgcagtggatcaaggaccagcgccagctcctggtggaggtcgagcggatggagtgcgccacccccagcgacaagcagggcatgccggtgctgtccctcaacatcacgtgccagatgaacaagaccatcatcggcgtcagcgtgctgtccgtgctggtcgtgagcgtggtcgcggtgctcgtgtacaagttctacttccacctgatgctgctcgccgggtgcatcaagtacggccgcggggagaacatctacgacgccttcgtcatctactccagccaggacgaggactgggtgcggaacgagctggtgaagaacctggaggagggcgtcccgcccttccagctctgcctgcactaccgcgacttcatccccggggtggccatcgccgcgaacatcatccacgagggcttccacaagtcccggaaggtgatcgtcgtggtgagccagcacttcatccagtcccgctggtgcatcttcgagtacgagatcgcccagacctggcagttcctgagctcccgcgccggcatcatcttcatcgtcctccagaaggtggagaagaccctgctgcggcagcaggtcgagctctaccgcctgctgagccggaacacctacctcgagtgggaggactccgtgctggggcgccacatcttctggcggcgcctgcggaaggccctcctggacggcaagagctggaaccccgaggggaccgtgggcaccgggtgcaactggcaggaggccacgtccatctga

SEQ ID NO: 577 - RNA, 1377 nt, synthetic construct
  misc_feature 1..1377: note = P01730
  source 1..1377: mol_type = other RNA
atgaaccgcggcgtgcccttccggcacctcctcctggtcctgcagctcgccctgctgccggccgcgacccaggggaagaaggtggtgctcggcaagaagggggacaccgtcgagctgacgtgcaccgccagccagaagaagtccatccagttccactggaagaacagcaaccagatcaagatcctgggcaaccaggggtccttcctcaccaagggccccagcaagctgaacgaccgcgccgactcccggcgcagcctgtgggaccagggcaacttccccctcatcatcaagaacctgaagatcgaggactccgacacctacatctgcgaggtggaggaccagaaggaggaggtgcagctgctcgtcttcgggctgacggccaacagcgacacccacctcctgcagggccagtccctgaccctgaccctcgagagcccgcccgggtccagcccctccgtgcagtgccggagcccccgcggcaagaacatccagggcgggaagacgctgtccgtgagccagctggagctccaggactccggcacctggacctgcaccgtcctgcagaaccagaagaaggtggagttcaagatcgacatcgtggtcctggccttccagaaggcgagctccatcgtgtacaagaaggagggggagcaggtcgagttcagcttccccctcgccttcacggtggagaagctgaccggcagcggggagctgtggtggcaggccgagcgggcctccagctccaagagctggatcaccttcgacctcaagaacaaggaggtgtccgtgaagcgcgtcacccaggacccgaagctgcagatgggcaagaagctgcccctccacctgacgctgccccaggcgctcccccagtacgccggcagcgggaacctgaccctggccctcgaggccaagaccggcaagctgcaccaggaggtgaacctggtggtcatgcgggccacccagctccagaagaacctgacgtgcgaggtgtgggggccgacctcccccaagctgatgctcagcctgaagctggagaacaaggaggcgaaggtgtccaagcgcgagaaggccgtctgggtgctcaaccccgaggccggcatgtggcagtgcctgctgagcgactccgggcaggtcctgctcgagagcaacatcaaggtgctgcccacctggtccaccccggtgcagcccatggccctgatcgtcctcggcggcgtggccgggctgctgctgttcatcggcctggggatcttcttctgcgtgcggtgccgccaccggcgccggcaggcggagcgcatgagccagatcaagcggctgctctccgagaagaagacgtgccagtgcccccaccgcttccagaagacctgcagccccatctga

SEQ ID NO: 578 - RNA, 537 nt, synthetic construct
  misc_feature 1..537: note = P01850
  source 1..537: mol_type = other RNA
atggaggacctgaacaaggtgttcccgcccgaggtcgccgtgttcgagcccagcgaggccgagatctcccacacccagaaggcgaccctcgtgtgcctggccacgggcttcttccccgaccacgtcgagctgagctggtgggtgaacgggaaggaggtgcactccggcgtcagcaccgacccccagccgctcaaggagcagcccgccctgaacgactcccgctactgcctgagctcccggctccgcgtgagcgccaccttctggcagaacccccggaaccacttccgctgccaggtgcagttctacgggctgtccgagaacgacgagtggacccaggaccgggccaagcccgtcacgcagatcgtgagcgcggaggcctggggccgcgccgactgcgggttcacctccgtgagctaccagcagggcgtcctgtccgccaccatcctctacgagatcctgctgggcaaggcgaccctctacgccgtgctggtgagcgccctggtcctcatggccatggtgaagcggaaggacttctga

SEQ ID NO: 579 - RNA, 624 nt, synthetic construct
  misc_feature 1..624: note = P07766
  source 1..624: mol_type = other RNA
atgcagagcggcacccactggcgcgtgctggggctctgcctgctgtccgtcggcgtgtgggggcaggacggcaacgaggagatgggcgggatcacccagacgccctacaaggtgagcatctccggcaccaccgtcatcctgacctgcccccagtaccccgggagcgagatcctctggcagcacaacgacaagaacatcggcggggacgaggacgacaagaacatcggctccgacgaggaccacctgagcctcaaggagttctccgagctggagcagagcgggtactacgtgtgctacccccggggctccaagcccgaggacgccaacttctacctgtacctccgcgcccgggtgtgcgagaactgcatggagatggacgtcatgagcgtggcgacgatcgtgatcgtcgacatctgcatcaccggcgggctgctgctcctggtgtactactggtccaagaaccgcaaggccaaggccaagccggtgacccggggcgccggggccggcggccgccagcgggggcagaacaaggagcgcccgccgcccgtccccaaccccgactacgagcccatccggaagggccagcgcgacctgtacagcgggctcaaccagcggcgcatctga

SEQ ID NO: 580 - RNA, 3915 nt, synthetic construct
  misc_feature 1..3915: note = P08575
  source 1..3915: mol_type = other RNA
atgtacctgtggctcaagctgctggccttcggcttcgccttcctcgacaccgaggtgttcgtcaccgggcagagccccacgccgtcccccaccggcctgaccaccgcgaagatgcccagcgtgcccctgtccagcgacccgctccccacgcacaccaccgccttctcccccgccagcaccttcgagcgcgagaacgacttctccgagacgaccaccagcctgtcccccgacaacaccagcacccaggtgtccccggacagcctggacaacgcctccgccttcaacaccaccggggtcagctccgtgcagacgccccacctccccacgcacgcggacagccagaccccctccgccggcaccgacacccagacgttcagcgggtccgccgccaacgcgaagctgaacccgacccccggcagcaacgccatcagcgacgtgcccggcgagcggtccaccgccagcaccttccccacggacccggtcagccccctgaccaccaccctctccctggcccaccactccagcgccgcgctgcccgcccgcacgtccaacaccaccatcaccgccaacacgagcgacgcctacctcaacgcctccgagaccaccaccctgagcccctccgggagcgcggtgatctccacgaccaccatcgccaccaccccgagcaagcccacgtgcgacgagaagtacgccaacatcaccgtggactacctgtacaacaaggagaccaagctgttcaccgccaagctgaacgtcaacgagaacgtggagtgcggcaacaacacgtgcaccaacaacgaggtgcacaacctgaccgagtgcaagaacgcctccgtcagcatctcccacaacagctgcaccgcgcccgacaagacgctcatcctggacgtgcccccgggggtggagaagttccagctgcacgactgcacccaggtcgagaaggccgacaccaccatctgcctcaagtggaagaacatcgagacgttcacgtgcgacacccagaacatcacctaccggttccagtgcggcaacatgatcttcgacaacaaggagatcaagctggagaacctggagcccgagcacgagtacaagtgcgactccgagatcctctacaacaaccacaagttcaccaacgccagcaagatcatcaagaccgacttcgggagccccggcgagccccagatcatcttctgccgctccgaggccgcccaccagggcgtgatcacctggaacccgccccagcggagcttccacaacttcaccctgtgctacatcaaggagacggagaaggactgcctgaacctcgacaagaacctgatcaagtacgacctgcagaacctcaagccctacaccaagtacgtgctgtccctgcacgcgtacatcatcgccaaggtccagcgcaacgggagcgccgccatgtgccacttcaccaccaagtccgcgccgcccagccaggtgtggaacatgacggtgtccatgaccagcgacaactccatgcacgtcaagtgccggccgccccgcgaccggaacggcccccacgagcgctaccacctcgaggtggaggccgggaacaccctggtgcggaacgagagccacaagaactgcgacttccgcgtcaaggacctgcagtactccaccgactacacgttcaaggcctacttccacaacggcgactaccccggcgagcccttcatcctccaccacagcacctcctacaacagcaaggccctgatcgccttcctggcgttcctcatcatcgtgacctccatcgccctgctggtcgtgctctacaagatctacgacctgcacaagaagcggagctgcaacctggacgagcagcaggagctcgtggagcgcgacgacgagaagcagctgatgaacgtcgagcccatccacgccgacatcctgctggagacctacaagcggaagatcgccgacgaggggcgcctcttcctggccgagttccagtccatcccgcgggtgttcagcaagttccccatcaaggaggcgcgcaagcccttcaaccagaacaagaaccggtacgtggacatcctgccctacgactacaaccgcgtcgagctcagcgagatcaacggcgacgccgggtccaactacatcaacgccagctacatcgacggcttcaaggagccgcggaagtacatcgccgcccaggggccccgcgacgagacggtggacgacttctggcgcatgatctgggagcagaaggcgaccgtgatcgtcatggtgacccggtgcgaggagggcaaccgcaacaagtgcgccgagtactggccctccatggaggagggcacccgggccttcggggacgtggtcgtgaagatcaaccagcacaagcgctgccccgactacatcatccagaagctgaacatcgtgaacaagaaggagaaggccacgggccgggaggtcacccacatccagttcaccagctggccggaccacggggtgcccgaggacccccacctcctcctgaagctgcgccggcgcgtgaacgcgttctccaacttcttcagcggccccatcgtcgtgcactgctccgccggggtgggccggaccggcacctacatcgggatcgacgccatgctcgagggcctggaggccgagaacaaggtcgacgtgtacgggtacgtggtcaagctgcgccggcagcgctgcctcatggtccaggtggaggcccagtacatcctgatccaccaggcgctggtggagtacaaccagttcggcgagacggaggtgaacctcagcgagctgcacccgtacctgcacaacatgaagaagcgggacccgccctccgagcccagccccctcgaggccgagttccagcgcctgccctcctaccggagctggcgcacccagcacatcgggaaccaggaggagaacaagtccaagaaccggaacagcaacgtgatcccctacgactacaaccgcgtcccgctgaagcacgagctcgagatgtccaaggagagcgagcacgactccgacgagagctccgacgacgacagcgacagcgaggagccctccaagtacatcaacgccagcttcatcatgtcctactggaagcccgaggtgatgatcgccgcccagggccccctgaaggagaccatcggcgacttctggcagatgatcttccagcggaaggtgaaggtcatcgtgatgctgaccgagctcaagcacggggaccaggagatctgcgcgcagtactggggcgaggggaagcagacgtacggcgacatcgaggtggacctgaaggacaccgacaagagctccacctacaccctgcgcgtcttcgagctccgccacagcaagcggaaggactcccgcacggtgtaccagtaccagtacaccaactggagcgtggagcagctgccggccgagcccaaggagctgatctccatgatccaggtcgtgaagcagaagctcccccagaagaacagctccgagggcaacaagcaccacaagagcacgcccctgctgatccactgccgggacgggtcccagcagaccggcatcttctgcgccctcctgaacctgctcgagagcgccgagaccgaggaggtggtcgacatcttccaggtggtgaaggccctgcgcaaggcgcggccggggatggtctccaccttcgagcagtaccagttcctgtacgacgtgatcgccagcacctaccccgcccagaacggccaggtgaagaagaacaaccaccaggaggacaagatcgagttcgacaacgaggtcgacaaggtgaagcaggacgccaactgcgtgaaccccctcggggcgcccgagaagctgccggaggccaaggagcaggccgagggctccgagcccaccagcggcacggaggggcccgagcactccgtcaacggccccgccagcccggccctgaaccaggggagctga

SEQ ID NO: 581 - RNA, 765 nt, synthetic construct
  misc_feature 1..765: note = P08637
  source 1..765: mol_type = other RNA
atgtggcagctgctcctgcccaccgccctgctcctgctggtgagcgccggcatgcgcaccgaggacctcccgaaggcggtcgtgttcctggagccccagtggtaccgggtgctggagaaggactccgtcacgctcaagtgccagggggcctacagccccgaggacaactccacccagtggttccacaacgagagcctgatctccagccaggcctccagctacttcatcgacgccgccaccgtggacgactccggcgagtaccgctgccagaccaacctgagcacgctctccgaccccgtgcagctggaggtccacatcgggtggctgctcctgcaggcgccgcggtgggtgttcaaggaggaggaccccatccacctccgctgccacagctggaagaacaccgccctgcacaaggtgacctacctgcagaacggcaaggggcggaagtacttccaccacaactccgacttctacatccccaaggccaccctgaaggacagcggctcctacttctgccgcggcctcttcgggagcaagaacgtctccagcgagacggtgaacatcaccatcacccagggcctggccgtgtccaccatcagcagcttcttcccgcccgggtaccaggtctccttctgcctggtgatggtgctcctgttcgcggtcgacacgggcctgtacttcagcgtgaagaccaacatccggtccagcacccgcgactggaaggaccacaagttcaagtggcggaaggacccccaggacaagtga

SEQ ID NO: 582 - RNA, 663 nt, synthetic construct
  misc_feature 1..663: note = P10747
  source 1..663: mol_type = other RNA
atgctgcgcctcctgctggccctcaacctgttccccagcatccaggtgaccggcaacaagatcctggtcaagcagtcccccatgctcgtggcctacgacaacgcggtgaacctgagctgcaagtactcctacaacctgttcagccgggagttccgcgcctccctccacaaggggctggacagcgccgtcgaggtgtgcgtggtctacggcaactactcccagcagctccaggtgtacagcaagaccgggttcaactgcgacggcaagctggggaacgagtccgtgacgttctacctgcagaacctgtacgtcaaccagaccgacatctacttctgcaagatcgaggtgatgtacccgccgccctacctcgacaacgagaagtccaacggcaccatcatccacgtgaagggcaagcacctgtgccccagccccctgttccccgggcccagcaagcccttctgggtcctcgtggtggtcggcggggtgctggcctgctactccctgctcgtgaccgtcgccttcatcatcttctgggtgcggagcaagcgctcccggctgctgcacagcgactacatgaacatgacgccccgccggcccggccccacccgcaagcactaccagccgtacgcgccgccccgggacttcgccgcctaccgctcctga

SEQ ID NO: 583 - RNA, 681 nt, synthetic construct
  misc_feature 1..681: note = P11912
  source 1..681: mol_type = other RNA
atgcccggcgggccgggcgtgctgcaggccctccccgccaccatcttcctgctgttcctcctgagcgcggtctacctggggcccggctgccaggccctctggatgcacaaggtgcccgcctccctgatggtgagcctgggggaggacgcccacttccagtgcccgcacaactccagcaacaacgccaacgtcacctggtggcgcgtgctccacggcaactacacgtggccgcccgagttcctgggccccggggaggaccccaacggcaccctgatcatccagaacgtgaacaagtcccacgggggcatctacgtctgccgggtgcaggaggggaacgagagctaccagcagtcctgcggcacctacctccgcgtgcggcagcccccgccccgccccttcctggacatgggcgaggggaccaagaaccggatcatcacggcggagggcatcatcctgctgttctgcgccgtcgtgcccgggaccctgctcctcttccgcaagcggtggcagaacgagaagctgggcctggacgccggcgacgagtacgaggacgagaacctctacgaggggctgaacctggacgactgcagcatgtacgaggacatctcccgcggcctccaggggacctaccaggacgtgggcagcctgaacatcggggacgtccagctggagaagccctga

SEQ ID NO: 584 - RNA, 1671 nt, synthetic construct
  misc_feature 1..1671: note = P15391
  source 1..1671: mol_type = other RNA
atgcccccgccccgcctgctcttcttcctgctgttcctcacccccatggaggtgcggcccgaggagccgctggtcgtgaaggtggaggagggcgacaacgccgtcctgcagtgcctcaaggggaccagcgacggccccacgcagcagctgacctggtcccgcgagagccccctgaagcccttcctcaagctgtccctggggctcccgggcctggggatccacatgcggcccctggccatctggctcttcatcttcaacgtgagccagcagatgggcggcttctacctgtgccagcccgggcccccgtccgagaaggcgtggcagcccggctggaccgtgaacgtcgaggggagcggcgagctgttccgctggaacgtgtccgacctcgggggcctgggctgcgggctgaagaaccggagctccgagggccccagctcccccagcgggaagctcatgtccccgaagctgtacgtgtgggccaaggaccgccccgagatctgggagggcgagcccccctgcctgccgccccgggacagcctcaaccagtccctgagccaggacctgaccatggcccccggctccacgctctggctgagctgcggggtccccccggactccgtgagccgcggccccctgagctggacccacgtgcaccccaaggggcccaagtccctcctgagcctggagctcaaggacgaccggccggcccgcgacatgtgggtcatggagaccggcctgctgctcccccgggccaccgcgcaggacgccgggaagtactactgccaccgcggcaacctgacgatgtccttccacctggagatcaccgcccggcccgtgctctggcactggctgctgcgcaccggcgggtggaaggtgagcgccgtcaccctcgcgtacctgatcttctgcctgtgctccctcgtgggcatcctgcacctgcagcgggccctcgtgctgcgccggaagcgcaagcggatgacggacccgacccgccggttcttcaaggtcacccccccccccgggagcggcccgcagaaccagtacgggaacgtgctgtccctgcccacccccacgagcggcctcggccgcgcccagcgctgggccgccgggctgggcgggaccgcgccctcctacggcaacccgagctccgacgtgcaggccgacggggccctgggcagccggtccccccccggcgtcgggcccgaggaggaggagggcgaggggtacgaggagccggacagcgaggaggactccgagttctacgagaacgacagcaacctcggccaggaccagctgtcccaggacggcagcgggtacgagaaccccgaggacgagcccctgggccccgaggacgaggactccttcagcaacgccgagagctacgagaacgaggacgaggagctcacccagccggtggcccgcaccatggacttcctgtccccccacgggagcgcgtgggacccctcccgggaggccacgagcctgggctcccagagctacgaggacatgcgcgggatcctctacgccgccccccagctgcggtccatccgcggccagccgggccccaaccacgaggaggacgccgacagctacgagaacatggacaaccccgacgggcccgacccggcgtggggcgggggcgggcggatgggcacctggtccacccgctga

SEQ ID NO: 585 - RNA, 672 nt, synthetic construct
  misc_feature 1..672: note = P16410
  source 1..672: mol_type = other RNA
atggcctgcctgggcttccagcgccacaaggcccagctcaacctggcgacccggacctggccctgcacgctcctgttcttcctgctgttcatcccggtgttctgcaaggccatgcacgtcgcccagcccgccgtggtgctcgccagctcccgcgggatcgcgagcttcgtctgcgagtacgcctcccccggcaaggccaccgaggtgcgggtgaccgtcctgcgccaggccgacagccaggtgaccgaggtgtgcgcggccacgtacatgatggggaacgagctgaccttcctcgacgactccatctgcaccggcaccagctccgggaaccaggtcaacctgacgatccagggcctgcgggccatggacaccggcctctacatctgcaaggtggagctgatgtacccgccgccctactacctggggatcggcaacgggacccagatctacgtgatcgaccccgagccctgccccgacagcgacttcctcctgtggatcctggccgccgtctccagcggcctcttcttctactccttcctgctgaccgcggtgagcctctccaagatgctgaagaagcgcagccccctgacgaccggggtgtacgtcaagatgccgcccaccgagcccgagtgcgagaagcagttccagccctacttcatccccatcaactga

SEQ ID NO: 586 - RNA, 1419 nt, synthetic construct
  misc_feature 1..1419: note = P16671
  source 1..1419: mol_type = other RNA
atgggctgcgaccgcaactgcgggctgatcgccggcgccgtgatcggggcggtcctcgccgtgttcggcgggatcctgatgcccgtgggcgacctgctcatccagaagaccatcaagaagcaggtcgtgctggaggagggcaccatcgccttcaagaactgggtgaagacggggaccgaggtctaccggcagttctggatcttcgacgtgcagaacccgcaggaggtgatgatgaacagctccaacatccaggtcaagcagcgcggcccctacacctaccgggtgcgcttcctggccaaggagaacgtgacccaggacgccgaggacaacacggtcagcttcctccagcccaacggggcgatcttcgagccctccctgagcgtgggcaccgaggccgacaacttcaccgtgctgaacctcgccgtcgccgcggcctcccacatctaccagaaccagttcgtgcagatgatcctgaacagcctgatcaacaagtccaagagctccatgttccaggtgcggaccctccgcgagctgctgtgggggtaccgggacccgttcctcagcctggtcccctaccccgtgacgaccaccgtgggcctgttctacccctacaacaacaccgccgacggcgtctacaaggtgttcaacgggaaggacaacatctccaaggtggccatcatcgacacgtacaagggcaagcgcaacctcagctactgggagtcccactgcgacatgatcaacgggaccgacgccgcgagcttcccgcccttcgtcgagaagtcccaggtgctgcagttcttcagctccgacatctgccggagcatctacgccgtcttcgagtccgacgtgaacctgaagggcatccccgtgtaccgcttcgtcctccccagcaaggccttcgccagcccggtggagaaccccgacaactactgcttctgcaccgagaagatcatctccaagaactgcaccagctacggcgtgctggacatctccaagtgcaaggaggggcggcccgtctacatcagcctgccccacttcctctacgcctccccggacgtgagcgagcccatcgacggcctgaaccccaacgaggaggagcaccgcacgtacctggacatcgagcccatcaccgggttcaccctccagttcgcgaagcggctccaggtgaacctgctggtcaagccgtccgagaagatccaggtgctgaagaacctgaagcgcaactacatcgtgcccatcctctggctgaacgagaccggcacgatcggggacgagaaggccaacatgttccggagccaggtcaccggcaagatcaacctgctcggcctgatcgagatgatcctgctctccgtgggggtggtcatgttcgtggccttcatgatcagctactgcgcctgccgctccaagaccatcaagtga

SEQ ID NO: 587 - RNA, 651 nt, synthetic construct
  misc_feature 1..651: note = P26718
  source 1..651: mol_type = other RNA
atgggctggatccgcgggcggcgcagccggcactcctgggagatgagcgagttccacaactacaacctggacctcaagaagtccgacttcagcacccgctggcagaagcagcggtgccccgtggtcaagtccaagtgccgcgagaacgccagcccgttcttcttctgctgcttcatcgccgtggcgatgggcatccggttcatcatcatggtggccatctggtccgccgtcttcctgaacagcctgttcaaccaggaggtgcagatccccctcaccgagtcctactgcgggccctgccccaagaactggatctgctacaagaacaactgctaccagttcttcgacgagagcaagaactggtacgagtcccaggccagctgcatgtcccagaacgccagcctgctgaaggtgtactccaaggaggaccaggacctcctgaagctggtcaagagctaccactggatgggcctcgtgcacatcccgacgaacgggtcctggcagtgggaggacggcagcatcctgtcccccaacctgctcaccatcatcgagatgcagaagggcgactgcgcgctgtacgccagcagcttcaaggggtacatcgagaactgctccacccccaacacctacatctgcatgcagcgcacggtgtga

SEQ ID NO: 588 - RNA, 261 nt, synthetic construct
  misc_feature 1..261: note = P30273
  source 1..261: mol_type = other RNA
atgatccccgccgtggtcctgctcctgctgctcctggtggagcaggccgcggccctgggcgagccccagctctgctacatcctggacgccatcctgttcctctacgggatcgtgctgaccctgctctactgccgcctgaagatccaggtccggaaggccgccatcaccagctacgagaagtccgacggcgtgtacacggggctgagcacccgcaaccaggagacctacgagaccctcaagcacgagaagccgccccagtag

SEQ ID NO: 589 - RNA, 1137 nt, synthetic construct
  misc_feature 1..1137: note = P32248
  source 1..1137: mol_type = other RNA
atggacctgggcaagcccatgaagtccgtgctcgtcgtggccctgctggtgatcttccaggtctgcctctgccaggacgaggtgaccgacgactacatcggggacaacaccacggtggactacaccctgttcgagagcctgtgcagcaagaaggacgtccgcaacttcaaggcctggttcctcccgatcatgtactccatcatctgcttcgtgggcctgctggggaacggcctcgtggtcctgacctacatctacttcaagcggctgaagaccatgacggacacctacctcctgaacctggcggtggccgacatcctcttcctgctgaccctccccttctgggcctacagcgccgccaagtcctgggtgttcggggtccacttctgcaagctgatcttcgcgatctacaagatgagcttcttctccggcatgctgctcctgctgtgcatcagcatcgaccgctacgtggccatcgtgcaggccgtctccgcccaccggcaccgcgcgcgggtgctcctgatcagcaagctgtcctgcgtgggcatctggatcctcgccaccgtcctgagcatccccgagctgctctactccgacctgcagcgcagctccagcgagcaggccatgcggtgctccctgatcacggagcacgtggaggccttcatcaccatccaggtggcccagatggtcatcgggttcctcgtgcccctgctggcgatgagcttctgctacctcgtgatcatccgcaccctgctgcaggcccggaacttcgagcgcaacaaggccatcaaggtcatcatcgccgtggtcgtggtgttcatcgtcttccagctcccgtacaacggcgtggtgctggcccagaccgtcgcgaacttcaacatcacgtccagcacgtgcgagctgagcaagcagctcaacatcgcctacgacgtgacctactccctggcctgcgtgcggtgctgcgtcaaccccttcctgtacgccttcatcggggtgaagttccgcaacgacctcttcaagctgttcaaggacctgggctgcctcagccaggagcagctgcggcagtggtccagctgccgccacatccggcgctccagcatgtccgtggaggccgagaccaccaccaccttcagcccctga

SEQ ID NO: 590 - RNA, 690 nt, synthetic construct
  misc_feature 1..690: note = P40259
  source 1..690: mol_type = other RNA
atggcccgcctggccctcagccccgtgccgtcccactggatggtcgcgctgctgctcctgctgagcgccgagcccgtgcccgccgcccggtccgaggaccgctaccggaaccccaagggcagcgcctgctcccgcatctggcagagcccgcggttcatcgcgcgcaagcgggggttcaccgtgaagatgcactgctacatgaactccgccagcggcaacgtctcctggctctggaagcaggagatggacgagaacccccagcagctgaagctggagaaggggcgcatggaggagagccagaacgagtccctcgccaccctgacgatccagggcatccggttcgaggacaacgggatctacttctgccagcagaagtgcaacaacaccagcgaggtgtaccagggctgcggcaccgagctgcgcgtgatggggttctccaccctcgcccagctgaagcagcggaacacgctgaaggacggcatcatcatgatccagaccctcctgatcatcctgttcatcatcgtccccatcttcctcctgctggacaaggacgacagcaaggcggggatggaggaggaccacacctacgagggcctcgacatcgaccagaccgccacgtacgaggacatcgtgaccctgcgcaccggggaggtgaagtggtccgtcggcgagcaccccggccaggagtga

SEQ ID NO: 591 - RNA, 990 nt, synthetic construct
  misc_feature 1..990: note = P42081
  source 1..990: mol_type = other RNA
atggacccccagtgcaccatgggcctgagcaacatcctcttcgtgatggccttcctgctgtccggggccgcgccgctcaagatccaggcctacttcaacgagaccgccgacctgccctgccagttcgccaacagccagaaccagtccctgagcgagctcgtcgtgttctggcaggaccaggagaacctggtgctgaacgaggtctacctcggcaaggagaagttcgactccgtgcacagcaagtacatggggcgcacctccttcgacagcgactcctggaccctgcggctgcacaacctccagatcaaggacaagggcctgtaccagtgcatcatccaccacaagaagcccaccgggatgatccgcatccaccagatgaacagcgagctgtccgtgctcgccaacttcagccagcccgagatcgtcccgatctccaacatcaccgagaacgtgtacatcaacctgacgtgcagctccatccacggctaccccgagcccaagaagatgagcgtgctgctccggaccaagaactccaccatcgagtacgacggcgtcatgcagaagtcccaggacaacgtgaccgagctgtacgacgtgagcatcagcctgagcgtctccttccccgacgtgacgagcaacatgaccatcttctgcatcctcgagaccgacaagacccgcctgctgtccagcccgttctccatcgagctcgaggacccccagcccccgcccgaccacatcccctggatcacggcggtgctgcccaccgtcatcatctgcgtgatggtgttctgcctgatcctctggaagtggaagaagaagaagcggccccgcaacagctacaagtgcgggaccaacaccatggagcgggaggagtccgagcagacgaagaagcgcgagaagatccacatcccggagcggagcgacgaggcccagcgcgtcttcaagtccagcaagacctccagctgcgacaagtccgacacgtgcttctga

SEQ ID NO: 592 - RNA, 1011 nt, synthetic construct
  misc_feature 1..1011: note = Q15762
  source 1..1011: mol_type = other RNA
atggactaccccaccctgctcctggccctgctccacgtgtaccgcgccctgtgcgaggaggtcctgtggcacaccagcgtgccgttcgcggagaacatgtccctcgagtgcgtgtaccccagcatgggcatcctgacgcaggtcgagtggttcaagatcgggacccagcaggactccatcgccatcttcagccccacccacggcatggtgatccggaagccctacgccgagcgcgtgtacttcctgaactccaccatggccagcaacaacatgaccctcttcttccggaacgcctccgaggacgacgtcgggtactacagctgctccctgtacacgtacccgcagggcacctggcagaaggtgatccaggtggtccagagcgactccttcgaggcggccgtgcccagcaactcccacatcgtgagcgagcccgggaagaacgtcaccctgacgtgccagccccagatgacctggccggtgcaggccgtgcgctgggagaagatccagccccggcagatcgacctcctgacctactgcaacctggtccacggccgcaacttcacctccaagttcccccggcagatcgtgagcaactgctcccacggccgctggagcgtgatcgtcatccccgacgtgacggtgtccgacagcgggctctaccggtgctacctgcaggccagcgcgggcgagaacgagaccttcgtcatgcgcctgaccgtggccgaggggaagaccgacaaccagtacaccctcttcgtggccggcgggacggtcctgctgctcctgttcgtgatctccatcaccaccatcatcgtcatcttcctgaaccggcgccggcgccgggagcgccgggacctcttcacggagagctgggacacccagaaggccccgaacaactaccgctcccccatcagcacctcccagcccaccaaccagagcatggacgacacgcgggaggacatctacgtgaactaccccaccttctcccgccggccgaagacccgcgtgtga

SEQ ID NO: 593 - RNA, 13482 nt, synthetic construct
  misc_feature 1..13482: note = Q685J3
  source 1..13482: mol_type = other RNA
atgccccgcccgggcaccatggccctgtgcctcctgaccctggtgctcagcctgctgccgccccaggccgcggccgagcaggacctcagcgtcaaccgggccgtgtgggacgggggcgggtgcatcagccagggcgacgtgctgaaccgccagtgccagcagctgtcccagcacgtccggacggggagcgccgccaacaccgcgaccggcaccacctccaccaacgtggtggagccccgcatgtacctcagctgctccaccaacccggagatgaccagcatcgagtccagcgtcacctccgacacccccggcgtgagctccacccggatgacccccaccgagagccgcaccacctccgagagcacctccgacagcaccaccctgttcccctccagcaccgaggacaccagctccccgaccacccccgaggggaccgacgtgcccatgagcaccccctccgaggagagcatctccagcaccatggccttcgtctccaccgccccgctgcccagcttcgaggcctacacctccctcacctacaaggtggacatgagcaccccgctgaccacctccacccaggcgagctccagccccaccacccccgagtccaccaccatccccaagagcaccaactccgagggcagcacgcccctgacctccatgcccgccagcaccatgaaggtggccagctccgaggccatcaccctcctgaccaccccggtcgagatcagcacccccgtgaccatctccgcccaggcgagctccagccccaccaccgccgaggggccctccctgagcaactccgccccgagcggcgggtccacgcccctcacccggatgcccctgagcgtgatgctggtcgtgtccagcgaggcctccaccctcagcaccacccccgccgcgaccaacatcccggtgatcacctccaccgaggccagcagctcccccaccaccgccgagggcaccagcatccccacctccacctacaccgagggcagcaccccgctgacctccacccccgccagcaccatgcccgtcgccacctccgagatgagcaccctgtccatcacccccgtggacaccagcaccctcgtgaccacctccaccgagccgagctccctgcccaccaccgcggaggccaccagcatgctgacctccaccctcagcgaggggtccacgcccctgaccaacatgcccgtcagcaccatcctggtggcctccagcgaggccagcaccacctccaccatcccggtggacagcaagaccttcgtcaccaccgcctccgaggcgagctccagccccaccaccgccgaggacacctccatcgccaccagcaccccctccgagggcagcacgcccctcacctccatgccggtgagcaccacccccgtcgcctccagcgaggcgtccaacctgagcaccacccccgtggactccaagacccaggtgaccaccagcaccgaggcctccagctccccgcccaccgccgaggtcaactccatgcccaccagcaccccctccgaggggagcacgcccctgacctccatgagcgtgtccaccatgcccgtggccagctccgaggccagcaccctctccaccacccccgtcgacaccagcacccccgtgaccacctccagcgaggcgtccagctccagcaccacccccgagggcacctccatcccgaccagcacccccagcgagggctccacgcccctgaccaacatgccggtgagcacccgcctggtcgtgtccagcgaggcctccaccaccagcaccacccccgccgactccaacaccttcgtgaccaccagctccgaggccagctccagctccaccaccgccgaggggaccagcatgcccacctccacctacagcgagcggggcaccaccatcacctccatgagcgtctccaccacgctcgtggcgagcagcgaggcctccaccctgagcaccacccccgtggactccaacaccccggtcaccaccagcaccgaggccacctccagctccaccaccgccgaggggaccagcatgcccacctccacctacaccgagggcagcacgcccctgacctccatgcccgtgaacaccaccctcgtggccagctccgaggcgagcaccctgtccaccaccccggtcgacaccagcacccccgtgacgacctccaccgaggccagctccagccccaccaccgccgacggggccagcatgcccacgtccaccccgagcgagggctccacgcccctgaccagcatgcccgtgtccaagacgctcctgaccagctccgaggcgagcaccctgtccaccacgcccctcgacaccagcacccacatcaccacgtccaccgaggccagctgctccccgaccaccacggagggcaccagcatgcccatctccacccccagcgaggggagccccctgctgaccagcatcccggtcagcatcacgcccgtgacctcccccgaggccagcaccctctccaccacgcccgtggacagcaactccccggtcaccaccagcaccgaggtgtccagctcccccacgcccgccgagggcaccagcatgcccacctccacctacagcgaggggcgcacgccgctgacctccatgcccgtgagcaccaccctggtcgccacgtccgcgatcagcaccctgtccaccacccccgtggacaccagcacgccggtgaccaactccaccgaggcccggagcagccccaccacgtccgagggcaccagcatgcccacctccacccccggggagggcagcacgccgctcacctccatgcccgacagcaccacccccgtcgtgtccagcgaggcccgcacgctgtccgccacccccgtggacaccagcaccccggtcacgacctccaccgaggccaccagctcccccacgaccgcggagggcaccagcatccccacctccacgcccagcgaggggaccaccccgctgacctccacgcccgtgagccacaccctcgtggccaactccgaggccagcaccctgagcaccacgcccgtcgactccaacacgcccctgaccaccagcacggaggcctccagcccgccgcccaccgccgagggcacctccatgcccaccagcaccccgtccgaggggagcacgcccctcacccggatgcccgtgtccaccaccatggtggcgagctccgagacgagcaccctgtccaccacccccgccgacacgagcaccccggtcaccacctactcccaggccagctccagctccacgaccgccgacggcaccagcatgcccaccagcacgtactccgaggggagcacgcccctgacctccgtgcccgtgagcacccgcctcgtcgtgtccagcgaggcgtccacgctgagcaccaccccggtggacacctccatccccgtcacgaccagcaccgaggcctccagctcccccaccacggccgagggcaccagcatcccgaccagcccgcccagcgagggcaccacgcccctggcctccatgccggtgagcaccaccctcgtggtctccagcgaggccaacaccctgagcacgacccccgtggactccaagacccaggtggcgaccagcaccgaggcctcctccccgccgcccacggccgaggtcacctccatgcccaccagcacccccggggagcggtccacgcccctgaccagcatgcccgtgcgccacacccccgtcgcctccagcgaggcctccaccctcagcacgtcccccgtggacaccagcacccccgtgaccacgtccgcggagaccagctccagcccgaccaccgccgagggcacgtccctgcccaccagcaccaccagcgaggggtccacgctgctcaccagcatccccgtctccaccaccctggtgacgagccccgaggcctccaccctgctcaccaccccggtggacacgaagggccccgtcgtgaccagcaacgaggtgtccagctcccccacccccgccgagggcaccagcatgccgacgtccacctacagcgaggggcggacgcccctgacctccatccccgtcaacacgaccctggtggccagctccgcgatcagcatcctctccaccaccccggtggacaacagcacccccgtcacgaccagcaccgaggcctgctccagccccaccacgtccgagggcaccagcatgcccaactccaacccgagcgaggggaccacgcccctgacgtccatccccgtgagcaccacccccgtggtctccagcgaggcctccaccctgagcgccacgccggtggacacctccacccccggcaccacgagcgccgaggcgacctccagccccaccaccgccgaggggatctccatccccacgagcaccccgtccgagggcaagacgcccctcaagagcatccccgtgagcaacacccccgtcgccaactccgaggccagcacgctgtccaccaccccggtggacagcaactcccccgtggtcaccagcacggcggtgtccagctcccccacccccgccgagggcaccagcatcgccatctccaccccgagcgaggggtccacggccctgaccagcatccccgtgtccaccaccacggtcgccagctccgagatcaacagcctctccaccacccccgcggtgaccagcacgcccgtgaccacctacagccaggcctccagctccccgaccaccgccgacggcacgagcatgcagacctccacctacagcgaggggtccacgcccctgacgagcctgcccgtctccaccatgctcgtggtgagctccgaggccaacaccctgagcaccacgcccatcgactccaagacccaggtcaccgccagcaccgaggcgtccagctccacgaccgccgagggcagctccatgaccatcagcaccccgagcgaggggagccccctgctcacgagcatccccgtgtccaccaccccggtggccagccccgaggcctccaccctgagcacgacccccgtcgactccaacagccccgtgatcacctccaccgaggtgagctccagcccgacgcccgccgagggcacctccatgcccaccagcacctacacggagggccgcacgcccctgacctccatcaccgtccggacgaccccggtggcgagctccgccatcagcaccctctccaccacgcccgtggacaacagcacccccgtcaccaccagcaccgaggcccgctccagccccacgacctccgaggggaccagcatgccgaactccacccccagcgagggcacgacgcccctgacctccatccccgtgagcaccacgccggtgctgtccagcgaggcctccaccctcagcgcgacccccatcgacacctccacgcccgtcaccaccagcaccgaggccacgtccagccccaccaccgccgaggggacctccatcccgacgagcaccctgtccgagggcatgacgcccctgaccagcacgcccgtgagccacaccctcgtggccaactccgaggccagcaccctgtccaccacgcccgtcgacagcaactccccggtggtgaccagcaccgcggtctccagctcccccacccccgccgaggggacgagcatcgccacctccacccccagcgagggctccaccgccctgacgagcatcccggtgtccaccaccaccgtggccagctccgagaccaacacgctcagcaccacccccgcggtcaccagcacgcccgtgaccacctacgcccaggtctccagctccccgaccacggccgacggcagctccatgcccaccagcacgccccgggaggggcgcccgcccctgacctccatccccgtgagcacgaccaccgtggcctccagcgagatcaacaccctgtccacgaccctcgccgacacccgcacccccgtcacgacctacagccaggcgtccagctcccccaccaccgccgacggcacgagcatgcccacccccgcctactccgaggggagcacgcccctgacctccatgcccctgagcacgaccctcgtggtgagctccgaggccagcaccctgtccaccacgccggtcgacaccagcacccccgcgaccacgtccaccgagggcagctccagccccaccaccgccgggggcacctccatccagacgagcaccccctccgagcggaccaccccgctggccggcatgcccgtgagcacgaccctcgtggtctccagcgaggggaacaccctgtccaccacgcccgtggacagcaagacccaggtgaccaactccaccgaggccagctccagcgccacggcggagggcagctccatgaccatcagcgccccctccgaggggagcccgctgctcacctccatccccctgagcaccacgcccgtcgcctcccccgaggccagcaccctgtccaccaccccggtggacagcaactcccccgtgatcacgagcaccgaggtctccagctcccccatccccaccgagggcaccagcatgcagacgtccacctacagcgaccgccggaccccgctcacctccatgcccgtgagcacgaccgtggtcgccagctccgcgatcagcaccctgtccaccacgcccgtggacaccagcaccccggtgaccaactccacggaggcccgcagctcccccaccaccagcgagggcacctccatgcccaccagcacgccctccgaggggagcaccccgttcacctccatgcccgtcagcaccatgcccgtggtgacgtccgaggccagcaccctgtccgccacccccgtcgacaccagcacgccggtgaccacctccaccgaggccacgagcagccccaccaccgcggagggcacctccatccccacgagcaccctctccgaggggaccacgcccctgacgagcatcccggtgtcccacaccctggtcgccaacagcgaggtgtccaccctcagcaccacgcccgtggactccaacacccccttcaccaccagcacggaggcctcctccccgccgcccaccgccgagggcacctccatgcccaccagcacgtccagcgaggggaacacgcccctgacccggatgcccgtctccaccacgatggtggccagcttcgagacctccaccctgagcaccacccccgcggacacgagcacccccgtgaccacctactcccaggccggcagctcccccacgaccgccgacgacaccagcatgcccacctccacgtacagcgagggctccacgcccctcaccagcgtccccgtgtccaccatgccggtggtcagctccgaggccagcacgcactccaccacccccgtggacaccagcacgcccgtgaccacctccaccgaggcgagctccagccccacgaccgccgaggggaccagcatcccgaccagcccgcccagcgagggcacgacgcccctggcctccatgccggtcagcaccacccccgtggtgtccagcgaggccgggacgctgtccaccacccccgtcgacaccagcacgcccatgaccacctccaccgaggccagctccagcccgacgaccgcggaggacatcgtggtgcccatctccaccgccagcgagggctccaccctcctgaccagcatccccgtctccacgacccccgtggccagcccggaggcctccaccctgagcaccacgcccgtggacagcaactcccccgtcgtgaccagcaccgagatctccagctccgccaccagcgcggaggggacgtccatgcccaccagcacctactccgagggcagcaccccgctccgctccatgcccgtgagcacgaagcccctggcctccagcgaggcctccaccctgagcaccacccccgtcgacacgtccatcccggtgaccaccagcaccgagacgtccagcagccccaccaccgccaaggacacctccatgcccatcagcacgccctccgaggtcagcacctccctcaccagcatcctggtgtccaccatgccggtggccagctccgaggcgagcacgctgtccaccacccccgtcgacacccggacgctcgtgaccaccagcaccggcacgtccagctcccccaccaccgccgaggggagctccatgccgaccagcacgcccggcgagcgctccacgcccctgaccaacatcctggtgagcaccaccctcctggccaacagcgaggcctccacgctgagcaccacccccgtcgacacctccacgccggtgaccaccagcgcggaggcctccagctcccccaccacggccgaggggaccagcatgcggatctccacccccagcgacggctccacgcccctcacgagcatcctggtgtccaccctgccggtcgccagctccgaggccagcaccgtgtccaccacggcggtggacaccagcatccccgtcaccacctccacggaggccagcagctcccccaccaccgccgaggtgaccagcatgcccacgtccaccccgagcgagacctccacgcccctcacgagcatgcccgtgaaccacacccccgtcgcctccagcgaggccgggaccctgtccaccacgccggtggacaccagcacccccgtgaccacgtccaccaaggcgagctccagccccaccaccgccgagggcatcgtcgtgcccatctccaccgccagcgagggctccacgctgctgaccagcatcccggtgtccaccacccccgtcgccagcagcgaggcctccacgctcagcaccacccccgtggacacctccatccccgtgacgaccagcaccgaggggtccagctccccgaccacggcggagggcaccagcatgcccatctccacccccagcgaggtctccacgcccctgacgagcatcctggtgtccaccgtgccggtcgccgggagcgaggcctccaccctcagcaccacgcccgtggacacccgcacccccgtgaccacgtccgccgaggcgagcagctccccgaccaccgccgagggcaccagcatgcccatctccacgcccggcgagcggcgcacgcccctgaccagcatgtccgtcagcaccatgccggtggcctccagcgaggcctccacgctgagccggacccccgccgacacctccacccccgtgacgaccagcaccgaggcgtccagctcccccaccaccgccgaggggacgggcatcccgatcagcaccccctccgaggggagcacgcccctcacctccatccccgtcagcacgaccccggtggccatccccgaggccagcaccctgtccaccacgcccgtggacagcaactcccccgtcgtgaccagcaccgaggtgtccagctccccgacccccgccgagggcacgagcatgcccatctccacctacagcgaggggtccacgcccctgaccggcgtcccggtgagcacgacccccgtgacctccagcgcgatctccaccctcagcacgacccccgtcgacacctccacccccgtgacgaccagcaccgaggcccactccagcccgaccacgagcgagggcacctccatgcccaccagcaccccctccgaggggagcacgccgctgacctacatgcccgtgtccaccatgctggtcgtgagctccgaggacagcaccctctccgccacgcccgtggacaccagcacccccgtcaccacctccacggaggccaccagctccaccaccgccgagggcacgagcatcccgacctccacccccagcgaggggatgacgcccctgacgtccgtgcccgtgagcaacaccccggtcgcgtccagcgaggccagcatcctgtccaccacccccgtggacagcaacacgcccctcaccacctccaccgaggccagctccagcccgcccacggccgagggcacctccatgcccaccagcaccccctccgaggggagcacgcccctgacctccatgcccgtcagcaccaccacggtggcctccagcgagacctccaccctgagcaccacgcccgcggacacctccacccccgtgaccacgtacagccaggcctccagctccccgcccatcgccgacggcacctccatgcccaccagcacctactccgagggcagcacgcccctcaccaacatgtccttcagcaccacccccgtcgtgtccagcgaggcctccaccctgagcacgacccccgtggacacctccacccccgtcacgaccagcaccgaggcgtccctgagccccaccacggccgaggggacctccatccccaccagctccccgagcgagggcaccacgcccctcgcctccatgcccgtgagcaccaccccggtggtcagctccgaggtgaacaccctgagcacgacccccgtggactccaacaccctggtcaccacgagcaccgaggcctccagctcccccaccatcgccgaggggaccagcctccccacgtccaccaccagcgagggctccaccccgctgagcatcatgcccctgtccacgacccccgtggcgagctccgaggccagcaccctctccaccacgcccgtggacaccagcaccccggtcaccacgagctcccccaccaacagctcccccaccaccgccgaggtgaccagcatgcccacgtccaccgccggggagggcagcaccccgctgaccaacatgcccgtgtccacgacccccgtcgccagctccgaggcgagcaccctgtccaccacgcccgtggacagcaacaccttcgtgacctccagctcccaggccagctccagcccggccaccctccaggtcacgaccatgcgcatgtccacccccagcgagggcagctccagcctgaccacgatgctgctctccagcacctacgtgacctccagcgaggcctccacccccagcacgccctccgtggaccggagcaccccggtcaccacctccacgcagagcaactccacccccacgccgcccgaggtgatcaccctgccgatgagcacgccctccgaggtgagcacgcccctgaccatcatgcccgtctccaccacgagcgtgaccatctccgaggccgggaccgcgagcaccctcccggtggacacgagcacccccgtcatcacctccacccaggtgagctccagccccgtgacgccggagggcaccaccatgcccatctggaccccctccgaggggagcacgcccctgacgaccatgccggtctccaccacccgcgtgacgagctccgagggcagcaccctgtccacccccagcgtggtcacctccacgcccgtgaccaccagcaccgaggccatctccagctccgccacgctcgacagcaccaccatgtccgtgagcatgcccatggagatcagcaccctggggacgaccatcctggtctccaccaccccggtgacgcggttccccgagagctccacccccagcatcccctccgtgtacaccagcatgtccatgaccacggccagcgagggctccagctccccgaccaccctcgagggcaccacgaccatgcccatgagcaccacctccgagcgcagcacgctgctgaccaccgtcctcatctcccccatcagcgtgatgtcccccagcgaggcgtccaccctgagcacgccgcccggggacaccagcacgcccctgctcacctccaccaaggccggcagcttctccatccccgccgaggtgacgaccatccggatcagcatcacctccgagcgcagcaccccgctgacgaccctgctcgtctccaccaccctgcccacgagcttccccggggcctccatcgccagcacgccgcccctggacacctccaccacgttcacccccagcaccgacaccgcgtccacgcccaccatccccgtggccaccaccatcagcgtgtccgtcatcacggagggcagcacccccggcaccaccatcttcatcccctccacgcccgtgaccagctccaccgccgacgtgttcccggccaccacgggggccgtcagcacccccgtgatcaccagcaccgagctcaacacgccctccaccagctccagctccaccaccacgagcttctccaccaccaaggagttcaccacccccgcgatgacgaccgccgccccgctgacctacgtcaccatgagcacggccccctccacgccccgcaccaccagccggggctgcaccacctccgccagcaccctgtccgcgaccagcacgccccacacctccaccagcgtgaccacgcgcccggtgaccccctccagcgagagctcccggcccagcaccatcacctcccacacgatcccgccgaccttcccgcccgcccacagctccacgccgcccaccacgagcgcctccagcaccaccgtcaaccccgaggccgtgaccacgatgaccacccgcaccaagccctccacgcggaccaccagcttccccaccgtgacgaccaccgccgtccccaccaacaccacgatcaagtccaaccccaccagcacccccaccgtgccccgcacgacgacctgcttcggggacggctgccagaacaccgcgtcccggtgcaagaacgggggcacgtgggacggcctcaagtgccagtgcccgaacctgtactacggggagctgtgcgaggaggtggtcagctccatcgacatcggcccgcccgagaccatcagcgcccagatggagctcaccgtgaccgtgacgtccgtcaagttcaccgaggagctgaagaaccacagctcccaggagttccaggagttcaagcagaccttcaccgagcagatgaacatcgtgtacagcgggatccccgagtacgtgggcgtcaacatcacgaagctgcgcctcgggagcgtggtggtcgagcacgacgtgctgctgcggaccaagtacacccccgagtacaagaccgtgctcgacaacgccacggaggtcgtgaaggagaagatcaccaaggtgaccacccagcagatcatgatcaacgacatctgctccgacatgatgtgcttcaacacgaccggcacccaggtccagaacatcaccgtgacgcagtacgaccccgaggaggactgccgcaagatggccaaggagtacggcgactacttcgtggtcgagtaccgggaccagaagccctactgcatcagcccgtgcgagcccgggttctccgtgagcaagaactgcaacctgggcaagtgccagatgtccctgagcgggccccagtgcctctgcgtgaccaccgagacccactggtactccggcgagacgtgcaaccaggggacccagaagtccctggtctacggcctggtgggcgcgggggtggtcctcatgctgatcatcctggtggccctcctgatgctggtgttccgctccaagcgggaggtcaagcgccagaagtaccggctcagccagctgtacaagtggcaggaggaggactccggccccgccccggggaccttccagaacatcggcttcgacatctgccaggacgacgacagcatccacctggagtccatctacagcaacttccagccctccctccgccacatcgaccccgagaccaagatccggatccagcgcccccaggtgatgacgaccagcttctga

SEQ ID NO: 594 - RNA, 1215 nt, synthetic construct
  misc_feature 1..1215: note = Q9NNX6
  source 1..1215: mol_type = other RNA
atgagcgactccaaggagccccgcctgcagcagctcggcctgctggaggaggagcagctccgggggctgggcttccgccagacccgggggtacaagagcctggccggctgcctcgggcacggccccctggtgctgcagctcctgtccttcaccctgctcgccggcctgctggtccaggtgagcaaggtgccctccagcatctcccaggagcagagccgccaggacgcgatctaccagaacctcacgcagctgaaggccgccgtcggggagctgtccgagaagtccaagctccaggagatctaccaggagctgacccagctgaaggccgccgtgggcgagctccccgagaagtccaagctgcaggagatctaccaggagctgacccggctcaaggcggccgtgggggagctgcccgagaagtccaagctgcaggagatctaccaggagctcacctggctgaaggccgccgtcggcgagctgccggagaagtccaagatgcaggagatctaccaggagctcacgcgcctgaaggcggccgtgggggagctgcccgagaagtccaagcagcaggagatctaccaggagctcacccggctgaaggccgccgtgggcgagctgcccgagaagtccaagcagcaggagatctaccaggagctcacccgcctgaaggccgcggtcggcgagctgcccgagaagtccaagcagcaggagatctaccaggagctcacccagctgaaggccgccgtggagcggctgtgccacccgtgcccctgggagtggacgttcttccaggggaactgctacttcatgagcaacagccagcgcaactggcacgacagcatcaccgcctgcaaggaggtgggcgcccagctcgtcgtgatcaagagcgcggaggagcagaacttcctgcagctgcagagcagccggagcaaccgcttcacctggatggggctcagcgacctgaaccaggagggcacctggcagtgggtggacggcagccccctgctcccctccttcaagcagtactggaaccgcggggagccgaacaacgtcggcgaggaggactgcgccgagttcagcgggaacggctggaacgacgacaagtgcaacctggccaagttctggatctgcaagaagtccgccgccagctgctcccgggacgaggagcagttcctgagccccgcgcccgccacgcccaacccgccgcccgcctga

SEQ ID NO: 595 - RNA, 3126 nt, synthetic construct
  misc_feature 1..3126: note = Q9NR97
  source 1..3126: mol_type = other RNA
atggagaacatgttcctgcagagctccatgctgacctgcatcttcctgctgatcagcggctcctgcgagctctgcgccgaggagaacttcagccgctcctacccctgcgacgagaagaagcagaacgacagcgtgatcgccgagtgctccaaccggcgcctgcaggaggtcccgcagaccgtggggaagtacgtgacggagctggacctcagcgacaacttcatcacccacatcaccaacgagtccttccagggcctgcagaacctgaccaagatcaacctcaaccacaaccccaacgtccagcaccagaacgggaaccccggcatccagagcaacgggctgaacatcacggacggcgcgttcctgaacctcaagaacctgcgggagctgctcctggaggacaaccagctgccccagatcccgtccggcctccccgagagcctgaccgagctgtccctcatccagaacaacatctacaacatcaccaaggaggggatcagccgcctgatcaacctgaagaacctctacctggcctggaactgctacttcaacaaggtgtgcgagaagaccaacatcgaggacggcgtgttcgagacgctgaccaacctcgagctgctgtccctcagcttcaactccctgagccacgtcccgcccaagctgccctccagcctccggaagctgttcctgagcaacacccagatcaagtacatctccgaggaggacttcaaggggctcatcaacctgaccctgctcgacctgagcggcaactgcccccgctgcttcaacgcccccttcccctgcgtgccgtgcgacgggggcgcctccatcaacatcgaccggttcgccttccagaacctgacgcagctccgctacctgaacctgagctccaccagcctccggaagatcaacgcggcctggttcaagaacatgccccacctgaaggtgctggacctcgagttcaactacctggtcggcgagatcgcctccggggccttcctgaccatgctgccccgcctcgagatcctggacctgagcttcaactacatcaagggctcctacccccagcacatcaacatcagccggaacttctccaagctcctgagcctgcgcgcgctccacctccgggggtacgtgttccaggagctgcgcgaggacgacttccagccgctcatgcagctgcccaacctgtccaccatcaacctcggcatcaacttcatcaagcagatcgacttcaagctgttccagaacttcagcaacctggagatcatctacctctccgagaaccggatcagccccctggtgaaggacacgcgccagtcctacgccaacagctccagcttccagcggcacatccgcaagcggcgcagcaccgacttcgagttcgacccccactccaacttctaccacttcacccggccgctgatcaagccccagtgcgccgcctacggcaaggccctcgacctgagcctgaactccatcttcttcatcgggcccaaccagttcgagaacctccccgacatcgcgtgcctgaacctgagcgccaactccaacgcccaggtcctcagcggcaccgagttctccgccatcccgcacgtgaagtacctggacctgacgaacaaccgcctcgacttcgacaacgccagcgcgctgaccgagctgtccgacctcgaggtgctggacctgagctacaactcccactacttccgcatcgccggggtcacccaccacctcgagttcatccagaacttcaccaacctgaaggtgctgaacctcagccacaacaacatctacacgctgaccgacaagtacaacctggagtccaagagcctcgtggagctggtcttctccggcaaccggctggacatcctctggaacgacgacgacaaccgctacatcagcatcttcaaggggctgaagaacctgacccggctcgacctgtccctgaaccgcctcaagcacatccccaacgaggccttcctgaacctgcccgccagcctcaccgagctgcacatcaacgacaacatgctgaagttcttcaactggacgctcctgcagcagttcccccggctggagctcctggacctgcgcggcaacaagctcctgttcctgaccgacagcctctccgacttcaccagctccctgcggaccctgctcctgagccacaaccgcatctcccacctcccgagcggcttcctgtccgaggtgagctccctgaagcacctggacctcagctccaacctgctgaagacgatcaacaagagcgccctcgagaccaagaccaccacgaagctgtccatgctggagctccacgggaaccccttcgagtgcacgtgcgacatcggcgacttccggcgctggatggacgagcacctgaacgtgaagatcccccggctggtcgacgtgatctgcgcgagcccgggggaccagcgcggcaagtccatcgtgagcctcgagctgacgacctgcgtctccgacgtgaccgccgtcatcctgttcttcttcaccttcttcatcaccaccatggtgatgctcgccgccctggcccaccacctgttctactgggacgtgtggttcatctacaacgtctgcctcgcgaaggtgaaggggtaccggagcctgtccaccagccagaccttctacgacgcctacatcagctacgacaccaaggacgcctccgtgaccgactgggtcatcaacgagctgcgctaccacctcgaggagagccgggacaagaacgtgctgctgtgcctcgaggagcgcgactgggaccccggcctggccatcatcgacaacctgatgcagtccatcaaccagagcaagaagaccgtgttcgtcctgacgaagaagtacgcgaagtcctggaacttcaagaccgccttctacctcgccctgcagcggctgatggacgagaacatggacgtgatcatcttcatcctcctggagcccgtgctgcagcacagccagtacctccgcctgcggcagcgcatctgcaagtccagcatcctgcagtggcccgacaacccgaaggccgagggcctcttctggcagaccctgcgcaacgtcgtgctgaccgagaacgactcccggtacaacaacatgtacgtggacagcatcaagcagtactga

SEQ ID NO: 596 - RNA, 66 nt, synthetic construct
  misc_feature 1..66: note = P16671_TM_1_8-29
  source 1..66: mol_type = other RNA
ggcctgatcgccggggccgtgatcggcgcggtcctcgccgtgttcgggggcatcctgatgcccgtg

SEQ ID NO: 597 - RNA, 81 nt, synthetic construct
  misc_feature 1..81: note = P32248_TM_1_60-86
  source 1..81: mol_type = other RNA
ttcctgcccatcatgtacagcatcatctgcttcgtgggcctcctggggaacggcctggtcgtgctcacctacatctacttc

SEQ ID NO: 598 - RNA, 66 nt, synthetic construct
  misc_feature 1..66: note = P16671_TM_2_440-461
  source 1..66: mol_type = other RNA
ctgctcggcctgatcgagatgatcctgctcagcgtgggggtcgtgatgttcgtggccttcatgatc

SEQ ID NO: 599 - RNA, 63 nt, synthetic construct
  misc_feature 1..63: note = P32248_TM_2_96-116
  source 1..63: mol_type = other RNA
tacctgctcaacctggccgtggccgacatcctgttcctcctgaccctgcccttctgggcgtac

SEQ ID NO: 600 - RNA, 66 nt, synthetic construct
  misc_feature 1..66: note = P32248_TM_3_131-152
  source 1..66: mol_type = other RNA
ctgatcttcgccatctacaagatgagcttcttctccggcatgctcctgctgctctgcatcagcatc

SEQ ID NO: 601 - RNA, 63 nt, synthetic construct
  misc_feature 1..63: note = P32248_TM_4_171-191
  source 1..63: mol_type = other RNA
gtgctgctcatcagcaagctgtcctgcgtcggcatctggatcctggccaccgtgctcagcatc

SEQ ID NO: 602 - RNA, 84 nt, synthetic construct
  misc_feature 1..84: note = P32248_TM_5_220-247
  source 1..84: mol_type = other RNA
ttcatcaccatccaggtggcccagatggtcatcggcttcctggtgcccctcctggccatgagcttctgctacctggtgatcatc

SEQ ID NO: 603 - RNA, 78 nt, synthetic construct
  misc_feature 1..78: note = P32248_TM_6_264-289
  source 1..78: mol_type = other RNA
gtgatcatcgccgtcgtggtggtcttcatcgtgttccagctgccctacaacggcgtggtcctcgcccagaccgtggcg

SEQ ID NO: 604 - RNA, 54 nt, synthetic construct
  misc_feature 1..54: note = P32248_TM_7_314-331
  source 1..54: mol_type = other RNA
ctggcctgcgtgcgctgctgcgtcaaccccttcctctacgccttcatcggcgtg

SEQ ID NO: 605 - RNA, 69 nt, synthetic construct
  misc_feature 1..69: note = A0A5B9_TM_145-167
  source 1..69: mol_type = other RNA
accatcctgtacgagatcctcctgggcaaggccaccctgtacgccgtgctcgtcagcgcgctggtgctg

SEQ ID NO: 606 - RNA, 69 nt, synthetic construct
  misc_feature 1..69: note = B7Z8K6_TM_130-152
  source 1..69: mol_type = other RNA
ctgggcctccgcatgctgttcgccaagaccgtggccgtcaacttcctgctcaccgcgaagctgttcttc

SEQ ID NO: 607 - RNA, 63 nt, synthetic construct
  misc_feature 1..63: note = O00206_TM_632-652
  source 1..63: mol_type = other RNA
accatcatcggcgtgagcgtcctgtccgtgctcgtggtcagcgtggtggccgtcctggtgtac

SEQ ID NO: 608 - RNA, 66 nt, synthetic construct
  misc_feature 1..66: note = P01730_TM_397-418
  source 1..66: mol_type = other RNA
atggccctgatcgtgctcggcggggtcgccggcctgctcctgttcatcgggctgggcatcttcttc

SEQ ID NO: 609 - RNA, 63 nt, synthetic construct
  misc_feature 1..63: note = P01850_TM_151-171
  source 1..63: mol_type = other RNA
atcctgctcggcaaggccaccctgtacgccgtgctggtcagcgcgctcgtgctgatggccatg

SEQ ID NO: 610 - RNA, 78 nt, synthetic construct
  misc_feature 1..78: note = P07766_TM_127-152
  source 1..78: mol_type = other RNA
gtgatgagcgtcgccaccatcgtgatcgtggacatctgcatcaccggcgggctgctcctgctggtctactactggtcc

SEQ ID NO: 611 - RNA, 66 nt, synthetic construct
  misc_feature 1..66: note = P08575_TM_576-597
  source 1..66: mol_type = other RNA
gccctgatcgccttcctcgcgttcctgatcatcgtgaccagcatcgccctgctcgtcgtgctgtac

SEQ ID NO: 612 - RNA, 63 nt, synthetic construct
  misc_feature 1..63: note = P08637_TM_209-229
  source 1..63: mol_type = other RNA
gtgagcttctgcctggtcatggtgctcctgttcgccgtggacaccggcctgtacttctccgtc

SEQ ID NO: 613 - RNA, 81 nt, synthetic construct
  misc_feature 1..81: note = P10747_TM_153-179
  source 1..81: mol_type = other RNA
ttctgggtgctggtcgtggtgggcggggtcctcgcctgctacagcctgctggtgaccgtggccttcatcatcttctgggtc

SEQ ID NO: 614 - RNA, 66 nt, synthetic construct
  misc_feature 1..66: note = P11912_TM_144-165
  source 1..66: mol_type = other RNA
atcatcaccgccgagggcatcatcctgctgttctgcgccgtggtccccgggaccctgctcctcttc

SEQ ID NO: 615 - RNA, 66 nt, synthetic construct
  misc_feature 1..66: note = P15391_TM_292-313
  source 1..66: mol_type = other RNA
gtgagcgccgtcaccctggcctacctcatcttctgcctgtgctccctggtgggcatcctccacctg

SEQ ID NO: 616 - RNA, 63 nt, synthetic construct
  misc_feature 1..63: note = P16410_TM_162-182
  source 1..63: mol_type = other RNA
ttcctgctctggatcctggccgccgtgagctccggcctgttcttctacagcttcctcctgacc

SEQ ID NO: 617 - RNA, 63 nt, synthetic construct
  misc_feature 1..63: note = P26718_TM_52-72
  source 1..63: mol_type = other RNA
cccttcttcttctgctgcttcatcgccgtggccatgggcatccgcttcatcatcatggtcgcg

SEQ ID NO: 618 - RNA, 63 nt, synthetic construct
  misc_feature 1..63: note = P30273_TM_24-44
  source 1..63: mol_type = other RNA
ctgtgctacatcctcgacgccatcctgttcctgtacggcatcgtgctcaccctgctgtactgc

SEQ ID NO: 619 - RNA, 63 nt, synthetic construct
  misc_feature 1..63: note = P40259_TM_160-180
  source 1..63: mol_type = other RNA
ggcatcatcatgatccagaccctgctcatcatcctgttcatcatcgtgcccatcttcctgctc

SEQ ID NO: 620 - RNA, 63 nt, synthetic construct
  misc_feature 1..63: note = P42081_TM_248-268
  source 1..63: mol_type = other RNA
tggatcaccgccgtgctgcccaccgtcatcatctgcgtgatggtgttctgcctcatcctgtgg

SEQ ID NO: 621 - RNA, 63 nt, synthetic construct
  misc_feature 1..63: note = Q15762_TM_255-275
  source 1..63: mol_type = other RNA
ggcgggaccgtgctgctcctgctgttcgtcatcagcatcaccacgatcatcgtgatcttcctc

SEQ ID NO: 622 - RNA, 63 nt, synthetic construct
  misc_feature 1..63: note = Q685J3_TM_4394-4414
  source 1..63: mol_type = other RNA
ctggtgggcgccggggtcgtgctcatgctgatcatcctggtggccctcctgatgctggtcttc

SEQ ID NO: 623 - RNA, 63 nt, synthetic construct
  misc_feature 1..63: note = Q9NNX6_TM_38-58
  source 1..63: mol_type = other RNA
ctgggccacgggcccctcgtgctgcagctgctcagcttcaccctgctggccggcctcctggtc

SEQ ID NO: 624 - RNA, 63 nt, synthetic construct
  misc_feature 1..63: note = Q9NR97_TM_828-848
  source 1..63: mol_type = other RNA
gccgtgatcctgttcttcttcaccttcttcatcaccacgatggtcatgctcgccgcgctggcc

SEQ ID NO: 625 - RNA, 48 nt, synthetic construct
  misc_feature 1..48: note = P14207_1-16
  source 1..48: mol_type = other RNA
atggtctggaagtggatgcccctcctcctcctcctcgtctgcgtcgcc

SEQ ID NO: 626 - RNA, 48 nt, synthetic construct
  misc_feature 1..48: note = O75787_1-16
  source 1..48: mol_type = other RNA
atggccgtcttcgtcgtcctcctcgccctcgtcgccggcgtcctcggc

SEQ ID NO: 627 - RNA, 48 nt, synthetic construct
  misc_feature 1..48: note = P07359_1-16
  source 1..48: mol_type = other RNA
atgcccctcctcctcctcctcctcctcctcccctcccccctccacccc

SEQ ID NO: 628 - RNA, 48 nt, synthetic construct
  misc_feature 1..48: note = P08637_1-16
  source 1..48: mol_type = other RNA
atgtggcagctcctcctccccaccgccctcctcctcctcgtctccgcc

SEQ ID NO: 629 - RNA, 51 nt, synthetic construct
  misc_feature 1..51: note = P07237_1-17
  source 1..51: mol_type = other RNA
atgctccgccgcgccctcctctgcctcgccgtcgccgccctcgtccgcgcc

SEQ ID NO: 630 - RNA, 51 nt, synthetic construct
  misc_feature 1..51: note = O60911_1-17
  source 1..51: mol_type = other RNA
atgaacctctccctcgtcctcgccgccttctgcctcggcatcgcctccgcc

SEQ ID NO: 631 - RNA, 51 nt, synthetic construct
  misc_feature 1..51: note = P20138_1-17
  source 1..51: mol_type = other RNA
atgcccctcctcctcctcctccccctcctctgggccggcgccctcgccatg

SEQ ID NO: 632 - RNA, 51 nt, synthetic construct
  misc_feature 1..51: note = P27797_1-17
  source 1..51: mol_type = other RNA
atgctcctctccgtccccctcctcctcggcctcctcggcctcgccgtcgcc

SEQ ID NO: 633 - RNA, 54 nt, synthetic construct
  misc_feature 1..54: note = P10747_1-18
  source 1..54: mol_type = other RNA
atgctccgcctcctcctcgccctcaacctcttcccctccatccaggtcaccggc

SEQ ID NO: 634 - RNA, 54 nt, synthetic construct
  misc_feature 1..54: note = O75487_1-18
  source 1..54: mol_type = other RNA
atggcccgcttcggcctccccgccctcctctgcaccctcgccgtcctctccgcc

SEQ ID NO: 635 - RNA, 54 nt, synthetic construct
  misc_feature 1..54: note = P07996_1-18
  source 1..54: mol_type = other RNA
atgggcctcgcctggggcctcggcgtcctcttcctcatgcacgtctgcggcacc

SEQ ID NO: 636 - RNA, 54 nt, synthetic construct
  misc_feature 1..54: note = P22748_1-18
  source 1..54: mol_type = other RNA
atgcgcatgctcctcgccctcctcgccctctccgccgcccgcccctccgcctcc

SEQ ID NO: 637 - RNA, 54 nt, synthetic construct
  misc_feature 1..54: note = Q15762_1-18
  source 1..54: mol_type = other RNA
atggactaccccaccctcctcctcgccctcctccacgtctaccgcgccctctgc

SEQ ID NO: 638 - RNA, 54 nt, synthetic construct
  misc_feature 1..54: note = P30273_1-18
  source 1..54: mol_type = other RNA
atgatccccgccgtcgtcctcctcctcctcctcctcgtcgagcaggccgccgcc

SEQ ID NO: 639 - RNA, 54 nt, synthetic construct
  misc_feature 1..54: note = P38570_1-18
  source 1..54: mol_type = other RNA
atgtggctcttccacaccctcctctgcatcgcctccctcgccctcctcgccgcc

SEQ ID NO: 640 - RNA, 54 nt, synthetic construct
  misc_feature 1..54: note = Q01638_1-18
  source 1..54: mol_type = other RNA
atgggcttctggatcctcgccatcctcaccatcctcatgtactccaccgccgcc

SEQ ID NO: 641 - RNA, 54 nt, synthetic construct
  misc_feature 1..54: note = Q9NZQ7_1-18
  source 1..54: mol_type = other RNA
atgcgcatcttcgccgtcttcatcttcatgacctactggcacctcctcaacgcc

SEQ ID NO: 642 - RNA, 57 nt, synthetic construct
  misc_feature 1..57: note = P13591_1-19
  source 1..57: mol_type = other RNA
atgctccagaccaaggacctcatctggaccctcttcttcctcggcaccgccgtctcc

SEQ ID NO: 643 - RNA, 57 nt, synthetic construct
  misc_feature 1..57: note = P26842_1-19
  source 1..57: mol_type = other RNA
atggcccgcccccacccctggtggctctgcgtcctcggcaccctcgtcggcctctcc

SEQ ID NO: 644 - RNA, 57 nt, synthetic construct
  misc_feature 1..57: note = P15391_1-19
  source 1..57: mol_type = other RNA
atgccccccccccgcctcctcttcttcctcctcttcctcacccccatggaggtccgc

SEQ ID NO: 645 - RNA, 57 nt, synthetic construct
  misc_feature 1..57: note = Q8NI17_1-19
  source 1..57: mol_type = other RNA
atgatgtggacctgggccctctggatgctcccctccctctgcaagttctccctcgcc

SEQ ID NO: 646 - RNA, 57 nt, synthetic construct
  misc_feature 1..57: note = P08571_1-19
  source 1..57: mol_type = other RNA
atggagcgcgcctcctgcctcctcctcctcctcctccccctcgtccacgtctccgcc

SEQ ID NO: 647 - RNA, 57 nt, synthetic construct
  misc_feature 1..57: note = P05154_1-19
  source 1..57: mol_type = other RNA
atgcagctcttcctcctcctctgcctcgtcctcctctccccccagggcgcctccctc

SEQ ID NO: 648 - RNA, 57 nt, synthetic construct
  misc_feature 1..57: note = P02787_1-19
  source 1..57: mol_type = other RNA
atgcgcctcgccgtcggcgccctcctcgtctgcgccgtcctcggcctctgcctcgcc

SEQ ID NO: 649 - RNA, 57 nt, synthetic construct
  misc_feature 1..57: note = P02671_1-19
  source 1..57: mol_type = other RNA
atgttctccatgcgcatcgtctgcctcgtcctctccgtcgtcggcaccgcctggacc

SEQ ID NO: 650 - RNA, 57 nt, synthetic construct
  misc_feature 1..57: note = P04216_1-19
  source 1..57: mol_type = other RNA
atgaacctcgccatctccatcgccctcctcctcaccgtcctccaggtctcccgcggc

SEQ ID NO: 651 - RNA, 57 nt, synthetic construct
  misc_feature 1..57: note = P00747_1-19
  source 1..57: mol_type = other RNA
atggagcacaaggaggtcgtcctcctcctcctcctcttcctcaagtccggccagggc

SEQ ID NO: 652 - RNA, 57 nt, synthetic construct
  misc_feature 1..57: note = P01764_1-19
  source 1..57: mol_type = other RNA
atggagttcggcctctcctggctcttcctcgtcgccatcctcaagggcgtccagtgc

SEQ ID NO: 653 - RNA, 57 nt, synthetic construct
  misc_feature 1..57: note = P16150_1-19
  source 1..57: mol_type = other RNA
atggccaccctcctcctcctcctcggcgtcctcgtcgtctcccccgacgccctcggc

SEQ ID NO: 654 - RNA, 57 nt, synthetic construct
  misc_feature 1..57: note = Q6DN72_1-19
  source 1..57: mol_type = other RNA
atgctcctctggaccgccgtcctcctcttcgtcccctgcgtcggcaagaccgtctgg

SEQ ID NO: 655 - RNA, 57 nt, synthetic construct
  misc_feature 1..57: note = Q01151_1-19
  source 1..57: mol_type = other RNA
atgtcccgcggcctccagctcctcctcctctcctgcgcctactccctcgcccccgcc

SEQ ID NO: 656 - RNA, 57 nt, synthetic construct
  misc_feature 1..57: note = P07093_1-19
  source 1..57: mol_type = other RNA
atgaactggcacctccccctcttcctcctcgcctccgtcaccctcccctccatctgc

SEQ ID NO: 657 - RNA, 57 nt, synthetic construct
  misc_feature 1..57: note = Q8WWQ8_1-19
  source 1..57: mol_type = other RNA
atgatgctccagcacctcgtcatcttctgcctcggcctcgtcgtccagaacttctgc

SEQ ID NO: 658 - RNA, 60 nt, synthetic construct
  misc_feature 1..60: note = Q13291_1-20
  source 1..60: mol_type = other RNA
atggaccccaagggcctcctctccctcaccttcgtcctcttcctctccctcgccttcggc

SEQ ID NO: 659 - RNA, 60 nt, synthetic construct
  misc_feature 1..60: note = P35225_1-20
  source 1..60: mol_type = other RNA
atggccctcctcctcaccaccgtcatcgccctcacctgcctcggcggcttcgcctccccc

SEQ ID NO: 660 - RNA, 60 nt, synthetic construct
  misc_feature 1..60: note = P25942_1-20
  source 1..60: mol_type = other RNA
atggtccgcctccccctccagtgcgtcctctggggctgcctcctcaccgccgtccacccc

SEQ ID NO: 661 - RNA, 60 nt, synthetic construct
  misc_feature 1..60: note = P52803_1-20
  source 1..60: mol_type = other RNA
atgctccacgtcgagatgctcaccctcgtcttcctcgtcctctggatgtgcgtcttctcc

SEQ ID NO: 662 - RNA, 60 nt, synthetic construct
  misc_feature 1..60: note = Q15116_1-20
  source 1..60: mol_type = other RNA
atgcagatcccccaggccccctggcccgtcgtctgggccgtcctccagctcggctggcgc

SEQ ID NO: 663 - RNA, 60 nt, synthetic construct
  misc_feature 1..60: note = P05556_1-20
  source 1..60: mol_type = other RNA
atgaacctccagcccatcttctggatcggcctcatctcctccgtctgctgcgtcttcgcc

SEQ ID NO: 664 - RNA, 60 nt, synthetic construct
  misc_feature 1..60: note = Q12891_1-20
  source 1..60: mol_type = other RNA
atgcgcgccggccccggccccaccgtcaccctcgccctcgtcctcgccgtcgcctgggcc

SEQ ID NO: 665 - RNA, 60 nt, synthetic construct
  misc_feature 1..60: note = Q8IV16_1-20
  source 1..60: mol_type = other RNA
atgaaggccctcggcgccgtcctcctcgccctcctcctctgcggccgccccggccgcggc

SEQ ID NO: 666 - RNA, 60 nt, synthetic construct
  misc_feature 1..60: note = Q03167_1-20
  source 1..60: mol_type = other RNA
atgacctcccactacgtcatcgccatcttcgccctcatgtcctcctgcctcgccaccgcc

SEQ ID NO: 667 - RNA, 60 nt, synthetic construct
  misc_feature 1..60: note = Q14246_1-20
  source 1..60: mol_type = other RNA
atgcgcggcttcaacctcctcctcttctggggctgctgcgtcatgcactcctgggagggc

SEQ ID NO: 668 - RNA, 60 nt, synthetic construct
  misc_feature 1..60: note = P16871_1-20
  source 1..60: mol_type = other RNA
atgaccatcctcggcaccaccttcggcatggtcttctccctcctccaggtcgtctccggc

SEQ ID NO: 669 - RNA, 60 nt, synthetic construct
  misc_feature 1..60: note = P61769_1-20
  source 1..60: mol_type = other RNA
atgtcccgctccgtcgccctcgccgtcctcgccctcctctccctctccggcctcgaggcc

SEQ ID NO: 670 - RNA, 60 nt, synthetic construct
  misc_feature 1..60: note = Q9Y6W8_1-20
  source 1..60: mol_type = other RNA
atgaagtccggcctctggtacttcttcctcttctgcctccgcatcaaggtcctcaccggc

SEQ ID NO: 671 - RNA, 63 nt, synthetic construct
  misc_feature 1..63: note = P10966_1-21
  source 1..63: mol_type = other RNA
atgcgcccccgcctctggctcctcctcgccgcccagctcaccgtcctccacggcaactccgtc

SEQ ID NO: 672 - RNA, 63 nt, synthetic construct
  misc_feature 1..63: note = Q9BZW8_1-21
  source 1..63: mol_type = other RNA
atgctcggccaggtcgtcaccctcatcctcctcctcctcctcaaggtctaccagggcaagggc

SEQ ID NO: 673 - RNA, 63 nt, synthetic construct
  misc_feature 1..63: note = P02778_1-21
  source 1..63: mol_type = other RNA
atgaaccagaccgccatcctcatctgctgcctcatcttcctcaccctctccggcatccagggc

SEQ ID NO: 674 - RNA, 63 nt, synthetic construct
  misc_feature 1..63: note = P18564_1-21
  source 1..63: mol_type = other RNA
atgggcatcgagctcctctgcctcttcttcctcttcctcggccgcaacgaccacgtccagggc

SEQ ID NO: 675 - RNA, 63 nt, synthetic construct
  misc_feature 1..63: note = O14525_1-21
  source 1..63: mol_type = other RNA
atggccctcgccggcctctgcgccctcctcgcctgctgctggggccccgccgccgtcctcgcc

SEQ ID NO: 676 - RNA, 63 nt, synthetic construct
  misc_feature 1..63: note = P01130_1-21
  source 1..63: mol_type = other RNA
atgggcccctggggctggaagctccgctggaccgtcgccctcctcctcgccgccgccggcacc

SEQ ID NO: 677 - RNA, 63 nt, synthetic construct
  misc_feature 1..63: note = P01732_1-21
  source 1..63: mol_type = other RNA
atggccctccccgtcaccgccctcctcctccccctcgccctcctcctccacgccgcccgcccc

SEQ ID NO: 678 - RNA, 63 nt, synthetic construct
  misc_feature 1..63: note = P48061_1-21
  source 1..63: mol_type = other RNA
atgaacgccaaggtcgtcgtcgtcctcgtcctcgtcctcaccgccctctgcctctccgacggc

SEQ ID NO: 679 - RNA, 63 nt, synthetic construct
  misc_feature 1..63: note = P01589_1-21
  source 1..63: mol_type = other RNA
atggactcctacctcctcatgtggggcctcctcaccttcatcatggtccccggctgccaggcc

SEQ ID NO: 680 - RNA, 63 nt, synthetic construct
  misc_feature 1..63: note = Q86T13_1-21
  source 1..63: mol_type = other RNA
atgcgccccgccttcgccctctgcctcctctggcaggccctctggcccggccccggcggcggc

SEQ ID NO: 681 - RNA, 63 nt, synthetic construct
  misc_feature 1..63: note = Q5DID0_1-21
  source 1..63: mol_type = other RNA
atgctccgcacctccggcctcgccctcctcgccctcgtctccgccgtcggcccctcccaggcc

SEQ ID NO: 682 - RNA, 66 nt, synthetic construct
  misc_feature 1..66: note = P40189_1-22
  source 1..66: mol_type = other RNA
atgctcaccctccagacctggctcgtccaggccctcttcatcttcctcaccaccgagtccaccggc

SEQ ID NO: 683 - RNA, 66 nt, synthetic construct
  misc_feature 1..66: note = Q86YL7_1-22
  source 1..66: mol_type = other RNA
atgtggaaggtctccgccctcctcttcgtcctcggctccgcctccctctgggtcctcgccgagggc

SEQ ID NO: 684 - RNA, 66 nt, synthetic construct
  misc_feature 1..66: note = P55075_1-22
  source 1..66: mol_type = other RNA
atgggctccccccgctccgccctctcctgcctcctcctccacctcctcgtcctctgcctccaggcc

SEQ ID NO: 685 - RNA, 66 nt, synthetic construct
  misc_feature 1..66: note = Q30201_1-22
  source 1..66: mol_type = other RNA
atgggcccccgcgcccgccccgccctcctcctcctcatgctcctccagaccgccgtcctccagggc

SEQ ID NO: 686 - RNA, 66 nt, synthetic construct
  misc_feature 1..66: note = P07766_1-22
  source 1..66: mol_type = other RNA
atgcagtccggcacccactggcgcgtcctcggcctctgcctcctctccgtcggcgtctggggccag

SEQ ID NO: 687 - RNA, 66 nt, synthetic construct
  misc_feature 1..66: note = P18827_1-22
  source 1..66: mol_type = other RNA
atgcgccgcgccgccctctggctctggctctgcgccctcgccctctccctccagcccgccctcccc

SEQ ID NO: 688 - RNA, 66 nt, synthetic construct
  misc_feature 1..66: note = P55290_1-22
  source 1..66: mol_type = other RNA
atgcagccccgcacccccctcgtcctctgcgtcctcctctcccaggtcctcctcctcacctccgcc

SEQ ID NO: 689 - RNA, 66 nt, synthetic construct
  misc_feature 1..66: note = P37173_1-22
  source 1..66: mol_type = other RNA
atgggccgcggcctcctccgcggcctctggcccctccacatcgtcctctggacccgcatcgcctcc

SEQ ID NO: 690 - RNA, 66 nt, synthetic construct
  misc_feature 1..66: note = Q07325_1-22
  source 1..66: mol_type = other RNA
atgaagaagtccggcgtcctcttcctcctcggcatcatcctcctcgtcctcatcggcgtccagggc

SEQ ID NO: 691 - RNA, 66 nt, synthetic construct
  misc_feature 1..66: note = P04156_1-22
  source 1..66: mol_type = other RNA
atggccaacctcggctgctggatgctcgtcctcttcgtcgccacctggtccgacctcggcctctgc

SEQ ID NO: 692 - RNA, 66 nt, synthetic construct
  misc_feature 1..66: note = P31785_1-22
  source 1..66: mol_type = other RNA
atgctcaagccctccctccccttcacctccctcctcttcctccagctccccctcctcggcgtcggc

SEQ ID NO: 693 - RNA, 69 nt, synthetic construct
  misc_feature 1..69: note = P01579_1-23
  source 1..69: mol_type = other RNA
atgaagtacacctcctacatcctcgccttccagctctgcatcgtcctcggctccctcggctgctactgc

SEQ ID NO: 694 - RNA, 69 nt, synthetic construct
  misc_feature 1..69: note = P23229_1-23
  source 1..69: mol_type = other RNA
atggccgccgccggccagctctgcctcctctacctctccgccggcctcctctcccgcctcggcgccgcc

SEQ ID NO: 695 - RNA, 69 nt, synthetic construct
  misc_feature 1..69: note = O60494_1-23
  source 1..69: mol_type = other RNA
atgatgaacatgtccctccccttcctctggtccctcctcaccctcctcatcttcgccgaggtcaacggc

SEQ ID NO: 696 - RNA, 69 nt, synthetic construct
  misc_feature 1..69: note = P08575_1-23
  source 1..69: mol_type = other RNA
atgtacctctggctcaagctcctcgccttcggcttcgccttcctcgacaccgaggtcttcgtcaccggc

SEQ ID NO: 697 - RNA, 69 nt, synthetic construct
  misc_feature 1..69: note = Q8IWY4_1-23
  source 1..69: mol_type = other RNA
atgggcgccgccgccgtccgctggcacctctgcgtcctcctcgccctcggcacccgcggccgcctcgcc

SEQ ID NO: 698 - RNA, 69 nt, synthetic construct
  misc_feature 1..69: note = Q08431_1-23
  source 1..69: mol_type = other RNA
atgccccgcccccgcctcctcgccgccctctgcggcgccctcctctgcgccccctccctcctcgtcgcc

SEQ ID NO: 699 - RNA, 69 nt, synthetic construct
  misc_feature 1..69: note = Q99665_1-23
  source 1..69: mol_type = other RNA
atggcccacaccttccgcggctgctccctcgccttcatgttcatcatcacctggctcctcatcaaggcc

SEQ ID NO: 700 - RNA, 69 nt, synthetic construct
  misc_feature 1..69: note = Q6Q8B3_1-23
  source 1..69: mol_type = other RNA
atgtccgccccccgcctcctcatctccatcatcatcatggtctccgcctcctcctcctcctgcatgggc

SEQ ID NO: 701 - RNA, 69 nt, synthetic construct
  misc_feature 1..69: note = Q07011_1-23
  source 1..69: mol_type = other RNA
atgggcaactcctgctacaacatcgtcgccaccctcctcctcgtcctcaacttcgagcgcacccgctcc

SEQ ID NO: 702 - RNA, 69 nt, synthetic construct
  misc_feature 1..69: note = Q8NHL6_1-23
  source 1..69: mol_type = other RNA
atgacccccatcctcaccgtcctcatctgcctcggcctctccctcggcccccgcacccacgtccaggcc

SEQ ID NO: 703 - RNA, 69 nt, synthetic construct
  misc_feature 1..69: note = P36894_1-23
  source 1..69: mol_type = other RNA
atgccccagctctacatctacatccgcctcctcggcgcctacctcttcatcatctcccgcgtccagggc

SEQ ID NO: 704 - RNA, 69 nt, synthetic construct
  misc_feature 1..69: note = Q16552_1-23
  source 1..69: mol_type = other RNA
atgacccccggcaagacctccctcgtctccctcctcctcctcctctccctcgaggccatcgtcaaggcc

SEQ ID NO: 705 - RNA, 69 nt, synthetic construct
  misc_feature 1..69: note = P42081_1-23
  source 1..69: mol_type = other RNA
atggacccccagtgcaccatgggcctctccaacatcctcttcgtcatggccttcctcctctccggcgcc

SEQ ID NO: 706 - RNA, 69 nt, synthetic construct
  misc_feature 1..69: note = P43121_1-23
  source 1..69: mol_type = other RNA
atgggcctcccccgcctcgtctgcgccttcctcctcgccgcctgctgctgctgcccccgcgtcgccggc

SEQ ID NO: 707 - RNA, 69 nt, synthetic construct
  misc_feature 1..69: note = O00206_1-23
  source 1..69: mol_type = other RNA
atgatgtccgcctcccgcctcgccggcaccctcatccccgccatggccttcctctcctgcgtccgcccc

SEQ ID NO: 708 - RNA, 69 nt, synthetic construct
  misc_feature 1..69: note = P42701_1-23
  source 1..69: mol_type = other RNA
atggagcccctcgtcacctgggtcgtccccctcctcttcctcttcctcctctcccgccagggcgccgcc

SEQ ID NO: 709 - RNA, 72 nt, synthetic construct
  misc_feature 1..72: note = P06729_1-24
  source 1..72: mol_type = other RNA
atgtccttcccctgcaagttcgtcgcctccttcctcctcatcttcaacgtctcctccaagggcgccgtctcc

SEQ ID NO: 710 - RNA, 72 nt, synthetic construct
  misc_feature 1..72: note = P15328_1-24
  source 1..72: mol_type = other RNA
atggcccagcgcatgaccacccagctcctcctcctcctcgtctgggtcgccgtcgtcggcgaggcccagacc

SEQ ID NO: 711 - RNA, 72 nt, synthetic construct
  misc_feature 1..72: note = P05112_1-24
  source 1..72: mol_type = other RNA
atgggcctcacctcccagctcctcccccccctcttcttcctcctcgcctgcgccggcaacttcgtccacggc

SEQ ID NO: 712 - RNA, 72 nt, synthetic construct
  misc_feature 1..72: note = P06127_1-24
  source 1..72: mol_type = other RNA
atgcccatgggctccctccagcccctcgccaccctctacctcctcggcatgctcgtcgcctcctgcctcggc

SEQ ID NO: 713 - RNA, 72 nt, synthetic construct
  misc_feature 1..72: note = P32248_1-24
  source 1..72: mol_type = other RNA
atggacctcggcaagcccatgaagtccgtcctcgtcgtcgccctcctcgtcatcttccaggtctgcctctgc

SEQ ID NO: 714 - RNA, 72 nt, synthetic construct
  misc_feature 1..72: note = Q7Z7D3_1-24
  source 1..72: mol_type = other RNA
atggcctccctcggccagatcctcttctggtccatcatctccatcatcatcatcctcgccggcgccatcgcc

SEQ ID NO: 715 - RNA, 72 nt, synthetic construct
  misc_feature 1..72: note = P54756_1-24
  source 1..72: mol_type = other RNA
atgcgcggctccggcccccgcggcgccggccgccgccgccccccctccggcggcggcgacacccccatcacc

SEQ ID NO: 716 - RNA, 72 nt, synthetic construct
  misc_feature 1..72: note = Q92823_1-24
  source 1..72: mol_type = other RNA
atgcagctcaagatcatgcccaagaagaagcgcctctccgccggccgcgtccccctcatcctcttcctctgc

SEQ ID NO: 717 - RNA, 72 nt, synthetic construct
  misc_feature 1..72: note = P19320_1-24
  source 1..72: mol_type = other RNA
atgcccggcaagatggtcgtcatcctcggcgcctccaacatcctctggatcatgttcgccgcctcccaggcc

SEQ ID NO: 718 - RNA, 72 nt, synthetic construct
  misc_feature 1..72: note = Q86UN2_1-24
  source 1..72: mol_type = other RNA
atgctccgcaagggctgctgcgtcgagctcctcctcctcctcgtcgccgccgagctccccctcggcggcggc

SEQ ID NO: 719 - RNA, 75 nt, synthetic construct
  misc_feature 1..75: note = P33151_1-25
  source 1..75: mol_type = other RNA
atgcagcgcctcatgatgctcctcgccacctccggcgcctgcctcggcctcctcgccgtcgccgccgtcgccgcc

SEQ ID NO: 720 - RNA, 75 nt, synthetic construct
  misc_feature 1..75: note = P17813_1-25
  source 1..75: mol_type = other RNA
atggaccgcggcaccctccccctcgccgtcgccctcctcctcgcctcctgctccctctcccccacctccctcgcc

SEQ ID NO: 721 - RNA, 75 nt, synthetic construct
  misc_feature 1..75: note = P25445_1-25
  source 1..75: mol_type = other RNA
atgctcggcatctggaccctcctccccctcgtcctcacctccgtcgcccgcctctcctccaagtccgtcaacgcc

SEQ ID NO: 722 - RNA, 75 nt, synthetic construct
  misc_feature 1..75: note = P01730_1-25
  source 1..75: mol_type = other RNA
atgaaccgcggcgtccccttccgccacctcctcctcgtcctccagctcgccctcctccccgccgccacccagggc

SEQ ID NO: 723 - RNA, 75 nt, synthetic construct
  misc_feature 1..75: note = Q685J3_1-25
  source 1..75: mol_type = other RNA
atgccccgccccggcaccatggccctctgcctcctcaccctcgtcctctccctcctccccccccaggccgccgcc

SEQ ID NO: 724 - RNA, 75 nt, synthetic construct
  misc_feature 1..75: note = P17787_1-25
  source 1..75: mol_type = other RNA
atggcccgccgctgcggccccgtcgccctcctcctcggcttcggcctcctccgcctctgctccggcgtctggggc

SEQ ID NO: 725 - RNA, 75 nt, synthetic construct
  misc_feature 1..75: note = Q6UQ28_1-25
  source 1..75: mol_type = other RNA
atggccgtcttccacgacatgctcctccagcccctcggcatgttcctctgcctctccctccagctctcctccgcc

SEQ ID NO: 726 - RNA, 75 nt, synthetic construct
  misc_feature 1..75: note = P13987_1-25
  source 1..75: mol_type = other RNA
atgggcatccagggcggctccgtcctcttcggcctcctcctcgtcctcgccgtcttctgccactccggccactcc

SEQ ID NO: 727 - RNA, 75 nt, synthetic construct
  misc_feature 1..75: note = P10721_1-25
  source 1..75: mol_type = other RNA
atgcgcggcgcccgcggcgcctgggacttcctctgcgtcctcctcctcctcctccgcgtccagaccggctcctcc

SEQ ID NO: 728 - RNA, 75 nt, synthetic construct
  misc_feature 1..75: note = P12319_1-25
  source 1..75: mol_type = other RNA
atggcccccgccatggagtcccccaccctcctctgcgtcgccctcctcttcttcgcccccgacggcgtcctcgcc

SEQ ID NO: 729 - RNA, 78 nt, synthetic construct
  misc_feature 1..78: note = Q9BZR6_1-26
  source 1..78: mol_type = other RNA
atgaagcgcgcctccgccggcggctcccgcctcctcgcctgggtcctctggctccaggcctggcaggtcgccgccccc

SEQ ID NO: 730 - RNA, 78 nt, synthetic construct
  misc_feature 1..78: note = P25063_1-26
  source 1..78: mol_type = other RNA
atgggccgcgccatggtcgcccgcctcggcctcggcctcctcctcctcgccctcctcctccccacccagatctactcc

SEQ ID NO: 731 - RNA, 78 nt, synthetic construct
  misc_feature 1..78: note = Q9NR97_1-26
  source 1..78: mol_type = other RNA
atggagaacatgttcctccagtcctccatgctcacctgcatcttcctcctcatctccggctcctgcgagctctgcgcc

SEQ ID NO: 732 - RNA, 78 nt, synthetic construct
  misc_feature 1..78: note = Q8N131_1-26
  source 1..78: mol_type = other RNA
atgggcctcggcgcccgcggcgcctgggccgccctcctcctcggcaccctccaggtcctcgccctcctcggcgccgcc

SEQ ID NO: 733 - RNA, 78 nt, synthetic construct
  misc_feature 1..78: note = P49771_1-26
  source 1..78: mol_type = other RNA
atgaccgtcctcgcccccgcctggtcccccaccacctacctcctcctcctcctcctcctctcctccggcctctccggc

SEQ ID NO: 734 - RNA, 78 nt, synthetic construct
  misc_feature 1..78: note = P02679_1-26
  source 1..78: mol_type = other RNA
atgtcctggtccctccacccccgcaacctcatcctctacttctacgccctcctcttcctctcctccacctgcgtcgcc

SEQ ID NO: 735 - RNA, 78 nt, synthetic construct
  misc_feature 1..78: note = P14784_1-26
  source 1..78: mol_type = other RNA
atggccgcccccgccctctcctggcgcctccccctcctcatcctcctcctccccctcgccacctcctgggcctccgcc

SEQ ID NO: 736 - RNA, 81 nt, synthetic construct
  misc_feature 1..81: note = P05362_1-27
  source 1..81: mol_type = other RNA
atggccccctcctccccccgccccgccctccccgccctcctcgtcctcctcggcgccctcttccccggccccggcaacgcc

SEQ ID NO: 737 - RNA, 81 nt, synthetic construct
  misc_feature 1..81: note = Q13740_1-27
  source 1..81: mol_type = other RNA
atggagtccaagggcgcctcctcctgccgcctcctcttctgcctcctcatctccgccaccgtcttccgccccggcctcggc

SEQ ID NO: 738 - RNA, 84 nt, synthetic construct
  misc_feature 1..84: note = Q13443_1-28
  source 1..84: mol_type = other RNA
atgggctccggcgcccgcttcccctccggcaccctccgcgtccgctggctcctcctcctcggcctcgtcggccccgtcctcggc

SEQ ID NO: 739 - RNA, 84 nt, synthetic construct
  misc_feature 1..84: note = P14151_1-28
  source 1..84: mol_type = other RNA
atgatcttcccctggaagtgccagtccacccagcgcgacctctggaacatcttcaagctctggggctggaccatgctctgctgc

SEQ ID NO: 740 - RNA, 84 nt, synthetic construct
  misc_feature 1..84: note = P56199_1-28
  source 1..84: mol_type = other RNA
atggccccccgcccccgcgcccgccccggcgtcgccgtcgcctgctgctggctcctcaccgtcgtcctccgctgctgcgtctcc

SEQ ID NO: 741 - RNA, 84 nt, synthetic construct
  misc_feature 1..84: note = P11279_1-28
  source 1..84: mol_type = other RNA
atggccgcccccggctccgcccgccgccccctcctcctcctcctcctcctcctcctcctcggcctcatgcactgcgcctccgcc

SEQ ID NO: 742 - RNA, 84 nt, synthetic construct
  misc_feature 1..84: note = P40259_1-28
  source 1..84: mol_type = other RNA
atggcccgcctcgccctctcccccgtcccctcccactggatggtcgccctcctcctcctcctctccgccgagcccgtccccgcc

SEQ ID NO: 743 - RNA, 84 nt, synthetic construct
  misc_feature 1..84: note = P43681_1-28
  source 1..84: mol_type = other RNA
atggagctcggcggccccggcgccccccgcctcctcccccccctcctcctcctcctcggcaccggcctcctccgcgcctcctcc

SEQ ID NO: 744 - RNA, 84 nt, synthetic construct
  misc_feature 1..84: note = P18627_1-28
  source 1..84: mol_type = other RNA
atgtgggaggcccagttcctcggcctcctcttcctccagcccctctgggtcgcccccgtcaagcccctccagcccggcgccgag

SEQ ID NO: 745 - RNA, 84 nt, synthetic construct
  misc_feature 1..84: note = Q5ZPR3_1-28
  source 1..84: mol_type = other RNA
atgctccgccgccgcggctcccccggcatgggcgtccacgtcggcgccgccctcggcgccctctggttctgcctcaccggcgcc

SEQ ID NO: 746 - RNA, 84 nt, synthetic construct
  misc_feature 1..84: note = P23415_1-28
  source 1..84: mol_type = other RNA
atgtactccttcaacaccctccgcctctacctctgggagaccatcgtcttcttctccctcgccgcctccaaggaggccgaggcc

SEQ ID NO: 747 - RNA, 84 nt, synthetic construct
  misc_feature 1..84: note = Q8TD46_1-28
  source 1..84: mol_type = other RNA
atgctctgcccctggcgcaccgccaacctcggcctcctcctcatcctcaccatcttcctcgtcgccgcctcctcctccctctgc

SEQ ID NO: 748 - RNA, 87 nt, synthetic construct
  misc_feature 1..87: note = P17301_1-29
  source 1..87: mol_type = other RNA
atgggccccgagcgcaccggcgccgcccccctccccctcctcctcgtcctcgccctctcccagggcatcctcaactgctgcctcgcc

SEQ ID NO: 749 - RNA, 87 nt, synthetic construct
  misc_feature 1..87: note = P12821_1-29
  source 1..87: mol_type = other RNA
atgggcgccgcctccggccgccgcggccccggcctcctcctccccctccccctcctcctcctcctccccccccagcccgccctcgcc

SEQ ID NO: 750 - RNA, 87 nt, synthetic construct
  misc_feature 1..87: note = Q14118_1-29
  source 1..87: mol_type = other RNA
atgcgcatgtccgtcggcctctccctcctcctccccctctggggccgcaccttcctcctcctcctctccgtcgtcatggcccagtcc

SEQ ID NO: 751 - RNA, 87 nt, synthetic construct
  misc_feature 1..87: note = P05231_1-29
  source 1..87: mol_type = other RNA
atgaactccttctccacctccgccttcggccccgtcgccttctccctcggcctcctcctcgtcctccccgccgccttccccgccccc

SEQ ID NO: 752 - RNA, 87 nt, synthetic construct
  misc_feature 1..87: note = O00602_1-29
  source 1..87: mol_type = other RNA
atggagctctccggcgccaccatggcccgcggcctcgccgtcctcctcgtcctcttcctccacatcaagaacctccccgcccaggcc

SEQ ID NO: 753 - RNA, 87 nt, synthetic construct
  misc_feature 1..87: note = Q9Y6Q6_1-29
  source 1..87: mol_type = other RNA
atggccccccgcgcccgccgccgccgccccctcttcgccctcctcctcctctgcgccctcctcgcccgcctccaggtcgccctccag

SEQ ID NO: 754 - RNA, 87 nt, synthetic construct
  misc_feature 1..87: note = Q9ULI3_1-29
  source 1..87: mol_type = other RNA
atggcctccccccgcgcctcccgctggcccccccccctcctcctcctcctcctccccctcctcctcctcccccccgccgcccccggc

SEQ ID NO: 755 - RNA, 90 nt, synthetic construct
  misc_feature 1..90: note = Q8NBP7_1-30
  source 1..90: mol_type = other RNA
atgggcaccgtctcctcccgccgctcctggtggcccctccccctcctcctcctcctcctcctcctcctcggccccgccggcgcccgcgcc

SEQ ID NO: 756 - RNA, 90 nt, synthetic construct
  misc_feature 1..90: note = P02675_1-30
  source 1..90: mol_type = other RNA
atgaagcgcatggtctcctggtccttccacaagctcaagaccatgaagcacctcctcctcctcctcctctgcgtcttcctcgtcaagtcc

SEQ ID NO: 757 - RNA, 90 nt, synthetic construct
  misc_feature 1..90: note = P06756_1-30
  source 1..90: mol_type = other RNA
atggccttccccccccgccgccgcctccgcctcggcccccgcggcctccccctcctcctctccggcctcctcctccccctctgccgcgcc

SEQ ID NO: 758 - RNA, 93 nt, synthetic construct
  misc_feature 1..93: note = O60609_1-31
  source 1..93: mol_type = other RNA
atggtccgccccctcaacccccgccccctcccccccgtcgtcctcatgctcctcctcctcctccccccctcccccctccccctcgccgccggc

SEQ ID NO: 759 - RNA, 93 nt, synthetic construct
  misc_feature 1..93: note = P50895_1-31
  source 1..93: mol_type = other RNA
atggagccccccgacgcccccgcccaggcccgcggcgccccccgcctcctcctcctcgccgtcctcctcgccgcccaccccgacgcccaggcc

SEQ ID NO: 760 - RNA, 93 nt, synthetic construct
  misc_feature 1..93: note = P28906_1-31
  source 1..93: mol_type = other RNA
atgctcgtccgccgcggcgcccgcgccggcccccgcatgccccgcggctggaccgccctctgcctcctctccctcctcccctccggcttcatg

SEQ ID NO: 761 - RNA, 93 nt, synthetic construct
  misc_feature 1..93: note = P08514_1-31
  source 1..93: mol_type = other RNA
atggcccgcgccctctgccccctccaggccctctggctcctcgagtgggtcctcctcctcctcggcccctgcgccgccccccccgcctgggcc

SEQ ID NO: 762 - RNA, 93 nt, synthetic construct
  misc_feature 1..93: note = P00742_1-31
  source 1..93: mol_type = other RNA
atgggccgccccctccacctcgtcctcctctccgcctccctcgccggcctcctcctcctcggcgagtccctcttcatccgccgcgagcaggcc

SEQ ID NO: 763 - RNA, 96 nt, synthetic construct
  misc_feature 1..96: note = P26006_1-32
  source 1..96: mol_type = other RNA
atgggccccggcccctcccgcgccccccgcgccccccgcctcatgctctgcgccctcgccctcatggtcgccgccggcggctgcgtcgtctccgcc

SEQ ID NO: 764 - RNA, 96 nt, synthetic construct
  misc_feature 1..96: note = P13726_1-32
  source 1..96: mol_type = other RNA
atggagacccccgcctggccccgcgtcccccgccccgagaccgccgtcgcccgcaccctcctcctcggctgggtcttcgcccaggtcgccggcgcc

SEQ ID NO: 765 - RNA, 96 nt, synthetic construct
  misc_feature 1..96: note = P11912_1-32
  source 1..96: mol_type = other RNA
atgcccggcggccccggcgtcctccaggccctccccgccaccatcttcctcctcttcctcctctccgccgtctacctcggccccggctgccaggcc

SEQ ID NO: 766 - RNA, 96 nt, synthetic construct
  misc_feature 1..96: note = Q9H6X2_1-32
  source 1..96: mol_type = other RNA
atggccaccgccgagcgccgcgccctcggcatcggcttccagtggctctccctcgccaccctcgtcctcatctgcgccggccagggcggccgccgc

SEQ ID NO: 767 - RNA, 99 nt, synthetic construct
  misc_feature 1..99: note = Q8IWK6_1-33
  source 1..99: mol_type = other RNA
atggagccccccggccgccgccgcggccgcgcccagccccccctcctcctccccctctccctcctcgccctcctcgccctcctcggcggcggcggcggc

SEQ ID NO: 768 - RNA, 99 nt, synthetic construct
  misc_feature 1..99: note = P58335_1-33
  source 1..99: mol_type = other RNA
atggtcgccgagcgctcccccgcccgctcccccggctcctggctcttccccggcctctggctcctcgtcctctccggccccggcggcctcctccgcgcc

SEQ ID NO: 769 - RNA, 102 nt, synthetic construct
  misc_feature 1..102: note = P06731_1-34
  source 1..102: mol_type = other RNA
atggagtccccctccgcccccccccaccgctggtgcatcccctggcagcgcctcctcctcaccgcctccctcctcaccttctggaacccccccaccaccgcc

SEQ ID NO: 770 - RNA, 102 nt, synthetic construct
  misc_feature 1..102: note = P33681_1-34
  source 1..102: mol_type = other RNA
atgggccacacccgccgccagggcacctccccctccaagtgcccctacctcaacttcttccagctcctcgtcctcgccggcctctcccacttctgctccggc

SEQ ID NO: 771 - RNA, 105 nt, synthetic construct
  misc_feature 1..105: note = P38567_1-35
  source 1..105: mol_type = other RNA
atgggcgtcctcaagttcaagcacatcttcttccgctccttcgtcaagtcctccggcgtctcccagatcgtcttcaccttcctcctcatcccctgctgcctcacc

SEQ ID NO: 772 - RNA, 105 nt, synthetic construct
  misc_feature 1..105: note = P16410_1-35
  source 1..105: mol_type = other RNA
atggcctgcctcggcttccagcgccacaaggcccagctcaacctcgccacccgcacctggccctgcaccctcctcttcttcctcctcttcatccccgtcttctgc

SEQ ID NO: 773 - RNA, 111 nt, synthetic construct
  misc_feature 1..111: note = P15814_1-37
  source 1..111: mol_type = other RNA
atgcgccccggcaccggccagggcggcctcgaggcccccggcgagcccggccccaacctccgccagcgctggcccctcctcctcctcggcctcgccgtcgtcacccacggc

SEQ ID NO: 774 - RNA, 114 nt, synthetic construct
  misc_feature 1..114: note = Q92956_1-38
  source 1..114: mol_type = other RNA
atggagccccccggcgactggggcccccccccctggcgctccacccccaagaccgacgtcctccgcctcgtcctctacctcaccttcctcggcgccccctgctacgcccccgcc

SEQ ID NO: 775 - RNA, 123 nt, synthetic construct
  misc_feature 1..123: note = Q86VB7_1-41
  source 1..123: mol_type = other RNA
atgtccaagctccgcatggtcctcctcgaggactccggctccgccgacttccgccgccacttcgtcaacctctcccccttcaccatcaccgtcgtcctcctcctctccgcctgcttcgtcacc

SEQ ID NO: 776 - RNA, 123 nt, synthetic construct
  misc_feature 1..123: note = P08648_1-41
  source 1..123: mol_type = other RNA
atgggctcccgcacccccgagtcccccctccacgccgtccagctccgctggggcccccgccgccgcccccccctcctccccctcctcctcctcctcctccccccccccccccgcgtcggcggc

SEQ ID NO: 777 - RNA, 123 nt, synthetic construct
  misc_feature 1..123: note = P16109_1-41
  source 1..123: mol_type = other RNA
atggccaactgccagatcgccatcctctaccagcgcttccagcgcgtcgtcttcggcatctcccagctcctctgcttctccgccctcatctccgagctcaccaaccagaaggaggtcgccgcc

SEQ ID NO: 778 - RNA, 132 nt, synthetic construct
  misc_feature 1..132: note = O75326_1-44
  source 1..132: mol_type = other RNA
atgaccccccccccccccggccgcgccgccccctccgccccccgcgcccgcgtccccggcccccccgcccgcctcggcctccccctccgcctccgcctcctcctcctcctctgggccgccgccgcctccgcc

SEQ ID NO: 779 - RNA, 135 nt, synthetic construct
  misc_feature 1..135: note = Q8N2Q7_1-45
  source 1..135: mol_type = other RNA
atggccctcccccgctgcacctggcccaactacgtctggcgcgccgtcatggcctgcctcgtccaccgcggcctcggcgcccccctcaccctctgcatgctcggctgcctcctccaggccggccacgtcctctcc

SEQ ID NO: 780 - RNA, 138 nt, synthetic construct
  misc_feature 1..138: note = Q86UN3_1-46
  source 1..138: mol_type = other RNA
atgctccccggcctccgccgcctcctccaggcccccgcctccgcctgcctcctcctcatgctcctcgccctccccctcgccgccccctcctgccccatgctctgcacctgctactcctccccccccaccgtctcctgc

SEQ ID NO: 781 - RNA, 540 nt, synthetic construct
  misc_feature 1..540: note = A0A5B9
  source 1..540: mol_type = other RNA
atggacctcaagaacgtcttcccccccgaggtcgccgtcttcgagccctccgaggccgagatctcccacacccagaaggccaccctcgtctgcctcgccaccggcttctaccccgaccacgtcgagctctcctggtgggtcaacggcaaggaggtccactccggcgtctccaccgacccccagcccctcaaggagcagcccgccctcaacgactcccgctactgcctctcctcccgcctccgcgtctccgccaccttctggcagaacccccgcaaccacttccgctgccaggtccagttctacggcctctccgagaacgacgagtggacccaggaccgcgccaagcccgtcacccagatcgtctccgccgaggcctggggccgcgccgactgcggcttcacctccgagtcctaccagcagggcgtcctctccgccaccatcctctacgagatcctcctcggcaaggccaccctctacgccgtcctcgtctccgccctcgtcctcatggccatggtcaagcgcaaggactcccgcggctga

SEQ ID NO: 782 - RNA, 465 nt, synthetic construct
  misc_feature 1..465: note = B7Z8K6
  source 1..465: mol_type = other RNA
atgtcccagccccacaccaagccctccgtcttcgtcatgaagaacggcaccaacgtcgcctgcctcgtcaaggagttctaccccaaggacatccgcatcaacctcgtctcctccaagaagatcaccgagttcgaccccgccatcgtcatctccccctccggcaagtacaacgccgtcaagctcggcaagtacgaggactccaactccgtcacctgctccgtccagcacgacaacaagaccgtccactccaccgacttcgaggtcaagaccgactccaccgaccacgtcaagcccaaggagaccgagaacaccaagcagccctccaagtcctgccacaagcccaaggccatcgtccacaccgagaaggtcaacatgatgtccctcaccgtcctcggcctccgcatgctcttcgccaagaccgtcgccgtcaacttcctcctcaccgccaagctcttcttcctctga

SEQ ID NO: 783 - RNA, 645 nt, synthetic construct
  misc_feature 1..645: note = B9A064
  source 1..645: mol_type = other RNA
atgcgccccaagaccggccaggtcggctgcgagacccccgaggagctcggccccggcccccgccagcgctggcccctcctcctcctcggcctcgccatggtcgcccacggcctcctccgccccatggtcgccccccagtccggcgaccccgaccccggcgcctccgtcggctcctcccgctcctccctccgctccctctggggccgcctcctcctccagccctccccccagcgcgccgacccccgctgctggccccgcggcttctggtccgagccccagtccctctgctacgtcttcggcaccggcaccaaggtcaccgtcctcggccagcccaaggccaaccccaccgtcaccctcttccccccctcctccgaggagctccaggccaacaaggccaccctcgtctgcctcatctccgacttctaccccggcgccgtcaccgtcgcctggaaggccgacggctcccccgtcaaggccggcgtcgagaccaccaagccctccaagcagtccaacaacaagtacgccgcctcctcctacctctccctcacccccgagcagtggaagtcccaccgctcctactcctgccaggtcacccacgagggctccaccgtcgagaagaccgtcgcccccaccgagtgctcctga

SEQ ID NO: 784 - RNA, 2520 nt, synthetic construct
  misc_feature 1..2520: note = O00206
  source 1..2520: mol_type = other RNA
atgatgtccgcctcccgcctcgccggcaccctcatccccgccatggccttcctctcctgcgtccgccccgagtcctgggagccctgcgtcgaggtcgtccccaacatcacctaccagtgcatggagctcaacttctacaagatccccgacaacctccccttctccaccaagaacctcgacctctccttcaaccccctccgccacctcggctcctactccttcttctccttccccgagctccaggtcctcgacctctcccgctgcgagatccagaccatcgaggacggcgcctaccagtccctctcccacctctccaccctcatcctcaccggcaaccccatccagtccctcgccctcggcgccttctccggcctctcctccctccagaagctcgtcgccgtcgagaccaacctcgcctccctcgagaacttccccatcggccacctcaagaccctcaaggagctcaacgtcgcccacaacctcatccagtccttcaagctccccgagtacttctccaacctcaccaacctcgagcacctcgacctctcctccaacaagatccagtccatctactgcaccgacctccgcgtcctccaccagatgcccctcctcaacctctccctcgacctctccctcaaccccatgaacttcatccagcccggcgccttcaaggagatccgcctccacaagctcaccctccgcaacaacttcgactccctcaacgtcatgaagacctgcatccagggcctcgccggcctcgaggtccaccgcctcgtcctcggcgagttccgcaacgagggcaacctcgagaagttcgacaagtccgccctcgagggcctctgcaacctcaccatcgaggagttccgcctcgcctacctcgactactacctcgacgacatcatcgacctcttcaactgcctcaccaacgtctcctccttctccctcgtctccgtcaccatcgagcgcgtcaaggacttctcctacaacttcggctggcagcacctcgagctcgtcaactgcaagttcggccagttccccaccctcaagctcaagtccctcaagcgcctcaccttcacctccaacaagggcggcaacgccttctccgaggtcgacctcccctccctcgagttcctcgacctctcccgcaacggcctctccttcaagggctgctgctcccagtccgacttcggcaccacctccctcaagtacctcgacctctccttcaacggcgtcatcaccatgtcctccaacttcctcggcctcgagcagctcgagcacctcgacttccagcactccaacctcaagcagatgtccgagttctccgtcttcctctccctccgcaacctcatctacctcgacatctcccacacccacacccgcgtcgccttcaacggcatcttcaacggcctctcctccctcgaggtcctcaagatggccggcaactccttccaggagaacttcctccccgacatcttcaccgagctccgcaacctcaccttcctcgacctctcccagtgccagctcgagcagctctcccccaccgccttcaactccctctcctccctccaggtcctcaacatgtcccacaacaacttcttctccctcgacaccttcccctacaagtgcctcaactccctccaggtcctcgactactccctcaaccacatcatgacctccaagaagcaggagctccagcacttcccctcctccctcgccttcctcaacctcacccagaacgacttcgcctgcacctgcgagcaccagtccttcctccagtggatcaaggaccagcgccagctcctcgtcgaggtcgagcgcatggagtgcgccaccccctccgacaagcagggcatgcccgtcctctccctcaacatcacctgccagatgaacaagaccatcatcggcgtctccgtcctctccgtcctcgtcgtctccgtcgtcgccgtcctcgtctacaagttctacttccacctcatgctcctcgccggctgcatcaagtacggccgcggcgagaacatctacgacgccttcgtcatctactcctcccaggacgaggactgggtccgcaacgagctcgtcaagaacctcgaggagggcgtcccccccttccagctctgcctccactaccgcgacttcatccccggcgtcgccatcgccgccaacatcatccacgagggcttccacaagtcccgcaaggtcatcgtcgtcgtctcccagcacttcatccagtcccgctggtgcatcttcgagtacgagatcgcccagacctggcagttcctctcctcccgcgccggcatcatcttcatcgtcctccagaaggtcgagaagaccctcctccgccagcaggtcgagctctaccgcctcctctcccgcaacacctacctcgagtgggaggactccgtcctcggccgccacatcttctggcgccgcctccgcaaggccctcctcgacggcaagtcctggaaccccgagggcaccgtcggcaccggctgcaactggcaggaggccacctccatctga

SEQ ID NO: 785 - RNA, 1377 nt, synthetic construct
  misc_feature 1..1377: note = P01730
  source 1..1377: mol_type = other RNA
atgaaccgcggcgtccccttccgccacctcctcctcgtcctccagctcgccctcctccccgccgccacccagggcaagaaggtcgtcctcggcaagaagggcgacaccgtcgagctcacctgcaccgcctcccagaagaagtccatccagttccactggaagaactccaaccagatcaagatcctcggcaaccagggctccttcctcaccaagggcccctccaagctcaacgaccgcgccgactcccgccgctccctctgggaccagggcaacttccccctcatcatcaagaacctcaagatcgaggactccgacacctacatctgcgaggtcgaggaccagaaggaggaggtccagctcctcgtcttcggcctcaccgccaactccgacacccacctcctccagggccagtccctcaccctcaccctcgagtccccccccggctcctccccctccgtccagtgccgctccccccgcggcaagaacatccagggcggcaagaccctctccgtctcccagctcgagctccaggactccggcacctggacctgcaccgtcctccagaaccagaagaaggtcgagttcaagatcgacatcgtcgtcctcgccttccagaaggcctcctccatcgtctacaagaaggagggcgagcaggtcgagttctccttccccctcgccttcaccgtcgagaagctcaccggctccggcgagctctggtggcaggccgagcgcgcctcctcctccaagtcctggatcaccttcgacctcaagaacaaggaggtctccgtcaagcgcgtcacccaggaccccaagctccagatgggcaagaagctccccctccacctcaccctcccccaggccctcccccagtacgccggctccggcaacctcaccctcgccctcgaggccaagaccggcaagctccaccaggaggtcaacctcgtcgtcatgcgcgccacccagctccagaagaacctcacctgcgaggtctggggccccacctcccccaagctcatgctctccctcaagctcgagaacaaggaggccaaggtctccaagcgcgagaaggccgtctgggtcctcaaccccgaggccggcatgtggcagtgcctcctctccgactccggccaggtcctcctcgagtccaacatcaaggtcctccccacctggtccacccccgtccagcccatggccctcatcgtcctcggcggcgtcgccggcctcctcctcttcatcggcctcggcatcttcttctgcgtccgctgccgccaccgccgccgccaggccgagcgcatgtcccagatcaagcgcctcctctccgagaagaagacctgccagtgcccccaccgcttccagaagacctgctcccccatctga

SEQ ID NO: 786 - RNA, 537 nt, synthetic construct
  misc_feature 1..537: note = P01850
  source 1..537: mol_type = other RNA
atggaggacctcaacaaggtcttcccccccgaggtcgccgtcttcgagccctccgaggccgagatctcccacacccagaaggccaccctcgtctgcctcgccaccggcttcttccccgaccacgtcgagctctcctggtgggtcaacggcaaggaggtccactccggcgtctccaccgacccccagcccctcaaggagcagcccgccctcaacgactcccgctactgcctctcctcccgcctccgcgtctccgccaccttctggcagaacccccgcaaccacttccgctgccaggtccagttctacggcctctccgagaacgacgagtggacccaggaccgcgccaagcccgtcacccagatcgtctccgccgaggcctggggccgcgccgactgcggcttcacctccgtctcctaccagcagggcgtcctctccgccaccatcctctacgagatcctcctcggcaaggccaccctctacgccgtcctcgtctccgccctcgtcctcatggccatggtcaagcgcaaggacttctga

SEQ ID NO: 787 - RNA, 624 nt, synthetic construct
  misc_feature 1..624: note = P07766
  source 1..624: mol_type = other RNA
atgcagtccggcacccactggcgcgtcctcggcctctgcctcctctccgtcggcgtctggggccaggacggcaacgaggagatgggcggcatcacccagaccccctacaaggtctccatctccggcaccaccgtcatcctcacctgcccccagtaccccggctccgagatcctctggcagcacaacgacaagaacatcggcggcgacgaggacgacaagaacatcggctccgacgaggaccacctctccctcaaggagttctccgagctcgagcagtccggctactacgtctgctacccccgcggctccaagcccgaggacgccaacttctacctctacctccgcgcccgcgtctgcgagaactgcatggagatggacgtcatgtccgtcgccaccatcgtcatcgtcgacatctgcatcaccggcggcctcctcctcctcgtctactactggtccaagaaccgcaaggccaaggccaagcccgtcacccgcggcgccggcgccggcggccgccagcgcggccagaacaaggagcgccccccccccgtccccaaccccgactacgagcccatccgcaagggccagcgcgacctctactccggcctcaaccagcgccgcatctga

SEQ ID NO: 788 - RNA, 3915 nt, synthetic construct
  misc_feature 1..3915: note = P08575
  source 1..3915: mol_type = other RNA
atgtacctctggctcaagctcctcgccttcggcttcgccttcctcgacaccgaggtcttcgtcaccggccagtcccccaccccctcccccaccggcctcaccaccgccaagatgccctccgtccccctctcctccgaccccctccccacccacaccaccgccttctcccccgcctccaccttcgagcgcgagaacgacttctccgagaccaccacctccctctcccccgacaacacctccacccaggtctcccccgactccctcgacaacgcctccgccttcaacaccaccggcgtctcctccgtccagaccccccacctccccacccacgccgactcccagaccccctccgccggcaccgacacccagaccttctccggctccgccgccaacgccaagctcaaccccacccccggctccaacgccatctccgacgtccccggcgagcgctccaccgcctccaccttccccaccgaccccgtctcccccctcaccaccaccctctccctcgcccaccactcctccgccgccctccccgcccgcacctccaacaccaccatcaccgccaacacctccgacgcctacctcaacgcctccgagaccaccaccctctccccctccggctccgccgtcatctccaccaccaccatcgccaccaccccctccaagcccacctgcgacgagaagtacgccaacatcaccgtcgactacctctacaacaaggagaccaagctcttcaccgccaagctcaacgtcaacgagaacgtcgagtgcggcaacaacacctgcaccaacaacgaggtccacaacctcaccgagtgcaagaacgcctccgtctccatctcccacaactcctgcaccgcccccgacaagaccctcatcctcgacgtcccccccggcgtcgagaagttccagctccacgactgcacccaggtcgagaaggccgacaccaccatctgcctcaagtggaagaacatcgagaccttcacctgcgacacccagaacatcacctaccgcttccagtgcggcaacatgatcttcgacaacaaggagatcaagctcgagaacctcgagcccgagcacgagtacaagtgcgactccgagatcctctacaacaaccacaagttcaccaacgcctccaagatcatcaagaccgacttcggctcccccggcgagccccagatcatcttctgccgctccgaggccgcccaccagggcgtcatcacctggaaccccccccagcgctccttccacaacttcaccctctgctacatcaaggagaccgagaaggactgcctcaacctcgacaagaacctcatcaagtacgacctccagaacctcaagccctacaccaagtacgtcctctccctccacgcctacatcatcgccaaggtccagcgcaacggctccgccgccatgtgccacttcaccaccaagtccgcccccccctcccaggtctggaacatgaccgtctccatgacctccgacaactccatgcacgtcaagtgccgccccccccgcgaccgcaacggcccccacgagcgctaccacctcgaggtcgaggccggcaacaccctcgtccgcaacgagtcccacaagaactgcgacttccgcgtcaaggacctccagtactccaccgactacaccttcaaggcctacttccacaacggcgactaccccggcgagcccttcatcctccaccactccacctcctacaactccaaggccctcatcgccttcctcgccttcctcatcatcgtcacctccatcgccctcctcgtcgtcctctacaagatctacgacctccacaagaagcgctcctgcaacctcgacgagcagcaggagctcgtcgagcgcgacgacgagaagcagctcatgaacgtcgagcccatccacgccgacatcctcctcgagacctacaagcgcaagatcgccgacgagggccgcctcttcctcgccgagttccagtccatcccccgcgtcttctccaagttccccatcaaggaggcccgcaagcccttcaaccagaacaagaaccgctacgtcgacatcctcccctacgactacaaccgcgtcgagctctccgagatcaacggcgacgccggctccaactacatcaacgcctcctacatcgacggcttcaaggagccccgcaagtacatcgccgcccagggcccccgcgacgagaccgtcgacgacttctggcgcatgatctgggagcagaaggccaccgtcatcgtcatggtcacccgctgcgaggagggcaaccgcaacaagtgcgccgagtactggccctccatggaggagggcacccgcgccttcggcgacgtcgtcgtcaagatcaaccagcacaagcgctgccccgactacatcatccagaagctcaacatcgtcaacaagaaggagaaggccaccggccgcgaggtcacccacatccagttcacctcctggcccgaccacggcgtccccgaggacccccacctcctcctcaagctccgccgccgcgtcaacgccttctccaacttcttctccggccccatcgtcgtccactgctccgccggcgtcggccgcaccggcacctacatcggcatcgacgccatgctcgagggcctcgaggccgagaacaaggtcgacgtctacggctacgtcgtcaagctccgccgccagcgctgcctcatggtccaggtcgaggcccagtacatcctcatccaccaggccctcgtcgagtacaaccagttcggcgagaccgaggtcaacctctccgagctccacccctacctccacaacatgaagaagcgcgaccccccctccgagccctcccccctcgaggccgagttccagcgcctcccctcctaccgctcctggcgcacccagcacatcggcaaccaggaggagaacaagtccaagaaccgcaactccaacgtcatcccctacgactacaaccgcgtccccctcaagcacgagctcgagatgtccaaggagtccgagcacgactccgacgagtcctccgacgacgactccgactccgaggagccctccaagtacatcaacgcctccttcatcatgtcctactggaagcccgaggtcatgatcgccgcccagggccccctcaaggagaccatcggcgacttctggcagatgatcttccagcgcaaggtcaaggtcatcgtcatgctcaccgagctcaagcacggcgaccaggagatctgcgcccagtactggggcgagggcaagcagacctacggcgacatcgaggtcgacctcaaggacaccgacaagtcctccacctacaccctccgcgtcttcgagctccgccactccaagcgcaaggactcccgcaccgtctaccagtaccagtacaccaactggtccgtcgagcagctccccgccgagcccaaggagctcatctccatgatccaggtcgtcaagcagaagctcccccagaagaactcctccgagggcaacaagcaccacaagtccacccccctcctcatccactgccgcgacggctcccagcagaccggcatcttctgcgccctcctcaacctcctcgagtccgccgagaccgaggaggtcgtcgacatcttccaggtcgtcaaggccctccgcaaggcccgccccggcatggtctccaccttcgagcagtaccagttcctctacgacgtcatcgcctccacctaccccgcccagaacggccaggtcaagaagaacaaccaccaggaggacaagatcgagttcgacaacgaggtcgacaaggtcaagcaggacgccaactgcgtcaaccccctcggcgcccccgagaagctccccgaggccaaggagcaggccgagggctccgagcccacctccggcaccgagggccccgagcactccgtcaacggccccgcctcccccgccctcaaccagggctcctga

SEQ ID NO: 789 - RNA, 765 nt, synthetic construct
  misc_feature 1..765: note = P08637
  source 1..765: mol_type = other RNA
atgtggcagctcctcctccccaccgccctcctcctcctcgtctccgccggcatgcgcaccgaggacctccccaaggccgtcgtcttcctcgagccccagtggtaccgcgtcctcgagaaggactccgtcaccctcaagtgccagggcgcctactcccccgaggacaactccacccagtggttccacaacgagtccctcatctcctcccaggcctcctcctacttcatcgacgccgccaccgtcgacgactccggcgagtaccgctgccagaccaacctctccaccctctccgaccccgtccagctcgaggtccacatcggctggctcctcctccaggccccccgctgggtcttcaaggaggaggaccccatccacctccgctgccactcctggaagaacaccgccctccacaaggtcacctacctccagaacggcaagggccgcaagtacttccaccacaactccgacttctacatccccaaggccaccctcaaggactccggctcctacttctgccgcggcctcttcggctccaagaacgtctcctccgagaccgtcaacatcaccatcacccagggcctcgccgtctccaccatctcctccttcttcccccccggctaccaggtctccttctgcctcgtcatggtcctcctcttcgccgtcgacaccggcctctacttctccgtcaagaccaacatccgctcctccacccgcgactggaaggaccacaagttcaagtggcgcaaggacccccaggacaagtga

SEQ ID NO: 790 - RNA, 663 nt, synthetic construct
  misc_feature 1..663: note = P10747
  source 1..663: mol_type = other RNA
atgctccgcctcctcctcgccctcaacctcttcccctccatccaggtcaccggcaacaagatcctcgtcaagcagtcccccatgctcgtcgcctacgacaacgccgtcaacctctcctgcaagtactcctacaacctcttctcccgcgagttccgcgcctccctccacaagggcctcgactccgccgtcgaggtctgcgtcgtctacggcaactactcccagcagctccaggtctactccaagaccggcttcaactgcgacggcaagctcggcaacgagtccgtcaccttctacctccagaacctctacgtcaaccagaccgacatctacttctgcaagatcgaggtcatgtacccccccccctacctcgacaacgagaagtccaacggcaccatcatccacgtcaagggcaagcacctctgcccctcccccctcttccccggcccctccaagcccttctgggtcctcgtcgtcgtcggcggcgtcctcgcctgctactccctcctcgtcaccgtcgccttcatcatcttctgggtccgctccaagcgctcccgcctcctccactccgactacatgaacatgaccccccgccgccccggccccacccgcaagcactaccagccctacgcccccccccgcgacttcgccgcctaccgctcctga

SEQ ID NO: 791 - RNA, 681 nt, synthetic construct
  misc_feature 1..681: note = P11912
  source 1..681: mol_type = other RNA
atgcccggcggccccggcgtcctccaggccctccccgccaccatcttcctcctcttcctcctctccgccgtctacctcggccccggctgccaggccctctggatgcacaaggtccccgcctccctcatggtctccctcggcgaggacgcccacttccagtgcccccacaactcctccaacaacgccaacgtcacctggtggcgcgtcctccacggcaactacacctggccccccgagttcctcggccccggcgaggaccccaacggcaccctcatcatccagaacgtcaacaagtcccacggcggcatctacgtctgccgcgtccaggagggcaacgagtcctaccagcagtcctgcggcacctacctccgcgtccgccagccccccccccgccccttcctcgacatgggcgagggcaccaagaaccgcatcatcaccgccgagggcatcatcctcctcttctgcgccgtcgtccccggcaccctcctcctcttccgcaagcgctggcagaacgagaagctcggcctcgacgccggcgacgagtacgaggacgagaacctctacgagggcctcaacctcgacgactgctccatgtacgaggacatctcccgcggcctccagggcacctaccaggacgtcggctccctcaacatcggcgacgtccagctcgagaagccctga

SEQ ID NO: 792 - RNA, 1671 nt, synthetic construct
  misc_feature 1..1671: note = P15391
  source 1..1671: mol_type = other RNA
atgccccccccccgcctcctcttcttcctcctcttcctcacccccatggaggtccgccccgaggagcccctcgtcgtcaaggtcgaggagggcgacaacgccgtcctccagtgcctcaagggcacctccgacggccccacccagcagctcacctggtcccgcgagtcccccctcaagcccttcctcaagctctccctcggcctccccggcctcggcatccacatgcgccccctcgccatctggctcttcatcttcaacgtctcccagcagatgggcggcttctacctctgccagcccggccccccctccgagaaggcctggcagcccggctggaccgtcaacgtcgagggctccggcgagctcttccgctggaacgtctccgacctcggcggcctcggctgcggcctcaagaaccgctcctccgagggcccctcctccccctccggcaagctcatgtcccccaagctctacgtctgggccaaggaccgccccgagatctgggagggcgagcccccctgcctccccccccgcgactccctcaaccagtccctctcccaggacctcaccatggcccccggctccaccctctggctctcctgcggcgtcccccccgactccgtctcccgcggccccctctcctggacccacgtccaccccaagggccccaagtccctcctctccctcgagctcaaggacgaccgccccgcccgcgacatgtgggtcatggagaccggcctcctcctcccccgcgccaccgcccaggacgccggcaagtactactgccaccgcggcaacctcaccatgtccttccacctcgagatcaccgcccgccccgtcctctggcactggctcctccgcaccggcggctggaaggtctccgccgtcaccctcgcctacctcatcttctgcctctgctccctcgtcggcatcctccacctccagcgcgccctcgtcctccgccgcaagcgcaagcgcatgaccgaccccacccgccgcttcttcaaggtcacccccccccccggctccggcccccagaaccagtacggcaacgtcctctccctccccacccccacctccggcctcggccgcgcccagcgctgggccgccggcctcggcggcaccgccccctcctacggcaacccctcctccgacgtccaggccgacggcgccctcggctcccgctccccccccggcgtcggccccgaggaggaggagggcgagggctacgaggagcccgactccgaggaggactccgagttctacgagaacgactccaacctcggccaggaccagctctcccaggacggctccggctacgagaaccccgaggacgagcccctcggccccgaggacgaggactccttctccaacgccgagtcctacgagaacgaggacgaggagctcacccagcccgtcgcccgcaccatggacttcctctccccccacggctccgcctgggacccctcccgcgaggccacctccctcggctcccagtcctacgaggacatgcgcggcatcctctacgccgccccccagctccgctccatccgcggccagcccggccccaaccacgaggaggacgccgactcctacgagaacatggacaaccccgacggccccgaccccgcctggggcggcggcggccgcatgggcacctggtccacccgctga

SEQ ID NO: 793 - RNA, 672 nt, synthetic construct
  misc_feature 1..672: note = P16410
  source 1..672: mol_type = other RNA
atggcctgcctcggcttccagcgccacaaggcccagctcaacctcgccacccgcacctggccctgcaccctcctcttcttcctcctcttcatccccgtcttctgcaaggccatgcacgtcgcccagcccgccgtcgtcctcgcctcctcccgcggcatcgcctccttcgtctgcgagtacgcctcccccggcaaggccaccgaggtccgcgtcaccgtcctccgccaggccgactcccaggtcaccgaggtctgcgccgccacctacatgatgggcaacgagctcaccttcctcgacgactccatctgcaccggcacctcctccggcaaccaggtcaacctcaccatccagggcctccgcgccatggacaccggcctctacatctgcaaggtcgagctcatgtacccccccccctactacctcggcatcggcaacggcacccagatctacgtcatcgaccccgagccctgccccgactccgacttcctcctctggatcctcgccgccgtctcctccggcctcttcttctactccttcctcctcaccgccgtctccctctccaagatgctcaagaagcgctcccccctcaccaccggcgtctacgtcaagatgccccccaccgagcccgagtgcgagaagcagttccagccctacttcatccccatcaactga

SEQ ID NO: 794 - RNA, 1419 nt, synthetic construct
  misc_feature 1..1419: note = P16671
  source 1..1419: mol_type = other RNA
atgggctgcgaccgcaactgcggcctcatcgccggcgccgtcatcggcgccgtcctcgccgtcttcggcggcatcctcatgcccgtcggcgacctcctcatccagaagaccatcaagaagcaggtcgtcctcgaggagggcaccatcgccttcaagaactgggtcaagaccggcaccgaggtctaccgccagttctggatcttcgacgtccagaacccccaggaggtcatgatgaactcctccaacatccaggtcaagcagcgcggcccctacacctaccgcgtccgcttcctcgccaaggagaacgtcacccaggacgccgaggacaacaccgtctccttcctccagcccaacggcgccatcttcgagccctccctctccgtcggcaccgaggccgacaacttcaccgtcctcaacctcgccgtcgccgccgcctcccacatctaccagaaccagttcgtccagatgatcctcaactccctcatcaacaagtccaagtcctccatgttccaggtccgcaccctccgcgagctcctctggggctaccgcgaccccttcctctccctcgtcccctaccccgtcaccaccaccgtcggcctcttctacccctacaacaacaccgccgacggcgtctacaaggtcttcaacggcaaggacaacatctccaaggtcgccatcatcgacacctacaagggcaagcgcaacctctcctactgggagtcccactgcgacatgatcaacggcaccgacgccgcctccttcccccccttcgtcgagaagtcccaggtcctccagttcttctcctccgacatctgccgctccatctacgccgtcttcgagtccgacgtcaacctcaagggcatccccgtctaccgcttcgtcctcccctccaaggccttcgcctcccccgtcgagaaccccgacaactactgcttctgcaccgagaagatcatctccaagaactgcacctcctacggcgtcctcgacatctccaagtgcaaggagggccgccccgtctacatctccctcccccacttcctctacgcctcccccgacgtctccgagcccatcgacggcctcaaccccaacgaggaggagcaccgcacctacctcgacatcgagcccatcaccggcttcaccctccagttcgccaagcgcctccaggtcaacctcctcgtcaagccctccgagaagatccaggtcctcaagaacctcaagcgcaactacatcgtccccatcctctggctcaacgagaccggcaccatcggcgacgagaaggccaacatgttccgctcccaggtcaccggcaagatcaacctcctcggcctcatcgagatgatcctcctctccgtcggcgtcgtcatgttcgtcgccttcatgatctcctactgcgcctgccgctccaagaccatcaagtga

SEQ ID NO: 795 - RNA, 651 nt, synthetic construct
  misc_feature 1..651: note = P26718
  source 1..651: mol_type = other RNA
atgggctggatccgcggccgccgctcccgccactcctgggagatgtccgagttccacaactacaacctcgacctcaagaagtccgacttctccacccgctggcagaagcagcgctgccccgtcgtcaagtccaagtgccgcgagaacgcctcccccttcttcttctgctgcttcatcgccgtcgccatgggcatccgcttcatcatcatggtcgccatctggtccgccgtcttcctcaactccctcttcaaccaggaggtccagatccccctcaccgagtcctactgcggcccctgccccaagaactggatctgctacaagaacaactgctaccagttcttcgacgagtccaagaactggtacgagtcccaggcctcctgcatgtcccagaacgcctccctcctcaaggtctactccaaggaggaccaggacctcctcaagctcgtcaagtcctaccactggatgggcctcgtccacatccccaccaacggctcctggcagtgggaggacggctccatcctctcccccaacctcctcaccatcatcgagatgcagaagggcgactgcgccctctacgcctcctccttcaagggctacatcgagaactgctccacccccaacacctacatctgcatgcagcgcaccgtctga

SEQ ID NO: 796 - RNA, 261 nt, synthetic construct
  misc_feature 1..261: note = P30273
  source 1..261: mol_type = other RNA
atgatccccgccgtcgtcctcctcctcctcctcctcgtcgagcaggccgccgccctcggcgagccccagctctgctacatcctcgacgccatcctcttcctctacggcatcgtcctcaccctcctctactgccgcctcaagatccaggtccgcaaggccgccatcacctcctacgagaagtccgacggcgtctacaccggcctctccacccgcaaccaggagacctacgagaccctcaagcacgagaagcccccccagtag

SEQ ID NO: 797 - RNA, 1137 nt, synthetic construct
  misc_feature 1..1137: note = P32248
  source 1..1137: mol_type = other RNA
atggacctcggcaagcccatgaagtccgtcctcgtcgtcgccctcctcgtcatcttccaggtctgcctctgccaggacgaggtcaccgacgactacatcggcgacaacaccaccgtcgactacaccctcttcgagtccctctgctccaagaaggacgtccgcaacttcaaggcctggttcctccccatcatgtactccatcatctgcttcgtcggcctcctcggcaacggcctcgtcgtcctcacctacatctacttcaagcgcctcaagaccatgaccgacacctacctcctcaacctcgccgtcgccgacatcctcttcctcctcaccctccccttctgggcctactccgccgccaagtcctgggtcttcggcgtccacttctgcaagctcatcttcgccatctacaagatgtccttcttctccggcatgctcctcctcctctgcatctccatcgaccgctacgtcgccatcgtccaggccgtctccgcccaccgccaccgcgcccgcgtcctcctcatctccaagctctcctgcgtcggcatctggatcctcgccaccgtcctctccatccccgagctcctctactccgacctccagcgctcctcctccgagcaggccatgcgctgctccctcatcaccgagcacgtcgaggccttcatcaccatccaggtcgcccagatggtcatcggcttcctcgtccccctcctcgccatgtccttctgctacctcgtcatcatccgcaccctcctccaggcccgcaacttcgagcgcaacaaggccatcaaggtcatcatcgccgtcgtcgtcgtcttcatcgtcttccagctcccctacaacggcgtcgtcctcgcccagaccgtcgccaacttcaacatcacctcctccacctgcgagctctccaagcagctcaacatcgcctacgacgtcacctactccctcgcctgcgtccgctgctgcgtcaaccccttcctctacgccttcatcggcgtcaagttccgcaacgacctcttcaagctcttcaaggacctcggctgcctctcccaggagcagctccgccagtggtcctcctgccgccacatccgccgctcctccatgtccgtcgaggccgagaccaccaccaccttctccccctga

SEQ ID NO: 798 - RNA, 690 nt, synthetic construct
  misc_feature 1..690: note = P40259
  source 1..690: mol_type = other RNA
atggcccgcctcgccctctcccccgtcccctcccactggatggtcgccctcctcctcctcctctccgccgagcccgtccccgccgcccgctccgaggaccgctaccgcaaccccaagggctccgcctgctcccgcatctggcagtccccccgcttcatcgcccgcaagcgcggcttcaccgtcaagatgcactgctacatgaactccgcctccggcaacgtctcctggctctggaagcaggagatggacgagaacccccagcagctcaagctcgagaagggccgcatggaggagtcccagaacgagtccctcgccaccctcaccatccagggcatccgcttcgaggacaacggcatctacttctgccagcagaagtgcaacaacacctccgaggtctaccagggctgcggcaccgagctccgcgtcatgggcttctccaccctcgcccagctcaagcagcgcaacaccctcaaggacggcatcatcatgatccagaccctcctcatcatcctcttcatcatcgtccccatcttcctcctcctcgacaaggacgactccaaggccggcatggaggaggaccacacctacgagggcctcgacatcgaccagaccgccacctacgaggacatcgtcaccctccgcaccggcgaggtcaagtggtccgtcggcgagcaccccggccaggagtga

SEQ ID NO: 799 - RNA, 990 nt, synthetic construct
  misc_feature 1..990: note = P42081
  source 1..990: mol_type = other RNA
atggacccccagtgcaccatgggcctctccaacatcctcttcgtcatggccttcctcctctccggcgccgcccccctcaagatccaggcctacttcaacgagaccgccgacctcccctgccagttcgccaactcccagaaccagtccctctccgagctcgtcgtcttctggcaggaccaggagaacctcgtcctcaacgaggtctacctcggcaaggagaagttcgactccgtccactccaagtacatgggccgcacctccttcgactccgactcctggaccctccgcctccacaacctccagatcaaggacaagggcctctaccagtgcatcatccaccacaagaagcccaccggcatgatccgcatccaccagatgaactccgagctctccgtcctcgccaacttctcccagcccgagatcgtccccatctccaacatcaccgagaacgtctacatcaacctcacctgctcctccatccacggctaccccgagcccaagaagatgtccgtcctcctccgcaccaagaactccaccatcgagtacgacggcgtcatgcagaagtcccaggacaacgtcaccgagctctacgacgtctccatctccctctccgtctccttccccgacgtcacctccaacatgaccatcttctgcatcctcgagaccgacaagacccgcctcctctcctcccccttctccatcgagctcgaggacccccagcccccccccgaccacatcccctggatcaccgccgtcctccccaccgtcatcatctgcgtcatggtcttctgcctcatcctctggaagtggaagaagaagaagcgcccccgcaactcctacaagtgcggcaccaacaccatggagcgcgaggagtccgagcagaccaagaagcgcgagaagatccacatccccgagcgctccgacgaggcccagcgcgtcttcaagtcctccaagacctcctcctgcgacaagtccgacacctgcttctga

SEQ ID NO: 800 - RNA, 1011 nt, synthetic construct
  misc_feature 1..1011: note = Q15762
  source 1..1011: mol_type = other RNA
atggactaccccaccctcctcctcgccctcctccacgtctaccgcgccctctgcgaggaggtcctctggcacacctccgtccccttcgccgagaacatgtccctcgagtgcgtctacccctccatgggcatcctcacccaggtcgagtggttcaagatcggcacccagcaggactccatcgccatcttctcccccacccacggcatggtcatccgcaagccctacgccgagcgcgtctacttcctcaactccaccatggcctccaacaacatgaccctcttcttccgcaacgcctccgaggacgacgtcggctactactcctgctccctctacacctacccccagggcacctggcagaaggtcatccaggtcgtccagtccgactccttcgaggccgccgtcccctccaactcccacatcgtctccgagcccggcaagaacgtcaccctcacctgccagccccagatgacctggcccgtccaggccgtccgctgggagaagatccagccccgccagatcgacctcctcacctactgcaacctcgtccacggccgcaacttcacctccaagttcccccgccagatcgtctccaactgctcccacggccgctggtccgtcatcgtcatccccgacgtcaccgtctccgactccggcctctaccgctgctacctccaggcctccgccggcgagaacgagaccttcgtcatgcgcctcaccgtcgccgagggcaagaccgacaaccagtacaccctcttcgtcgccggcggcaccgtcctcctcctcctcttcgtcatctccatcaccaccatcatcgtcatcttcctcaaccgccgccgccgccgcgagcgccgcgacctcttcaccgagtcctgggacacccagaaggcccccaacaactaccgctcccccatctccacctcccagcccaccaaccagtccatggacgacacccgcgaggacatctacgtcaactaccccaccttctcccgccgccccaagacccgcgtctga

SEQ ID NO: 801 - RNA, 13482 nt, synthetic construct
  misc_feature 1..13482: note = Q685J3
  source 1..13482: mol_type = other RNA
atgccccgccccggcaccatggccctctgcctcctcaccctcgtcctctccctcctccccccccaggccgccgccgagcaggacctctccgtcaaccgcgccgtctgggacggcggcggctgcatctcccagggcgacgtcctcaaccgccagtgccagcagctctcccagcacgtccgcaccggctccgccgccaacaccgccaccggcaccacctccaccaacgtcgtcgagccccgcatgtacctctcctgctccaccaaccccgagatgacctccatcgagtcctccgtcacctccgacacccccggcgtctcctccacccgcatgacccccaccgagtcccgcaccacctccgagtccacctccgactccaccaccctcttcccctcctccaccgaggacacctcctcccccaccacccccgagggcaccgacgtccccatgtccaccccctccgaggagtccatctcctccaccatggccttcgtctccaccgcccccctcccctccttcgaggcctacacctccctcacctacaaggtcgacatgtccacccccctcaccacctccacccaggcctcctcctcccccaccacccccgagtccaccaccatccccaagtccaccaactccgagggctccacccccctcacctccatgcccgcctccaccatgaaggtcgcctcctccgaggccatcaccctcctcaccacccccgtcgagatctccacccccgtcaccatctccgcccaggcctcctcctcccccaccaccgccgagggcccctccctctccaactccgccccctccggcggctccacccccctcacccgcatgcccctctccgtcatgctcgtcgtctcctccgaggcctccaccctctccaccacccccgccgccaccaacatccccgtcatcacctccaccgaggcctcctcctcccccaccaccgccgagggcacctccatccccacctccacctacaccgagggctccacccccctcacctccacccccgcctccaccatgcccgtcgccacctccgagatgtccaccctctccatcacccccgtcgacacctccaccctcgtcaccacctccaccgagccctcctccctccccaccaccgccgaggccacctccatgctcacctccaccctctccgagggctccacccccctcaccaacatgcccgtctccaccatcctcgtcgcctcctccgaggcctccaccacctccaccatccccgtcgactccaagaccttcgtcaccaccgcctccgaggcctcctcctcccccaccaccgccgaggacacctccatcgccacctccaccccctccgagggctccacccccctcacctccatgcccgtctccaccacccccgtcgcctcctccgaggcctccaacctctccaccacccccgtcgactccaagacccaggtcaccacctccaccgaggcctcctcctccccccccaccgccgaggtcaactccatgcccacctccaccccctccgagggctccacccccctcacctccatgtccgtctccaccatgcccgtcgcctcctccgaggcctccaccctctccaccacccccgtcgacacctccacccccgtcaccacctcctccgaggcctcctcctcctccaccacccccgagggcacctccatccccacctccaccccctccgagggctccacccccctcaccaacatgcccgtctccacccgcctcgtcgtctcctccgaggcctccaccacctccaccacccccgccgactccaacaccttcgtcaccacctcctccgaggcctcctcctcctccaccaccgccgagggcacctccatgcccacctccacctactccgagcgcggcaccaccatcacctccatgtccgtctccaccaccctcgtcgcctcctccgaggcctccaccctctccaccacccccgtcgactccaacacccccgtcaccacctccaccgaggccacctcctcctccaccaccgccgagggcacctccatgcccacctccacctacaccgagggctccacccccctcacctccatgcccgtcaacaccaccctcgtcgcctcctccgaggcctccaccctctccaccacccccgtcgacacctccacccccgtcaccacctccaccgaggcctcctcctcccccaccaccgccgacggcgcctccatgcccacctccaccccctccgagggctccacccccctcacctccatgcccgtctccaagaccctcctcacctcctccgaggcctccaccctctccaccacccccctcgacacctccacccacatcaccacctccaccgaggcctcctgctcccccaccaccaccgagggcacctccatgcccatctccaccccctccgagggctcccccctcctcacctccatccccgtctccatcacccccgtcacctcccccgaggcctccaccctctccaccacccccgtcgactccaactcccccgtcaccacctccaccgaggtctcctcctcccccacccccgccgagggcacctccatgcccacctccacctactccgagggccgcacccccctcacctccatgcccgtctccaccaccctcgtcgccacctccgccatctccaccctctccaccacccccgtcgacacctccacccccgtcaccaactccaccgaggcccgctcctcccccaccacctccgagggcacctccatgcccacctccacccccggcgagggctccacccccctcacctccatgcccgactccaccacccccgtcgtctcctccgaggcccgcaccctctccgccacccccgtcgacacctccacccccgtcaccacctccaccgaggccacctcctcccccaccaccgccgagggcacctccatccccacctccaccccctccgagggcaccacccccctcacctccacccccgtctcccacaccctcgtcgccaactccgaggcctccaccctctccaccacccccgtcgactccaacacccccctcaccacctccaccgaggcctcctcccccccccccaccgccgagggcacctccatgcccacctccaccccctccgagggctccacccccctcacccgcatgcccgtctccaccaccatggtcgcctcctccgagacctccaccctctccaccacccccgccgacacctccacccccgtcaccacctactcccaggcctcctcctcctccaccaccgccgacggcacctccatgcccacctccacctactccgagggctccacccccctcacctccgtccccgtctccacccgcctcgtcgtctcctccgaggcctccaccctctccaccacccccgtcgacacctccatccccgtcaccacctccaccgaggcctcctcctcccccaccaccgccgagggcacctccatccccacctcccccccctccgagggcaccacccccctcgcctccatgcccgtctccaccaccctcgtcgtctcctccgaggccaacaccctctccaccacccccgtcgactccaagacccaggtcgccacctccaccgaggcctcctcccccccccccaccgccgaggtcacctccatgcccacctccacccccggcgagcgctccacccccctcacctccatgcccgtccgccacacccccgtcgcctcctccgaggcctccaccctctccacctcccccgtcgacacctccacccccgtcaccacctccgccgagacctcctcctcccccaccaccgccgagggcacctccctccccacctccaccacctccgagggctccaccctcctcacctccatccccgtctccaccaccctcgtcacctcccccgaggcctccaccctcctcaccacccccgtcgacaccaagggccccgtcgtcacctccaacgaggtctcctcctcccccacccccgccgagggcacctccatgcccacctccacctactccgagggccgcacccccctcacctccatccccgtcaacaccaccctcgtcgcctcctccgccatctccatcctctccaccacccccgtcgacaactccacccccgtcaccacctccaccgaggcctgctcctcccccaccacctccgagggcacctccatgcccaactccaacccctccgagggcaccacccccctcacctccatccccgtctccaccacccccgtcgtctcctccgaggcctccaccctctccgccacccccgtcgacacctccacccccggcaccacctccgccgaggccacctcctcccccaccaccgccgagggcatctccatccccacctccaccccctccgagggcaagacccccctcaagtccatccccgtctccaacacccccgtcgccaactccgaggcctccaccctctccaccacccccgtcgactccaactcccccgtcgtcacctccaccgccgtctcctcctcccccacccccgccgagggcacctccatcgccatctccaccccctccgagggctccaccgccctcacctccatccccgtctccaccaccaccgtcgcctcctccgagatcaactccctctccaccacccccgccgtcacctccacccccgtcaccacctactcccaggcctcctcctcccccaccaccgccgacggcacctccatgcagacctccacctactccgagggctccacccccctcacctccctccccgtctccaccatgctcgtcgtctcctccgaggccaacaccctctccaccacccccatcgactccaagacccaggtcaccgcctccaccgaggcctcctcctccaccaccgccgagggctcctccatgaccatctccaccccctccgagggctcccccctcctcacctccatccccgtctccaccacccccgtcgcctcccccgaggcctccaccctctccaccacccccgtcgactccaactcccccgtcatcacctccaccgaggtctcctcctcccccacccccgccgagggcacctccatgcccacctccacctacaccgagggccgcacccccctcacctccatcaccgtccgcaccacccccgtcgcctcctccgccatctccaccctctccaccacccccgtcgacaactccacccccgtcaccacctccaccgaggcccgctcctcccccaccacctccgagggcacctccatgcccaactccaccccctccgagggcaccacccccctcacctccatccccgtctccaccacccccgtcctctcctccgaggcctccaccctctccgccacccccatcgacacctccacccccgtcaccacctccaccgaggccacctcctcccccaccaccgccgagggcacctccatccccacctccaccctctccgagggcatgacccccctcacctccacccccgtctcccacaccctcgtcgccaactccgaggcctccaccctctccaccacccccgtcgactccaactcccccgtcgtcacctccaccgccgtctcctcctcccccacccccgccgagggcacctccatcgccacctccaccccctccgagggctccaccgccctcacctccatccccgtctccaccaccaccgtcgcctcctccgagaccaacaccctctccaccacccccgccgtcacctccacccccgtcaccacctacgcccaggtctcctcctcccccaccaccgccgacggctcctccatgcccacctccaccccccgcgagggccgcccccccctcacctccatccccgtctccaccaccaccgtcgcctcctccgagatcaacaccctctccaccaccctcgccgacacccgcacccccgtcaccacctactcccaggcctcctcctcccccaccaccgccgacggcacctccatgcccacccccgcctactccgagggctccacccccctcacctccatgcccctctccaccaccctcgtcgtctcctccgaggcctccaccctctccaccacccccgtcgacacctccacccccgccaccacctccaccgagggctcctcctcccccaccaccgccggcggcacctccatccagacctccaccccctccgagcgcaccacccccctcgccggcatgcccgtctccaccaccctcgtcgtctcctccgagggcaacaccctctccaccacccccgtcgactccaagacccaggtcaccaactccaccgaggcctcctcctccgccaccgccgagggctcctccatgaccatctccgccccctccgagggctcccccctcctcacctccatccccctctccaccacccccgtcgcctcccccgaggcctccaccctctccaccacccccgtcgactccaactcccccgtcatcacctccaccgaggtctcctcctcccccatccccaccgagggcacctccatgcagacctccacctactccgaccgccgcacccccctcacctccatgcccgtctccaccaccgtcgtcgcctcctccgccatctccaccctctccaccacccccgtcgacacctccacccccgtcaccaactccaccgaggcccgctcctcccccaccacctccgagggcacctccatgcccacctccaccccctccgagggctccacccccttcacctccatgcccgtctccaccatgcccgtcgtcacctccgaggcctccaccctctccgccacccccgtcgacacctccacccccgtcaccacctccaccgaggccacctcctcccccaccaccgccgagggcacctccatccccacctccaccctctccgagggcaccacccccctcacctccatccccgtctcccacaccctcgtcgccaactccgaggtctccaccctctccaccacccccgtcgactccaacacccccttcaccacctccaccgaggcctcctcccccccccccaccgccgagggcacctccatgcccacctccacctcctccgagggcaacacccccctcacccgcatgcccgtctccaccaccatggtcgcctccttcgagacctccaccctctccaccacccccgccgacacctccacccccgtcaccacctactcccaggccggctcctcccccaccaccgccgacgacacctccatgcccacctccacctactccgagggctccacccccctcacctccgtccccgtctccaccatgcccgtcgtctcctccgaggcctccacccactccaccacccccgtcgacacctccacccccgtcaccacctccaccgaggcctcctcctcccccaccaccgccgagggcacctccatccccacctcccccccctccgagggcaccacccccctcgcctccatgcccgtctccaccacccccgtcgtctcctccgaggccggcaccctctccaccacccccgtcgacacctccacccccatgaccacctccaccgaggcctcctcctcccccaccaccgccgaggacatcgtcgtccccatctccaccgcctccgagggctccaccctcctcacctccatccccgtctccaccacccccgtcgcctcccccgaggcctccaccctctccaccacccccgtcgactccaactcccccgtcgtcacctccaccgagatctcctcctccgccacctccgccgagggcacctccatgcccacctccacctactccgagggctccacccccctccgctccatgcccgtctccaccaagcccctcgcctcctccgaggcctccaccctctccaccacccccgtcgacacctccatccccgtcaccacctccaccgagacctcctcctcccccaccaccgccaaggacacctccatgcccatctccaccccctccgaggtctccacctccctcacctccatcctcgtctccaccatgcccgtcgcctcctccgaggcctccaccctctccaccacccccgtcgacacccgcaccctcgtcaccacctccaccggcacctcctcctcccccaccaccgccgagggctcctccatgcccacctccacccccggcgagcgctccacccccctcaccaacatcctcgtctccaccaccctcctcgccaactccgaggcctccaccctctccaccacccccgtcgacacctccacccccgtcaccacctccgccgaggcctcctcctcccccaccaccgccgagggcacctccatgcgcatctccaccccctccgacggctccacccccctcacctccatcctcgtctccaccctccccgtcgcctcctccgaggcctccaccgtctccaccaccgccgtcgacacctccatccccgtcaccacctccaccgaggcctcctcctcccccaccaccgccgaggtcacctccatgcccacctccaccccctccgagacctccacccccctcacctccatgcccgtcaaccacacccccgtcgcctcctccgaggccggcaccctctccaccacccccgtcgacacctccacccccgtcaccacctccaccaaggcctcctcctcccccaccaccgccgagggcatcgtcgtccccatctccaccgcctccgagggctccaccctcctcacctccatccccgtctccaccacccccgtcgcctcctccgaggcctccaccctctccaccacccccgtcgacacctccatccccgtcaccacctccaccgagggctcctcctcccccaccaccgccgagggcacctccatgcccatctccaccccctccgaggtctccacccccctcacctccatcctcgtctccaccgtccccgtcgccggctccgaggcctccaccctctccaccacccccgtcgacacccgcacccccgtcaccacctccgccgaggcctcctcctcccccaccaccgccgagggcacctccatgcccatctccacccccggcgagcgccgcacccccctcacctccatgtccgtctccaccatgcccgtcgcctcctccgaggcctccaccctctcccgcacccccgccgacacctccacccccgtcaccacctccaccgaggcctcctcctcccccaccaccgccgagggcaccggcatccccatctccaccccctccgagggctccacccccctcacctccatccccgtctccaccacccccgtcgccatccccgaggcctccaccctctccaccacccccgtcgactccaactcccccgtcgtcacctccaccgaggtctcctcctcccccacccccgccgagggcacctccatgcccatctccacctactccgagggctccacccccctcaccggcgtccccgtctccaccacccccgtcacctcctccgccatctccaccctctccaccacccccgtcgacacctccacccccgtcaccacctccaccgaggcccactcctcccccaccacctccgagggcacctccatgcccacctccaccccctccgagggctccacccccctcacctacatgcccgtctccaccatgctcgtcgtctcctccgaggactccaccctctccgccacccccgtcgacacctccacccccgtcaccacctccaccgaggccacctcctccaccaccgccgagggcacctccatccccacctccaccccctccgagggcatgacccccctcacctccgtccccgtctccaacacccccgtcgcctcctccgaggcctccatcctctccaccacccccgtcgactccaacacccccctcaccacctccaccgaggcctcctcctccccccccaccgccgagggcacctccatgcccacctccaccccctccgagggctccacccccctcacctccatgcccgtctccaccaccaccgtcgcctcctccgagacctccaccctctccaccacccccgccgacacctccacccccgtcaccacctactcccaggcctcctcctccccccccatcgccgacggcacctccatgcccacctccacctactccgagggctccacccccctcaccaacatgtccttctccaccacccccgtcgtctcctccgaggcctccaccctctccaccacccccgtcgacacctccacccccgtcaccacctccaccgaggcctccctctcccccaccaccgccgagggcacctccatccccacctcctccccctccgagggcaccacccccctcgcctccatgcccgtctccaccacccccgtcgtctcctccgaggtcaacaccctctccaccacccccgtcgactccaacaccctcgtcaccacctccaccgaggcctcctcctcccccaccatcgccgagggcacctccctccccacctccaccacctccgagggctccacccccctctccatcatgcccctctccaccacccccgtcgcctcctccgaggcctccaccctctccaccacccccgtcgacacctccacccccgtcaccacctcctcccccaccaactcctcccccaccaccgccgaggtcacctccatgcccacctccaccgccggcgagggctccacccccctcaccaacatgcccgtctccaccacccccgtcgcctcctccgaggcctccaccctctccaccacccccgtcgactccaacaccttcgtcacctcctcctcccaggcctcctcctcccccgccaccctccaggtcaccaccatgcgcatgtccaccccctccgagggctcctcctccctcaccaccatgctcctctcctccacctacgtcacctcctccgaggcctccaccccctccaccccctccgtcgaccgctccacccccgtcaccacctccacccagtccaactccacccccaccccccccgaggtcatcaccctccccatgtccaccccctccgaggtctccacccccctcaccatcatgcccgtctccaccacctccgtcaccatctccgaggccggcaccgcctccaccctccccgtcgacacctccacccccgtcatcacctccacccaggtctcctcctcccccgtcacccccgagggcaccaccatgcccatctggaccccctccgagggctccacccccctcaccaccatgcccgtctccaccacccgcgtcacctcctccgagggctccaccctctccaccccctccgtcgtcacctccacccccgtcaccacctccaccgaggccatctcctcctccgccaccctcgactccaccaccatgtccgtctccatgcccatggagatctccaccctcggcaccaccatcctcgtctccaccacccccgtcacccgcttccccgagtcctccaccccctccatcccctccgtctacacctccatgtccatgaccaccgcctccgagggctcctcctcccccaccaccctcgagggcaccaccaccatgcccatgtccaccacctccgagcgctccaccctcctcaccaccgtcctcatctcccccatctccgtcatgtccccctccgaggcctccaccctctccaccccccccggcgacacctccacccccctcctcacctccaccaaggccggctccttctccatccccgccgaggtcaccaccatccgcatctccatcacctccgagcgctccacccccctcaccaccctcctcgtctccaccaccctccccacctccttccccggcgcctccatcgcctccaccccccccctcgacacctccaccaccttcaccccctccaccgacaccgcctccacccccaccatccccgtcgccaccaccatctccgtctccgtcatcaccgagggctccacccccggcaccaccatcttcatcccctccacccccgtcacctcctccaccgccgacgtcttccccgccaccaccggcgccgtctccacccccgtcatcacctccaccgagctcaacaccccctccacctcctcctcctccaccaccacctccttctccaccaccaaggagttcaccacccccgccatgaccaccgccgcccccctcacctacgtcaccatgtccaccgccccctccaccccccgcaccacctcccgcggctgcaccacctccgcctccaccctctccgccacctccaccccccacacctccacctccgtcaccacccgccccgtcaccccctcctccgagtcctcccgcccctccaccatcacctcccacaccatcccccccaccttcccccccgcccactcctccaccccccccaccacctccgcctcctccaccaccgtcaaccccgaggccgtcaccaccatgaccacccgcaccaagccctccacccgcaccacctccttccccaccgtcaccaccaccgccgtccccaccaacaccaccatcaagtccaaccccacctccacccccaccgtcccccgcaccaccacctgcttcggcgacggctgccagaacaccgcctcccgctgcaagaacggcggcacctgggacggcctcaagtgccagtgccccaacctctactacggcgagctctgcgaggaggtcgtctcctccatcgacatcggcccccccgagaccatctccgcccagatggagctcaccgtcaccgtcacctccgtcaagttcaccgaggagctcaagaaccactcctcccaggagttccaggagttcaagcagaccttcaccgagcagatgaacatcgtctactccggcatccccgagtacgtcggcgtcaacatcaccaagctccgcctcggctccgtcgtcgtcgagcacgacgtcctcctccgcaccaagtacacccccgagtacaagaccgtcctcgacaacgccaccgaggtcgtcaaggagaagatcaccaaggtcaccacccagcagatcatgatcaacgacatctgctccgacatgatgtgcttcaacaccaccggcacccaggtccagaacatcaccgtcacccagtacgaccccgaggaggactgccgcaagatggccaaggagtacggcgactacttcgtcgtcgagtaccgcgaccagaagccctactgcatctccccctgcgagcccggcttctccgtctccaagaactgcaacctcggcaagtgccagatgtccctctccggcccccagtgcctctgcgtcaccaccgagacccactggtactccggcgagacctgcaaccagggcacccagaagtccctcgtctacggcctcgtcggcgccggcgtcgtcctcatgctcatcatcctcgtcgccctcctcatgctcgtcttccgctccaagcgcgaggtcaagcgccagaagtaccgcctctcccagctctacaagtggcaggaggaggactccggccccgcccccggcaccttccagaacatcggcttcgacatctgccaggacgacgactccatccacctcgagtccatctactccaacttccagccctccctccgccacatcgaccccgagaccaagatccgcatccagcgcccccaggtcatgaccacctccttctga

SEQ ID NO: 802 - RNA, 1215 nt, synthetic construct
  misc_feature 1..1215: note = Q9NNX6
  source 1..1215: mol_type = other RNA
atgtccgactccaaggagccccgcctccagcagctcggcctcctcgaggaggagcagctccgcggcctcggcttccgccagacccgcggctacaagtccctcgccggctgcctcggccacggccccctcgtcctccagctcctctccttcaccctcctcgccggcctcctcgtccaggtctccaaggtcccctcctccatctcccaggagcagtcccgccaggacgccatctaccagaacctcacccagctcaaggccgccgtcggcgagctctccgagaagtccaagctccaggagatctaccaggagctcacccagctcaaggccgccgtcggcgagctccccgagaagtccaagctccaggagatctaccaggagctcacccgcctcaaggccgccgtcggcgagctccccgagaagtccaagctccaggagatctaccaggagctcacctggctcaaggccgccgtcggcgagctccccgagaagtccaagatgcaggagatctaccaggagctcacccgcctcaaggccgccgtcggcgagctccccgagaagtccaagcagcaggagatctaccaggagctcacccgcctcaaggccgccgtcggcgagctccccgagaagtccaagcagcaggagatctaccaggagctcacccgcctcaaggccgccgtcggcgagctccccgagaagtccaagcagcaggagatctaccaggagctcacccagctcaaggccgccgtcgagcgcctctgccacccctgcccctgggagtggaccttcttccagggcaactgctacttcatgtccaactcccagcgcaactggcacgactccatcaccgcctgcaaggaggtcggcgcccagctcgtcgtcatcaagtccgccgaggagcagaacttcctccagctccagtcctcccgctccaaccgcttcacctggatgggcctctccgacctcaaccaggagggcacctggcagtgggtcgacggctcccccctcctcccctccttcaagcagtactggaaccgcggcgagcccaacaacgtcggcgaggaggactgcgccgagttctccggcaacggctggaacgacgacaagtgcaacctcgccaagttctggatctgcaagaagtccgccgcctcctgctcccgcgacgaggagcagttcctctcccccgcccccgccacccccaaccccccccccgcctga

SEQ ID NO: 803 - RNA, 3126 nt, synthetic construct
  misc_feature 1..3126: note = Q9NR97
  source 1..3126: mol_type = other RNA
atggagaacatgttcctccagtcctccatgctcacctgcatcttcctcctcatctccggctcctgcgagctctgcgccgaggagaacttctcccgctcctacccctgcgacgagaagaagcagaacgactccgtcatcgccgagtgctccaaccgccgcctccaggaggtcccccagaccgtcggcaagtacgtcaccgagctcgacctctccgacaacttcatcacccacatcaccaacgagtccttccagggcctccagaacctcaccaagatcaacctcaaccacaaccccaacgtccagcaccagaacggcaaccccggcatccagtccaacggcctcaacatcaccgacggcgccttcctcaacctcaagaacctccgcgagctcctcctcgaggacaaccagctcccccagatcccctccggcctccccgagtccctcaccgagctctccctcatccagaacaacatctacaacatcaccaaggagggcatctcccgcctcatcaacctcaagaacctctacctcgcctggaactgctacttcaacaaggtctgcgagaagaccaacatcgaggacggcgtcttcgagaccctcaccaacctcgagctcctctccctctccttcaactccctctcccacgtcccccccaagctcccctcctccctccgcaagctcttcctctccaacacccagatcaagtacatctccgaggaggacttcaagggcctcatcaacctcaccctcctcgacctctccggcaactgcccccgctgcttcaacgcccccttcccctgcgtcccctgcgacggcggcgcctccatcaacatcgaccgcttcgccttccagaacctcacccagctccgctacctcaacctctcctccacctccctccgcaagatcaacgccgcctggttcaagaacatgccccacctcaaggtcctcgacctcgagttcaactacctcgtcggcgagatcgcctccggcgccttcctcaccatgctcccccgcctcgagatcctcgacctctccttcaactacatcaagggctcctacccccagcacatcaacatctcccgcaacttctccaagctcctctccctccgcgccctccacctccgcggctacgtcttccaggagctccgcgaggacgacttccagcccctcatgcagctccccaacctctccaccatcaacctcggcatcaacttcatcaagcagatcgacttcaagctcttccagaacttctccaacctcgagatcatctacctctccgagaaccgcatctcccccctcgtcaaggacacccgccagtcctacgccaactcctcctccttccagcgccacatccgcaagcgccgctccaccgacttcgagttcgacccccactccaacttctaccacttcacccgccccctcatcaagccccagtgcgccgcctacggcaaggccctcgacctctccctcaactccatcttcttcatcggccccaaccagttcgagaacctccccgacatcgcctgcctcaacctctccgccaactccaacgcccaggtcctctccggcaccgagttctccgccatcccccacgtcaagtacctcgacctcaccaacaaccgcctcgacttcgacaacgcctccgccctcaccgagctctccgacctcgaggtcctcgacctctcctacaactcccactacttccgcatcgccggcgtcacccaccacctcgagttcatccagaacttcaccaacctcaaggtcctcaacctctcccacaacaacatctacaccctcaccgacaagtacaacctcgagtccaagtccctcgtcgagctcgtcttctccggcaaccgcctcgacatcctctggaacgacgacgacaaccgctacatctccatcttcaagggcctcaagaacctcacccgcctcgacctctccctcaaccgcctcaagcacatccccaacgaggccttcctcaacctccccgcctccctcaccgagctccacatcaacgacaacatgctcaagttcttcaactggaccctcctccagcagttcccccgcctcgagctcctcgacctccgcggcaacaagctcctcttcctcaccgactccctctccgacttcacctcctccctccgcaccctcctcctctcccacaaccgcatctcccacctcccctccggcttcctctccgaggtctcctccctcaagcacctcgacctctcctccaacctcctcaagaccatcaacaagtccgccctcgagaccaagaccaccaccaagctctccatgctcgagctccacggcaaccccttcgagtgcacctgcgacatcggcgacttccgccgctggatggacgagcacctcaacgtcaagatcccccgcctcgtcgacgtcatctgcgcctcccccggcgaccagcgcggcaagtccatcgtctccctcgagctcaccacctgcgtctccgacgtcaccgccgtcatcctcttcttcttcaccttcttcatcaccaccatggtcatgctcgccgccctcgcccaccacctcttctactgggacgtctggttcatctacaacgtctgcctcgccaaggtcaagggctaccgctccctctccacctcccagaccttctacgacgcctacatctcctacgacaccaaggacgcctccgtcaccgactgggtcatcaacgagctccgctaccacctcgaggagtcccgcgacaagaacgtcctcctctgcctcgaggagcgcgactgggaccccggcctcgccatcatcgacaacctcatgcagtccatcaaccagtccaagaagaccgtcttcgtcctcaccaagaagtacgccaagtcctggaacttcaagaccgccttctacctcgccctccagcgcctcatggacgagaacatggacgtcatcatcttcatcctcctcgagcccgtcctccagcactcccagtacctccgcctccgccagcgcatctgcaagtcctccatcctccagtggcccgacaaccccaaggccgagggcctcttctggcagaccctccgcaacgtcgtcctcaccgagaacgactcccgctacaacaacatgtacgtcgactccatcaagcagtactga

SEQ ID NO: 804 - RNA, 66 nt, synthetic construct
  misc_feature 1..66: note = P16671_TM_1_8-29
  source 1..66: mol_type = other RNA
ggcctcatcgccggcgccgtcatcggcgccgtcctcgccgtcttcggcggcatcctcatgcccgtc

SEQ ID NO: 805 - RNA, 81 nt, synthetic construct
  misc_feature 1..81: note = P32248_TM_1_60-86
  source 1..81: mol_type = other RNA
ttcctccccatcatgtactccatcatctgcttcgtcggcctcctcggcaacggcctcgtcgtcctcacctacatctacttc

SEQ ID NO: 806 - RNA, 66 nt, synthetic construct
  misc_feature 1..66: note = P16671_TM_2_440-461
  source 1..66: mol_type = other RNA
ctcctcggcctcatcgagatgatcctcctctccgtcggcgtcgtcatgttcgtcgccttcatgatc

SEQ ID NO: 807 - RNA, 63 nt, synthetic construct
  misc_feature 1..63: note = P32248_TM_2_96-116
  source 1..63: mol_type = other RNA
tacctcctcaacctcgccgtcgccgacatcctcttcctcctcaccctccccttctgggcctac

SEQ ID NO: 808 - RNA, 66 nt, synthetic construct
  misc_feature 1..66: note = P32248_TM_3_131-152
  source 1..66: mol_type = other RNA
ctcatcttcgccatctacaagatgtccttcttctccggcatgctcctcctcctctgcatctccatc

SEQ ID NO: 809 - RNA, 63 nt, synthetic construct
  misc_feature 1..63: note = P32248_TM_4_171-191
  source 1..63: mol_type = other RNA
gtcctcctcatctccaagctctcctgcgtcggcatctggatcctcgccaccgtcctctccatc

SEQ ID NO: 810 - RNA, 84 nt, synthetic construct
  misc_feature 1..84: note = P32248_TM_5_220-247
  source 1..84: mol_type = other RNA
ttcatcaccatccaggtcgcccagatggtcatcggcttcctcgtccccctcctcgccatgtccttctgctacctcgtcatcatc

SEQ ID NO: 811 - RNA, 78 nt, synthetic construct
  misc_feature 1..78: note = P32248_TM_6_264-289
  source 1..78: mol_type = other RNA
gtcatcatcgccgtcgtcgtcgtcttcatcgtcttccagctcccctacaacggcgtcgtcctcgcccagaccgtcgcc

SEQ ID NO: 812 - RNA, 54 nt, synthetic construct
  misc_feature 1..54: note = P32248_TM_7_314-331
  source 1..54: mol_type = other RNA
ctcgcctgcgtccgctgctgcgtcaaccccttcctctacgccttcatcggcgtc

SEQ ID NO: 813 - RNA, 69 nt, synthetic construct
  misc_feature 1..69: note = A0A5B9_TM_145-167
  source 1..69: mol_type = other RNA
accatcctctacgagatcctcctcggcaaggccaccctctacgccgtcctcgtctccgccctcgtcctc

SEQ ID NO: 814 - RNA, 69 nt, synthetic construct
  misc_feature 1..69: note = B7Z8K6_TM_130-152
  source 1..69: mol_type = other RNA
ctcggcctccgcatgctcttcgccaagaccgtcgccgtcaacttcctcctcaccgccaagctcttcttc

SEQ ID NO: 815 - RNA, 63 nt, synthetic construct
  misc_feature 1..63: note = O00206_TM_632-652
  source 1..63: mol_type = other RNA
accatcatcggcgtctccgtcctctccgtcctcgtcgtctccgtcgtcgccgtcctcgtctac

SEQ ID NO: 816 - RNA, 66 nt, synthetic construct
  misc_feature 1..66: note = P01730_TM_397-418
  source 1..66: mol_type = other RNA
atggccctcatcgtcctcggcggcgtcgccggcctcctcctcttcatcggcctcggcatcttcttc

SEQ ID NO: 817 - RNA, 63 nt, synthetic construct
  misc_feature 1..63: note = P01850_TM_151-171
  source 1..63: mol_type = other RNA
atcctcctcggcaaggccaccctctacgccgtcctcgtctccgccctcgtcctcatggccatg

SEQ ID NO: 818 - RNA, 78 nt, synthetic construct
  misc_feature 1..78: note = P07766_TM_127-152
  source 1..78: mol_type = other RNA
gtcatgtccgtcgccaccatcgtcatcgtcgacatctgcatcaccggcggcctcctcctcctcgtctactactggtcc

SEQ ID NO: 819 - RNA, 66 nt, synthetic construct
  misc_feature 1..66: note = P08575_TM_576-597
  source 1..66: mol_type = other RNA
gccctcatcgccttcctcgccttcctcatcatcgtcacctccatcgccctcctcgtcgtcctctac

SEQ ID NO: 820 - RNA, 63 nt, synthetic construct
  misc_feature 1..63: note = P08637_TM_209-229
  source 1..63: mol_type = other RNA
gtctccttctgcctcgtcatggtcctcctcttcgccgtcgacaccggcctctacttctccgtc

SEQ ID NO: 821 - RNA, 81 nt, synthetic construct
  misc_feature 1..81: note = P10747_TM_153-179
  source 1..81: mol_type = other RNA
ttctgggtcctcgtcgtcgtcggcggcgtcctcgcctgctactccctcctcgtcaccgtcgccttcatcatcttctgggtc

SEQ ID NO: 822 - RNA, 66 nt, synthetic construct
  misc_feature 1..66: note = P11912_TM_144-165
  source 1..66: mol_type = other RNA
atcatcaccgccgagggcatcatcctcctcttctgcgccgtcgtccccggcaccctcctcctcttc

SEQ ID NO: 823 - RNA, 66 nt, synthetic construct
  misc_feature 1..66: note = P15391_TM_292-313
  source 1..66: mol_type = other RNA
gtctccgccgtcaccctcgcctacctcatcttctgcctctgctccctcgtcggcatcctccacctc

SEQ ID NO: 824 - RNA, 63 nt, synthetic construct
  misc_feature 1..63: note = P16410_TM_162-182
  source 1..63: mol_type = other RNA
ttcctcctctggatcctcgccgccgtctcctccggcctcttcttctactccttcctcctcacc

SEQ ID NO: 825 - RNA, 63 nt, synthetic construct
  misc_feature 1..63: note = P26718_TM_52-72
  source 1..63: mol_type = other RNA
cccttcttcttctgctgcttcatcgccgtcgccatgggcatccgcttcatcatcatggtcgcc

SEQ ID NO: 826 - RNA, 63 nt, synthetic construct
  misc_feature 1..63: note = P30273_TM_24-44
  source 1..63: mol_type = other RNA
ctctgctacatcctcgacgccatcctcttcctctacggcatcgtcctcaccctcctctactgc

SEQ ID NO: 827 - RNA, 63 nt, synthetic construct
  misc_feature 1..63: note = P40259_TM_160-180
  source 1..63: mol_type = other RNA
ggcatcatcatgatccagaccctcctcatcatcctcttcatcatcgtccccatcttcctcctc

SEQ ID NO: 828 - RNA, 63 nt, synthetic construct
  misc_feature 1..63: note = P42081_TM_248-268
  source 1..63: mol_type = other RNA
tggatcaccgccgtcctccccaccgtcatcatctgcgtcatggtcttctgcctcatcctctgg

SEQ ID NO: 829 - RNA, 63 nt, synthetic construct
  misc_feature 1..63: note = Q15762_TM_255-275
  source 1..63: mol_type = other RNA
ggcggcaccgtcctcctcctcctcttcgtcatctccatcaccaccatcatcgtcatcttcctc

SEQ ID NO: 830 - RNA, 63 nt, synthetic construct
  misc_feature 1..63: note = Q685J3_TM_4394-4414
  source 1..63: mol_type = other RNA
ctcgtcggcgccggcgtcgtcctcatgctcatcatcctcgtcgccctcctcatgctcgtcttc

SEQ ID NO: 831 - RNA, 63 nt, synthetic construct
  misc_feature 1..63: note = Q9NNX6_TM_38-58
  source 1..63: mol_type = other RNA
ctcggccacggccccctcgtcctccagctcctctccttcaccctcctcgccggcctcctcgtc

SEQ ID NO: 832 - RNA, 63 nt, synthetic construct
  misc_feature 1..63: note = Q9NR97_TM_828-848
  source 1..63: mol_type = other RNA
gccgtcatcctcttcttcttcaccttcttcatcaccaccatggtcatgctcgccgccctcgcc

SEQ ID NO: 833 - RNA, 48 nt, synthetic construct
  misc_feature 1..48: note = P14207_1-16
  source 1..48: mol_type = other RNA
atggtgtggaagtggatgcccctgctccttctgttggtctgcgttgcc

SEQ ID NO: 834 - RNA, 48 nt, synthetic construct
  misc_feature 1..48: note = O75787_1-16
  source 1..48: mol_type = other RNA
atggccgtgttcgtcgttctgctcgctcttgtggcaggcgtactgggg

SEQ ID NO: 835 - RNA, 48 nt, synthetic construct
  misc_feature 1..48: note = P07359_1-16
  source 1..48: mol_type = other RNA
atgcccctgctccttctgttgttactgctacctagcccactccacccg

SEQ ID NO: 836 - RNA, 48 nt, synthetic construct
  misc_feature 1..48: note = P08637_1-16
  source 1..48: mol_type = other RNA
atgtggcagctgctccttcccaccgccctgttgttactggtgagcgct

SEQ ID NO: 837 - RNA, 51 nt, synthetic construct
  misc_feature 1..51: note = P07237_1-17
  source 1..51: mol_type = other RNA
atgctgagaagggccctcctttgcctggctgtggcagccttggtccgggcg

SEQ ID NO: 838 - RNA, 51 nt, synthetic construct
  misc_feature 1..51: note = O60911_1-17
  source 1..51: mol_type = other RNA
atgaacctgagcctcgtgcttgccgctttctgcctgggcatcgcatccgcc

SEQ ID NO: 839 - RNA, 51 nt, synthetic construct
  misc_feature 1..51: note = P20138_1-17
  source 1..51: mol_type = other RNA
atgcccctgctccttctgttgcctttactgtgggccggcgctctagcaatg

SEQ ID NO: 840 - RNA, 51 nt, synthetic construct
  misc_feature 1..51: note = P27797_1-17
  source 1..51: mol_type = other RNA
atgctgctcagcgtgccccttctgttgggcttactggggctagccgtcgct

SEQ ID NO: 841 - RNA, 54 nt, synthetic construct
  misc_feature 1..54: note = P10747_1-18
  source 1..54: mol_type = other RNA
atgctgagactccttctggccttgaacttattccccagcatccaggtgaccggc

SEQ ID NO: 842 - RNA, 54 nt, synthetic construct
  misc_feature 1..54: note = O75487_1-18
  source 1..54: mol_type = other RNA
atggccagattcggcctgcccgctctcctttgcaccctggcagtgttgagcgcc

SEQ ID NO: 843 - RNA, 54 nt, synthetic construct
  misc_feature 1..54: note = P07996_1-18
  source 1..54: mol_type = other RNA
atgggcctggcctgggggctcggagtgcttttcctgatgcacgtctgcggtacc

SEQ ID NO: 844 - RNA, 54 nt, synthetic construct
  misc_feature 1..54: note = P22748_1-18
  source 1..54: mol_type = other RNA
atgagaatgctgctcgcccttctggctttgagcgcagccaggccctccgcgtct

SEQ ID NO: 845 - RNA, 54 nt, synthetic construct
  misc_feature 1..54: note = Q15762_1-18
  source 1..54: mol_type = other RNA
atggactaccccaccctgctccttgccctgttgcacgtgtatagagctttatgc

SEQ ID NO: 846 - RNA, 54 nt, synthetic construct
  misc_feature 1..54: note = P30273_1-18
  source 1..54: mol_type = other RNA
atgatccccgccgtggtcctgctccttctgttgttagttgagcaggctgcagcc

SEQ ID NO: 847 - RNA, 54 nt, synthetic construct
  misc_feature 1..54: note = P38570_1-18
  source 1..54: mol_type = other RNA
atgtggctgttccacaccctcctttgcatcgccagcctggctttgttagcagcc

SEQ ID NO: 848 - RNA, 54 nt, synthetic construct
  misc_feature 1..54: note = Q01638_1-18
  source 1..54: mol_type = other RNA
atgggcttctggatcctggccattctcaccatacttatgtacagcacagctgca

SEQ ID NO: 849 - RNA, 54 nt, synthetic construct
  misc_feature 1..54: note = Q9NZQ7_1-18
  source 1..54: mol_type = other RNA
atgagaatcttcgccgtgtttattttcatgacctactggcacctcctgaacgct

SEQ ID NO: 850 - RNA, 57 nt, synthetic construct
  misc_feature 1..57: note = P13591_1-19
  source 1..57: mol_type = other RNA
atgctgcagaccaaggacctcatctggacacttttctttctgggcactgccgtgagc

SEQ ID NO: 851 - RNA, 57 nt, synthetic construct
  misc_feature 1..57: note = P26842_1-19
  source 1..57: mol_type = other RNA
atggccagaccccacccttggtggctgtgcgtgctcggcacccttgtcgggctgagc

SEQ ID NO: 852 - RNA, 57 nt, synthetic construct
  misc_feature 1..57: note = P15391_1-19
  source 1..57: mol_type = other RNA
atgccccctccaagactcctgttctttcttctgttcttgaccccgatggaggtgagg

SEQ ID NO: 853 - RNA, 57 nt, synthetic construct
  misc_feature 1..57: note = Q8NI17_1-19
  source 1..57: mol_type = other RNA
atgatgtggacctgggccctgtggatgctccccagcctttgcaagttctccctggct

SEQ ID NO: 854 - RNA, 57 nt, synthetic construct
  misc_feature 1..57: note = P08571_1-19
  source 1..57: mol_type = other RNA
atggagagagccagctgcctgctccttctgttgttacccctggtgcacgtctccgct

SEQ ID NO: 855 - RNA, 57 nt, synthetic construct
  misc_feature 1..57: note = P05154_1-19
  source 1..57: mol_type = other RNA
atgcagctgttcctccttctgtgcttggtgttactgagcccccaaggcgcctcccta

SEQ ID NO: 856 - RNA, 57 nt, synthetic construct
  misc_feature 1..57: note = P02787_1-19
  source 1..57: mol_type = other RNA
atgagactggccgtgggcgctctccttgtctgcgcagttctggggttgtgtttagcc

SEQ ID NO: 857 - RNA, 57 nt, synthetic construct
  misc_feature 1..57: note = P02671_1-19
  source 1..57: mol_type = other RNA
atgttcagcatgagaatcgtgtgcctggtcctctccgttgtgggcaccgcctggaca

SEQ ID NO: 858 - RNA, 57 nt, synthetic construct
  misc_feature 1..57: note = P04216_1-19
  source 1..57: mol_type = other RNA
atgaacctggccatcagcattgctctccttctgaccgtgttgcaggtctccagaggc

SEQ ID NO: 859 - RNA, 57 nt, synthetic construct
  misc_feature 1..57: note = P00747_1-19
  source 1..57: mol_type = other RNA
atggagcacaaggaagtggtcctgctccttctgttgttcttaaaaagcggccagggg

SEQ ID NO: 860 - RNA, 57 nt, synthetic construct
  misc_feature 1..57: note = P01764_1-19
  source 1..57: mol_type = other RNA
atggagttcggcctgagctggctctttcttgtggccatcctgaagggggtccagtgc

SEQ ID NO: 861 - RNA, 57 nt, synthetic construct
  misc_feature 1..57: note = P16150_1-19
  source 1..57: mol_type = other RNA
atggccaccctgctccttctgttgggcgtgttagtcgttagccccgacgctctgggg

SEQ ID NO: 862 - RNA, 57 nt, synthetic construct
  misc_feature 1..57: note = Q6DN72_1-19
  source 1..57: mol_type = other RNA
atgctgctctggaccgccgtgcttctgttcgtcccctgcgttggcaagacagtgtgg

SEQ ID NO: 863 - RNA, 57 nt, synthetic construct
  misc_feature 1..57: note = Q01151_1-19
  source 1..57: mol_type = other RNA
atgagcagaggcctgcagctccttctgttgtcctgcgcctactctttagctcccgca

SEQ ID NO: 864 - RNA, 57 nt, synthetic construct
  misc_feature 1..57: note = P07093_1-19
  source 1..57: mol_type = other RNA
atgaactggcacctccccctgttccttctggccagcgtgaccttgccttccatctgc

SEQ ID NO: 865 - RNA, 57 nt, synthetic construct
  misc_feature 1..57: note = Q8WWQ8_1-19
  source 1..57: mol_type = other RNA
atgatgctgcagcacctcgtgatcttctgccttggcctggtcgttcaaaacttttgt

SEQ ID NO: 866 - RNA, 60 nt, synthetic construct
  misc_feature 1..60: note = Q13291_1-20
  source 1..60: mol_type = other RNA
atggaccccaagggcctgctcagccttaccttcgtgctgtttttgtccttagccttcggg

SEQ ID NO: 867 - RNA, 60 nt, synthetic construct
  misc_feature 1..60: note = P35225_1-20
  source 1..60: mol_type = other RNA
atggccctgctccttaccacagtgatcgctctgacttgcttgggcgggttcgcaagcccc

SEQ ID NO: 868 - RNA, 60 nt, synthetic construct
  misc_feature 1..60: note = P25942_1-20
  source 1..60: mol_type = other RNA
atggtgagactgcccctccagtgcgtcctttggggctgtctgttgaccgccgttcaccct

SEQ ID NO: 869 - RNA, 60 nt, synthetic construct
  misc_feature 1..60: note = P52803_1-20
  source 1..60: mol_type = other RNA
atgctgcacgtggagatgctcacccttgtcttcctggttttgtggatgtgcgtgtttagc

SEQ ID NO: 870 - RNA, 60 nt, synthetic construct
  misc_feature 1..60: note = Q15116_1-20
  source 1..60: mol_type = other RNA
atgcagatcccccaagccccttggccagtggtctgggctgttctgcagctcggctggaga

SEQ ID NO: 871 - RNA, 60 nt, synthetic construct
  misc_feature 1..60: note = P05556_1-20
  source 1..60: mol_type = other RNA
atgaacctgcagcccatcttctggattggcctcataagctccgtgtgctgtgtctttgcc

SEQ ID NO: 872 - RNA, 60 nt, synthetic construct
  misc_feature 1..60: note = Q12891_1-20
  source 1..60: mol_type = other RNA
atgagagccggccccgggcctaccgtgacactggctctcgtccttgcagttgcctgggcg

SEQ ID NO: 873 - RNA, 60 nt, synthetic construct
  misc_feature 1..60: note = Q8IV16_1-20
  source 1..60: mol_type = other RNA
atgaaggccctgggcgctgtgctccttgcactgttgttatgcgggagacccggaaggggt

SEQ ID NO: 874 - RNA, 60 nt, synthetic construct
  misc_feature 1..60: note = Q03167_1-20
  source 1..60: mol_type = other RNA
atgaccagccactacgtgatcgccattttcgctctgatgtcctcttgcctcgcaacagcc

SEQ ID NO: 875 - RNA, 60 nt, synthetic construct
  misc_feature 1..60: note = Q14246_1-20
  source 1..60: mol_type = other RNA
atgagaggcttcaaccttctcctgttttgggggtgctgtgtgatgcacagctgggaggga

SEQ ID NO: 876 - RNA, 60 nt, synthetic construct
  misc_feature 1..60: note = P16871_1-20
  source 1..60: mol_type = other RNA
atgaccatcctgggcacaactttcgggatggtgtttagcctccttcaggtcgtttccgga

SEQ ID NO: 877 - RNA, 60 nt, synthetic construct
  misc_feature 1..60: note = P61769_1-20
  source 1..60: mol_type = other RNA
atgagcagatccgtggccctggctgtcctcgcacttctgtctttgtcaggcttagaggcc

SEQ ID NO: 878 - RNA, 60 nt, synthetic construct
  misc_feature 1..60: note = Q9Y6W8_1-20
  source 1..60: mol_type = other RNA
atgaaaagcggcctgtggtacttctttctcttctgccttagaatcaaggtgctgaccggg

SEQ ID NO: 879 - RNA, 63 nt, synthetic construct
  misc_feature 1..63: note = P10966_1-21
  source 1..63: mol_type = other RNA
atgagacccaggctgtggctccttctggccgctcagttgaccgtgttacacggcaacagcgtc

SEQ ID NO: 880 - RNA, 63 nt, synthetic construct
  misc_feature 1..63: note = Q9BZW8_1-21
  source 1..63: mol_type = other RNA
atgctgggccaggtggtcaccctcatccttctgttgttactgaaggtttaccaagggaaagga

SEQ ID NO: 881 - RNA, 63 nt, synthetic construct
  misc_feature 1..63: note = P02778_1-21
  source 1..63: mol_type = other RNA
atgaaccagaccgccatcctgatttgctgtctcatattccttacactgagcggcatccaaggg

SEQ ID NO: 882 - RNA, 63 nt, synthetic construct
  misc_feature 1..63: note = P18564_1-21
  source 1..63: mol_type = other RNA
atgggcatcgagctgctctgccttttctttctgttcttggggagaaacgaccacgtgcaggga

SEQ ID NO: 883 - RNA, 63 nt, synthetic construct
  misc_feature 1..63: note = O14525_1-21
  source 1..63: mol_type = other RNA
atggccctggctggcctctgcgcacttctggcctgttgctgggggcccgcggctgtgttggcc

SEQ ID NO: 884 - RNA, 63 nt, synthetic construct
  misc_feature 1..63: note = P01130_1-21
  source 1..63: mol_type = other RNA
atgggcccctgggggtggaagctgagatggaccgtggccctccttctggctgcagccggaaca

SEQ ID NO: 885 - RNA, 63 nt, synthetic construct
  misc_feature 1..63: note = P01732_1-21
  source 1..63: mol_type = other RNA
atggccctgcccgtgaccgctctccttctgcctttggcattactgctacacgccgcgagacca

SEQ ID NO: 886 - RNA, 63 nt, synthetic construct
  misc_feature 1..63: note = P48061_1-21
  source 1..63: mol_type = other RNA
atgaacgccaaggtggtcgttgtgctggtactcgtgcttaccgctctgtgcttgagcgacggc

SEQ ID NO: 887 - RNA, 63 nt, synthetic construct
  misc_feature 1..63: note = P01589_1-21
  source 1..63: mol_type = other RNA
atggacagctacctgctcatgtggggccttctgaccttcatcatggtgcccgggtgccaggcc

SEQ ID NO: 888 - RNA, 63 nt, synthetic construct
  misc_feature 1..63: note = Q86T13_1-21
  source 1..63: mol_type = other RNA
atgagacccgccttcgctctgtgcctcctttggcaggcactgtggcctggcccagggggaggt

SEQ ID NO: 889 - RNA, 63 nt, synthetic construct
  misc_feature 1..63: note = Q5DID0_1-21
  source 1..63: mol_type = other RNA
atgctgagaaccagcggcctcgcccttctggctttggtgtccgcagtcgggccctctcaggcc

SEQ ID NO: 890 - RNA, 66 nt, synthetic construct
  misc_feature 1..66: note = P40189_1-22
  source 1..66: mol_type = other RNA
atgctgaccctccagacatggcttgtgcaagccctgttcatctttttgactacggagagcaccggc

SEQ ID NO: 891 - RNA, 66 nt, synthetic construct
  misc_feature 1..66: note = Q86YL7_1-22
  source 1..66: mol_type = other RNA
atgtggaaggtgagcgccctcctgttcgtccttggctccgcttctctgtgggttttggcagagggg

SEQ ID NO: 892 - RNA, 66 nt, synthetic construct
  misc_feature 1..66: note = P55075_1-22
  source 1..66: mol_type = other RNA
atgggcagccccagatccgccctgtcttgcctccttctgcacttgttagtgctgtgtctacaggct

SEQ ID NO: 893 - RNA, 66 nt, synthetic construct
  misc_feature 1..66: note = Q30201_1-22
  source 1..66: mol_type = other RNA
atgggccccagagccaggcctgctctgctccttctgatgttgttacagaccgcagtgctgcaaggg

SEQ ID NO: 894 - RNA, 66 nt, synthetic construct
  misc_feature 1..66: note = P07766_1-22
  source 1..66: mol_type = other RNA
atgcagagcggcacccactggagagtgctggggctctgccttctgtccgtcggagtttggggtcaa

SEQ ID NO: 895 - RNA, 66 nt, synthetic construct
  misc_feature 1..66: note = P18827_1-22
  source 1..66: mol_type = other RNA
atgagaagggccgctctgtggctctggctttgcgcactggccttgagcttacagcccgcgctgcct

SEQ ID NO: 896 - RNA, 66 nt, synthetic construct
  misc_feature 1..66: note = P55290_1-22
  source 1..66: mol_type = other RNA
atgcagcccagaacccctctggtgctctgcgtccttctgagccaagttttgttactgacatccgcc

SEQ ID NO: 897 - RNA, 66 nt, synthetic construct
  misc_feature 1..66: note = P37173_1-22
  source 1..66: mol_type = other RNA
atgggcagagggctgctcaggggactttggcccctgcacatcgtgttgtggacccggattgccagc

SEQ ID NO: 898 - RNA, 66 nt, synthetic construct
  misc_feature 1..66: note = Q07325_1-22
  source 1..66: mol_type = other RNA
atgaagaaaagcggcgtgctgttcctccttgggatcattctgttggtcttaataggagttcagggt

SEQ ID NO: 899 - RNA, 66 nt, synthetic construct
  misc_feature 1..66: note = P04156_1-22
  source 1..66: mol_type = other RNA
atggccaacctgggctgctggatgctcgtgcttttcgtcgctacctggagcgacctggggttgtgt

SEQ ID NO: 900 - RNA, 66 nt, synthetic construct
  misc_feature 1..66: note = P31785_1-22
  source 1..66: mol_type = other RNA
atgctgaagcccagcctccctttcacctcccttctgtttttgcagttaccactgctaggcgtgggg

SEQ ID NO: 901 - RNA, 69 nt, synthetic construct
  misc_feature 1..69: note = P01579_1-23
  source 1..69: mol_type = other RNA
atgaagtacaccagctatatcctggccttccagctctgcattgtgcttggctccctggggtgttactgc

SEQ ID NO: 902 - RNA, 69 nt, synthetic construct
  misc_feature 1..69: note = P23229_1-23
  source 1..69: mol_type = other RNA
atggccgctgcaggccagctgtgcctcctttacctgagcgccgggttgttatccagactgggagcggct

SEQ ID NO: 903 - RNA, 69 nt, synthetic construct
  misc_feature 1..69: note = O60494_1-23
  source 1..69: mol_type = other RNA
atgatgaacatgagcctgcccttcctctggtcccttctgaccttgttaatctttgccgaggtgaatggc

SEQ ID NO: 904 - RNA, 69 nt, synthetic construct
  misc_feature 1..69: note = P08575_1-23
  source 1..69: mol_type = other RNA
atgtacctgtggctcaagctgcttgccttcggctttgctttcttggacaccgaggtgtttgtcacaggg

SEQ ID NO: 905 - RNA, 69 nt, synthetic construct
  misc_feature 1..69: note = Q8IWY4_1-23
  source 1..69: mol_type = other RNA
atgggcgccgctgcagtgagatggcacctgtgcgtcctccttgccctggggaccaggggacggttggcg

SEQ ID NO: 906 - RNA, 69 nt, synthetic construct
  misc_feature 1..69: note = Q08431_1-23
  source 1..69: mol_type = other RNA
atgccaagacctaggctgctcgccgctctttgcggcgcactgttgtgtgcccccagcttactggtggcg

SEQ ID NO: 907 - RNA, 69 nt, synthetic construct
  misc_feature 1..69: note = Q99665_1-23
  source 1..69: mol_type = other RNA
atggcccacaccttcagaggctgcagcctggcttttatgttcatcattacatggctccttataaaggca

SEQ ID NO: 908 - RNA, 69 nt, synthetic construct
  misc_feature 1..69: note = Q6Q8B3_1-23
  source 1..69: mol_type = other RNA
atgagcgcccccagactgctcatctccattataatcatggtgtctgcttcaagtagctcctgcatgggc

SEQ ID NO: 909 - RNA, 69 nt, synthetic construct
  misc_feature 1..69: note = Q07011_1-23
  source 1..69: mol_type = other RNA
atgggcaacagctgctacaatatcgtggccaccctgctccttgtcctgaacttcgagagaacaaggtcc

SEQ ID NO: 910 - RNA, 69 nt, synthetic construct
  misc_feature 1..69: note = Q8NHL6_1-23
  source 1..69: mol_type = other RNA
atgacccccatcctgacagtgctcatttgccttggcctgagcttggggcctagaactcacgtccaggcc

SEQ ID NO: 911 - RNA, 69 nt, synthetic construct
  misc_feature 1..69: note = P36894_1-23
  source 1..69: mol_type = other RNA
atgccccagctgtacatctatattagactccttggcgcctacctgttcataatcagcagggtgcaaggg

SEQ ID NO: 912 - RNA, 69 nt, synthetic construct
  misc_feature 1..69: note = Q16552_1-23
  source 1..69: mol_type = other RNA
atgacccccggcaagacaagcctggtgtccctccttctgttgttatctctggaggccatcgtcaaagct

SEQ ID NO: 913 - RNA, 69 nt, synthetic construct
  misc_feature 1..69: note = P42081_1-23
  source 1..69: mol_type = other RNA
atggacccccagtgcaccatgggcctgagcaacatcctcttcgtgatggcctttcttctgtccggggct

SEQ ID NO: 914 - RNA, 69 nt, synthetic construct
  misc_feature 1..69: note = P43121_1-23
  source 1..69: mol_type = other RNA
atgggcctgcccagactcgtgtgcgccttccttctggctgcatgttgctgttgccctagggtcgccggg

SEQ ID NO: 915 - RNA, 69 nt, synthetic construct
  misc_feature 1..69: note = O00206_1-23
  source 1..69: mol_type = other RNA
atgatgagcgcctccagactggctggcaccctcatccccgcaatggccttcctttcttgcgtgaggcct

SEQ ID NO: 916 - RNA, 69 nt, synthetic construct
  misc_feature 1..69: note = P42701_1-23
  source 1..69: mol_type = other RNA
atggagcccctggtgacctgggtcgttcctctccttttcctgtttttgttaagcagacagggcgccgct

SEQ ID NO: 917 - RNA, 72 nt, synthetic construct
  misc_feature 1..72: note = P06729_1-24
  source 1..72: mol_type = other RNA
atgagcttcccctgcaagtttgtggcctccttcctgctcatctttaacgtctcttcaaaaggcgctgttagt

SEQ ID NO: 918 - RNA, 72 nt, synthetic construct
  misc_feature 1..72: note = P15328_1-24
  source 1..72: mol_type = other RNA
atggcccagagaatgaccacacaactgctccttctgttggtgtgggtcgctgttgtgggcgaggcacagact

SEQ ID NO: 919 - RNA, 72 nt, synthetic construct
  misc_feature 1..72: note = P05112_1-24
  source 1..72: mol_type = other RNA
atgggcctgaccagccagctccttccccctctgttctttttgttagcctgcgctgggaacttcgtgcacgga

SEQ ID NO: 920 - RNA, 72 nt, synthetic construct
  misc_feature 1..72: note = P06127_1-24
  source 1..72: mol_type = other RNA
atgcccatgggcagcctgcagcctctcgccaccctttacctgttggggatgttagtggcttcctgcctggga

SEQ ID NO: 921 - RNA, 72 nt, synthetic construct
  misc_feature 1..72: note = P32248_1-24
  source 1..72: mol_type = other RNA
atggacctgggcaagcccatgaaaagcgtgctcgtcgttgcccttctggtgatcttccaggtatgcttgtgt

SEQ ID NO: 922 - RNA, 72 nt, synthetic construct
  misc_feature 1..72: note = Q7Z7D3_1-24
  source 1..72: mol_type = other RNA
atggccagcctgggccagatcctcttctggtccattatatctatcattatcattcttgctggggcaatcgcc

SEQ ID NO: 923 - RNA, 72 nt, synthetic construct
  misc_feature 1..72: note = P54756_1-24
  source 1..72: mol_type = other RNA
atgagaggcagcgggcccaggggagccggtcggcgccgacctccatccggcgggggagacaccccgatcaca

SEQ ID NO: 924 - RNA, 72 nt, synthetic construct
  misc_feature 1..72: note = Q92823_1-24
  source 1..72: mol_type = other RNA
atgcagctgaagatcatgcccaaaaagaaaagactcagcgccggcagggtgcctcttattctgttcttgtgc

SEQ ID NO: 925 - RNA, 72 nt, synthetic construct
  misc_feature 1..72: note = P19320_1-24
  source 1..72: mol_type = other RNA
atgcccggcaagatggtggtcatcctgggggccagcaacattctctggataatgttcgctgcatcccaggcc

SEQ ID NO: 926 - RNA, 72 nt, synthetic construct
  misc_feature 1..72: note = Q86UN2_1-24
  source 1..72: mol_type = other RNA
atgctgagaaagggctgctgtgtggagctccttctgttgttagtcgccgctgaactgcccctagggggaggt

SEQ ID NO: 927 - RNA, 75 nt, synthetic construct
  misc_feature 1..75: note = P33151_1-25
  source 1..75: mol_type = other RNA
atgcagagactgatgatgctccttgccaccagcggcgcttgcctggggttgttagcagtggccgcggtcgctgcc

SEQ ID NO: 928 - RNA, 75 nt, synthetic construct
  misc_feature 1..75: note = P17813_1-25
  source 1..75: mol_type = other RNA
atggacagaggcaccctgcccctcgccgtggcacttctgttggctagctgctccttatctcctacatcactggcc

SEQ ID NO: 929 - RNA, 75 nt, synthetic construct
  misc_feature 1..75: note = P25445_1-25
  source 1..75: mol_type = other RNA
atgctgggcatctggaccctccttcccctggtgttgacaagcgtcgccagattatcctctaagtcagttaacgct

SEQ ID NO: 930 - RNA, 75 nt, synthetic construct
  misc_feature 1..75: note = P01730_1-25
  source 1..75: mol_type = other RNA
atgaacagaggcgtgcccttcaggcacctcctgcttgtcctgcagttggccttactgcctgctgcaacccaaggg

SEQ ID NO: 931 - RNA, 75 nt, synthetic construct
  misc_feature 1..75: note = Q685J3_1-25
  source 1..75: mol_type = other RNA
atgcccagacctggcaccatggccctgtgcctccttacactggtgttgagcttactgccaccgcaggctgcagcc

SEQ ID NO: 932 - RNA, 75 nt, synthetic construct
  misc_feature 1..75: note = P17787_1-25
  source 1..75: mol_type = other RNA
atggccagaaggtgcggccccgtggctctgctccttgggttcggactgttgcggttatgtagcggtgtctggggc

SEQ ID NO: 933 - RNA, 75 nt, synthetic construct
  misc_feature 1..75: note = Q6UQ28_1-25
  source 1..75: mol_type = other RNA
atggccgtgttccacgacatgctgctccagccccttggcatgtttctgtgcttgagcttacaactgtcctctgct

SEQ ID NO: 934 - RNA, 75 nt, synthetic construct
  misc_feature 1..75: note = P13987_1-25
  source 1..75: mol_type = other RNA
atgggcatccagggagggagcgttctgttcggtctccttctggtcttggccgtgttttgccactccggccattct

SEQ ID NO: 935 - RNA, 75 nt, synthetic construct
  misc_feature 1..75: note = P10721_1-25
  source 1..75: mol_type = other RNA
atgagaggcgccaggggagcttgggacttcctgtgcgtgctccttctgttgttacgggtccagaccgggagctcc

SEQ ID NO: 936 - RNA, 75 nt, synthetic construct
  misc_feature 1..75: note = P12319_1-25
  source 1..75: mol_type = other RNA
atggcccccgctatggagagccctaccctgctctgcgtggcacttctgttctttgccccagacggcgtcttggcg

SEQ ID NO: 937 - RNA, 78 nt, synthetic construct
  misc_feature 1..78: note = Q9BZR6_1-26
  source 1..78: mol_type = other RNA
atgaagagagccagcgctggcgggtccaggctgctcgcatgggtgctttggctgcaggcctggcaagtcgcggctccc

SEQ ID NO: 938 - RNA, 78 nt, synthetic construct
  misc_feature 1..78: note = P25063_1-26
  source 1..78: mol_type = other RNA
atgggcagagccatggtggctaggctggggctcggacttctgttgttagcactgctactccccacccagatctacagc

SEQ ID NO: 939 - RNA, 78 nt, synthetic construct
  misc_feature 1..78: note = Q9NR97_1-26
  source 1..78: mol_type = other RNA
atggagaacatgttcctgcagagctccatgcttacctgcatctttctcctgatttctggctcatgtgaattgtgcgcc

SEQ ID NO: 940 - RNA, 78 nt, synthetic construct
  misc_feature 1..78: note = Q8N131_1-26
  source 1..78: mol_type = other RNA
atgggcctgggggccagaggagcttgggcagccctccttctgggtaccttacaggtgttggcgctgctaggcgctgcc

SEQ ID NO: 941 - RNA, 78 nt, synthetic construct
  misc_feature 1..78: note = P49771_1-26
  source 1..78: mol_type = other RNA
atgaccgtgctggcccccgcttggagccctacaacttacctccttctgttgttactgctatcctctggcctctcaggg

SEQ ID NO: 942 - RNA, 78 nt, synthetic construct
  misc_feature 1..78: note = P02679_1-26
  source 1..78: mol_type = other RNA
atgagctggtccctgcaccccagaaacctcatcctttacttctatgccctgttgtttttatcttcaacctgcgtggct

SEQ ID NO: 943 - RNA, 78 nt, synthetic construct
  misc_feature 1..78: note = P14784_1-26
  source 1..78: mol_type = other RNA
atggccgctcccgcactgagctggagactccctcttctgatcttgttactgccactagccacctcctgggcgtctgct

SEQ ID NO: 944 - RNA, 81 nt, synthetic construct
  misc_feature 1..81: note = P05362_1-27
  source 1..81: mol_type = other RNA
atggcccccagctcccctagaccagctctgccggcactccttgtgctgttgggcgccttattccccgggcctggaaacgcg

SEQ ID NO: 945 - RNA, 81 nt, synthetic construct
  misc_feature 1..81: note = Q13740_1-27
  source 1..81: mol_type = other RNA
atggagagcaagggcgcctcctcttgcagactcctgttctgtcttctgatctcagctaccgtgtttaggcccgggttggga

SEQ ID NO: 946 - RNA, 84 nt, synthetic construct
  misc_feature 1..84: note = Q13443_1-28
  source 1..84: mol_type = other RNA
atgggcagcggggccagattcccctccggaaccctgagggtgcggtggctccttctgttgggtttagtcggccctgttctgggg

SEQ ID NO: 947 - RNA, 84 nt, synthetic construct
  misc_feature 1..84: note = P14151_1-28
  source 1..84: mol_type = other RNA
atgatcttcccctggaagtgccagagcacccaaagagacctgtggaacatttttaaactctggggctggacaatgctttgttgc

SEQ ID NO: 948 - RNA, 84 nt, synthetic construct
  misc_feature 1..84: note = P56199_1-28
  source 1..84: mol_type = other RNA
atggcccccagacctagggctcggccaggcgtggcagtcgcctgctgttggctgctcaccgttgtgcttcgctgctgtgtaagc

SEQ ID NO: 949 - RNA, 84 nt, synthetic construct
  misc_feature 1..84: note = P11279_1-28
  source 1..84: mol_type = other RNA
atggccgctcccggcagcgcaagaaggcctctgctccttctgttgttactgctactcctggggcttatgcactgcgcctccgcg

SEQ ID NO: 950 - RNA, 84 nt, synthetic construct
  misc_feature 1..84: note = P40259_1-28
  source 1..84: mol_type = other RNA
atggccagactggctctcagccccgtgccttcccactggatggtcgcacttctgttgttactgtctgccgagccagttccggcg

SEQ ID NO: 951 - RNA, 84 nt, synthetic construct
  misc_feature 1..84: note = P43681_1-28
  source 1..84: mol_type = other RNA
atggagctgggcgggcccggagcccctagactccttccaccgctgttgttactgctaggtaccggcctcctgagggctagctcc

SEQ ID NO: 952 - RNA, 84 nt, synthetic construct
  misc_feature 1..84: note = P18627_1-28
  source 1..84: mol_type = other RNA
atgtgggaggcccagttcctgggcctcctttttctgcaacccttgtgggtggctcctgtcaagccattacagccgggggcagaa

SEQ ID NO: 953 - RNA, 84 nt, synthetic construct
  misc_feature 1..84: note = Q5ZPR3_1-28
  source 1..84: mol_type = other RNA
atgctgagaaggcggggcagccccgggatgggagtgcacgtcggtgccgctctcggcgcactttggttctgcctgaccggggcc

SEQ ID NO: 954 - RNA, 84 nt, synthetic construct
  misc_feature 1..84: note = P23415_1-28
  source 1..84: mol_type = other RNA
atgtacagcttcaacaccctgagactctatctttgggagacaatcgtgtttttctccctggccgcttctaaggaagcagaggcc

SEQ ID NO: 955 - RNA, 84 nt, synthetic construct
  misc_feature 1..84: note = Q8TD46_1-28
  source 1..84: mol_type = other RNA
atgctgtgcccctggagaaccgccaacctcggccttctgttgatcttaacaattttcctggtggctgcaagctcctctctatgt

SEQ ID NO: 956 - RNA, 87 nt, synthetic construct
  misc_feature 1..87: note = P17301_1-29
  source 1..87: mol_type = other RNA
atgggccccgagagaaccggggccgctcctctgccactccttctggtgttggcattaagccagggaatcctgaactgctgtctagcc

SEQ ID NO: 957 - RNA, 87 nt, synthetic construct
  misc_feature 1..87: note = P12821_1-29
  source 1..87: mol_type = other RNA
atgggcgccgctagcgggagaaggggacccggtctgctccttcctctgccattgttactgctactcccgccccagcctgcactggcc

SEQ ID NO: 958 - RNA, 87 nt, synthetic construct
  misc_feature 1..87: note = Q14118_1-29
  source 1..87: mol_type = other RNA
atgagaatgagcgtgggcctgtccctccttctgcccttgtgggggaggaccttcttactgctactctctgtcgttatggcccagtca

SEQ ID NO: 959 - RNA, 87 nt, synthetic construct
  misc_feature 1..87: note = P05231_1-29
  source 1..87: mol_type = other RNA
atgaacagcttctccacctctgcctttggccccgtggctttctcactggggctccttctggtcttgcctgcagcctttccagcgccg

SEQ ID NO: 960 - RNA, 87 nt, synthetic construct
  misc_feature 1..87: note = O00602_1-29
  source 1..87: mol_type = other RNA
atggagctgagcggcgccaccatggctagagggctcgcagtgcttctggtcttgttcttacacatcaagaacctgcccgcccaggcg

SEQ ID NO: 961 - RNA, 87 nt, synthetic construct
  misc_feature 1..87: note = Q9Y6Q6_1-29
  source 1..87: mol_type = other RNA
atggcccccagagctaggcggcgccgacctctgttcgcactccttctgttgtgcgccttactggcgcgtctacaggtggctctccaa

SEQ ID NO: 962 - RNA, 87 nt, synthetic construct
  misc_feature 1..87: note = Q9ULI3_1-29
  source 1..87: mol_type = other RNA
atggccagccccagagcttccaggtggcctccaccgctgctccttctgttgttacccctgctactcctgcctccagcagcccccggc

SEQ ID NO: 963 - RNA, 90 nt, synthetic construct
  misc_feature 1..90: note = Q8NBP7_1-30
  source 1..90: mol_type = other RNA
atgggcaccgtgagctccagaaggtcttggtggcccctgcctctccttctgttgttactgctactcctggggccagccggagctcgggca

SEQ ID NO: 964 - RNA, 90 nt, synthetic construct
  misc_feature 1..90: note = P02675_1-30
  source 1..90: mol_type = other RNA
atgaagagaatggtgagctggtccttccacaaactgaagaccatgaaacatctccttctgttgttactgtgcgtctttctagttaagtct

SEQ ID NO: 965 - RNA, 90 nt, synthetic construct
  misc_feature 1..90: note = P06756_1-30
  source 1..90: mol_type = other RNA
atggccttccctcccagaaggcggctgcgcctcggcccacgagggcttccgctgttgttaagcggactgctactccccctgtgccgtgct

SEQ ID NO: 966 - RNA, 93 nt, synthetic construct
  misc_feature 1..93: note = O60609_1-31
  source 1..93: mol_type = other RNA
atggtgagacccctgaaccctaggccactcccgcccgtcgttcttatgctgttgttactgctacctccaagccccctccctctggccgctggc

SEQ ID NO: 967 - RNA, 93 nt, synthetic construct
  misc_feature 1..93: note = P50895_1-31
  source 1..93: mol_type = other RNA
atggagccccctgacgccccagctcaggcaagaggcgccccgaggctgctccttctggcggtgttgttagctgcccaccccgatgcacaagcc

SEQ ID NO: 968 - RNA, 93 nt, synthetic construct
  misc_feature 1..93: note = P28906_1-31
  source 1..93: mol_type = other RNA
atgctggtgagaaggggcgcccgggctgggccccgcatgcctcgaggatggaccgcactctgccttctgagcttgttaccatccggtttcatg

SEQ ID NO: 969 - RNA, 93 nt, synthetic construct
  misc_feature 1..93: note = P08514_1-31
  source 1..93: mol_type = other RNA
atggccagagctctgtgccccctccaggcactttggctgttggagtgggtgttactgctactcggcccttgtgccgcgccaccggcttgggcc

SEQ ID NO: 970 - RNA, 93 nt, synthetic construct
  misc_feature 1..93: note = P00742_1-31
  source 1..93: mol_type = other RNA
atgggcagacccctgcacctcgtgcttctgagcgcctccttggctgggttactgctactcggagagtctctgttcatcaggcgggaacaggca

SEQ ID NO: 971 - RNA, 96 nt, synthetic construct
  misc_feature 1..96: note = P26006_1-32
  source 1..96: mol_type = other RNA
atgggccccgggcctagcagagccccaagggctccgcggctgatgctctgcgcacttgccctgatggtggcggctggaggttgtgtcgtttccgcc

SEQ ID NO: 972 - RNA, 96 nt, synthetic construct
  misc_feature 1..96: note = P13726_1-32
  source 1..96: mol_type = other RNA
atggagacccccgcctggcctagagtgccaaggccggaaacagctgtcgcacggactctgctccttggctgggttttcgcccaggtggcgggggct

SEQ ID NO: 973 - RNA, 96 nt, synthetic construct
  misc_feature 1..96: note = P11912_1-32
  source 1..96: mol_type = other RNA
atgcccggcgggcctggagtgctgcaggccctcccagctaccatcttccttctgtttttgttaagcgcagtctacctgggtccgggctgccaagcc

SEQ ID NO: 974 - RNA, 96 nt, synthetic construct
  misc_feature 1..96: note = Q9H6X2_1-32
  source 1..96: mol_type = other RNA
atggccaccgctgagagaagggcactgggcatcgggttccagtggctcagccttgccacactggtgttgatttgcgcgggacaaggtggccggcgc

SEQ ID NO: 975 - RNA, 99 nt, synthetic construct
  misc_feature 1..99: note = Q8IWK6_1-33
  source 1..99: mol_type = other RNA
atggagccccctggcagaaggcgggggcgcgcccagccaccgctgctccttcccctgagcttgttagctctgctagcactcctgggaggtggcggggga

SEQ ID NO: 976 - RNA, 99 nt, synthetic construct
  misc_feature 1..99: note = P58335_1-33
  source 1..99: mol_type = other RNA
atggtggccgagagaagccccgctaggtcccctggctcttggctgttcccagggctctggcttctggtcttgtcaggaccgggtggcttactgcgggca

SEQ ID NO: 977 - RNA, 102 nt, synthetic construct
  misc_feature 1..102: note = P06731_1-34
  source 1..102: mol_type = other RNA
atggagagcccctccgcccctccacacagatggtgcatcccgtggcagaggctgctccttaccgcttctctgttgacattctggaaccctcccactacggca

SEQ ID NO: 978 - RNA, 102 nt, synthetic construct
  misc_feature 1..102: note = P33681_1-34
  source 1..102: mol_type = other RNA
atgggccacaccagaaggcaggggacaagcccctccaagtgcccttacctgaacttctttcaactccttgtgctggccggattgtctcatttctgttcaggt

SEQ ID NO: 979 - RNA, 105 nt, synthetic construct
  misc_feature 1..105: note = P38567_1-35
  source 1..105: mol_type = other RNA
atgggcgtgctgaagttcaaacacatctttttcagatcctttgtcaagagctctggggtttcacagattgtgttcacctttctccttataccctgctgtctgaca

SEQ ID NO: 980 - RNA, 105 nt, synthetic construct
  misc_feature 1..105: note = P16410_1-35
  source 1..105: mol_type = other RNA
atggcctgcctgggcttccagagacacaaggctcaactcaaccttgcaaccaggacatggccctgtactctgttgtttttcttactgtttatccctgtgttctgc

SEQ ID NO: 981 - RNA, 111 nt, synthetic construct
  misc_feature 1..111: note = P15814_1-37
  source 1..111: mol_type = other RNA
atgagacccggcaccgggcagggaggtctggaggcccctggcgaaccagggccgaacctcaggcaacggtggccccttctgttgttaggactggctgtggtcacacacggc

SEQ ID NO: 982 - RNA, 114 nt, synthetic construct
  misc_feature 1..114: note = Q92956_1-38
  source 1..114: mol_type = other RNA
atggagccccctggcgactgggggccaccgccctggagaagcacccctaagacagatgtgctgaggctcgtcctttacctgactttcttgggagccccatgctatgctcccgca

SEQ ID NO: 983 - RNA, 123 nt, synthetic construct
  misc_feature 1..123: note = Q86VB7_1-41
  source 1..123: mol_type = other RNA
atgagcaagctgagaatggtgctccttgaggactccggctctgccgatttcaggcggcactttgtcaacctgtcacccttcaccatcacagttgtgttgttactgagtgcttgctttgtaact

SEQ ID NO: 984 - RNA, 123 nt, synthetic construct
  misc_feature 1..123: note = P08648_1-41
  source 1..123: mol_type = other RNA
atgggcagcagaacccccgagtcccctctgcacgccgtgcagctcaggtgggggccacggcgccgaccgccccttctgcctttgttactgctactcctgccaccccctccacgtgtcggaggt

SEQ ID NO: 985 - RNA, 123 nt, synthetic construct
  misc_feature 1..123: note = P16109_1-41
  source 1..123: mol_type = other RNA
atggccaactgccagatcgctattctgtaccaaagattccagagggtggtctttggcataagccagctcctttgtttctccgcactgatctctgagttgaccaatcagaaggaagttgccgcg

SEQ ID NO: 986 - RNA, 132 nt, synthetic construct
  misc_feature 1..132: note = O75326_1-44
  source 1..132: mol_type = other RNA
atgacccctcccccaccgggcagagccgctcccagcgcacctagggcccgggtgccagggccccctgcgcgcctgggactcccacttcgactgcgtttgttactgctactctgggctgccgcagcctccgct

SEQ ID NO: 987 - RNA, 135 nt, synthetic construct
  misc_feature 1..135: note = Q8N2Q7_1-45
  source 1..135: mol_type = other RNA
atggccctgcccagatgcacctggcctaactacgtgtggagggctgtcatggcatgtctcgttcaccggggccttggggccccactgacattgtgcatgttaggatgtctgctacaggcgggtcatgtgctcagc

SEQ ID NO: 988 - RNA, 138 nt, synthetic construct
  misc_feature 1..138: note = Q86UN3_1-46
  source 1..138: mol_type = other RNA
atgctgcccggcctcagaaggcttctgcaggcccctgctagcgcatgcttgttactgatgctactcgccctgccacttgcggctccgtcctgtcccatgctgtgcacctgttactcttcacctccaacagtgagttgc

SEQ ID NO: 989 - RNA, 540 nt, synthetic construct
  misc_feature 1..540: note = A0A5B9
  source 1..540: mol_type = other RNA
atggacctgaagaacgtgtttccccctgaggtcgccgttttcgaaccaagcgaggctgaaatctcccacacccagaaagcaacactcgtgtgccttgccactggcttctacccggatcatgtagagctgtcttggtgggtgaatgggaaggaagtccactcaggagtgagtacggacccccaacctttgaaagagcagccagcgttaaacgatagcagatattgtctgtcctctaggctacgggtttcggctaccttttggcagaatccccgcaaccatttccgatgccaggtgcaattttacggtctctcagagaatgacgaatggacacaggatcgtgccaagcctgtcactcagattgtgagcgcagaggcctggggcagagctgactgtgggttcaccagtgaatcctatcagcaaggagtactgtctgcaacaatactttacgagatcctgttgggcaaagccaccctctatgctgttctggtgagcgccctggtcctcatggcgatggtgaagaggaaggattcccggggttga

SEQ ID NO: 990 - RNA, 465 nt, synthetic construct
  misc_feature 1..465: note = B7Z8K6
  source 1..465: mol_type = other RNA
atgagccagccccacaccaagccttccgtgttcgtcatgaaaaacggcacaaatgttgcctgcctggtgaaggagttttacccaaaagacatcagaattaacctcgtatcttcaaagaaaataactgagttcgatccggctatcgtgattagtcccagcgggaagtataatgcagtcaaacttggaaagtacgaagactccaactctgtgacgtgttcggttcaacatgataataagaccgtgcactcaacagactttgaagtcaaaactgatagcaccgaccatgtgaagcctaaagagacagaaaacaccaagcagccaagtaagtcctgccacaaacccaaggccatcgtacatactgagaaagttaatatgatgtctctgacagtgttgggtttaaggatgctgttcgcgaagaccgtcgctgtgaactttctactcacggccaaactgttctttctttga

SEQ ID NO: 991 - RNA, 645 nt, synthetic construct
  misc_feature 1..645: note = B9A064
  source 1..645: mol_type = other RNA
atgagacccaagaccggccaggtggggtgcgagacacctgaggaactgggaccaggtccgaggcaacggtggcccctccttctgttgggcttagccatggtcgctcacgggctgctacgccctatggttgcaccacagagcggagaccccgatcctggcgcctccgtgggttcttcacgaagtagcctccgttccctgtgggggagacttctgttgcagccatctccccagagggcggaccctcggtgttggccacgcggattctggtcggaaccgcaatcactctgctacgtatttggcactggcacgaaagtgaccgtcctggggcagcccaaggctaaccctacagtgactctgttcccacccagcagtgaggaactccaggccaataaagcaaccttagtttgtctgatctccgatttttatcctggagccgtgacagtcgcttggaaggcagacggttctccagtgaaagccggcgtagagaccactaagcccagcaagcagtccaacaataaatacgctgcctcaagttatcttagcttgacaccggagcaatggaagtctcatagatcctactcatgccaggttacccacgaagggagcacggtggagaaaactgtcgcgcctaccgaatgtagttga

SEQ ID NO: 992 - RNA, 2520 nt, synthetic construct
  misc_feature 1..2520: note = O00206
  source 1..2520: mol_type = other RNA
atgatgagcgcctccagactggctggcaccctcatccccgcaatggccttcctttcttgcgtgaggcctgagtcatgggaaccatgtgtcgaggttgtgccgaacattacataccagtgcatggaactgaatttttataagatacccgacaacttgcctttcagtactaaaaatttagatctgagctttaacccactacggcacctcgggtcctactctttcttttcgttccccgagctgcaagtacttgacctgtcacgctgtgaaatccagacgattgaggatggagcgtatcagagcttgagtcatctctccaccctgatcctgacaggtaatcctattcagtctctcgctttaggcgcctttagcgggctgtcctcacttcaaaagttggtggcagtcgagactaacctggccagtctagaaaatttcccaatcggacacctcaaaaccctgaaggagcttaacgtggctcataatctgatacagagctttaaattgcccgaatacttctctaacctcacaaatctggagcacttagacctgtcctcaaacaagatccagagcatttattgcaccgatctccgagttcttcatcagatgcctctgttgaatctaagtctggacctctctctgaacccaatgaattttatccaaccgggcgcattcaaggagattcgtcttcacaaactgactttgagaaacaactttgattccctcaatgtgatgaagacatgtatccagggtctggccgggttagaagtccacaggctggtgctaggagagttccggaacgaaggcaatctcgagaaattcgacaagagcgctctggaaggcctttgcaacttgaccatagaggagtttcgcctggcctacctcgattattacctggacgatattatcgaccttttcaattgtctgacgaacgtatcgtctttttccttggtttcagtgactattgaaagagtcaaagatttcagttacaattttgggtggcagcatctcgagctggtgaactgcaagttcggacagtttcccaccttaaagctgaaaagcctaaagaggctcacattcacttccaataaaggtggcaacgcgttttctgaagtggacctgcctagccttgagttcttggacctgtcacggaatgggctcagttttaagggatgttgctcccaaagcgatttcggcaccacatctctgaaatatttagacctgtcatttaacggtgtcatcaccatgagtagcaatttccttgggttggaacagctcgagcacctggatttccagcattccaacctaaagcaaatgtctgagttttcggttttcctgagcctccgcaatctgatctaccttgacatttcccacacgcacactcgagtggcatttaacggaatattcaacggcttgtcaagtctggaagtattaaaaatggccggcaattcttttcaggagaacttcctcccagatatctttacagaactgagaaatcttaccttcctggacttgagccagtgtcagctcgagcaactgtcccccactgcttttaactcactaagctctctccaggtgctgaatatgtcccataacaatttctttagtctggatacattcccttataagtgccttaacagcttgcaggtcctggactactctttaaatcacattatgacctccaagaaacaggaactccaacattttccatcaagtctggccttccttaacctgacgcagaatgatttcgcatgcacctgtgagcaccagagctttctacagtggatcaaggaccaaaggcagctcctggtggaggttgaacggatggagtgcgctacaccctcggataaacaggggatgccggtgttgtccctgaacataacttgtcagatgaataagaccattatcggagtctctgtgttaagcgtactcgttgtgtcagtcgtggccgtcctggtgtataaattctactttcatcttatgctgttggcgggttgcatcaagtatggccgtggggaaaacatttacgacgccttcgttatctacagttcccaagacgaggattgggtgcgcaatgagctcgtaaagaacctggaagagggagtccctccctttcagctatgtctgcactatagagacttcattccaggcgtggcaatagctgccaacatcattcacgaaggttttcataaatctaggaaggttatcgtggtcgtgagccagcacttcatccaatcccggtggtgcatttttgagtacgaaatagctcagacatggcagttcctttcaagccgagccgggatcatttttatcgtactccagaaagtggagaagactctgttgcgccaacaggttgagctgtatagattactcagtaggaatacctacctggaatgggaggattctgtccttggccggcatattttctggcgcagactgaggaaagcattgctcgacggaaagtcctggaaccctgaaggcacagtggggaccggatgtaattggcaggaggccactagcatctga

SEQ ID NO: 993 - RNA, 1377 nt, synthetic construct
  misc_feature 1..1377: note = P01730
  source 1..1377: mol_type = other RNA
atgaacagaggcgtgcccttcaggcatctgctccttgtcctgcagttggccttactgcctgctgcaacccaagggaagaaagttgtgctaggaaagaaaggtgacacagtagagctcacttgcacggccagccagaagaaatccatccagtttcactggaaaaattctaaccagattaagatactgggcaatcaagggtcattccttaccaaaggaccaagtaagctgaacgatcgggcggacagccgccgatccttgtgggatcagggcaattttccgctcatcattaaaaacctgaagatcgaagactctgatacatacatttgtgaggtggaagaccagaaagaggaagtccagctgctcgtgttcggtttaactgctaattcggatacccatctgcttcaagggcagtcattgacactgaccctagagagtccccctggaagctccccatctgttcagtgccgtagccccagaggcaagaacatccagggcgggaagactctctccgtgtcacaactggagcttcaggacagtggaacatggacctgtacggtcctgcagaatcaaaagaaggtggaatttaaaatagatatcgtagttttggccttccagaaggcaagctctattgtgtataaaaaggagggtgaacaggtcgagttttccttccctctcgcctttactgtggagaaactgaccggctcaggggaattatggtggcaggctgagagggcaagcagttctaagtcctggatcacattcgacctgaagaacaaagaagtgagcgtcaagcgggttactcaagatccaaaactccagatgggaaagaaacttcccctgcacttgaccctacctcaggccctgccacagtacgctggctcgggtaatctcacactggcccttgaggcgaagaccgggaagctgcaccaagaagtgaacttggtagtgatgcgcgcaacgcagctccagaaaaatctgacttgcgaggtctggggaccgacatctcccaagttaatgctgtccctaaaactcgagaacaaggaagccaaagtgtcaaagagagagaaggctgtttgggtgctgaatcctgaagccggcatgtggcagtgtcttttgagtgacagcggccaagtcctgctcgagtccaacattaaagtgctgccaacctggtctactcccgtacagcctatggcacttatcgttctgggaggggtggctggtttgctcctgtttataggcttagggattttcttttgcgtcaggtgtcggcatcgccgaagacaggccgaaaggatgagccagatcaagcggctgctatcagagaaaaagacatgccaatgtccacaccgtttccagaaaacctgcagtcccatttga

SEQ ID NO: 994 - RNA, 537 nt, synthetic construct
  misc_feature 1..537: note = P01850
  source 1..537: mol_type = other RNA
atggaggacctgaacaaggtgtttccccctgaagtcgccgttttcgagccaagcgaagctgagatctcccacacccagaaagcaacactcgtgtgccttgccactggcttctttccggatcatgtagaactgtcttggtgggtgaatgggaaggaggtccactcaggagtgagtacggacccccaacctttgaaagagcagccagcgttaaacgatagcagatactgtctgtcctctaggctacgggtttcggctaccttctggcagaatccccgcaaccattttcgatgccaggtgcaattctatggtctctcagaaaatgacgagtggacacaggatcgtgccaagcctgtcactcagattgtgagcgcagaagcctggggcagagctgactgtgggtttaccagtgtatcctaccagcaaggagttctgtctgcaacaatactttatgagatcctgttgggcaaagccaccctctacgctgtgctggtcagcgccctggtgctcatggcgatggtgaagaggaaggatttctga

SEQ ID NO: 995 - RNA, 624 nt, synthetic construct
  misc_feature 1..624: note = P07766
  source 1..624: mol_type = other RNA
atgcagagcggcacccactggagagtgctggggctctgccttctgtccgtcggagtttggggtcaagacggcaacgaggaaatgggagggatcacacagactccctacaaggtgtctatttcaggcacgaccgtaatattgacatgtcctcagtatccaggtagtgagatcttatggcagcataatgataaaaacattgggggagacgaagatgacaagaatatcggcagcgatgaggaccacctgtccctaaaagagttctctgaactcgagcaatcgggctactatgtgtgctacccgagggggtcaaagcccgaagatgccaacttttatctgtaccttcgggctcgcgtctgtgagaattgcatggaaatggacgtgatgagcgttgcaactattgtgatcgtcgatatatgtatcaccggaggtctgttgctcctggtgtattactggagtaaaaaccgaaaggccaaggcgaaacctgtaacacgtggcgctggggccggaggcagacagaggggtcagaataaggagcggccaccccctgttccaaaccccgactacgagcctattcgcaaagggcagagagatctgtattccggactcaatcaaaggcggatctga

SEQ ID NO: 996 - RNA, 3915 nt, synthetic construct
  misc_feature 1..3915: note = P08575
  source 1..3915: mol_type = other RNA
atgtacctgtggctcaagctcctggccttcggctttgctttcttggacaccgaggtgtttgtcacagggcagagccccactccttccccaacgggattaaccacagcaaaaatgccgtctgttcccctgtcaagtgatcctctaccaactcacaccacagccttcagccccgcgtccacctttgaaagagagaacgacttctctgaaactacaacctcgctctcacctgataatacgagcactcaagtgagtccagactccctggataacgcttctgcctttaataccacaggtgtaagctccgtgcagactccccatcttcctacccacgcagactcacagacaccaagtgccggcaccgatacgcagactttcagcgggtctgctgcaaacgccaagctgaatccgacacccggatccaacgctatctcagacgtccctggcgagaggagcaccgccagtacttttccaacagatcccgtgtctcctttgaccacgaccctctccctggcgcatcacagctcggcagccctgccagctcggacatctaatactaccattacagccaacacttccgacgcatatctcaatgcttcagaaaccacaaccttaagtcccagcggttccgccgttatatctactacgacaatcgcgaccactccgagcaaacctacctgcgatgagaagtacgccaacattacagtggactatctgtacaataaagagaccaaacttttcactgcaaagttgaacgtcaatgaaaacgtggagtgtgggaataacacatgcacgaacaatgaagtacataacctgaccgagtgtaagaatgcttcagttagtatctcccacaacagctgcactgcccccgataagacactaattctcgacgtgccacctggagtcgagaaatttcaactgcacgactgtacccaggtggaaaaggctgatacaactatctgccttaaatggaagaatatagagaccttcacgtgtgacacccagaacatcacatatcgctttcagtgcggcaatatgattttcgataacaaggaaatcaaactggagaatttggaacccgagcatgagtacaagtgtgactctgaaattctctataacaatcacaaattcactaacgcctcaaagatcataaaaaccgattttggcagtccaggggagccccaaattatcttctgccgaagcgaagcagcccatcagggagtgattacatggaatcctccacagcgttcctttcacaacttcactctgtgttacatcaaggagaccgaaaaagactgcttaaatctggataagaacctcatcaagtacgaccttcagaacctgaaaccgtatacgaagtacgtcttgtctctacacgcttatattatagcgaaagttcaaagaaatggttcggcagccatgtgccattttacaaccaagagcgctcccccttcccaggtgtggaacatgactgtatcaatgacaagtgataattctatgcacgtgaaatgtaggccaccccgggaccgcaacggccctcatgagagataccacctggaggtcgaagccgggaataccctcgtgaggaacgagagccataagaattgcgatttccgggttaaggacctgcagtattccactgactacacctttaaagcatatttccacaacggagattacccaggcgaaccctttatccttcaccattcaacaagctacaattctaaggccctgattgctttcttggcctttctcatcatagtgacgtccattgcactgttagtcgtgctgtataaaatctacgacctacacaagaaacgcagttgtaacctcgatgagcaacaggaactggtagagcgagacgatgagaagcagcttatgaatgttgaaccgatccatgcggacattttgctggagacctataagagaaaaatcgctgatgaaggtaggcttttcctggccgagtttcagagcattcctcgggtgttctctaagttcccaataaaagaggcacgtaagccctttaaccaaaataaaaaccgctacgtcgacatccttccttatgattacaatagagtggaactgtccgagattaacggggacgccggatcaaactatatcaatgctagttacatcgatggcttcaaggaacccaggaagtacattgccgcacagggcccacgggacgagactgtcgatgacttttggcgaatgatatgggaacagaaagctacagtgatcgttatggtgacccgctgcgaggaggggaacagaaataagtgtgccgaatattggcctagcatggaggaaggaacaagggcgttcggtgacgtagtcgtgaaaattaaccagcacaagcggtgccccgattacatcattcaaaaattgaatatcgttaacaagaaagagaaggccactggccgcgaagtgacccacatacagtttacgtcgtggccagaccatggggtcccggaggatcctcacctcctgttaaagctgagaaggcgtgtgaatgctttctccaactttttctctggacccatcgtagtgcattgtagcgcaggcgttggtcggacagggacctatattggcatcgacgccatgctagagggactcgaagctgagaataaagtcgatgtgtacggctatgtggtcaagctgcgaagacagaggtgccttatggttcaggtggaagcccaatacattttgatccaccaggcactggtggagtataaccagtttggggaaactgaggtaaatctctcagagctgcatccatacttacacaacatgaaaaagcgcgatccccctagtgaaccatcacccctggaggcggagttccagcggcttccttcttacagaagctggaggacccaacacataggaaatcaggaagagaacaaatccaagaatcgcaactcaaacgtcattccgtatgactacaatcgagtgccattgaagcatgaactcgagatgagcaaagaaagtgagcacgactctgatgaatccagcgacgatgactcggattcagaggagccctctaagtatatcaacgccagttttattatgtcctactggaaacctgaagttatgatcgctgcccagggtccactgaaggagacaataggcgacttctggcaaatgatctttcagcggaaagtgaaggtcattgtgatgctaactgaactgaagcatggggaccaggagatctgtgcacagtattggggagaaggcaaacaaacctacggtgatattgaggttgacctcaaggatacagacaaaagctctacgtataccctgcgtgtgttcgagcttagacacagcaagaggaaagattcccgcactgtataccagtaccagtatacaaattggtcagtcgaacagttgcccgctgagcctaaggaactgatcagtatgatacaagtggtgaagcagaaattaccgcagaagaacagctctgaggggaataaacatcacaagtccactcccctcctgattcactgccgggacggctcacagcaaaccggaatcttctgtgcccttctgaacttgctcgaaagtgcagagacagaggaagtcgttgatatctttcaggtggtaaaagccctgagaaaggctaggccaggcatggtgagcaccttcgagcagtaccaatttctatatgacgtcattgcgtccacgtaccctgcccagaatggacaggtgaaaaagaacaatcatcaggaagataagatcgagttcgacaacgaggttgataaagtgaagcaagacgcaaattgcgtcaaccccctgggggctccagaaaaactccctgaggccaaggaacaggccgagggttctgaacccacttcgggcaccgaggggccagagcacagcgtgaatggaccggcttcccctgcactgaaccagggctcctga

SEQ ID NO: 997 - RNA, 765 nt, synthetic construct
  misc_feature 1..765: note = P08637
  source 1..765: mol_type = other RNA
atgtggcagctgctccttcccaccgccctgttgttactggtgagcgctggcatgagaacagaggacctacctaaggcagtcgttttcctcgaaccacaatggtacagggtgctggagaaagattccgtaactcttaagtgccagggggcctattctccggaagacaactcaacgcagtggtttcacaatgagagtctgatcagctcccaggcgtcttcgtacttcattgatgctgccaccgtggacgattcaggagaatatcggtgtcaaacaaacttgagcactctcagtgaccccgtccagctggaggtgcatataggttggctgctcttacaggcacctcgctgggtttttaaagaggaagatccaatccatctgcgatgccactcctggaagaataccgcccttcacaaagtgacatacttgcagaacggcaaggggcgtaagtatttccatcacaattctgacttttacattcccaaagctaccctgaaggatagcggatcctatttctgtagaggcctatttggtagtaaaaacgtctcaagcgagactgtgaatatcacaattacccaagggctcgcagtatctacgatctcctcattctttcctccaggataccaggttagcttctgcctggtgatggtccttctgtttgccgtggacactggcttgtacttcagtgtgaagaccaacataaggtcttccacacgggattggaaagaccacaagtttaagtggcgcaaagatccccaggacaagtga

SEQ ID NO: 998 - RNA, 663 nt, synthetic construct
  misc_feature 1..663: note = P10747
  source 1..663: mol_type = other RNA
atgctgagactccttctggccttgaacttattccccagcatccaggtgaccggcaataagattctggtcaaacaatcccctatgctagttgcttacgacaacgcagtgaatctctcttgcaagtattcatacaacctgtttagtagggagttccgggccagccttcacaaagggctggattccgcggtagaggtgtgtgtcgtgtatggaaattactctcagcagttgcaggtttattcgaagacaggttttaactgcgacggcaaactcgggaatgagtcagtgactttctacctgcaaaacctgtatgtcaatcagacggatatatacttttgtaagatcgaagtgatgtacccaccgccctatctcgacaacgaaaagagcaatggaaccattatccatgtaaaaggcaagcacttatgccctagtccactgttccccggtccttccaaaccattttgggttcttgtggtcgtcgggggagtgttggcttgttactctctgctagtgacagttgccttcattatcttttgggtgcgcagcaagcgatcccgtctcctgcattcagattatatgaacatgactcccagaaggcctggcccaacccggaaacactaccagccgtatgcaccccctcgcgacttcgccgcttacagaagttga

SEQ ID NO: 999 - RNA, 681 nt, synthetic construct
  misc_feature 1..681: note = P11912
  source 1..681: mol_type = other RNA
atgcccggcgggcctggagtgctgcaggccctcccagctaccatcttccttctgtttttgttaagcgcagtctacctgggtccgggctgccaagccctatggatgcacaaggttcccgcgtccctcatggtgtctctgggggaggacgctcatttccagtgtcctcacaactcaagtaataacgccaatgtaacatggtggagagtgcttcatggaaactatacttggccacccgaatttctgggccctggtgaggatccaaatgggacgttgattatacagaacgtcaataaaagccacggaggcatctacgtgtgcagggttcaggaaggcaacgagtcctatcaacagtcttgtgggacctacctccgggtgcgccagccccctccacgaccgttcctggacatgggagaaggtacaaagaatcgtattatcactgcagagggcattatcctgctcttttgcgccgtcgtgcccgggaccttactgcttttcagaaaaaggtggcagaacgagaagttgggactggatgctggcgacgaatatgaggatgaaaatctatacgagggtctcaacctggacgattgttcgatgtatgaggacatatcacgggggcttcaaggaacataccaggatgtaggcagcctgaatatcggcgacgttcagttggaaaaaccttga

SEQ ID NO: 1000 - RNA, 1671 nt, synthetic construct
  misc_feature 1..1671: note = P15391
  source 1..1671: mol_type = other RNA
atgccccctccaagactcctcttctttcttctgttcttgaccccgatggaggtgaggcccgaggaacctttagtcgttaaggtggaagagggcgacaacgccgtactgcagtgcctaaaagggacaagcgatggaccaactcaacagctcacgtggtcccgggaatctcccctgaagccttttcttaaactgtcattgggtctcccaggcctggggatccacatgcgccccctggctatttggctgttcatatttaatgtgagtcagcagatgggaggcttctacttatgtcaacctggtccaccgagcgagaaggcatggcagcccgggtggaccgtcaacgtggagggatccggcgaactgtttcgatggaatgtttctgaccttggcgggttgggatgcggtctgaaaaaccgttcgtcagagggccctagcagtccatccgggaagctaatgtctcccaagctctatgtgtgggccaaagatagacctgaaatctgggagggagagccaccctgtctgccgcctagggacagccttaatcagtccctgtcacaggatttgacaatggcgcccggcagtactctctggctgagctgcggtgtcccacctgactctgtgtcccgggggcccttatcatggacccatgtacacccaaagggacccaaaagcctgctcagtcttgaactgaaggatgaccgccctgctagagatatgtgggttatggagacaggcttgctactgccaagggccaccgcacaagacgccggcaaatactattgtcatcgggggaacctcactatgtctttccacctggaaattacagctcgcccggtgctttggcattggctgttgcgaaccggaggttggaaggtctccgcagtgacgctcgcctacctgatcttttgcttatgtagcctggtgggcattctacacctccagagagctctggtccttaggcggaagcgtaaacgcatgactgatcccaccagaaggttctttaaggttacacctccacccgggtcgggacctcagaatcagtatggcaacgtgttgtctctgccaactcccacctccggtctcgggcgggcccaacgatgggcggcaggcctgggaggcacagccccgtcatacgggaatcctagtagcgacgtacaggctgatggagcccttggttcccgctctccacccggcgtggggcctgaggaagaggagggagaaggctatgaggaacccgacagcgaggaagactcagagttctacgagaacgatagtaatctgggtcaggaccaattgtcccaggatgggagcggctacgaaaacccagaggacgaacctctcggacccgaggatgaagactctttttcaaatgcagagagttatgagaacgaagatgaggaactgacccagccagtcgctagaacgatggacttcttaagcccgcacggctccgcctgggatccttctagggaggcgacttcgctggggagccagtcctacgaggacatgcggggaatcctatatgccgcaccccaactccgctcaataagaggtcagccaggccccaatcatgaagaggatgctgacagttacgaaaacatggacaaccctgatgggccagaccccgcctggggaggcggtgggaggatgggcacatggtctacccgttga

SEQ ID NO: 1001 - RNA, 672 nt, synthetic construct
  misc_feature 1..672: note = P16410
  source 1..672: mol_type = other RNA
atggcctgcctgggcttccagagacacaaggctcaactcaaccttgcaaccaggacatggccctgtactctgttgtttttcttactgtttatccctgtgttctgcaaagccatgcatgtcgcgcagccagctgttgtgctagccagctcccgggggattgcatcttttgtatgtgagtacgcctcaccgggaaaggctacggaagtgcgcgtcaccgtgctccgacaggcagacagtcaggttacagaggtgtgcgccgctacttatatgatgggtaatgaactgaccttccttgatgacagcatatgtacaggcacctcctctgggaaccaagtcaatctgactatccagggattgcgtgccatggatacaggcctctacatttgcaaagtggagctgatgtatccccctccatactatctgggtatcgggaacggaacccagatttacgtaatcgaccccgaaccttgtccagattcggactttctcttatggatactggcggcagtttcaagcggccttttcttttatagtttcttgctgacggccgtgtccctatctaagatgctcaaaaagagaagccccctgactaccggcgtctacgtgaagatgcctccaacagagccggagtgcgaaaaacagtttcaaccctacttcatccctattaattga

SEQ ID NO: 1002 - RNA, 1419 nt, synthetic construct
  misc_feature 1..1419: note = P16671
  source 1..1419: mol_type = other RNA
atgggctgcgacagaaactgtgggctgatcgccggagctgtgattggtgcagtcctcgccgttttcggcgggatacttatgcccgtgggagatctgttgatccagaagaccattaaaaagcaagtagtgttagaggaaggcacaatcgcgtttaaaaattgggtcaagactggtacggaggtgtacaggcagttctggatttttgacgttcagaaccctcaggaagtgatgatgaatagctccaacatccaagtcaaacagcgggggccatatacctaccgcgtgcgattcctggctaaggagaatgtaacacaggatgccgaagacaacactgtttcttttctacagccgaatggagcaatattcgagccctcactcagtgtgggcaccgaggccgataactttacagtcctgaatcttgctgtggcagccgctagccacatctatcaaaaccagttcgtgcagatgattctgaatagtttgatcaacaagtctaaatcgtcaatgtttcaggtccgtaccctcagagaactgctgtggggctacagggaccctttcctcagcttagttccatatcccgtgactacaaccgtagggctgttttacccttataataacacggccgatggagtgtacaaggtcttcaatggtaaagacaacattagtaaggtggcgatcatagatacttacaaaggcaagcggaacctttcctattgggagtctcattgcgacatgattaatgggaccgatgcagccagctttccacccttcgttgaaaagtcccaagtgttgcagttcttttcaagtgacatctgtcgcagcatttacgctgtcttcgagtctgatgtgaacctgaaaggaatccctgtatatagatttgttctaccatccaaggccttcgcatcaccggtggagaatcccgacaactactgcttttgtacagagaaaatcattagcaagaattgcacttcctatggcgtcctcgacatatctaaatgtaaggagggtaggcctgtgtacatctccctgccacacttcctttatgctagccccgatgtctcggaacctattgacgggctgaacccaaatgaggaagaacatcggacctacttggatatcgagcccataacaggatttaccctccagttcgccaaacgcctgcaagtgaacttactggttaagccgtctgaaaagattcaggtgctcaaaaatcttaagcgaaactacatcgtacctatcctgtggttgaatgagacgggcactattggcgacgaaaaagcgaacatgtttagatcccaggtcacagggaagatcaatctactgggactcattgagatgatactgctttcagtgggtgttgtgatgttcgtcgcctttatgatcagttattgcgcatgtaggagcaaaaccattaagtga

SEQ ID NO: 1003 - RNA, 651 nt, synthetic construct
  misc_feature 1..651: note = P26718
  source 1..651: mol_type = other RNA
atgggctggatcagagggaggcggagccgccactcctgggagatgtctgagttccataactacaatctggacctcaagaaatcagattttagtacccgatggcagaagcaacgttgccccgtggtcaaaagcaagtgtagagaaaacgcctcccctttctttttctgctgttttattgctgttgcaatgggaataaggttcatcattatggtggccatctggtctgcggtatttcttaattcgctgttcaaccaggaagtgcagattccattgacagagtcatattgcggtccgtgtcccaaaaattggatctgctacaagaacaattgttatcagtttttcgacgaaagcaagaactggtacgagagtcaggcttcctgcatgtctcaaaatgccagcttactgaaagtctattccaaggaggatcaggacctactcaaactggtgaagtcataccactggatgggccttgttcatatacctactaacgggagttggcagtgggaagatggaagcatcctgtctccaaatttgctcacgattatcgagatgcaaaaaggcgactgtgcactgtatgcctcctcatttaagggttacattgaaaactgcagcacccccaatacatacatctgtatgcagcggactgtgtga

SEQ ID NO: 1004 - RNA, 261 nt, synthetic construct
  misc_feature 1..261: note = P30273
  source 1..261: mol_type = other RNA
atgatccccgccgtggtcctgctccttctgttgttagttgagcaggctgcagccctgggcgaacctcaactatgctacattctcgacgcgatactgttcctttatgggatcgtgctgaccttgctctactgtagactgaagattcaggtaaggaaagctgccatcacaagctatgagaagtccgatggagtgtacactggtctgtctacgcggaaccaggaaacctatgagacactcaaacacgaaaagccaccgcagtag

SEQ ID NO: 1005 - RNA, 1137 nt, synthetic construct
  misc_feature 1..1137: note = P32248
  source 1..1137: mol_type = other RNA
atggacctgggcaagcccatgaaaagcgtgctcgtcgttgcccttctggtgatcttccaggtatgcttgtgtcaagatgaggtgaccgacgattacattggggacaacacaactgtcgattatacgttatttgaatccctgtgctctaagaaagacgtgagaaatttcaaggcttggtttctacctataatgtactcaatcatttgtttcgttggactcctgggtaacggccttgtggtcctgacctatatctactttaaaaggttgaagacaatgactgatacctatctcctgaatctggcagtggccgacattctcttcttactgacacttccattttgggcgtacagtgctgccaagagctgggtattcggggttcacttttgcaaattgatcttcgcaatatataagatgtcctttttctctggaatgctgctactcctgtgtatctcgattgatcggtacgtggccatcgtccaggctgtgtcagcacatcgccaccgagcccgtgtgcttctgattagcaaattgagttgcgtcggcatctggatactcgctaccgttctgtccattccggagttactgtactctgacctccagagaagctcctcagaacaggccatgaggtgtagtcttatcactgagcatgtggaagcgtttattacaatccaagtagcacagatggtgatcggtttcctggtccccttgctagccatgagcttctgctatctggtgattatacggaccctcctgcaggctcgcaactttgagagaaataaggccatcaaagttattatcgcagtggtcgtggtattcatagtttttcagcttccttacaacggggtggtcctggctcaaacggtggccaatttcaacattacttcttccacctgtgagttgtcaaagcagctcaatatcgcgtatgatgtcacatacagcctggcctgcgtgaggtgttgcgttaacccatttttatatgcattcatcggagtgaagtttcggaatgacctgttcaaactatttaaggatctcggctgcctgagtcaggaacagcttcgccaatggtcttcctgtcgacacattagaaggagctcgatgtctgtagaggctgaaactaccacaaccttctccccctga

SEQ ID NO: 1006 - RNA, 690 nt, synthetic construct
  misc_feature 1..690: note = P40259
  source 1..690: mol_type = other RNA
atggccagactggctctcagccccgtgccttcccactggatggtcgcacttctgttgttactgtctgccgagccagttccggcggctaggtcagaagaccggtaccgcaaccccaagggcagtgcctgcagccgaatctggcagtcccctcgtttcattgcaagaaaaagggggtttaccgtgaagatgcattgttatatgaactctgcctcgggaaatgtatcatggctatggaaacaagagatggatgaaaatccacagcagctcaagctggagaaaggtcggatggaagagagccagaacgagagtcttgctacactgactatacaaggcatccgcttcgaagacaatgggatttacttttgccagcagaagtgtaacaatacgtccgaggtgtatcagggatgcggcaccgaattgagagtcatgggtttctctacactcgcacaactgaagcagaggaacactctgaaagatgggatcattatgatccagaccctcttaataatcctgtttattatcgtgcccattttccttttgctggacaaggatgacagcaaagccggaatggaggaggatcacacatacgaaggcctagacatcgatcagaccgctacttatgaggacatagttacactccggaccggcgaagtgaagtggtccgtcggggagcatcctggacaagaatga

SEQ ID NO: 1007 - RNA, 990 nt, synthetic construct
  misc_feature 1..990: note = P42081
  source 1..990: mol_type = other RNA
atggacccccagtgcaccatgggcctgagcaacatcctcttcgtgatggcctttcttctgtccggggctgcacctttgaagattcaagcctacttcaatgagacagcggatttaccatgtcagtttgctaactctcagaatcagtcactgagtgagctagtcgttttctggcaagaccaggaaaacctcgtgctgaatgaagtatatcttggaaaagagaagtttgatagcgtgcactccaaatacatgggtagaacttctttcgactcggattcatggacgctgaggttgcataacctccagataaaggacaaaggcctgtatcagtgcatcattcaccataagaagccgaccgggatgatccggattcaccaaatgaatagcgaactgagtgtcctcgccaacttttcccagcccgagatcgtgcctatatctaatatcacagagaacgtttacattaatttaacttgtagctccatccatggatatccagaacccaaaaagatgtcagtgctgcttcgcaccaaaaacagtacaattgagtacgatggcgtcatgcagaagagtcaggacaatgtgaccgaattgtatgatgtatctatctccctgtcagttagcttccctgacgtgactagcaacatgacaatattttgcattctagagaccgataaaacgcgactcctgtcttccccattcagcatcgagcttgaagacccccaacctccaccggatcacattccctggatcactgcagtcctgcctaccgtgatcatttgtgtgatggtcttttgcttgatactctggaagtggaagaaaaagaaacgtccaagaaattcgtacaagtgtggtacaaacactatggagagggaagagtctgaacagaccaaaaagcgggagaaaatccacattcccgagcgctccgacgaagcccagagagttttcaagtcaagtaagacaagctcctgcgacaaatctgatacctgtttttga

SEQ ID NO: 1008 - RNA, 1011 nt, synthetic construct
  misc_feature 1..1011: note = Q15762
  source 1..1011: mol_type = other RNA
atggactaccccaccctgctccttgccctgttgcacgtgtatagagctttatgcgaggaagtcctgtggcatacaagcgttcctttcgcagagaacatgtccctagaatgtgtgtacccatctatgggcatcctcactcaggtagagtggtttaagattgggacgcaacaggattcaatagccatcttcagtccgacccacggaatggtgattaggaaaccctatgcggaacgggtctactttctgaatagcacaatggcttccaacaatatgactcttttctttcgcaacgcctctgaggacgatgtgggttattactcgtgctcactgtatacctaccctcagggcacatggcagaaggttatccaagtggtccagagcgacagtttcgaggcagccgtgccatccaattctcatattgtaagcgaacccgggaaaaacgttaccttgacttgtcagcctcagatgacatggccagtgcaagctgtccgatgggagaagatccagccccgtcagatagatctcctgacctactgcaatctggtgcacggaagaaactttacgtccaaattccctaggcagatcgtgtcaaattgtagtcatggccggtggagcgtcattgttatcccagacgtgactgtatctgattccggtctctatcgctgctacttacaagcatcagccggggaaaacgagacctttgtgatgagactgacagtcgctgagggaaagactgacaatcagtatacccttttcgtggccggcggcacagttttgctgctactctttgtgattagcatcaccacgataattgtcatcttcctgaacaggcggcgccgaagagaaaggcgggatctttttactgagagttgggacacacagaaggcgccgaataactaccgttctcccatttccaccagccaacctactaatcagtcgatggatgacacacgcgaagatatctatgtgaactacccaaccttctctagaaggcccaaaacgcgggtatga

SEQ ID NO: 1009 - RNA, 13482 nt, synthetic construct
  misc_feature 1..13482: note = Q685J3
  source 1..13482: mol_type = other RNA
atgccccgacctggaaccatggccctgtgcctccttactctggtgttgtccttactgcccccgcaggctgcagccgaacaagacctatccgtcaacagggcggtttgggatgggggaggttgtatctctcagggcgacgtgctcaatcggcagtgccagcaactgtcacagcacgtacgcactgggagtgctgccaacacggcaaccggaactactagcaccaatgtggtcgaaccccgaatgtacctttcctgttctactaaccctgagatgacctcgattgaatcaagcgtgacaagtgatactccaggcgtttcctctacccgtatgacgcccactgagagcagaaccacttccgaatcaacaagtgacagcaccactctgttcccttcttccaccgaggatacgtcaagcccaactactcccgagggtaccgacgtgcctatgagtactccatctgaagagtccatcagctcgaccatggcctttgtctctaccgctccgttgccctccttcgaagcatatacgtcactcacctacaaggtggatatgagtacccctctgactaccagcacccaggcctcctctagcccaactacccccgagtcaaccaccatccctaaaagtactaattccgaggggagcacgccactgacctctatgcccgcttcaaccatgaaggtagccagtagcgaagcgattactctcttaaccacaccggttgagatctccacccctgtgactatttctgcacaggcctcgagctcccccacaacggctgaaggaccatcactgagtaactctgcccctagcggcggctccacaccccttactaggatgccattgtcagtcatgctggtggtgagctctgaggcatccacactaagtaccacacccgctgccactaatatccctgtcataaccagcacggaagcgtcttcctcaccaaccacagccgaggggacaagtatcccgaccagcacatatactgagggatcgacacccctcacgtccactcctgcatctaccatgccagttgctactagcgaaatgtcaacactgagtattacccccgtggacacttccacccttgtaacaacgtctaccgagcctagctccctgccaactacagccgaagctacctcaatgttgacaagcactctcagtgagggttctacacccctgacgaacatgccggtgtccacaatcttagtcgccagctcggaagcatcaaccacttctaccattcctgtggatagtaaaacatttgttactaccgcctccgaggctagctctagcccaacaacggcggaggacacctccatcgcaacttcaacacccagtgaaggcagcacccctctgacttctatgcccgtgtccacaaccccagtcgcctcaagtgaggctagcaatctctccacgactcctgtggattctaagacccaagtaacaacctcgactgaagccagctcaagtcccccaacagcagaggttaacagcatgccgacctctacacctagcgaagggtccactccccttacctcaatgtctgtgagcacgatgccagtcgccagttccgaggctagcacactgtctaccactcccgtggacacctcaacacctgtcactacctccagtgaggccagctcgtcttccacgacaccagaaggaaccagcatacccacttcaacacctagtgagggctctaccccgttgactaatatgccagtgtccacacggctagttgtgagctcagaagcaagtaccacgagcactacccccgcggattccaacacattcgtaaccacatctagcgaggcttcctcatctagtactaccgccgagggtacgtcgatgcctacaagcacttactccgaacgcgggaccacaattacctctatgtcagtcagcactaccctggtggcatccagtgaggcctctacactcagcacgactccagttgactcaaatacccccgtgacaacctccactgaagctacaagtagctctaccacggccgagggaacttccatgcctacatcaacctataccgaaggcagcactccgctgacatcgatgcccgtcaacaccacacttgtggcatctagtgaggcttccactctgagcacgaccccagtagacacatcaactcctgtgaccacatccaccgaggcctctagcagtcccactacggcggatggcgcctccatgccaaccagcacaccttctgaagggtcaactcccttgaccagtatgccagtttccaaaacactcctgaccagctctgaggcttcgactttatcaacaacgccgctggacaccagcactcatatcacaacctccaccgaagcaagttgctctcctacaactacggagggaaccagcatgcccatttccacaccatcagaaggtagtcccctactcacttctatccctgtcagcatcaccccagtgacatcccccgaggcctcaaccctgagcactacgcctgtggattctaattccccggtcacaaccagtactgaggttagctcgtccccaacccccgctgaaggcacatctatgcctacttcaacctacagcgaggggagaacaccccttacgagtatgccagtgtccaccactttggtggccacatctgcaattagcaccctgtcaactacacctgtagacacctccacgcccgtcaccaacagtacagaagcgaggagctctccaactacctcagagggaacatccatgcctactagcaccccgggcgaaggttctacacccctcaccagtatgccagattcgactacgcctgtggtttccagcgaggcccggacactgtcagctacccccgtggacacttctaccccagtcacaacgagcaccgaggccacttccagtcctacaaccgcagaagggacttcaatacccacatctaccccgagcgagggcacaactccacttacctccacgcctgtgagtcacaccctggttgctaacagcgaagcctccacattgtctactacccccgtggattcaaatacaccactcactaccagcacggaggcatcgtccccacctccgacagccgagggaaccagtatgcccacttctacaccaagcgaaggctcaacccctctgactcgcatgcccgtatccaccacaatggtcgcttctagtgagacgagcaccttatccactactcctgcggacacctcaactccagtgacaacctatagccaggcctctagttccagcacgacagcagatgggacctcaatgcccacttctacctactccgaaggatcgacacctctgactagcgtgccagtcagtaccagactggttgtgtcttccgaggctagcacactctcaacgactcccgtagacaccagtatcccggtgacaacctccactgaagcctcctcttcacctacaaccgccgagggtacgagcattccaacttctccccctagcgagggcaccacaccactggctagtatgcccgtctcgaccactcttgtggttagctccgaagcaaacacattgtcaaccacaccggtggattctaagactcaggtcgccaccagcacggaggcgagttcccctcccccaacagctgaagtgacctcaatgcctacttctacccccggggagagaagcacaccactgacttccatgcccgttaggcatacgcctgtggccagtagcgaagcatctaccctctcaacatccccagtcgacaccagcactccggtaacaaccagtgccgagacttcttcctcgcccacaaccgctgagggaacgagcctgcctacttcaaccacatccgaaggctctaccttactgacaagtatcccagtgagcacaacccttgttacgtcacccgaggcatccacattgctcactacccctgtggacacaaagggtccagtcgtgaccagcaatgaagtatctagttcccccactcctgccgaggggacgagcatgccgacctcaacatactctgaaggccggactccactgacctcgatacccgtgaacacaaccctagtcgcgagctccgctattagtatcctgtctactacacctgttgataattcaacccccgtgacgactagcacagaggcctgttccagtccaaccacttctgagggaaccagcatgcctaactccaatccctcagaaggcacaaccccactcacgagcatcccggtgtctacaactcctgtcgtgtccagtgaggcatcaaccctgagcgccacacccgttgacacttcgaccccagggacaacctccgctgaagccacttctagtcccacgaccgcagagggaattagcatccctacatcaactccatccgagggtaaaacaccccttaagtctattcctgtaagcaacacaccggtggctaatagtgaagcctccaccttgagcactacaccagtcgattctaactcacccgtggttacgtccaccgcggtgagcagttctcctactccagccgagggcacatcaatagcaatctccacccccagcgaagggtcgaccgctctgacttctattcctgtcagtacaacgaccgtggcctccagcgagatcaattcattatctacaactcccgctgtaaccagcacaccagtcactacctattcccaggcaagttcaagcccgacgacagccgacggaacctccatgcaaacttctacctacagtgaaggcagcacacctctcacttccctgcccgtgtcaaccatgcttgttgtgtcttcggaggccaacacactgagcacgaccccaatcgattccaaaactcaggtcacagctagtaccgaggcgtctagctcaactacagcagaaggttccagcatgaccatttctacgcctagtgaggggtcccccttgctcacctcaataccagtgagcacaactcctgttgcctctcccgaggcttcgaccctgtccacaactccggtggacagtaatagcccagtcatcacctcaacagaggtgtcttccagccctacgcccgccgaaggcaccagtatgccaacttcaacatataccgagggacgtactcccctaacctccattacagtacgcacgacccctgtggcaagctctgccatcagtactctgagcacaaccccggttgataactccactccagtcacaacctctactgaggctagatcaagccccacaacctccgaaggcacgtcgatgcctaattctacccccagtgaggggacaactccactcaccagcattcctgtgtcaacaactcccgtgctgtcctctgaagcgagcaccctttccgccacgccaatcgacacaagtacccctgtcactacatcaaccgaggcaactagctctccgaccacagctgaaggaacgtccatacccaccagtactttgagcgagggcatgacaccactgacctcaactcctgtatctcacacattagtggccaactccgaggcatcgaccctcagcacgacacccgttgatagtaactccccagtggtcacctctactgccgtgtcaagctcccctacccccgctgaaggtacatctatcgccactagcaccccgagtgaggggtcaacagcgctgacgtccattccagttagcactaccacagtggcatctagtgaaaccaatactctttccacaacccctgccgtcacgagcactcccgtgaccacatacgctcaggtatcatcgtctccaaccactgccgacggaagctccatgcccacaagtacccctagggagggccggcccccactgacgtcaatccctgtgtctacaactaccgttgctagctccgagattaacacactaagtaccactctcgcagatacccgaacaccggtcactacgtatagccaagcctcttcctcacccaccacagctgacggtactagcatgccaacccctgcctactcggaaggctccacacccctgacctctatgccattgagtactacgctggtggtgtcaagcgaggcatccacattatctaccactcctgtcgataccagcacacccgcgaccacaagtacagaagggtcatccagcccgaccacggccggaggcacatctatccagacttccacccctagtgagcgcacaaccccactcgctgggatgcccgttagcactacgctggtggtatcatctgaaggaaataccctttccacaactcctgtggacagcaagacccaggtcacaaactcgaccgaggccagttcttcagcaactgctgagggctccagcatgacaatatctgccccaagcgaaggtagccccctgttgaccagtattcctctctcaacgactccagtggcaagccccgaggcctccacactgtctaccactccggttgacagtaattcacctgtgatcaccagcacagaagtctcctcttcgcccattccaaccgaggggacgagcatgcagacatccacttatagtgatagaaggacacccctaacatcaatgcctgtatctactaccgtggttgctagctccgcgatcagtacactgtctaccactccagtggacacgagcacccccgtcacaaactcaactgaagcccggtccagccctaccacatctgagggaacctcaatgccaacaagtacgccgtccgagggcagcacaccctttacctcgatgcctgtgtctactatgccagtcgtgacatccgaagcaagcaccctttcagctactcccgttgataccagtacacctgtgacgacctctacagaggccacttccagcccaaccacagccgaaggtacttcaatacccaccagtacgctctccgagggcacaaccccgctgactagcatccctgtatctcataccttggtggcaaattcggaagtcagcacactgtccactaccccagttgactcaaacacacccttcacgacctctactgaggctagtagccctcccccaacagccgaggggacctccatgccgacttctacatcaagcgaaggaaatacccctttaacgcgcatgcccgtgagtaccacaatggtcgcgtcctttgagacttctaccctcagcacaactccagctgatacctccacacccgtgacgacctactcacaagccggcagtagccctactacagcagacgatacctctatgccaacttccacctactcggaagggagcacacccctgacgtcagtacctgtgagtactatgccagttgtgtcctctgaggccagcacccactcaacaaccccggtcgacacttccacacccgtgaccacgtctactgaggctagcagttcccctacaaccgcagaaggaaccagcattccaacatctcccccttcagagggcactaccccacttgccagtatgcccgtctccacaactcctgtggttagctctgaagcgggtaccctgtcgacgacaccggtagatacctcaactcccatgacaaccagcactgaggcttccagttctccaaccacagccgaagacatcgtggtccctattagcacggcatccgaggggtcaaccttgctcacaagtatccccgtgagcacaaccccagttgcctctcctgaggcttccactctgagcacaacccccgtggattcaaactctccagtcgtgacgtccacagaaataagtagctcggccacttccgcagagggaacctctatgccgacctcaacatatagcgaaggcagtactcctctaagatccatgcccgtatctaccaaaccactggctagctcagaggccagtacgctttccacaactcccgtggacaccagcattcctgttacaacctctactgaaacatcctcaagcccaaccacggcgaaggatacaagtatgcccatctctaccccttcggaggtctccacaagcctcacctcaatcctggtgtctactatgccggtggccagtagcgaggcatccacattgtcaaccacgcccgtcgacactaggacattagttaccacaagcaccggtacttcctctagtccaaccacagctgaaggcagctccatgcctacttctacgcccggggagcgttcaaccccactgacaaatattctcgtgtcgactaccctgcttgccaacagcgaagcaagtacactgtccaccactcctgtagacacgtctacacccgtgaccactagcgctgaggcctcatccagtccaaccacagccgaaggaacctctatgcggatcagcactccgtccgatggctcaacacctttgacgagcattctagtctctaccctgcccgtggcgagttccgaggctagcacagtttcgactaccgcagtggacacatctataccagtcaccacttcaacggaggcctccagcagtcctaccacagctgaagtgacttctatgcccacctccacaccaagcgagacttcaacccctctcacaagtatgcccgtaaatcacaccccggttgcctccagcgaagcagggacgctgtctactacaccagtggatacctcaactcccgtcaccacaagcacgaaggcctccagttctcctaccactgctgagggaatcgtggtgccaatttcgacagcgagcgagggctccacccttttaacatcaatccccgtctctactacccctgttgccagtagcgaagcatccacactgtcaaccactccggtggacacgtctattcccgtaaccacaagcactgagggttccagtagcccaaccacagctgaagggacgtctatgcctatctccaccccctcagaggtgagcactccactcacaagtatattggtctcgaccgtgcctgttgccggatctgaagcatccactctgagcacaacccccgtggatactcgaaccccagtcacaacgtcagccgaggctagttcctctcctaccacagccgagggcactagcatgcccatctcaaccccgggcgaaagaaggacacctctcacttccatgagcgtgtctaccatgccagtagcgagttccgaggcaagcacgctgtcacgcacacccgccgacacctctactcctgttaccacatcgactgaagctagtagctccccaaccacagccgaggggacgggcattcccatctctaccccgtcagaaggtagcactcctcttacatccattcccgtgagtaccactccagtcgcaatccccgaggcttctacactgagcaccacgcctgtggattccaactcaccagttgtgaccagcactgaggtcagttcttcccccactcctgccgaaggcacctcgatgccaataagcacatactcagaggggtccactccgttgaccggagtgcccgtatctacgacacctgtgaccagtagcgctatttccactctatcaacaaccccagtcgacacttctacccccgttacaacgagcactgaagcccatagttcccctaccacaagcgagggcacctctatgccaacttcaacaccctccgaaggtagtaccccgctgacgtatatgcctgtgagcactatgctcgtcgtgtcttcggaggattccacattatcagcaaccccagtagacaccagcacacccgtgactaccagtacagaggcgacttcttccaccacggccgaagggacaagcatccctacctcaactccctctgagggaatgacaccactgaccagcgttcctgtgtccaatactcccgtcgctagttcagaagccagcatcctttccacgaccccagtggattctaacacaccgctgactaccagtacagaggcaagctcctcgccccctaccgctgagggcacttctatgccaacatcaacccccagcgaaggctccacgcctctcacaagtatgccagtttctacaaccaccgtcgccagctcagagacatccactttgagcaccacgcccgcagacacaagtactcctgtgaccacatactctcaggcctcctcaagcccgccaattgcggacgggacctctatgcccacttcgacatattccgaaggaagtacccctctgacgaacatgagcttctcaactaccccagtggtatcttccgaggctagcacactcagtaccactcccgtcgatacatccacccctgtgacgactagcacagaagcctctctgtcacccaccacagcagagggtacaagtataccaacctccagcccgtctgagggcaccacacctcttgcctcaatgcccgtttcgactacgccagtggtcagctccgaagtgaataccctaagtacaactcctgttgactctaacaccctggtgacaaccagcactgaggcttcctcatctcccacgatcgccgaagggacttccttgccaaccagtactacctccgagggatcaacaccgttaagcattatgcctctgtctaccactcccgtagcatccagtgaagctagcacactctcgacgaccccagtcgatacttcaacacccgtgaccacatcttcccctaccaatagcagtccaactacggccgaggtgacctccatgcccacatctactgcgggcgagggtagcacccctctgacaaacatgccggtttcaactaccccagtcgcttccagtgaagccagcacactttctacgacccccgtggactcaaatacttttgtaacatccagctctcaggcaagttcgtcccctgccaccctacaggtgactaccatgcggatgagcacaccctcagaggggtctagctccctcacgaccatgttgctgagttcaacttacgtcacatctagcgaggcttccaccccaagtacacctagcgtggatagatctactcccgttaccacgtccacacaatcaaacagcaccccaactcctccggaggtgatcaccctacccatgtcgacaccatccgaagtctctactcctctgaccattatgcccgtgagtacaacgagcgttaccatctcagaggcaggaactgcctccacactcccagtggacacctctactcctgtaataacaagcacccaggtcagttcctcacccgtgacgccggagggcactaccatgccaatctggacacccagcgaaggctctacccctcttactacaatgccagttagtaccacaagggtgacttccagcgaggggtcaaccctgtctacgccctccgtcgtgacaagcacccctgtaactacctcgacagaagcgattagttcttcagccactttagattccaccacaatgagcgtgagtatgcccatggagatctctacgttgggaaccactattctggtcagcacaaccccagttactcgcttccctgagtcctcaacaccgagcatcccctccgtgtatacctctatgagtatgacgaccgcttcagaaggtagctcctctccaactacactcgagggcaccacaactatgcctatgtcgaccacgagcgaacgaagtacactgcttactaccgtgctgatatcccccatttcagtcatgtctccaagcgaggcatccacactcagtacccctcccggggacactagcaccccgttgctgacatctacgaaagccggatcattttccatcccagctgaagtgactaccatccggattagcatcacatctgagcgtagtacccctttaactacactactggtttccaccacgctccccacttcattcccaggcgccagcatagcatcgacacctccccttgatacctctaccacatttactccgtccaccgacacagctagcactcctacgattcccgtagccaccacaatcagtgtgtcagtcattaccgagggttccactccagggacaaccatcttcataccctctactcctgtgacgagcagtaccgcggatgttttcccagccacaactggagcagtgtcaacccccgtcattacatccaccgaactgaatactcctagcacatcttcgagctccaccacgacaagtttttctacaaccaaggagttcaccacaccagctatgactacggccgcacccttgacctacgtgacaatgtcaactgccccgagcacccctagaacaacctccaggggctgcactacatctgctagtaccctgagcgccacgtcaactccacacacctccacaagcgtaactacccgccccgtgacaccttcttccgaaagttcacggccaagcaccatcacgtctcatactataccccctacatttccacccgcgcactcctcgaccccgcctactacaagcgctagttcaaccacggtcaacccagaggcagttaccacaatgactaccagaacaaaaccctccactaggaccacatctttccctaccgtgactacgacagccgtccccaccaatactaccattaagagcaacccaacaagtaccccgactgtgccccgaacaacgacctgttttggcgacgggtgccagaatactgcttcccgctgtaaaaacggaggtacatgggatggcctcaagtgccagtgtcctaatctgtactatggggaactttgcgaggaggttgtgtcaagcatcgacattggaccacccgaaaccatatctgcccaaatggagctcacagtaactgtgacctccgtcaaattcacggaagaactgaagaaccacagctctcaggaatttcaggagttcaagcagacctttacagagcaaatgaatatcgtgtacagtggcattcctgaatatgttggtgtcaacatcactaaattgcggctggggtcagtggtggtagagcatgacgtcttactaagaaccaagtacacaccagaatataaaactgtgctggataacgcaaccgaggttgtgaaggagaaaatcacgaaggtcacaacccagcagattatgataaatgacatctgctccgatatgatgtgtttcaacactacaggaacccaagtgcagaatattactgttacccagtacgaccccgaagaggattgcaggaagatggccaaagaatatggcgactactttgtggtcgagtaccgtgatcagaagccttattgtatcagcccatgcgaaccgggcttctcggtgtctaaaaactgtaatctcgggaagtgccaaatgagtcttagcggaccccagtgtctgtgcgtaacaacggagacccactggtactccggtgagacttgtaaccagggcacacagaaatcattggtgtatgggctggttggagctggcgtcgtgctcatgctgattatccttgtggcgttactgatgctcgtctttcgctctaagcgggaagttaagagacaaaaatacaggttgagccagctgtataagtggcaggaggaagactccggtcctgccccagggaccttccagaatataggcttcgatatctgccaagacgatgacagtattcatctagagtcaatctacagcaactttcagccctctctgcgacacattgatcctgaaacaaaaatccggatacagcgcccacaagtgatgactacctccttctga

SEQ ID NO: 1010 - RNA, 1215 nt, synthetic construct
  misc_feature 1..1215: note = Q9NNX6
  source 1..1215: mol_type = other RNA
atgagcgactccaaggagcccagactgcagcaactcggccttctggaagaggaacagttgagggggttaggattccggcagacccgcggttacaaatctctggccggctgcctagggcacggacctctcgtgctgcagcttctgtcatttacattgctcgctggcctgctggtccaagttagtaaggtgccaagctccatctctcaggagcagtcgcgacaggatgcaatttatcaaaacctcactcagttaaaagccgcggtaggtgaactgtcagaaaagagcaaacttcaggagatataccaggaattgacgcaactgaaggctgccgtgggggagctaccggaaaagagtaaactccaggagatctatcaggagctgacccgtcttaaggcagccgtcggagaactgcccgagaaatccaagttgcaagaaatttaccaggagctcacatggctgaaagctgcagtgggcgaattacctgagaagtctaagatgcaggagatctatcaggaactgactagactcaaagccgctgttggcgagcttccagaaaagagcaaacaacaggagatttaccaggaactgaccaggttgaaggccgcggtgggggagctacccgagaaatccaagcagcaagaaatctatcaggagctgacacggctcaaagcagccgtcggagaactgcctgagaagtcaaagcagcaggaaatataccaagagcttacccagctgaaagctgccgtggagcgcttgtgtcatccatgcccctgggaatggactttctttcagggtaattgttacttcatgagtaacagccagagaaattggcacgactctatcacagcatgcaaggaggtaggcgctcaactcgttgtgattaaatccgccgaggagcagaactttctgcagttacaatcaagcaggagtaatcggttcacctggatggggctgtctgatctaaaccaggagggaacgtggcagtgggtcgacggctcccctctcctgccgagctttaagcagtattggaatcgcggtgaaccaaacaatgtgggggaggaagattgtgcggagttctcgggaaacggctggaatgacgataaatgcaaccttgccaagttttggatctgtaagaaatctgcagcttcctgctcacgagacgaggaacaattcttgagtcccgcccctgctactccaaatccccctccagcctga

SEQ ID NO: 1011 - RNA, 3126 nt, synthetic construct
  misc_feature 1..3126: note = Q9NR97
  source 1..3126: mol_type = other RNA
atggagaacatgttcctgcagagctccatgttgacctgcatctttcttctgatttctggctcatgtgaattgtgcgccgaggaaaatttcagtagaagctacccctgtgacgagaagaaacaaaacgattccgtgatagctgaatgctctaataggcggttacaggaggtccctcagacagttgggaagtatgtgactgagctggacctatcggataactttatcacgcacattaccaatgaatcattccagggactccaaaacctgacaaaaatcaatcttaaccataatccaaacgtacagcaccagaatggtaacccgggcattcagagcaatgggctgaacatcactgacggagcatttttgaatctcaagaacctgcgcgagctgctcttagaagataaccaactgccccagatacctagtggccttccagagtccttgaccgagctgtctctaatccagaataacatttacaatatcacaaaagaaggtattagccgactcatcaacctgaagaatctttatctggcctggaactgttacttcaataaggtgtgcgagaaaaccaacatagaagacggggtctttgagactttgacaaatctcgaactgttatccctgtcattcaacagtctcagccatgtgccccctaaacttccatcttccctgcgtaagttgtttctatcaaatacccagattaagtatatcagcgaggaggatttcaaaggactgattaacctcacgctgcttgacctgagtggcaattgtcccagatgctttaacgcgcctttcccatgtgttccgtgcgatggcggggcttctatcaatatcgacaggtttgccttccaaaacttgactcagctccggtacctgaacttatccagcacctcgctgcgcaagattaatgcagcctggttcaagaacatgccccacctaaaagtgctcgatctggaatttaattatcttgtcggagagatagcttctggtgcattcttgacaatgctgcctagactcgaaatcctggacctttcctttaactacattaagggctcatacccacagcatatcaatataagtaggaacttcagcaaactgttgtccctccgggccctgcacttacgcgggtatgtgtttcaagagctgcgagaagatgacttccagcccctaatgcagctccctaatctgtctactattaaccttggaatcaattttatcaagcagattgacttcaaattgtttcaaaacttcagcaatctggagatcatttacctctcagagaacagaataagtccactggtaaaggataccaggcagtcctatgctaattcttcttcatttcagcggcacatccgtaaacgcagaagtacagacttcgaatttgatccccatagcaacttctaccacttcaccaggccgttaattaagcctcagtgtgccgcgtatggcaaggcactggacctttccttgaatagcatctttttcatcggtcccaaccaatttgagaacctcccagatattgcctgcctgaatctatcggctaacagcaatgcccaggttctgtccgggacggaattttcagcaatacctcatgtgaaatacctcgacctgactaacaatcggcttgattttgacaacgctagtgccttgacagagctgtctgatttagaagtcctcgacctgagctataattcccactacttccgaatcgcgggagtgacccaccatcttgagtttattcagaacttcactaatctgaaggtgttgaacctctcacacaataacatctacacactgaccgataaatataatctagagagcaagtctctggtcgaactcgttttctccggcaaccgcctggacattctttggaatgacgatgacaacagatacatcagtatattcaaaggcttgaagaacctgacgaggttagatctcagcctgaatcggcttaagcatatccccaacgaggcctttctgaatctaccagcatctctcaccgaactgcacattaacgacaatatgttgaaattctttaactggacactgttacagcaattcccccgcctcgagctgcttgatctgagagggaataagctcctcttcctgactgactccctatcagattttaccagtagcctgaggacacttctcctgtcgcataaccgtatctcccacttgccttctggattcctgagcgaggtgtcaagtttaaaacacctcgacctgtcctctaatcttctgaagactattaacaaaagcgctttggaaaccaagacaaccactaagctctccatgctggagctacatggtaatccatttgaatgcacgtgtgatatcggcgacttccggcgatggatggatgagcacctgaacgtaaaaataccgagacttgtggacgtcatttgcgcctcacccggggatcagaggggaaagagcatcgtgagtctcgaactgacaacctgtgtttctgacgtgactgctgtcattttgtttttctttaccttctttatcacaaccatggtgatgttagccgcactggcccatcacctcttctattgggacgtatggtttatatacaatgtttgcctggctaaagtgaagggctatcgctcccttagcacttcgcagacattctacgatgcgtatatctcatacgacacgaaagatgcatctgtcaccgactgggtgattaacgagctgcggtaccacttggaggaaagtagagataagaatgtcctactgtgtctcgaggaaagggactgggatcctggtctggccatcattgacaaccttatgcagtccatcaatcaaagcaagaaaactgtgttcgttttaacaaagaaatatgctaagtcttggaactttaaaaccgccttctacctggcactccagcgcttgatggatgagaacatggacgtgataatttttatcctgctcgaaccagtactgcagcatagccaatatcttcgactgcggcagcgtatctgcaagtcctcaattttgcagtggcccgataatcctaaagccgaggggctattctggcagacactgagaaacgtcgtgctcactgagaatgacagtaggtacaacaatatgtatgttgatagcatcaagcaatactga

SEQ ID NO: 1012 - RNA, 66 nt, synthetic construct
  misc_feature 1..66: note = P16671_TM_1_8-29
  source 1..66: mol_type = other RNA
ggcctgatcgccggggctgtgattggagcagtcctcgccgttttcggtggcatacttatgcccgtg

SEQ ID NO: 1013 - RNA, 81 nt, synthetic construct
  misc_feature 1..81: note = P32248_TM_1_60-86
  source 1..81: mol_type = other RNA
ttcctgcccatcatgtacagcattatatgctttgtgggcctccttgggaacggactggtcgttttgacctatatctacttc

SEQ ID NO: 1014 - RNA, 66 nt, synthetic construct
  misc_feature 1..66: note = P16671_TM_2_440-461
  source 1..66: mol_type = other RNA
ctgctcggccttatcgagatgattctgttgagcgtgggggtcgttatgttcgtggcctttatgata

SEQ ID NO: 1015 - RNA, 63 nt, synthetic construct
  misc_feature 1..63: note = P32248_TM_2_96-116
  source 1..63: mol_type = other RNA
tacctgctcaaccttgccgtggctgacatcctgttcttgttaaccctgcccttttgggcatat

SEQ ID NO: 1016 - RNA, 66 nt, synthetic construct
  misc_feature 1..66: note = P32248_TM_3_131-152
  source 1..66: mol_type = other RNA
ctgatcttcgccatttacaagatgagctttttctccggcatgctccttctgttgtgcatatctatc

SEQ ID NO: 1017 - RNA, 63 nt, synthetic construct
  misc_feature 1..63: note = P32248_TM_4_171-191
  source 1..63: mol_type = other RNA
gtgctgctcatcagcaagctgtcctgcgtcggcatttggatacttgccaccgttttgtctatc

SEQ ID NO: 1018 - RNA, 84 nt, synthetic construct
  misc_feature 1..84: note = P32248_TM_5_220-247
  source 1..84: mol_type = other RNA
ttcatcaccattcaggtggcccaaatggtcataggctttctggttcccctccttgctatgagcttctgctacctggtgatcatt

SEQ ID NO: 1019 - RNA, 78 nt, synthetic construct
  misc_feature 1..78: note = P32248_TM_6_264-289
  source 1..78: mol_type = other RNA
gtgatcattgccgtcgttgtggtattcatagtgtttcagctgccctacaacggcgtcgtgctcgctcaaaccgttgca

SEQ ID NO: 1020 - RNA, 54 nt, synthetic construct
  misc_feature 1..54: note = P32248_TM_7_314-331
  source 1..54: mol_type = other RNA
ctggcctgcgtgagatgttgcgtcaaccccttcctctacgcttttatcggcgtt

SEQ ID NO: 1021 - RNA, 69 nt, synthetic construct
  misc_feature 1..69: note = A0A5B9_TM_145-167
  source 1..69: mol_type = other RNA
accatcctgtacgagattctccttggcaaggccacactgtatgctgtgttggtcagcgcattagttctg

SEQ ID NO: 1022 - RNA, 69 nt, synthetic construct
  misc_feature 1..69: note = B7Z8K6_TM_130-152
  source 1..69: mol_type = other RNA
ctgggcctcagaatgcttttcgccaagaccgtggctgtcaactttctgttgacagcaaaattattcttt

SEQ ID NO: 1023 - RNA, 63 nt, synthetic construct
  misc_feature 1..63: note = O00206_TM_632-652
  source 1..63: mol_type = other RNA
accatcattggcgtgagcgtcctgtccgttctcgtggtatctgtggtcgccgtgcttgtttac

SEQ ID NO: 1024 - RNA, 66 nt, synthetic construct
  misc_feature 1..66: note = P01730_TM_397-418
  source 1..66: mol_type = other RNA
atggccctgatcgtgctcggcggggtcgctggacttctgttgttcattggtttaggcatatttttc

SEQ ID NO: 1025 - RNA, 63 nt, synthetic construct
  misc_feature 1..63: note = P01850_TM_151-171
  source 1..63: mol_type = other RNA
atcctgctcggcaaggccaccctttacgctgtgctggtcagcgcattggttttaatggccatg

SEQ ID NO: 1026 - RNA, 78 nt, synthetic construct
  misc_feature 1..78: note = P07766_TM_127-152
  source 1..78: mol_type = other RNA
gtgatgagcgtcgccaccatcgttattgtggacatatgcatcacaggcgggctgctccttctggtatactattggtcc

SEQ ID NO: 1027 - RNA, 66 nt, synthetic construct
  misc_feature 1..66: note = P08575_TM_576-597
  source 1..66: mol_type = other RNA
gccctgatcgctttcctcgcatttcttattatagtgaccagcatcgccctgttggtcgttttatac

SEQ ID NO: 1028 - RNA, 63 nt, synthetic construct
  misc_feature 1..63: note = P08637_TM_209-229
  source 1..63: mol_type = other RNA
gtgagcttctgcctggtcatggttctcctttttgccgtggacaccggcctgtacttctccgta

SEQ ID NO: 1029 - RNA, 81 nt, synthetic construct
  misc_feature 1..81: note = P10747_TM_153-179
  source 1..81: mol_type = other RNA
ttctgggtgctggtcgttgtgggcggggtactcgcctgctacagccttctggtgaccgtcgcttttatcattttctgggtg

SEQ ID NO: 1030 - RNA, 66 nt, synthetic construct
  misc_feature 1..66: note = P11912_TM_144-165
  source 1..66: mol_type = other RNA
atcattaccgccgagggcataatcctcctgttctgcgctgtggtccccgggacacttctgttgttt

SEQ ID NO: 1031 - RNA, 66 nt, synthetic construct
  misc_feature 1..66: note = P15391_TM_292-313
  source 1..66: mol_type = other RNA
gtgagcgccgtcaccctggcttacctcatcttctgcctttgttccctggttggcattttgcactta

SEQ ID NO: 1032 - RNA, 63 nt, synthetic construct
  misc_feature 1..63: note = P16410_TM_162-182
  source 1..63: mol_type = other RNA
ttcctgctctggatccttgccgctgtgtcttccggcctgtttttctacagctttttgttaacc

SEQ ID NO: 1033 - RNA, 63 nt, synthetic construct
  misc_feature 1..63: note = P26718_TM_52-72
  source 1..63: mol_type = other RNA
cccttctttttctgctgttttatcgccgtggctatgggcattagattcataatcatggtcgca

SEQ ID NO: 1034 - RNA, 63 nt, synthetic construct
  misc_feature 1..63: note = P30273_TM_24-44
  source 1..63: mol_type = other RNA
ctgtgctacatcctcgacgccattcttttcctgtatggcatagtgttgaccttactgtactgt

SEQ ID NO: 1035 - RNA, 63 nt, synthetic construct
  misc_feature 1..63: note = P40259_TM_160-180
  source 1..63: mol_type = other RNA
ggcatcattatgatacagaccctgctcatcattcttttcatcattgtgcccatctttctgttg

SEQ ID NO: 1036 - RNA, 63 nt, synthetic construct
  misc_feature 1..63: note = P42081_TM_248-268
  source 1..63: mol_type = other RNA
tggatcaccgccgtgctgcccacagtcattatatgcgttatggtgttctgtctcatcctttgg

SEQ ID NO: 1037 - RNA, 63 nt, synthetic construct
  misc_feature 1..63: note = Q15762_TM_255-275
  source 1..63: mol_type = other RNA
ggcgggaccgtgctgctccttctgttcgtcattagcattacaactataatcgttatctttttg

SEQ ID NO: 1038 - RNA, 63 nt, synthetic construct
  misc_feature 1..63: note = Q685J3_TM_4394-4414
  source 1..63: mol_type = other RNA
ctggtgggcgccggggtcgttctcatgcttatcattctggtggctttgttaatgctggtattc

SEQ ID NO: 1039 - RNA, 63 nt, synthetic construct
  misc_feature 1..63: note = Q9NNX6_TM_38-58
  source 1..63: mol_type = other RNA
ctgggccacgggcccctcgtgcttcagctgttgagcttcaccttactggccggactactcgtc

SEQ ID NO: 1040 - RNA, 63 nt, synthetic construct
  misc_feature 1..63: note = Q9NR97_TM_828-848
  source 1..63: mol_type = other RNA
gccgtgatcctgttctttttcacctttttcattacaactatggtcatgctcgctgcacttgcc

SEQ ID NO: 1041 - RNA, 48 nt, synthetic construct
  misc_feature 1..48: note = P14207_1-16
  source 1..48: mol_type = other RNA
atggtgtggaagtggatgcccctgctgctgctgctggtgtgcgtggcc

SEQ ID NO: 1042 - RNA, 48 nt, synthetic construct
  misc_feature 1..48: note = O75787_1-16
  source 1..48: mol_type = other RNA
atggccgtgttcgtggtgctgctggccctggtggccggcgtgctgggc

SEQ ID NO: 1043 - RNA, 48 nt, synthetic construct
  misc_feature 1..48: note = P07359_1-16
  source 1..48: mol_type = other RNA
atgcccctgctgctgctgctgctgctgctgcccagccccctgcacccc

SEQ ID NO: 1044 - RNA, 48 nt, synthetic construct
  misc_feature 1..48: note = P08637_1-16
  source 1..48: mol_type = other RNA
atgtggcagctgctgctgcccaccgccctgctgctgctggtgagcgcc

SEQ ID NO: 1045 - RNA, 51 nt, synthetic construct
  misc_feature 1..51: note = P07237_1-17
  source 1..51: mol_type = other RNA
atgctgagaagagccctgctgtgcctggccgtggccgccctggtgagagcc

SEQ ID NO: 1046 - RNA, 51 nt, synthetic construct
  misc_feature 1..51: note = O60911_1-17
  source 1..51: mol_type = other RNA
atgaacctgagcctggtgctggccgccttctgcctgggcatcgccagcgcc

SEQ ID NO: 1047 - RNA, 51 nt, synthetic construct
  misc_feature 1..51: note = P20138_1-17
  source 1..51: mol_type = other RNA
atgcccctgctgctgctgctgcccctgctgtgggccggcgccctggccatg

SEQ ID NO: 1048 - RNA, 51 nt, synthetic construct
  misc_feature 1..51: note = P27797_1-17
  source 1..51: mol_type = other RNA
atgctgctgagcgtgcccctgctgctgggcctgctgggcctggccgtggcc

SEQ ID NO: 1049 - RNA, 54 nt, synthetic construct
  misc_feature 1..54: note = P10747_1-18
  source 1..54: mol_type = other RNA
atgctgagactgctgctggccctgaacctgttccccagcatccaggtgaccggc

SEQ ID NO: 1050 - RNA, 54 nt, synthetic construct
  misc_feature 1..54: note = O75487_1-18
  source 1..54: mol_type = other RNA
atggccagattcggcctgcccgccctgctgtgcaccctggccgtgctgagcgcc

SEQ ID NO: 1051 - RNA, 54 nt, synthetic construct
  misc_feature 1..54: note = P07996_1-18
  source 1..54: mol_type = other RNA
atgggcctggcctggggcctgggcgtgctgttcctgatgcacgtgtgcggcacc

SEQ ID NO: 1052 - RNA, 54 nt, synthetic construct
  misc_feature 1..54: note = P22748_1-18
  source 1..54: mol_type = other RNA
atgagaatgctgctggccctgctggccctgagcgccgccagacccagcgccagc

SEQ ID NO: 1053 - RNA, 54 nt, synthetic construct
  misc_feature 1..54: note = Q15762_1-18
  source 1..54: mol_type = other RNA
atggactaccccaccctgctgctggccctgctgcacgtgtacagagccctgtgc

SEQ ID NO: 1054 - RNA, 54 nt, synthetic construct
  misc_feature 1..54: note = P30273_1-18
  source 1..54: mol_type = other RNA
atgatccccgccgtggtgctgctgctgctgctgctggtggagcaggccgccgcc

SEQ ID NO: 1055 - RNA, 54 nt, synthetic construct
  misc_feature 1..54: note = P38570_1-18
  source 1..54: mol_type = other RNA
atgtggctgttccacaccctgctgtgcatcgccagcctggccctgctggccgcc

SEQ ID NO: 1056 - RNA, 54 nt, synthetic construct
  misc_feature 1..54: note = Q01638_1-18
  source 1..54: mol_type = other RNA
atgggcttctggatcctggccatcctgaccatcctgatgtacagcaccgccgcc

SEQ ID NO: 1057 - RNA, 54 nt, synthetic construct
  misc_feature 1..54: note = Q9NZQ7_1-18
  source 1..54: mol_type = other RNA
atgagaatcttcgccgtgttcatcttcatgacctactggcacctgctgaacgcc

SEQ ID NO: 1058 - RNA, 57 nt, synthetic construct
  misc_feature 1..57: note = P13591_1-19
  source 1..57: mol_type = other RNA
atgctgcagaccaaggacctgatctggaccctgttcttcctgggcaccgccgtgagc

SEQ ID NO: 1059 - RNA, 57 nt, synthetic construct
  misc_feature 1..57: note = P26842_1-19
  source 1..57: mol_type = other RNA
atggccagaccccacccctggtggctgtgcgtgctgggcaccctggtgggcctgagc

SEQ ID NO: 1060 - RNA, 57 nt, synthetic construct
  misc_feature 1..57: note = P15391_1-19
  source 1..57: mol_type = other RNA
atgcccccccccagactgctgttcttcctgctgttcctgacccccatggaggtgaga

SEQ ID NO: 1061 - RNA, 57 nt, synthetic construct
  misc_feature 1..57: note = Q8NI17_1-19
  source 1..57: mol_type = other RNA
atgatgtggacctgggccctgtggatgctgcccagcctgtgcaagttcagcctggcc

SEQ ID NO: 1062 - RNA, 57 nt, synthetic construct
  misc_feature 1..57: note = P08571_1-19
  source 1..57: mol_type = other RNA
atggagagagccagctgcctgctgctgctgctgctgcccctggtgcacgtgagcgcc

SEQ ID NO: 1063 - RNA, 57 nt, synthetic construct
  misc_feature 1..57: note = P05154_1-19
  source 1..57: mol_type = other RNA
atgcagctgttcctgctgctgtgcctggtgctgctgagcccccagggcgccagcctg

SEQ ID NO: 1064 - RNA, 57 nt, synthetic construct
  misc_feature 1..57: note = P02787_1-19
  source 1..57: mol_type = other RNA
atgagactggccgtgggcgccctgctggtgtgcgccgtgctgggcctgtgcctggcc

SEQ ID NO: 1065 - RNA, 57 nt, synthetic construct
  misc_feature 1..57: note = P02671_1-19
  source 1..57: mol_type = other RNA
atgttcagcatgagaatcgtgtgcctggtgctgagcgtggtgggcaccgcctggacc

SEQ ID NO: 1066 - RNA, 57 nt, synthetic construct
  misc_feature 1..57: note = P04216_1-19
  source 1..57: mol_type = other RNA
atgaacctggccatcagcatcgccctgctgctgaccgtgctgcaggtgagcagaggc

SEQ ID NO: 1067 - RNA, 57 nt, synthetic construct
  misc_feature 1..57: note = P00747_1-19
  source 1..57: mol_type = other RNA
atggagcacaaggaggtggtgctgctgctgctgctgttcctgaagagcggccagggc

SEQ ID NO: 1068 - RNA, 57 nt, synthetic construct
  misc_feature 1..57: note = P01764_1-19
  source 1..57: mol_type = other RNA
atggagttcggcctgagctggctgttcctggtggccatcctgaagggcgtgcagtgc

SEQ ID NO: 1069 - RNA, 57 nt, synthetic construct
  misc_feature 1..57: note = P16150_1-19
  source 1..57: mol_type = other RNA
atggccaccctgctgctgctgctgggcgtgctggtggtgagccccgacgccctgggc

SEQ ID NO: 1070 - RNA, 57 nt, synthetic construct
  misc_feature 1..57: note = Q6DN72_1-19
  source 1..57: mol_type = other RNA
atgctgctgtggaccgccgtgctgctgttcgtgccctgcgtgggcaagaccgtgtgg

SEQ ID NO: 1071 - RNA, 57 nt, synthetic construct
  misc_feature 1..57: note = Q01151_1-19
  source 1..57: mol_type = other RNA
atgagcagaggcctgcagctgctgctgctgagctgcgcctacagcctggcccccgcc

SEQ ID NO: 1072 - RNA, 57 nt, synthetic construct
  misc_feature 1..57: note = P07093_1-19
  source 1..57: mol_type = other RNA
atgaactggcacctgcccctgttcctgctggccagcgtgaccctgcccagcatctgc

SEQ ID NO: 1073 - RNA, 57 nt, synthetic construct
  misc_feature 1..57: note = Q8WWQ8_1-19
  source 1..57: mol_type = other RNA
atgatgctgcagcacctggtgatcttctgcctgggcctggtggtgcagaacttctgc

SEQ ID NO: 1074 - RNA, 60 nt, synthetic construct
  misc_feature 1..60: note = Q13291_1-20
  source 1..60: mol_type = other RNA
atggaccccaagggcctgctgagcctgaccttcgtgctgttcctgagcctggccttcggc

SEQ ID NO: 1075 - RNA, 60 nt, synthetic construct
  misc_feature 1..60: note = P35225_1-20
  source 1..60: mol_type = other RNA
atggccctgctgctgaccaccgtgatcgccctgacctgcctgggcggcttcgccagcccc

SEQ ID NO: 1076 - RNA, 60 nt, synthetic construct
  misc_feature 1..60: note = P25942_1-20
  source 1..60: mol_type = other RNA
atggtgagactgcccctgcagtgcgtgctgtggggctgcctgctgaccgccgtgcacccc

SEQ ID NO: 1077 - RNA, 60 nt, synthetic construct
  misc_feature 1..60: note = P52803_1-20
  source 1..60: mol_type = other RNA
atgctgcacgtggagatgctgaccctggtgttcctggtgctgtggatgtgcgtgttcagc

SEQ ID NO: 1078 - RNA, 60 nt, synthetic construct
  misc_feature 1..60: note = Q15116_1-20
  source 1..60: mol_type = other RNA
atgcagatcccccaggccccctggcccgtggtgtgggccgtgctgcagctgggctggaga

SEQ ID NO: 1079 - RNA, 60 nt, synthetic construct
  misc_feature 1..60: note = P05556_1-20
  source 1..60: mol_type = other RNA
atgaacctgcagcccatcttctggatcggcctgatcagcagcgtgtgctgcgtgttcgcc

SEQ ID NO: 1080 - RNA, 60 nt, synthetic construct
  misc_feature 1..60: note = Q12891_1-20
  source 1..60: mol_type = other RNA
atgagagccggccccggccccaccgtgaccctggccctggtgctggccgtggcctgggcc

SEQ ID NO: 1081 - RNA, 60 nt, synthetic construct
  misc_feature 1..60: note = Q8IV16_1-20
  source 1..60: mol_type = other RNA
atgaaggccctgggcgccgtgctgctggccctgctgctgtgcggcagacccggcagaggc

SEQ ID NO: 1082 - RNA, 60 nt, synthetic construct
  misc_feature 1..60: note = Q03167_1-20
  source 1..60: mol_type = other RNA
atgaccagccactacgtgatcgccatcttcgccctgatgagcagctgcctggccaccgcc

SEQ ID NO: 1083 - RNA, 60 nt, synthetic construct
  misc_feature 1..60: note = Q14246_1-20
  source 1..60: mol_type = other RNA
atgagaggcttcaacctgctgctgttctggggctgctgcgtgatgcacagctgggagggc

SEQ ID NO: 1084 - RNA, 60 nt, synthetic construct
  misc_feature 1..60: note = P16871_1-20
  source 1..60: mol_type = other RNA
atgaccatcctgggcaccaccttcggcatggtgttcagcctgctgcaggtggtgagcggc

SEQ ID NO: 1085 - RNA, 60 nt, synthetic construct
  misc_feature 1..60: note = P61769_1-20
  source 1..60: mol_type = other RNA
atgagcagaagcgtggccctggccgtgctggccctgctgagcctgagcggcctggaggcc

SEQ ID NO: 1086 - RNA, 60 nt, synthetic construct
  misc_feature 1..60: note = Q9Y6W8_1-20
  source 1..60: mol_type = other RNA
atgaagagcggcctgtggtacttcttcctgttctgcctgagaatcaaggtgctgaccggc

SEQ ID NO: 1087 - RNA, 63 nt, synthetic construct
  misc_feature 1..63: note = P10966_1-21
  source 1..63: mol_type = other RNA
atgagacccagactgtggctgctgctggccgcccagctgaccgtgctgcacggcaacagcgtg

SEQ ID NO: 1088 - RNA, 63 nt, synthetic construct
  misc_feature 1..63: note = Q9BZW8_1-21
  source 1..63: mol_type = other RNA
atgctgggccaggtggtgaccctgatcctgctgctgctgctgaaggtgtaccagggcaagggc

SEQ ID NO: 1089 - RNA, 63 nt, synthetic construct
  misc_feature 1..63: note = P02778_1-21
  source 1..63: mol_type = other RNA
atgaaccagaccgccatcctgatctgctgcctgatcttcctgaccctgagcggcatccagggc

SEQ ID NO: 1090 - RNA, 63 nt, synthetic construct
  misc_feature 1..63: note = P18564_1-21
  source 1..63: mol_type = other RNA
atgggcatcgagctgctgtgcctgttcttcctgttcctgggcagaaacgaccacgtgcagggc

SEQ ID NO: 1091 - RNA, 63 nt, synthetic construct
  misc_feature 1..63: note = O14525_1-21
  source 1..63: mol_type = other RNA
atggccctggccggcctgtgcgccctgctggcctgctgctggggccccgccgccgtgctggcc

SEQ ID NO: 1092 - RNA, 63 nt, synthetic construct
  misc_feature 1..63: note = P01130_1-21
  source 1..63: mol_type = other RNA
atgggcccctggggctggaagctgagatggaccgtggccctgctgctggccgccgccggcacc

SEQ ID NO: 1093 - RNA, 63 nt, synthetic construct
  misc_feature 1..63: note = P01732_1-21
  source 1..63: mol_type = other RNA
atggccctgcccgtgaccgccctgctgctgcccctggccctgctgctgcacgccgccagaccc

SEQ ID NO: 1094 - RNA, 63 nt, synthetic construct
  misc_feature 1..63: note = P48061_1-21
  source 1..63: mol_type = other RNA
atgaacgccaaggtggtggtggtgctggtgctggtgctgaccgccctgtgcctgagcgacggc

SEQ ID NO: 1095 - RNA, 63 nt, synthetic construct
  misc_feature 1..63: note = P01589_1-21
  source 1..63: mol_type = other RNA
atggacagctacctgctgatgtggggcctgctgaccttcatcatggtgcccggctgccaggcc

SEQ ID NO: 1096 - RNA, 63 nt, synthetic construct
  misc_feature 1..63: note = Q86T13_1-21
  source 1..63: mol_type = other RNA
atgagacccgccttcgccctgtgcctgctgtggcaggccctgtggcccggccccggcggcggc

SEQ ID NO: 1097 - RNA, 63 nt, synthetic construct
  misc_feature 1..63: note = Q5DID0_1-21
  source 1..63: mol_type = other RNA
atgctgagaaccagcggcctggccctgctggccctggtgagcgccgtgggccccagccaggcc

SEQ ID NO: 1098 - RNA, 66 nt, synthetic construct
  misc_feature 1..66: note = P40189_1-22
  source 1..66: mol_type = other RNA
atgctgaccctgcagacctggctggtgcaggccctgttcatcttcctgaccaccgagagcaccggc

SEQ ID NO: 1099 - RNA, 66 nt, synthetic construct
  misc_feature 1..66: note = Q86YL7_1-22
  source 1..66: mol_type = other RNA
atgtggaaggtgagcgccctgctgttcgtgctgggcagcgccagcctgtgggtgctggccgagggc

SEQ ID NO: 1100 - RNA, 66 nt, synthetic construct
  misc_feature 1..66: note = P55075_1-22
  source 1..66: mol_type = other RNA
atgggcagccccagaagcgccctgagctgcctgctgctgcacctgctggtgctgtgcctgcaggcc

SEQ ID NO: 1101 - RNA, 66 nt, synthetic construct
  misc_feature 1..66: note = Q30201_1-22
  source 1..66: mol_type = other RNA
atgggccccagagccagacccgccctgctgctgctgatgctgctgcagaccgccgtgctgcagggc

SEQ ID NO: 1102 - RNA, 66 nt, synthetic construct
  misc_feature 1..66: note = P07766_1-22
  source 1..66: mol_type = other RNA
atgcagagcggcacccactggagagtgctgggcctgtgcctgctgagcgtgggcgtgtggggccag

SEQ ID NO: 1103 - RNA, 66 nt, synthetic construct
  misc_feature 1..66: note = P18827_1-22
  source 1..66: mol_type = other RNA
atgagaagagccgccctgtggctgtggctgtgcgccctggccctgagcctgcagcccgccctgccc

SEQ ID NO: 1104 - RNA, 66 nt, synthetic construct
  misc_feature 1..66: note = P55290_1-22
  source 1..66: mol_type = other RNA
atgcagcccagaacccccctggtgctgtgcgtgctgctgagccaggtgctgctgctgaccagcgcc

SEQ ID NO: 1105 - RNA, 66 nt, synthetic construct
  misc_feature 1..66: note = P37173_1-22
  source 1..66: mol_type = other RNA
atgggcagaggcctgctgagaggcctgtggcccctgcacatcgtgctgtggaccagaatcgccagc

SEQ ID NO: 1106 - RNA, 66 nt, synthetic construct
  misc_feature 1..66: note = Q07325_1-22
  source 1..66: mol_type = other RNA
atgaagaagagcggcgtgctgttcctgctgggcatcatcctgctggtgctgatcggcgtgcagggc

SEQ ID NO: 1107 - RNA, 66 nt, synthetic construct
  misc_feature 1..66: note = P04156_1-22
  source 1..66: mol_type = other RNA
atggccaacctgggctgctggatgctggtgctgttcgtggccacctggagcgacctgggcctgtgc

SEQ ID NO: 1108 - RNA, 66 nt, synthetic construct
  misc_feature 1..66: note = P31785_1-22
  source 1..66: mol_type = other RNA
atgctgaagcccagcctgcccttcaccagcctgctgttcctgcagctgcccctgctgggcgtgggc

SEQ ID NO: 1109 - RNA, 69 nt, synthetic construct
  misc_feature 1..69: note = P01579_1-23
  source 1..69: mol_type = other RNA
atgaagtacaccagctacatcctggccttccagctgtgcatcgtgctgggcagcctgggctgctactgc

SEQ ID NO: 1110 - RNA, 69 nt, synthetic construct
  misc_feature 1..69: note = P23229_1-23
  source 1..69: mol_type = other RNA
atggccgccgccggccagctgtgcctgctgtacctgagcgccggcctgctgagcagactgggcgccgcc

SEQ ID NO: 1111 - RNA, 69 nt, synthetic construct
  misc_feature 1..69: note = O60494_1-23
  source 1..69: mol_type = other RNA
atgatgaacatgagcctgcccttcctgtggagcctgctgaccctgctgatcttcgccgaggtgaacggc

SEQ ID NO: 1112 - RNA, 69 nt, synthetic construct
  misc_feature 1..69: note = P08575_1-23
  source 1..69: mol_type = other RNA
atgtacctgtggctgaagctgctggccttcggcttcgccttcctggacaccgaggtgttcgtgaccggc

SEQ ID NO: 1113 - RNA, 69 nt, synthetic construct
  misc_feature 1..69: note = Q8IWY4_1-23
  source 1..69: mol_type = other RNA
atgggcgccgccgccgtgagatggcacctgtgcgtgctgctggccctgggcaccagaggcagactggcc

SEQ ID NO: 1114 - RNA, 69 nt, synthetic construct
  misc_feature 1..69: note = Q08431_1-23
  source 1..69: mol_type = other RNA
atgcccagacccagactgctggccgccctgtgcggcgccctgctgtgcgcccccagcctgctggtggcc

SEQ ID NO: 1115 - RNA, 69 nt, synthetic construct
  misc_feature 1..69: note = Q99665_1-23
  source 1..69: mol_type = other RNA
atggcccacaccttcagaggctgcagcctggccttcatgttcatcatcacctggctgctgatcaaggcc

SEQ ID NO: 1116 - RNA, 69 nt, synthetic construct
  misc_feature 1..69: note = Q6Q8B3_1-23
  source 1..69: mol_type = other RNA
atgagcgcccccagactgctgatcagcatcatcatcatggtgagcgccagcagcagcagctgcatgggc

SEQ ID NO: 1117 - RNA, 69 nt, synthetic construct
  misc_feature 1..69: note = Q07011_1-23
  source 1..69: mol_type = other RNA
atgggcaacagctgctacaacatcgtggccaccctgctgctggtgctgaacttcgagagaaccagaagc

SEQ ID NO: 1118 - RNA, 69 nt, synthetic construct
  misc_feature 1..69: note = Q8NHL6_1-23
  source 1..69: mol_type = other RNA
atgacccccatcctgaccgtgctgatctgcctgggcctgagcctgggccccagaacccacgtgcaggcc

SEQ ID NO: 1119 - RNA, 69 nt, synthetic construct
  misc_feature 1..69: note = P36894_1-23
  source 1..69: mol_type = other RNA
atgccccagctgtacatctacatcagactgctgggcgcctacctgttcatcatcagcagagtgcagggc

SEQ ID NO: 1120 - RNA, 69 nt, synthetic construct
  misc_feature 1..69: note = Q16552_1-23
  source 1..69: mol_type = other RNA
atgacccccggcaagaccagcctggtgagcctgctgctgctgctgagcctggaggccatcgtgaaggcc

SEQ ID NO: 1121 - RNA, 69 nt, synthetic construct
  misc_feature 1..69: note = P42081_1-23
  source 1..69: mol_type = other RNA
atggacccccagtgcaccatgggcctgagcaacatcctgttcgtgatggccttcctgctgagcggcgcc

SEQ ID NO: 1122 - RNA, 69 nt, synthetic construct
  misc_feature 1..69: note = P43121_1-23
  source 1..69: mol_type = other RNA
atgggcctgcccagactggtgtgcgccttcctgctggccgcctgctgctgctgccccagagtggccggc

SEQ ID NO: 1123 - RNA, 69 nt, synthetic construct
  misc_feature 1..69: note = O00206_1-23
  source 1..69: mol_type = other RNA
atgatgagcgccagcagactggccggcaccctgatccccgccatggccttcctgagctgcgtgagaccc

SEQ ID NO: 1124 - RNA, 69 nt, synthetic construct
  misc_feature 1..69: note = P42701_1-23
  source 1..69: mol_type = other RNA
atggagcccctggtgacctgggtggtgcccctgctgttcctgttcctgctgagcagacagggcgccgcc

SEQ ID NO: 1125 - RNA, 72 nt, synthetic construct
  misc_feature 1..72: note = P06729_1-24
  source 1..72: mol_type = other RNA
atgagcttcccctgcaagttcgtggccagcttcctgctgatcttcaacgtgagcagcaagggcgccgtgagc

SEQ ID NO: 1126 - RNA, 72 nt, synthetic construct
  misc_feature 1..72: note = P15328_1-24
  source 1..72: mol_type = other RNA
atggcccagagaatgaccacccagctgctgctgctgctggtgtgggtggccgtggtgggcgaggcccagacc

SEQ ID NO: 1127 - RNA, 72 nt, synthetic construct
  misc_feature 1..72: note = P05112_1-24
  source 1..72: mol_type = other RNA
atgggcctgaccagccagctgctgccccccctgttcttcctgctggcctgcgccggcaacttcgtgcacggc

SEQ ID NO: 1128 - RNA, 72 nt, synthetic construct
  misc_feature 1..72: note = P06127_1-24
  source 1..72: mol_type = other RNA
atgcccatgggcagcctgcagcccctggccaccctgtacctgctgggcatgctggtggccagctgcctgggc

SEQ ID NO: 1129 - RNA, 72 nt, synthetic construct
  misc_feature 1..72: note = P32248_1-24
  source 1..72: mol_type = other RNA
atggacctgggcaagcccatgaagagcgtgctggtggtggccctgctggtgatcttccaggtgtgcctgtgc

SEQ ID NO: 1130 - RNA, 72 nt, synthetic construct
  misc_feature 1..72: note = Q7Z7D3_1-24
  source 1..72: mol_type = other RNA
atggccagcctgggccagatcctgttctggagcatcatcagcatcatcatcatcctggccggcgccatcgcc

SEQ ID NO: 1131 - RNA, 72 nt, synthetic construct
  misc_feature 1..72: note = P54756_1-24
  source 1..72: mol_type = other RNA
atgagaggcagcggccccagaggcgccggcagaagaagaccccccagcggcggcggcgacacccccatcacc

SEQ ID NO: 1132 - RNA, 72 nt, synthetic construct
  misc_feature 1..72: note = Q92823_1-24
  source 1..72: mol_type = other RNA
atgcagctgaagatcatgcccaagaagaagagactgagcgccggcagagtgcccctgatcctgttcctgtgc

SEQ ID NO: 1133 - RNA, 72 nt, synthetic construct
  misc_feature 1..72: note = P19320_1-24
  source 1..72: mol_type = other RNA
atgcccggcaagatggtggtgatcctgggcgccagcaacatcctgtggatcatgttcgccgccagccaggcc

SEQ ID NO: 1134 - RNA, 72 nt, synthetic construct
  misc_feature 1..72: note = Q86UN2_1-24
  source 1..72: mol_type = other RNA
atgctgagaaagggctgctgcgtggagctgctgctgctgctggtggccgccgagctgcccctgggcggcggc

SEQ ID NO: 1135 - RNA, 75 nt, synthetic construct
  misc_feature 1..75: note = P33151_1-25
  source 1..75: mol_type = other RNA
atgcagagactgatgatgctgctggccaccagcggcgcctgcctgggcctgctggccgtggccgccgtggccgcc

SEQ ID NO: 1136 - RNA, 75 nt, synthetic construct
  misc_feature 1..75: note = P17813_1-25
  source 1..75: mol_type = other RNA
atggacagaggcaccctgcccctggccgtggccctgctgctggccagctgcagcctgagccccaccagcctggcc

SEQ ID NO: 1137 - RNA, 75 nt, synthetic construct
  misc_feature 1..75: note = P25445_1-25
  source 1..75: mol_type = other RNA
atgctgggcatctggaccctgctgcccctggtgctgaccagcgtggccagactgagcagcaagagcgtgaacgcc

SEQ ID NO: 1138 - RNA, 75 nt, synthetic construct
  misc_feature 1..75: note = P01730_1-25
  source 1..75: mol_type = other RNA
atgaacagaggcgtgcccttcagacacctgctgctggtgctgcagctggccctgctgcccgccgccacccagggc

SEQ ID NO: 1139 - RNA, 75 nt, synthetic construct
  misc_feature 1..75: note = Q685J3_1-25
  source 1..75: mol_type = other RNA
atgcccagacccggcaccatggccctgtgcctgctgaccctggtgctgagcctgctgcccccccaggccgccgcc

SEQ ID NO: 1140 - RNA, 75 nt, synthetic construct
  misc_feature 1..75: note = P17787_1-25
  source 1..75: mol_type = other RNA
atggccagaagatgcggccccgtggccctgctgctgggcttcggcctgctgagactgtgcagcggcgtgtggggc

SEQ ID NO: 1141 - RNA, 75 nt, synthetic construct
  misc_feature 1..75: note = Q6UQ28_1-25
  source 1..75: mol_type = other RNA
atggccgtgttccacgacatgctgctgcagcccctgggcatgttcctgtgcctgagcctgcagctgagcagcgcc

SEQ ID NO: 1142 - RNA, 75 nt, synthetic construct
  misc_feature 1..75: note = P13987_1-25
  source 1..75: mol_type = other RNA
atgggcatccagggcggcagcgtgctgttcggcctgctgctggtgctggccgtgttctgccacagcggccacagc

SEQ ID NO: 1143 - RNA, 75 nt, synthetic construct
  misc_feature 1..75: note = P10721_1-25
  source 1..75: mol_type = other RNA
atgagaggcgccagaggcgcctgggacttcctgtgcgtgctgctgctgctgctgagagtgcagaccggcagcagc

SEQ ID NO: 1144 - RNA, 75 nt, synthetic construct
  misc_feature 1..75: note = P12319_1-25
  source 1..75: mol_type = other RNA
atggcccccgccatggagagccccaccctgctgtgcgtggccctgctgttcttcgcccccgacggcgtgctggcc

SEQ ID NO: 1145 - RNA, 78 nt, synthetic construct
  misc_feature 1..78: note = Q9BZR6_1-26
  source 1..78: mol_type = other RNA
atgaagagagccagcgccggcggcagcagactgctggcctgggtgctgtggctgcaggcctggcaggtggccgccccc

SEQ ID NO: 1146 - RNA, 78 nt, synthetic construct
  misc_feature 1..78: note = P25063_1-26
  source 1..78: mol_type = other RNA
atgggcagagccatggtggccagactgggcctgggcctgctgctgctggccctgctgctgcccacccagatctacagc

SEQ ID NO: 1147 - RNA, 78 nt, synthetic construct
  misc_feature 1..78: note = Q9NR97_1-26
  source 1..78: mol_type = other RNA
atggagaacatgttcctgcagagcagcatgctgacctgcatcttcctgctgatcagcggcagctgcgagctgtgcgcc

SEQ ID NO: 1148 - RNA, 78 nt, synthetic construct
  misc_feature 1..78: note = Q8N131_1-26
  source 1..78: mol_type = other RNA
atgggcctgggcgccagaggcgcctgggccgccctgctgctgggcaccctgcaggtgctggccctgctgggcgccgcc

SEQ ID NO: 1149 - RNA, 78 nt, synthetic construct
  misc_feature 1..78: note = P49771_1-26
  source 1..78: mol_type = other RNA
atgaccgtgctggcccccgcctggagccccaccacctacctgctgctgctgctgctgctgagcagcggcctgagcggc

SEQ ID NO: 1150 - RNA, 78 nt, synthetic construct
  misc_feature 1..78: note = P02679_1-26
  source 1..78: mol_type = other RNA
atgagctggagcctgcaccccagaaacctgatcctgtacttctacgccctgctgttcctgagcagcacctgcgtggcc

SEQ ID NO: 1151 - RNA, 78 nt, synthetic construct
  misc_feature 1..78: note = P14784_1-26
  source 1..78: mol_type = other RNA
atggccgcccccgccctgagctggagactgcccctgctgatcctgctgctgcccctggccaccagctgggccagcgcc

SEQ ID NO: 1152 - RNA, 81 nt, synthetic construct
  misc_feature 1..81: note = P05362_1-27
  source 1..81: mol_type = other RNA
atggcccccagcagccccagacccgccctgcccgccctgctggtgctgctgggcgccctgttccccggccccggcaacgcc

SEQ ID NO: 1153 - RNA, 81 nt, synthetic construct
  misc_feature 1..81: note = Q13740_1-27
  source 1..81: mol_type = other RNA
atggagagcaagggcgccagcagctgcagactgctgttctgcctgctgatcagcgccaccgtgttcagacccggcctgggc

SEQ ID NO: 1154 - RNA, 84 nt, synthetic construct
  misc_feature 1..84: note = Q13443_1-28
  source 1..84: mol_type = other RNA
atgggcagcggcgccagattccccagcggcaccctgagagtgagatggctgctgctgctgggcctggtgggccccgtgctgggc

SEQ ID NO: 1155 - RNA, 84 nt, synthetic construct
  misc_feature 1..84: note = P14151_1-28
  source 1..84: mol_type = other RNA
atgatcttcccctggaagtgccagagcacccagagagacctgtggaacatcttcaagctgtggggctggaccatgctgtgctgc

SEQ ID NO: 1156 - RNA, 84 nt, synthetic construct
  misc_feature 1..84: note = P56199_1-28
  source 1..84: mol_type = other RNA
atggcccccagacccagagccagacccggcgtggccgtggcctgctgctggctgctgaccgtggtgctgagatgctgcgtgagc

SEQ ID NO: 1157 - RNA, 84 nt, synthetic construct
  misc_feature 1..84: note = P11279_1-28
  source 1..84: mol_type = other RNA
atggccgcccccggcagcgccagaagacccctgctgctgctgctgctgctgctgctgctgggcctgatgcactgcgccagcgcc

SEQ ID NO: 1158 - RNA, 84 nt, synthetic construct
  misc_feature 1..84: note = P40259_1-28
  source 1..84: mol_type = other RNA
atggccagactggccctgagccccgtgcccagccactggatggtggccctgctgctgctgctgagcgccgagcccgtgcccgcc

SEQ ID NO: 1159 - RNA, 84 nt, synthetic construct
  misc_feature 1..84: note = P43681_1-28
  source 1..84: mol_type = other RNA
atggagctgggcggccccggcgcccccagactgctgccccccctgctgctgctgctgggcaccggcctgctgagagccagcagc

SEQ ID NO: 1160 - RNA, 84 nt, synthetic construct
  misc_feature 1..84: note = P18627_1-28
  source 1..84: mol_type = other RNA
atgtgggaggcccagttcctgggcctgctgttcctgcagcccctgtgggtggcccccgtgaagcccctgcagcccggcgccgag

SEQ ID NO: 1161 - RNA, 84 nt, synthetic construct
  misc_feature 1..84: note = Q5ZPR3_1-28
  source 1..84: mol_type = other RNA
atgctgagaagaagaggcagccccggcatgggcgtgcacgtgggcgccgccctgggcgccctgtggttctgcctgaccggcgcc

SEQ ID NO: 1162 - RNA, 84 nt, synthetic construct
  misc_feature 1..84: note = P23415_1-28
  source 1..84: mol_type = other RNA
atgtacagcttcaacaccctgagactgtacctgtgggagaccatcgtgttcttcagcctggccgccagcaaggaggccgaggcc

SEQ ID NO: 1163 - RNA, 84 nt, synthetic construct
  misc_feature 1..84: note = Q8TD46_1-28
  source 1..84: mol_type = other RNA
atgctgtgcccctggagaaccgccaacctgggcctgctgctgatcctgaccatcttcctggtggccgccagcagcagcctgtgc

SEQ ID NO: 1164 - RNA, 87 nt, synthetic construct
  misc_feature 1..87: note = P17301_1-29
  source 1..87: mol_type = other RNA
atgggccccgagagaaccggcgccgcccccctgcccctgctgctggtgctggccctgagccagggcatcctgaactgctgcctggcc

SEQ ID NO: 1165 - RNA, 87 nt, synthetic construct
  misc_feature 1..87: note = P12821_1-29
  source 1..87: mol_type = other RNA
atgggcgccgccagcggcagaagaggccccggcctgctgctgcccctgcccctgctgctgctgctgcccccccagcccgccctggcc

SEQ ID NO: 1166 - RNA, 87 nt, synthetic construct
  misc_feature 1..87: note = Q14118_1-29
  source 1..87: mol_type = other RNA
atgagaatgagcgtgggcctgagcctgctgctgcccctgtggggcagaaccttcctgctgctgctgagcgtggtgatggcccagagc

SEQ ID NO: 1167 - RNA, 87 nt, synthetic construct
  misc_feature 1..87: note = P05231_1-29
  source 1..87: mol_type = other RNA
atgaacagcttcagcaccagcgccttcggccccgtggccttcagcctgggcctgctgctggtgctgcccgccgccttccccgccccc

SEQ ID NO: 1168 - RNA, 87 nt, synthetic construct
  misc_feature 1..87: note = O00602_1-29
  source 1..87: mol_type = other RNA
atggagctgagcggcgccaccatggccagaggcctggccgtgctgctggtgctgttcctgcacatcaagaacctgcccgcccaggcc

SEQ ID NO: 1169 - RNA, 87 nt, synthetic construct
  misc_feature 1..87: note = Q9Y6Q6_1-29
  source 1..87: mol_type = other RNA
atggcccccagagccagaagaagaagacccctgttcgccctgctgctgctgtgcgccctgctggccagactgcaggtggccctgcag

SEQ ID NO: 1170 - RNA, 87 nt, synthetic construct
  misc_feature 1..87: note = Q9ULI3_1-29
  source 1..87: mol_type = other RNA
atggccagccccagagccagcagatggcccccccccctgctgctgctgctgctgcccctgctgctgctgccccccgccgcccccggc

SEQ ID NO: 1171 - RNA, 90 nt, synthetic construct
  misc_feature 1..90: note = Q8NBP7_1-30
  source 1..90: mol_type = other RNA
atgggcaccgtgagcagcagaagaagctggtggcccctgcccctgctgctgctgctgctgctgctgctgggccccgccggcgccagagcc

SEQ ID NO: 1172 - RNA, 90 nt, synthetic construct
  misc_feature 1..90: note = P02675_1-30
  source 1..90: mol_type = other RNA
atgaagagaatggtgagctggagcttccacaagctgaagaccatgaagcacctgctgctgctgctgctgtgcgtgttcctggtgaagagc

SEQ ID NO: 1173 - RNA, 90 nt, synthetic construct
  misc_feature 1..90: note = P06756_1-30
  source 1..90: mol_type = other RNA
atggccttcccccccagaagaagactgagactgggccccagaggcctgcccctgctgctgagcggcctgctgctgcccctgtgcagagcc

SEQ ID NO: 1174 - RNA, 93 nt, synthetic construct
  misc_feature 1..93: note = O60609_1-31
  source 1..93: mol_type = other RNA
atggtgagacccctgaaccccagacccctgccccccgtggtgctgatgctgctgctgctgctgccccccagccccctgcccctggccgccggc

SEQ ID NO: 1175 - RNA, 93 nt, synthetic construct
  misc_feature 1..93: note = P50895_1-31
  source 1..93: mol_type = other RNA
atggagccccccgacgcccccgcccaggccagaggcgcccccagactgctgctgctggccgtgctgctggccgcccaccccgacgcccaggcc

SEQ ID NO: 1176 - RNA, 93 nt, synthetic construct
  misc_feature 1..93: note = P28906_1-31
  source 1..93: mol_type = other RNA
atgctggtgagaagaggcgccagagccggccccagaatgcccagaggctggaccgccctgtgcctgctgagcctgctgcccagcggcttcatg

SEQ ID NO: 1177 - RNA, 93 nt, synthetic construct
  misc_feature 1..93: note = P08514_1-31
  source 1..93: mol_type = other RNA
atggccagagccctgtgccccctgcaggccctgtggctgctggagtgggtgctgctgctgctgggcccctgcgccgccccccccgcctgggcc

SEQ ID NO: 1178 - RNA, 93 nt, synthetic construct
  misc_feature 1..93: note = P00742_1-31
  source 1..93: mol_type = other RNA
atgggcagacccctgcacctggtgctgctgagcgccagcctggccggcctgctgctgctgggcgagagcctgttcatcagaagagagcaggcc

SEQ ID NO: 1179 - RNA, 96 nt, synthetic construct
  misc_feature 1..96: note = P26006_1-32
  source 1..96: mol_type = other RNA
atgggccccggccccagcagagcccccagagcccccagactgatgctgtgcgccctggccctgatggtggccgccggcggctgcgtggtgagcgcc

SEQ ID NO: 1180 - RNA, 96 nt, synthetic construct
  misc_feature 1..96: note = P13726_1-32
  source 1..96: mol_type = other RNA
atggagacccccgcctggcccagagtgcccagacccgagaccgccgtggccagaaccctgctgctgggctgggtgttcgcccaggtggccggcgcc

SEQ ID NO: 1181 - RNA, 96 nt, synthetic construct
  misc_feature 1..96: note = P11912_1-32
  source 1..96: mol_type = other RNA
atgcccggcggccccggcgtgctgcaggccctgcccgccaccatcttcctgctgttcctgctgagcgccgtgtacctgggccccggctgccaggcc

SEQ ID NO: 1182 - RNA, 96 nt, synthetic construct
  misc_feature 1..96: note = Q9H6X2_1-32
  source 1..96: mol_type = other RNA
atggccaccgccgagagaagagccctgggcatcggcttccagtggctgagcctggccaccctggtgctgatctgcgccggccagggcggcagaaga

SEQ ID NO: 1183 - RNA, 99 nt, synthetic construct
  misc_feature 1..99: note = Q8IWK6_1-33
  source 1..99: mol_type = other RNA
atggagccccccggcagaagaagaggcagagcccagccccccctgctgctgcccctgagcctgctggccctgctggccctgctgggcggcggcggcggc

SEQ ID NO: 1184 - RNA, 99 nt, synthetic construct
  misc_feature 1..99: note = P58335_1-33
  source 1..99: mol_type = other RNA
atggtggccgagagaagccccgccagaagccccggcagctggctgttccccggcctgtggctgctggtgctgagcggccccggcggcctgctgagagcc

SEQ ID NO: 1185 - RNA, 102 nt, synthetic construct
  misc_feature 1..102: note = P06731_1-34
  source 1..102: mol_type = other RNA
atggagagccccagcgcccccccccacagatggtgcatcccctggcagagactgctgctgaccgccagcctgctgaccttctggaacccccccaccaccgcc

SEQ ID NO: 1186 - RNA, 102 nt, synthetic construct
  misc_feature 1..102: note = P33681_1-34
  source 1..102: mol_type = other RNA
atgggccacaccagaagacagggcaccagccccagcaagtgcccctacctgaacttcttccagctgctggtgctggccggcctgagccacttctgcagcggc

SEQ ID NO: 1187 - RNA, 105 nt, synthetic construct
  misc_feature 1..105: note = P38567_1-35
  source 1..105: mol_type = other RNA
atgggcgtgctgaagttcaagcacatcttcttcagaagcttcgtgaagagcagcggcgtgagccagatcgtgttcaccttcctgctgatcccctgctgcctgacc

SEQ ID NO: 1188 - RNA, 105 nt, synthetic construct
  misc_feature 1..105: note = P16410_1-35
  source 1..105: mol_type = other RNA
atggcctgcctgggcttccagagacacaaggcccagctgaacctggccaccagaacctggccctgcaccctgctgttcttcctgctgttcatccccgtgttctgc

SEQ ID NO: 1189 - RNA, 111 nt, synthetic construct
  misc_feature 1..111: note = P15814_1-37
  source 1..111: mol_type = other RNA
atgagacccggcaccggccagggcggcctggaggcccccggcgagcccggccccaacctgagacagagatggcccctgctgctgctgggcctggccgtggtgacccacggc

SEQ ID NO: 1190 - RNA, 114 nt, synthetic construct
  misc_feature 1..114: note = Q92956_1-38
  source 1..114: mol_type = other RNA
atggagccccccggcgactggggcccccccccctggagaagcacccccaagaccgacgtgctgagactggtgctgtacctgaccttcctgggcgccccctgctacgcccccgcc

SEQ ID NO: 1191 - RNA, 123 nt, synthetic construct
  misc_feature 1..123: note = Q86VB7_1-41
  source 1..123: mol_type = other RNA
atgagcaagctgagaatggtgctgctggaggacagcggcagcgccgacttcagaagacacttcgtgaacctgagccccttcaccatcaccgtggtgctgctgctgagcgcctgcttcgtgacc

SEQ ID NO: 1192 - RNA, 123 nt, synthetic construct
  misc_feature 1..123: note = P08648_1-41
  source 1..123: mol_type = other RNA
atgggcagcagaacccccgagagccccctgcacgccgtgcagctgagatggggccccagaagaagaccccccctgctgcccctgctgctgctgctgctgccccccccccccagagtgggcggc

SEQ ID NO: 1193 - RNA, 123 nt, synthetic construct
  misc_feature 1..123: note = P16109_1-41
  source 1..123: mol_type = other RNA
atggccaactgccagatcgccatcctgtaccagagattccagagagtggtgttcggcatcagccagctgctgtgcttcagcgccctgatcagcgagctgaccaaccagaaggaggtggccgcc

SEQ ID NO: 1194 - RNA, 132 nt, synthetic construct
  misc_feature 1..132: note = O75326_1-44
  source 1..132: mol_type = other RNA
atgaccccccccccccccggcagagccgcccccagcgcccccagagccagagtgcccggcccccccgccagactgggcctgcccctgagactgagactgctgctgctgctgtgggccgccgccgccagcgcc

SEQ ID NO: 1195 - RNA, 135 nt, synthetic construct
  misc_feature 1..135: note = Q8N2Q7_1-45
  source 1..135: mol_type = other RNA
atggccctgcccagatgcacctggcccaactacgtgtggagagccgtgatggcctgcctggtgcacagaggcctgggcgcccccctgaccctgtgcatgctgggctgcctgctgcaggccggccacgtgctgagc

SEQ ID NO: 1196 - RNA, 138 nt, synthetic construct
  misc_feature 1..138: note = Q86UN3_1-46
  source 1..138: mol_type = other RNA
atgctgcccggcctgagaagactgctgcaggcccccgccagcgcctgcctgctgctgatgctgctggccctgcccctggccgcccccagctgccccatgctgtgcacctgctacagcagcccccccaccgtgagctgc

SEQ ID NO: 1197 - RNA, 540 nt, synthetic construct
  misc_feature 1..540: note = A0A5B9
  source 1..540: mol_type = other RNA
atggacctgaagaacgtgttcccccccgaggtggccgtgttcgagcccagcgaggccgagatcagccacacccagaaggccaccctggtgtgcctggccaccggcttctaccccgaccacgtggagctgagctggtgggtgaacggcaaggaggtgcacagcggcgtgagcaccgacccccagcccctgaaggagcagcccgccctgaacgacagcagatactgcctgagcagcagactgagagtgagcgccaccttctggcagaaccccagaaaccacttcagatgccaggtgcagttctacggcctgagcgagaacgacgagtggacccaggacagagccaagcccgtgacccagatcgtgagcgccgaggcctggggcagagccgactgcggcttcaccagcgagagctaccagcagggcgtgctgagcgccaccatcctgtacgagatcctgctgggcaaggccaccctgtacgccgtgctggtgagcgccctggtgctgatggccatggtgaagagaaaggacagcagaggctga

SEQ ID NO: 1198 - RNA, 465 nt, synthetic construct
  misc_feature 1..465: note = B7Z8K6
  source 1..465: mol_type = other RNA
atgagccagccccacaccaagcccagcgtgttcgtgatgaagaacggcaccaacgtggcctgcctggtgaaggagttctaccccaaggacatcagaatcaacctggtgagcagcaagaagatcaccgagttcgaccccgccatcgtgatcagccccagcggcaagtacaacgccgtgaagctgggcaagtacgaggacagcaacagcgtgacctgcagcgtgcagcacgacaacaagaccgtgcacagcaccgacttcgaggtgaagaccgacagcaccgaccacgtgaagcccaaggagaccgagaacaccaagcagcccagcaagagctgccacaagcccaaggccatcgtgcacaccgagaaggtgaacatgatgagcctgaccgtgctgggcctgagaatgctgttcgccaagaccgtggccgtgaacttcctgctgaccgccaagctgttcttcctgtga

SEQ ID NO: 1199 - RNA, 645 nt, synthetic construct
  misc_feature 1..645: note = B9A064
  source 1..645: mol_type = other RNA
atgagacccaagaccggccaggtgggctgcgagacccccgaggagctgggccccggccccagacagagatggcccctgctgctgctgggcctggccatggtggcccacggcctgctgagacccatggtggccccccagagcggcgaccccgaccccggcgccagcgtgggcagcagcagaagcagcctgagaagcctgtggggcagactgctgctgcagcccagcccccagagagccgaccccagatgctggcccagaggcttctggagcgagccccagagcctgtgctacgtgttcggcaccggcaccaaggtgaccgtgctgggccagcccaaggccaaccccaccgtgaccctgttcccccccagcagcgaggagctgcaggccaacaaggccaccctggtgtgcctgatcagcgacttctaccccggcgccgtgaccgtggcctggaaggccgacggcagccccgtgaaggccggcgtggagaccaccaagcccagcaagcagagcaacaacaagtacgccgccagcagctacctgagcctgacccccgagcagtggaagagccacagaagctacagctgccaggtgacccacgagggcagcaccgtggagaagaccgtggcccccaccgagtgcagctga

SEQ ID NO: 1200 - RNA, 2520 nt, synthetic construct
  misc_feature 1..2520: note = O00206
  source 1..2520: mol_type = other RNA
atgatgagcgccagcagactggccggcaccctgatccccgccatggccttcctgagctgcgtgagacccgagagctgggagccctgcgtggaggtggtgcccaacatcacctaccagtgcatggagctgaacttctacaagatccccgacaacctgcccttcagcaccaagaacctggacctgagcttcaaccccctgagacacctgggcagctacagcttcttcagcttccccgagctgcaggtgctggacctgagcagatgcgagatccagaccatcgaggacggcgcctaccagagcctgagccacctgagcaccctgatcctgaccggcaaccccatccagagcctggccctgggcgccttcagcggcctgagcagcctgcagaagctggtggccgtggagaccaacctggccagcctggagaacttccccatcggccacctgaagaccctgaaggagctgaacgtggcccacaacctgatccagagcttcaagctgcccgagtacttcagcaacctgaccaacctggagcacctggacctgagcagcaacaagatccagagcatctactgcaccgacctgagagtgctgcaccagatgcccctgctgaacctgagcctggacctgagcctgaaccccatgaacttcatccagcccggcgccttcaaggagatcagactgcacaagctgaccctgagaaacaacttcgacagcctgaacgtgatgaagacctgcatccagggcctggccggcctggaggtgcacagactggtgctgggcgagttcagaaacgagggcaacctggagaagttcgacaagagcgccctggagggcctgtgcaacctgaccatcgaggagttcagactggcctacctggactactacctggacgacatcatcgacctgttcaactgcctgaccaacgtgagcagcttcagcctggtgagcgtgaccatcgagagagtgaaggacttcagctacaacttcggctggcagcacctggagctggtgaactgcaagttcggccagttccccaccctgaagctgaagagcctgaagagactgaccttcaccagcaacaagggcggcaacgccttcagcgaggtggacctgcccagcctggagttcctggacctgagcagaaacggcctgagcttcaagggctgctgcagccagagcgacttcggcaccaccagcctgaagtacctggacctgagcttcaacggcgtgatcaccatgagcagcaacttcctgggcctggagcagctggagcacctggacttccagcacagcaacctgaagcagatgagcgagttcagcgtgttcctgagcctgagaaacctgatctacctggacatcagccacacccacaccagagtggccttcaacggcatcttcaacggcctgagcagcctggaggtgctgaagatggccggcaacagcttccaggagaacttcctgcccgacatcttcaccgagctgagaaacctgaccttcctggacctgagccagtgccagctggagcagctgagccccaccgccttcaacagcctgagcagcctgcaggtgctgaacatgagccacaacaacttcttcagcctggacaccttcccctacaagtgcctgaacagcctgcaggtgctggactacagcctgaaccacatcatgaccagcaagaagcaggagctgcagcacttccccagcagcctggccttcctgaacctgacccagaacgacttcgcctgcacctgcgagcaccagagcttcctgcagtggatcaaggaccagagacagctgctggtggaggtggagagaatggagtgcgccacccccagcgacaagcagggcatgcccgtgctgagcctgaacatcacctgccagatgaacaagaccatcatcggcgtgagcgtgctgagcgtgctggtggtgagcgtggtggccgtgctggtgtacaagttctacttccacctgatgctgctggccggctgcatcaagtacggcagaggcgagaacatctacgacgccttcgtgatctacagcagccaggacgaggactgggtgagaaacgagctggtgaagaacctggaggagggcgtgccccccttccagctgtgcctgcactacagagacttcatccccggcgtggccatcgccgccaacatcatccacgagggcttccacaagagcagaaaggtgatcgtggtggtgagccagcacttcatccagagcagatggtgcatcttcgagtacgagatcgcccagacctggcagttcctgagcagcagagccggcatcatcttcatcgtgctgcagaaggtggagaagaccctgctgagacagcaggtggagctgtacagactgctgagcagaaacacctacctggagtgggaggacagcgtgctgggcagacacatcttctggagaagactgagaaaggccctgctggacggcaagagctggaaccccgagggcaccgtgggcaccggctgcaactggcaggaggccaccagcatctga

SEQ ID NO: 1201 - RNA, 1377 nt, synthetic construct
  misc_feature 1..1377: note = P01730
  source 1..1377: mol_type = other RNA
atgaacagaggcgtgcccttcagacacctgctgctggtgctgcagctggccctgctgcccgccgccacccagggcaagaaggtggtgctgggcaagaagggcgacaccgtggagctgacctgcaccgccagccagaagaagagcatccagttccactggaagaacagcaaccagatcaagatcctgggcaaccagggcagcttcctgaccaagggccccagcaagctgaacgacagagccgacagcagaagaagcctgtgggaccagggcaacttccccctgatcatcaagaacctgaagatcgaggacagcgacacctacatctgcgaggtggaggaccagaaggaggaggtgcagctgctggtgttcggcctgaccgccaacagcgacacccacctgctgcagggccagagcctgaccctgaccctggagagcccccccggcagcagccccagcgtgcagtgcagaagccccagaggcaagaacatccagggcggcaagaccctgagcgtgagccagctggagctgcaggacagcggcacctggacctgcaccgtgctgcagaaccagaagaaggtggagttcaagatcgacatcgtggtgctggccttccagaaggccagcagcatcgtgtacaagaaggagggcgagcaggtggagttcagcttccccctggccttcaccgtggagaagctgaccggcagcggcgagctgtggtggcaggccgagagagccagcagcagcaagagctggatcaccttcgacctgaagaacaaggaggtgagcgtgaagagagtgacccaggaccccaagctgcagatgggcaagaagctgcccctgcacctgaccctgccccaggccctgccccagtacgccggcagcggcaacctgaccctggccctggaggccaagaccggcaagctgcaccaggaggtgaacctggtggtgatgagagccacccagctgcagaagaacctgacctgcgaggtgtggggccccaccagccccaagctgatgctgagcctgaagctggagaacaaggaggccaaggtgagcaagagagagaaggccgtgtgggtgctgaaccccgaggccggcatgtggcagtgcctgctgagcgacagcggccaggtgctgctggagagcaacatcaaggtgctgcccacctggagcacccccgtgcagcccatggccctgatcgtgctgggcggcgtggccggcctgctgctgttcatcggcctgggcatcttcttctgcgtgagatgcagacacagaagaagacaggccgagagaatgagccagatcaagagactgctgagcgagaagaagacctgccagtgcccccacagattccagaagacctgcagccccatctga

SEQ ID NO: 1202 - RNA, 537 nt, synthetic construct
  misc_feature 1..537: note = P01850
  source 1..537: mol_type = other RNA
atggaggacctgaacaaggtgttcccccccgaggtggccgtgttcgagcccagcgaggccgagatcagccacacccagaaggccaccctggtgtgcctggccaccggcttcttccccgaccacgtggagctgagctggtgggtgaacggcaaggaggtgcacagcggcgtgagcaccgacccccagcccctgaaggagcagcccgccctgaacgacagcagatactgcctgagcagcagactgagagtgagcgccaccttctggcagaaccccagaaaccacttcagatgccaggtgcagttctacggcctgagcgagaacgacgagtggacccaggacagagccaagcccgtgacccagatcgtgagcgccgaggcctggggcagagccgactgcggcttcaccagcgtgagctaccagcagggcgtgctgagcgccaccatcctgtacgagatcctgctgggcaaggccaccctgtacgccgtgctggtgagcgccctggtgctgatggccatggtgaagagaaaggacttctga

SEQ ID NO: 1203 - RNA, 624 nt, synthetic construct
  misc_feature 1..624: note = P07766
  source 1..624: mol_type = other RNA
atgcagagcggcacccactggagagtgctgggcctgtgcctgctgagcgtgggcgtgtggggccaggacggcaacgaggagatgggcggcatcacccagaccccctacaaggtgagcatcagcggcaccaccgtgatcctgacctgcccccagtaccccggcagcgagatcctgtggcagcacaacgacaagaacatcggcggcgacgaggacgacaagaacatcggcagcgacgaggaccacctgagcctgaaggagttcagcgagctggagcagagcggctactacgtgtgctaccccagaggcagcaagcccgaggacgccaacttctacctgtacctgagagccagagtgtgcgagaactgcatggagatggacgtgatgagcgtggccaccatcgtgatcgtggacatctgcatcaccggcggcctgctgctgctggtgtactactggagcaagaacagaaaggccaaggccaagcccgtgaccagaggcgccggcgccggcggcagacagagaggccagaacaaggagagacccccccccgtgcccaaccccgactacgagcccatcagaaagggccagagagacctgtacagcggcctgaaccagagaagaatctga

SEQ ID NO: 1204 - RNA, 3915 nt, synthetic construct
  misc_feature 1..3915: note = P08575
  source 1..3915: mol_type = other RNA
atgtacctgtggctgaagctgctggccttcggcttcgccttcctggacaccgaggtgttcgtgaccggccagagccccacccccagccccaccggcctgaccaccgccaagatgcccagcgtgcccctgagcagcgaccccctgcccacccacaccaccgccttcagccccgccagcaccttcgagagagagaacgacttcagcgagaccaccaccagcctgagccccgacaacaccagcacccaggtgagccccgacagcctggacaacgccagcgccttcaacaccaccggcgtgagcagcgtgcagaccccccacctgcccacccacgccgacagccagacccccagcgccggcaccgacacccagaccttcagcggcagcgccgccaacgccaagctgaaccccacccccggcagcaacgccatcagcgacgtgcccggcgagagaagcaccgccagcaccttccccaccgaccccgtgagccccctgaccaccaccctgagcctggcccaccacagcagcgccgccctgcccgccagaaccagcaacaccaccatcaccgccaacaccagcgacgcctacctgaacgccagcgagaccaccaccctgagccccagcggcagcgccgtgatcagcaccaccaccatcgccaccacccccagcaagcccacctgcgacgagaagtacgccaacatcaccgtggactacctgtacaacaaggagaccaagctgttcaccgccaagctgaacgtgaacgagaacgtggagtgcggcaacaacacctgcaccaacaacgaggtgcacaacctgaccgagtgcaagaacgccagcgtgagcatcagccacaacagctgcaccgcccccgacaagaccctgatcctggacgtgccccccggcgtggagaagttccagctgcacgactgcacccaggtggagaaggccgacaccaccatctgcctgaagtggaagaacatcgagaccttcacctgcgacacccagaacatcacctacagattccagtgcggcaacatgatcttcgacaacaaggagatcaagctggagaacctggagcccgagcacgagtacaagtgcgacagcgagatcctgtacaacaaccacaagttcaccaacgccagcaagatcatcaagaccgacttcggcagccccggcgagccccagatcatcttctgcagaagcgaggccgcccaccagggcgtgatcacctggaaccccccccagagaagcttccacaacttcaccctgtgctacatcaaggagaccgagaaggactgcctgaacctggacaagaacctgatcaagtacgacctgcagaacctgaagccctacaccaagtacgtgctgagcctgcacgcctacatcatcgccaaggtgcagagaaacggcagcgccgccatgtgccacttcaccaccaagagcgccccccccagccaggtgtggaacatgaccgtgagcatgaccagcgacaacagcatgcacgtgaagtgcagaccccccagagacagaaacggcccccacgagagataccacctggaggtggaggccggcaacaccctggtgagaaacgagagccacaagaactgcgacttcagagtgaaggacctgcagtacagcaccgactacaccttcaaggcctacttccacaacggcgactaccccggcgagcccttcatcctgcaccacagcaccagctacaacagcaaggccctgatcgccttcctggccttcctgatcatcgtgaccagcatcgccctgctggtggtgctgtacaagatctacgacctgcacaagaagagaagctgcaacctggacgagcagcaggagctggtggagagagacgacgagaagcagctgatgaacgtggagcccatccacgccgacatcctgctggagacctacaagagaaagatcgccgacgagggcagactgttcctggccgagttccagagcatccccagagtgttcagcaagttccccatcaaggaggccagaaagcccttcaaccagaacaagaacagatacgtggacatcctgccctacgactacaacagagtggagctgagcgagatcaacggcgacgccggcagcaactacatcaacgccagctacatcgacggcttcaaggagcccagaaagtacatcgccgcccagggccccagagacgagaccgtggacgacttctggagaatgatctgggagcagaaggccaccgtgatcgtgatggtgaccagatgcgaggagggcaacagaaacaagtgcgccgagtactggcccagcatggaggagggcaccagagccttcggcgacgtggtggtgaagatcaaccagcacaagagatgccccgactacatcatccagaagctgaacatcgtgaacaagaaggagaaggccaccggcagagaggtgacccacatccagttcaccagctggcccgaccacggcgtgcccgaggacccccacctgctgctgaagctgagaagaagagtgaacgccttcagcaacttcttcagcggccccatcgtggtgcactgcagcgccggcgtgggcagaaccggcacctacatcggcatcgacgccatgctggagggcctggaggccgagaacaaggtggacgtgtacggctacgtggtgaagctgagaagacagagatgcctgatggtgcaggtggaggcccagtacatcctgatccaccaggccctggtggagtacaaccagttcggcgagaccgaggtgaacctgagcgagctgcacccctacctgcacaacatgaagaagagagacccccccagcgagcccagccccctggaggccgagttccagagactgcccagctacagaagctggagaacccagcacatcggcaaccaggaggagaacaagagcaagaacagaaacagcaacgtgatcccctacgactacaacagagtgcccctgaagcacgagctggagatgagcaaggagagcgagcacgacagcgacgagagcagcgacgacgacagcgacagcgaggagcccagcaagtacatcaacgccagcttcatcatgagctactggaagcccgaggtgatgatcgccgcccagggccccctgaaggagaccatcggcgacttctggcagatgatcttccagagaaaggtgaaggtgatcgtgatgctgaccgagctgaagcacggcgaccaggagatctgcgcccagtactggggcgagggcaagcagacctacggcgacatcgaggtggacctgaaggacaccgacaagagcagcacctacaccctgagagtgttcgagctgagacacagcaagagaaaggacagcagaaccgtgtaccagtaccagtacaccaactggagcgtggagcagctgcccgccgagcccaaggagctgatcagcatgatccaggtggtgaagcagaagctgccccagaagaacagcagcgagggcaacaagcaccacaagagcacccccctgctgatccactgcagagacggcagccagcagaccggcatcttctgcgccctgctgaacctgctggagagcgccgagaccgaggaggtggtggacatcttccaggtggtgaaggccctgagaaaggccagacccggcatggtgagcaccttcgagcagtaccagttcctgtacgacgtgatcgccagcacctaccccgcccagaacggccaggtgaagaagaacaaccaccaggaggacaagatcgagttcgacaacgaggtggacaaggtgaagcaggacgccaactgcgtgaaccccctgggcgcccccgagaagctgcccgaggccaaggagcaggccgagggcagcgagcccaccagcggcaccgagggccccgagcacagcgtgaacggccccgccagccccgccctgaaccagggcagctga

SEQ ID NO: 1205 - RNA, 765 nt, synthetic construct
  misc_feature 1..765: note = P08637
  source 1..765: mol_type = other RNA
atgtggcagctgctgctgcccaccgccctgctgctgctggtgagcgccggcatgagaaccgaggacctgcccaaggccgtggtgttcctggagccccagtggtacagagtgctggagaaggacagcgtgaccctgaagtgccagggcgcctacagccccgaggacaacagcacccagtggttccacaacgagagcctgatcagcagccaggccagcagctacttcatcgacgccgccaccgtggacgacagcggcgagtacagatgccagaccaacctgagcaccctgagcgaccccgtgcagctggaggtgcacatcggctggctgctgctgcaggcccccagatgggtgttcaaggaggaggaccccatccacctgagatgccacagctggaagaacaccgccctgcacaaggtgacctacctgcagaacggcaagggcagaaagtacttccaccacaacagcgacttctacatccccaaggccaccctgaaggacagcggcagctacttctgcagaggcctgttcggcagcaagaacgtgagcagcgagaccgtgaacatcaccatcacccagggcctggccgtgagcaccatcagcagcttcttcccccccggctaccaggtgagcttctgcctggtgatggtgctgctgttcgccgtggacaccggcctgtacttcagcgtgaagaccaacatcagaagcagcaccagagactggaaggaccacaagttcaagtggagaaaggacccccaggacaagtga

SEQ ID NO: 1206 - RNA, 663 nt, synthetic construct
  misc_feature 1..663: note = P10747
  source 1..663: mol_type = other RNA
atgctgagactgctgctggccctgaacctgttccccagcatccaggtgaccggcaacaagatcctggtgaagcagagccccatgctggtggcctacgacaacgccgtgaacctgagctgcaagtacagctacaacctgttcagcagagagttcagagccagcctgcacaagggcctggacagcgccgtggaggtgtgcgtggtgtacggcaactacagccagcagctgcaggtgtacagcaagaccggcttcaactgcgacggcaagctgggcaacgagagcgtgaccttctacctgcagaacctgtacgtgaaccagaccgacatctacttctgcaagatcgaggtgatgtacccccccccctacctggacaacgagaagagcaacggcaccatcatccacgtgaagggcaagcacctgtgccccagccccctgttccccggccccagcaagcccttctgggtgctggtggtggtgggcggcgtgctggcctgctacagcctgctggtgaccgtggccttcatcatcttctgggtgagaagcaagagaagcagactgctgcacagcgactacatgaacatgacccccagaagacccggccccaccagaaagcactaccagccctacgccccccccagagacttcgccgcctacagaagctga

SEQ ID NO: 1207 - RNA, 681 nt, synthetic construct
  misc_feature 1..681: note = P11912
  source 1..681: mol_type = other RNA
atgcccggcggccccggcgtgctgcaggccctgcccgccaccatcttcctgctgttcctgctgagcgccgtgtacctgggccccggctgccaggccctgtggatgcacaaggtgcccgccagcctgatggtgagcctgggcgaggacgcccacttccagtgcccccacaacagcagcaacaacgccaacgtgacctggtggagagtgctgcacggcaactacacctggccccccgagttcctgggccccggcgaggaccccaacggcaccctgatcatccagaacgtgaacaagagccacggcggcatctacgtgtgcagagtgcaggagggcaacgagagctaccagcagagctgcggcacctacctgagagtgagacagcccccccccagacccttcctggacatgggcgagggcaccaagaacagaatcatcaccgccgagggcatcatcctgctgttctgcgccgtggtgcccggcaccctgctgctgttcagaaagagatggcagaacgagaagctgggcctggacgccggcgacgagtacgaggacgagaacctgtacgagggcctgaacctggacgactgcagcatgtacgaggacatcagcagaggcctgcagggcacctaccaggacgtgggcagcctgaacatcggcgacgtgcagctggagaagccctga

SEQ ID NO: 1208 - RNA, 1671 nt, synthetic construct
  misc_feature 1..1671: note = P15391
  source 1..1671: mol_type = other RNA
atgcccccccccagactgctgttcttcctgctgttcctgacccccatggaggtgagacccgaggagcccctggtggtgaaggtggaggagggcgacaacgccgtgctgcagtgcctgaagggcaccagcgacggccccacccagcagctgacctggagcagagagagccccctgaagcccttcctgaagctgagcctgggcctgcccggcctgggcatccacatgagacccctggccatctggctgttcatcttcaacgtgagccagcagatgggcggcttctacctgtgccagcccggcccccccagcgagaaggcctggcagcccggctggaccgtgaacgtggagggcagcggcgagctgttcagatggaacgtgagcgacctgggcggcctgggctgcggcctgaagaacagaagcagcgagggccccagcagccccagcggcaagctgatgagccccaagctgtacgtgtgggccaaggacagacccgagatctgggagggcgagcccccctgcctgccccccagagacagcctgaaccagagcctgagccaggacctgaccatggcccccggcagcaccctgtggctgagctgcggcgtgccccccgacagcgtgagcagaggccccctgagctggacccacgtgcaccccaagggccccaagagcctgctgagcctggagctgaaggacgacagacccgccagagacatgtgggtgatggagaccggcctgctgctgcccagagccaccgcccaggacgccggcaagtactactgccacagaggcaacctgaccatgagcttccacctggagatcaccgccagacccgtgctgtggcactggctgctgagaaccggcggctggaaggtgagcgccgtgaccctggcctacctgatcttctgcctgtgcagcctggtgggcatcctgcacctgcagagagccctggtgctgagaagaaagagaaagagaatgaccgaccccaccagaagattcttcaaggtgacccccccccccggcagcggcccccagaaccagtacggcaacgtgctgagcctgcccacccccaccagcggcctgggcagagcccagagatgggccgccggcctgggcggcaccgcccccagctacggcaaccccagcagcgacgtgcaggccgacggcgccctgggcagcagaagcccccccggcgtgggccccgaggaggaggagggcgagggctacgaggagcccgacagcgaggaggacagcgagttctacgagaacgacagcaacctgggccaggaccagctgagccaggacggcagcggctacgagaaccccgaggacgagcccctgggccccgaggacgaggacagcttcagcaacgccgagagctacgagaacgaggacgaggagctgacccagcccgtggccagaaccatggacttcctgagcccccacggcagcgcctgggaccccagcagagaggccaccagcctgggcagccagagctacgaggacatgagaggcatcctgtacgccgccccccagctgagaagcatcagaggccagcccggccccaaccacgaggaggacgccgacagctacgagaacatggacaaccccgacggccccgaccccgcctggggcggcggcggcagaatgggcacctggagcaccagatga

SEQ ID NO: 1209 - RNA, 672 nt, synthetic construct
  misc_feature 1..672: note = P16410
  source 1..672: mol_type = other RNA
atggcctgcctgggcttccagagacacaaggcccagctgaacctggccaccagaacctggccctgcaccctgctgttcttcctgctgttcatccccgtgttctgcaaggccatgcacgtggcccagcccgccgtggtgctggccagcagcagaggcatcgccagcttcgtgtgcgagtacgccagccccggcaaggccaccgaggtgagagtgaccgtgctgagacaggccgacagccaggtgaccgaggtgtgcgccgccacctacatgatgggcaacgagctgaccttcctggacgacagcatctgcaccggcaccagcagcggcaaccaggtgaacctgaccatccagggcctgagagccatggacaccggcctgtacatctgcaaggtggagctgatgtacccccccccctactacctgggcatcggcaacggcacccagatctacgtgatcgaccccgagccctgccccgacagcgacttcctgctgtggatcctggccgccgtgagcagcggcctgttcttctacagcttcctgctgaccgccgtgagcctgagcaagatgctgaagaagagaagccccctgaccaccggcgtgtacgtgaagatgccccccaccgagcccgagtgcgagaagcagttccagccctacttcatccccatcaactga

SEQ ID NO: 1210 - RNA, 1419 nt, synthetic construct
  misc_feature 1..1419: note = P16671
  source 1..1419: mol_type = other RNA
atgggctgcgacagaaactgcggcctgatcgccggcgccgtgatcggcgccgtgctggccgtgttcggcggcatcctgatgcccgtgggcgacctgctgatccagaagaccatcaagaagcaggtggtgctggaggagggcaccatcgccttcaagaactgggtgaagaccggcaccgaggtgtacagacagttctggatcttcgacgtgcagaacccccaggaggtgatgatgaacagcagcaacatccaggtgaagcagagaggcccctacacctacagagtgagattcctggccaaggagaacgtgacccaggacgccgaggacaacaccgtgagcttcctgcagcccaacggcgccatcttcgagcccagcctgagcgtgggcaccgaggccgacaacttcaccgtgctgaacctggccgtggccgccgccagccacatctaccagaaccagttcgtgcagatgatcctgaacagcctgatcaacaagagcaagagcagcatgttccaggtgagaaccctgagagagctgctgtggggctacagagaccccttcctgagcctggtgccctaccccgtgaccaccaccgtgggcctgttctacccctacaacaacaccgccgacggcgtgtacaaggtgttcaacggcaaggacaacatcagcaaggtggccatcatcgacacctacaagggcaagagaaacctgagctactgggagagccactgcgacatgatcaacggcaccgacgccgccagcttcccccccttcgtggagaagagccaggtgctgcagttcttcagcagcgacatctgcagaagcatctacgccgtgttcgagagcgacgtgaacctgaagggcatccccgtgtacagattcgtgctgcccagcaaggccttcgccagccccgtggagaaccccgacaactactgcttctgcaccgagaagatcatcagcaagaactgcaccagctacggcgtgctggacatcagcaagtgcaaggagggcagacccgtgtacatcagcctgccccacttcctgtacgccagccccgacgtgagcgagcccatcgacggcctgaaccccaacgaggaggagcacagaacctacctggacatcgagcccatcaccggcttcaccctgcagttcgccaagagactgcaggtgaacctgctggtgaagcccagcgagaagatccaggtgctgaagaacctgaagagaaactacatcgtgcccatcctgtggctgaacgagaccggcaccatcggcgacgagaaggccaacatgttcagaagccaggtgaccggcaagatcaacctgctgggcctgatcgagatgatcctgctgagcgtgggcgtggtgatgttcgtggccttcatgatcagctactgcgcctgcagaagcaagaccatcaagtga

SEQ ID NO: 1211 - RNA, 651 nt, synthetic construct
  misc_feature 1..651: note = P26718
  source 1..651: mol_type = other RNA
atgggctggatcagaggcagaagaagcagacacagctgggagatgagcgagttccacaactacaacctggacctgaagaagagcgacttcagcaccagatggcagaagcagagatgccccgtggtgaagagcaagtgcagagagaacgccagccccttcttcttctgctgcttcatcgccgtggccatgggcatcagattcatcatcatggtggccatctggagcgccgtgttcctgaacagcctgttcaaccaggaggtgcagatccccctgaccgagagctactgcggcccctgccccaagaactggatctgctacaagaacaactgctaccagttcttcgacgagagcaagaactggtacgagagccaggccagctgcatgagccagaacgccagcctgctgaaggtgtacagcaaggaggaccaggacctgctgaagctggtgaagagctaccactggatgggcctggtgcacatccccaccaacggcagctggcagtgggaggacggcagcatcctgagccccaacctgctgaccatcatcgagatgcagaagggcgactgcgccctgtacgccagcagcttcaagggctacatcgagaactgcagcacccccaacacctacatctgcatgcagagaaccgtgtga

SEQ ID NO: 1212 - RNA, 261 nt, synthetic construct
  misc_feature 1..261: note = P30273
  source 1..261: mol_type = other RNA
atgatccccgccgtggtgctgctgctgctgctgctggtggagcaggccgccgccctgggcgagccccagctgtgctacatcctggacgccatcctgttcctgtacggcatcgtgctgaccctgctgtactgcagactgaagatccaggtgagaaaggccgccatcaccagctacgagaagagcgacggcgtgtacaccggcctgagcaccagaaaccaggagacctacgagaccctgaagcacgagaagcccccccagtag

SEQ ID NO: 1213 - RNA, 1137 nt, synthetic construct
  misc_feature 1..1137: note = P32248
  source 1..1137: mol_type = other RNA
atggacctgggcaagcccatgaagagcgtgctggtggtggccctgctggtgatcttccaggtgtgcctgtgccaggacgaggtgaccgacgactacatcggcgacaacaccaccgtggactacaccctgttcgagagcctgtgcagcaagaaggacgtgagaaacttcaaggcctggttcctgcccatcatgtacagcatcatctgcttcgtgggcctgctgggcaacggcctggtggtgctgacctacatctacttcaagagactgaagaccatgaccgacacctacctgctgaacctggccgtggccgacatcctgttcctgctgaccctgcccttctgggcctacagcgccgccaagagctgggtgttcggcgtgcacttctgcaagctgatcttcgccatctacaagatgagcttcttcagcggcatgctgctgctgctgtgcatcagcatcgacagatacgtggccatcgtgcaggccgtgagcgcccacagacacagagccagagtgctgctgatcagcaagctgagctgcgtgggcatctggatcctggccaccgtgctgagcatccccgagctgctgtacagcgacctgcagagaagcagcagcgagcaggccatgagatgcagcctgatcaccgagcacgtggaggccttcatcaccatccaggtggcccagatggtgatcggcttcctggtgcccctgctggccatgagcttctgctacctggtgatcatcagaaccctgctgcaggccagaaacttcgagagaaacaaggccatcaaggtgatcatcgccgtggtggtggtgttcatcgtgttccagctgccctacaacggcgtggtgctggcccagaccgtggccaacttcaacatcaccagcagcacctgcgagctgagcaagcagctgaacatcgcctacgacgtgacctacagcctggcctgcgtgagatgctgcgtgaaccccttcctgtacgccttcatcggcgtgaagttcagaaacgacctgttcaagctgttcaaggacctgggctgcctgagccaggagcagctgagacagtggagcagctgcagacacatcagaagaagcagcatgagcgtggaggccgagaccaccaccaccttcagcccctga

SEQ ID NO: 1214 - RNA, 690 nt, synthetic construct
  misc_feature 1..690: note = P40259
  source 1..690: mol_type = other RNA
atggccagactggccctgagccccgtgcccagccactggatggtggccctgctgctgctgctgagcgccgagcccgtgcccgccgccagaagcgaggacagatacagaaaccccaagggcagcgcctgcagcagaatctggcagagccccagattcatcgccagaaagagaggcttcaccgtgaagatgcactgctacatgaacagcgccagcggcaacgtgagctggctgtggaagcaggagatggacgagaacccccagcagctgaagctggagaagggcagaatggaggagagccagaacgagagcctggccaccctgaccatccagggcatcagattcgaggacaacggcatctacttctgccagcagaagtgcaacaacaccagcgaggtgtaccagggctgcggcaccgagctgagagtgatgggcttcagcaccctggcccagctgaagcagagaaacaccctgaaggacggcatcatcatgatccagaccctgctgatcatcctgttcatcatcgtgcccatcttcctgctgctggacaaggacgacagcaaggccggcatggaggaggaccacacctacgagggcctggacatcgaccagaccgccacctacgaggacatcgtgaccctgagaaccggcgaggtgaagtggagcgtgggcgagcaccccggccaggagtga

SEQ ID NO: 1215 - RNA, 990 nt, synthetic construct
  misc_feature 1..990: note = P42081
  source 1..990: mol_type = other RNA
atggacccccagtgcaccatgggcctgagcaacatcctgttcgtgatggccttcctgctgagcggcgccgcccccctgaagatccaggcctacttcaacgagaccgccgacctgccctgccagttcgccaacagccagaaccagagcctgagcgagctggtggtgttctggcaggaccaggagaacctggtgctgaacgaggtgtacctgggcaaggagaagttcgacagcgtgcacagcaagtacatgggcagaaccagcttcgacagcgacagctggaccctgagactgcacaacctgcagatcaaggacaagggcctgtaccagtgcatcatccaccacaagaagcccaccggcatgatcagaatccaccagatgaacagcgagctgagcgtgctggccaacttcagccagcccgagatcgtgcccatcagcaacatcaccgagaacgtgtacatcaacctgacctgcagcagcatccacggctaccccgagcccaagaagatgagcgtgctgctgagaaccaagaacagcaccatcgagtacgacggcgtgatgcagaagagccaggacaacgtgaccgagctgtacgacgtgagcatcagcctgagcgtgagcttccccgacgtgaccagcaacatgaccatcttctgcatcctggagaccgacaagaccagactgctgagcagccccttcagcatcgagctggaggacccccagcccccccccgaccacatcccctggatcaccgccgtgctgcccaccgtgatcatctgcgtgatggtgttctgcctgatcctgtggaagtggaagaagaagaagagacccagaaacagctacaagtgcggcaccaacaccatggagagagaggagagcgagcagaccaagaagagagagaagatccacatccccgagagaagcgacgaggcccagagagtgttcaagagcagcaagaccagcagctgcgacaagagcgacacctgcttctga

SEQ ID NO: 1216 - RNA, 1011 nt, synthetic construct
  misc_feature 1..1011: note = Q15762
  source 1..1011: mol_type = other RNA
atggactaccccaccctgctgctggccctgctgcacgtgtacagagccctgtgcgaggaggtgctgtggcacaccagcgtgcccttcgccgagaacatgagcctggagtgcgtgtaccccagcatgggcatcctgacccaggtggagtggttcaagatcggcacccagcaggacagcatcgccatcttcagccccacccacggcatggtgatcagaaagccctacgccgagagagtgtacttcctgaacagcaccatggccagcaacaacatgaccctgttcttcagaaacgccagcgaggacgacgtgggctactacagctgcagcctgtacacctacccccagggcacctggcagaaggtgatccaggtggtgcagagcgacagcttcgaggccgccgtgcccagcaacagccacatcgtgagcgagcccggcaagaacgtgaccctgacctgccagccccagatgacctggcccgtgcaggccgtgagatgggagaagatccagcccagacagatcgacctgctgacctactgcaacctggtgcacggcagaaacttcaccagcaagttccccagacagatcgtgagcaactgcagccacggcagatggagcgtgatcgtgatccccgacgtgaccgtgagcgacagcggcctgtacagatgctacctgcaggccagcgccggcgagaacgagaccttcgtgatgagactgaccgtggccgagggcaagaccgacaaccagtacaccctgttcgtggccggcggcaccgtgctgctgctgctgttcgtgatcagcatcaccaccatcatcgtgatcttcctgaacagaagaagaagaagagagagaagagacctgttcaccgagagctgggacacccagaaggcccccaacaactacagaagccccatcagcaccagccagcccaccaaccagagcatggacgacaccagagaggacatctacgtgaactaccccaccttcagcagaagacccaagaccagagtgtga

SEQ ID NO: 1217 - RNA, 13482 nt, synthetic construct
  misc_feature 1..13482: note = Q685J3
  source 1..13482: mol_type = other RNA
atgcccagacccggcaccatggccctgtgcctgctgaccctggtgctgagcctgctgcccccccaggccgccgccgagcaggacctgagcgtgaacagagccgtgtgggacggcggcggctgcatcagccagggcgacgtgctgaacagacagtgccagcagctgagccagcacgtgagaaccggcagcgccgccaacaccgccaccggcaccaccagcaccaacgtggtggagcccagaatgtacctgagctgcagcaccaaccccgagatgaccagcatcgagagcagcgtgaccagcgacacccccggcgtgagcagcaccagaatgacccccaccgagagcagaaccaccagcgagagcaccagcgacagcaccaccctgttccccagcagcaccgaggacaccagcagccccaccacccccgagggcaccgacgtgcccatgagcacccccagcgaggagagcatcagcagcaccatggccttcgtgagcaccgcccccctgcccagcttcgaggcctacaccagcctgacctacaaggtggacatgagcacccccctgaccaccagcacccaggccagcagcagccccaccacccccgagagcaccaccatccccaagagcaccaacagcgagggcagcacccccctgaccagcatgcccgccagcaccatgaaggtggccagcagcgaggccatcaccctgctgaccacccccgtggagatcagcacccccgtgaccatcagcgcccaggccagcagcagccccaccaccgccgagggccccagcctgagcaacagcgcccccagcggcggcagcacccccctgaccagaatgcccctgagcgtgatgctggtggtgagcagcgaggccagcaccctgagcaccacccccgccgccaccaacatccccgtgatcaccagcaccgaggccagcagcagccccaccaccgccgagggcaccagcatccccaccagcacctacaccgagggcagcacccccctgaccagcacccccgccagcaccatgcccgtggccaccagcgagatgagcaccctgagcatcacccccgtggacaccagcaccctggtgaccaccagcaccgagcccagcagcctgcccaccaccgccgaggccaccagcatgctgaccagcaccctgagcgagggcagcacccccctgaccaacatgcccgtgagcaccatcctggtggccagcagcgaggccagcaccaccagcaccatccccgtggacagcaagaccttcgtgaccaccgccagcgaggccagcagcagccccaccaccgccgaggacaccagcatcgccaccagcacccccagcgagggcagcacccccctgaccagcatgcccgtgagcaccacccccgtggccagcagcgaggccagcaacctgagcaccacccccgtggacagcaagacccaggtgaccaccagcaccgaggccagcagcagcccccccaccgccgaggtgaacagcatgcccaccagcacccccagcgagggcagcacccccctgaccagcatgagcgtgagcaccatgcccgtggccagcagcgaggccagcaccctgagcaccacccccgtggacaccagcacccccgtgaccaccagcagcgaggccagcagcagcagcaccacccccgagggcaccagcatccccaccagcacccccagcgagggcagcacccccctgaccaacatgcccgtgagcaccagactggtggtgagcagcgaggccagcaccaccagcaccacccccgccgacagcaacaccttcgtgaccaccagcagcgaggccagcagcagcagcaccaccgccgagggcaccagcatgcccaccagcacctacagcgagagaggcaccaccatcaccagcatgagcgtgagcaccaccctggtggccagcagcgaggccagcaccctgagcaccacccccgtggacagcaacacccccgtgaccaccagcaccgaggccaccagcagcagcaccaccgccgagggcaccagcatgcccaccagcacctacaccgagggcagcacccccctgaccagcatgcccgtgaacaccaccctggtggccagcagcgaggccagcaccctgagcaccacccccgtggacaccagcacccccgtgaccaccagcaccgaggccagcagcagccccaccaccgccgacggcgccagcatgcccaccagcacccccagcgagggcagcacccccctgaccagcatgcccgtgagcaagaccctgctgaccagcagcgaggccagcaccctgagcaccacccccctggacaccagcacccacatcaccaccagcaccgaggccagctgcagccccaccaccaccgagggcaccagcatgcccatcagcacccccagcgagggcagccccctgctgaccagcatccccgtgagcatcacccccgtgaccagccccgaggccagcaccctgagcaccacccccgtggacagcaacagccccgtgaccaccagcaccgaggtgagcagcagccccacccccgccgagggcaccagcatgcccaccagcacctacagcgagggcagaacccccctgaccagcatgcccgtgagcaccaccctggtggccaccagcgccatcagcaccctgagcaccacccccgtggacaccagcacccccgtgaccaacagcaccgaggccagaagcagccccaccaccagcgagggcaccagcatgcccaccagcacccccggcgagggcagcacccccctgaccagcatgcccgacagcaccacccccgtggtgagcagcgaggccagaaccctgagcgccacccccgtggacaccagcacccccgtgaccaccagcaccgaggccaccagcagccccaccaccgccgagggcaccagcatccccaccagcacccccagcgagggcaccacccccctgaccagcacccccgtgagccacaccctggtggccaacagcgaggccagcaccctgagcaccacccccgtggacagcaacacccccctgaccaccagcaccgaggccagcagccccccccccaccgccgagggcaccagcatgcccaccagcacccccagcgagggcagcacccccctgaccagaatgcccgtgagcaccaccatggtggccagcagcgagaccagcaccctgagcaccacccccgccgacaccagcacccccgtgaccacctacagccaggccagcagcagcagcaccaccgccgacggcaccagcatgcccaccagcacctacagcgagggcagcacccccctgaccagcgtgcccgtgagcaccagactggtggtgagcagcgaggccagcaccctgagcaccacccccgtggacaccagcatccccgtgaccaccagcaccgaggccagcagcagccccaccaccgccgagggcaccagcatccccaccagcccccccagcgagggcaccacccccctggccagcatgcccgtgagcaccaccctggtggtgagcagcgaggccaacaccctgagcaccacccccgtggacagcaagacccaggtggccaccagcaccgaggccagcagccccccccccaccgccgaggtgaccagcatgcccaccagcacccccggcgagagaagcacccccctgaccagcatgcccgtgagacacacccccgtggccagcagcgaggccagcaccctgagcaccagccccgtggacaccagcacccccgtgaccaccagcgccgagaccagcagcagccccaccaccgccgagggcaccagcctgcccaccagcaccaccagcgagggcagcaccctgctgaccagcatccccgtgagcaccaccctggtgaccagccccgaggccagcaccctgctgaccacccccgtggacaccaagggccccgtggtgaccagcaacgaggtgagcagcagccccacccccgccgagggcaccagcatgcccaccagcacctacagcgagggcagaacccccctgaccagcatccccgtgaacaccaccctggtggccagcagcgccatcagcatcctgagcaccacccccgtggacaacagcacccccgtgaccaccagcaccgaggcctgcagcagccccaccaccagcgagggcaccagcatgcccaacagcaaccccagcgagggcaccacccccctgaccagcatccccgtgagcaccacccccgtggtgagcagcgaggccagcaccctgagcgccacccccgtggacaccagcacccccggcaccaccagcgccgaggccaccagcagccccaccaccgccgagggcatcagcatccccaccagcacccccagcgagggcaagacccccctgaagagcatccccgtgagcaacacccccgtggccaacagcgaggccagcaccctgagcaccacccccgtggacagcaacagccccgtggtgaccagcaccgccgtgagcagcagccccacccccgccgagggcaccagcatcgccatcagcacccccagcgagggcagcaccgccctgaccagcatccccgtgagcaccaccaccgtggccagcagcgagatcaacagcctgagcaccacccccgccgtgaccagcacccccgtgaccacctacagccaggccagcagcagccccaccaccgccgacggcaccagcatgcagaccagcacctacagcgagggcagcacccccctgaccagcctgcccgtgagcaccatgctggtggtgagcagcgaggccaacaccctgagcaccacccccatcgacagcaagacccaggtgaccgccagcaccgaggccagcagcagcaccaccgccgagggcagcagcatgaccatcagcacccccagcgagggcagccccctgctgaccagcatccccgtgagcaccacccccgtggccagccccgaggccagcaccctgagcaccacccccgtggacagcaacagccccgtgatcaccagcaccgaggtgagcagcagccccacccccgccgagggcaccagcatgcccaccagcacctacaccgagggcagaacccccctgaccagcatcaccgtgagaaccacccccgtggccagcagcgccatcagcaccctgagcaccacccccgtggacaacagcacccccgtgaccaccagcaccgaggccagaagcagccccaccaccagcgagggcaccagcatgcccaacagcacccccagcgagggcaccacccccctgaccagcatccccgtgagcaccacccccgtgctgagcagcgaggccagcaccctgagcgccacccccatcgacaccagcacccccgtgaccaccagcaccgaggccaccagcagccccaccaccgccgagggcaccagcatccccaccagcaccctgagcgagggcatgacccccctgaccagcacccccgtgagccacaccctggtggccaacagcgaggccagcaccctgagcaccacccccgtggacagcaacagccccgtggtgaccagcaccgccgtgagcagcagccccacccccgccgagggcaccagcatcgccaccagcacccccagcgagggcagcaccgccctgaccagcatccccgtgagcaccaccaccgtggccagcagcgagaccaacaccctgagcaccacccccgccgtgaccagcacccccgtgaccacctacgcccaggtgagcagcagccccaccaccgccgacggcagcagcatgcccaccagcacccccagagagggcagaccccccctgaccagcatccccgtgagcaccaccaccgtggccagcagcgagatcaacaccctgagcaccaccctggccgacaccagaacccccgtgaccacctacagccaggccagcagcagccccaccaccgccgacggcaccagcatgcccacccccgcctacagcgagggcagcacccccctgaccagcatgcccctgagcaccaccctggtggtgagcagcgaggccagcaccctgagcaccacccccgtggacaccagcacccccgccaccaccagcaccgagggcagcagcagccccaccaccgccggcggcaccagcatccagaccagcacccccagcgagagaaccacccccctggccggcatgcccgtgagcaccaccctggtggtgagcagcgagggcaacaccctgagcaccacccccgtggacagcaagacccaggtgaccaacagcaccgaggccagcagcagcgccaccgccgagggcagcagcatgaccatcagcgcccccagcgagggcagccccctgctgaccagcatccccctgagcaccacccccgtggccagccccgaggccagcaccctgagcaccacccccgtggacagcaacagccccgtgatcaccagcaccgaggtgagcagcagccccatccccaccgagggcaccagcatgcagaccagcacctacagcgacagaagaacccccctgaccagcatgcccgtgagcaccaccgtggtggccagcagcgccatcagcaccctgagcaccacccccgtggacaccagcacccccgtgaccaacagcaccgaggccagaagcagccccaccaccagcgagggcaccagcatgcccaccagcacccccagcgagggcagcacccccttcaccagcatgcccgtgagcaccatgcccgtggtgaccagcgaggccagcaccctgagcgccacccccgtggacaccagcacccccgtgaccaccagcaccgaggccaccagcagccccaccaccgccgagggcaccagcatccccaccagcaccctgagcgagggcaccacccccctgaccagcatccccgtgagccacaccctggtggccaacagcgaggtgagcaccctgagcaccacccccgtggacagcaacacccccttcaccaccagcaccgaggccagcagccccccccccaccgccgagggcaccagcatgcccaccagcaccagcagcgagggcaacacccccctgaccagaatgcccgtgagcaccaccatggtggccagcttcgagaccagcaccctgagcaccacccccgccgacaccagcacccccgtgaccacctacagccaggccggcagcagccccaccaccgccgacgacaccagcatgcccaccagcacctacagcgagggcagcacccccctgaccagcgtgcccgtgagcaccatgcccgtggtgagcagcgaggccagcacccacagcaccacccccgtggacaccagcacccccgtgaccaccagcaccgaggccagcagcagccccaccaccgccgagggcaccagcatccccaccagcccccccagcgagggcaccacccccctggccagcatgcccgtgagcaccacccccgtggtgagcagcgaggccggcaccctgagcaccacccccgtggacaccagcacccccatgaccaccagcaccgaggccagcagcagccccaccaccgccgaggacatcgtggtgcccatcagcaccgccagcgagggcagcaccctgctgaccagcatccccgtgagcaccacccccgtggccagccccgaggccagcaccctgagcaccacccccgtggacagcaacagccccgtggtgaccagcaccgagatcagcagcagcgccaccagcgccgagggcaccagcatgcccaccagcacctacagcgagggcagcacccccctgagaagcatgcccgtgagcaccaagcccctggccagcagcgaggccagcaccctgagcaccacccccgtggacaccagcatccccgtgaccaccagcaccgagaccagcagcagccccaccaccgccaaggacaccagcatgcccatcagcacccccagcgaggtgagcaccagcctgaccagcatcctggtgagcaccatgcccgtggccagcagcgaggccagcaccctgagcaccacccccgtggacaccagaaccctggtgaccaccagcaccggcaccagcagcagccccaccaccgccgagggcagcagcatgcccaccagcacccccggcgagagaagcacccccctgaccaacatcctggtgagcaccaccctgctggccaacagcgaggccagcaccctgagcaccacccccgtggacaccagcacccccgtgaccaccagcgccgaggccagcagcagccccaccaccgccgagggcaccagcatgagaatcagcacccccagcgacggcagcacccccctgaccagcatcctggtgagcaccctgcccgtggccagcagcgaggccagcaccgtgagcaccaccgccgtggacaccagcatccccgtgaccaccagcaccgaggccagcagcagccccaccaccgccgaggtgaccagcatgcccaccagcacccccagcgagaccagcacccccctgaccagcatgcccgtgaaccacacccccgtggccagcagcgaggccggcaccctgagcaccacccccgtggacaccagcacccccgtgaccaccagcaccaaggccagcagcagccccaccaccgccgagggcatcgtggtgcccatcagcaccgccagcgagggcagcaccctgctgaccagcatccccgtgagcaccacccccgtggccagcagcgaggccagcaccctgagcaccacccccgtggacaccagcatccccgtgaccaccagcaccgagggcagcagcagccccaccaccgccgagggcaccagcatgcccatcagcacccccagcgaggtgagcacccccctgaccagcatcctggtgagcaccgtgcccgtggccggcagcgaggccagcaccctgagcaccacccccgtggacaccagaacccccgtgaccaccagcgccgaggccagcagcagccccaccaccgccgagggcaccagcatgcccatcagcacccccggcgagagaagaacccccctgaccagcatgagcgtgagcaccatgcccgtggccagcagcgaggccagcaccctgagcagaacccccgccgacaccagcacccccgtgaccaccagcaccgaggccagcagcagccccaccaccgccgagggcaccggcatccccatcagcacccccagcgagggcagcacccccctgaccagcatccccgtgagcaccacccccgtggccatccccgaggccagcaccctgagcaccacccccgtggacagcaacagccccgtggtgaccagcaccgaggtgagcagcagccccacccccgccgagggcaccagcatgcccatcagcacctacagcgagggcagcacccccctgaccggcgtgcccgtgagcaccacccccgtgaccagcagcgccatcagcaccctgagcaccacccccgtggacaccagcacccccgtgaccaccagcaccgaggcccacagcagccccaccaccagcgagggcaccagcatgcccaccagcacccccagcgagggcagcacccccctgacctacatgcccgtgagcaccatgctggtggtgagcagcgaggacagcaccctgagcgccacccccgtggacaccagcacccccgtgaccaccagcaccgaggccaccagcagcaccaccgccgagggcaccagcatccccaccagcacccccagcgagggcatgacccccctgaccagcgtgcccgtgagcaacacccccgtggccagcagcgaggccagcatcctgagcaccacccccgtggacagcaacacccccctgaccaccagcaccgaggccagcagcagcccccccaccgccgagggcaccagcatgcccaccagcacccccagcgagggcagcacccccctgaccagcatgcccgtgagcaccaccaccgtggccagcagcgagaccagcaccctgagcaccacccccgccgacaccagcacccccgtgaccacctacagccaggccagcagcagcccccccatcgccgacggcaccagcatgcccaccagcacctacagcgagggcagcacccccctgaccaacatgagcttcagcaccacccccgtggtgagcagcgaggccagcaccctgagcaccacccccgtggacaccagcacccccgtgaccaccagcaccgaggccagcctgagccccaccaccgccgagggcaccagcatccccaccagcagccccagcgagggcaccacccccctggccagcatgcccgtgagcaccacccccgtggtgagcagcgaggtgaacaccctgagcaccacccccgtggacagcaacaccctggtgaccaccagcaccgaggccagcagcagccccaccatcgccgagggcaccagcctgcccaccagcaccaccagcgagggcagcacccccctgagcatcatgcccctgagcaccacccccgtggccagcagcgaggccagcaccctgagcaccacccccgtggacaccagcacccccgtgaccaccagcagccccaccaacagcagccccaccaccgccgaggtgaccagcatgcccaccagcaccgccggcgagggcagcacccccctgaccaacatgcccgtgagcaccacccccgtggccagcagcgaggccagcaccctgagcaccacccccgtggacagcaacaccttcgtgaccagcagcagccaggccagcagcagccccgccaccctgcaggtgaccaccatgagaatgagcacccccagcgagggcagcagcagcctgaccaccatgctgctgagcagcacctacgtgaccagcagcgaggccagcacccccagcacccccagcgtggacagaagcacccccgtgaccaccagcacccagagcaacagcacccccaccccccccgaggtgatcaccctgcccatgagcacccccagcgaggtgagcacccccctgaccatcatgcccgtgagcaccaccagcgtgaccatcagcgaggccggcaccgccagcaccctgcccgtggacaccagcacccccgtgatcaccagcacccaggtgagcagcagccccgtgacccccgagggcaccaccatgcccatctggacccccagcgagggcagcacccccctgaccaccatgcccgtgagcaccaccagagtgaccagcagcgagggcagcaccctgagcacccccagcgtggtgaccagcacccccgtgaccaccagcaccgaggccatcagcagcagcgccaccctggacagcaccaccatgagcgtgagcatgcccatggagatcagcaccctgggcaccaccatcctggtgagcaccacccccgtgaccagattccccgagagcagcacccccagcatccccagcgtgtacaccagcatgagcatgaccaccgccagcgagggcagcagcagccccaccaccctggagggcaccaccaccatgcccatgagcaccaccagcgagagaagcaccctgctgaccaccgtgctgatcagccccatcagcgtgatgagccccagcgaggccagcaccctgagcaccccccccggcgacaccagcacccccctgctgaccagcaccaaggccggcagcttcagcatccccgccgaggtgaccaccatcagaatcagcatcaccagcgagagaagcacccccctgaccaccctgctggtgagcaccaccctgcccaccagcttccccggcgccagcatcgccagcaccccccccctggacaccagcaccaccttcacccccagcaccgacaccgccagcacccccaccatccccgtggccaccaccatcagcgtgagcgtgatcaccgagggcagcacccccggcaccaccatcttcatccccagcacccccgtgaccagcagcaccgccgacgtgttccccgccaccaccggcgccgtgagcacccccgtgatcaccagcaccgagctgaacacccccagcaccagcagcagcagcaccaccaccagcttcagcaccaccaaggagttcaccacccccgccatgaccaccgccgcccccctgacctacgtgaccatgagcaccgcccccagcacccccagaaccaccagcagaggctgcaccaccagcgccagcaccctgagcgccaccagcaccccccacaccagcaccagcgtgaccaccagacccgtgacccccagcagcgagagcagcagacccagcaccatcaccagccacaccatcccccccaccttcccccccgcccacagcagcaccccccccaccaccagcgccagcagcaccaccgtgaaccccgaggccgtgaccaccatgaccaccagaaccaagcccagcaccagaaccaccagcttccccaccgtgaccaccaccgccgtgcccaccaacaccaccatcaagagcaaccccaccagcacccccaccgtgcccagaaccaccacctgcttcggcgacggctgccagaacaccgccagcagatgcaagaacggcggcacctgggacggcctgaagtgccagtgccccaacctgtactacggcgagctgtgcgaggaggtggtgagcagcatcgacatcggcccccccgagaccatcagcgcccagatggagctgaccgtgaccgtgaccagcgtgaagttcaccgaggagctgaagaaccacagcagccaggagttccaggagttcaagcagaccttcaccgagcagatgaacatcgtgtacagcggcatccccgagtacgtgggcgtgaacatcaccaagctgagactgggcagcgtggtggtggagcacgacgtgctgctgagaaccaagtacacccccgagtacaagaccgtgctggacaacgccaccgaggtggtgaaggagaagatcaccaaggtgaccacccagcagatcatgatcaacgacatctgcagcgacatgatgtgcttcaacaccaccggcacccaggtgcagaacatcaccgtgacccagtacgaccccgaggaggactgcagaaagatggccaaggagtacggcgactacttcgtggtggagtacagagaccagaagccctactgcatcagcccctgcgagcccggcttcagcgtgagcaagaactgcaacctgggcaagtgccagatgagcctgagcggcccccagtgcctgtgcgtgaccaccgagacccactggtacagcggcgagacctgcaaccagggcacccagaagagcctggtgtacggcctggtgggcgccggcgtggtgctgatgctgatcatcctggtggccctgctgatgctggtgttcagaagcaagagagaggtgaagagacagaagtacagactgagccagctgtacaagtggcaggaggaggacagcggccccgcccccggcaccttccagaacatcggcttcgacatctgccaggacgacgacagcatccacctggagagcatctacagcaacttccagcccagcctgagacacatcgaccccgagaccaagatcagaatccagagaccccaggtgatgaccaccagcttctga

SEQ ID NO: 1218 - RNA, 1215 nt, synthetic construct
  misc_feature 1..1215: note = Q9NNX6
  source 1..1215: mol_type = other RNA
atgagcgacagcaaggagcccagactgcagcagctgggcctgctggaggaggagcagctgagaggcctgggcttcagacagaccagaggctacaagagcctggccggctgcctgggccacggccccctggtgctgcagctgctgagcttcaccctgctggccggcctgctggtgcaggtgagcaaggtgcccagcagcatcagccaggagcagagcagacaggacgccatctaccagaacctgacccagctgaaggccgccgtgggcgagctgagcgagaagagcaagctgcaggagatctaccaggagctgacccagctgaaggccgccgtgggcgagctgcccgagaagagcaagctgcaggagatctaccaggagctgaccagactgaaggccgccgtgggcgagctgcccgagaagagcaagctgcaggagatctaccaggagctgacctggctgaaggccgccgtgggcgagctgcccgagaagagcaagatgcaggagatctaccaggagctgaccagactgaaggccgccgtgggcgagctgcccgagaagagcaagcagcaggagatctaccaggagctgaccagactgaaggccgccgtgggcgagctgcccgagaagagcaagcagcaggagatctaccaggagctgaccagactgaaggccgccgtgggcgagctgcccgagaagagcaagcagcaggagatctaccaggagctgacccagctgaaggccgccgtggagagactgtgccacccctgcccctgggagtggaccttcttccagggcaactgctacttcatgagcaacagccagagaaactggcacgacagcatcaccgcctgcaaggaggtgggcgcccagctggtggtgatcaagagcgccgaggagcagaacttcctgcagctgcagagcagcagaagcaacagattcacctggatgggcctgagcgacctgaaccaggagggcacctggcagtgggtggacggcagccccctgctgcccagcttcaagcagtactggaacagaggcgagcccaacaacgtgggcgaggaggactgcgccgagttcagcggcaacggctggaacgacgacaagtgcaacctggccaagttctggatctgcaagaagagcgccgccagctgcagcagagacgaggagcagttcctgagccccgcccccgccacccccaaccccccccccgcctga

SEQ ID NO: 1219 - RNA, 3126 nt, synthetic construct
  misc_feature 1..3126: note = Q9NR97
  source 1..3126: mol_type = other RNA
atggagaacatgttcctgcagagcagcatgctgacctgcatcttcctgctgatcagcggcagctgcgagctgtgcgccgaggagaacttcagcagaagctacccctgcgacgagaagaagcagaacgacagcgtgatcgccgagtgcagcaacagaagactgcaggaggtgccccagaccgtgggcaagtacgtgaccgagctggacctgagcgacaacttcatcacccacatcaccaacgagagcttccagggcctgcagaacctgaccaagatcaacctgaaccacaaccccaacgtgcagcaccagaacggcaaccccggcatccagagcaacggcctgaacatcaccgacggcgccttcctgaacctgaagaacctgagagagctgctgctggaggacaaccagctgccccagatccccagcggcctgcccgagagcctgaccgagctgagcctgatccagaacaacatctacaacatcaccaaggagggcatcagcagactgatcaacctgaagaacctgtacctggcctggaactgctacttcaacaaggtgtgcgagaagaccaacatcgaggacggcgtgttcgagaccctgaccaacctggagctgctgagcctgagcttcaacagcctgagccacgtgccccccaagctgcccagcagcctgagaaagctgttcctgagcaacacccagatcaagtacatcagcgaggaggacttcaagggcctgatcaacctgaccctgctggacctgagcggcaactgccccagatgcttcaacgcccccttcccctgcgtgccctgcgacggcggcgccagcatcaacatcgacagattcgccttccagaacctgacccagctgagatacctgaacctgagcagcaccagcctgagaaagatcaacgccgcctggttcaagaacatgccccacctgaaggtgctggacctggagttcaactacctggtgggcgagatcgccagcggcgccttcctgaccatgctgcccagactggagatcctggacctgagcttcaactacatcaagggcagctacccccagcacatcaacatcagcagaaacttcagcaagctgctgagcctgagagccctgcacctgagaggctacgtgttccaggagctgagagaggacgacttccagcccctgatgcagctgcccaacctgagcaccatcaacctgggcatcaacttcatcaagcagatcgacttcaagctgttccagaacttcagcaacctggagatcatctacctgagcgagaacagaatcagccccctggtgaaggacaccagacagagctacgccaacagcagcagcttccagagacacatcagaaagagaagaagcaccgacttcgagttcgacccccacagcaacttctaccacttcaccagacccctgatcaagccccagtgcgccgcctacggcaaggccctggacctgagcctgaacagcatcttcttcatcggccccaaccagttcgagaacctgcccgacatcgcctgcctgaacctgagcgccaacagcaacgcccaggtgctgagcggcaccgagttcagcgccatcccccacgtgaagtacctggacctgaccaacaacagactggacttcgacaacgccagcgccctgaccgagctgagcgacctggaggtgctggacctgagctacaacagccactacttcagaatcgccggcgtgacccaccacctggagttcatccagaacttcaccaacctgaaggtgctgaacctgagccacaacaacatctacaccctgaccgacaagtacaacctggagagcaagagcctggtggagctggtgttcagcggcaacagactggacatcctgtggaacgacgacgacaacagatacatcagcatcttcaagggcctgaagaacctgaccagactggacctgagcctgaacagactgaagcacatccccaacgaggccttcctgaacctgcccgccagcctgaccgagctgcacatcaacgacaacatgctgaagttcttcaactggaccctgctgcagcagttccccagactggagctgctggacctgagaggcaacaagctgctgttcctgaccgacagcctgagcgacttcaccagcagcctgagaaccctgctgctgagccacaacagaatcagccacctgcccagcggcttcctgagcgaggtgagcagcctgaagcacctggacctgagcagcaacctgctgaagaccatcaacaagagcgccctggagaccaagaccaccaccaagctgagcatgctggagctgcacggcaaccccttcgagtgcacctgcgacatcggcgacttcagaagatggatggacgagcacctgaacgtgaagatccccagactggtggacgtgatctgcgccagccccggcgaccagagaggcaagagcatcgtgagcctggagctgaccacctgcgtgagcgacgtgaccgccgtgatcctgttcttcttcaccttcttcatcaccaccatggtgatgctggccgccctggcccaccacctgttctactgggacgtgtggttcatctacaacgtgtgcctggccaaggtgaagggctacagaagcctgagcaccagccagaccttctacgacgcctacatcagctacgacaccaaggacgccagcgtgaccgactgggtgatcaacgagctgagataccacctggaggagagcagagacaagaacgtgctgctgtgcctggaggagagagactgggaccccggcctggccatcatcgacaacctgatgcagagcatcaaccagagcaagaagaccgtgttcgtgctgaccaagaagtacgccaagagctggaacttcaagaccgccttctacctggccctgcagagactgatggacgagaacatggacgtgatcatcttcatcctgctggagcccgtgctgcagcacagccagtacctgagactgagacagagaatctgcaagagcagcatcctgcagtggcccgacaaccccaaggccgagggcctgttctggcagaccctgagaaacgtggtgctgaccgagaacgacagcagatacaacaacatgtacgtggacagcatcaagcagtactga

SEQ ID NO: 1220 - RNA, 66 nt, synthetic construct
  misc_feature 1..66: note = P16671_TM_1_8-29
  source 1..66: mol_type = other RNA
ggcctgatcgccggcgccgtgatcggcgccgtgctggccgtgttcggcggcatcctgatgcccgtg

SEQ ID NO: 1221 - RNA, 81 nt, synthetic construct
  misc_feature 1..81: note = P32248_TM_1_60-86
  source 1..81: mol_type = other RNA
ttcctgcccatcatgtacagcatcatctgcttcgtgggcctgctgggcaacggcctggtggtgctgacctacatctacttc

SEQ ID NO: 1222 - RNA, 66 nt, synthetic construct
  misc_feature 1..66: note = P16671_TM_2_440-461
  source 1..66: mol_type = other RNA
ctgctgggcctgatcgagatgatcctgctgagcgtgggcgtggtgatgttcgtggccttcatgatc

SEQ ID NO: 1223 - RNA, 63 nt, synthetic construct
  misc_feature 1..63: note = P32248_TM_2_96-116
  source 1..63: mol_type = other RNA
tacctgctgaacctggccgtggccgacatcctgttcctgctgaccctgcccttctgggcctac

SEQ ID NO: 1224 - RNA, 66 nt, synthetic construct
  misc_feature 1..66: note = P32248_TM_3_131-152
  source 1..66: mol_type = other RNA
ctgatcttcgccatctacaagatgagcttcttcagcggcatgctgctgctgctgtgcatcagcatc

SEQ ID NO: 1225 - RNA, 63 nt, synthetic construct
  misc_feature 1..63: note = P32248_TM_4_171-191
  source 1..63: mol_type = other RNA
gtgctgctgatcagcaagctgagctgcgtgggcatctggatcctggccaccgtgctgagcatc

SEQ ID NO: 1226 - RNA, 84 nt, synthetic construct
  misc_feature 1..84: note = P32248_TM_5_220-247
  source 1..84: mol_type = other RNA
ttcatcaccatccaggtggcccagatggtgatcggcttcctggtgcccctgctggccatgagcttctgctacctggtgatcatc

SEQ ID NO: 1227 - RNA, 78 nt, synthetic construct
  misc_feature 1..78: note = P32248_TM_6_264-289
  source 1..78: mol_type = other RNA
gtgatcatcgccgtggtggtggtgttcatcgtgttccagctgccctacaacggcgtggtgctggcccagaccgtggcc

SEQ ID NO: 1228 - RNA, 54 nt, synthetic construct
  misc_feature 1..54: note = P32248_TM_7_314-331
  source 1..54: mol_type = other RNA
ctggcctgcgtgagatgctgcgtgaaccccttcctgtacgccttcatcggcgtg

SEQ ID NO: 1229 - RNA, 69 nt, synthetic construct
  misc_feature 1..69: note = A0A5B9_TM_145-167
  source 1..69: mol_type = other RNA
accatcctgtacgagatcctgctgggcaaggccaccctgtacgccgtgctggtgagcgccctggtgctg

SEQ ID NO: 1230 - RNA, 69 nt, synthetic construct
  misc_feature 1..69: note = B7Z8K6_TM_130-152
  source 1..69: mol_type = other RNA
ctgggcctgagaatgctgttcgccaagaccgtggccgtgaacttcctgctgaccgccaagctgttcttc

SEQ ID NO: 1231 - RNA, 63 nt, synthetic construct
  misc_feature 1..63: note = O00206_TM_632-652
  source 1..63: mol_type = other RNA
accatcatcggcgtgagcgtgctgagcgtgctggtggtgagcgtggtggccgtgctggtgtac

SEQ ID NO: 1232 - RNA, 66 nt, synthetic construct
  misc_feature 1..66: note = P01730_TM_397-418
  source 1..66: mol_type = other RNA
atggccctgatcgtgctgggcggcgtggccggcctgctgctgttcatcggcctgggcatcttcttc

SEQ ID NO: 1233 - RNA, 63 nt, synthetic construct
  misc_feature 1..63: note = P01850_TM_151-171
  source 1..63: mol_type = other RNA
atcctgctgggcaaggccaccctgtacgccgtgctggtgagcgccctggtgctgatggccatg

SEQ ID NO: 1234 - RNA, 78 nt, synthetic construct
  misc_feature 1..78: note = P07766_TM_127-152
  source 1..78: mol_type = other RNA
gtgatgagcgtggccaccatcgtgatcgtggacatctgcatcaccggcggcctgctgctgctggtgtactactggagc

SEQ ID NO: 1235 - RNA, 66 nt, synthetic construct
  misc_feature 1..66: note = P08575_TM_576-597
  source 1..66: mol_type = other RNA
gccctgatcgccttcctggccttcctgatcatcgtgaccagcatcgccctgctggtggtgctgtac

SEQ ID NO: 1236 - RNA, 63 nt, synthetic construct
  misc_feature 1..63: note = P08637_TM_209-229
  source 1..63: mol_type = other RNA
gtgagcttctgcctggtgatggtgctgctgttcgccgtggacaccggcctgtacttcagcgtg

SEQ ID NO: 1237 - RNA, 81 nt, synthetic construct
  misc_feature 1..81: note = P10747_TM_153-179
  source 1..81: mol_type = other RNA
ttctgggtgctggtggtggtgggcggcgtgctggcctgctacagcctgctggtgaccgtggccttcatcatcttctgggtg

SEQ ID NO: 1238 - RNA, 66 nt, synthetic construct
  misc_feature 1..66: note = P11912_TM_144-165
  source 1..66: mol_type = other RNA
atcatcaccgccgagggcatcatcctgctgttctgcgccgtggtgcccggcaccctgctgctgttc

SEQ ID NO: 1239 - RNA, 66 nt, synthetic construct
  misc_feature 1..66: note = P15391_TM_292-313
  source 1..66: mol_type = other RNA
gtgagcgccgtgaccctggcctacctgatcttctgcctgtgcagcctggtgggcatcctgcacctg

SEQ ID NO: 1240 - RNA, 63 nt, synthetic construct
  misc_feature 1..63: note = P16410_TM_162-182
  source 1..63: mol_type = other RNA
ttcctgctgtggatcctggccgccgtgagcagcggcctgttcttctacagcttcctgctgacc

SEQ ID NO: 1241 - RNA, 63 nt, synthetic construct
  misc_feature 1..63: note = P26718_TM_52-72
  source 1..63: mol_type = other RNA
cccttcttcttctgctgcttcatcgccgtggccatgggcatcagattcatcatcatggtggcc

SEQ ID NO: 1242 - RNA, 63 nt, synthetic construct
  misc_feature 1..63: note = P30273_TM_24-44
  source 1..63: mol_type = other RNA
ctgtgctacatcctggacgccatcctgttcctgtacggcatcgtgctgaccctgctgtactgc

SEQ ID NO: 1243 - RNA, 63 nt, synthetic construct
  misc_feature 1..63: note = P40259_TM_160-180
  source 1..63: mol_type = other RNA
ggcatcatcatgatccagaccctgctgatcatcctgttcatcatcgtgcccatcttcctgctg

SEQ ID NO: 1244 - RNA, 63 nt, synthetic construct
  misc_feature 1..63: note = P42081_TM_248-268
  source 1..63: mol_type = other RNA
tggatcaccgccgtgctgcccaccgtgatcatctgcgtgatggtgttctgcctgatcctgtgg

SEQ ID NO: 1245 - RNA, 63 nt, synthetic construct
  misc_feature 1..63: note = Q15762_TM_255-275
  source 1..63: mol_type = other RNA
ggcggcaccgtgctgctgctgctgttcgtgatcagcatcaccaccatcatcgtgatcttcctg

SEQ ID NO: 1246 - RNA, 63 nt, synthetic construct
  misc_feature 1..63: note = Q685J3_TM_4394-4414
  source 1..63: mol_type = other RNA
ctggtgggcgccggcgtggtgctgatgctgatcatcctggtggccctgctgatgctggtgttc

SEQ ID NO: 1247 - RNA, 63 nt, synthetic construct
  misc_feature 1..63: note = Q9NNX6_TM_38-58
  source 1..63: mol_type = other RNA
ctgggccacggccccctggtgctgcagctgctgagcttcaccctgctggccggcctgctggtg

SEQ ID NO: 1248 - RNA, 63 nt, synthetic construct
  misc_feature 1..63: note = Q9NR97_TM_828-848
  source 1..63: mol_type = other RNA
gccgtgatcctgttcttcttcaccttcttcatcaccaccatggtgatgctggccgccctggcc

SEQ ID NO: 1249 - RNA, 48 nt, synthetic construct
  misc_feature 1..48: note = P14207_1-16
  source 1..48: mol_type = other RNA
atggtgtggaagtggatgcccctgctcctgcttctggtctgcgttgcc

SEQ ID NO: 1250 - RNA, 48 nt, synthetic construct
  misc_feature 1..48: note = O75787_1-16
  source 1..48: mol_type = other RNA
atggccgtgttcgtcgttctgctcgctctggtggccggcgtgcttggg

SEQ ID NO: 1251 - RNA, 48 nt, synthetic construct
  misc_feature 1..48: note = P07359_1-16
  source 1..48: mol_type = other RNA
atgcccctgctcctgcttctgctcctgcttcctagcccgctgcacccc

SEQ ID NO: 1252 - RNA, 48 nt, synthetic construct
  misc_feature 1..48: note = P08637_1-16
  source 1..48: mol_type = other RNA
atgtggcagctgctcctgcccaccgcccttctgctcctggtgagcgct

SEQ ID NO: 1253 - RNA, 51 nt, synthetic construct
  misc_feature 1..51: note = P07237_1-17
  source 1..51: mol_type = other RNA
atgctgagacgggccctcctgtgccttgctgtggccgcgctggtccgcgct

SEQ ID NO: 1254 - RNA, 51 nt, synthetic construct
  misc_feature 1..51: note = O60911_1-17
  source 1..51: mol_type = other RNA
atgaacctgagcctcgtgctggccgctttctgccttggcatcgcctccgcg

SEQ ID NO: 1255 - RNA, 51 nt, synthetic construct
  misc_feature 1..51: note = P20138_1-17
  source 1..51: mol_type = other RNA
atgcccctgctcctgcttctgcctctcctgtgggccggcgctcttgccatg

SEQ ID NO: 1256 - RNA, 51 nt, synthetic construct
  misc_feature 1..51: note = P27797_1-17
  source 1..51: mol_type = other RNA
atgctgctcagcgtgcccctgcttctgggcctcctggggcttgccgtcgct

SEQ ID NO: 1257 - RNA, 54 nt, synthetic construct
  misc_feature 1..54: note = P10747_1-18
  source 1..54: mol_type = other RNA
atgctgagactcctgcttgccctgaacctcttccccagcatccaggtgaccggc

SEQ ID NO: 1258 - RNA, 54 nt, synthetic construct
  misc_feature 1..54: note = O75487_1-18
  source 1..54: mol_type = other RNA
atggccagattcggcctgcccgctctcctgtgcacccttgccgtgctgagcgcg

SEQ ID NO: 1259 - RNA, 54 nt, synthetic construct
  misc_feature 1..54: note = P07996_1-18
  source 1..54: mol_type = other RNA
atgggcctggcctgggggctcggagtgctgttccttatgcacgtctgcggcacc

SEQ ID NO: 1260 - RNA, 54 nt, synthetic construct
  misc_feature 1..54: note = P22748_1-18
  source 1..54: mol_type = other RNA
atgagaatgctgctcgccctgcttgctctgagcgccgcgcggccctccgcttct

SEQ ID NO: 1261 - RNA, 54 nt, synthetic construct
  misc_feature 1..54: note = Q15762_1-18
  source 1..54: mol_type = other RNA
atggactaccccaccctgctcctggcccttctgcacgtgtatagagctctctgc

SEQ ID NO: 1262 - RNA, 54 nt, synthetic construct
  misc_feature 1..54: note = P30273_1-18
  source 1..54: mol_type = other RNA
atgatccccgccgtggtcctgctcctgcttctgctcgttgagcaggctgccgcg

SEQ ID NO: 1263 - RNA, 54 nt, synthetic construct
  misc_feature 1..54: note = P38570_1-18
  source 1..54: mol_type = other RNA
atgtggctgttccacaccctcctgtgcatcgccagccttgctctgctcgccgcg

SEQ ID NO: 1264 - RNA, 54 nt, synthetic construct
  misc_feature 1..54: note = Q01638_1-18
  source 1..54: mol_type = other RNA
atgggcttctggatcctggccattctcaccatcctgatgtacagcacagctgcc

SEQ ID NO: 1265 - RNA, 54 nt, synthetic construct; identical to SEQ ID NO: 849
  misc_feature 1..54: note = Q9NZQ7_1-18
  source 1..54: mol_type = other RNA

SEQ ID NO: 1266 - RNA, 57 nt, synthetic construct
  misc_feature 1..57: note = P13591_1-19
  source 1..57: mol_type = other RNA
atgctgcagaccaaggacctcatctggacactgttctttcttggcacggccgtgagc

SEQ ID NO: 1267 - RNA, 57 nt, synthetic construct
  misc_feature 1..57: note = P26842_1-19
  source 1..57: mol_type = other RNA
atggccagaccccacccttggtggctgtgcgtgctcggcaccctggtcgggcttagc

SEQ ID NO: 1268 - RNA, 57 nt, synthetic construct
  misc_feature 1..57: note = P15391_1-19
  source 1..57: mol_type = other RNA
atgccccctccgagactcctgttctttctgcttttcctgacccccatggaggtgcgg

SEQ ID NO: 1269 - RNA, 57 nt, synthetic construct
  misc_feature 1..57: note = Q8NI17_1-19
  source 1..57: mol_type = other RNA
atgatgtggacctgggccctgtggatgctccccagcctgtgcaagttctcccttgct

SEQ ID NO: 1270 - RNA, 57 nt, synthetic construct
  misc_feature 1..57: note = P08571_1-19
  source 1..57: mol_type = other RNA
atggagagagccagctgcctgctcctgcttctgctccccctggtgcacgtctccgct

SEQ ID NO: 1271 - RNA, 57 nt, synthetic construct
  misc_feature 1..57: note = P05154_1-19
  source 1..57: mol_type = other RNA
atgcagctgttcctcctgctttgcctggtgctcctgagcccccaaggcgcctccctt

SEQ ID NO: 1272 - RNA, 57 nt, synthetic construct
  misc_feature 1..57: note = P02787_1-19
  source 1..57: mol_type = other RNA
atgagactggccgtgggcgctctcctggtctgcgccgttcttgggctgtgtctcgcg

SEQ ID NO: 1273 - RNA, 57 nt, synthetic construct; identical to SEQ ID NO: 857
  misc_feature 1..57: note = P02671_1-19
  source 1..57: mol_type = other RNA

SEQ ID NO: 1274 - RNA, 57 nt, synthetic construct
  misc_feature 1..57: note = P04216_1-19
  source 1..57: mol_type = other RNA
atgaacctggccatcagcattgctctcctgcttaccgtgctgcaggtctccagaggc

SEQ ID NO: 1275 - RNA, 57 nt, synthetic construct
  misc_feature 1..57: note = P00747_1-19
  source 1..57: mol_type = other RNA
atggagcacaaggaagtggtcctgctcctgcttctgttcctcaaaagcggccagggg

SEQ ID NO: 1276 - RNA, 57 nt, synthetic construct
  misc_feature 1..57: note = P01764_1-19
  source 1..57: mol_type = other RNA
atggagttcggcctgagctggctctttctggtggccatccttaagggggtccagtgc

SEQ ID NO: 1277 - RNA, 57 nt, synthetic construct
  misc_feature 1..57: note = P16150_1-19
  source 1..57: mol_type = other RNA
atggccaccctgctcctgcttctgggcgtgctcgtcgttagccccgacgctctgggg

SEQ ID NO: 1278 - RNA, 57 nt, synthetic construct
  misc_feature 1..57: note = Q6DN72_1-19
  source 1..57: mol_type = other RNA
atgctgctctggaccgccgtgctgcttttcgtcccctgcgttggcaagacagtgtgg

SEQ ID NO: 1279 - RNA, 57 nt, synthetic construct
  misc_feature 1..57: note = Q01151_1-19
  source 1..57: mol_type = other RNA
atgagcagaggcctgcagctcctgcttctgtcctgcgcctactctctcgctcccgcc

SEQ ID NO: 1280 - RNA, 57 nt, synthetic construct
  misc_feature 1..57: note = P07093_1-19
  source 1..57: mol_type = other RNA
atgaactggcacctccccctgttcctgcttgccagcgtgaccctgccttccatctgc

SEQ ID NO: 1281 - RNA, 57 nt, synthetic construct
  misc_feature 1..57: note = Q8WWQ8_1-19
  source 1..57: mol_type = other RNA
atgatgctgcagcacctcgtgatcttctgcctgggccttgtcgttcaaaacttttgt

SEQ ID NO: 1282 - RNA, 60 nt, synthetic construct
  misc_feature 1..60: note = Q13291_1-20
  source 1..60: mol_type = other RNA
atggaccccaagggcctgctcagcctgaccttcgtgctttttctgtccctcgccttcggg

SEQ ID NO: 1283 - RNA, 60 nt, synthetic construct
  misc_feature 1..60: note = P35225_1-20
  source 1..60: mol_type = other RNA
atggccctgctcctgaccacagtgatcgctcttacgtgcctgggcgggttcgccagcccc

SEQ ID NO: 1284 - RNA, 60 nt, synthetic construct
  misc_feature 1..60: note = P25942_1-20
  source 1..60: mol_type = other RNA
atggtgagactgcccctccagtgcgtcctgtggggctgtcttctgaccgccgttcaccct

SEQ ID NO: 1285 - RNA, 60 nt, synthetic construct
  misc_feature 1..60: note = P52803_1-20
  source 1..60: mol_type = other RNA
atgctgcacgtggagatgctcaccctggtcttccttgttctgtggatgtgcgtgtttagc

SEQ ID NO: 1286 - RNA, 60 nt, synthetic construct
  misc_feature 1..60: note = Q15116_1-20
  source 1..60: mol_type = other RNA
atgcagatcccccaagccccttggccggtggtctgggctgttctgcagctcggctggaga

SEQ ID NO: 1287 - RNA, 60 nt, synthetic construct
  misc_feature 1..60: note = P05556_1-20
  source 1..60: mol_type = other RNA
atgaacctgcagcccatcttctggattggcctcatcagctccgtgtgctgtgtctttgcc

SEQ ID NO: 1288 - RNA, 60 nt, synthetic construct
  misc_feature 1..60: note = Q12891_1-20
  source 1..60: mol_type = other RNA
atgagagccggccccgggcctaccgtgacactggctctcgtcctggccgttgcgtgggct

SEQ ID NO: 1289 - RNA, 60 nt, synthetic construct
  misc_feature 1..60: note = Q8IV16_1-20
  source 1..60: mol_type = other RNA
atgaaggccctgggcgctgtgctcctggcccttctgctctgcgggagacccggacggggc

SEQ ID NO: 1290 - RNA, 60 nt, synthetic construct
  misc_feature 1..60: note = Q03167_1-20
  source 1..60: mol_type = other RNA
atgaccagccactacgtgatcgccattttcgctctgatgtcctcttgcctcgccacagcg

SEQ ID NO: 1291 - RNA, 60 nt, synthetic construct
  misc_feature 1..60: note = Q14246_1-20
  source 1..60: mol_type = other RNA
atgagaggcttcaacctgctcctgttttgggggtgctgtgtgatgcacagctgggaggga

SEQ ID NO: 1292 - RNA, 60 nt, synthetic construct
  misc_feature 1..60: note = P16871_1-20
  source 1..60: mol_type = other RNA
atgaccatcctgggcacaacgttcgggatggtgtttagcctcctgcaggtcgtttccgga

SEQ ID NO: 1293 - RNA, 60 nt, synthetic construct
  misc_feature 1..60: note = P61769_1-20
  source 1..60: mol_type = other RNA
atgagcagatccgtggccctggctgtcctcgccctgctttctctgagcggcctcgaggcg

SEQ ID NO: 1294 - RNA, 60 nt, synthetic construct
  misc_feature 1..60: note = Q9Y6W8_1-20
  source 1..60: mol_type = other RNA
atgaaaagcggcctgtggtacttctttctcttctgcctgagaatcaaggtgcttaccggg

SEQ ID NO: 1295 - RNA, 63 nt, synthetic construct
  misc_feature 1..63: note = P10966_1-21
  source 1..63: mol_type = other RNA
atgagaccccggctgtggctcctgcttgccgctcagctgaccgtgctccacggcaacagcgtc

SEQ ID NO: 1296 - RNA, 63 nt, synthetic construct
  misc_feature 1..63: note = Q9BZW8_1-21
  source 1..63: mol_type = other RNA
atgctgggccaggtggtcaccctcatcctgcttctgctcctgaaggtttaccaagggaaagga

SEQ ID NO: 1297 - RNA, 63 nt, synthetic construct
  misc_feature 1..63: note = P02778_1-21
  source 1..63: mol_type = other RNA
atgaaccagaccgccatcctgatttgctgtctcatcttcctgacacttagcggcattcaaggg

SEQ ID NO: 1298 - RNA, 63 nt, synthetic construct
  misc_feature 1..63: note = P18564_1-21
  source 1..63: mol_type = other RNA
atgggcatcgagctgctctgcctgttctttcttttcctggggagaaacgaccacgtgcaggga

SEQ ID NO: 1299 - RNA, 63 nt, synthetic construct
  misc_feature 1..63: note = O14525_1-21
  source 1..63: mol_type = other RNA
atggccctggctggcctctgcgccctgcttgcgtgttgctgggggcccgctgccgtgctggcc

SEQ ID NO: 1300 - RNA, 63 nt, synthetic construct
  misc_feature 1..63: note = P01130_1-21
  source 1..63: mol_type = other RNA
atgggcccctgggggtggaagctgagatggaccgtggccctcctgcttgctgccgcgggaaca

SEQ ID NO: 1301 - RNA, 63 nt, synthetic construct
  misc_feature 1..63: note = P01732_1-21
  source 1..63: mol_type = other RNA
atggccctgcccgtgaccgctctcctgcttcctctggccctcctgcttcacgcggctagaccg

SEQ ID NO: 1302 - RNA, 63 nt, synthetic construct
  misc_feature 1..63: note = P48061_1-21
  source 1..63: mol_type = other RNA
atgaacgccaaggtggtcgttgtgctggtgctcgtcctgaccgctctttgcctgagcgacggc

SEQ ID NO: 1303 - RNA, 63 nt, synthetic construct
  misc_feature 1..63: note = P01589_1-21
  source 1..63: mol_type = other RNA
atggacagctacctgctcatgtggggcctgcttaccttcatcatggtgcccgggtgccaggcc

SEQ ID NO: 1304 - RNA, 63 nt, synthetic construct
  misc_feature 1..63: note = Q86T13_1-21
  source 1..63: mol_type = other RNA
atgagaccggccttcgctctgtgcctcctgtggcaggccctttggcctggccccgggggaggc

SEQ ID NO: 1305 - RNA, 63 nt, synthetic construct
  misc_feature 1..63: note = Q5DID0_1-21
  source 1..63: mol_type = other RNA
atgctgagaaccagcggcctcgccctgcttgctctggtgtccgccgtcgggccctctcaggcg

SEQ ID NO: 1306 - RNA, 66 nt, synthetic construct
  misc_feature 1..66: note = P40189_1-22
  source 1..66: mol_type = other RNA
atgctgaccctccagacatggctggtgcaagcccttttcatctttctgacgaccgagagcacaggc

SEQ ID NO: 1307 - RNA, 66 nt, synthetic construct
  misc_feature 1..66: note = Q86YL7_1-22
  source 1..66: mol_type = other RNA
atgtggaaggtgagcgccctcctgttcgtcctgggctccgcttctctttgggttctggccgagggg

SEQ ID NO: 1308 - RNA, 66 nt, synthetic construct
  misc_feature 1..66: note = P55075_1-22
  source 1..66: mol_type = other RNA
atgggcagccccagatccgccctgtcttgcctcctgcttcacctcctggtgctgtgtcttcaggct

SEQ ID NO: 1309 - RNA, 66 nt, synthetic construct
  misc_feature 1..66: note = Q30201_1-22
  source 1..66: mol_type = other RNA
atgggccccagagcccggcctgctctgctcctgcttatgctgctccagaccgccgtgctgcaaggg

SEQ ID NO: 1310 - RNA, 66 nt, synthetic construct
  misc_feature 1..66: note = P07766_1-22
  source 1..66: mol_type = other RNA
atgcagagcggcacccactggagagtgctggggctctgcctgctttccgtcggagtttggggccaa

SEQ ID NO: 1311 - RNA, 66 nt, synthetic construct
  misc_feature 1..66: note = P18827_1-22
  source 1..66: mol_type = other RNA
atgagacgggccgctctgtggctctggctgtgcgcccttgcgctgagcctccagcccgctctgcct

SEQ ID NO: 1312 - RNA, 66 nt, synthetic construct
  misc_feature 1..66: note = P55290_1-22
  source 1..66: mol_type = other RNA
atgcagcccagaacccctctggtgctctgcgtcctgcttagccaagttctgctcctgacatccgcc

SEQ ID NO: 1313 - RNA, 66 nt, synthetic construct
  misc_feature 1..66: note = P37173_1-22
  source 1..66: mol_type = other RNA
atgggcagagggctgctccggggactgtggccccttcacatcgtgctgtggacccgcattgccagc

SEQ ID NO: 1314 - RNA, 66 nt, synthetic construct
  misc_feature 1..66: note = Q07325_1-22
  source 1..66: mol_type = other RNA
atgaagaaaagcggcgtgctgttcctcctggggatcattcttctggtcctcatcggagttcagggc

SEQ ID NO: 1315 - RNA, 66 nt, synthetic construct
  misc_feature 1..66: note = P04156_1-22
  source 1..66: mol_type = other RNA
atggccaacctgggctgctggatgctcgtgctgttcgtcgctacctggagcgaccttgggctgtgt

SEQ ID NO: 1316 - RNA, 66 nt, synthetic construct
  misc_feature 1..66: note = P31785_1-22
  source 1..66: mol_type = other RNA
atgctgaagcccagcctccctttcacctccctgctttttctgcagctcccgctgcttggcgtgggg

SEQ ID NO: 1317 - RNA, 69 nt, synthetic construct
  misc_feature 1..69: note = P01579_1-23
  source 1..69: mol_type = other RNA
atgaagtacaccagctatatcctggccttccagctctgcattgtgctgggctcccttgggtgttactgc

SEQ ID NO: 1318 - RNA, 69 nt, synthetic construct
  misc_feature 1..69: note = P23229_1-23
  source 1..69: mol_type = other RNA
atggccgctgccggccagctgtgcctcctgtaccttagcgcggggctgctctccagactgggagctgcc

SEQ ID NO: 1319 - RNA, 69 nt, synthetic construct
  misc_feature 1..69: note = O60494_1-23
  source 1..69: mol_type = other RNA
atgatgaacatgagcctgcccttcctctggtccctgcttaccctgctcatctttgccgaggtgaatggc

SEQ ID NO: 1320 - RNA, 69 nt, synthetic construct
  misc_feature 1..69: note = P08575_1-23
  source 1..69: mol_type = other RNA
atgtacctgtggctcaagctgcttgccttcggctttgctttcctggacaccgaggtgtttgtcacaggg

SEQ ID NO: 1321 - RNA, 69 nt, synthetic construct
  misc_feature 1..69: note = Q8IWY4_1-23
  source 1..69: mol_type = other RNA
atgggcgccgctgccgtgagatggcacctgtgcgtcctcctggcgcttgggacccggggacgcctggct

SEQ ID NO: 1322 - RNA, 69 nt, synthetic construct
  misc_feature 1..69: note = Q08431_1-23
  source 1..69: mol_type = other RNA
atgcccagacctcggctgctcgccgctctgtgcggcgcccttctgtgtgcgccgagcctcctggtggct

SEQ ID NO: 1323 - RNA, 69 nt, synthetic construct
  misc_feature 1..69: note = Q99665_1-23
  source 1..69: mol_type = other RNA
atggcccacaccttcagaggctgcagcctggcttttatgttcatcattacatggctcctgatcaaggcc

SEQ ID NO: 1324 - RNA, 69 nt, synthetic construct
  misc_feature 1..69: note = Q6Q8B3_1-23
  source 1..69: mol_type = other RNA
atgagcgcccccagactgctcatctccattatcattatggtgtctgctagctcctctagctgcatgggc

SEQ ID NO: 1325 - RNA, 69 nt, synthetic construct
  misc_feature 1..69: note = Q07011_1-23
  source 1..69: mol_type = other RNA
atgggcaacagctgctacaatatcgtggccaccctgctcctggtccttaacttcgagagaacacggtcc

SEQ ID NO: 1326 - RNA, 69 nt, synthetic construct
  misc_feature 1..69: note = Q8NHL6_1-23
  source 1..69: mol_type = other RNA
atgacccccatcctgacagtgctcatttgcctgggccttagcctggggcctagaacgcacgtccaggcc

SEQ ID NO: 1327 - RNA, 69 nt, synthetic construct
  misc_feature 1..69: note = P36894_1-23
  source 1..69: mol_type = other RNA
atgccccagctgtacatctatattagactcctgggcgcctaccttttcatcattagccgggtgcaaggg

SEQ ID NO: 1328 - RNA, 69 nt, synthetic construct
  misc_feature 1..69: note = Q16552_1-23
  source 1..69: mol_type = other RNA
atgacccccggcaagacaagcctggtgtccctcctgcttctgctctctctggaggccatcgtcaaagct

SEQ ID NO: 1329 - RNA, 69 nt, synthetic construct
  misc_feature 1..69: note = P42081_1-23
  source 1..69: mol_type = other RNA
atggacccccagtgcaccatgggcctgagcaacatcctcttcgtgatggcctttctgctttccggggct

SEQ ID NO: 1330 - RNA, 69 nt, synthetic construct
  misc_feature 1..69: note = P43121_1-23
  source 1..69: mol_type = other RNA
atgggcctgcccagactcgtgtgcgccttcctgcttgctgcctgttgctgttgccctcgggtcgcgggg

SEQ ID NO: 1331 - RNA, 69 nt, synthetic construct
  misc_feature 1..69: note = O00206_1-23
  source 1..69: mol_type = other RNA
atgatgagcgcctccagactggctggcaccctcatccccgccatggcgttcctgtcttgcgtgcggcct

SEQ ID NO: 1332 - RNA, 69 nt, synthetic construct
  misc_feature 1..69: note = P42701_1-23
  source 1..69: mol_type = other RNA
atggagcccctggtgacctgggtcgttcctctcctgttcctttttctgctcagcagacagggcgccgct

SEQ ID NO: 1333 - RNA, 72 nt, synthetic construct
  misc_feature 1..72: note = P06729_1-24
  source 1..72: mol_type = other RNA
atgagcttcccctgcaagtttgtggcctccttcctgctcatctttaacgtctctagcaaaggcgctgtttcc

SEQ ID NO: 1334 - RNA, 72 nt, synthetic construct
  misc_feature 1..72: note = P15328_1-24
  source 1..72: mol_type = other RNA
atggcccagagaatgaccacacaactgctcctgcttctggtgtgggtcgctgttgtgggcgaggcccagacg

SEQ ID NO: 1335 - RNA, 72 nt, synthetic construct
  misc_feature 1..72: note = P05112_1-24
  source 1..72: mol_type = other RNA
atgggcctgaccagccagctcctgccccctcttttctttctgctcgcctgcgctgggaacttcgtgcacgga

SEQ ID NO: 1336 - RNA, 72 nt, synthetic construct
  misc_feature 1..72: note = P06127_1-24
  source 1..72: mol_type = other RNA
atgcccatgggcagcctgcagcctctcgccaccctgtaccttctggggatgctcgtggcttcctgcctggga

SEQ ID NO: 1337 - RNA, 72 nt, synthetic construct
  misc_feature 1..72: note = P32248_1-24
  source 1..72: mol_type = other RNA
atggacctgggcaagcccatgaaaagcgtgctcgtcgttgccctgcttgtgatcttccaggtgtgcctgtgt

SEQ ID NO: 1338 - RNA, 72 nt, synthetic construct
  misc_feature 1..72: note = Q7Z7D3_1-24
  source 1..72: mol_type = other RNA
atggccagcctgggccagatcctcttctggtccattatctctattatcattatcctggctggggccatcgcg

SEQ ID NO: 1339 - RNA, 72 nt, synthetic construct
  misc_feature 1..72: note = P54756_1-24
  source 1..72: mol_type = other RNA
atgagaggcagcgggccccggggagccggccgcagacggcctccgtccgggggaggcgacacccccatcaca

SEQ ID NO: 1340 - RNA, 72 nt, synthetic construct
  misc_feature 1..72: note = Q92823_1-24
  source 1..72: mol_type = other RNA
atgcagctgaagatcatgcccaaaaagaaaagactcagcgccggccgggtgcctctgattcttttcctgtgc

SEQ ID NO: 1341 - RNA, 72 nt, synthetic construct
  misc_feature 1..72: note = P19320_1-24
  source 1..72: mol_type = other RNA
atgcccggcaagatggtggtcatcctgggggccagcaacattctctggatcatgttcgctgcctcccaggcg

SEQ ID NO: 1342 - RNA, 72 nt, synthetic construct
  misc_feature 1..72: note = Q86UN2_1-24
  source 1..72: mol_type = other RNA
atgctgagaaagggctgctgtgtggagctcctgcttctgctcgtcgccgctgaactgccccttgggggaggc

SEQ ID NO: 1343 - RNA, 75 nt, synthetic construct
  misc_feature 1..75: note = P33151_1-25
  source 1..75: mol_type = other RNA
atgcagagactgatgatgctcctggccaccagcggcgcttgccttgggctgctcgccgtggcggctgtcgccgcc

SEQ ID NO: 1344 - RNA, 75 nt, synthetic construct
  misc_feature 1..75: note = P17813_1-25
  source 1..75: mol_type = other RNA
atggacagaggcaccctgcccctcgccgtggctctgcttctggccagctgctccctctctcctacaagcctggcg

SEQ ID NO: 1345 - RNA, 75 nt, synthetic construct
  misc_feature 1..75: note = P25445_1-25
  source 1..75: mol_type = other RNA
atgctgggcatctggaccctcctgccccttgtgctgacaagcgtcgccagactctcctctaagagcgttaacgct

SEQ ID NO: 1346 - RNA, 75 nt, synthetic construct
  misc_feature 1..75: note = P01730_1-25
  source 1..75: mol_type = other RNA
atgaacagaggcgtgcccttccggcacctcctgctggtccttcagctggccctcctgcctgctgccacccaaggg

SEQ ID NO: 1347 - RNA, 75 nt, synthetic construct
  misc_feature 1..75: note = Q685J3_1-25
  source 1..75: mol_type = other RNA
atgcccagacctggcaccatggccctgtgcctcctgacacttgtgctgagcctcctgccgccccaggctgccgcg

SEQ ID NO: 1348 - RNA, 75 nt, synthetic construct
  misc_feature 1..75: note = P17787_1-25
  source 1..75: mol_type = other RNA
atggccagacggtgcggccccgtggctctgctcctggggttcggacttctgcgcctctgtagcggcgtctggggg

SEQ ID NO: 1349 - RNA, 75 nt, synthetic construct
  misc_feature 1..75: note = Q6UQ28_1-25
  source 1..75: mol_type = other RNA
atggccgtgttccacgacatgctgctccagcccctgggcatgtttctttgcctgagcctccaactgtcctctgct

SEQ ID NO: 1350 - RNA, 75 nt, synthetic construct
  misc_feature 1..75: note = P13987_1-25
  source 1..75: mol_type = other RNA
atgggcatccagggagggagcgttctgttcggcctcctgcttgtcctggccgtgttttgccactccgggcattct

SEQ ID NO: 1351 - RNA, 75 nt, synthetic construct
  misc_feature 1..75: note = P10721_1-25
  source 1..75: mol_type = other RNA
atgagaggcgcccgcggggcttgggacttcctgtgcgtgctcctgcttctgctccgggtccagaccggaagctcc

SEQ ID NO: 1352 - RNA, 75 nt, synthetic construct
  misc_feature 1..75: note = P12319_1-25
  source 1..75: mol_type = other RNA
atggcccccgctatggagagccctaccctgctctgcgtggccctgcttttctttgcgccggacggcgtcctggct

SEQ ID NO: 1353 - RNA, 78 nt, synthetic construct
  misc_feature 1..78: note = Q9BZR6_1-26
  source 1..78: mol_type = other RNA
atgaagagagccagcgctggcgggtcccggctgctcgcctgggtgctgtggcttcaggcgtggcaagtcgctgccccc

SEQ ID NO: 1354 - RNA, 78 nt, synthetic construct
  misc_feature 1..78: note = P25063_1-26
  source 1..78: mol_type = other RNA
atgggcagagccatggtggctcggctggggctcggactgcttctgctcgccctgcttctgcccacccagatctacagc

SEQ ID NO: 1355 - RNA, 78 nt, synthetic construct
  misc_feature 1..78: note = Q9NR97_1-26
  source 1..78: mol_type = other RNA
atggagaacatgttcctgcagagctccatgctgacctgcatctttctccttatttctggcagctgtgaactgtgcgcc

SEQ ID NO: 1356 - RNA, 78 nt, synthetic construct
  misc_feature 1..78: note = Q8N131_1-26
  source 1..78: mol_type = other RNA
atgggcctgggggccagaggagcttgggccgcgctcctgcttggcaccctccaggtgctggctctgcttggggccgcc

SEQ ID NO: 1357 - RNA, 78 nt, synthetic construct
  misc_feature 1..78: note = P49771_1-26
  source 1..78: mol_type = other RNA
atgaccgtgctggcccccgcttggagccctacaacgtacctcctgcttctgctcctgctttcctctggcctgagcggg

SEQ ID NO: 1358 - RNA, 78 nt, synthetic construct
  misc_feature 1..78: note = P02679_1-26
  source 1..78: mol_type = other RNA
atgagctggtccctgcaccccagaaacctcatcctgtacttctatgcccttctgtttctcagctctacctgcgtggct

SEQ ID NO: 1359 - RNA, 78 nt, synthetic construct
  misc_feature 1..78: note = P14784_1-26
  source 1..78: mol_type = other RNA
atggccgctcccgccctgagctggagactccctctgcttatcctgctcctgccgcttgcgacctcctgggcttctgcc

SEQ ID NO: 1360 - RNA, 81 nt, synthetic construct
  misc_feature 1..81: note = P05362_1-27
  source 1..81: mol_type = other RNA
atggcccccagctcccctagaccggctctgcccgccctcctggtgcttctgggcgctctcttccctgggcccggaaacgcg

SEQ ID NO: 1361 - RNA, 81 nt, synthetic construct
  misc_feature 1..81: note = Q13740_1-27
  source 1..81: mol_type = other RNA
atggagagcaagggcgcctcctcttgcagactcctgttctgtctgcttatcagcgctaccgtgtttcggcccgggctggga

SEQ ID NO: 1362 - RNA, 84 nt, synthetic construct
  misc_feature 1..84: note = Q13443_1-28
  source 1..84: mol_type = other RNA
atgggcagcggggccagattcccctccggaaccctgcgggtgcgctggctcctgcttctgggcctcgtcgggcctgttctggga

SEQ ID NO: 1363 - RNA, 84 nt, synthetic construct
  misc_feature 1..84: note = P14151_1-28
  source 1..84: mol_type = other RNA
atgatcttcccctggaagtgccagagcacccaaagagacctgtggaacatttttaaactctggggctggacaatgctgtgttgc

SEQ ID NO: 1364 - RNA, 84 nt, synthetic construct
  misc_feature 1..84: note = P56199_1-28
  source 1..84: mol_type = other RNA
atggcccccagacctcgggctcgcccgggcgtggccgtcgcgtgctgttggctgctcaccgttgtgctgagatgctgtgtgagc

SEQ ID NO: 1365 - RNA, 84 nt, synthetic construct
  misc_feature 1..84: note = P11279_1-28
  source 1..84: mol_type = other RNA
atggccgctcccggcagcgccagacggcctctgctcctgcttctgctcctgcttctgctcgggctgatgcactgcgcgtccgct

SEQ ID NO: 1366 - RNA, 84 nt, synthetic construct
  misc_feature 1..84: note = P40259_1-28
  source 1..84: mol_type = other RNA
atggccagactggctctcagccccgtgccttcccactggatggtcgccctgcttctgctcctgtctgcggagccggttcccgct

SEQ ID NO: 1367 - RNA, 84 nt, synthetic construct
  misc_feature 1..84: note = P43681_1-28
  source 1..84: mol_type = other RNA
atggagctgggcgggcccggagcccctagactcctgccgccccttctgctcctgcttggcaccgggctgctccgggctagctcc

SEQ ID NO: 1368 - RNA, 84 nt, synthetic construct
  misc_feature 1..84: note = P18627_1-28
  source 1..84: mol_type = other RNA
atgtgggaggcccagttcctgggcctcctgtttcttcaacccctgtgggtggctcctgtcaagccgctccagcccggggccgaa

SEQ ID NO: 1369 - RNA, 84 nt, synthetic construct
  misc_feature 1..84: note = Q5ZPR3_1-28
  source 1..84: mol_type = other RNA
atgctgagacggcgcggcagccccgggatgggagtgcacgtcggcgccgctctcggggccctgtggttctgccttaccggagcg

SEQ ID NO: 1370 - RNA, 84 nt, synthetic construct
  misc_feature 1..84: note = P23415_1-28
  source 1..84: mol_type = other RNA
atgtacagcttcaacaccctgagactctatctgtgggagacaatcgtgtttttctcccttgccgcttctaaggaagccgaggcg

SEQ ID NO: 1371 - RNA, 84 nt, synthetic construct
  misc_feature 1..84: note = Q8TD46_1-28
  source 1..84: mol_type = other RNA
atgctgtgcccctggagaaccgccaacctcggcctgcttctgatcctcacaattttcctggtggctgccagctcctctctttgt

SEQ ID NO: 1372 - RNA, 87 nt, synthetic construct
  misc_feature 1..87: note = P17301_1-29
  source 1..87: mol_type = other RNA
atgggccccgagagaaccggggccgctcctctgccgctcctgcttgtgctggccctcagccagggaatcctgaactgctgtcttgcg

SEQ ID NO: 1373 - RNA, 87 nt, synthetic construct
  misc_feature 1..87: note = P12821_1-29
  source 1..87: mol_type = other RNA
atgggcgccgctagcgggagacggggacccggcctgctcctgcctcttccgctgctcctgcttctgccccctcagcccgccctcgcg

SEQ ID NO: 1374 - RNA, 87 nt, synthetic construct
  misc_feature 1..87: note = Q14118_1-29
  source 1..87: mol_type = other RNA
atgagaatgagcgtgggcctgtccctcctgcttcccctgtgggggcggaccttcctcctgcttctgtctgtcgttatggcccagagc

SEQ ID NO: 1375 - RNA, 87 nt, synthetic construct
  misc_feature 1..87: note = P05231_1-29
  source 1..87: mol_type = other RNA
atgaacagcttctccacctctgcctttggccccgtggctttcagcctggggctcctgcttgtcctgcctgccgcgtttccggctccc

SEQ ID NO: 1376 - RNA, 87 nt, synthetic construct
  misc_feature 1..87: note = O00602_1-29
  source 1..87: mol_type = other RNA
atggagctgagcggcgccaccatggctagagggctcgccgtgctgcttgtcctgttcctccacatcaagaacctgcccgcgcaggct

SEQ ID NO: 1377 - RNA, 87 nt, synthetic construct
  misc_feature 1..87: note = Q9Y6Q6_1-29
  source 1..87: mol_type = other RNA
atggcccccagagctcggcgcagacggcctctgttcgccctcctgcttctgtgcgcgctcctggctcgccttcaggtggccctgcaa

SEQ ID NO: 1378 - RNA, 87 nt, synthetic construct
  misc_feature 1..87: note = Q9ULI3_1-29
  source 1..87: mol_type = other RNA
atggccagccccagagcttcccggtggcctccgcccctcctcctgcttctgctccctctgcttctgctgccccctgccgcgcccggc

SEQ ID NO: 1379 - RNA, 90 nt, synthetic construct
  misc_feature 1..90: note = Q8NBP7_1-30
  source 1..90: mol_type = other RNA
atgggcaccgtgagctccagacggtcttggtggcccctgcctctcctgcttctgctcctgcttctgctcgggccggccggagctcgcgcc

SEQ ID NO: 1380 - RNA, 90 nt, synthetic construct
  misc_feature 1..90: note = P02675_1-30
  source 1..90: mol_type = other RNA
atgaagagaatggtgagctggtccttccacaaactgaagaccatgaaacatctcctgcttctgctcctgtgcgtctttcttgttaagtct

SEQ ID NO: 1381 - RNA, 90 nt, synthetic construct
  misc_feature 1..90: note = P06756_1-30
  source 1..90: mol_type = other RNA
atggccttccctcccagacggcgcctgagactcggcccgcgggggctgccccttctgctcagcggactgcttctgcctctctgccgcgct

SEQ ID NO: 1382 - RNA, 93 nt, synthetic construct
  misc_feature 1..93: note = O60609_1-31
  source 1..93: mol_type = other RNA
atggtgagacccctgaaccctcggccgctgccccctgtcgttctcatgcttctgctcctgcttccccctagccccctgcctctcgccgctggc

SEQ ID NO: 1383 - RNA, 93 nt, synthetic construct
  misc_feature 1..93: note = P50895_1-31
  source 1..93: mol_type = other RNA
atggagccccctgacgccccggctcaggccagaggcgcgccccggctgctcctgcttgctgtgctgctcgccgcccaccctgatgctcaagcc

SEQ ID NO: 1384 - RNA, 93 nt, synthetic construct
  misc_feature 1..93: note = P28906_1-31
  source 1..93: mol_type = other RNA
atgctggtgagacggggcgcccgcgctgggcccagaatgcctcggggatggaccgccctctgcctgcttagcctgctcccgtccggcttcatg

SEQ ID NO: 1385 - RNA, 93 nt, synthetic construct
  misc_feature 1..93: note = P08514_1-31
  source 1..93: mol_type = other RNA
atggccagagctctgtgccccctccaggccctgtggcttctggagtgggtgctcctgcttctgggcccttgtgcggctccgcccgcctgggcc

SEQ ID NO: 1386 - RNA, 93 nt, synthetic construct
  misc_feature 1..93: note = P00742_1-31
  source 1..93: mol_type = other RNA
atgggcagacccctgcacctcgtgctgcttagcgcctccctggctgggctcctgcttctgggagagtctctcttcatccggcgcgaacaggcc

SEQ ID NO: 1387 - RNA, 96 nt, synthetic construct
  misc_feature 1..96: note = P26006_1-32
  source 1..96: mol_type = other RNA
atgggccccgggcctagcagagccccgcgggctccccgcctgatgctctgcgccctggcgcttatggtggctgccggaggctgtgtcgtttccgcc

SEQ ID NO: 1388 - RNA, 96 nt, synthetic construct
  misc_feature 1..96: note = P13726_1-32
  source 1..96: mol_type = other RNA
atggagacccccgcctggcctagagtgccgcggcccgaaacagctgtcgcccgcacgctgctcctgggctgggttttcgctcaggtggcgggggcc

SEQ ID NO: 1389 - RNA, 96 nt, synthetic construct
  misc_feature 1..96: note = P11912_1-32
  source 1..96: mol_type = other RNA
atgcccggcgggcctggagtgctgcaggccctcccggctaccatcttcctgctttttctgctcagcgccgtctacctgggccccgggtgccaagcg

SEQ ID NO: 1390 - RNA, 96 nt, synthetic construct
  misc_feature 1..96: note = Q9H6X2_1-32
  source 1..96: mol_type = other RNA
atggccaccgctgagagacgggccctgggcatcgggttccagtggctcagcctggcgacacttgtgctgatttgcgctggacaaggcgggcgcaga

SEQ ID NO: 1391 - RNA, 99 nt, synthetic construct
  misc_feature 1..99: note = Q8IWK6_1-33
  source 1..99: mol_type = other RNA
atggagccccctggcagacggcgcgggagagcccagccgcccctgctcctgcctcttagcctgctcgctctgcttgccctgctcggaggcgggggaggc

SEQ ID NO: 1392 - RNA, 99 nt, synthetic construct
  misc_feature 1..99: note = P58335_1-33
  source 1..99: mol_type = other RNA
atggtggccgagagaagccccgctcggtcccctggctcttggctgttcccggggctctggctgcttgtcctgagcggacccggcgggctcctgcgcgcc

SEQ ID NO: 1393 - RNA, 102 nt, synthetic construct
  misc_feature 1..102: note = P06731_1-34
  source 1..102: mol_type = other RNA
atggagagcccctccgcccctccgcacagatggtgcatcccctggcagcggctgctcctgaccgcttctcttctgacattctggaaccctcccacgaccgcc

SEQ ID NO: 1394 - RNA, 102 nt, synthetic construct
  misc_feature 1..102: note = P33681_1-34
  source 1..102: mol_type = other RNA
atgggccacaccagacggcaggggacaagcccctccaagtgcccttacctgaacttctttcaactcctggtgcttgccggactgtctcatttctgtagcggc

SEQ ID NO: 1395 - RNA, 105 nt, synthetic construct
  misc_feature 1..105: note = P38567_1-35
  source 1..105: mol_type = other RNA
atgggcgtgctgaagttcaaacacatctttttcagatcctttgtcaagagctctggggttagccagattgtgttcacctttctcctgatcccctgctgtcttaca

SEQ ID NO: 1396 - RNA, 105 nt, synthetic construct
  misc_feature 1..105: note = P16410_1-35
  source 1..105: mol_type = other RNA
atggcctgcctgggcttccagagacacaaggctcaactcaacctggccacccggacatggccctgtacgcttctgtttttcctcctgtttatccctgtgttctgc

SEQ ID NO: 1397 - RNA, 111 nt, synthetic construct
  misc_feature 1..111: note = P15814_1-37
  source 1..111: mol_type = other RNA
atgagacccggcaccgggcagggaggcctggaggcccctggggaaccgggacccaacctccggcaacgctggcctctgcttctgctcggcctggctgtggtcacacacggg

SEQ ID NO: 1398 - RNA, 114 nt, synthetic construct
  misc_feature 1..114: note = Q92956_1-38
  source 1..114: mol_type = other RNA
atggagccccctggcgactgggggccgcccccttggagaagcacccccaagacagatgtgctgcggctcgtcctgtaccttacgttcctgggagccccttgctatgctcccgcc

SEQ ID NO: 1399 - RNA, 123 nt, synthetic construct
  misc_feature 1..123: note = Q86VB7_1-41
  source 1..123: mol_type = other RNA
atgagcaagctgagaatggtgctcctggaggactccggctctgccgatttccggcgccactttgtcaaccttagccccttcaccatcacagttgtgctgctcctgtccgcttgctttgtgacg

SEQ ID NO: 1400 - RNA, 123 nt, synthetic construct
  misc_feature 1..123: note = P08648_1-41
  source 1..123: mol_type = other RNA
atgggcagcagaacccccgagtcccctctgcacgccgtgcagctccggtgggggccgcgcagacggccccctctgcttcccctgctcctgcttctgctccctccccctccgcgcgtcggaggc

SEQ ID NO: 1401 - RNA, 123 nt, synthetic construct
  misc_feature 1..123: note = P16109_1-41
  source 1..123: mol_type = other RNA
atggccaactgccagatcgctattctgtaccaaagattccagcgggtggtctttggcatcagccagctcctgtgtttctccgcccttatttctgagctgaccaatcagaaggaagttgcggct

SEQ ID NO: 1402 - RNA, 132 nt, synthetic construct
  misc_feature 1..132: note = O75326_1-44
  source 1..132: mol_type = other RNA
atgacccctcccccgcccggcagagccgctcctagcgcgccccgggcccgcgtgcctgggccccctgctagactgggactcccgctgcggcttcgcctgctcctgcttctgtgggccgccgctgcctccgct

SEQ ID NO: 1403 - RNA, 135 nt, synthetic construct
  misc_feature 1..135: note = Q8N2Q7_1-45
  source 1..135: mol_type = other RNA
atggccctgcccagatgcacctggcctaactacgtgtggcgggctgtcatggcctgtctcgttcaccgcggcctgggggcgccgcttacactgtgcatgctcggatgtctgcttcaggctggccatgtgctgagc

SEQ ID NO: 1404 - RNA, 138 nt, synthetic construct
  misc_feature 1..138: note = Q86UN3_1-46
  source 1..138: mol_type = other RNA
atgctgcccggcctcagacggctgcttcaggcccctgctagcgcctgcctgctcctgatgcttctggcgctcccgctggctgccccctcctgtcctatgctgtgcacctgttactctagccctcccacagtgtcctgc

SEQ ID NO: 1405 - RNA, 540 nt, synthetic construct
  misc_feature 1..540: note = A0A5B9
  source 1..540: mol_type = other RNA
atggacctgaagaacgtgtttccccctgaggtcgccgttttcgaaccgagcgaggctgaaatctcccacacccagaaagccacactcgtgtgcctggcgacgggcttctaccccgatcatgtggagctttcttggtgggtcaatgggaaggaagtgcacagcggagtttccaccgaccctcaacccctgaaagagcagcctgctctcaacgattctagatattgtctgagctcccggcttcgcgtgtctgccacattttggcagaatcccagaaaccatttccggtgccaggtccaattttacggcctgagcgagaatgacgaatggacccaggatcgcgccaagcctgtgacacagattgtttccgctgaggcctgggggagagctgactgtggattcaccagcgaatcttatcagcaaggcgtgctctccgccacaatcctgtacgagattctgctcgggaaagcgaccctgtatgccgtccttgtgagcgctctggtgctcatggccatggtcaagcggaaggattctcgcggatga

SEQ ID NO: 1406 - RNA, 465 nt, synthetic construct
  misc_feature 1..465: note = B7Z8K6
  source 1..465: mol_type = other RNA
atgagccagccccacaccaagccttccgtgttcgtcatgaaaaacggcacaaatgttgcctgcctggtgaaggagttttacccgaaagacatcagaattaacctcgtgtctagcaagaaaatcacggagttcgatcccgctattgtcatctccccttctgggaagtataatgccgtgaagctgggaaaatacgaagacagcaactccgttacctgttctgtgcaacatgataataagacagtccacagcaccgactttgaagtgaaaacagattccaccgaccatgttaagcccaaagagacagaaaacaccaagcagcctagcaagtcttgccacaaacccaaggcgattgtgcatacggagaaagtcaatatgatgtcccttaccgtgctgggcctccggatgctgttcgctaagacagtggccgtcaactttcttctgaccgccaaactcttctttctgtga

SEQ ID NO: 1407 - RNA, 645 nt, synthetic construct
  misc_feature 1..645: note = B9A064
  source 1..645: mol_type = other RNA
atgagacccaagaccggccaggtggggtgcgagacacctgaggaactgggaccgggcccccggcaacgctggcctctcctgcttctggggctcgccatggtcgctcacggactgcttagacccatggttgcccctcagagcggcgaccccgatcctggggcgtccgtgggatctagccggtcctctctgcgcagcctctggggcagactgctgctccagccgtctccccagcgggctgaccctcgctgttggcccagaggcttctggtccgaacctcaaagcctgtgctacgtgtttgggacgggaaccaaagtcacagtgcttggccagcccaaggccaacccgaccgttacactgttccctccctccagcgaggaactccaggccaataaagctaccctggtgtgtcttatctctgatttttatcctggggccgtcacagtggcttggaaggccgacggatcccccgttaaagcgggcgtggagaccacgaagcccagcaagcagtctaacaataaatacgccgcttccagctatctgtctctcacccctgagcaatggaagtcccatcggagctactcctgccaggtcacacacgaagggtctaccgtggagaaaacagtggccccgaccgaatgtagctga

SEQ ID NO: 1408 - RNA, 2520 nt, synthetic construct
  misc_feature 1..2520: note = O00206
  source 1..2520: mol_type = other RNA
atgatgagcgcctccagactggctggcaccctcatccccgccatggcgttcctgtcttgcgtgcggcctgagagctgggaaccgtgtgtcgaggttgtgcccaacattacataccagtgcatggaacttaatttttataagatccctgacaacctgcccttctccacgaaaaatctcgatctgtcttttaaccctcttcgccacctggggagctactccttcttttctttccccgagctccaagtgctggacctgagcagatgtgaaattcagaccatcgaggatggagcttatcagtccctcagccatctgtctacacttattctgaccggcaatcctatccagtccctcgccctgggggcctttagcggactttcttccctgcaaaagctcgtcgctgtggagacaaacctggccagcctggaaaatttcccgatcggccacctcaaaaccctgaaggagcttaacgttgctcataatctgattcagtcttttaaactccccgaatacttctccaacctgacaaatcttgagcacctggacctcagctccaacaagatccagtctatttattgcaccgatctgcgggtgctgcatcagatgcctctcctgaatcttagcctggacctctccctgaaccccatgaattttatccaacctggggccttcaaggagattcgccttcacaaactgacgctcagaaacaactttgatagcctgaatgtcatgaagacctgtatccagggactggcgggcctcgaagtgcaccggctggttcttggcgagttccgcaacgaagggaatctggagaaattcgacaagtctgccctcgaaggactgtgcaacctgacaattgaggagtttagacttgcttacctcgattattacctggacgatatcatcgacctgttcaattgtctcaccaacgtgtccagcttttctctggtcagcgtgacaattgaacgggtgaaagatttctcctacaattttggctggcagcatcttgagctggtcaactgcaagttcgggcagtttcccaccctcaagctgaaatctctgaagcgccttacgttcacaagcaataaaggaggcaacgccttttccgaagttgacctcccgagcctggagttcctggacctctctagaaatgggctgtcctttaagggatgttgcagccaatctgatttcggcaccacatcccttaaatatctggacctcagctttaacggcgtgatcaccatgtcctctaatttcctggggctggaacagcttgagcacctcgatttccagcatagcaacctgaagcaaatgtccgagttttctgtgttcctgagcctccggaatctgatttaccttgacatctcccacacccacacacgcgtcgcttttaacggaattttcaacggcctgagctctctcgaagtgctgaaaatggccggaaattcctttcaggagaacttcctgcctgatatctttacggaacttagaaatctcaccttcctggacctgagccagtgtcagctcgagcaactgtctcccacagcgtttaactcccttagctctctgcaggttctcaatatgagccataacaatttcttttccctggataccttcccttataagtgcctgaacagccttcaggtgctggactactctctcaatcacatcatgacatccaagaaacaggaactgcaacattttcccagctccctcgccttcctgaaccttacccagaatgatttcgcttgcacgtgtgagcaccagtcttttctgcagtggattaaggaccaacggcagctcctggtcgaggtggaacgcatggagtgcgccacacccagcgataaacaggggatgcctgttctgtcccttaacatcacctgtcagatgaataagaccattatcggcgtgtctgtcctgagcgtgctcgtcgtgtccgttgtggctgtcctggtgtataaattctactttcatctcatgctgcttgccgggtgcattaagtatggaagaggcgaaaacatctacgacgccttcgttatctactctagccaagacgaggattgggtgcggaatgagctggtcaagaacctcgaagagggcgtgccgccctttcagctgtgtctgcactatagagacttcattcctggggtggctatcgcggccaacattatccacgaaggatttcataaatcccgcaaggttattgtcgtggtgagccagcacttcatccaatctcggtggtgcatttttgagtacgaaatcgctcagacatggcagttcctttccagcagagccggcatcatttttatcgtcctgcagaaagtggagaagaccctcctgcgccaacaggttgagctctatcggctgctttctagaaatacatacctggaatgggaggattccgtgctggggcgccatattttctggcggagactccgcaaagccctgcttgacggaaagagctggaaccccgaaggcacggtcgggaccggctgtaattggcaggaggctacatctatctga

SEQ ID NO: 1409 - RNA, 1377 nt, synthetic construct
  misc_feature 1..1377: note = P01730
  source 1..1377: mol_type = other RNA
atgaacagaggcgtgcccttccggcatctgctcctggtccttcagctggccctcctgcctgctgccacccaagggaagaaagttgtgcttggaaagaaaggcgacacagtggagctgacgtgcaccgcgagccagaagaaatccatccagtttcactggaaaaattctaaccagattaagatcctcgggaatcaaggcagcttcctgacaaaaggaccgtccaagctgaacgatcgcgctgactctagacggagcctctgggatcaggggaattttcccctgattatcaaaaaccttaagattgaagactccgatacctacatctgtgaggtcgaagaccagaaagaggaagtgcagctgctcgttttcggactgacagccaattctgatacccaccttctgcaaggccagagcctcacactgaccctggagtcccctcccggcagctctccttccgtgcagtgccgcagccccagagggaagaacatccagggaggcaagacgctctctgtctcccaactggagcttcaggacagcgggacctggacatgtaccgtgctgcagaatcaaaagaaggttgaatttaaaattgatatcgtggtcctcgccttccagaaggcttcttccattgtgtataaaaaggagggagaacaggtggagtttagcttccctctggcctttacagtcgagaaacttaccggctccggggaactgtggtggcaggctgagcgggcctctagctccaagagctggatcacgttcgacctcaagaacaaagaagtttctgtgaagcgcgtgacacaagatccgaaactgcagatgggaaagaaactgcccctccatctgacccttcctcaggcgctgccccagtacgccggctccggcaatctcacactggctcttgaggccaagaccgggaagctgcaccaagaagtcaacctcgtggttatgagagctacccagctgcagaaaaatctgacatgcgaggtgtggggacctacgagccccaagctcatgctgtctcttaaactggagaacaaggaagccaaagtcagcaagcgggagaaggcggtgtgggttctcaatccggaagccggcatgtggcagtgtctgctgtccgactctgggcaagtgcttctcgagagcaacattaaagtcctgcctacctggtccacacccgtgcagcctatggctctgatcgtcctcggaggcgtggccgggctgcttctgtttattggactcggcatcttcttttgcgttcgctgtagacatcggcgcagacaggctgaacggatgagccagatcaagcgcctgctgtctgagaaaaagacctgccaatgtccccacagattccagaaaacatgctcccccatttga

SEQ ID NO: 1410 - RNA, 537 nt, synthetic construct
  misc_feature 1..537: note = P01850
  source 1..537: mol_type = other RNA
atggaggacctgaacaaggtgtttccccctgaagtcgccgttttcgagccgagcgaagctgagatctcccacacccagaaagccacactcgtgtgcctggcgacgggcttctttcccgatcatgtggaactttcttggtgggtcaatgggaaggaggtgcacagcggagtttccaccgaccctcaacccctgaaagagcagcctgctctcaacgattctagatactgtctgagctcccggcttcgcgtgtctgccacattctggcagaatcccagaaaccattttcggtgccaggtccaattctatggcctgagcgaaaatgacgagtggacccaggatcgcgccaagcctgtgacacagattgtttccgctgaagcctgggggagagctgactgtggatttaccagcgtgtcttaccagcaaggcgtcctctccgccacaatcctgtatgagattctgctcgggaaagcgaccctgtacgccgtgcttgtgagcgctctggtcctcatggccatggttaagcggaaggatttctga

SEQ ID NO: 1411 - RNA, 624 nt, synthetic construct
  misc_feature 1..624: note = P07766
  source 1..624: mol_type = other RNA
atgcagagcggcacccactggagagtgctggggctctgcctgctttccgtcggagtttggggccaagacgggaacgaggaaatgggaggcatcacacagacgccctacaaggtgtctattagcgggaccacagtgatcctgacctgtcctcagtatccgggatccgagattctctggcagcataatgataaaaacatcggcggcgacgaagatgacaagaatattgggtctgatgaggaccacctgagccttaaagagttctccgaactggagcaatctggatactatgtctgctacccccggggcagcaagcctgaagatgccaacttttatctctacctgcgcgctagagtgtgtgagaattgcatggaaatggacgttatgtccgtggccacaatcgtcatcgtggatatttgtatcaccgggggactgctcctgcttgtttattactggagcaaaaaccggaaggcgaaggctaaacccgtgacacgcggcgccggggccggaggcagacagcggggccagaataaggagcgccctccccctgtcccgaaccccgactacgagcctattagaaaagggcagcgggatctgtattctggactcaatcaacgcagaatctga

SEQ ID NO: 1412 - RNA, 3915 nt, synthetic construct
  misc_feature 1..3915: note = P08575
  source 1..3915: mol_type = other RNA
atgtacctgtggctcaagctgcttgccttcggctttgctttcctggacaccgaggtgtttgtcacagggcagagccccacgccttccccgaccggactcacaaccgccaaaatgccctctgttcctctgagctccgatccccttcctacacacaccacagcgttctctcccgctagcacctttgaaagagagaacgacttctccgaaacgaccacatctctgagccctgataatacctccacacaagtgagcccggactctctcgataacgcctccgcctttaataccacgggcgtgagctctgtccagacaccccatctgcctacccacgctgactcccagacacccagcgccgggaccgatacccagacattctctggatccgctgccaacgcgaagctgaatcctacgcccggcagcaacgccatctccgacgtgccgggggagcggtctaccgctagcacatttcctaccgatcccgtttcccctctcacaaccacgctgagccttgcccatcactcttccgctgccctgcccgcgcgcacaagcaataccaccattacagccaacacctctgacgcttatctcaatgccagcgaaacaacgaccctgtccccctctggaagcgctgtgatctccacaaccacaattgccaccacgcctagcaaaccgacctgcgatgagaagtacgccaacatcacagtcgactatctttacaataaagagaccaagctgttcacagctaagctcaacgtgaatgaaaacgttgagtgtggcaataatacctgcacgaacaacgaagtgcataacctgacagagtgtaaaaatgcgtctgtctccattagccacaactcttgcaccgcccccgataagacactgatcctcgacgtgcctcccggcgtggagaaatttcaactgcacgactgtacccaggtcgaaaaggctgataccacaatctgccttaaatggaagaatattgagacgttcacctgtgacacacagaacatcacctatagatttcagtgcgggaatatgattttcgataacaaggaaatcaaactggagaatctcgaacctgagcatgagtacaagtgtgactccgaaattctgtataacaatcacaaattcacaaacgccagcaagatcattaaaaccgattttggatcccccggcgagccgcaaatcatcttctgccggtctgaagccgctcatcagggggttattacgtggaatcctccccagcgcagctttcacaacttcacactttgttacatcaaggagaccgaaaaagactgcctgaatctcgataagaacctgattaagtacgacctgcagaacctcaaaccttataccaagtacgtgctgtcccttcacgcctatatcattgcgaaagtgcaaagaaatggatctgctgccatgtgccattttacaaccaagagcgctcccccttcccaggtctggaacatgacagtgagcatgacgtctgataattccatgcacgttaaatgtcggcccccgcgcgacagaaacggccctcatgagcggtaccacctggaggtggaagccgggaataccctcgtccgcaacgagagccataagaattgcgatttcagagtgaaggacctgcagtattctacagactacacctttaaagcctatttccacaacggagattaccccggcgaaccctttatccttcaccattccacaagctacaattctaaggctctgatcgccttcctcgcgtttctgattatcgttaccagcattgccctgctcgtggtcctgtataaaatctacgaccttcacaagaaacggtcctgtaacctggatgagcaacaggaactcgtggagcgcgacgatgagaagcagctgatgaatgtcgaacctattcatgctgacatcctgcttgagacgtataagagaaaaatcgccgatgaaggccgcctcttcctggctgagtttcagagcattccgcgggtgttctctaagttccccatcaaagaggccagaaagccttttaaccaaaataaaaaccggtacgttgacattctgccctatgattacaatagagtggaactctccgagatcaacggggacgcgggaagcaactatattaatgcctcctacatcgatggcttcaaggaacctcgcaagtacattgctgcccaggggccccgggacgagaccgtcgatgacttttggagaatgatctgggaacagaaagctacagtgatcgttatggtgacccgctgcgaggagggaaaccggaataagtgtgccgaatattggccttctatggaggaaggcacaagagccttcggggacgtcgtggtgaaaattaaccagcacaagcgctgccccgattacatcattcaaaaactgaatatcgttaacaagaaagagaaggctaccggacgggaagtcacacacattcagtttaccagctggccggaccatggcgtgcctgaggatccccaccttctgctcaagctgagacgccgggtgaatgcgttctccaactttttctctggccctatcgtcgtgcattgtagcgccggggttggaagaacgggcacatatatcgggattgacgctatgctggagggacttgaagccgagaataaagtggatgtctacggctatgtggttaagctccgccggcagagatgcctgatggtgcaggtcgaagcccaatacatcctgattcaccaggctctcgtggagtataaccagtttggggaaaccgaggttaatctgtccgagcttcatccctacctgcacaacatgaaaaagcgggacccgccttctgaacccagccctctcgaggccgagttccagcgcctgccctcctacagaagctggcggacccaacacatcggcaatcaggaagagaacaaatctaagaatagaaactccaacgtgattccctatgattacaatcgcgtccctctgaagcatgaacttgagatgagcaaagaatctgagcacgactccgatgaaagctctgacgatgactccgatagcgaggagccgtccaagtatatcaacgcgagctttatcatgtcttactggaaacccgaagtgatgattgctgcccagggacctctcaaggagacaatcggcgacttctggcaaatgatttttcagcggaaagtgaaggtcatcgttatgctgaccgaactgaagcatggggaccaggagatttgtgcccagtattggggagaaggcaaacaaacgtacggggatatcgaggtggacctcaaggatacagacaaaagctccacctatacactgagagtgttcgagcttcgccactctaagagaaaagatagccggaccgtctaccagtaccagtatacaaattggtccgtggaacagctgcccgctgagcctaaggaactcatctctatgattcaagttgtgaagcagaaactgccccagaagaacagctccgagggaaataaacatcacaagtctacccctctgcttatccactgccgcgacggcagccagcaaacggggattttctgtgccctcctgaacctgctcgaatccgcggagaccgaggaagtcgtggatatctttcaggttgtgaaagctctgagaaaggcccggccgggcatggtcagcacattcgagcagtaccaatttctttatgacgtgattgcctctacctaccccgctcagaatggacaggttaaaaagaacaatcatcaggaagataagatcgagttcgacaacgaggtggataaagtcaagcaagacgccaattgcgtgaaccctctgggcgctcccgaaaaactccctgaggccaaggaacaggcggaggggtccgaacccacaagcggaaccgagggcccggagcactctgtgaatgggcctgcctcccccgctctgaaccagggaagctga

SEQ ID NO: 1413 - RNA, 765 nt, synthetic construct
  misc_feature 1..765: note = P08637
  source 1..765: mol_type = other RNA
atgtggcagctgctcctgcccaccgcccttctgctcctggtgagcgctggcatgagaacagaggaccttcctaaggccgtcgttttcctggaaccgcaatggtaccgggtgctcgagaaagattccgtgacgctgaagtgccagggggcgtattctcccgaagacaacagcacccagtggtttcacaatgagtccctgatctctagccaggcttcctcttacttcattgatgccgccacagtcgacgatagcggagaatatcgctgtcaaaccaacctctccacactgagcgaccctgtgcagcttgaggttcatatcggctggctgctcctgcaggctcccagatgggtgtttaaagaggaagatcctattcaccttcggtgccattcttggaagaataccgccctgcacaaagtcacatacctccagaacgggaagggacgcaagtatttccatcacaattccgacttttacatccccaaagctaccctgaaggatagcggctcttatttctgtagagggctgtttggatccaaaaacgtgagctctgagacggttaatattaccatcacacaaggcctcgccgtgtccaccatcagctccttctttcctccgggctaccaggtctctttctgcctggtgatggtgcttctgtttgcggtcgacacagggctctacttcagcgttaagaccaacattcggtccagcacgcgcgattggaaagaccacaagtttaagtggagaaaagatccccaggacaagtga

SEQ ID NO: 1414 - RNA, 663 nt, synthetic construct
  misc_feature 1..663: note = P10747
  source 1..663: mol_type = other RNA
atgctgagactcctgcttgccctgaacctcttccccagcatccaggtgaccggcaataagattctggtcaaacaatcccctatgcttgttgcttacgacaacgccgtgaatctgtcttgcaagtatagctacaacctcttttcccgggagttccgcgcgtctctgcacaaagggctggatagcgctgtggaagtctgtgtggtttatggaaattactcccagcagctccaggtgtattctaagacaggctttaactgcgacgggaaactgggaaatgagagcgtcacgttctaccttcaaaacctgtatgtgaatcagaccgatatctacttttgtaagattgaagttatgtacccgcccccttatctcgacaacgagaagtccaatggcacaatcattcatgtgaaagggaagcacctgtgccccagccctcttttccccggaccttctaaaccgttttgggtcctggtggtggtcggcggcgttctcgcctgttactccctgctggtgaccgtggccttcatcatcttttgggtcagaagcaagcggtctcgcctcctgcattccgattatatgaacatgacacccagacggcctgggcccacccgcaaacactaccagccttatgctcccccgagagacttcgccgcttaccggagctga

SEQ ID NO: 1415 - RNA, 681 nt, synthetic construct
  misc_feature 1..681: note = P11912
  source 1..681: mol_type = other RNA
atgcccggcgggcctggagtgctgcaggccctcccggctaccatcttcctgctttttctgctcagcgccgtctacctgggccccgggtgccaagcgctttggatgcacaaggttcctgcttccctgatggtgtctctcggagaggacgcccatttccagtgtccccacaacagctccaataacgccaatgtgacatggtggagagtcctgcatggcaactatacgtggcctcccgaatttctggggcctggagaggatccgaatggcaccctcattatccagaacgtgaataaatctcacggcgggatttacgtttgccgggtgcaggaaggaaacgagagctatcaacagtcctgtggcacatacctgcgcgtcagacagccccctccccggcctttccttgacatgggggaaggaaccaagaatcgcatcattacagctgagggcatcatcctgctcttttgcgccgtggttcccgggaccctgcttctgttcagaaaacggtggcagaacgagaagctcggactggatgctggcgacgaatatgaggatgaaaatctgtacgagggcctcaacctggacgattgttctatgtatgaggacattagccgcgggcttcaaggaacataccaggatgtgggctccctgaatatcggggacgtccagctcgaaaaaccgtga

SEQ ID NO: 1416 - RNA, 1671 nt, synthetic construct
  misc_feature 1..1671: note = P15391
  source 1..1671: mol_type = other RNA
atgccccctccgagactgctgttctttctgcttttcctgacccccatggaggtgcggcctgaggaacccctcgtcgttaaggtggaagagggcgacaacgccgtgctgcagtgccttaaagggacaagcgatggacctacgcaacagctgacctggtcccgcgaatctcccctcaagccttttctgaaactgagcctcggcctgccggggcttggaatccacatgagacccctggctatttggctctttatctttaatgtctcccagcagatgggcgggttctacctgtgtcaacctggacccccttctgagaaggcctggcagcccggctggacagtgaacgttgagggcagcggggaactttttcggtggaatgtgtccgacctgggaggcctcgggtgcggactgaaaaaccgctctagcgagggcccgtccagcccttctgggaagctgatgtcccccaagctctatgtctgggcgaaagatagacctgaaatttgggagggagagcctccctgtctgcccccgcgggacagccttaatcagtctctgtcccaggatctcaccatggctcccggcagcacactgtggctttcttgcggcgtgcctcccgactccgttagccgcgggcctctgtcctggacccatgtgcaccccaagggaccgaaatctctcctgagcctggaactcaaggatgacagacctgcccgggatatgtgggtcatggagacaggcctgcttctgccccgcgccaccgctcaagacgccgggaaatactattgtcatagaggaaacctcacgatgtccttccacctggaaatcaccgctcggcctgtgctttggcattggctgctccgcacaggcgggtggaaggtgagcgccgtcaccctggcgtacctgattttctgcctctgttctctggttggaatccttcacctccagagagccctcgtgctgcggcgcaagagaaaacggatgacagatcccaccagacgcttctttaaggtgacgcctcccccgggctccggccctcagaatcagtatgggaacgtcctgagccttcccacacccacctctggactcggccgggctcaaagatgggccgctgggctgggaggcacagcccctagctacgggaatccgtcctctgacgtgcaggcggatggcgccctgggaagccgctcccctcccggcgttgggcccgaggaagaggagggagaaggctatgaggaacctgacagcgaggaagactctgagttctacgagaacgattccaatctcgggcaggaccaactgagccaggatggatctggctacgaaaaccccgaggacgaacctcttgggcccgaggatgaagactcctttagcaatgctgagtcctatgagaacgaagatgaggaactgacccagccggtggcccggaccatggacttcctctctcctcacggcagcgcttgggatccctccagagaggccacatctctgggaagccagtcctacgaggacatgcgcggcatcctgtatgccgctcctcaacttcggagcattagagggcagcccggaccgaatcatgaagaggatgcggactcttacgaaaacatggacaaccctgatggccccgaccctgcctggggagggggcgggcgcatgggcacgtggtccacccggtga

SEQ ID NO: 1417 - RNA, 672 nt, synthetic construct
  misc_feature 1..672: note = P16410
  source 1..672: mol_type = other RNA
atggcctgcctgggcttccagagacacaaggctcaactcaacctggccacccggacatggccctgtacgcttctgtttttcctcctgtttatccctgtgttctgcaaagcgatgcatgtcgctcagccggccgttgtgcttgccagctcccgcgggattgcttcttttgtgtgtgagtacgccagccccggaaaggctaccgaagtcagagtgacagttctgcggcaggccgactcccaggtgaccgaggtctgcgcggccacatatatgatgggcaatgaactcaccttcctggatgactctatctgtacagggaccagctccggaaaccaagtgaatctgacgattcagggcctccgcgctatggataccgggctgtacatctgcaaagttgagcttatgtatcctcccccttactatctgggaattggcaacggcacacagatctacgtgatcgaccccgaaccttgtccggattctgactttctcctgtggattcttgccgctgtcagctccgggctgttcttttatagcttcctcctgaccgccgtgtctctgtccaagatgctcaaaaagagaagccccctgacaaccggagtgtacgtcaagatgcctcccacggagcctgagtgcgaaaaacagtttcaaccctacttcatcccgattaattga

SEQ ID NO: 1418 - RNA, 1419 nt, synthetic construct
  misc_feature 1..1419: note = P16671
  source 1..1419: mol_type = other RNA
atgggctgcgacagaaactgtgggctgatcgccggagctgtgattggcgccgtcctcgcggttttcgggggaatcctgatgcccgtgggcgatcttctgattcagaagaccatcaaaaagcaagtggtcctcgaggaagggacaattgcttttaaaaattgggtgaagacgggaaccgaggtttaccggcagttctggatctttgacgtgcagaaccctcaggaagtcatgatgaatagctccaacatccaagtgaaacagcgcggcccgtatacatacagagttcggttcctggccaaggagaatgtgacccaggatgccgaagacaacacagtctcttttcttcagcccaatggcgctattttcgagcctagcctgtccgtggggaccgaggccgataactttacagtgctcaatctggctgtcgccgcggcctctcacatctatcaaaaccagttcgttcagatgattctgaatagcctcatcaacaagtccaaatctagcatgtttcaggtgcgcaccctgagagaacttctgtggggataccgggaccccttcctctccctggtgccttatcccgtcacgaccacagtgggcctgttttacccttataataacaccgctgatggggtttacaaggtgttcaatggaaaagacaacattagcaaggtcgccatcattgatacatacaaaggcaagcgcaacctttcttattgggagtcccattgcgacatgatcaatgggaccgatgctgccagctttccgcccttcgtggaaaagtctcaagttctccagttcttttccagcgacatctgtagatctatttacgcggtgttcgagtccgatgtcaacctgaaaggaatccctgtgtatcggtttgtcctgcccagcaaggccttcgcttcccctgtggagaatcccgacaactactgcttttgtacggagaaaattatctctaagaattgcacaagctatggcgttctcgacatttccaaatgtaaggagggccgcccggtgtacatcagcctgcctcacttcctttatgcctctcccgatgtctccgaacctatcgacgggctgaaccccaatgaggaagaacatagaacctacctcgatattgagcccatcacaggatttaccctgcagttcgctaaacggcttcaagtgaacctgctcgttaagcctagcgaaaagattcaggtgctgaaaaatctgaagcgcaactacatcgtcccgattctctggctgaatgagaccggcacaatcggggacgaaaaagccaacatgtttagatctcaggtgacgggaaagatcaatcttctgggcctcattgagatgatcctgcttagcgtgggggttgtcatgttcgtggcctttatgatttcctattgcgcttgtcggtctaaaaccatcaagtga

SEQ ID NO: 1419 - RNA, 651 nt, synthetic construct
  misc_feature 1..651: note = P26718
  source 1..651: mol_type = other RNA
atgggctggatcagagggcggcgcagcagacactcctgggagatgtctgagttccataactacaatctggacctcaagaaaagcgatttttccacccggtggcagaagcaacgctgccccgtggtcaaatctaagtgtagagaaaacgccagccctttctttttctgctgttttattgctgttgccatgggaatccggttcattatcatggtggcgatttggtccgctgtgtttcttaattctctgttcaaccaggaagtccagatcccgctgacagagagctattgcggcccctgtcctaaaaattggatctgctacaagaacaattgttatcagtttttcgacgaatccaagaactggtacgagagccaagcctcttgcatgtcccagaatgccagcctcctgaaagtgtattctaaggaggatcaggaccttctgaaactcgttaagtcctaccactggatggggctggtgcatattcccacgaacggaagctggcagtgggaagatggctctatcctgtcccctaatctcctgaccattatcgagatgcaaaaaggggactgtgctctttatgccagctcctttaagggatacattgaaaactgctctacacccaatacctacatctgtatgcagcgcacagtctga

SEQ ID NO: 1420 - RNA, 261 nt, synthetic construct
  misc_feature 1..261: note = P30273
  source 1..261: mol_type = other RNA
atgatccccgccgtggtcctgctcctgcttctgctcgttgagcaggctgccgcgctgggcgaacctcaactttgctacattctggacgctatcctcttcctgtatgggattgtgctgaccctcctgtactgtagacttaagatccaggtgcggaaagccgccattacaagctatgagaagtccgatggagtctacacgggcctgtctacccgcaaccaggaaacatatgagaccctcaaacacgaaaagccgccccagtag

SEQ ID NO: 1421 - RNA, 1137 nt, synthetic construct
  misc_feature 1..1137: note = P32248
  source 1..1137: mol_type = other RNA
atggacctgggcaagcccatgaaaagcgtgctcgtcgttgccctgcttgtgatcttccaggtgtgcctgtgtcaagatgaggtcaccgacgattacattggggacaacacaacggtggattataccctctttgaatccctgtgctctaagaaagacgttagaaatttcaaggcttggtttcttcctatcatgtacagcattatctgtttcgtgggactgctcggcaacgggctggtcgtgctgacatatatttactttaaacggctcaagaccatgacagatacctatctgcttaatctggccgttgcggacatcctcttcctgcttacactgccgttttgggcttactccgccgccaagtcttgggtgttcggagtccacttttgcaaactcatcttcgctatttataagatgagctttttctccggcatgctgctgctcctgtgtatctctattgatcgctacgtggccatcgtgcaggctgtcagcgcccatagacaccgggcgcgcgttcttctgatttccaaactcagctgcgtggggatctggattctggccaccgtgctttctatccccgagctgctctactccgacctgcagagatctagctccgaacaggctatgcggtgtagcctgatcacggagcatgtcgaagcctttattaccatccaagtggctcagatggttattggattcctcgtgcctctgcttgccatgtctttctgctatctggtcatcattcgcacactcctgcaggcgagaaactttgagcggaataaggccatcaaagtgatcattgctgttgtggtcgtgttcatcgtctttcagcttccctacaacggcgtggttctggcccaaaccgtggctaatttcaacattacatccagcacctgtgagctctccaagcagctgaatatcgcctatgatgtcacgtactctctggcctgcgtgcgctgttgcgttaacccttttctctatgctttcattggcgtgaagtttagaaatgacctgttcaaactttttaaggatctggggtgcctcagccaggaacagctgcggcaatggtccagctgtcgccacatcagacggtcttccatgagcgtcgaggcggaaacaaccacaaccttctctccctga

SEQ ID NO: 1422 - RNA, 690 nt, synthetic construct
  misc_feature 1..690: note = P40259
  source 1..690: mol_type = other RNA
atggccagactggctctcagccccgtgccttcccactggatggtcgccctgcttctgctcctgtctgcggagccggttcccgctgcccggagcgaagaccgctacagaaaccctaagggctccgcctgctctcggatctggcagagcccccgcttcattgctagaaaacgggggtttaccgtgaagatgcattgttatatgaactccgcctctggaaatgtgagctggctttggaaacaagagatggatgaaaatcctcagcagctgaagctcgagaaaggccgcatggaagagtcccagaacgagagcctggctacactgacgatccaagggattagattcgaagacaatggaatctacttttgccagcagaagtgtaacaatacctctgaggtctatcagggctgcgggacagaactccgggtgatgggattctccaccctggcccaacttaagcagcgcaacacactgaaagatggcattatcatgatccagaccctcctgattatcctttttattatcgttcccattttcctgctcctggacaaggatgacagcaaagcgggcatggaggaggatcacacatacgaagggctggacatcgatcagaccgccacgtatgaggacattgtgaccctcagaacaggagaagtcaagtggtctgtgggcgagcatcctgggcaagaatga

SEQ ID NO: 1423 - RNA, 990 nt, synthetic construct
  misc_feature 1..990: note = P42081
  source 1..990: mol_type = other RNA
atggacccccagtgcaccatgggcctgagcaacatcctcttcgtgatggcctttctgctttccggggctgcccctctgaagattcaagcgtacttcaatgagacagctgatctcccgtgtcagtttgccaactctcagaatcagagcctgtccgaacttgtcgttttctggcaagaccaggagaacctggtgctcaatgaagtgtatctgggaaaagagaagtttgattctgtccacagcaaatacatgggcagaacgtccttcgactctgatagctggaccctgcggctccataacctgcagatcaaggacaaagggctttatcagtgcattatccaccataagaagcccacaggaatgattcgcatccaccaaatgaactccgaactgagcgtgctcgccaatttttctcagcctgagatcgttcccatttccaatatcaccgagaacgtgtacattaatctgacatgtagctctatccatggctatcctgaacccaaaaagatgtccgtccttctgagaaccaaaaacagcacaattgagtacgatggggtgatgcagaagtctcaggacaatgttaccgaactctatgatgtgtccatcagcctgtccgtctctttccctgacgtgacgagcaacatgaccatcttttgcattctggagacagataaaacccggctcctgtccagcccgttctctatcgagcttgaagacccccaacctccccctgatcacattccctggatcacagctgtgctgccgaccgtcattatctgtgttatggtgttttgcctcattctgtggaagtggaagaaaaagaaacgccctagaaattcctacaagtgtggaacgaacacaatggagcgggaagagagcgaacagaccaaaaagcgcgagaaaatccacatccccgagagatctgacgaagcccagcgggtgttcaagagctccaagacatctagctgcgacaaatccgatacctgtttttga

SEQ ID NO: 1424 - RNA, 1011 nt, synthetic construct
  misc_feature 1..1011: note = Q15762
  source 1..1011: mol_type = other RNA
atggactaccccaccctgctcctggcccttctgcacgtgtatagagctctctgcgaggaagtcctgtggcatacaagcgttcctttcgccgagaacatgtcccttgaatgtgtgtacccgtctatgggcatcctgacccaggtggagtggtttaagattgggacgcaacaggatagcatcgcgattttctcccccacacacggaatggtcatccggaaaccttatgctgaacgcgtgtactttctcaattctaccatggccagcaacaatatgacactgttctttagaaacgcctccgaggacgatgttggctattactcttgcagcctgtatacctacccccaggggacatggcagaaggtgattcaagtcgtgcagtccgacagcttcgaggctgccgttccttctaattcccatatcgtgagcgaacccggcaaaaacgtcaccctcacgtgtcagcctcagatgacctggccggtgcaagctgtgcggtgggagaagatccagccccgccagattgatctgcttacatactgcaatctggtccacggaagaaactttacctctaaattccctcggcagatcgtttccaattgtagccatgggcgctggtctgtgattgtgatccccgacgtcacagtgtccgatagcggactctatagatgctacctgcaagcctccgcgggcgaaaacgagacctttgttatgcggcttacggtggccgagggcaagacagacaatcagtataccctgttcgtcgctgggggaacagtgctcctgctgctctttgttatttctatcaccaccattatcgtgatcttcctgaaccgcagacggcgcagagaacggcgcgatctttttacagagagctgggacacgcagaaggcccctaataactacagatcccccattagcacctctcaaccgacaaatcagtccatggatgacacccgggaagatatctatgtcaactaccctacattcagcagacgccccaaaacccgggtgtga

SEQ ID NO: 1425 - RNA, 13482 nt, synthetic construct
  misc_feature 1..13482: note = Q685J3
  source 1..13482: mol_type = other RNA
atgcccagacctggcaccatggccctgtgcctcctgacccttgtgctgagcctcctgccgccccaggctgccgccgaacaagacctttccgtcaaccgggctgtttgggatgggggaggctgtatctctcagggggacgtgctgaatcgccagtgccagcaactcagccagcacgtgagaacgggatccgccgccaacaccgctaccggcaccacctctaccaatgtcgtggaacctcggatgtacctgagctgttccaccaaccccgaaatgacctctattgaaagctccgttacgagcgatacccctggggtgtcttccacccgcatgacccccaccgagagcagaaccacgtctgaatccaccagcgactctaccacactgttcccttccagcaccgaggatacctcctctccgaccacgcccgagggaaccgacgtccctatgagcacaccctccgaagagagcatctcttccaccatggcctttgtgagcacagctcctctcccctctttcgaagcctataccagcctgacgtacaaggttgatatgtccacaccgcttaccacctctacacaggcgagctccagccctaccacacccgagtctacgaccattcctaaatccacaaatagcgagggctctacacccctgacatccatgcccgccagcaccatgaaggtggcttcctctgaagccatcacgctcctgaccacacctgtcgagattagcaccccggtgacaatctccgctcaggcctctagctcccccaccacggcggaaggccctagcctttctaactccgcccccagcgggggatctacacctctgacccggatgcccctctccgtgatgctggtcgttagctctgaggctagcacactgtccaccaccccggccgctacaaatatccctgtgattacgagcaccgaagcctcttccagccccacaaccgccgagggcacatccatccctacctctacgtatacagaggggagcacacccctgacctccacccctgcttctaccatgcccgtggcgacaagcgaaatgtccacgctgtctattaccccggtcgacacaagcacccttgtgacaacctccacggagcctagctctctgcccaccacagccgaagctacctccatgctcacaagcaccctgtctgagggatccacaccccttaccaacatgcctgttagcacgatcctggtggcctcttccgaagccagcacaacctccaccattccggtcgatagcaaaacatttgtgaccacggcttctgaggccagctcctctcccacaaccgcggaggacacaagcatcgctacctccacaccttctgaaggcagcacacccctcacgtccatgcctgtttctaccacacccgtggccagctccgaggccagcaatctgtctaccacacctgtcgattccaagacccaagtgacgacaagcaccgaggcttcttcctcccctcccacagccgaggtcaactccatgcccacctctacccccagcgaagggtccacacctctgacgagcatgtctgtgtccaccatgcccgttgctagctctgaggccagcacactctccaccacaccggtggacacctctacgcctgtcacaaccagctccgaggcgtctagctccagcaccacacccgaaggaacctctattcctacatccacgcccagcgagggctccacacccctgacaaatatgcctgtgtctacccgccttgttgtgagctccgaagcctctacaaccagcacgaccccggctgattccaacacattcgtcaccacaagctctgaggcctcctcctctagcaccacagctgagggcacgagcatgcccacctctacatacagcgaaagagggaccaccatcacatccatgtctgtgagcacgaccctggtggcctccagcgaggcgtccacactctctaccacacctgttgacagcaatacccccgtcacgacatccaccgaagccacctctagctccacaaccgctgagggaacatctatgcctaccagcacgtatacagaaggctccacacccctgacaagcatgcctgtgaacaccacgcttgtggcctcttccgaggctagcaccctgtctacaaccccggtcgacacatccacccccgtgacaaccagcacggaggcctcttccagccctacaaccgccgatggggcttccatgcccaccagcacaccttctgaaggaagcacacccctcacatccatgccggtttctaaaacgctgctgaccagctccgaggcgtctacactcagcaccacacctctggacacctccacgcatatcaccacatctaccgaagccagctgctcccccacaaccacggagggcacaagcatgcccatttctaccccttccgaagggagcccccttctgacatctatccctgtgtccattaccccggtcaccagccccgaggcttccacactctctacgacccctgtggatagcaattcccccgttacaaccagcacagaggtgtcttccagccctacccccgccgaaggaacgtctatgccgacaagcacctactccgagggccggacccctctgacatctatgcccgtcagcaccacactggtggccacgtccgctatctctacccttagcacaacccctgttgacacatccacccccgtgacgaacagcaccgaagcccgctctagccctacaaccagcgagggcacatccatgcccacctctacaccgggggaaggaagcacccctctcacgtccatgcccgattctacaacccccgtcgtgagctccgaggcgagaaccctgagcgctacacctgtggacacgtctaccccggtcacaacctccacagaggccaccagctctcccacaaccgccgaaggcacgtccattcctaccagcacaccctctgaggggaccacacctctgacctccacgcccgttagccacacactcgtggctaactctgaagccagcaccctgtccacaacccctgtggatagcaatacgccgcttaccacatccaccgaggcgtctagcccgcctcccacagctgagggaacctccatgcctacatctacccccagcgaaggctccacgccgctgacacggatgcctgtctctaccaccatggtggccagctccgagacaagcaccctctctacaacgcccgccgacacctccacacccgttaccacatatagccaggcttcttccagctctaccacggccgatgggacctccatgcctacaagcacctactctgaaggctccacacccctgaccagcgtgcctgtcagcacgcgcctggtggtttcctctgaggctagcacactttccaccacaccggtggacacctctatccccgtcaccacaagcacggaagcctcctctagccctaccacagcggagggaacctccatccccacaagccctccctctgagggcaccacgccgctcgcctccatgcctgtgagcacaaccctggttgtgtcttccgaagctaacaccctgagcacaacccccgtcgattccaagacacaggtggccacgtctaccgaggctagctcccctccccctacagccgaagtgacctctatgcccacaagcaccccgggggagagatccacgcctctcaccagcatgcccgtccggcatacacccgttgcctcttccgaagctagcaccctgtctacaagccctgtggacacctccacaccggtgaccacgtctgcggagacaagctccagccccaccaccgccgagggaacatctcttcctacgtccaccacaagcgaaggctccaccctgctcacatctattcccgtcagcaccacactggtgacctcccctgaggcttctacgctgcttaccacacccgttgacaccaaggggcctgtggtcacaagcaatgaagtgtcctctagccccaccccggccgagggaacgtccatgcctacaagcacctactctgaaggccgcacacccctcacctccatccctgttaacaccacactggtggccagctctgctatttccatcctgagcacgacccccgtcgataattctacaccggtgaccacaagcaccgaggcctgttccagccctacgacatccgaggggacctctatgcccaacagcaatccctccgaaggcaccacacctctcacctctattcccgtcagcacaacgcctgtggtttcctctgaggcgagcaccctgtccgctacaccggtggacaccagcacacccggaaccacgtctgccgaagccacctccagccctacaaccgctgagggcatctctatccccacatccacccctagcgaggggaaaacaccccttaagtctattcctgtctccaacacgccggtggccaatagcgaagcgtctaccctgtccacaacccccgttgatagcaactcccctgtggtcaccagcacagctgtgtctagctcccccacgcctgccgagggaacctctatcgccattagcacaccctccgaaggctctaccgctctcacaagcatcccggtgtccaccacgacagttgccagctctgagattaattccctgagcaccacccctgctgtcacatctacccccgtgacaacgtattcccaggccagctctagccccaccacagcggacgggaccagcatgcaaacatccacctactctgaaggaagcacgcctctgacctcccttcccgtgagcacaatgctcgtcgtgtcttccgaggccaacaccctgagcacaacccctatcgattctaaaacacaggttaccgctagcacggaggcctcctctagcacaaccgctgaaggctccagcatgaccatttctacaccgtccgaggggagccccctgctcacctctatccctgtgtccacaacgcccgtcgccagccctgaagcctccaccctgtctacaacccccgtggacagcaattccccggttatcacatctaccgaggtgagctccagccctacgcccgctgaaggcacctctatgcctacatccacctatacagagggaagaacaccccttacgagcattacagtccggaccacaccggtggcgtcttccgccatcagcaccctgtctaccacacctgttgataactccacgcccgtgaccacaagcaccgaggctagaagctcccccacaacctctgaaggcacgagcatgcctaattccacaccctctgaggggaccacccctctcacaagcattccggtctccaccacacccgtgctgtctagcgaagcctccacgctgtctgccacccctatcgacacaagcacccccgtgacaacctccacggaggctaccagctctcctacaaccgccgaaggaacatccattcccaccagcacactttctgagggcatgacccctctgacgtccacaccggtcagccacaccctcgttgcgaactctgaggcttccaccctgagcacaacgcccgtggattccaacagccctgtggtcacctctacagccgtgagctcctctcccacccctgccgaagggacaagcatcgctacctccacaccctctgagggaagcaccgccctcacgtccatcccggtttctaccacaaccgtggcgagctccgaaacaaataccctgagcacgacccctgccgtcacctctacacccgtgaccacgtacgctcaggtttccagctctcccaccacagccgacggctccagcatgcctacctccacaccccgcgaggggcggcctccgcttacctctattcccgtgagcacaaccacggtcgcttccagcgagatcaacacactgtctaccaccctcgccgatacaagaacccctgtgacaacgtattcccaggcttcctctagccccaccacagccgacggcaccagcatgcctacacccgcgtactctgaaggaagcaccccgctgacgtccatgcctctgtctaccacacttgtcgtgagctccgaggccagcaccctgtctacaacccccgttgatacgtccacccctgctaccacaagcaccgaaggctcctctagccccaccacagccgggggaacgtccattcaaacctctacacctagcgagcgcaccacacccctcgctggcatgccggtgtccaccacgctggtggtcagctctgaagggaatacactctccaccacccccgttgacagcaagacacaggtgaccaactctacagaggcctccagctctgccacggctgagggatccagcatgaccatctctgcgcctagcgaaggcagccccctgcttacaagcattcctctgtccaccacaccggtggcctctcccgaggctagcaccctctccacgacccctgtcgactctaatagccccgtgatcacatccaccgaagtttctagctcccctatccccacagagggcaccagcatgcagacatctacctattccgatcggagaacgcctctgacaagcatgcccgtgtctaccaccgtcgtggcctccagcgccatttctacactgtccacgaccccggtcgacacaagcacccctgtgacaaactccaccgaagctcgcagctctcccacaacctccgaggggacgagcatgcctacctctacacccagcgagggatccaccccgtttacatctatgcctgttagcaccatgcccgtggtcacgtccgaagcctctacacttagcgcgacccccgtggatacatccacccctgttaccacaagcacggaggccacctcttcccccacaaccgctgaaggcacaagcatccctacctctacgctgtccgaggggacaaccccgctcaccagcattcccgtgtcccatacactggtcgccaattctgaagtgagcaccctctccacaacgcctgtggacagcaacacccccttcacaacctctacagaggcttccagccctcccccgaccgccgagggaacgtctatgcctacctccacaagctctgaaggcaatacacccctgacacggatgcctgttagcaccacaatggtcgcgtcctttgagacgtctacccttagcacaacccccgccgatacctccacacctgtgacgacctacagccaagctgggtcttcccccacaaccgccgacgatacaagcatgccgacctccacgtactctgaaggaagcacacccctgacctccgtgcctgtctctaccatgcccgttgtgagctccgaggctagcacacactctaccacacctgtggacacgtccacccccgtcacaaccagcacagaggcctcttccagccctaccacggctgaaggcacctctatcccgacatctccccctagcgagggcaccacacccctggccagcatgcctgtgagcaccacacccgttgtgtccagcgaagcggggaccctctccacgacaccggtcgatacctctacccctatgacaaccagcacagaggcctcctctagccccacgaccgctgaagacattgtggttcctatctccacagcctctgagggaagcaccctgcttacatccatccccgtgagcaccacgccggtcgcttctcctgaggcctccaccctgagcacaacccccgtggattctaactcccccgtggtcacaagcaccgaaatttcttccagcgccacgtccgcggagggcacatctatgcctaccagcacatattccgaagggagcacacccctcagatctatgcctgttagcaccaaaccgctggcttcctctgaggccagcacactctccacgacccccgtggacacatctatccctgtgaccacaagcaccgaaacgtccagctctcccacaaccgctaaggatacctccatgcctattagcacaccctctgaggtctccaccagcctgacatccatccttgtgtctacgatgcctgttgccagctccgaggcctctaccctgagcacaaccccggtggacacacgcaccctggtcacgacctccacaggaacctcctctagccccacaaccgctgaaggcagctctatgcctacaagcacgcccggggagcggtccacccctctcacaaatattctggtgtctaccacccttctggccaacagcgaagcgtccacactcagcacgacccccgttgacacatctaccccggtgacaacctccgccgaggctagctcctctcccacaaccgccgaaggaacgagcatgagaatctccaccccttctgatggcagcacacccctgacctccattctcgtcagcacactgcctgtggcttcttccgaggccagcaccgtttctacgacagcggtggacacctccatccccgtcacaaccagcacggaggcctcttccagccctaccacagctgaagtgacctctatgccgacatccacccccagcgagacaagcacccctcttacgtccatgcccgtcaatcacacacctgtggcctctagcgaagctggcaccctgtccaccacacccgttgatacctctacaccggtgacgaccagcacaaaggcctcctctagccctaccacagctgaggggatcgtcgtgcccatttccaccgccagcgagggatctacgctgctcacctccatccctgtgagcacaacccccgttgcgtcttccgaagccagcacactgtctaccacgcctgtggacacatccattcccgtcaccacaagcaccgagggctcctctagcccgaccacagctgaagggacgtccatgcccatcagcaccccttctgaggtgtccacaccccttaccagcattctggtttctacagtgcctgtcgccggaagcgaggcttccaccctctctacgacacccgtggatacccgcaccccggtcacaaccagcgccgaggcctccagctctcctacaacggcggagggcacctccatgcccatcagcacacctggggaacggagaacacccctgacatctatgtccgtgagcaccatgcctgttgcttcctctgaggccagcacgctctcccggacccccgccgacacatctaccccggtgacaaccagcacagaggcttccagctctcctaccacggccgagggaacaggcatccccatttccacccctagcgaaggctctacacccctgacatccatcccggtcagcacgacccccgtggctattcctgaggcctctacacttagcaccacacccgttgattccaacagccctgtggtcacctctacagaggtgtccagctcccccacccctgcggaagggacgtctatgccgatcagcacctactccgagggatctacacccctgaccggcgtgcctgttagcacaacccccgtcacgtcctctgccattagcacactgtccaccacacctgtggacaccagcacccccgtgacaacgtctaccgaagctcattccagcccgacaacctctgaggggacatccatgcctaccagcacgccctctgaaggatccacacctctcacctatatgcccgtcagcaccatgctggtggtttccagcgaggattctacacttagcgccacccctgtggacacatccacgcccgtcaccacatctaccgaggctacaagctccaccacggccgaaggcacctctatcccgacaagcaccccctccgaggggatgacacctctgacctctgtgcccgttagcaatacacctgtggcgtccagcgaagcctctatcctctccacgacccccgtcgatagcaacacacctctgaccacctctacagaggcttccagctccccgcccacggccgagggaacctctatgcctacaagcaccccctccgaaggcagcacacctctgacctctatgcccgtgtccacgacaaccgttgctagctctgagaccagcacactctccaccacaccggccgacacgtctacccctgtgacaacctacagccaggcttcctcttcccctcccattgccgacggcacatccatgcccaccagcacgtattctgaagggtccaccccgcttacaaacatgagcttctccaccacacccgtcgtgtctagcgaggcgtccaccctgtctacaacccctgtggatacgagcacacccgtcaccacctccacagaagccagcctgtctcctaccacagctgagggaacgtccatccccaccagctctccttccgagggcacaaccccgctcgccagcatgcccgtttctacaacccctgtggtgagctccgaagtcaatacgctgtctaccacacccgtggacagcaacacccttgttacaacctccacggaggccagctcctctcctacaattgctgaagggaccagcctgcccacatccaccacctctgagggaagcacacctctctccatcatgccgctgtctacgacccccgtggccagctccgaagcgagcacactgtctaccacacctgtcgatacctccacgcccgtgacaaccagctctcctaccaattccagccccacaaccgctgaggttacatctatgccgacgtccaccgccggcgaggggagcacacccctcaccaacatgcctgtgtccacaacccccgtcgccagctctgaagctagcacgctttccaccacacctgtggactctaatacctttgtcacaagctcctctcaggccagctcctctcccgctaccctccaggtgacaacgatgcgcatgagcaccccttccgagggatcctcttccctgacaaccatgctcctgagctctacctacgttacatccagcgaagcctccacgccgtctacccccagcgtggatagatccacacctgtcaccacaagcacccaatctaactccacacccacccctcccgaggtgattacgcttccgatgagcaccccttctgaagttagcacacccctgaccatcatgcctgtgtccacaacctctgtcacgattagcgaggcgggcacagcctccaccctccccgtggacacatctacccctgtgatcacgagcacccaggtttccagctctcccgtcacaccggagggcaccacaatgcccatctggaccccttccgaagggagcacacccctgaccacgatgcctgtgtccacaacccgggtgacctctagcgagggatccacactgtctacccccagcgtcgtgacatccacgccggttaccacaagcaccgaagctatttcttccagcgccacactcgattctaccacgatgtccgtgagcatgcctatggagatctctacccttggcacaaccattctggtctccacaacccccgtgacgagattccctgagagctctacacccagcatcccttccgtttataccagcatgtccatgacaaccgcttctgaagggagctcctctcccaccacactggagggaacgaccacaatgccgatgagcaccacatccgaacgctctaccctcctgacgacagtgcttattagccctatctccgtcatgagcccctctgaggcctccaccctgagcacccctcccggcgacacatctaccccgctcctgacatccacgaaagcggggagcttttctatccccgccgaagtgaccacaattcggatctccattaccagcgagagatccacacctctgaccacgctccttgtgtctaccacactgcccaccagcttccctggagctagcatcgcctccacaccccctctggatacctctacaacctttacgccgagcacagacaccgcttccacccccacaattcctgttgccacgaccatctctgtcagcgtgatcacagagggctccacccccggcacaaccattttcatcccttctacacccgtgaccagctccacggccgatgtcttcccggctaccacaggggcggttagcacccctgtgattacatctaccgaactcaatacgccctccacatcctcttccagcaccacaacctccttttctacgaccaaggagttcacaacccctgccatgacaaccgctgcgcccctgacatacgtgaccatgagcacggccccttccacaccccgcaccacctctagaggatgcacaaccagcgcttccacacttagcgccacgtctaccccgcacacatccaccagcgtcacaacccggcccgtgacgccttctagcgaatcctctcgccccagcaccatcacatcccataccattcctcccacatttcctccggcgcacagctctacaccccctacaacgtccgctagctccaccacagttaaccccgaggccgtgaccaccatgacaacgagaaccaaaccttctacacggaccaccagcttccccaccgtcacgacaaccgccgtgccgaccaatacaaccatcaagtccaaccctacatctacgcccaccgttcctcgcacaaccacatgttttggcgacgggtgccagaataccgctagcagatgtaaaaacggaggcacgtgggatgggctgaagtgccagtgtcccaatctctactatggcgaactgtgcgaggaggtggtctccagcattgacatcggaccgcccgaaaccatctctgcccaaatggagctgacagtgaccgtgacatccgtcaaattcaccgaagaactcaagaaccacagctctcaggaatttcaggagttcaagcagacatttaccgagcaaatgaatattgtttactccggcatccctgaatatgtgggggtgaacattacgaaacttcggctgggaagcgtcgttgtggagcatgacgtgctgctccgcacaaagtacacccccgaatataaaaccgtcctggataacgctacagaggtggttaaggagaaaatcacgaaggtgaccacacagcagattatgatcaatgacatctgctctgatatgatgtgtttcaacaccacaggcacccaagtccagaatattacagtgacccagtacgaccctgaagaggattgcagaaagatggccaaagaatatggggactactttgttgtggagtaccgggatcagaagccctattgtatctccccttgcgaaccgggattcagcgtctctaaaaactgtaatcttggcaagtgccaaatgagcctgtccgggccccagtgtctctgcgtgacgaccgagacacactggtacagcggcgagacctgtaaccagggaacacagaaatccctggtctatggcctggtgggggcgggagttgtgctcatgcttattatcctggtcgccctgctcatgctggtgtttcgctctaagagagaagtgaagcggcaaaaatacagacttagccagctgtataagtggcaggaggaagactccggccctgctcccgggaccttccagaatattggattcgatatctgccaagacgatgactctatccatctcgagagcatttactccaactttcagccttctctgcgccacatcgatcccgaaacgaaaattcggatccagagacctcaagttatgacaaccagcttctga

SEQ ID NO: 1426 - RNA, 1215 nt, synthetic construct
  misc_feature 1..1215: note = Q9NNX6
  source 1..1215: mol_type = other RNA
atgagcgactccaaggagcccagactgcagcaactcggcctgcttgaagaggaacagctgcgggggctcggattccgccagaccagaggctacaaatctctggccgggtgccttggacacggccctctggtgctccagctgctgagctttacactcctggctgggcttctggtccaagtttccaaggtgccgtctagcatctcccaggagcagtctcggcaggatgccatttatcaaaacctcacgcagctgaaagcggctgtgggagaacttagcgagaagtccaaactgcaggagatctaccaggaactcacccaactgaaggccgccgtcggcgagctgcccgaaaagagcaaactccaggagatttatcaggagctgacacgccttaaggctgccgtgggcgaactgcctgagaaatctaagctccaagaaatctaccaggagctgacctggcttaaagctgccgttggggaactgcccgagaagtccaagatgcaggagatttatcaggaactcacaagactgaaagcggccgtgggagagctgcctgaaaagagcaaacaacaggagatctaccaggaactcacccggctgaaggctgccgtcggcgagcttcccgagaaatctaagcagcaagaaatctatcaggagctgacacgcctcaaagctgccgtgggggaactgcctgagaagtccaagcagcaggaaatttaccaagagcttacccagctgaaagcggccgttgagagactctgtcatccgtgcccctgggaatggacgttctttcagggaaattgttacttcatgagcaactctcagcggaattggcacgactccatcaccgcttgcaaggaggtgggcgcccaactggtcgtgattaaaagcgctgaagaacagaactttctgcagctccaatcctctcgcagcaatagattcacatggatggggctgtccgatcttaaccaggagggaacctggcagtgggtggacggcagccctctgctcccctcttttaagcagtattggaatcggggcgaacctaacaatgtcggggaggaagattgtgccgagttctccggaaacggctggaatgacgataaatgcaacctggccaagttttggatctgtaagaaaagcgctgcgtcttgcagccgcgacgaggagcaattcctgtcccccgccccggctacacctaatccccctcccgcctga

SEQ ID NO: 1427 - RNA, 3126 nt, synthetic construct
  misc_feature 1..3126: note = Q9NR97
  source 1..3126: mol_type = other RNA
atggagaacatgttcctgcagagctccatgctgacctgcatctttctgcttatttctggcagctgtgaactgtgcgccgaggaaaatttctccagatcttacccctgtgacgagaagaaacaaaacgatagcgtgatcgctgaatgctccaatcggcgcctccaggaggtccctcagacagttgggaagtatgtgacggagctggacctttctgataactttattacccacatcacaaatgaatccttccagggactgcaaaacctcaccaaaattaatctgaaccataatccgaacgtgcagcaccagaatggcaaccccgggatccagtccaatggactgaacatcacagacggcgcctttctcaatctgaagaaccttagagagctgctcctggaagataaccaacttcctcagattcccagcgggctgcctgagtctctcaccgagctgtccctgatccagaataacatttacaatatcacaaaagaaggaattagccggctcatcaacctgaagaatctttatctggcgtggaactgttacttcaataaggtctgcgagaaaaccaacattgaagacggcgtgtttgagacgctcaccaatctggaacttctgtctctctccttcaacagcctgtctcatgttccccctaagctgccgtccagcctccgcaaactgtttctttccaatacacagatcaagtatatctctgaggaggatttcaaaggcctgattaacctcaccctgcttgacctgagcgggaattgtcccagatgctttaacgctcctttcccctgtgtgccttgcgatggaggcgcctccatcaatattgaccggtttgccttccaaaacctcacacagctgcgctacctgaacctcagctctacctccctgagaaagatcaatgctgcctggttcaagaacatgccccaccttaaagtcctggatctcgaatttaattatctggtgggggagattgctagcggagccttcctgacgatgcttccgcggctcgaaatcctggacctgtcttttaactacatcaagggcagctaccctcagcatattaatatctcccgcaacttctctaaactcctgagccttagagcgctgcacctccgggggtatgtttttcaagagctgcgcgaagatgacttccagcccctgatgcagcttcctaatctctccacaattaacctgggaatcaattttattaagcagatcgacttcaaactgtttcaaaacttcagcaatctcgagatcatttacctgtctgagaacagaatcagcccccttgtgaaggatacccggcagagctatgccaattcttccagctttcagcgccacattagaaaacggagatccacagacttcgaatttgatccccattctaacttctaccacttcacccgccctctgatcaagccgcagtgtgctgcctatggcaaggctctcgacctgagcctcaattccattttcttcatcggccccaaccaatttgagaaccttcctgatattgcctgcctcaatctgtctgcgaacagcaatgcccaggtcctgtccgggaccgaatttagcgctatcccccatgtgaaatacctcgacctgacaaacaatcggcttgattttgacaacgcctctgctctgacggagctctccgatctggaagtgctggaccttagctataattctcactacttcagaatcgccggagtcacccaccatctcgagtttattcagaacttcacaaatctgaaggttctgaacctctcccacaataacatctacaccctgacagataaatataatcttgagagcaagtctctggtggaactcgtgtttagcggcaaccgcctggacattctgtggaatgacgatgacaaccggtacatctccattttcaaagggcttaagaacctgaccagactcgatctgagcctcaatcgcctgaagcatatccctaacgaggcctttcttaatctgcccgcttctctcacggaactgcacatcaacgacaatatgctgaaattctttaactggacacttctgcagcaattcccgcggctcgagctgctcgatctgagaggaaataaacttctgttcctcaccgactccctgagcgattttacctcctctctgcgcacacttctgctcagccataaccggatttcccatctgccttctggcttcctcagcgaggtctcctctctgaagcaccttgacctgagctccaatctgctcaagaccatcaacaaaagcgcgctggaaacaaagacgaccacaaaactttctatgctggagctccacgggaatccctttgaatgcacctgtgatattggagacttcagacgctggatggatgagcacctgaacgtgaagatccctcggctcgttgacgtgatttgcgcctcccccggcgatcagagaggcaagagcatcgtctctctggaacttacaacctgtgtgtccgacgttacggctgtgatcctgtttttctttaccttctttattacaaccatggtcatgctggccgccctcgctcatcacctgttctattgggacgtgtggtttatctacaatgtctgccttgccaaagtgaaggggtatcggagcctgtctacatcccagaccttctacgatgcgtatattagctacgacacgaaagatgcttccgttacagactgggtgatcaacgagctccgctaccacctggaggaaagcagagataagaatgtcctcctgtgtcttgaggaacgggactgggatcctggactggccattatcgacaacctgatgcagtctatcaatcaaagcaagaaaaccgtgttcgttctcacaaagaaatatgccaagtcctggaactttaaaaccgctttctacctggcccttcagagactgatggatgagaacatggacgtgattatctttattctcctggaacccgtcctccagcattctcaatatctgcgccttcggcagagaatctgcaagagctccattctgcagtggccggataatcctaaagctgagggcctgttctggcagaccctccgcaacgtggtgctgacagagaatgactctagatacaacaatatgtatgttgatagcatcaagcaatactga

SEQ ID NO: 1428 - RNA, 66 nt, synthetic construct
  misc_feature 1..66: note = P16671_TM_1_8-29
  source 1..66: mol_type = other RNA
ggcctgatcgccggggctgtgattggagccgtcctcgcggttttcggcgggatcctgatgcccgtg

SEQ ID NO: 1429 - RNA, 81 nt, synthetic construct
  misc_feature 1..81: note = P32248_TM_1_60-86
  source 1..81: mol_type = other RNA
ttcctgcccatcatgtacagcattatctgctttgtgggcctcctggggaacggacttgtcgttctgacctatatttacttc

SEQ ID NO: 1430 - RNA, 66 nt, synthetic construct
  misc_feature 1..66: note = P16671_TM_2_440-461
  source 1..66: mol_type = other RNA
ctgctcggcctgatcgagatgattcttctgagcgtgggggtcgttatgttcgtggcctttatgatc

SEQ ID NO: 1431 - RNA, 63 nt, synthetic construct
  misc_feature 1..63: note = P32248_TM_2_96-116
  source 1..63: mol_type = other RNA
tacctgctcaacctggccgtggctgacatccttttcctgctcaccctgcccttttgggcctat

SEQ ID NO: 1432 - RNA, 66 nt, synthetic construct
  misc_feature 1..66: note = P32248_TM_3_131-152
  source 1..66: mol_type = other RNA
ctgatcttcgccatttacaagatgagctttttctccggcatgctcctgcttctgtgcatctctatt

SEQ ID NO: 1433 - RNA, 63 nt, synthetic construct
  misc_feature 1..63: note = P32248_TM_4_171-191
  source 1..63: mol_type = other RNA
gtgctgctcatcagcaagctgtcctgcgtcggcatttggatccttgccaccgttctgtctatt

SEQ ID NO: 1434 - RNA, 84 nt, synthetic construct
  misc_feature 1..84: note = P32248_TM_5_220-247
  source 1..84: mol_type = other RNA
ttcatcaccattcaggtggcccaaatggtcatcggctttctggttcccctcctggctatgagcttctgctaccttgtgattatc

SEQ ID NO: 1435 - RNA, 78 nt, synthetic construct
  misc_feature 1..78: note = P32248_TM_6_264-289
  source 1..78: mol_type = other RNA
gtgatcattgccgtcgttgtggtgttcatcgtctttcagctgccctacaacggcgtggttctcgctcaaaccgtggcc

SEQ ID NO: 1436 - RNA, 54 nt, synthetic construct; identical to SEQ ID NO: 1020
  misc_feature 1..54: note = P32248_TM_7_314-331
  source 1..54: mol_type = other RNA

SEQ ID NO: 1437 - RNA, 69 nt, synthetic construct
  misc_feature 1..69: note = A0A5B9_TM_145-167
  source 1..69: mol_type = other RNA
accatcctgtacgagattctcctgggcaaggccacactttatgctgtgctggtcagcgccctcgttctg

SEQ ID NO: 1438 - RNA, 69 nt, synthetic construct
  misc_feature 1..69: note = B7Z8K6_TM_130-152
  source 1..69: mol_type = other RNA
ctgggcctcagaatgctgttcgccaagaccgtggctgtcaactttcttctgacagccaaactcttcttt

SEQ ID NO: 1439 - RNA, 63 nt, synthetic construct
  misc_feature 1..63: note = O00206_TM_632-652
  source 1..63: mol_type = other RNA
accatcattggcgtgagcgtcctgtccgttctcgtggtgtctgtcgtggccgttctggtgtac

SEQ ID NO: 1440 - RNA, 66 nt, synthetic construct
  misc_feature 1..66: note = P01730_TM_397-418
  source 1..66: mol_type = other RNA
atggccctgatcgtgctcggcggggtcgctggactgcttctgttcattggcctcgggatctttttc

SEQ ID NO: 1441 - RNA, 63 nt, synthetic construct
  misc_feature 1..63: note = P01850_TM_151-171
  source 1..63: mol_type = other RNA
atcctgctcggcaaggccaccctgtacgctgtgcttgtcagcgccctggttctcatggcgatg

SEQ ID NO: 1442 - RNA, 78 nt, synthetic construct
  misc_feature 1..78: note = P07766_TM_127-152
  source 1..78: mol_type = other RNA
gtgatgagcgtcgccaccatcgttattgtggacatctgcattacaggcgggctgctcctgcttgtgtactattggtcc

SEQ ID NO: 1443 - RNA, 66 nt, synthetic construct
  misc_feature 1..66: note = P08575_TM_576-597
  source 1..66: mol_type = other RNA
gccctgatcgctttcctcgcctttctgattatcgtgaccagcattgcgcttctggtcgttctctac

SEQ ID NO: 1444 - RNA, 63 nt, synthetic construct
  misc_feature 1..63: note = P08637_TM_209-229
  source 1..63: mol_type = other RNA
gtgagcttctgcctggtcatggttctcctgtttgccgtggacaccggcctttacttctccgtg

SEQ ID NO: 1445 - RNA, 81 nt, synthetic construct
  misc_feature 1..81: note = P10747_TM_153-179
  source 1..81: mol_type = other RNA
ttctgggtgctggtcgttgtgggcggggtgctcgcctgctacagcctgcttgtcaccgtggcttttatcattttctgggtt

SEQ ID NO: 1446 - RNA, 66 nt, synthetic construct
  misc_feature 1..66: note = P11912_TM_144-165
  source 1..66: mol_type = other RNA
atcattaccgccgagggcatcattctcctgttctgcgctgtggtccccgggacactgcttctgttt

SEQ ID NO: 1447 - RNA, 66 nt, synthetic construct
  misc_feature 1..66: note = P15391_TM_292-313
  source 1..66: mol_type = other RNA
gtgagcgccgtcaccctggcttacctcatcttctgcctgtgttcccttgttggcattctgcacctc

SEQ ID NO: 1448 - RNA, 63 nt, synthetic construct
  misc_feature 1..63: note = P16410_TM_162-182
  source 1..63: mol_type = other RNA
ttcctgctctggatcctggccgctgtgagctccggcctgtttttctactcttttcttctcacc

SEQ ID NO: 1449 - RNA, 63 nt, synthetic construct
  misc_feature 1..63: note = P26718_TM_52-72
  source 1..63: mol_type = other RNA
cccttctttttctgctgttttatcgccgtggctatgggcattagattcatcattatggtcgcc

SEQ ID NO: 1450 - RNA, 63 nt, synthetic construct
  misc_feature 1..63: note = P30273_TM_24-44
  source 1..63: mol_type = other RNA
ctgtgctacatcctcgacgccattctgttcctttatggcatcgtgctgaccctcctgtactgt

SEQ ID NO: 1451 - RNA, 63 nt, synthetic construct
  misc_feature 1..63: note = P40259_TM_160-180
  source 1..63: mol_type = other RNA
ggcatcattatgatccagaccctgctcattatcctgttcattatcgtgcccatctttcttctg

SEQ ID NO: 1452 - RNA, 63 nt, synthetic construct
  misc_feature 1..63: note = P42081_TM_248-268
  source 1..63: mol_type = other RNA
tggatcaccgccgtgctgcccacagtcattatctgcgttatggtgttctgtctcattctgtgg

SEQ ID NO: 1453 - RNA, 63 nt, synthetic construct
  misc_feature 1..63: note = Q15762_TM_255-275
  source 1..63: mol_type = other RNA
ggcgggaccgtgctgctcctgcttttcgtcatcagcattacaacgatcattgttatctttctg

SEQ ID NO: 1454 - RNA, 63 nt, synthetic construct
  misc_feature 1..63: note = Q685J3_TM_4394-4414
  source 1..63: mol_type = other RNA
ctggtgggcgccggggtcgttctcatgctgatcattcttgtggctctgctcatgctggtgttc

SEQ ID NO: 1455 - RNA, 63 nt, synthetic construct
  misc_feature 1..63: note = Q9NNX6_TM_38-58
  source 1..63: mol_type = other RNA
ctgggccacgggcccctcgtgctgcagcttctgagcttcaccctcctggccggacttctggtc

SEQ ID NO: 1456 - RNA, 63 nt, synthetic construct
  misc_feature 1..63: note = Q9NR97_TM_828-848
  source 1..63: mol_type = other RNA
gccgtgatcctgttctttttcacctttttcattacaacgatggtcatgctcgctgccctggcg

SEQ ID NO: 1457 - RNA, 48 nt, synthetic construct
  misc_feature 1..48: note = P14207_1-16
  source 1..48: mol_type = other RNA
atggtatggaaatggatgccattattattattattagtatgtgtagca

SEQ ID NO: 1458 - RNA, 48 nt, synthetic construct
  misc_feature 1..48: note = O75787_1-16
  source 1..48: mol_type = other RNA
atggctgtatttgtagttttattggcattagtagctggagttttaggt

SEQ ID NO: 1459 - RNA, 48 nt, synthetic construct
  misc_feature 1..48: note = P07359_1-16
  source 1..48: mol_type = other RNA
atgccccttctccttctccttctccttctcccttcccctcttcatccc

SEQ ID NO: 1460 - RNA, 48 nt, synthetic construct
  misc_feature 1..48: note = P08637_1-16
  source 1..48: mol_type = other RNA
atgtggcaacttttacttcctactgcccttttacttttagtttctgct

SEQ ID NO: 1461 - RNA, 51 nt, synthetic construct
  misc_feature 1..51: note = P07237_1-17
  source 1..51: mol_type = other RNA
atgcttagacgtgcacttttatgtttagctgtagctgcacttgtacgtgca

SEQ ID NO: 1462 - RNA, 51 nt, synthetic construct
  misc_feature 1..51: note = O60911_1-17
  source 1..51: mol_type = other RNA
atgaatttatctttagttttagctgctttttgtcttggtattgcttctgct

SEQ ID NO: 1463 - RNA, 51 nt, synthetic construct
  misc_feature 1..51: note = P20138_1-17
  source 1..51: mol_type = other RNA
atgcctttattattattattacctttattatgggctggcgctttagctatg

SEQ ID NO: 1464 - RNA, 51 nt, synthetic construct
  misc_feature 1..51: note = P27797_1-17
  source 1..51: mol_type = other RNA
atgcttttatctgtacctttacttttaggtttacttggacttgcagttgca

SEQ ID NO: 1465 - RNA, 54 nt, synthetic construct
  misc_feature 1..54: note = P10747_1-18
  source 1..54: mol_type = other RNA
atgctccgtcttcttcttgctcttaatttatttccttctattcaagttactggc

SEQ ID NO: 1466 - RNA, 54 nt, synthetic construct
  misc_feature 1..54: note = O75487_1-18
  source 1..54: mol_type = other RNA
atggcacgttttggtttacctgcacttttatgtacacttgcagttttatctgca

SEQ ID NO: 1467 - RNA, 54 nt, synthetic construct
  misc_feature 1..54: note = P07996_1-18
  source 1..54: mol_type = other RNA
atgggtttagcttggggtttaggtgtattatttttaatgcatgtatgtggaact

SEQ ID NO: 1468 - RNA, 54 nt, synthetic construct
  misc_feature 1..54: note = P22748_1-18
  source 1..54: mol_type = other RNA
atgcgtatgcttttagctttacttgcactttcagctgcacgtccatctgcatct

SEQ ID NO: 1469 - RNA, 54 nt, synthetic construct
  misc_feature 1..54: note = Q15762_1-18
  source 1..54: mol_type = other RNA
atggattaccctacacttctacttgcacttctacatgtatatagagctctatgt

SEQ ID NO: 1470 - RNA, 54 nt, synthetic construct
  misc_feature 1..54: note = P30273_1-18
  source 1..54: mol_type = other RNA
atgataccagcagtagtactactactactactattagtagaacaagcagcagca

SEQ ID NO: 1471 - RNA, 54 nt, synthetic construct
  misc_feature 1..54: note = P38570_1-18
  source 1..54: mol_type = other RNA
atgtggctttttcatactttactttgtattgcttctttagctttacttgctgct

SEQ ID NO: 1472 - RNA, 54 nt, synthetic construct
  misc_feature 1..54: note = Q01638_1-18
  source 1..54: mol_type = other RNA
atgggtttctggatacttgcaattttaactatacttatgtattcaactgcagct

SEQ ID NO: 1473 - RNA, 54 nt, synthetic construct
  misc_feature 1..54: note = Q9NZQ7_1-18
  source 1..54: mol_type = other RNA
atgagaatattcgcagtattcatattcatgacatactggcatttactaaacgca

SEQ ID NO: 1474 - RNA, 57 nt, synthetic construct
  misc_feature 1..57: note = P13591_1-19
  source 1..57: mol_type = other RNA
atgctacaaacaaaagacttaatatggacattattctttctaggcacagccgtatca

SEQ ID NO: 1475 - RNA, 57 nt, synthetic construct
  misc_feature 1..57: note = P26842_1-19
  source 1..57: mol_type = other RNA
atggctagacctcatccttggtggttatgtgtattaggaactttagttggattaagt

SEQ ID NO: 1476 - RNA, 57 nt, synthetic construct
  misc_feature 1..57: note = P15391_1-19
  source 1..57: mol_type = other RNA
atgcctcctcctcgtcttcttttttttcttctttttcttactcctatggaagttcgt

SEQ ID NO: 1477 - RNA, 57 nt, synthetic construct
  misc_feature 1..57: note = Q8NI17_1-19
  source 1..57: mol_type = other RNA
atgatgtggacttgggctttatggatgttaccaagtttatgtaaatttagtttagca

SEQ ID NO: 1478 - RNA, 57 nt, synthetic construct
  misc_feature 1..57: note = P08571_1-19
  source 1..57: mol_type = other RNA
atggaaagagcttcatgtctacttctacttctacttccacttgtacatgtatctgca

SEQ ID NO: 1479 - RNA, 57 nt, synthetic construct
  misc_feature 1..57: note = P05154_1-19
  source 1..57: mol_type = other RNA
atgcaactatttctacttctatgtctagttctactttcacctcaaggtgcatcttta

SEQ ID NO: 1480 - RNA, 57 nt, synthetic construct
  misc_feature 1..57: note = P02787_1-19
  source 1..57: mol_type = other RNA
atgagattagcagtaggagcattattagtatgtgcagtattaggattatgtttagca

SEQ ID NO: 1481 - RNA, 57 nt, synthetic construct
  misc_feature 1..57: note = P02671_1-19
  source 1..57: mol_type = other RNA
atgttttcaatgagaattgtatgtttagttttaagtgtagttgggactgcatggaca

SEQ ID NO: 1482 - RNA, 57 nt, synthetic construct
  misc_feature 1..57: note = P04216_1-19
  source 1..57: mol_type = other RNA
atgaatctagcgatatcgatagcgctattgctaacggtattgcaagtgagcagggga

SEQ ID NO: 1483 - RNA, 57 nt, synthetic construct
  misc_feature 1..57: note = P00747_1-19
  source 1..57: mol_type = other RNA
atggaacataaagaagtagtactattactattactatttctaaaaagcggacaagga

SEQ ID NO: 1484 - RNA, 57 nt, synthetic construct
  misc_feature 1..57: note = P01764_1-19
  source 1..57: mol_type = other RNA
atggaatttggattaagttggttatttttagtggcaatattaaaaggagtacagtgt

SEQ ID NO: 1485 - RNA, 57 nt, synthetic construct
  misc_feature 1..57: note = P16150_1-19
  source 1..57: mol_type = other RNA
atggctactttattattattattaggtgttttagttgtttctcctgatgctttaggt

SEQ ID NO: 1486 - RNA, 57 nt, synthetic construct
  misc_feature 1..57: note = Q6DN72_1-19
  source 1..57: mol_type = other RNA
atgttattatggactgctgttttattatttgttccttgtgttggtaaaactgtttgg

SEQ ID NO: 1487 - RNA, 57 nt, synthetic construct
  misc_feature 1..57: note = Q01151_1-19
  source 1..57: mol_type = other RNA
atgtctagaggtctacaattacttctactttcatgtgcatattcacttgcacctgca

SEQ ID NO: 1488 - RNA, 57 nt, synthetic construct
  misc_feature 1..57: note = P07093_1-19
  source 1..57: mol_type = other RNA
atgaactggcatctacctctatttctacttgcatctgtaactctaccttcaatctgc

SEQ ID NO: 1489 - RNA, 57 nt, synthetic construct
  misc_feature 1..57: note = Q8WWQ8_1-19
  source 1..57: mol_type = other RNA
atgatgttacaacatttagttatattttgtcttggcttagtcgttcaaaatttctgt

SEQ ID NO: 1490 - RNA, 60 nt, synthetic construct
  misc_feature 1..60: note = Q13291_1-20
  source 1..60: mol_type = other RNA
atggatcctaaaggtcttctttctcttacttttgttctttttctttctcttgcttttggt

SEQ ID NO: 1491 - RNA, 60 nt, synthetic construct
  misc_feature 1..60: note = P35225_1-20
  source 1..60: mol_type = other RNA
atggcacttttacttacaactgtaattgcacttacatgtttaggcggatttgcaagtcca

SEQ ID NO: 1492 - RNA, 60 nt, synthetic construct
  misc_feature 1..60: note = P25942_1-20
  source 1..60: mol_type = other RNA
atggtaagactaccattacaatgtgtattatggggatgtctattaacagcagtacatcca

SEQ ID NO: 1493 - RNA, 60 nt, synthetic construct
  misc_feature 1..60: note = P52803_1-20
  source 1..60: mol_type = other RNA
atgttgcatgtggaaatgcttacgcttgtgtttttagttttatggatgtgtgtattttcg

SEQ ID NO: 1494 - RNA, 60 nt, synthetic construct
  misc_feature 1..60: note = Q15116_1-20
  source 1..60: mol_type = other RNA
atgcaaataccacaagcaccatggccagtagtatgggcagtattacaattaggatggaga

SEQ ID NO: 1495 - RNA, 60 nt, synthetic construct
  misc_feature 1..60: note = P05556_1-20
  source 1..60: mol_type = other RNA
atgaatttacaacctattttttggattggtttaatttcttctgtctgttgtgtttttgct

SEQ ID NO: 1496 - RNA, 60 nt, synthetic construct
  misc_feature 1..60: note = Q12891_1-20
  source 1..60: mol_type = other RNA
atgagagcaggaccaggaccaacagtaacattagcattagtattagcagtagcatgggca

SEQ ID NO: 1497 - RNA, 60 nt, synthetic construct
  misc_feature 1..60: note = Q8IV16_1-20
  source 1..60: mol_type = other RNA
atgaaagcattaggagcagtattattagcattattattatgtggaagaccaggaagagga

SEQ ID NO: 1498 - RNA, 60 nt, synthetic construct
  misc_feature 1..60: note = Q03167_1-20
  source 1..60: mol_type = other RNA
atgacttcacattacgttatagctatatttgcacttatgtcttcatgtctagctacagct

SEQ ID NO: 1499 - RNA, 60 nt, synthetic construct
  misc_feature 1..60: note = Q14246_1-20
  source 1..60: mol_type = other RNA
atgagagggtttaatttattgttattttgggggtgttgtgtaatgcatagttgggaggga

SEQ ID NO: 1500 - RNA, 60 nt, synthetic construct
  misc_feature 1..60: note = P16871_1-20
  source 1..60: mol_type = other RNA
atgacaatattaggaacaacattcggaatggtattttcattactacaagtagtatcagga

SEQ ID NO: 1501 - RNA, 60 nt, synthetic construct
  misc_feature 1..60: note = P61769_1-20
  source 1..60: mol_type = other RNA
atgtctagatctgtagctttagctgtacttgcacttttatctttatctggacttgaagct

SEQ ID NO: 1502 - RNA, 60 nt, synthetic construct
  misc_feature 1..60: note = Q9Y6W8_1-20
  source 1..60: mol_type = other RNA
atgaaatcaggtttgtggtatttttttcttttttgtttgcgtataaaagtgcttacgggc

SEQ ID NO: 1503 - RNA, 63 nt, synthetic construct
  misc_feature 1..63: note = P10966_1-21
  source 1..63: mol_type = other RNA
atgcgtccacgtttatggttacttttagctgcacaattaactgtacttcatggtaattctgta

SEQ ID NO: 1504 - RNA, 63 nt, synthetic construct
  misc_feature 1..63: note = Q9BZW8_1-21
  source 1..63: mol_type = other RNA
atgctaggacaagtagtaacactaatactactactactactaaaagtataccaaggaaaagga

SEQ ID NO: 1505 - RNA, 63 nt, synthetic construct
  misc_feature 1..63: note = P02778_1-21
  source 1..63: mol_type = other RNA
atgaaccaaacagcaatactaatatgctgcctaatattcctaacactatcaggaatacaagga

SEQ ID NO: 1506 - RNA, 63 nt, synthetic construct
  misc_feature 1..63: note = P18564_1-21
  source 1..63: mol_type = other RNA
atgggtatagaattattatgcttattctttctatttctaggtagaaatgaccatgtacaagga

SEQ ID NO: 1507 - RNA, 63 nt, synthetic construct
  misc_feature 1..63: note = O14525_1-21
  source 1..63: mol_type = other RNA
atggcattagcaggattatgtgcattattagcatgttgttggggaccagcagcagtattagca

SEQ ID NO: 1508 - RNA, 63 nt, synthetic construct
  misc_feature 1..63: note = P01130_1-21
  source 1..63: mol_type = other RNA
atgggaccatggggatggaaattaagatggacagtagcattattattagcagcagcaggaaca

SEQ ID NO: 1509 - RNA, 63 nt, synthetic construct
  misc_feature 1..63: note = P01732_1-21
  source 1..63: mol_type = other RNA
atggctttacctgtaactgcacttttacttccacttgcacttttacttcatgctgcacgtcca

SEQ ID NO: 1510 - RNA, 63 nt, synthetic construct
  misc_feature 1..63: note = P48061_1-21
  source 1..63: mol_type = other RNA
atgaatgcaaaagtagtagtagtattagtattagtactgacagcattatgtttatcagacgga

SEQ ID NO: 1511 - RNA, 63 nt, synthetic construct
  misc_feature 1..63: note = P01589_1-21
  source 1..63: mol_type = other RNA
atggattcatatttattaatgtggggattattaacttttattatggttccaggttgtcaagca

SEQ ID NO: 1512 - RNA, 63 nt, synthetic construct
  misc_feature 1..63: note = Q86T13_1-21
  source 1..63: mol_type = other RNA
atgagaccagcatttgcattatgtttattatggcaagcattatggccaggaccaggaggagga

SEQ ID NO: 1513 - RNA, 63 nt, synthetic construct
  misc_feature 1..63: note = Q5DID0_1-21
  source 1..63: mol_type = other RNA
atgctaagaacatcaggactagcactactagcattagtatcagcagtaggaccatcacaagca

SEQ ID NO: 1514 - RNA, 66 nt, synthetic construct
  misc_feature 1..66: note = P40189_1-22
  source 1..66: mol_type = other RNA
atgctaactctacaaacctggctagttcaagctctatttatatttctaactacagaatcaactggc

SEQ ID NO: 1515 - RNA, 66 nt, synthetic construct
  misc_feature 1..66: note = Q86YL7_1-22
  source 1..66: mol_type = other RNA
atgtggaaagtgagtgcgttattgtttgtgttagggagtgcgagtttgtgggtgttagcggaaggg

SEQ ID NO: 1516 - RNA, 66 nt, synthetic construct
  misc_feature 1..66: note = P55075_1-22
  source 1..66: mol_type = other RNA
atgggttctcctcgttctgctctttcttgtcttcttcttcatttacttgttctttgtcttcaagct

SEQ ID NO: 1517 - RNA, 66 nt, synthetic construct
  misc_feature 1..66: note = Q30201_1-22
  source 1..66: mol_type = other RNA
atgggaccaagagcaagaccagcattactattactaatgctattacaaacagcagtactacaagga

SEQ ID NO: 1518 - RNA, 66 nt, synthetic construct
  misc_feature 1..66: note = P07766_1-22
  source 1..66: mol_type = other RNA
atgcaaagtggaacgcattggagagtgttagggttatgtttattgagtgtaggagtgtggggacaa

SEQ ID NO: 1519 - RNA, 66 nt, synthetic construct
  misc_feature 1..66: note = P18827_1-22
  source 1..66: mol_type = other RNA
atgagaagagcagcattatggttatggttatgtgcattagcattatcattacaaccagcattacca

SEQ ID NO: 1520 - RNA, 66 nt, synthetic construct
  misc_feature 1..66: note = P55290_1-22
  source 1..66: mol_type = other RNA
atgcaaccacgtacacctctagttctatgtgtacttctatctcaagttctacttctaacttcagct

SEQ ID NO: 1521 - RNA, 66 nt, synthetic construct
  misc_feature 1..66: note = P37173_1-22
  source 1..66: mol_type = other RNA
atgggaagaggattattaagaggattatggccattacatatagtattatggacaagaatagcaagt

SEQ ID NO: 1522 - RNA, 66 nt, synthetic construct
  misc_feature 1..66: note = Q07325_1-22
  source 1..66: mol_type = other RNA
atgaaaaaatcgggagtactatttctattgggaataatattactagtactaataggagtgcaaggg

SEQ ID NO: 1523 - RNA, 66 nt, synthetic construct
  misc_feature 1..66: note = P04156_1-22
  source 1..66: mol_type = other RNA
atggctaatttaggatgttggatgttagttttatttgtagctacatggagtgatttaggtttatgt

SEQ ID NO: 1524 - RNA, 66 nt, synthetic construct
  misc_feature 1..66: note = P31785_1-22
  source 1..66: mol_type = other RNA
atgcttaaaccttcacttccatttacatctctacttttccttcaacttccacttctaggcgtcggc

SEQ ID NO: 1525 - RNA, 69 nt, synthetic construct
  misc_feature 1..69: note = P01579_1-23
  source 1..69: mol_type = other RNA
atgaaatatacatcttacattctagctttccaactatgtatagttctaggttcacttggatgttactgt

SEQ ID NO: 1526 - RNA, 69 nt, synthetic construct
  misc_feature 1..69: note = P23229_1-23
  source 1..69: mol_type = other RNA
atggcagcagcaggacaattatgtttattatatttaagtgcaggattattaagtagattaggagcagca

SEQ ID NO: 1527 - RNA, 69 nt, synthetic construct
  misc_feature 1..69: note = O60494_1-23
  source 1..69: mol_type = other RNA
atgatgaacatgtcacttccatttctatggtcattactaactctattaatatttgcagaagtaaatgga

SEQ ID NO: 1528 - RNA, 69 nt, synthetic construct
  misc_feature 1..69: note = P08575_1-23
  source 1..69: mol_type = other RNA
atgtatttatggttaaaattacttgcatttggatttgcatttttagatacagaagtatttgtgactggg

SEQ ID NO: 1529 - RNA, 69 nt, synthetic construct
  misc_feature 1..69: note = Q8IWY4_1-23
  source 1..69: mol_type = other RNA
atgggagcagcagcagtaagatggcatttatgtgtattattagcattaggaacaagaggaagattagca

SEQ ID NO: 1530 - RNA, 69 nt, synthetic construct
  misc_feature 1..69: note = Q08431_1-23
  source 1..69: mol_type = other RNA
atgcctcgtcctcgtttattagctgctttatgtggtgctttattatgtgctccttctttattagttgct

SEQ ID NO: 1531 - RNA, 69 nt, synthetic construct
  misc_feature 1..69: note = Q99665_1-23
  source 1..69: mol_type = other RNA
atggcccatacttttcgcggatgttcacttgcatttatgtttataattacatggttacttataaaagca

SEQ ID NO: 1532 - RNA, 69 nt, synthetic construct
  misc_feature 1..69: note = Q6Q8B3_1-23
  source 1..69: mol_type = other RNA
atgtcagctccacgtctacttatatctataattataatggtatctgcatcttcatcttcatgtatgggt

SEQ ID NO: 1533 - RNA, 69 nt, synthetic construct
  misc_feature 1..69: note = Q07011_1-23
  source 1..69: mol_type = other RNA
atgggcaatagctgttataatattgtggccacacttttacttgtacttaattttgaacgcacacgttca

SEQ ID NO: 1534 - RNA, 69 nt, synthetic construct
  misc_feature 1..69: note = Q8NHL6_1-23
  source 1..69: mol_type = other RNA
atgactccaattttaactgtacttatatgcttaggcttaagtttaggcccacgcacacacgtacaagca

SEQ ID NO: 1535 - RNA, 69 nt, synthetic construct
  misc_feature 1..69: note = P36894_1-23
  source 1..69: mol_type = other RNA
atgccacaactatatatatatatccgtctattaggcgcttacttattcattatatctagagttcaaggt

SEQ ID NO: 1536 - RNA, 69 nt, synthetic construct
  misc_feature 1..69: note = Q16552_1-23
  source 1..69: mol_type = other RNA
atgaccccaggcaaaacaagcctagtatcactactattactattaagcctagaagcaatagtaaaagca

SEQ ID NO: 1537 - RNA, 69 nt, synthetic construct
  misc_feature 1..69: note = P42081_1-23
  source 1..69: mol_type = other RNA
atggatccacaatgtactatgggtctatctaatattttatttgtaatggcatttttactttcaggtgca

SEQ ID NO: 1538 - RNA, 69 nt, synthetic construct
  misc_feature 1..69: note = P43121_1-23
  source 1..69: mol_type = other RNA
atgggtttacctagattagtatgtgcatttttattagcagcttgttgttgttgtccacgtgtagctgga

SEQ ID NO: 1539 - RNA, 69 nt, synthetic construct
  misc_feature 1..69: note = O00206_1-23
  source 1..69: mol_type = other RNA
atgatgtctgcatctagattagcaggtacattaatacctgcaatggcatttctatcttgtgttagacct

SEQ ID NO: 1540 - RNA, 69 nt, synthetic construct
  misc_feature 1..69: note = P42701_1-23
  source 1..69: mol_type = other RNA
atggaaccattagtaacatgggtagtaccattattatttttatttttattatcaagacaaggagcagca

SEQ ID NO: 1541 - RNA, 72 nt, synthetic construct
  misc_feature 1..72: note = P06729_1-24
  source 1..72: mol_type = other RNA
atgtcttttccttgtaaatttgttgcttcttttcttcttatttttaatgtttcttctaaaggtgctgtttct

SEQ ID NO: 1542 - RNA, 72 nt, synthetic construct
  misc_feature 1..72: note = P15328_1-24
  source 1..72: mol_type = other RNA
atggcacaaagaatgacaacacaattactattactattagtatgggtagcagtagtaggagaagcacaaaca

SEQ ID NO: 1543 - RNA, 72 nt, synthetic construct
  misc_feature 1..72: note = P05112_1-24
  source 1..72: mol_type = other RNA
atgggtcttacttctcaacttttacctcctcttttttttttacttgcttgtgctggtaattttgttcatggt

SEQ ID NO: 1544 - RNA, 72 nt, synthetic construct
  misc_feature 1..72: note = P06127_1-24
  source 1..72: mol_type = other RNA
atgccaatgggatcactacaaccattagcaacactatatctattaggaatgctagtagcatcatgcttagga

SEQ ID NO: 1545 - RNA, 72 nt, synthetic construct
  misc_feature 1..72: note = P32248_1-24
  source 1..72: mol_type = other RNA
atggatttaggtaaacctatgaaatcagttttagttgtagctttacttgtaatttttcaagtatgtttatgt

SEQ ID NO: 1546 - RNA, 72 nt, synthetic construct
  misc_feature 1..72: note = Q7Z7D3_1-24
  source 1..72: mol_type = other RNA
atggcatcattaggacaaatattattctggagcataataagcataataataatactagcaggagcaatagca

SEQ ID NO: 1547 - RNA, 72 nt, synthetic construct
  misc_feature 1..72: note = P54756_1-24
  source 1..72: mol_type = other RNA
atgagaggaagtggaccaagaggagcaggaagaagaagaccaccaagtggaggaggagatacaccaataaca

SEQ ID NO: 1548 - RNA, 72 nt, synthetic construct
  misc_feature 1..72: note = Q92823_1-24
  source 1..72: mol_type = other RNA
atgcaactaaaaataatgccaaaaaaaaaaagactatcagccggaagagtaccactaatactattcctatgc

SEQ ID NO: 1549 - RNA, 72 nt, synthetic construct
  misc_feature 1..72: note = P19320_1-24
  source 1..72: mol_type = other RNA
atgccaggaaaaatggtagtaatattaggagcaagtaatatattatggataatgtttgcagcaagtcaagca

SEQ ID NO: 1550 - RNA, 72 nt, synthetic construct
  misc_feature 1..72: note = Q86UN2_1-24
  source 1..72: mol_type = other RNA
atgttaagaaaaggatgttgtgtagaattattattattattagtagcagcagaattaccattaggaggagga

SEQ ID NO: 1551 - RNA, 75 nt, synthetic construct
  misc_feature 1..75: note = P33151_1-25
  source 1..75: mol_type = other RNA
atgcaaagattaatgatgttattagcaacttcaggtgcatgtttaggtttattagcagttgcagctgtagctgca

SEQ ID NO: 1552 - RNA, 75 nt, synthetic construct
  misc_feature 1..75: note = P17813_1-25
  source 1..75: mol_type = other RNA
atggatagaggtacacttccacttgcagttgcacttctacttgcatcttgctctctatctccaacttcacttgca

SEQ ID NO: 1553 - RNA, 75 nt, synthetic construct
  misc_feature 1..75: note = P25445_1-25
  source 1..75: mol_type = other RNA
atgctaggaatatggacactactaccactagtactaacatcagtagccagactatcatcaaaatcagtaaacgca

SEQ ID NO: 1554 - RNA, 75 nt, synthetic construct
  misc_feature 1..75: note = P01730_1-25
  source 1..75: mol_type = other RNA
atgaacagaggagtaccattcagacatctactattagtactacaactagcactattaccagcagcaacacaagga

SEQ ID NO: 1555 - RNA, 75 nt, synthetic construct
  misc_feature 1..75: note = Q685J3_1-25
  source 1..75: mol_type = other RNA
atgcctagacctggaactatggctctatgtctacttacacttgtactttcacttttacctccacaagcagctgca

SEQ ID NO: 1556 - RNA, 75 nt, synthetic construct
  misc_feature 1..75: note = P17787_1-25
  source 1..75: mol_type = other RNA
atggcaagaagatgtggaccagtagcattattattaggatttggattattaagattatgtagtggagtatgggga

SEQ ID NO: 1557 - RNA, 75 nt, synthetic construct
  misc_feature 1..75: note = Q6UQ28_1-25
  source 1..75: mol_type = other RNA
atggctgtttttcatgatatgttacttcaacctttaggtatgtttctttgtctttctcttcaactttcttctgct

SEQ ID NO: 1558 - RNA, 75 nt, synthetic construct
  misc_feature 1..75: note = P13987_1-25
  source 1..75: mol_type = other RNA
atgggtatacaaggaggttcagttttatttggattattattagttttagcagtattttgtcatagtggacattca

SEQ ID NO: 1559 - RNA, 75 nt, synthetic construct
  misc_feature 1..75: note = P10721_1-25
  source 1..75: mol_type = other RNA
atgagaggagcaagaggggcatgggattttttatgtgtattattattattattaagagtacaaacaggaagtagt

SEQ ID NO: 1560 - RNA, 75 nt, synthetic construct
  misc_feature 1..75: note = P12319_1-25
  source 1..75: mol_type = other RNA
atggctccagctatggaatcacctacacttttatgtgtagctttacttttttttgcacctgatggtgtacttgca

SEQ ID NO: 1561 - RNA, 78 nt, synthetic construct
  misc_feature 1..78: note = Q9BZR6_1-26
  source 1..78: mol_type = other RNA
atgaaaagagcaagtgcaggaggaagtagattattagcatgggtattatggttacaagcatggcaagtagcagcacca

SEQ ID NO: 1562 - RNA, 78 nt, synthetic construct
  misc_feature 1..78: note = P25063_1-26
  source 1..78: mol_type = other RNA
atgggaagagcaatggtagcaagattaggattaggattactattactagcactattactaccaacacaaatatatagc

SEQ ID NO: 1563 - RNA, 78 nt, synthetic construct
  misc_feature 1..78: note = Q9NR97_1-26
  source 1..78: mol_type = other RNA
atggaaaatatgtttctacaatcatctatgcttacatgtatatttctacttatatctggatcttgcgaactatgtgca

SEQ ID NO: 1564 - RNA, 78 nt, synthetic construct
  misc_feature 1..78: note = Q8N131_1-26
  source 1..78: mol_type = other RNA
atgggattaggagcaagaggagcatgggcagcattattattaggaacattacaagtattagcattattaggagcagca

SEQ ID NO: 1565 - RNA, 78 nt, synthetic construct
  misc_feature 1..78: note = P49771_1-26
  source 1..78: mol_type = other RNA
atgacagtactagcaccagcatggtcaccaacaacatatctattactattactattactatcatcaggactatcaggc

SEQ ID NO: 1566 - RNA, 78 nt, synthetic construct
  misc_feature 1..78: note = P02679_1-26
  source 1..78: mol_type = other RNA
atgtcttggtctcttcatcctcgtaatcttattctttatttttatgctcttctttttctttcttctacttgtgttgct

SEQ ID NO: 1567 - RNA, 78 nt, synthetic construct
  misc_feature 1..78: note = P14784_1-26
  source 1..78: mol_type = other RNA
atggctgctcctgcattatcatggagattaccattactaattctattactacctctagcaacatcttgggcttcagct

SEQ ID NO: 1568 - RNA, 81 nt, synthetic construct
  misc_feature 1..81: note = P05362_1-27
  source 1..81: mol_type = other RNA
atggctccatcttcacctagacctgcattaccagctttattagtattattaggtgcattatttcctggacctggaaatgca

SEQ ID NO: 1569 - RNA, 81 nt, synthetic construct
  misc_feature 1..81: note = Q13740_1-27
  source 1..81: mol_type = other RNA
atggaaagtaaaggagcaagttcatgtagactattattctgtctattaatatcagcaacagtatttagaccaggattagga

SEQ ID NO: 1570 - RNA, 84 nt, synthetic construct
  misc_feature 1..84: note = Q13443_1-28
  source 1..84: mol_type = other RNA
atgggaagtggagcaagatttccaagtggaacattaagagtaagatggttattattattaggattagtaggaccagtattagga

SEQ ID NO: 1571 - RNA, 84 nt, synthetic construct
  misc_feature 1..84: note = P14151_1-28
  source 1..84: mol_type = other RNA
atgatatttccatggaaatgtcaatcaacacaaagagatctatggaacatattcaaactatggggatggacaatgctatgttgc

SEQ ID NO: 1572 - RNA, 84 nt, synthetic construct
  misc_feature 1..84: note = P56199_1-28
  source 1..84: mol_type = other RNA
atggcaccaagaccaagagcaagaccaggagtagcagtagcatgttgctggctattaacagtagtattaagatgttgcgtaagc

SEQ ID NO: 1573 - RNA, 84 nt, synthetic construct
  misc_feature 1..84: note = P11279_1-28
  source 1..84: mol_type = other RNA
atggctgcacctggatctgcacgtagacctctattattattattacttctattattacttggacttatgcattgcgcttcagct

SEQ ID NO: 1574 - RNA, 84 nt, synthetic construct
  misc_feature 1..84: note = P40259_1-28
  source 1..84: mol_type = other RNA
atggctagattagcattatcacctgtaccttcacattggatggtagctctattactattactatctgcagaaccagttccagct

SEQ ID NO: 1575 - RNA, 84 nt, synthetic construct
  misc_feature 1..84: note = P43681_1-28
  source 1..84: mol_type = other RNA
atggaactaggaggaccaggagcaccaagactattaccaccactattactattactaggaacaggactattaagagcaagttca

SEQ ID NO: 1576 - RNA, 84 nt, synthetic construct
  misc_feature 1..84: note = P18627_1-28
  source 1..84: mol_type = other RNA
atgtgggaagcacaatttttaggactattatttttacaaccattatgggtagcaccagtaaaaccattacaaccaggagcagaa

SEQ ID NO: 1577 - RNA, 84 nt, synthetic construct
  misc_feature 1..84: note = Q5ZPR3_1-28
  source 1..84: mol_type = other RNA
atgttaagaagaagaggaagtccaggaatgggagtacatgtaggagcagcattaggagcattatggttttgtttaacaggagca

SEQ ID NO: 1578 - RNA, 84 nt, synthetic construct
  misc_feature 1..84: note = P23415_1-28
  source 1..84: mol_type = other RNA
atgtactcattcaacacactaagactatacctatgggaaacaatagtattcttctcactagcagcatcaaaagaagcagaagca

SEQ ID NO: 1579 - RNA, 84 nt, synthetic construct
  misc_feature 1..84: note = Q8TD46_1-28
  source 1..84: mol_type = other RNA
atgctttgtccttggcgtactgctaatcttggtcttttacttattcttactatttttcttgttgctgcttcttcttctctttgt

SEQ ID NO: 1580 - RNA, 87 nt, synthetic construct
  misc_feature 1..87: note = P17301_1-29
  source 1..87: mol_type = other RNA
atgggaccagaaagaacaggagcagcaccactaccactactattagtactagcactatcacaaggaatattaaactgttgcttagca

SEQ ID NO: 1581 - RNA, 87 nt, synthetic construct
  misc_feature 1..87: note = P12821_1-29
  source 1..87: mol_type = other RNA
atgggagcagcatcaggaagaagaggaccaggactattactaccactaccactattactattactaccaccacaaccagcactagca

SEQ ID NO: 1582 - RNA, 87 nt, synthetic construct
  misc_feature 1..87: note = Q14118_1-29
  source 1..87: mol_type = other RNA
atgagaatgagcgtaggattatcattactattgccattatggggaagaacattcttactattactaagcgtagtaatggcacaatca

SEQ ID NO: 1583 - RNA, 87 nt, synthetic construct
  misc_feature 1..87: note = P05231_1-29
  source 1..87: mol_type = other RNA
atgaattctttttctacttctgcttttggtcctgttgctttttctcttggtcttcttttagttcttcctgctgcttttcctgctcct

SEQ ID NO: 1584 - RNA, 87 nt, synthetic construct
  misc_feature 1..87: note = O00602_1-29
  source 1..87: mol_type = other RNA
atggaattaagcggagcaacaatggcaagaggactagcagtattactagtactatttctacatataaaaaacttaccagcacaagca

SEQ ID NO: 1585 - RNA, 87 nt, synthetic construct
  misc_feature 1..87: note = Q9Y6Q6_1-29
  source 1..87: mol_type = other RNA
atggcaccaagagcaagaagaagaagaccattattcgcactattactattatgcgcactattagcaagactacaagtagcactacaa

SEQ ID NO: 1586 - RNA, 87 nt, synthetic construct
  misc_feature 1..87: note = Q9ULI3_1-29
  source 1..87: mol_type = other RNA
atggcttcacctagagcttcacgttggcctccacctctattactacttctacttccattactattactacctccagctgcacctgga

SEQ ID NO: 1587 - RNA, 90 nt, synthetic construct
  misc_feature 1..90: note = Q8NBP7_1-30
  source 1..90: mol_type = other RNA
atgggaacagtaagttcaagaagaagctggtggccactaccactattactattactattattattactaggaccagcaggagcaagagca

SEQ ID NO: 1588 - RNA, 90 nt, synthetic construct
  misc_feature 1..90: note = P02675_1-30
  source 1..90: mol_type = other RNA
atgaaaagaatggtatcctggtcattccacaaactcaaaaccatgaaacacctcctactcctactcctatgcgtattcctagtcaaatcc

SEQ ID NO: 1589 - RNA, 90 nt, synthetic construct
  misc_feature 1..90: note = P06756_1-30
  source 1..90: mol_type = other RNA
atggcatttccaccaagaagaagattaagattaggaccaagaggactaccactattactatcaggattactattaccattatgcagagca

SEQ ID NO: 1590 - RNA, 93 nt, synthetic construct
  misc_feature 1..93: note = O60609_1-31
  source 1..93: mol_type = other RNA
atggtaagaccactaaacccaagaccactaccaccagtagtactaatgctactactactactaccaccatcaccactaccactagcagcagga

SEQ ID NO: 1591 - RNA, 93 nt, synthetic construct
  misc_feature 1..93: note = P50895_1-31
  source 1..93: mol_type = other RNA
atggaaccaccagacgcaccagcacaagcaagaggagcaccaagattactattactagcagtattactagcagcacatccagatgcacaagca

SEQ ID NO: 1592 - RNA, 93 nt, synthetic construct
  misc_feature 1..93: note = P28906_1-31
  source 1..93: mol_type = other RNA
atgctagtaagaagaggagcaagagcaggaccaagaatgccaagaggatggacagcactatgtctattaagcctattaccaagcggattcatg

SEQ ID NO: 1593 - RNA, 93 nt, synthetic construct
  misc_feature 1..93: note = P08514_1-31
  source 1..93: mol_type = other RNA
atggctagagctttatgtccattacaagcattatggttattagaatgggtattattattattaggtccatgtgctgctcctccagcatgggca

SEQ ID NO: 1594 - RNA, 93 nt, synthetic construct
  misc_feature 1..93: note = P00742_1-31
  source 1..93: mol_type = other RNA
atgggaagaccactacacctagtactactatcagcatcactagcaggactactactactaggagaatcactattcataagaagagaacaagca

SEQ ID NO: 1595 - RNA, 96 nt, synthetic construct
  misc_feature 1..96: note = P26006_1-32
  source 1..96: mol_type = other RNA
atgggaccaggaccaagtagagcaccaagagcaccaagattaatgttatgtgcattagcattaatggtagcagcaggaggatgtgtagtaagtgca

SEQ ID NO: 1596 - RNA, 96 nt, synthetic construct
  misc_feature 1..96: note = P13726_1-32
  source 1..96: mol_type = other RNA
atggaaacaccagcatggccaagagtaccaagaccagaaacagcagtagcaagaacattattattaggatgggtatttgcacaagtagcaggagca

SEQ ID NO: 1597 - RNA, 96 nt, synthetic construct
  misc_feature 1..96: note = P11912_1-32
  source 1..96: mol_type = other RNA
atgcctggaggtccaggtgtacttcaagcattacctgctactatatttttattatttttattatctgcagtttatcttggacctggatgtcaagct

SEQ ID NO: 1598 - RNA, 96 nt, synthetic construct
  misc_feature 1..96: note = Q9H6X2_1-32
  source 1..96: mol_type = other RNA
atggcaacagcagaaagaagagcattaggaataggatttcaatggttaagtttagcaacattagtattaatatgtgcaggacaaggaggaagaaga

SEQ ID NO: 1599 - RNA, 99 nt, synthetic construct
  misc_feature 1..99: note = Q8IWK6_1-33
  source 1..99: mol_type = other RNA
atggaaccaccaggaagaagaagaggaagagcacaaccaccattattattaccattaagtttattagcattattagcattattaggaggaggaggagga

SEQ ID NO: 1600 - RNA, 99 nt, synthetic construct
  misc_feature 1..99: note = P58335_1-33
  source 1..99: mol_type = other RNA
atggtagcagaaagaagtccagcaagaagtccaggaagttggttatttccaggattatggttattagtattaagtggaccaggaggattattaagagca

SEQ ID NO: 1601 - RNA, 102 nt, synthetic construct
  misc_feature 1..102: note = P06731_1-34
  source 1..102: mol_type = other RNA
atggaatcaccatcagcaccaccacacagatggtgcataccatggcaaagactactactaacagcatcactactaacattctggaacccaccaacaacagca

SEQ ID NO: 1602 - RNA, 102 nt, synthetic construct
  misc_feature 1..102: note = P33681_1-34
  source 1..102: mol_type = other RNA
atgggtcacactagacgtcaaggtacatctccatctaaatgtccatatctaaatttctttcaacttctagttctagctggactttcacatttctgttcaggt

SEQ ID NO: 1603 - RNA, 105 nt, synthetic construct
  misc_feature 1..105: note = P38567_1-35
  source 1..105: mol_type = other RNA
atgggtgttcttaaatttaaacatattttttttcgttcttttgttaaatcttctggtgtttctcaaattgtttttacttttcttcttattccttgttgtcttact

SEQ ID NO: 1604 - RNA, 105 nt, synthetic construct
  misc_feature 1..105: note = P16410_1-35
  source 1..105: mol_type = other RNA
atggcttgccttggatttcaacgtcacaaagcacaactaaatctagctacacgtacatggccatgtacacttctatttttccttctatttatacctgtattttgc

SEQ ID NO: 1605 - RNA, 111 nt, synthetic construct
  misc_feature 1..111: note = P15814_1-37
  source 1..111: mol_type = other RNA
atgagaccaggaacaggacaaggaggattagaagcaccaggagaaccaggaccaaatttaagacaaagatggccattattattattaggattagcagtagtaacacatgga

SEQ ID NO: 1606 - RNA, 114 nt, synthetic construct
  misc_feature 1..114: note = Q92956_1-38
  source 1..114: mol_type = other RNA
atggaaccaccaggagattggggaccaccaccatggagatcaacaccaaaaacagacgtactaagattagtactatatctaacattcttaggagcaccatgttacgcaccagca

SEQ ID NO: 1607 - RNA, 123 nt, synthetic construct
  misc_feature 1..123: note = Q86VB7_1-41
  source 1..123: mol_type = other RNA
atgtctaaacttagaatggtacttctagaagactctggatctgcagatttccgtagacatttcgttaacctttcacctttcactataactgtagttctacttctatctgcatgtttcgttaca

SEQ ID NO: 1608 - RNA, 123 nt, synthetic construct
  misc_feature 1..123: note = P08648_1-41
  source 1..123: mol_type = other RNA
atgggatcaagaacaccagaaagcccactacatgcagtacaattaagatggggaccaagaagaagaccaccattactaccactattactattactattaccaccaccaccaagagtaggagga

SEQ ID NO: 1609 - RNA, 123 nt, synthetic construct
  misc_feature 1..123: note = P16109_1-41
  source 1..123: mol_type = other RNA
atggcaaactgtcaaatagcaatactatatcaaagattccaaagagtagtattcggaataagccaactactatgcttcagcgcactaataagcgaactaacaaaccaaaaagaagtagcagca

SEQ ID NO: 1610 - RNA, 132 nt, synthetic construct
  misc_feature 1..132: note = O75326_1-44
  source 1..132: mol_type = other RNA
atgacaccaccaccaccaggaagagcagcaccatcagcaccaagagcaagagtaccaggaccaccagcaagattaggattaccattaagattaagattactattactattatgggcagcagcagcatcagca

SEQ ID NO: 1611 - RNA, 135 nt, synthetic construct
  misc_feature 1..135: note = Q8N2Q7_1-45
  source 1..135: mol_type = other RNA
atggctttacctagatgtacatggccaaattatgtttggcgtgcagttatggcttgtttagtacatagaggtttaggtgcacctttaactttatgtatgttaggatgtttattacaagctggacatgtattatca

SEQ ID NO: 1612 - RNA, 138 nt, synthetic construct
  misc_feature 1..138: note = Q86UN3_1-46
  source 1..138: mol_type = other RNA
atgcttccaggtctacgtagacttctacaagctcctgcatctgcatgtctacttctaatgctacttgcacttccacttgcagcaccatcttgccctatgctttgcacttgctattcatctccacctacagtttcatgt

SEQ ID NO: 1613 - RNA, 540 nt, synthetic construct
  misc_feature 1..540: note = A0A5B9
  source 1..540: mol_type = other RNA
atggacctaaaaaacgtattcccaccagaagtagcagtattcgaaccatcagaagcagaaatatcacacacacaaaaagcaacactagtatgtttagcaacaggattctacccagaccacgtagaattatcatggtgggtaaacggaaaagaagtacactcaggagtatcaactgacccacaaccactaaaagaacaaccagcattaaacgactcaagatactgcttatcatcaagactaagagtatcagcaacattctggcaaaacccaagaaatcactttagatgccaagtacaattctacggactatcagaaaacgacgaatggacacaagacagagcaaaaccagtaacacaaatagtatcagcagaagcatggggaagagcagactgcggattcacatcagaatcataccaacaaggagtactatcagcaacaatactatacgaaatactactaggaaaagcaacactatacgcagtcctagtatcagcactagtactaatggcaatggtaaaaagaaaagactcaagaggataa

SEQ ID NO: 1614 - RNA, 465 nt, synthetic construct
  misc_feature 1..465: note = B7Z8K6
  source 1..465: mol_type = other RNA
atgtcacaaccacacacaaaaccatcagtattcgtaatgaaaaacggaacaaacgtagcatgcctagtaaaagaattctacccaaaagacataagaataaacctagtatcatcaaaaaaaataacagaattcgacccagcaatagtaatatcaccatcaggcaaatacaacgcagtaaaactaggaaaatacgaagactcaaactcagtaacatgctcagtacaacacgacaacaaaacagtacactcaacagacttcgaagtcaaaacagactcaacagaccacgtaaaaccaaaagaaacagaaaacacaaaacaaccatcaaaatcatgccacaaaccaaaagcaatagtacacacagaaaaagtaaacatgatgtcactcacagtactaggactacgaatgctcttcgcaaaaacagtagcagtaaacttcctactaacagcaaaactattcttcctataa

SEQ ID NO: 1615 - RNA, 645 nt, synthetic construct
  misc_feature 1..645: note = B9A064
  source 1..645: mol_type = other RNA
atgagaccaaaaacaggacaagtaggatgtgaaacaccagaagaactaggaccaggaccaagacaaagatggcctctcttactcttaggattagcaatggtagctcacggcttactaagaccaatggtagcaccacaatcaggagatccagacccaggagcaagcgtaggatcatcaagatcatcattaagatcattatggggaagactattactacaaccatcaccacaaagagcagaccccagatgttggccaagaggattctggtcagaaccacaatcattatgttatgtattcggaacaggcacaaaagtaacagtactaggacaaccaaaagcaaacccaacagtaacattattcccaccatcaagtgaagaattacaagcaaacaaagcaacactagtatgcttaataagcgacttttatccaggagcagtcacagtagcatggaaagcagatggatcacccgtaaaagcaggcgttgaaacaaccaaaccatcaaaacaatcaaataacaaatacgcagcatcatcatatctatcactaactccagaacaatggaaatcacacagatcatactcatgtcaagtaacacatgaaggttcaacagtagaaaaaacagtcgcacctacagaatgttcatga

SEQ ID NO: 1616 - RNA, 2520 nt, synthetic construct
  misc_feature 1..2520: note = O00206
  source 1..2520: mol_type = other RNA
atgatgtcagcttctagacttgcaggcaccctaatacccgcaatggcattcctatcatgtgtaagacctgaatcctgggaaccttgcgtagaagttgtacctaacatcacataccaatgcatggaactcaatttttataaaatcccagacaatctaccattttcaaccaaaaatctagacctttcctttaacccattaagacatcttggatcatattcattcttctcattccctgaactacaagtactcgatctttcacgttgcgaaatccaaacaatagaagacggcgcttaccaatcactctcacatctatctactcttatattaactggaaaccccatacaatcattggcactcggagcattctcagggctctcatcactccaaaaattagttgctgttgaaacaaacttagcctcactagaaaactttcctataggacatcttaaaacactcaaagaactcaatgtagcacacaacctcatacaatcattcaaacttcccgaatacttctcaaatctcaccaacctagaacatcttgacctcagttcaaacaaaatacaatcaatatactgcacggatctacgcgtactacatcaaatgccccttttaaacctaagcctagacttatctttaaacccaatgaactttattcaacccggcgcatttaaagaaatacgtcttcataaattaacccttagaaacaattttgactctctaaacgttatgaaaacatgcatacaaggattagctggccttgaagtacaccgtctagtactcggagaatttagaaatgaaggaaatctagaaaaatttgacaaatctgcattagaaggattatgtaacctaactattgaagaatttcgtctcgcatacttagattattacctagacgacataatagatctatttaattgtttaacaaatgtatctagcttctctctagtatcagttacgattgaaagagtaaaagatttctcctacaatttcggctggcaacacttagaattagtaaactgtaaattcggccaatttccaactctaaaactaaaatcattaaaacgcctaacctttacatctaataaaggaggaaatgcattttctgaagtcgacctcccatccctagaatttctagatctaagtcgcaatggactatcattcaaaggatgttgctcacaatcagattttggaacaacatcactcaaatatttagatttatcattcaacggcgtaataacaatgtcctcaaactttctaggcctcgaacaattggaacacttagacttccaacattcaaatttaaaacaaatgtccgagttcagcgtatttctttccctgcgaaacctaatatacctcgacatatcccacacacatacgagggtagctttcaacggtatttttaacggcttatcatcactagaagtactcaaaatggccggcaactctttccaagaaaatttcctacccgacatattcacagaactaagaaatctaacattcctcgacctctcccagtgccaactcgaacaactgagccctacagcttttaactccctaagctctctacaagtactcaacatgtcacataacaacttcttctctttagacaccttcccatataaatgcctcaattcccttcaggtattagactatagtttaaaccatattatgacatcaaagaaacaggaacttcaacacttcccctccagcctcgctttcttaaacttaacacaaaatgatttcgcttgtacatgtgaacaccaatcttttctacaatggataaaagaccaacgtcaactattagtcgaagtagaacgcatggaatgtgccacaccctccgataaacaaggcatgcccgtactatcactaaacatcacatgtcaaatgaacaaaactataataggcgtttcagtcctttcagttctagtcgtatccgtagtcgctgtcctagtatataaattctatttccacctaatgttattggctggctgtataaaatatggtcgcggtgaaaacatctacgacgctttcgtaatatacagcagtcaagacgaagactgggtaagaaacgaacttgtcaaaaatctagaagaaggcgtacctcccttccaactatgcctacattaccgagatttcatacccggtgtagccatagcagcaaatattatccacgaaggcttccacaaatccagaaaagtaattgtcgttgtatcccagcactttatacaatcaagatggtgtattttcgaatacgaaattgcccaaacctggcaatttttatcatcacgagcaggaatcatctttatagtattacaaaaagttgagaaaacactcttacgacaacaagtagaactatatagacttttatctcgcaatacatatctagaatgggaagattctgttttaggaagacacatcttctggagaagactaagaaaagcactattagacggcaaatcatggaatcccgaaggtacagtaggaactggctgtaattggcaagaagcaacatcaatatga

SEQ ID NO: 1617 - RNA, 1377 nt, synthetic construct
  misc_feature 1..1377: note = P01730
  source 1..1377: mol_type = other RNA
atgaaccgaggagtaccattccgacacctcctactagtactacaactagcactattaccagcagcaacacaaggaaaaaaagtagtactaggaaaaaaaggagacacagtagaattaacctgtacagcaagccaaaaaaaatcaatacaattccactggaaaaactcaaaccaaataaaaatattaggtaaccaaggcagttttctaacaaagggaccaagcaaattaaacgatagggccgattcaagaagatcactttgggaccaaggcaacttcccattaataataaaaaatttaaaaatagaagatagcgacacctacatatgtgaagtagaagaccaaaaagaagaggtacaactattagtattcggactaaccgccaactcggacacacacttattacaaggacaatcactcaccctaacattagaatcaccaccaggatccagcccatcagtacaatgcagatcacccagaggaaaaaacatacaaggaggaaaaaccttaagcgtatctcaactcgaactacaagactcaggaacatggacatgcacagttctacaaaaccaaaaaaaagtcgaattcaaaatagatatagtagtattagcattccaaaaagcaagctctatagtttataaaaaagaaggagaacaagtagaattcagtttccccttagcattcaccgtagaaaaattaactggcagcggagaactttggtggcaagctgaacgagcgagcagctcaaaatcatggataacattcgatctaaaaaataaagaagtaagcgttaaaagagtaactcaagacccaaaacttcaaatgggaaaaaaactacctctacatctaacactcccacaagcattaccacaatatgcaggatcaggcaatttaacactagctctagaagcaaaaacaggaaaactacatcaagaagtaaatttagtcgtaatgcgcgccacccaattacaaaaaaatctcacatgcgaagtatggggaccaacctctcccaaactaatgttatcactcaaattagaaaataaagaagcaaaagtaagcaaaagagaaaaagcagtatgggtactaaacccagaagcaggaatgtggcaatgcctattatcagattccggacaagtactactagaatccaatataaaggtactaccaacatggtcaaccccagttcaaccaatggcattaatagtcctaggcggagtagccggactactattattcattggactaggaatattcttctgtgttagatgcagacatagaagaagacaagctgaaagaatgtcacaaatcaaaagactattaagtgaaaagaaaacatgccaatgcccacaccgctttcaaaaaacatgcagccctatatga

SEQ ID NO: 1618 - RNA, 537 nt, synthetic construct
  misc_feature 1..537: note = P01850
  source 1..537: mol_type = other RNA
atggaagatctaaataaagtattcccaccagaagtagcagtatttgaaccaagcgaagcagaaatatcgcacacacaaaaagcaacactagtatgcttagcaactggatttttcccagaccatgtagaactatcatggtgggtaaatggaaaagaagtacactcaggagtatcaacagacccacaaccactaaaagaacaaccagcactaaatgactcaagatactgcctaagctcaagattaagagtaagcgcaaccttctggcaaaacccaagaaatcacttcagatgtcaagtacaattttacggactatcagaaaatgacgaatggacacaagacagagcaaaaccagtaacacaaatagtatcagcagaagcatggggaagagcagactgcggattcacaagcgtaagctatcaacaaggagtactatcagcaacaatattatacgaaatactactaggaaaagcaacattatacgcagtattagtatcagcattagtattaatggcaatggtaaaaagaaaagatttctaa

SEQ ID NO: 1619 - RNA, 624 nt, synthetic construct
  misc_feature 1..624: note = P07766
  source 1..624: mol_type = other RNA
atgcaaagtggaacacattggagagtattaggattatgcttattatcagtaggagtatggggacaagacggaaacgaagaaatgggaggaataacgcaaacaccatataaagtaagcataagtggaacaacagtaatactaacatgcccacaatatccaggaagcgaaatactatggcaacacaatgacaaaaatataggaggagacgaagatgacaaaaatataggaagtgatgaagatcacttaagcctaaaagaattttcagaattagaacaaagcggatactatgtatgttacccaagaggaagtaaaccagaagacgcaaacttctacttatacttgagagcaagagtatgcgaaaactgtatggaaatggatgtaatgagtgtagcaacaatagtaatagtagacatatgcataacagggggattactactattagtatactattggagtaaaaacagaaaagcaaaagcaaaaccagtaacaagaggagcaggagcaggaggaagacaaagaggacaaaataaagaaagaccaccaccagtaccaaacccagactacgaaccaataagaaaaggacaaagagacttatactcaggattaaaccaaagaagaatatga

SEQ ID NO: 1620 - RNA, 3915 nt, synthetic construct
  misc_feature 1..3915: note = P08575
  source 1..3915: mol_type = other RNA
atgtacttatggctcaaactattagcattcggatttgcctttctcgacaccgaagtctttgtaactggccaatccccaacaccctcccccaccggcctaactaccgcaaaaatgccgtcagtccccctttcatctgatcccttgccaacacacacaacagcattttcaccggcaagcacttttgaacgagaaaacgatttttctgagacaacaacaagtctatccccagacaacacttccacccaggtttccccagattccctagataacgcaagtgcattcaacactacaggagtgtcctctgtacaaacgccacatctaccgacacacgctgactcacaaacacctagtgcaggaaccgatacccaaacattttcaggctctgccgccaacgctaaattgaacccaacgcctggcagcaacgcaatatctgacgttcccggcgaacgctcaacagcttctacctttccaaccgatccagttagtcctttaacaacaactttaagcctagcacaccattcatcagccgctctaccagctcgaacctctaacacaaccattacagcaaacacctccgatgcatatcttaacgcatcagaaacaactacattgtccccatcaggatctgcggtcatcagtacaaccactatagcaaccacaccttcaaaacctacctgcgatgaaaaatatgccaacattacagtagattacctatacaataaagaaacaaaattgtttaccgcaaaattaaacgtcaacgaaaatgtagaatgcggaaacaatacatgcactaacaatgaagtacacaaccttacagaatgcaaaaatgcgtctgtatccataagccataactcatgtacagcccctgacaaaacattaatactagacgtaccacccggcgtagaaaaatttcagcttcacgattgtacacaggtagaaaaagccgataccactatatgcttaaaatggaaaaatatagaaacgtttacttgtgatacacaaaatattacctatagattccaatgcgggaatatgatatttgacaacaaagaaatcaaattagaaaatttagaacctgaacacgaatataaatgtgacagcgaaatactttacaataatcataaatttacaaatgcatcaaaaataatcaaaaccgatttcggttcaccaggtgaaccccaaattatcttttgcaggagcgaagcagcacaccaaggtgtaataacttggaatccacctcaaagatcttttcacaacttcacattatgctacatcaaagaaacagaaaaagattgcctaaatctagataaaaatttaatcaaatatgatttacaaaatctaaaaccctacactaaatacgtattgagcttacacgcatacataattgcaaaagtacaacgcaacggatcagcagcaatgtgtcacttcaccaccaaatctgctccaccatcccaagtatggaacatgaccgtatcaatgacttcagataattctatgcatgtaaaatgcagacccccgagagacagaaacggaccacatgaaagatatcatcttgaagttgaagcgggaaataccctcgtacgcaacgagtcacacaaaaattgcgacttcagagtgaaagatctacaatattccacagactacaccttcaaagcatattttcacaacggtgattacccaggagaacctttcattttgcatcattctacatcctacaatagcaaagcactaatagcattcttggcttttctaataatagtaacatccatagcacttctagtcgtactatacaaaatttatgatttacacaagaaaagatcatgtaacctcgacgaacaacaggaattagtcgaaagagatgatgaaaaacaactgatgaacgtcgaaccaattcatgcagacatcctattagaaacatataaaagaaaaatagctgacgaaggtagattatttctagcagagttccaatcaatacctagagttttcagcaaattcccaataaaagaagcaagaaaacctttcaaccaaaataaaaaccgatacgttgatattttaccatacgactataacagagttgaactaagtgaaataaacggagacgcaggaagtaattatatcaatgcatcctacatagacgggttcaaagaaccaagaaaatatatcgcagcacaaggccctcgagatgaaacagttgatgatttttggagaatgatatgggaacaaaaagcaaccgtgattgtaatggttaccagatgcgaagaaggaaacagaaacaaatgtgcggaatactggcccagtatggaagaaggtacaagagcatttggggatgtcgtagtcaaaataaatcagcataaaagatgccctgactacattattcaaaaactgaatattgtcaacaagaaagaaaaagcaacaggacgtgaagtaactcatatacaattcacctcttggccagatcatggagtacccgaagacccgcatttactgctaaaacttcgcagaagagtaaatgcattctcaaacttcttcagcggtccgattgtagtacactgttcagcaggcgtaggcagaacaggaacttacataggaatagacgccatgctagaaggactcgaagctgaaaacaaagtcgatgtctatggttatgttgtgaaacttagacgacaaagatgcctaatggttcaagtagaagcacaatacatcctcatccaccaagcactcgttgaatacaatcaatttggagaaacagaagtaaacctttctgaattacacccctacctccacaacatgaagaaaagagatcccccaagtgaaccttcaccgctagaagctgagttccaaaggttaccctcctatagatcctggagaacccaacatataggcaaccaggaagaaaacaaaagtaaaaatcgcaactcaaatgtcatcccttatgactacaatagagttcccttaaaacatgaattagaaatgtctaaagaatctgaacatgacagtgacgaatcttccgacgacgattccgatagtgaagaaccatctaaatacataaacgcatcgtttatcatgagctattggaaaccagaagtaatgatcgcagcacaaggtccacttaaagaaacgatcggagatttttggcaaatgatctttcaaagaaaagtcaaagtcatagtaatgctgactgaacttaaacatggagaccaagaaatatgtgcccaatactggggagaaggtaaacaaacatacggagacatagaagtcgacttaaaagacacagacaaaagttcaacctacaccctaagagtatttgagcttcgacattcgaaacgaaaagattcaagaacagtataccaatatcaatataccaattggtcagtcgaacaactcccagctgaacccaaagaattaatatcaatgattcaagtagtcaaacagaaactaccacagaaaaatagctcagagggtaataaacatcacaaatcaaccccattattaatccattgcagagatggaagtcaacaaacgggaatattctgtgctctgttaaacctactagaatcagcagaaacagaggaagtagtggatatatttcaggtagttaaagcacttagaaaagcacgtccaggaatggtttcaacatttgaacaataccaatttctatacgacgttatagcttcaacttatccagctcaaaacggacaggtgaagaaaaacaatcaccaagaagataaaattgagtttgacaacgaagtagacaaagtcaaacaagatgctaactgtgtcaacccgttaggtgcccctgaaaaactaccagaagccaaagaacaagcagaaggctcagaaccaacatctggcaccgaaggaccagaacacagtgtaaatggtcccgccagcccagctttaaatcaaggttcataa

SEQ ID NO: 1621 - RNA, 765 nt, synthetic construct
  misc_feature 1..765: note = P08637
  source 1..765: mol_type = other RNA
atgtggcaactactactaccaacagcactcttactattagtatcagcaggaatgagaacagaagacctcccaaaagcagtagtattcctagaaccacaatggtacagagtactagaaaaagactcagtaacattaaaatgccaaggagcatactcaccagaagataactcaacccaatggttccacaacgaatcactaatatcatcccaagcatcatcatacttcatagacgcagcaacagtagacgactctggagaatacagatgccaaaccaacttatcaacattatcagacccagtacaactagaagtccacataggatggctactactacaagcacccagatgggtcttcaaagaagaagacccaatacacctaagatgccacagctggaaaaacacagcattacacaaagtaacatacctacaaaacggaaaaggaagaaaatactttcaccacaactcagacttttacataccaaaagccacattaaaagactcaggatcatacttctgccgaggactattcggatccaaaaacgtttcatcagaaacagtaaacataacaataacacaaggactagcagtctcaacaatatcatcattcttcccaccaggctaccaagtatcattctgcctagtaatggtattactatttgcagtagacacaggactatacttctcagtaaaaacaaacataagatcatcaacaagagactggaaagaccacaaatttaaatggagaaaagacccacaagacaaatga

SEQ ID NO: 1622 - RNA, 663 nt, synthetic construct
  misc_feature 1..663: note = P10747
  source 1..663: mol_type = other RNA
atgttaagactactactagcactaaacctattcccatcaatacaagtaaccggaaacaaaatactagtaaaacaatcaccaatgctagtagcatacgacaacgcagtaaacttatcatgcaaatactcctacaacctattctctagagaattcagagcatcactccacaaaggactagactcagcagtagaagtatgcgtagtatacggaaactactcccaacaactacaagtatactcaaaaacaggattcaactgcgacggaaaactaggaaacgaatcagtaacattctacctacaaaacctatacgtaaaccaaacagacatatacttctgcaaaatagaagtaatgtacccaccaccatatctagacaacgaaaaatcaaacggaactataatccacgtaaaaggaaaacacctctgcccatcaccactattccccggaccatcaaaaccattctgggtattagtagtagtaggaggagtactagcatgctactcactactagtcacagtagcattcataatattctgggtaagatcaaaaagatcaagattactacactcagactacatgaacatgacaccaagacgaccaggaccaacaagaaaacactatcaaccatacgcaccaccaagagacttcgcagcataccgatcatga

SEQ ID NO: 1623 - RNA, 681 nt, synthetic construct
  misc_feature 1..681: note = P11912
  source 1..681: mol_type = other RNA
atgccaggaggaccaggagtattacaagcactaccagcaacaatatttctattatttttactatctgcagtatacttaggacctggatgtcaagcattatggatgcataaagtaccagctagcttaatggtatcactaggagaagacgcacactttcaatgtccacataactcttcaaacaacgcaaacgtaacatggtggagagtactacacggaaactatacatggccaccagaatttctaggaccaggagaagatccaaatggaacattaataatacaaaacgtaaacaaaagccacggaggaatatatgtatgtagagtacaagaaggaaatgaatcataccaacaatcatgcggaacatatctaagagtaagacaaccaccaccaagaccattcttagacatgggagaaggaactaaaaatagaataataacagcagaaggaataatattactattttgcgcagtagtacccggaacattactattatttagaaaacgatggcaaaacgaaaaattaggactagacgcaggagatgaatatgaagatgaaaatctatatgaaggactaaatctagatgactgttcaatgtacgaagacatatcacgaggactacaaggaacatatcaagatgtaggatcattaaacataggagacgtacaattagaaaaaccatga

SEQ ID NO: 1624 - RNA, 1671 nt, synthetic construct
  misc_feature 1..1671: note = P15391
  source 1..1671: mol_type = other RNA
atgccaccacccagattattatttttcctactattcttaacaccaatggaagtaagaccagaagaaccattagtagtaaaagtagaagaaggtgataatgcggtacttcaatgtttaaaaggaacatcggatggaccaacacaacaattaacatggtcaagagaaagtccattaaaaccgtttttaaaattaagtttaggattacctggacttggaatacatatgagaccactagcaatatggttattcatttttaatgtatcacaacaaatgggaggattttacctatgccaaccaggaccaccaagtgaaaaggcttggcaacctggatggacagtaaatgtagaaggatccggtgaactatttagatggaacgtatcagatcttggtggattaggatgcggtcttaaaaatagatccagtgaaggaccaagtagcccaagtggaaaactaatgagtccaaaactatacgtatgggcaaaagatcgaccagagatctgggaaggagaacctccatgtttacctccaagagatagtctaaatcaaagtctttcacaagacttaacaatggcaccaggaagtactttgtggctatcttgtggcgtaccaccggattctgtaagcagaggaccgctaagttggacacatgtacatcctaaaggaccaaaaagtttattatcactagaactaaaagatgacagaccagctagggatatgtgggttatggaaacaggattgttattacccagagctacagcgcaggatgctggaaaatattattgccatagaggaaatctaacaatgagtttccacttagaaattacagcacgaccagtactatggcattggttattaagaacaggaggatggaaagtatctgcagtaacattagcctatctcatattttgcttatgttcattagtaggcatactacatcttcaaagagctttagtactcagaagaaaaagaaagagaatgacagatccaacacgaagatttttcaaagttacacccccacctggctcaggacctcaaaatcaatatggtaatgtactttcacttcccacacctacatctggtttagggagagcacaaagatgggcagctggattaggcggcacagctccatcctatggtaatccatcaagtgatgtacaagcagatggagcactcggaagtagaagccctccgggagtaggaccagaagaagaagaaggagaaggatatgaagaaccagattcagaagaagatagtgaattttacgaaaatgattccaatttaggtcaagatcaattaagtcaagacggtagcggatatgaaaatcctgaagatgaaccattaggtcctgaagatgaagactcattctcgaatgcagaaagttatgaaaacgaagatgaagaactaactcaaccagtagcaagaacaatggactttttatccccacatggatcagcttgggatccatcaagagaagccacatcattaggatcccaaagttatgaagatatgagaggaatattatatgctgcacctcaattgcgatctataagaggacaaccgggaccaaatcatgaagaagatgcagatagctatgaaaacatggataacccagatggacctgatccagcatggggaggaggaggtcgaatgggtacatggtcaacaagataa

SEQ ID NO: 1625 - RNA, 672 nt, synthetic construct
  misc_feature 1..672: note = P16410
  source 1..672: mol_type = other RNA
atggcttgcctaggattccaaagacacaaagcacaactaaacctagcaacacgaacatggccatgcacactattattcttcttactattcataccagtattctgcaaagcaatgcatgtagcacaaccagccgtagtactagcatcctcaagaggaatagcatcattcgtatgcgaatacgcatcaccaggaaaagcaacagaagtaagagtaacagtattaagacaagcagactcacaagtaacagaagtatgcgcagcaacatacatgatgggaaacgaattaacattcttagacgactcaatatgcacaggaacatcaagcggcaaccaagtaaatctaacaatacaaggactaagagcaatggacacaggcctatacatatgcaaagtagaactaatgtacccaccaccatactacctaggaataggaaacggcacacaaatatacgtaatagacccagaaccatgtccagattcagacttcttattatggatactagcagcagtctcatcaggattattcttctactcattcctactaacagcagtatcactatcaaaaatgttaaaaaaaagatcaccactaacaacaggcgtatacgtaaaaatgccaccaacagaaccagaatgcgaaaaacaattccaaccatacttcatccctataaactga

SEQ ID NO: 1626 - RNA, 1419 nt, synthetic construct
  misc_feature 1..1419: note = P16671
  source 1..1419: mol_type = other RNA
atgggatgcgacagaaactgcggcctaattgcaggagcagtaataggagcagtacttgccgtattcggaggaatactcatgccagttggagacctcctaatacaaaaaacaatcaaaaaacaagtagtactagaagaaggcacaatcgcatttaaaaactgggtaaaaacaggaacagaagtataccgacaattctggatatttgacgtacaaaatccacaagaagtcatgatgaacagctctaacatacaagtaaaacaacgaggaccatacacatacagagtaagattcttagcaaaagaaaacgtaacccaagacgccgaagacaacaccgtctcatttctacaaccaaacggagccatattcgaaccttcattatcagtaggcactgaagcagataacttcacagtactaaatctagcagtagcagcagcaagtcacatataccaaaaccaattcgtacaaatgatactaaactccttaataaacaaatcaaaatcatcaatgtttcaagtaagaacactacgagaattactatggggatacagagacccattcctatctctagttccctatccagtaactacaacagtcggacttttctatccctataacaacactgctgacggcgtctacaaagtattcaacggaaaagacaacatatccaaagtcgcgataatagacacatacaaaggtaaacgcaacctatcttactgggaatcacactgtgacatgataaacggaacagacgcagcatccttccccccattcgtagaaaaatcacaagtcttacaattcttctcatccgacatctgtagatcaatatacgcagtattcgaatccgatgtaaatctcaaaggaattccagtataccgattcgtcttaccatctaaagcatttgcatcacccgtagaaaatccagacaactactgtttctgcacagaaaaaataatttccaaaaactgcacatcatacggcgtactcgatatttcaaaatgcaaagaaggcagacccgtatacatctcactaccacattttctatacgcaagccccgatgtaagcgaaccaatagatggactcaacccaaacgaagaagaacacagaacatatttagacatagaacccattacaggcttcacactacaattcgctaaaagattacaagtcaatctactagtcaaaccatcagaaaaaattcaagtcctaaaaaatttaaaaaggaattacatagtaccaatactatggttaaatgaaacaggaacaataggggatgaaaaagcaaatatgttccgatcacaagtaacaggcaaaataaacctcctaggattaatagaaatgatactattatcagtaggcgtagtcatgtttgtagcatttatgatatcatactgcgcctgcagatcaaaaacaataaaatga

SEQ ID NO: 1627 - RNA, 651 nt, synthetic construct
  misc_feature 1..651: note = P26718
  source 1..651: mol_type = other RNA
atgggatggataagaggaagaagaagcagacactcatgggaaatgtcagaattccacaactacaacctagacctaaaaaaatcagacttctcaacaagatggcaaaaacaaagatgcccagtagtaaaatcaaaatgtagagaaaacgcatcaccattcttcttctgctgctttatagcagtagcaatgggaataagattcataataatggtagcaatatggagcgcagtattcctaaactcactattcaatcaagaagtacaaataccattaacagaatcatactgcggaccatgcccaaaaaattggatctgctacaaaaacaactgctaccaattcttcgacgaaagtaaaaactggtacgaaagccaagcatcatgcatgagccaaaacgcatcactactaaaagtatacagcaaagaagaccaagacctactaaaactcgtaaaaagctaccactggatgggactagtacacataccaacaaacggaagctggcaatgggaagacggatcaatactaagcccaaacctcttaacaataatagaaatgcaaaaaggcgactgcgcattatacgcatcaagcttcaaaggatacatagaaaactgctcaacaccaaacacatacatatgcatgcaaagaacagtataa

SEQ ID NO: 1628 - RNA, 261 nt, synthetic construct
  misc_feature 1..261: note = P30273
  source 1..261: mol_type = other RNA
atgataccagcagtagtactactactactactattagtagaacaagcagcagcactaggagaaccacaactatgctacatactagacgcaatactattcctatacggaatagtactcacactactatactgcagactaaaaatacaagtaagaaaagcagcaataacatcatacgaaaaatcagacggagtatacacaggactatcaacaagaaaccaagaaacatacgaaacactaaaacacgaaaaaccaccacaatag

SEQ ID NO: 1629 - RNA, 1137 nt, synthetic construct
  misc_feature 1..1137: note = P32248
  source 1..1137: mol_type = other RNA
atggatttaggcaaaccaatgaaatccgtattagtagtcgctctcctagtaatattccaagtatgtctatgtcaagacgaagtaaccgacgactacataggagacaacactacagttgactataccctattcgaaagcttatgctcaaaaaaagatgtaagaaatttcaaagcatggtttctaccaatcatgtattcaatcatatgtttcgtaggcctattaggaaacggactagtagtcttaacttatatatatttcaaacgactaaaaacaatgacagacacttacttactaaacttagcagtagcagacatcctattcctattaacattacccttctgggcatactctgccgcaaaatcttgggtatttggagtccacttctgcaaactaatattcgctatatacaaaatgtcatttttctccggaatgctactcttattatgtatctcaatagacagatatgtagcaatagtacaagcagtatccgcccacagacacagagctagagtactcttaatctcaaaactttcatgcgtaggaatatggatattagctacagtattatcaataccagaacttttatactctgatctacaaagatcctcatcagaacaagcaatgcgttgctctctaataaccgaacacgtagaagcattcattacaatacaagtagcacaaatggtcataggattcctagtaccactattagcaatgtccttctgctacttagtaatcataagaacactattacaagcacgaaatttcgaaagaaataaagcaatcaaagtaataatagcggtagtagtcgtatttatagtttttcaactaccatacaacggagtagtactcgcacaaacagttgcaaatttcaacattacttcatccacctgcgaattatctaaacaattaaatatagcatacgatgtcacatactcactagcatgcgtacgctgttgtgttaacccattcttatatgcattcataggagtaaaattcagaaacgacttatttaaactattcaaagacctcggatgcttatctcaagaacaactaagacaatggtcctcatgcagacacataagaagatcctcaatgtcagtagaagcagaaacaacaacaacattctctccctga

SEQ ID NO: 1630 - RNA, 690 nt, synthetic construct
  misc_feature 1..690: note = P40259
  source 1..690: mol_type = other RNA
atggcaagattagcattgagtccagtaccaagccattggatggtagcattattactattattatcagcagaaccagtaccagcagcaagaagcgaagacagatacagaaacccaaaaggaagcgcatgctcaagaatatggcaaagcccaagattcatagcaagaaaaagaggattcacagtaaaaatgcattgctatatgaatagcgcgagcggaaacgtaagttggctatggaaacaagaaatggacgaaaacccacaacaactaaaactagaaaaaggaagaatggaagaaagtcaaaacgagagcttagcaacactaacaatacaaggaataagattcgaagataacggaatatatttctgtcaacaaaaatgcaataatacctcagaagtatatcaaggatgtggaacagaattaagagtaatgggattctcaacattagcacaactaaaacaaagaaacacactaaaagacggaataataatgatacaaacactattaataatactatttataatagtaccgatatttttactattagataaagacgactcaaaagcgggaatggaagaagaccatacatatgaaggactagatatagatcaaacagcaacatatgaagacatagtaacactaagaacaggagaagtaaaatggagcgtaggagaacacccaggacaagaatga

SEQ ID NO: 1631 - RNA, 990 nt, synthetic construct
  misc_feature 1..990: note = P42081
  source 1..990: mol_type = other RNA
atggacccacaatgcaccatgggactatcaaatatactattcgtaatggcattcttactatccggagcagcaccactaaaaatccaagcatacttcaatgaaacagctgatctaccatgccaattcgcaaactcccaaaaccaatcactatcagaattagtagttttctggcaagaccaagaaaacttagtactcaacgaagtatacctcggaaaagaaaaattcgactcagtacattccaaatacatgggacgaacatcattcgactcagactcctggacattaagactacacaatctacaaataaaagataaaggactataccaatgtattatacaccacaaaaaaccaacaggaatgataagaatacaccaaatgaactcagaactctcagttctcgcaaacttctcacaaccagaaatagtaccaatatcaaacataacagaaaatgtatacataaacttaacttgctcatctatacacggataccccgaaccaaaaaaaatgtcagtactcttaagaacaaaaaactcaaccatagaatacgacggagtaatgcaaaaatcacaagataacgtaacagaactatacgatgtatcaatatccctatcagtatcattccccgacgtcacctccaatatgacaatattctgcatattagaaacagacaaaacaagattactatcatccccattctcaatagaactagaagacccacaaccacccccagaccatatcccatggataacagccgtactacctacagtaataatctgcgttatggttttctgcttaatactatggaaatggaaaaaaaaaaaaagacctagaaactcctacaaatgcggaacaaacacaatggaaagagaagaatcagaacaaacaaaaaaacgagaaaaaatacacattcccgaaagatcagacgaagcacaaagagtattcaaatcatcaaaaacatcctcatgcgacaaatctgacacatgcttctga

SEQ ID NO: 1632 - RNA, 1011 nt, synthetic construct
  misc_feature 1..1011: note = Q15762
  source 1..1011: mol_type = other RNA
atggattacccaacactactactagcactactccacgtatacagagcactatgcgaagaagtattatggcatacatcagtaccatttgcagaaaacatgtcactagaatgcgtatacccatcaatgggaatactcacacaagtagaatggttcaaaataggaacacaacaagattcaatagcaatattctcacctacccatggcatggtaataagaaaaccatacgcagaaagagtatattttttaaactcaaccatggcatcaaacaacatgacactattcttccgaaacgcatcagaagacgatgtaggatactactcatgcagcctatacacatacccacaaggaacatggcaaaaagtaatacaagtagtacaaagcgactcattcgaagcagccgtaccatcaaactcacacatagtatcagaaccaggaaaaaacgtaacactaacatgccaaccacaaatgacctggccagtacaagcagtcagatgggaaaaaatacaaccacgccaaatagacctactaacatactgcaacttagtacacggaagaaacttcacaagcaaattcccaagacaaatcgtatcaaactgctcacacggacgatggtcagtaatagtaataccagacgtcaccgtatccgattcaggactatatcgatgttacttacaagcatctgcaggcgaaaacgaaacatttgtaatgagactaacagtagccgaaggcaaaaccgataatcaatacacactattcgtagcaggaggaacagtactactactactattcgtaatatctataacaacaataatagtaatattcctaaacagaagaagaagaagagaaagacgagacttattcacagaatcatgggacacacaaaaagcccccaacaactatcgatcaccaatatccacatcccaaccaacaaaccaaagtatggacgatacaagagaagacatatacgtaaattacccaactttctcaagacgaccaaaaacaagagtatga

SEQ ID NO: 1633 - RNA, 13482 nt, synthetic construct
  misc_feature 1..13482: note = Q685J3
  source 1..13482: mol_type = other RNA
atgccccgtcctggcactatggcgctctgtctattgactttggtattaagtttacttccgccccaagcggctgcggaacaagatctttccgtgaaccgcgcagtttgggatggtggcggctgcatctcacaaggagacgtgttaaaccgccaatgtcaacaactgagtcaacacgtgcgtactggttctgctgcaaatacggcaaccggaactacttccacgaacgtagtagaaccccgaatgtatttatcatgctccactaaccccgaaatgaccagtatcgaatcctctgtaacttcagatactcctggcgtttcatctactcgtatgacccccactgaatcacgcactacttccgaatcaacttcagactccactaccctattcccttcatcaaccgaagataccagctcacccactactccagaaggaaccgacgtcccaatgtcaaccccgtcggaagaatctatatcctctaccatggctttcgttagcaccgctcctttaccgtctttcgaagcatacacttcccttacatataaggtagacatgagcactcctcttacaacgagtacacaggcttcgtcttcaccgacgaccccggaatcgacgacaatccctaagtccaccaactcggaaggctcaacgccattaacatccatgccagccagtactatgaaagtcgcgtcatcagaagctataaccctcctaacaacgccggttgaaataagcacacctgttacaataagcgcgcaagcatcatctagtcccaccacagcagaagggccttcgttgtccaattccgctccaagcggaggctctacaccccttacacgaatgccattatcagtcatgttagttgtaagttcggaggcttcaactctatcaacaactcccgccgccacaaacataccagtaatcacgtccacagaggcttcttcctcccctactaccgcagaaggaacttcaataccaacttccacatatacagaagggtcaactccattaacttctacaccagcatctacgatgcctgtagctacctcagaaatgtctacactttcaattacccctgtggatacgtctaccctagtgactacgagcacagaaccaagttcactgccaacaactgctgaagcaacgtctatgctaacatctacactcagcgaaggttctacacctttgaccaacatgcccgttagcactatcctggttgcgagctcagaggcttctacgacatcaactatcccagtagactcaaaaacttttgttaccacagcgtctgaagcatcttcatctcctactaccgcggaagacacttccatcgcaacttccactccatcagaaggttctactcctcttacatcgatgcccgtaagcacgacacccgtagcttcttccgaggcttcaaatttatctacgacccccgtcgactctaagacacaagtgacaacgagcaccgaagcctcgagctcaccaccaactgctgaagttaactcgatgcccacatctactccttcggaagggtccactcccttaacctcaatgtcagtgtcaacaatgcctgtcgcgtccagcgaggcttctaccctctcgaccactccagtggatacatccacgccagtaactacttccagcgaagcaagttcatcctcaacgacgccagaaggaacttctataccgacatcgacaccgtcagaaggttctacacccctcacgaacatgcccgtaagcactcggctggtggtatcttcagaagcctcaacgacatccactacacccgctgattccaacacattcgtcactacaagttcggaagcatcctctagttctactacggcggaaggaacatctatgcccacaagtacctattcagaaaggggaacaacgattaccagtatgagcgtatccaccacgctggttgcaagcagtgaagcaagtaccctatctacaactccagtagacagtaatacgcccgtaacgacttcaacggaagcaacatcttcatccactaccgcagaagggacctctatgccaacctccacgtacacagaaggaagtacacctctcacaagcatgcccgtaaataccacacttgtcgcgagtagtgaagcatcaaccctctcaaccacacctgttgatacatctacccccgttacaaccagtaccgaggcctcatcttcccctaccacagcagatggtgcttcaatgccaacctccacgcccagtgaaggttcgactccgctcacttctatgcccgtctcaaagaccctactaacaagttctgaagcctcaaccctttcaactactccgctagatacaagtacgcatattacaacatcaacggaagcatcgtgtagccctaccacaactgagggcacttccatgcccatctcaaccccatccgagggatctccactactcacgtctatcccagtcagtattacccctgtgacaagtcccgaggcttcaactctctcaaccacaccagtagattccaattctccagttacaacaagcactgaggtatcttcaagtccaacacccgcagaaggtacaagtatgccaacgtctacatacagcgaaggtaggacccctctaacatccatgcctgtatccaccaccttagttgcaaccagtgctatctccaccctatcgacaactcccgttgacacctccacacctgtaactaactcaacagaagcccgatcttcccccacaacatccgaaggaacatcaatgcctacttctactcccggagagggatcaactcctctaacgagtatgcctgactctaccaccccagtagtttcatccgaggctagaacattaagtgccacccctgtcgacacctcaactcctgtcaccacttcaacagaagcaacctcatcgccaactacggccgaaggcacatcaattccaacaagcactccttccgaaggaactaccccactcactagcacacctgtgtcgcacacccttgtagcaaattcagaagcatcgacactctctacaaccccggtcgattctaatactccattaaccacatcaacagaagcaagctctccaccaccaaccgcggaaggaacttccatgcctacaagcactccatcggaaggttccactcctctaactagaatgcccgtgtcgactaccatggtcgcctcgtccgagacttccactttaagtacgacccctgccgacacttccactcccgtgacaacatattcccaagcctcgtcttcttctacgactgcggacggaacatcaatgcccacatcaacatattccgaaggaagtacgcccttaacatcagtcccagtaagtaccagattagttgtatcttcagaagcatctaccctctccaccactcccgttgacacttctattcccgttactacgtccactgaagcctccagctcgccgaccaccgctgaaggcacctcaattcccacttcacctccaagtgaaggtacaacaccattagcgagtatgccggttagtacgacactcgtcgtatcatctgaagctaacacactctctactactcccgttgattcaaagacacaagtagccacaagtactgaggcttcgtctccaccgccgaccgcagaagtaacttctatgcccacttcaacaccgggagagcggtccactccattaacgtctatgcctgttcgacatacccccgtggcctcatcagaagcgtcaaccttgtcaacctccccagttgatacaagtaccccagtgacaacctcagctgaaacttcttcctcccccactaccgctgaaggcacatcattacctacttcaacaacttcagaaggatctaccctactaacatccattcccgtatctaccacacttgtaacatcacccgaggcttcaacattattgactacgccagtagacactaaaggtccagttgttacatcaaatgaggtgtcatcctccccgactccagctgaaggtacttcaatgcctacgtcaacttattccgaaggtcgaacccctttaacatctataccggtaaacactacattagtagccagttccgcgatatccatactctcaacgaccccagtagataattctacgcctgtaacaacctctacggaagcatgctcctctcctacaacctccgaaggtacctccatgccaaattccaacccatcagaaggcaccacccccttaacttctatccctgtctccactacacccgttgtatcctccgaagcatcaacgttgtcagctacccccgtagacacgtccactccgggtaccacaagcgctgaagcaacctcttcccccaccactgcagaaggtattagcatacccacttcgacaccctcagaaggtaaaacacccctaaaaagtatccccgtttctaatacccccgttgcaaactcagaagctagtaccttgagtacaactccagtcgactctaacagtcctgtagtaacatctacagcggtctcatcatcaccaacacccgctgaagggacttccatagcaatcagtacaccgtccgagggctccaccgcattaacatcgatacccgttagtaccactacggtggctagttccgaaatcaattctctttctacgactcctgcggtcacttcaactcccgtgacgacatatagtcaagcatcaagctcacctaccaccgcagacggaacttctatgcaaacctccacttattccgaaggcagtacccccttaacttcattacctgtgtccacgatgctagtagttagttctgaggctaatactctttcaactaccccaattgactcgaaaacacaagtcaccgcatcaacagaggcttcctcgtccacgacggcggagggatcgtcaatgaccatatcaacaccatctgaagggtcacccctcttgacttcgatccccgtcagtactacccctgtcgcatcgccagaagcctcgacactttcgaccacaccagtagattccaatagcccggtaataacatcaactgaagtctcttcatctccaaccccagcagagggtacaagcatgcccacaagtacttatacagaaggacgaacacccctgacctctataactgtgcgaacaacccctgtagctagttcagcgatctccactctttcaaccacacccgtcgataactcaaccccagtgactacgtcgacagaagctcgttcctcaccgaccacatccgaaggaacgtcaatgccaaactccactccctcagaagggaccacacctttaacctcaattcctgttagtacaaccccagttctgtccagtgaagcctccacattgtccgctacacccattgacacaagtacaccagttacaacgtccacagaagcaacgtcgtctccaaccacagcagagggaacaagtattcctacaagtactctaagcgaaggtatgactcctttaacttctactcctgtgtctcatacgttagtagcaaattcagaggcctccacactctcaaccacaccagtagactctaattccccagtggttacttcaacagcggtatcttcaagcccaactcccgctgaaggtacttccatcgccacctcgacaccctctgaagggagtacggcactaacaagtatacctgtatcaactacaacagttgccagctctgaaactaatactctcagcaccacaccagcagttacttcaaccccagttactacatatgcccaagtcagctcatcccccactaccgccgatggttcgtctatgccaacttctacaccaagagaaggacgtccacctctaacatcaattccggtgtctaccaccacggtggcgtcatcagaaataaataccttaagtacaactctagcagatacacgaacacctgtcactacatattcacaagcgagctcgtcgcctactaccgcggacggaacctcaatgcccaccccagcatattctgagggatcaacacccttaacatctatgccccttagtacaacacttgttgtatcctctgaggcttccactctctcgacaacccctgtagatacaagtacacccgccactacatcaacagagggatcatcatcgcctactactgctggtggaacaagtattcaaacatccaccccaagcgaaaggacaactccattggccggaatgcccgtcagcacaaccttggtggtgagcagcgagggaaacactcttagtactaccccggtcgacagtaagactcaagtaacaaatagtacggaggcatcaagttctgcgaccgccgaaggttcatccatgaccatatctgcaccgtcagagggtagtcccttactaacatcaattccgttatcaactacgcccgtagcctcgccggaggcttccactttatcgacgaccccagtagattcgaatagtcccgtaattacttctacagaagtttcctcatccccgatccctaccgaagggacaagtatgcaaacatccacatattcagatagacgcactccactaacgtcaatgcctgtgtcaacgactgtcgttgctagttcagcaatctccacactatcaacaacacccgtagatacctccacccctgtaactaactcgacggaggctcgttcatcacccaccacctcggaggggacatccatgcccacctctaccccctcagaggggtctactcccttcacctctatgccagtttctaccatgccagtggtgacatcagaagcgtctacccttagcgctaccccggtagacacaagtaccccagtcactacgtctaccgaagcaacaagttcccccacgacagccgaagggactagcatacctacctcaactttatcagaaggcactactcccttaacctcgatcccagtatcacatactttggtcgcgaacagcgaggtatccacactaagtactacaccagtagatagcaacacacctttcacgacgtctactgaggcttcttcaccacctccaaccgcagaaggaacttccatgcccacaagtacttcatcggaggggaatactccacttacgagaatgcctgtttcgaccactatggtcgcctctttcgaaacgagcacgctctctacaacgcccgccgacactagcacaccagtcacaacttattctcaagccggctcaagccctactaccgcggacgatacctccatgccgacgtcgacgtactctgaaggatcgactccacttacgagtgttccagtctccaccatgcccgtcgtttcctctgaagcaagcactcactcgacaacgcccgttgatacaagtacacccgtgaccacttcaaccgaagcgtcgtcttcaccaactacagctgagggcacctcgataccgacgagtccgccatcagaaggcactacccctcttgccagcatgcctgttagcactacacctgtcgtcagttcagaagcaggaacactctcaacgacacccgtggacacaagcaccccgatgactacatcaacagaagcctcgtccagtcccaccactgcagaggacattgtggtccctatttcaacagcttcggaaggatcgacactccttacttcaataccagtctccactactcctgtggcatctcccgaagcatcaactttgtcaactactccggttgatagcaattctcctgtagttacttcgacagagatttcctcctcggccacgagcgccgaaggcacctcaatgccgacttccacatattccgaaggttctacccctcttcgttcgatgcccgtttcaaccaaaccattagcatcatctgaggcatcaaccctttctaccaccccggtggatacctcaattcccgttactacatcgaccgaaacgtcctcctccccgaccacagccaaggacacgagcatgcccatcagtaccccaagcgaagtttctactagccttacctctatactggtttcaacgatgcccgtagcttccagtgaagcgtcaacactaagtaccacacccgtcgacacgcgtactctcgtcacaaccagtacaggtacctccagcagccccaccacagctgaaggaagctctatgcctacttcaacaccaggtgaacgcagtacacctctcactaacatcttggtatctactacactgctagccaactccgaagcatcaacactatcaacaacacctgtagacacctctacaccagttactacatcagcagaggcttcctcttcacctaccaccgcagaaggcacaagtatgagaattagcaccccatccgatggaagtacccctctcacttcaatattggtctcgactctcccagttgccagttctgaagccagtaccgtatccacaactgcggttgacacaagcatccctgtaactacctctactgaggcatcatcatctccgactacagcagaagtcacctcaatgcccacttcaactccctcagaaacaagtactcccctaacctcaatgcccgtaaatcacactcccgtagcttctagcgaagctgggacattatcgacaacgccagtcgacacctccacgcctgtgactacttccacaaaagccagctcctcgccaactacagcagagggaatcgtagtaccaatctctacagcaagcgaaggatccaccctactcacatccattccggtgtcgactaccccagtggctagctcagaagccagcaccctcagcactactcctgtcgacacttctatcccggtaaccacgtcaaccgagggatcttccagccctacaactgccgaaggcactagcatgccgatatccactccaagtgaagtctctaccccattaacctcgatactcgtatcaacggttcctgttgccggctctgaagcatccacactatccacaacaccagtagatacgagaactcccgtaacaactagcgctgaagcgtcctcaagccctacaaccgctgaaggaacgagtatgccaatatccactcccggcgaacggagaacaccattaacaagtatgtcagtaagtactatgcctgtcgcgtctagcgaggcctccaccctatcacgaactcccgcggacacatccacaccagtcaccacgtcgacagaagcgagttcgagtccaaccaccgcggaaggtacaggcatcccaatttccaccccttcagaaggctccactccactcacctccatacctgtatcgactactccagtggccatacccgaagcatctactctctctacaactccggtggattccaattcccccgttgtaacatctacggaggtatcctcatcccctacccctgctgaaggtacatccatgcccataagcacctattcagaaggatctacacctctcacaggagtaccagtatcaactactccagtaacctccagtgcaatatctacgctcagtacaacacccgttgacaccagtacaccagtaacaacttccacggaagcacattcctctccaacaacttcagaagggacaagcatgccaacgtctactccgagtgaaggtagcacaccactcacgtacatgccagtatctacaatgcttgtagtctctagcgaggattctactttatcagcgacgccagttgacacttccacaccagttacgacatcaaccgaggctacatcatcgacaacagccgaaggtaccagtatcccgacctcaacaccctctgaagggatgacaccccttacaagcgttcccgttagtaacactcctgttgcttcttccgaggcttcgatcctctctacaacacccgtagactctaacactccactaacgacatcaacagaggcaagctcaagtcccccgactgccgaaggcacaagcatgcccacttcaactccatccgaggggtctacacccctcacatcaatgcccgtttcaaccacaacggtggcatcttccgaaacctcaacgctgtccactactccagcggatacgtcaacacctgtaacaacttatagccaggcttcaagtagtccacccattgctgacggtaccagcatgcccacatcaacctattcagaaggctcaacaccccttactaatatgtcattctccactactccagtagtatcgtccgaggcatcaactctatcaactactcccgtcgatacctcaacccctgtcaccacatcgacagaagcctccctgtctccaacgacggcagaaggtacatccatcccaacttccagtccatctgaaggcactactcccctcgcctccatgcctgtcagtactacacctgtggtgagctcggaagttaataccctctccactacaccggttgactcgaatacattagtgacaacatctaccgaggcttcaagctcaccaactatagcagagggaacgtcattacccacctctactacaagtgaaggctccactccactctcaataatgcctttaagtacaacaccagtggcgtcgagcgaggcaagcactctgtctaccacgcctgttgatacctcaaccccggtaaccacttcatctccaacaaattcatcacctactacagccgaagtcacaagcatgcctacttcaactgcgggtgaaggaagtactcccttaacaaacatgcccgtatccaccacaccagtcgcttcctcagaggcgtcaacactctctactacccccgttgattcgaatacattcgttacatcttctagtcaggcttcttccagccctgctactctccaagtcaccactatgcgaatgtcgactccctcagaaggaagctcctcgcttactacaatgctactctccagcacctacgtcacttcatcggaagctagcacacctagtacgccatccgtcgaccgatcaactcctgtgaccacttccacccaaagtaactccactccaacaccaccagaagttatcacactccccatgtccactccctccgaggtcagcacccctctcaccattatgcctgtgtcgaccacaagcgtaacaatatcagaagcaggaacagcttcaactctaccggtcgacacctcaactcccgtgattacgtcgacccaggtctcaagttcacctgtcaccccggaaggtactacgatgccaatatggaccccctcggaaggctcaacccccttgacgacaatgccggtcagtactacacgtgttacttcatctgaaggttcaactctctccactccatccgtcgtcacttcaacacccgttaccaccagcacggaagctatatcatcttcggcaactttagactcaacgaccatgtcagtttcgatgccgatggagatatcgaccctaggcaccactatcctcgtatctacaacccctgtcactcgatttccagaatcatccacaccctccataccgtctgtttatacttcaatgtccatgacaacagcatccgaagggagctccagcccaacaacacttgaaggaaccacgactatgcctatgagtacaacatccgaaagaagtacattattaacaacagtgcttatctccccaatttctgtgatgtcaccaagcgaagccagcactctttccacaccacccggggacacgtctacgcctttattaacctcaacaaaagcaggatctttctcgattcctgctgaggtgaccacgatcagaatttctattacaagtgagcgttctacacctttaacaactcttctggtctccaccacattgcctacatcttttcccggagcttcaattgcctcgactccacccttggacacctccaccacttttactccgtcaaccgacactgcttccacacctacaatccctgttgccaccactataagtgtctctgtgataaccgaggggagtactcccggaactaccatcttcataccttccacgccagtgacttcatccacagcagatgtatttcccgcgacaacaggcgctgtttctacccccgtcataacttctacggaactcaatacaccatccacaagttcctcaagcacaacaacatccttctcgacaactaaagagttcactacgccagcgatgacgactgctgcacccctaacttacgtgacgatgagtactgctccctccaccccaagaacaacctcccggggctgcacaacgtccgcgtctacattaagtgcaacctccacacctcacaccagcacctcggttaccactagacctgtcaccccttcaagcgagtcttccaggccgtcaacaattacatctcacacaatccctccaacctttcccccggcccactcatcaacacctcctacaacatcagcgagctccacaacggttaatcctgaagcagtgacaacgatgacaacaagaacgaaaccatctactcgaacgacttcctttcctaccgttaccactaccgccgttcccactaatactaccataaaaagcaaccccacctcgacaccgacggtccccagaactacgacttgctttggggatggatgtcagaatacagccagtcgctgcaaaaatggtggtacttgggacggccttaaatgtcaatgtccaaacttatattatggcgaactatgtgaggaagtcgtatcatccatcgatataggccctcccgaaacaatctcagcacaaatggaactcacagtcacagttacctcagtaaaattcaccgaagaacttaaaaaccactcatctcaagagttccaggagttcaaacaaacttttactgaacaaatgaatatcgtatacagcggtatacccgaatatgtaggcgtcaacattactaagctacggcttggatctgtagtagtagaacatgatgtgttactaagaacaaagtatactccagagtataaaacagtgttggacaacgctacagaagttgtaaaagaaaagatcactaaggtcaccactcaacaaataatgataaacgacatatgctctgatatgatgtgtttcaatactacaggtacacaagtacaaaacatcacggttacacaatacgacccggaagaagactgtaggaaaatggctaaagaatatggcgactactttgtcgtggaatatcgagatcaaaaaccttactgtatcagtccttgtgagccgggtttcagtgttagtaaaaattgcaacttaggaaagtgtcagatgagtttaagcggaccgcagtgtctttgcgttactacagagactcactggtattccggggaaacctgcaaccaaggtacgcaaaaatccctagtttatgggctcgtgggtgctggagtcgtactcatgttaattattctagtcgctctccttatgctagtatttaggtcgaaaagggaagtaaaacggcaaaagtatcgtctcagtcagctatataagtggcaagaagaagatagtggaccagcaccaggcacatttcaaaacataggtttcgacatatgccaagacgacgattcaattcatttagaatcgatttattccaactttcagccttctctacgtcacatagaccccgaaactaagatacgaatccaacgacctcaggttatgacaacttcgttctga

SEQ ID NO: 1634 - RNA, 1215 nt, synthetic construct
  misc_feature 1..1215: note = Q9NNX6
  source 1..1215: mol_type = other RNA
atgagcgactcaaaagaaccaagactacaacaactaggattattggaagaagaacaacttagaggactcggattcagacaaactagaggctacaaaagtttagcaggttgtttaggacacggaccattagtcttacaactactatcattcacacttctcgctggactactagttcaagtatcaaaagtcccatcatcaatatcacaagaacaaagcagacaagacgcaatctatcaaaatttaacacaacttaaagcagctgtcggcgaactaagcgaaaaatcaaaattacaagaaatatatcaagaactaacacaattaaaagctgccgtaggagaactaccagaaaaaagtaaattacaagaaatatatcaagaattaacaagactaaaagctgctgtaggagaattaccagaaaaaagcaaactacaagaaatataccaagaactaacatggttaaaagcagccgtaggagaactacccgaaaaatcaaaaatgcaagaaatataccaagaactaacaagattaaaagcagcagtcggcgaattacccgaaaaatcaaaacaacaagaaatataccaagaactaacaagactaaaagctgcagtcggagaattaccagaaaaaagcaaacaacaagaaatataccaagaactcacaagactcaaagcagcagtaggtgaactacccgaaaaaagcaaacaacaagaaatctaccaggaattaactcagctaaaagcagcggtagaaagattatgccacccatgcccatgggaatggacatttttccaaggaaattgctatttcatgagcaactcacaacgaaattggcacgatagtataacagcatgcaaagaagtaggagcacaactagtagtaataaaatcagcagaagaacaaaacttcctacaattacaatcaagtagatcaaacagattcacatggatgggactatcagatttaaatcaagaaggaacatggcaatgggtagacggctcaccactacttccaagctttaaacaatactggaacagaggagaaccaaacaatgtaggagaagaagactgcgcagaattcagcggaaacggatggaacgatgacaaatgcaacctagcaaaattctggatatgtaaaaaatcagcagcatcatgtagcagagatgaagaacaattcttaagtccagcaccagcaactccaaatccaccaccagcctga

SEQ ID NO: 1635 - RNA, 3126 nt, synthetic construct
  misc_feature 1..3126: note = Q9NR97
  source 1..3126: mol_type = other RNA
atggaaaatatgtttctacaatcctccatgctaacatgcatatttctactcatatcaggctcttgtgaattgtgcgctgaagaaaacttctcccgttcctacccctgcgatgaaaagaaacaaaacgattccgtaattgccgaatgctctaaccgacggttacaagaagttccccaaacagtcggaaaatacgtaaccgaacttgacctatcagataatttcataacgcacattacaaatgaatccttccaaggccttcaaaatctcacaaaaatcaacctcaatcataacccaaacgtacaacaccaaaacggtaacccaggtatacaatcaaatggactaaacataaccgacggcgcatttctcaatctcaaaaacctccgagaactacttttagaagacaatcaacttccccaaattccatccggcctaccagaatcattaacagaactcagcttaattcaaaataatatctataacataactaaagaaggtatctcacgattaataaatttaaagaatctatatctagcctggaactgctatttcaacaaagtatgcgagaaaactaacattgaagacggagtatttgaaacattaacaaaccttgaattactatctctatcattcaactcattatcacacgtcccaccaaaactgccatcatccctcagaaaattatttctaagcaacacacagattaaatatatcagtgaagaagatttcaaaggtttaataaacctaacattactcgacctatcaggtaattgtccacgatgcttcaacgcaccatttccatgtgttccatgcgacggtggcgcttcaattaatatagacagattcgcttttcaaaatctaactcaactaagatatcttaacttatcctccacttccttacgcaaaataaatgcagcatggttcaaaaatatgccacacttaaaagtcctagatttagaatttaattacttagtaggagaaatagcatcaggagcattcttaacaatgctacctagattagaaattctagatttatcattcaactatataaaaggcagctacccgcaacacataaacatctctagaaacttctcgaaattactaagtttaagagccctacacctacgaggttatgtcttccaagaacttcgagaagacgatttccaaccactaatgcaacttccaaatctatcaaccataaaccttggaataaattttatcaaacaaattgattttaaactattccagaatttttccaatctagaaataatatacctctccgaaaacagaatatctccattggtaaaagatacccgtcaatcatatgccaactcttcttcatttcaacgacacataagaaaaagacgttccactgactttgaatttgatccacactcgaatttctatcacttcacaagacccttgatcaaacctcaatgtgccgcatacggcaaagcattagacctttcactcaactcaatcttctttataggccccaatcaattcgaaaatctaccagacatagcctgcctaaacctatcagcaaactcaaacgcacaagtactttccggtactgaattttcagcaataccacacgtgaaatatctagacctaacaaataacagactagatttcgataacgcctcggcactcactgaactctctgacttagaagtactagatctatcctacaattcacactacttccgaatagcaggagttacacaccacttagagttcatccaaaacttcactaacttaaaagtactaaacctctcacataacaatatttacacattaacagataaatacaacctagaatcaaaatcattagttgagctagtattttctggcaaccgacttgacatactctggaacgacgacgataaccgctacatctctattttcaaaggtctcaaaaacttaactagacttgacctcagccttaatcgactaaaacacatacctaatgaagcctttttaaacctcccagcttccctcaccgaactacacatcaacgataatatgttaaaattctttaattggactttattacaacaattccctcgactagaacttcttgatcttagaggtaataaattattatttcttaccgattcattaagcgactttacttcctctctaagaactctcctactaagccacaacagaatttctcatctacccagcggttttctatctgaagttagttcactaaaacaccttgacttaagttcaaacttactaaaaacaattaacaaatcagctctcgaaactaaaactaccacaaaactgtctatgctcgaattacacgggaatccctttgaatgtacctgcgacattggagatttccgaagatggatggatgaacaccttaacgttaaaatcccacgccttgttgacgtgatttgcgcatcccctggcgatcaacgtggtaaatctatagtttctctagaactcacaacttgtgtttctgatgttactgcagtcatcctatttttctttaccttctttataaccactatggttatgctggccgccttagcccatcacctgttctattgggacgtatggttcatttataacgtatgcctcgcaaaagtcaaaggttatcgttccctatcaacttcacaaactttctacgatgcatatatctcatacgatacaaaagacgcatcagtcactgattgggttatcaatgaactccgttaccacctcgaagaatccagagacaagaacgtcctactatgcctagaagaaagagactgggatccaggcctagcaataatcgataacctaatgcaatccatcaatcaatcaaagaaaactgtatttgtattaacaaagaaatacgcaaaatcctggaacttcaaaacagccttttacttagccttacaacgtctgatggacgaaaacatggacgtaataattttcattttacttgaacccgtactacaacatagtcaatacttacgattaagacaaagaatctgcaaatcctctatattacaatggcccgataaccctaaagccgaaggattattctggcaaaccttacgcaacgtcgttttaacagaaaacgactcaagatacaataatatgtacgtagattcaataaaacaatactaa

SEQ ID NO: 1636 - RNA, 66 nt, synthetic construct
  misc_feature 1..66: note = P16671_TM_1_8-29
  source 1..66: mol_type = other RNA
ggtttaattgctggtgcagttataggtgcagttttagcagtatttggaggtatattaatgcctgta

SEQ ID NO: 1637 - RNA, 81 nt, synthetic construct
  misc_feature 1..81: note = P32248_TM_1_60-86
  source 1..81: mol_type = other RNA
ttccttccaattatgtattcaattatatgtttcgttggacttctaggtaacggtctagttgtacttacatatatatatttc

SEQ ID NO: 1638 - RNA, 66 nt, synthetic construct
  misc_feature 1..66: note = P16671_TM_2_440-461
  source 1..66: mol_type = other RNA
ttgttaggtttaattgaaatgattttgttatctgttggtgttgttatgtttgttgcttttatgatt

SEQ ID NO: 1639 - RNA, 63 nt, synthetic construct
  misc_feature 1..63: note = P32248_TM_2_96-116
  source 1..63: mol_type = other RNA
tatctacttaaccttgcagttgcagatatacttttccttctaactctacctttctgggcatat

SEQ ID NO: 1640 - RNA, 66 nt, synthetic construct
  misc_feature 1..66: note = P32248_TM_3_131-152
  source 1..66: mol_type = other RNA
ctcattttcgctatttataaaatgtcctttttctctggcatgctccttctcctttgtatttccatt

SEQ ID NO: 1641 - RNA, 63 nt, synthetic construct
  misc_feature 1..63: note = P32248_TM_4_171-191
  source 1..63: mol_type = other RNA
gttctacttatatctaaactttcatgtgtaggtatatggatacttgcaactgtactttcaatt

SEQ ID NO: 1642 - RNA, 84 nt, synthetic construct
  misc_feature 1..84: note = P32248_TM_5_220-247
  source 1..84: mol_type = other RNA
tttattactattcaagttgctcaaatggttattggttttcttgttcctcttcttgctatgtctttttgttatcttgttattatt

SEQ ID NO: 1643 - RNA, 78 nt, synthetic construct
  misc_feature 1..78: note = P32248_TM_6_264-289
  source 1..78: mol_type = other RNA
gtaataatagcagtagtagtagtatttatagtattccaactaccatataacggagtagtattagcacaaacagtagca

SEQ ID NO: 1644 - RNA, 54 nt, synthetic construct
  misc_feature 1..54: note = P32248_TM_7_314-331
  source 1..54: mol_type = other RNA
cttgcatgtgtacgttgttgtgtaaatccgtttttatatgcatttataggtgta

SEQ ID NO: 1645 - RNA, 69 nt, synthetic construct
  misc_feature 1..69: note = A0A5B9_TM_145-167
  source 1..69: mol_type = other RNA
acaatactatacgaaatactactaggaaaagcaacactatacgcagtactagtatcagcactagtacta

SEQ ID NO: 1646 - RNA, 69 nt, synthetic construct
  misc_feature 1..69: note = B7Z8K6_TM_130-152
  source 1..69: mol_type = other RNA
ctaggcctacgcatgctctttgccaaaactgtagccgtaaattttcttttaactgcaaaattattcttt

SEQ ID NO: 1647 - RNA, 63 nt, synthetic construct
  misc_feature 1..63: note = O00206_TM_632-652
  source 1..63: mol_type = other RNA
actattattggtgtttctgttctttctgttttagttgtttctgttgttgctgttttagtttat

SEQ ID NO: 1648 - RNA, 66 nt, synthetic construct
  misc_feature 1..66: note = P01730_TM_397-418
  source 1..66: mol_type = other RNA
atggctttaattgttttgggtggtgttgctggtttgttattgtttattggtttgggtatttttttt

SEQ ID NO: 1649 - RNA, 63 nt, synthetic construct
  misc_feature 1..63: note = P01850_TM_151-171
  source 1..63: mol_type = other RNA
atacttttaggtaaagctacactttatgctgtacttgtatctgcacttgtacttatggctatg

SEQ ID NO: 1650 - RNA, 78 nt, synthetic construct
  misc_feature 1..78: note = P07766_TM_127-152
  source 1..78: mol_type = other RNA
gttatgtctgtagctacaattgtaattgtagatatatgtataactggaggtttacttttacttgtatattactggtca

SEQ ID NO: 1651 - RNA, 66 nt, synthetic construct
  misc_feature 1..66: note = P08575_TM_576-597
  source 1..66: mol_type = other RNA
gctcttattgcttttcttgcttttcttattattgttacttctattgcccttcttgttgttctttat

SEQ ID NO: 1652 - RNA, 63 nt, synthetic construct
  misc_feature 1..63: note = P08637_TM_209-229
  source 1..63: mol_type = other RNA
gtttctttttgtttagttatggttttactttttgctgttgatactggtctttatttttctgtt

SEQ ID NO: 1653 - RNA, 81 nt, synthetic construct
  misc_feature 1..81: note = P10747_TM_153-179
  source 1..81: mol_type = other RNA
ttttgggttttagttgttgttggtggtgttttggcttgttattctttattagttactgttgcttttattattttttgggtt

SEQ ID NO: 1654 - RNA, 66 nt, synthetic construct
  misc_feature 1..66: note = P11912_TM_144-165
  source 1..66: mol_type = other RNA
ataattacagctgaaggtataattttacttttctgtgcagttgtacctggaactttacttttattt

SEQ ID NO: 1655 - RNA, 66 nt, synthetic construct
  misc_feature 1..66: note = P15391_TM_292-313
  source 1..66: mol_type = other RNA
gtatctgcagtcacacttgcatatttaatattttgtttatgttcacttgtaggcattcttcatctt

SEQ ID NO: 1656 - RNA, 63 nt, synthetic construct
  misc_feature 1..63: note = P16410_TM_162-182
  source 1..63: mol_type = other RNA
tttcttctttggattcttgctgctgtttcttctggtctttttttttattcttttcttcttact

SEQ ID NO: 1657 - RNA, 63 nt, synthetic construct
  misc_feature 1..63: note = P26718_TM_52-72
  source 1..63: mol_type = other RNA
cctttttttttttgttgttttattgctgttgctatgggtattcgttttattattatggttgct

SEQ ID NO: 1658 - RNA, 63 nt, synthetic construct
  misc_feature 1..63: note = P30273_TM_24-44
  source 1..63: mol_type = other RNA
ctttgttatattcttgatgctattctttttctttatggtattgttcttactcttctttattgt

SEQ ID NO: 1659 - RNA, 63 nt, synthetic construct
  misc_feature 1..63: note = P40259_TM_160-180
  source 1..63: mol_type = other RNA
ggcataatcatgatccaaaccctactcataatcctattcataatcgtccccatattcctactc

SEQ ID NO: 1660 - RNA, 63 nt, synthetic construct
  misc_feature 1..63: note = P42081_TM_248-268
  source 1..63: mol_type = other RNA
tggattactgctgttcttcctactgttattatttgtgttatggttttttgtcttattctttgg

SEQ ID NO: 1661 - RNA, 63 nt, synthetic construct
  misc_feature 1..63: note = Q15762_TM_255-275
  source 1..63: mol_type = other RNA
ggcggtaccgttctccttctccttttcgttatctctatcactaccattatcgttatctttcta

SEQ ID NO: 1662 - RNA, 63 nt, synthetic construct
  misc_feature 1..63: note = Q685J3_TM_4394-4414
  source 1..63: mol_type = other RNA
cttgtaggtgctggtgtagttttaatgttaattatattagtggcattacttatgcttgtattt

SEQ ID NO: 1663 - RNA, 63 nt, synthetic construct
  misc_feature 1..63: note = Q9NNX6_TM_38-58
  source 1..63: mol_type = other RNA
ttaggtcatggtcctcttgttcttcaacttttatcttttactttacttgctggtttacttgtt

SEQ ID NO: 1664 - RNA, 63 nt, synthetic construct
  misc_feature 1..63: note = Q9NR97_TM_828-848
  source 1..63: mol_type = other RNA
gctgtaattctatttttctttacatttttcattacaactatggttatgcttgcagctctagct

SEQ ID NO: 1665 - RNA, 48 nt, synthetic construct
  misc_feature 1..48: note = P14207_1-16
  source 1..48: mol_type = other RNA
atggtgtggaagtggatgcccctgctcctgttgctggtctgcgtggcc

SEQ ID NO: 1666 - RNA, 48 nt, synthetic construct
  misc_feature 1..48: note = O75787_1-16
  source 1..48: mol_type = other RNA
atggccgtgttcgtcgtgctgctcgcactggtagccggcgtgttgggg

SEQ ID NO: 1667 - RNA, 48 nt, synthetic construct
  misc_feature 1..48: note = P07359_1-16
  source 1..48: mol_type = other RNA
atgcccctgctcctgttgctgctcctgttgccaagcccgctgcacccc

SEQ ID NO: 1668 - RNA, 48 nt, synthetic construct
  misc_feature 1..48: note = P08637_1-16
  source 1..48: mol_type = other RNA
atgtggcagctgctcctgcccaccgccttgctgctcctggtgagcgca

SEQ ID NO: 1669 - RNA, 51 nt, synthetic construct
  misc_feature 1..51: note = P07237_1-17
  source 1..51: mol_type = other RNA
atgctgaggcgggccctcctgtgcttggcagtggccgcgctggtccgcgcc

SEQ ID NO: 1670 - RNA, 51 nt, synthetic construct
  misc_feature 1..51: note = O60911_1-17
  source 1..51: mol_type = other RNA
atgaacctgagcctcgtgctggccgcattctgcttgggcatcgcctccgcg

SEQ ID NO: 1671 - RNA, 51 nt, synthetic construct
  misc_feature 1..51: note = P20138_1-17
  source 1..51: mol_type = other RNA
atgcccctgctcctgttgctgccactcctgtgggccggcgcattggccatg

SEQ ID NO: 1672 - RNA, 51 nt, synthetic construct
  misc_feature 1..51: note = P27797_1-17
  source 1..51: mol_type = other RNA
atgctgctcagcgtgcccctgttgctgggcctcctggggttggccgtcgca

SEQ ID NO: 1673 - RNA, 54 nt, synthetic construct
  misc_feature 1..54: note = P10747_1-18
  source 1..54: mol_type = other RNA
atgctgaggctcctgttggccctgaacctcttccccagcatccaggtgaccggc

SEQ ID NO: 1674 - RNA, 54 nt, synthetic construct
  misc_feature 1..54: note = O75487_1-18
  source 1..54: mol_type = other RNA
atggccaggttcggcctgcccgcactcctgtgcaccttggccgtgctgagcgcg

SEQ ID NO: 1675 - RNA, 54 nt, synthetic construct
  misc_feature 1..54: note = P07996_1-18
  source 1..54: mol_type = other RNA
atgggcctggcctgggggctcggtgtgctgttcttgatgcacgtctgcggcacc

SEQ ID NO: 1676 - RNA, 54 nt, synthetic construct
  misc_feature 1..54: note = P22748_1-18
  source 1..54: mol_type = other RNA
atgaggatgctgctcgccctgttggcactgagcgccgcgcggccctccgccagt

SEQ ID NO: 1677 - RNA, 54 nt, synthetic construct
  misc_feature 1..54: note = Q15762_1-18
  source 1..54: mol_type = other RNA
atggactaccccaccctgctcctggccttgctgcacgtgtatagggcactctgc

SEQ ID NO: 1678 - RNA, 54 nt, synthetic construct
  misc_feature 1..54: note = P30273_1-18
  source 1..54: mol_type = other RNA
atgatccccgccgtggtcctgctcctgttgctgctcgtggagcaggcagccgcg

SEQ ID NO: 1679 - RNA, 54 nt, synthetic construct
  misc_feature 1..54: note = P38570_1-18
  source 1..54: mol_type = other RNA
atgtggctgttccacaccctcctgtgcatcgccagcttggcactgctcgccgcg

SEQ ID NO: 1680 - RNA, 54 nt, synthetic construct
  misc_feature 1..54: note = Q01638_1-18
  source 1..54: mol_type = other RNA
atgggcttctggatcctggccattctcaccatcctgatgtacagcactgcagcc

SEQ ID NO: 1681 - RNA, 54 nt, synthetic construct
  misc_feature 1..54: note = Q9NZQ7_1-18
  source 1..54: mol_type = other RNA
atgaggatcttcgccgtgtttattttcatgacctactggcacctcctgaacgca

SEQ ID NO: 1682 - RNA, 57 nt, synthetic construct
  misc_feature 1..57: note = P13591_1-19
  source 1..57: mol_type = other RNA
atgctgcagaccaaggacctcatctggactctgttctttttgggcaccgccgtgagc

SEQ ID NO: 1683 - RNA, 57 nt, synthetic construct
  misc_feature 1..57: note = P26842_1-19
  source 1..57: mol_type = other RNA
atggccaggccccacccatggtggctgtgcgtgctcggcaccctggtcgggttgagc

SEQ ID NO: 1684 - RNA, 57 nt, synthetic construct
  misc_feature 1..57: note = P15391_1-19
  source 1..57: mol_type = other RNA
atgcccccaccgaggctcctgttctttctgttgttcctgacccccatggaggtgcgg

SEQ ID NO: 1685 - RNA, 57 nt, synthetic construct
  misc_feature 1..57: note = Q8NI17_1-19
  source 1..57: mol_type = other RNA
atgatgtggacctgggccctgtggatgctccccagcctgtgcaagttctccttggca

SEQ ID NO: 1686 - RNA, 57 nt, synthetic construct
  misc_feature 1..57: note = P08571_1-19
  source 1..57: mol_type = other RNA
atggagagggccagctgcctgctcctgttgctgctccccctggtgcacgtctccgca

SEQ ID NO: 1687 - RNA, 57 nt, synthetic construct
  misc_feature 1..57: note = P05154_1-19
  source 1..57: mol_type = other RNA
atgcagctgttcctcctgttgtgcctggtgctcctgagcccccaaggcgcctccttg

SEQ ID NO: 1688 - RNA, 57 nt, synthetic construct
  misc_feature 1..57: note = P02787_1-19
  source 1..57: mol_type = other RNA
atgaggctggccgtgggcgcactcctggtctgcgccgtgttggggctgtgtctcgcg

SEQ ID NO: 1689 - RNA, 57 nt, synthetic construct
  misc_feature 1..57: note = P02671_1-19
  source 1..57: mol_type = other RNA
atgttcagcatgaggatcgtgtgcctggtcctctccgtggtaggcaccgcctggact

SEQ ID NO: 1690 - RNA, 57 nt, synthetic construct
  misc_feature 1..57: note = P04216_1-19
  source 1..57: mol_type = other RNA
atgaacctggccatcagcattgcactcctgttgaccgtgctgcaggtctccaggggc

SEQ ID NO: 1691 - RNA, 57 nt, synthetic construct
  misc_feature 1..57: note = P00747_1-19
  source 1..57: mol_type = other RNA
atggagcacaaggaagtggtcctgctcctgttgctgttcctcaaaagcggccagggg

SEQ ID NO: 1692 - RNA, 57 nt, synthetic construct
  misc_feature 1..57: note = P01764_1-19
  source 1..57: mol_type = other RNA
atggagttcggcctgagctggctctttctggtggccatcttgaagggggtccagtgc

SEQ ID NO: 1693 - RNA, 57 nt, synthetic construct
  misc_feature 1..57: note = P16150_1-19
  source 1..57: mol_type = other RNA
atggccaccctgctcctgttgctgggcgtgctcgtcgtgagccccgacgcactgggg

SEQ ID NO: 1694 - RNA, 57 nt, synthetic construct
  misc_feature 1..57: note = Q6DN72_1-19
  source 1..57: mol_type = other RNA
atgctgctctggaccgccgtgctgttgttcgtcccctgcgtgggcaagactgtatgg

SEQ ID NO: 1695 - RNA, 57 nt, synthetic construct
  misc_feature 1..57: note = Q01151_1-19
  source 1..57: mol_type = other RNA
atgagcaggggcctgcagctcctgttgctgtcctgcgcctacagtctcgcacccgcc

SEQ ID NO: 1696 - RNA, 57 nt, synthetic construct
  misc_feature 1..57: note = P07093_1-19
  source 1..57: mol_type = other RNA
atgaactggcacctccccctgttcctgttggccagcgtgaccctgccatccatctgc

SEQ ID NO: 1697 - RNA, 57 nt, synthetic construct
  misc_feature 1..57: note = Q8WWQ8_1-19
  source 1..57: mol_type = other RNA
atgatgctgcagcacctcgtgatcttctgcctgggcttggtcgtgcaaaacttttgt

SEQ ID NO: 1698 - RNA, 60 nt, synthetic construct
  misc_feature 1..60: note = Q13291_1-20
  source 1..60: mol_type = other RNA
atggaccccaagggcctgctcagcctgaccttcgtgttgtttctgtccctcgccttcggg

SEQ ID NO: 1699 - RNA, 60 nt, synthetic construct
  misc_feature 1..60: note = P35225_1-20
  source 1..60: mol_type = other RNA
atggccctgctcctgaccactgtgatcgcattgacctgcctgggcgggttcgccagcccc

SEQ ID NO: 1700 - RNA, 60 nt, synthetic construct
  misc_feature 1..60: note = P25942_1-20
  source 1..60: mol_type = other RNA
atggtgaggctgcccctccagtgcgtcctgtggggctgtttgctgaccgccgtgcaccca

SEQ ID NO: 1701 - RNA, 60 nt, synthetic construct
  misc_feature 1..60: note = P52803_1-20
  source 1..60: mol_type = other RNA
atgctgcacgtggagatgctcaccctggtcttcttggtgctgtggatgtgcgtatttagc

SEQ ID NO: 1702 - RNA, 60 nt, synthetic construct
  misc_feature 1..60: note = Q15116_1-20
  source 1..60: mol_type = other RNA
atgcagatcccccaagccccatggccggtggtctgggcagtgctgcagctcggctggagg

SEQ ID NO: 1703 - RNA, 60 nt, synthetic construct; identical to SEQ ID NO: 1287
  misc_feature 1..60: note = P05556_1-20
  source 1..60: mol_type = other RNA

SEQ ID NO: 1704 - RNA, 60 nt, synthetic construct
  misc_feature 1..60: note = Q12891_1-20
  source 1..60: mol_type = other RNA
atgagggccggccccgggccaaccgtgactctggcactcgtcctggccgtggcgtgggcc

SEQ ID NO: 1705 - RNA, 60 nt, synthetic construct
  misc_feature 1..60: note = Q8IV16_1-20
  source 1..60: mol_type = other RNA
atgaaggccctgggcgcagtgctcctggccttgctgctctgcgggaggcccggtcggggc

SEQ ID NO: 1706 - RNA, 60 nt, synthetic construct
  misc_feature 1..60: note = Q03167_1-20
  source 1..60: mol_type = other RNA
atgaccagccactacgtgatcgccattttcgcactgatgtccagttgcctcgccactgcg

SEQ ID NO: 1707 - RNA, 60 nt, synthetic construct
  misc_feature 1..60: note = Q14246_1-20
  source 1..60: mol_type = other RNA
atgaggggcttcaacctgctcctgttttgggggtgctgtgtgatgcacagctgggagggt

SEQ ID NO: 1708 - RNA, 60 nt, synthetic construct
  misc_feature 1..60: note = P16871_1-20
  source 1..60: mol_type = other RNA
atgaccatcctgggcactaccttcgggatggtgtttagcctcctgcaggtcgtgtccggt

SEQ ID NO: 1709 - RNA, 60 nt, synthetic construct
  misc_feature 1..60: note = P61769_1-20
  source 1..60: mol_type = other RNA
atgagcaggtccgtggccctggcagtcctcgccctgttgagtctgagcggcctcgaggcg

SEQ ID NO: 1710 - RNA, 60 nt, synthetic construct
  misc_feature 1..60: note = Q9Y6W8_1-20
  source 1..60: mol_type = other RNA
atgaaaagcggcctgtggtacttctttctcttctgcctgaggatcaaggtgttgaccggg

SEQ ID NO: 1711 - RNA, 63 nt, synthetic construct
  misc_feature 1..63: note = P10966_1-21
  source 1..63: mol_type = other RNA
atgaggccccggctgtggctcctgttggccgcacagctgaccgtgctccacggcaacagcgtc

SEQ ID NO: 1712 - RNA, 63 nt, synthetic construct
  misc_feature 1..63: note = Q9BZW8_1-21
  source 1..63: mol_type = other RNA
atgctgggccaggtggtcaccctcatcctgttgctgctcctgaaggtgtaccaagggaaaggt

SEQ ID NO: 1713 - RNA, 63 nt, synthetic construct
  misc_feature 1..63: note = P02778_1-21
  source 1..63: mol_type = other RNA
atgaaccagaccgccatcctgatttgctgtctcatcttcctgactttgagcggcattcaaggg

SEQ ID NO: 1714 - RNA, 63 nt, synthetic construct
  misc_feature 1..63: note = P18564_1-21
  source 1..63: mol_type = other RNA
atgggcatcgagctgctctgcctgttctttttgttcctggggaggaacgaccacgtgcagggt

SEQ ID NO: 1715 - RNA, 63 nt, synthetic construct
  misc_feature 1..63: note = O14525_1-21
  source 1..63: mol_type = other RNA
atggccctggcaggcctctgcgccctgttggcgtgttgctgggggcccgccgcagtgctggcc

SEQ ID NO: 1716 - RNA, 63 nt, synthetic construct
  misc_feature 1..63: note = P01130_1-21
  source 1..63: mol_type = other RNA
atgggcccctgggggtggaagctgaggtggaccgtggccctcctgttggcagccgcgggtact

SEQ ID NO: 1717 - RNA, 63 nt, synthetic construct
  misc_feature 1..63: note = P01732_1-21
  source 1..63: mol_type = other RNA
atggccctgcccgtgaccgcactcctgttgccactggccctcctgttgcacgcggccaggccg

SEQ ID NO: 1718 - RNA, 63 nt, synthetic construct
  misc_feature 1..63: note = P48061_1-21
  source 1..63: mol_type = other RNA
atgaacgccaaggtggtcgtggtactggtgctcgtcctgaccgcattgtgcctgagcgacggc

SEQ ID NO: 1719 - RNA, 63 nt, synthetic construct
  misc_feature 1..63: note = P01589_1-21
  source 1..63: mol_type = other RNA
atggacagctacctgctcatgtggggcctgttgaccttcatcatggtgcccgggtgccaggcc

SEQ ID NO: 1720 - RNA, 63 nt, synthetic construct
  misc_feature 1..63: note = Q86T13_1-21
  source 1..63: mol_type = other RNA
atgaggccggccttcgcactgtgcctcctgtggcaggccttgtggccaggccccgggggtggc

SEQ ID NO: 1721 - RNA, 63 nt, synthetic construct
  misc_feature 1..63: note = Q5DID0_1-21
  source 1..63: mol_type = other RNA
atgctgaggaccagcggcctcgccctgttggcactggtgtccgccgtcgggcccagtcaggcg

SEQ ID NO: 1722 - RNA, 66 nt, synthetic construct
  misc_feature 1..66: note = P40189_1-22
  source 1..66: mol_type = other RNA
atgctgaccctccagacttggctggtgcaagccttgttcatctttctgaccacggagagcactggc

SEQ ID NO: 1723 - RNA, 66 nt, synthetic construct
  misc_feature 1..66: note = Q86YL7_1-22
  source 1..66: mol_type = other RNA
atgtggaaggtgagcgccctcctgttcgtcctgggctccgcaagtttgtgggtgctggccgagggg

SEQ ID NO: 1724 - RNA, 66 nt, synthetic construct
  misc_feature 1..66: note = P55075_1-22
  source 1..66: mol_type = other RNA
atgggcagccccaggtccgccctgagttgcctcctgttgcacctcctggtgctgtgtttgcaggca

SEQ ID NO: 1725 - RNA, 66 nt, synthetic construct
  misc_feature 1..66: note = Q30201_1-22
  source 1..66: mol_type = other RNA
atgggccccagggcccggccagcactgctcctgttgatgctgctccagaccgccgtgctgcaaggg

SEQ ID NO: 1726 - RNA, 66 nt, synthetic construct
  misc_feature 1..66: note = P07766_1-22
  source 1..66: mol_type = other RNA
atgcagagcggcacccactggagggtgctggggctctgcctgttgtccgtcggtgtgtggggccaa

SEQ ID NO: 1727 - RNA, 66 nt, synthetic construct
  misc_feature 1..66: note = P18827_1-22
  source 1..66: mol_type = other RNA
atgaggcgggccgcactgtggctctggctgtgcgccttggcgctgagcctccagcccgccctgcca

SEQ ID NO: 1728 - RNA, 66 nt, synthetic construct
  misc_feature 1..66: note = P55290_1-22
  source 1..66: mol_type = other RNA
atgcagcccaggaccccactggtgctctgcgtcctgttgagccaagtgctgctcctgacttccgcc

SEQ ID NO: 1729 - RNA, 66 nt, synthetic construct
  misc_feature 1..66: note = P37173_1-22
  source 1..66: mol_type = other RNA
atgggcagggggctgctccggggtctgtggcccttgcacatcgtgctgtggacccgcattgccagc

SEQ ID NO: 1730 - RNA, 66 nt, synthetic construct
  misc_feature 1..66: note = Q07325_1-22
  source 1..66: mol_type = other RNA
atgaagaaaagcggcgtgctgttcctcctggggatcattttgctggtcctcatcggtgtgcagggc

SEQ ID NO: 1731 - RNA, 66 nt, synthetic construct
  misc_feature 1..66: note = P04156_1-22
  source 1..66: mol_type = other RNA
atggccaacctgggctgctggatgctcgtgctgttcgtcgcaacctggagcgacttggggctgtgt

SEQ ID NO: 1732 - RNA, 66 nt, synthetic construct
  misc_feature 1..66: note = P31785_1-22
  source 1..66: mol_type = other RNA
atgctgaagcccagcctcccattcacctccctgttgtttctgcagctcccgctgttgggcgtgggg

SEQ ID NO: 1733 - RNA, 69 nt, synthetic construct
  misc_feature 1..69: note = P01579_1-23
  source 1..69: mol_type = other RNA
atgaagtacaccagctatatcctggccttccagctctgcattgtgctgggctccttggggtgttactgc

SEQ ID NO: 1734 - RNA, 69 nt, synthetic construct
  misc_feature 1..69: note = P23229_1-23
  source 1..69: mol_type = other RNA
atggccgcagccggccagctgtgcctcctgtacttgagcgcggggctgctctccaggctgggtgccgca

SEQ ID NO: 1735 - RNA, 69 nt, synthetic construct
  misc_feature 1..69: note = O60494_1-23
  source 1..69: mol_type = other RNA
atgatgaacatgagcctgcccttcctctggtccctgttgaccctgctcatctttgccgaggtgaatggc

SEQ ID NO: 1736 - RNA, 69 nt, synthetic construct
  misc_feature 1..69: note = P08575_1-23
  source 1..69: mol_type = other RNA
atgtacctgtggctcaagctgttggccttcggctttgcattcctggacaccgaggtgtttgtcactggg

SEQ ID NO: 1737 - RNA, 69 nt, synthetic construct
  misc_feature 1..69: note = Q8IWY4_1-23
  source 1..69: mol_type = other RNA
atgggcgccgcagccgtgaggtggcacctgtgcgtcctcctggcgttggggacccggggtcgcctggcc

SEQ ID NO: 1738 - RNA, 69 nt, synthetic construct
  misc_feature 1..69: note = Q08431_1-23
  source 1..69: mol_type = other RNA
atgcccaggccacggctgctcgccgcactgtgcggcgccttgctgtgtgcgccgagcctcctggtggcc

SEQ ID NO: 1739 - RNA, 69 nt, synthetic construct
  misc_feature 1..69: note = Q99665_1-23
  source 1..69: mol_type = other RNA
atggcccacaccttcaggggctgcagcctggcatttatgttcatcattacttggctcctgatcaaggcc

SEQ ID NO: 1740 - RNA, 69 nt, synthetic construct
  misc_feature 1..69: note = Q6Q8B3_1-23
  source 1..69: mol_type = other RNA
atgagcgcccccaggctgctcatctccattatcattatggtgagtgcaagctccagtagctgcatgggc

SEQ ID NO: 1741 - RNA, 69 nt, synthetic construct
  misc_feature 1..69: note = Q07011_1-23
  source 1..69: mol_type = other RNA
atgggcaacagctgctacaatatcgtggccaccctgctcctggtcttgaacttcgagaggactcggtcc

SEQ ID NO: 1742 - RNA, 69 nt, synthetic construct
  misc_feature 1..69: note = Q8NHL6_1-23
  source 1..69: mol_type = other RNA
atgacccccatcctgactgtgctcatttgcctgggcttgagcctggggccaaggacccacgtccaggcc

SEQ ID NO: 1743 - RNA, 69 nt, synthetic construct
  misc_feature 1..69: note = P36894_1-23
  source 1..69: mol_type = other RNA
atgccccagctgtacatctatattaggctcctgggcgcctacttgttcatcattagccgggtgcaaggg

SEQ ID NO: 1744 - RNA, 69 nt, synthetic construct
  misc_feature 1..69: note = Q16552_1-23
  source 1..69: mol_type = other RNA
atgacccccggcaagactagcctggtgtccctcctgttgctgctcagtctggaggccatcgtcaaagca

SEQ ID NO: 1745 - RNA, 69 nt, synthetic construct
  misc_feature 1..69: note = P42081_1-23
  source 1..69: mol_type = other RNA
atggacccccagtgcaccatgggcctgagcaacatcctcttcgtgatggcctttctgttgtccggggca

SEQ ID NO: 1746 - RNA, 69 nt, synthetic construct
  misc_feature 1..69: note = P43121_1-23
  source 1..69: mol_type = other RNA
atgggcctgcccaggctcgtgtgcgccttcctgttggcagcctgttgctgttgcccacgggtcgcgggg

SEQ ID NO: 1747 - RNA, 69 nt, synthetic construct
  misc_feature 1..69: note = O00206_1-23
  source 1..69: mol_type = other RNA
atgatgagcgcctccaggctggcaggcaccctcatccccgccatggcgttcctgagttgcgtgcggcca

SEQ ID NO: 1748 - RNA, 69 nt, synthetic construct
  misc_feature 1..69: note = P42701_1-23
  source 1..69: mol_type = other RNA
atggagcccctggtgacctgggtcgtgccactcctgttcttgtttctgctcagcaggcagggcgccgca

SEQ ID NO: 1749 - RNA, 72 nt, synthetic construct
  misc_feature 1..72: note = P06729_1-24
  source 1..72: mol_type = other RNA
atgagcttcccctgcaagtttgtggcctccttcctgctcatctttaacgtcagtagcaaaggcgcagtgtcc

SEQ ID NO: 1750 - RNA, 72 nt, synthetic construct
  misc_feature 1..72: note = P15328_1-24
  source 1..72: mol_type = other RNA
atggcccagaggatgaccactcaactgctcctgttgctggtgtgggtcgcagtggtaggcgaggcccagacc

SEQ ID NO: 1751 - RNA, 72 nt, synthetic construct
  misc_feature 1..72: note = P05112_1-24
  source 1..72: mol_type = other RNA
atgggcctgaccagccagctcctgcccccattgttctttctgctcgcctgcgcagggaacttcgtgcacggt

SEQ ID NO: 1752 - RNA, 72 nt, synthetic construct
  misc_feature 1..72: note = P06127_1-24
  source 1..72: mol_type = other RNA
atgcccatgggcagcctgcagccactcgccaccctgtacttgctggggatgctcgtggcatcctgcctgggt

SEQ ID NO: 1753 - RNA, 72 nt, synthetic construct
  misc_feature 1..72: note = P32248_1-24
  source 1..72: mol_type = other RNA
atggacctgggcaagcccatgaaaagcgtgctcgtcgtggccctgttggtaatcttccaggtgtgcctgtgt

SEQ ID NO: 1754 - RNA, 72 nt, synthetic construct
  misc_feature 1..72: note = Q7Z7D3_1-24
  source 1..72: mol_type = other RNA
atggccagcctgggccagatcctcttctggtccattatcagtattatcattatcctggcaggggccatcgcg

SEQ ID NO: 1755 - RNA, 72 nt, synthetic construct
  misc_feature 1..72: note = P54756_1-24
  source 1..72: mol_type = other RNA
atgaggggcagcgggccccggggtgccggccgcaggcggccaccgtccgggggcggtgacacccccatcact

SEQ ID NO: 1756 - RNA, 72 nt, synthetic construct
  misc_feature 1..72: note = Q92823_1-24
  source 1..72: mol_type = other RNA
atgcagctgaagatcatgcccaaaaagaaaaggctcagcgccggccgggtgccactgattttgttcctgtgc

SEQ ID NO: 1757 - RNA, 72 nt, synthetic construct
  misc_feature 1..72: note = P19320_1-24
  source 1..72: mol_type = other RNA
atgcccggcaagatggtggtcatcctgggggccagcaacattctctggatcatgttcgcagcctcccaggcg

SEQ ID NO: 1758 - RNA, 72 nt, synthetic construct
  misc_feature 1..72: note = Q86UN2_1-24
  source 1..72: mol_type = other RNA
atgctgaggaagggctgctgtgtggagctcctgttgctgctcgtcgccgcagaactgcccttgggtgggggc

SEQ ID NO: 1759 - RNA, 75 nt, synthetic construct
  misc_feature 1..75: note = P33151_1-25
  source 1..75: mol_type = other RNA
atgcagaggctgatgatgctcctggccaccagcggcgcatgcttggggctgctcgccgtggcggccgtcgcagcc

SEQ ID NO: 1760 - RNA, 75 nt, synthetic construct
  misc_feature 1..75: note = P17813_1-25
  source 1..75: mol_type = other RNA
atggacaggggcaccctgcccctcgccgtggcactgttgctggccagctgctccctcagtccaactagcctggcg

SEQ ID NO: 1761 - RNA, 75 nt, synthetic construct
  misc_feature 1..75: note = P25445_1-25
  source 1..75: mol_type = other RNA
atgctgggcatctggaccctcctgcccttggtgctgactagcgtcgccaggctctccagtaagagcgtgaacgca

SEQ ID NO: 1762 - RNA, 75 nt, synthetic construct
  misc_feature 1..75: note = P01730_1-25
  source 1..75: mol_type = other RNA
atgaacaggggcgtgcccttccggcacctcctgctggtcttgcagctggccctcctgccagcagccacccaaggg

SEQ ID NO: 1763 - RNA, 75 nt, synthetic construct
  misc_feature 1..75: note = Q685J3_1-25
  source 1..75: mol_type = other RNA
atgcccaggccaggcaccatggccctgtgcctcctgactttggtgctgagcctcctgccgccccaggcagccgcg

SEQ ID NO: 1764 - RNA, 75 nt, synthetic construct
  misc_feature 1..75: note = P17787_1-25
  source 1..75: mol_type = other RNA
atggccaggcggtgcggccccgtggcactgctcctggggttcggtttgctgcgcctctgtagcggcgtctggggg

SEQ ID NO: 1765 - RNA, 75 nt, synthetic construct
  misc_feature 1..75: note = Q6UQ28_1-25
  source 1..75: mol_type = other RNA
atggccgtgttccacgacatgctgctccagcccctgggcatgtttttgtgcctgagcctccaactgtccagtgca

SEQ ID NO: 1766 - RNA, 75 nt, synthetic construct
  misc_feature 1..75: note = P13987_1-25
  source 1..75: mol_type = other RNA
atgggcatccagggtgggagcgtgctgttcggcctcctgttggtcctggccgtgttttgccactccgggcatagt

SEQ ID NO: 1767 - RNA, 75 nt, synthetic construct
  misc_feature 1..75: note = P10721_1-25
  source 1..75: mol_type = other RNA
atgaggggcgcccgcggggcatgggacttcctgtgcgtgctcctgttgctgctccgggtccagaccggtagctcc

SEQ ID NO: 1768 - RNA, 75 nt, synthetic construct
  misc_feature 1..75: note = P12319_1-25
  source 1..75: mol_type = other RNA
atggcccccgcaatggagagcccaaccctgctctgcgtggccctgttgttctttgcgccggacggcgtcctggcc

SEQ ID NO: 1769 - RNA, 78 nt, synthetic construct
  misc_feature 1..78: note = Q9BZR6_1-26
  source 1..78: mol_type = other RNA
atgaagagggccagcgcaggcgggtcccggctgctcgcctgggtgctgtggttgcaggcgtggcaagtcgccgcaccc

SEQ ID NO: 1770 - RNA, 78 nt, synthetic construct
  misc_feature 1..78: note = P25063_1-26
  source 1..78: mol_type = other RNA
atgggcagggccatggtggcacggctggggctcggtctgttgctgctcgccctgttgctgcccacccagatctacagc

SEQ ID NO: 1771 - RNA, 78 nt, synthetic construct
  misc_feature 1..78: note = Q9NR97_1-26
  source 1..78: mol_type = other RNA
atggagaacatgttcctgcagagctccatgctgacctgcatctttctcttgattagtggcagctgtgaactgtgcgcc

SEQ ID NO: 1772 - RNA, 78 nt, synthetic construct
  misc_feature 1..78: note = Q8N131_1-26
  source 1..78: mol_type = other RNA
atgggcctgggggccaggggtgcatgggccgcgctcctgttgggcaccctccaggtgctggccctgttgggggcagcc

SEQ ID NO: 1773 - RNA, 78 nt, synthetic construct
  misc_feature 1..78: note = P49771_1-26
  source 1..78: mol_type = other RNA
atgaccgtgctggcccccgcatggagcccaactacctacctcctgttgctgctcctgttgtccagtggcctgagcggg

SEQ ID NO: 1774 - RNA, 78 nt, synthetic construct
  misc_feature 1..78: note = P02679_1-26
  source 1..78: mol_type = other RNA
atgagctggtccctgcaccccaggaacctcatcctgtacttctatgccttgctgtttctcagcagtacctgcgtggca

SEQ ID NO: 1775 - RNA, 78 nt, synthetic construct
  misc_feature 1..78: note = P14784_1-26
  source 1..78: mol_type = other RNA
atggccgcacccgccctgagctggaggctcccactgttgatcctgctcctgccgttggcgacctcctgggccagtgca

SEQ ID NO: 1776 - RNA, 81 nt, synthetic construct
  misc_feature 1..81: note = P05362_1-27
  source 1..81: mol_type = other RNA
atggcccccagctccccaaggccggcactgcccgccctcctggtgttgctgggcgccctcttcccagggcccggtaacgcg

SEQ ID NO: 1777 - RNA, 81 nt, synthetic construct
  misc_feature 1..81: note = Q13740_1-27
  source 1..81: mol_type = other RNA
atggagagcaagggcgcctccagttgcaggctcctgttctgtctgttgatcagcgcaaccgtgtttcggcccgggctgggt

SEQ ID NO: 1778 - RNA, 84 nt, synthetic construct
  misc_feature 1..84: note = Q13443_1-28
  source 1..84: mol_type = other RNA
atgggcagcggggccaggttcccctccggtaccctgcgggtgcgctggctcctgttgctgggcctcgtcgggccagtgctgggc

SEQ ID NO: 1779 - RNA, 84 nt, synthetic construct
  misc_feature 1..84: note = P14151_1-28
  source 1..84: mol_type = other RNA
atgatcttcccctggaagtgccagagcacccaaagggacctgtggaacatttttaaactctggggctggactatgctgtgttgc

SEQ ID NO: 1780 - RNA, 84 nt, synthetic construct
  misc_feature 1..84: note = P56199_1-28
  source 1..84: mol_type = other RNA
atggcccccaggccacgggcacgcccgggcgtggccgtcgcgtgctgttggctgctcaccgtggtactgaggtgctgtgtgagc

SEQ ID NO: 1781 - RNA, 84 nt, synthetic construct
  misc_feature 1..84: note = P11279_1-28
  source 1..84: mol_type = other RNA
atggccgcacccggcagcgccaggcggccactgctcctgttgctgctcctgttgctgctcgggctgatgcactgcgcgtccgcc

SEQ ID NO: 1782 - RNA, 84 nt, synthetic construct
  misc_feature 1..84: note = P40259_1-28
  source 1..84: mol_type = other RNA
atggccaggctggcactcagccccgtgccatcccactggatggtcgccctgttgctgctcctgagtgcggagccggtgcccgcc

SEQ ID NO: 1783 - RNA, 84 nt, synthetic construct
  misc_feature 1..84: note = P43681_1-28
  source 1..84: mol_type = other RNA
atggagctgggcgggcccggtgccccaaggctcctgccgcccttgctgctcctgttgggcaccgggctgctccgggcaagctcc

SEQ ID NO: 1784 - RNA, 84 nt, synthetic construct
  misc_feature 1..84: note = P18627_1-28
  source 1..84: mol_type = other RNA
atgtgggaggcccagttcctgggcctcctgtttttgcaacccctgtgggtggcaccagtcaagccgctccagcccggggccgaa

SEQ ID NO: 1785 - RNA, 84 nt, synthetic construct
  misc_feature 1..84: note = Q5ZPR3_1-28
  source 1..84: mol_type = other RNA
atgctgaggcggcgcggcagccccgggatgggtgtgcacgtcggcgccgcactcggggccctgtggttctgcttgaccggcgcg

SEQ ID NO: 1786 - RNA, 84 nt, synthetic construct
  misc_feature 1..84: note = P23415_1-28
  source 1..84: mol_type = other RNA
atgtacagcttcaacaccctgaggctctatctgtgggagactatcgtgtttttctccttggccgcaagtaaggaagccgaggcg

SEQ ID NO: 1787 - RNA, 84 nt, synthetic construct
  misc_feature 1..84: note = Q8TD46_1-28
  source 1..84: mol_type = other RNA
atgctgtgcccctggaggaccgccaacctcggcctgttgctgatcctcactattttcctggtggcagccagctccagtttgtgt

SEQ ID NO: 1788 - RNA, 87 nt, synthetic construct
  misc_feature 1..87: note = P17301_1-29
  source 1..87: mol_type = other RNA
atgggccccgagaggaccggggccgcaccactgccgctcctgttggtgctggccctcagccagggtatcctgaactgctgtttggcg

SEQ ID NO: 1789 - RNA, 87 nt, synthetic construct
  misc_feature 1..87: note = P12821_1-29
  source 1..87: mol_type = other RNA
atgggcgccgcaagcgggaggcggggtcccggcctgctcctgccattgccgctgctcctgttgctgcccccacagcccgccctcgcg

SEQ ID NO: 1790 - RNA, 87 nt, synthetic construct
  misc_feature 1..87: note = Q14118_1-29
  source 1..87: mol_type = other RNA
atgaggatgagcgtgggcctgtccctcctgttgcccctgtgggggcggaccttcctcctgttgctgagtgtcgtgatggcccagagc

SEQ ID NO: 1791 - RNA, 87 nt, synthetic construct
  misc_feature 1..87: note = P05231_1-29
  source 1..87: mol_type = other RNA
atgaacagcttctccaccagtgcctttggccccgtggcattcagcctggggctcctgttggtcctgccagccgcgtttccggccccc

SEQ ID NO: 1792 - RNA, 87 nt, synthetic construct
  misc_feature 1..87: note = O00602_1-29
  source 1..87: mol_type = other RNA
atggagctgagcggcgccaccatggcaagggggctcgccgtgctgttggtcctgttcctccacatcaagaacctgcccgcgcaggcc

SEQ ID NO: 1793 - RNA, 87 nt, synthetic construct
  misc_feature 1..87: note = Q9Y6Q6_1-29
  source 1..87: mol_type = other RNA
atggcccccagggcacggcgcaggcggccactgttcgccctcctgttgctgtgcgcgctcctggcccgcttgcaagtggcactgcag

SEQ ID NO: 1794 - RNA, 87 nt, synthetic construct
  misc_feature 1..87: note = Q9ULI3_1-29
  source 1..87: mol_type = other RNA
atggccagccccagggcatcccggtggccaccgcccctcctcctgttgctgctcccactgttgctgctgcccccagccgcgcccggc

SEQ ID NO: 1795 - RNA, 90 nt, synthetic construct
  misc_feature 1..90: note = Q8NBP7_1-30
  source 1..90: mol_type = other RNA
atgggcaccgtgagctccaggcggagttggtggcccctgccactcctgttgctgctcctgttgctgctcgggccggccggtgcacgcgcc

SEQ ID NO: 1796 - RNA, 90 nt, synthetic construct
  misc_feature 1..90: note = P02675_1-30
  source 1..90: mol_type = other RNA
atgaagaggatggtgagctggtccttccacaaactgaagaccatgaaacatctcctgttgctgctcctgtgcgtctttttggtgaagagt

SEQ ID NO: 1797 - RNA, 90 nt, synthetic construct
  misc_feature 1..90: note = P06756_1-30
  source 1..90: mol_type = other RNA
atggccttcccacccaggcggcgcctgaggctcggcccgcgggggctgcccttgctgctcagcggtctgttgctgccactctgccgcgca

SEQ ID NO: 1798 - RNA, 93 nt, synthetic construct
  misc_feature 1..93: note = O60609_1-31
  source 1..93: mol_type = other RNA
atggtgaggcccctgaacccacggccgctgcccccagtcgtgctcatgttgctgctcctgttgcccccaagccccctgccactcgccgcaggc

SEQ ID NO: 1799 - RNA, 93 nt, synthetic construct
  misc_feature 1..93: note = P50895_1-31
  source 1..93: mol_type = other RNA
atggagcccccagacgccccggcacaggccaggggcgcgccccggctgctcctgttggccgtgctgctcgcagcccacccagatgcacaagcc

SEQ ID NO: 1800 - RNA, 93 nt, synthetic construct
  misc_feature 1..93: note = P28906_1-31
  source 1..93: mol_type = other RNA
atgctggtgaggcggggcgcccgcgcagggcccaggatgccacggggttggaccgccctctgcctgttgagcctgctcccgtccggcttcatg

SEQ ID NO: 1801 - RNA, 93 nt, synthetic construct
  misc_feature 1..93: note = P08514_1-31
  source 1..93: mol_type = other RNA
atggccagggcactgtgccccctccaggccctgtggttgctggagtgggtgctcctgttgctgggcccatgtgcggccccgcccgcatgggcc

SEQ ID NO: 1802 - RNA, 93 nt, synthetic construct
  misc_feature 1..93: note = P00742_1-31
  source 1..93: mol_type = other RNA
atgggcaggcccctgcacctcgtgctgttgagcgcctccctggcagggctcctgttgctgggtgagagtctcttcatccggcgcgaacaggcc

SEQ ID NO: 1803 - RNA, 96 nt, synthetic construct
  misc_feature 1..96: note = P26006_1-32
  source 1..96: mol_type = other RNA
atgggccccgggccaagcagggccccgcgggcaccccgcctgatgctctgcgccctggcgttgatggtggccgccggtggctgtgtcgtgtccgca

SEQ ID NO: 1804 - RNA, 96 nt, synthetic construct
  misc_feature 1..96: note = P13726_1-32
  source 1..96: mol_type = other RNA
atggagacccccgcctggccaagggtgccgcggcccgaaactgcagtcgcccgcaccctgctcctgggctgggtgttcgcgcaggtagccggggca

SEQ ID NO: 1805 - RNA, 96 nt, synthetic construct
  misc_feature 1..96: note = P11912_1-32
  source 1..96: mol_type = other RNA
atgcccggcgggccaggtgtgctgcaggccctcccggcaaccatcttcctgttgtttctgctcagcgccgtctacctgggccccgggtgccaagcg

SEQ ID NO: 1806 - RNA, 96 nt, synthetic construct
  misc_feature 1..96: note = Q9H6X2_1-32
  source 1..96: mol_type = other RNA
atggccaccgcagagaggcgggccctgggcatcgggttccagtggctcagcctggcgactttggtgctgatttgcgccggtcaaggcgggcgcagg

SEQ ID NO: 1807 - RNA, 99 nt, synthetic construct
  misc_feature 1..99: note = Q8IWK6_1-33
  source 1..99: mol_type = other RNA
atggagcccccaggcaggcggcgcgggagggcccagccgcccctgctcctgccattgagcctgctcgcactgttggccctgctcggtggcgggggcggt

SEQ ID NO: 1808 - RNA, 99 nt, synthetic construct
  misc_feature 1..99: note = P58335_1-33
  source 1..99: mol_type = other RNA
atggtggccgagaggagccccgcacggtccccaggcagttggctgttcccggggctctggctgttggtcctgagcggtcccggcgggctcctgcgcgcc

SEQ ID NO: 1809 - RNA, 102 nt, synthetic construct
  misc_feature 1..102: note = P06731_1-34
  source 1..102: mol_type = other RNA
atggagagcccctccgccccaccgcacaggtggtgcatcccctggcagcggctgctcctgaccgcaagtttgctgactttctggaacccacccaccacggcc

SEQ ID NO: 1810 - RNA, 102 nt, synthetic construct
  misc_feature 1..102: note = P33681_1-34
  source 1..102: mol_type = other RNA
atgggccacaccaggcggcaggggactagcccctccaagtgcccatacctgaacttctttcaactcctggtgttggccggtctgagtcatttctgtagcggc

SEQ ID NO: 1811 - RNA, 105 nt, synthetic construct
  misc_feature 1..105: note = P38567_1-35
  source 1..105: mol_type = other RNA
atgggcgtgctgaagttcaaacacatctttttcaggagctttgtcaagtccagtggggtgagccagattgtattcacctttctcctgatcccctgctgtttgact

SEQ ID NO: 1812 - RNA, 105 nt, synthetic construct
  misc_feature 1..105: note = P16410_1-35
  source 1..105: mol_type = other RNA
atggcctgcctgggcttccagaggcacaaggcacaactcaacctggccacccggacttggccctgtaccttgctgtttttcctcctgtttatcccagtgttctgc

SEQ ID NO: 1813 - RNA, 111 nt, synthetic construct
  misc_feature 1..111: note = P15814_1-37
  source 1..111: mol_type = other RNA
atgaggcccggcaccgggcagggtggcctggaggccccaggggaaccgggccccaacctccggcaacgctggccactgttgctgctcggtctggcagtggtcactcacggg

SEQ ID NO: 1814 - RNA, 114 nt, synthetic construct
  misc_feature 1..114: note = Q92956_1-38
  source 1..114: mol_type = other RNA
atggagcccccaggcgactgggggccgcccccatggaggagcacccccaagactgatgtgctgcggctcgtcctgtacttgaccttcctgggtgccccatgctatgcacccgcc

SEQ ID NO: 1815 - RNA, 123 nt, synthetic construct
  misc_feature 1..123: note = Q86VB7_1-41
  source 1..123: mol_type = other RNA
atgagcaagctgaggatggtgctcctggaggactccggcagtgccgatttccggcgccactttgtcaacttgagccccttcaccatcactgtggtactgctcctgtccgcatgctttgtgacc

SEQ ID NO: 1816 - RNA, 123 nt, synthetic construct
  misc_feature 1..123: note = P08648_1-41
  source 1..123: mol_type = other RNA
atgggcagcaggacccccgagtccccactgcacgccgtgcagctccggtgggggccgcgcaggcggcccccactgttgcccctgctcctgttgctgctcccacccccaccgcgcgtcggtggc

SEQ ID NO: 1817 - RNA, 123 nt, synthetic construct
  misc_feature 1..123: note = P16109_1-41
  source 1..123: mol_type = other RNA
atggccaactgccagatcgcaattctgtaccaaaggttccagcgggtggtctttggcatcagccagctcctgtgtttctccgccttgattagtgagctgaccaatcagaaggaagtggcggcc

SEQ ID NO: 1818 - RNA, 132 nt, synthetic construct
  misc_feature 1..132: note = O75326_1-44
  source 1..132: mol_type = other RNA
atgaccccacccccgcccggcagggccgcaccaagcgcgccccgggcccgcgtgccagggcccccagccaggctgggtctcccgctgcggttgcgcctgctcctgttgctgtgggcagccgcagcctccgcg

SEQ ID NO: 1819 - RNA, 135 nt, synthetic construct
  misc_feature 1..135: note = Q8N2Q7_1-45
  source 1..135: mol_type = other RNA
atggccctgcccaggtgcacctggccaaactacgtgtggcgggcagtcatggcctgtctcgtgcaccgcggcctgggggcgccgttgactctgtgcatgctcggttgtctgttgcaggccggccatgtactgagc

SEQ ID NO: 1820 - RNA, 138 nt, synthetic construct
  misc_feature 1..138: note = Q86UN3_1-46
  source 1..138: mol_type = other RNA
atgctgcccggcctcaggcggctgttgcaggccccagcaagcgcctgcctgctcctgatgttgctggcgctcccgctggccgcaccctcctgtccaatgctgtgcacctgttacagtagcccacccactgtgtcctgc

SEQ ID NO: 1821 - RNA, 540 nt, synthetic construct
  misc_feature 1..540: note = A0A5B9
  source 1..540: mol_type = other RNA
atggacctgaagaacgtgtttcccccagaggtcgccgtgttcgaaccgagcgaggcagaaatctcccacacccagaaagccactctcgtatgcctggcgaccggcttctaccccgatcatgtggagttgagttggtgggtcaatgggaaggaagtgcacagcggtgtgtccacggacccacaacccctgaaagagcagccagccctcaacgatagtaggtattgtctgagctcccggttgcgcgtcagcgcaactttttggcagaatcccaggaaccatttccggtgccaggtgcaattttacggcctgtccgagaatgacgaatggacccaggatcgcgccaagccagtaacccagattgtgagtgcagaggcctgggggagggcggactgtggcttcactagcgaatcctatcagcaaggtgtcctcagcgccaccatcctgtacgagattctgctcgggaaagcaacgctgtatgccgtgttggtgagtgccctggtcctcatggcaatggtgaagcggaaggattcccgcggctga

SEQ ID NO: 1822 - RNA, 465 nt, synthetic construct
  misc_feature 1..465: note = B7Z8K6
  source 1..465: mol_type = other RNA
atgagccagccccacaccaagccatccgtgttcgtcatgaaaaacggcactaatgtggcctgcctggtaaaggagttttacccgaaagacatcaggattaacctcgtgagtagcaagaaaatcaccgagttcgatcccgcaattgtcatctccccaagtgggaagtataatgccgtgaagctgggtaaatacgaagacagcaactccgtgacgtgtagcgtccaacatgataataagactgtgcactccaccgactttgaagtaaaaaccgatagtactgaccatgtgaagcccaaagagaccgaaaacacgaagcagccaagcaaatcctgccacaagcccaaggcgattgtccatactgagaaagtgaatatgatgagcttgaccgtgctgggcctccggatgctgttcgccaagactgtcgcagtgaactttttgctgaccgccaaactcttctttctgtga

SEQ ID NO: 1823 - RNA, 645 nt, synthetic construct
  misc_feature 1..645: note = B9A064
  source 1..645: mol_type = other RNA
atgaggcccaagaccggccaggtggggtgcgagactccagaggaactgggtccgggcccccggcaacgctggccactcctgttgctggggctcgccatggtcgcacacggcctgttgaggcccatggtggccccacagagcggtgaccccgatccaggggcgtccgtaggcagtagccggtccagtctgcgcagcctctggggcaggctgctgctccagccgagcccccagcgggccgacccacgctgttggcccagggggttctggagcgaaccacaatccctgtgctacgtgtttggtaccggcacgaaagtcactgtgttggggcagcccaaggcaaacccgaccgtgaccctgtttcccccaagtagcgaggaactccaggccaataaagcaactctggtctgtctgatctccgatttctatcccggcgccgtgaccgtagcgtggaaggccgacggtagcccagtgaaagcaggggtcgagacgactaagcccagtaagcagtccaacaataaatacgccgccagctcctatttgagtctcaccccagagcaatggaagtcccatcggtcctacagctgccaggtgactcacgaaggcagtaccgtggagaaaaccgtcgcaccgacggaatgttcctga

SEQ ID NO: 1824 - RNA, 2520 nt, synthetic construct
  misc_feature 1..2520: note = O00206
  source 1..2520: mol_type = other RNA
atgatgagcgcctccaggctggcaggcaccctcatccccgccatggcgttcctgagttgcgtgcggccagagagctgggaaccgtgtgtcgaggtggtacccaacattacttaccagtgcatggaattgaatttttataagatcccagacaacctgcccttctccaccaaaaatctcgatctgagttttaacccattgcgccacctggggagctactccttctttagcttccccgagctccaagtgctggacctgtccaggtgtgaaattcagacgatcgaggatggtgcctatcagagtctcagccatctgtccactttgattctgaccggcaatccaatccagagcctcgcactgggggcctttagtggcctgtccagcttgcaaaagctcgtcgcagtggagaccaacctggcctccctggaaaatttcccgatcggtcacctcaaaactctgaaggagttgaacgtggcgcataatctgattcagagttttaaactccccgaatacttcagcaacctgaccaatctggagcacttggacctctccagcaacaagatccagagtatttattgcacggatctgcgggtcctgcatcagatgccactcctgaatttgtccctggacctcagcctgaaccccatgaattttatccaaccaggggccttcaaggagattcgcctgcacaaattgactctcaggaacaacttcgatagtctgaatgtgatgaagacctgtatccagggcctggcaggcctcgaagtacaccggctggtgttgggggagtttcgcaacgaaggtaatctggagaaattcgacaagtccgccctcgaaggcctgtgcaacctgactattgaggagtttaggttggcctacctggattattacctcgacgatatcatcgacctgttcaattgtctcaccaacgtcagcagcttttccctggtgagtgtgaccattgaacgggtcaaagatttcagctacaattttgggtggcagcatttggagctggtgaactgcaagttcggccagtttcccacgctcaaactgaagtccctgaagcgcttgactttcaccagcaataaaggtgggaacgcatttagtgaagtagacctgccgtccctcgagttcctggacctcagcaggaatggcctgtcctttaagggctgttgcagtcaaagcgatttcgggactacctccttgaaatatctggacctgagcttcaacggtgtgatcaccatgagttccaattttctcggcctggaacagttggagcacctggatttccagcatagcaacctcaagcaaatgtccgagtttagtgtcttcctgagcctccggaatctgatttacttggacatctcccacactcacacgcgcgtggcctttaacgggattttcaacggcctgagcagtctggaagtgctcaaaatggcgggtaattcctttcaggagaacttcctgcccgatatctttaccgaattgaggaatctgactttcctcgacctgagccagtgccagctggagcaactctccccaaccgcctttaacagcctgagtagcttgcaggtcctgaatatgtcccataacaatttcttcagtctcgatacctttccctataagtgtctgaacagcttgcaagtgctggactactccctcaatcacatcatgactagcaagaaacaggaactgcagcatttcccatccagtctggcatttctcaacctgacgcagaatgatttcgcctgcacctgtgagcaccagagctttttgcagtggattaaggaccaacggcagctgctcgtagaggtggaacgcatggagtgcgcaactccctccgataaacagggcatgccagtcctgagtttgaacatcacctgtcagatgaataagaccattatcggggtgagcgtcctgtccgtgctcgtggtaagcgtggtcgccgtgctggtctataaattctactttcatctgatgctcctggccggctgcattaagtatgggaggggtgaaaacatctacgacgcgttcgtgatctacagttcccaagacgaggattgggtgcggaatgagttggtaaagaacctggaagagggcgtgccgccctttcagctctgtctgcactatcgcgacttcattccaggggtcgcaatcgccgccaacattatccacgaaggctttcataaaagcaggaaggtgattgtcgtggtgtcccagcacttcatccaaagccggtggtgcatttttgagtacgaaatcgcacagacttggcagttcctgagttccagggccggtatcattttcatcgtactccagaaagtcgagaagacgttgctgcgccaacaggtggagctgtatcggctcctgagcaggaatacctacttggaatgggaggatagtgtgctgggccgccatatcttttggcggaggctccgcaaagcgctgctggacgggaagtcctggaaccccgaaggcactgtcgggaccggctgtaattggcaggaggccactagcatttga

SEQ ID NO: 1825 - RNA, 1377 nt, synthetic construct
  misc_feature 1..1377: note = P01730
  source 1..1377: mol_type = other RNA
atgaacaggggcgtgcccttccggcatctgctcctggtcttgcagctggccctcctgccagcagccacccaagggaagaaagtggtattgggtaagaaaggcgacactgtggagctgacctgcacggcgagccagaagaaatccatccagtttcactggaagaatagtaaccagattaagatcctcgggaatcaaggcagcttcctgactaaaggtccgtccaagctgaacgatcgcgccgacagtaggcggagcctctgggatcaggggaattttcccctgattatcaaaaacttgaagattgaagactccgatacctacatctgtgaggtcgaagaccagaaagaggaagtgcagctgctcgtgttcggcctgaccgcaaatagcgatactcacctgttgcaaggccagtccctcaccctgacgctggagagtccacccgggagctccccaagcgtccagtgccgcagtcccaggggtaagaacatccagggcgggaaaactctctccgtgagccaactggagttgcaggactccggcacctggacttgtaccgtactgcagaatcaaaagaaggtggaatttaaaattgatatcgtcgtgctcgccttccagaaggcaagtagcattgtgtataaaaaggagggtgaacaggtcgagttttccttcccactggcctttaccgtggagaaactgacggggagcggcgaattgtggtggcaggcggagcgggccagttccagcaagagttggatcactttcgacctcaagaacaaagaagtatccgtgaagcgcgtcacccaagatccgaaactgcagatgggcaagaaactgcccctccatctgactttgccacaggcactgccccagtacgccgggagcggtaatctcaccctggccctggaggcaaagaccggcaagttgcaccaagaagtgaacctcgtggtcatgagggccactcagctgcagaaaaatctgacgtgcgaggtgtgggggccaaccagccccaagctcatgctgtccttgaaactggagaacaaggaagcgaaagtaagtaagcgggagaaggccgtgtgggtcctcaatccggaagcaggcatgtggcagtgtctgctgagcgactccggtcaagtgttgctggagagcaacattaaagtcctccccacttggagtaccccagtgcagcccatggccctgatcgtgctcggcggggtagcaggcctgttgctgtttattgggctcggtatcttcttctgcgtgcgctgtaggcatcggcgcaggcaggccgaacggatgtcccagatcaagcgcctgctgagcgagaaaaagacctgccaatgtccacacaggtttcagaaaacttgctcccccatttga

SEQ ID NO: 1826 - RNA, 537 nt, synthetic construct
  misc_feature 1..537: note = P01850
  source 1..537: mol_type = other RNA
atggaggacctgaacaaggtgtttcccccagaagtcgccgtgttcgagccgagcgaagcagagatctcccacacccagaaagccactctcgtatgcctggcgaccggcttctttcccgatcatgtggaattgagttggtgggtcaatgggaaggaggtgcacagcggtgtgtccacggacccacaacccctgaaagagcagccagccctcaacgatagtaggtactgtctgagctcccggttgcgcgtcagcgcaactttctggcagaatcccaggaaccattttcggtgccaggtgcaattctatggcctgtccgaaaatgacgagtggacccaggatcgcgccaagccagtaacccagattgtgagtgcagaagcctgggggagggcggactgtggctttactagcgtctcctaccagcaaggtgtgctcagcgccaccatcctgtatgagattctgctcgggaaagcaacgctgtacgccgtgttggtcagtgccctggtgctcatggcaatggtaaagcggaaggatttctga

SEQ ID NO: 1827 - RNA, 624 nt, synthetic construct
  misc_feature 1..624: note = P07766
  source 1..624: mol_type = other RNA
atgcagagcggcacccactggagggtgctggggctctgcctgttgtccgtcggtgtgtggggccaagacgggaacgaggaaatgggcggtatcactcagaccccctacaaggtaagtattagcgggacgactgtgatcctgacctgtccacagtatccgggctccgagattctctggcagcataatgataaaaacatcggcggggacgaagatgacaagaatattggtagtgatgaggaccacctgagcttgaaagagttctccgaactggagcaaagcggctactatgtctgctacccccgggggtccaagccagaagatgccaacttttatctctacctgcgcgcaagggtgtgtgagaattgcatggaaatggacgtgatgagtgtcgccaccatcgtgatcgtagatatttgtatcactggcggtctgctcctgttggtgtattactggagcaaaaaccggaaggcgaaggccaaacccgtcacccgcggggcaggcgccggcgggaggcagcggggtcagaataaggagcgcccacccccagtgccgaaccccgactacgagccaattaggaaaggccagcgggatctgtattccgggctcaatcaacgcaggatctga

SEQ ID NO: 1828 - RNA, 3915 nt, synthetic construct
  misc_feature 1..3915: note = P08575
  source 1..3915: mol_type = other RNA
atgtacctgtggctcaagctgttggccttcggctttgcattcctggacaccgaggtgtttgtcactgggcagagccccaccccatccccgacgggtctcactaccgccaaaatgcccagtgtgccactgagctccgatcccttgccaacccacactaccgcgttcagtcccgccagcacgtttgaaagggagaacgacttctccgaaactaccactagcctgtccccagataataccagtacccaagtaagcccggactccctcgataacgcaagcgcctttaatacgactggcgtgagttccgtccagacgccccatctgccaactcacgcagacagccagaccccctccgccgggaccgatactcagacgttcagtggcagcgcggccaacgcaaagctgaatccaacccccggttccaacgccatcagcgacgtgccgggggagcggagtactgcctccacctttcccaccgatccagtgagccccctcactacgaccctgagtttggcacatcactccagcgccgcgctgccagcccgcactagcaataccaccattactgcaaacacgtccgacgcctatctcaatgcaagtgaaaccactaccctgagcccctccggcagcgccgtcatcagtactaccacgattgccaccactccatccaaaccgacctgcgatgagaagtacgcgaacatcactgtggactatctgtacaataaagagaccaagttgttcacggcaaagctcaacgtaaatgaaaacgtggagtgtggcaataacacgtgcactaacaatgaagtccataacctgaccgagtgtaaaaatgccagcgtgtccattagtcacaacagctgcactgcccccgataagaccctgatcctcgacgtgccacccggggtcgagaaatttcaactgcacgactgtacccaggtggaaaaggcagataccactatctgcttgaaatggaagaatattgagaccttcacttgtgacacccagaacatcacgtataggttccagtgcggtaatatgatttttgataacaaagaaatcaagctggagaatctcgaaccagagcatgagtacaagtgtgactccgaaattctgtataacaatcacaaattcaccaacgccagcaagatcattaaaactgattttggcagtcccggggagccgcaaatcatcttctgccggtccgaagcggcccatcagggcgtaattacctggaatccaccccagcgcagctttcacaacttcactctgtgctacatcaaggagaccgaaaaagactgtttgaatctcgataagaacctgattaagtacgacctgcagaacctcaaaccctatactaagtacgtgctgtccttgcacgcatatatcattgccaaagtccaaaggaatggtagtgcagccatgtgccattttaccaccaagagcgccccaccctcccaggtgtggaacatgaccgtgagcatgacttccgataattccatgcacgtcaaatgtcggccaccgcgcgacaggaacgggccccatgagcggtaccacctggaggtggaagcaggcaataccctcgtacgcaacgagagccataagaattgcgatttcagggtgaaggacctgcagtattccactgactacacctttaaagcctatttccacaacggcgattacccaggggaaccctttatcctgcaccatagcacgagttacaatagcaaggcgttgatcgccttcctcgcatttctgattatcgtcacctccattgccctgctcgtggtcctgtataaaatctacgacttgcacaagaaacggagttgtaacctggatgagcaacaggaactcgtggagcgcgacgatgagaagcagctgatgaatgtggaaccaattcatgccgacatcctgttggagacttataagaggaaaatcgcagatgaaggtcggctgttcctcgcggagttccagagcattccccgcgtattttccaagttcccgatcaaagaggccaggaagccatttaaccaaaataaaaaccggtacgtggacattctgccctatgattacaatcgcgtcgaactcagcgagatcaacggcgacgcagggtccaactatattaatgccagttacatcgatggcttcaaggaaccaaggaaatacattgccgcacagggtccccgggacgagaccgtggatgacttttggaggatgatctgggaacagaaggccactgtcatcgtgatggtgacccgctgcgaggagggcaaccggaataagtgtgcggaatattggccgagcatggaggaagggacgagggccttcggcgacgtagtggtcaaaattaaccagcacaagcgctgccccgattacatcattcaaaaactgaatatcgtgaacaagaaagagaaggcaaccgggcgggaagtcactcacattcagtttacctcctggccagaccatggtgtgcccgaggatccacacttgctgctcaagctgaggcgccgggtgaatgccttcagtaactttttcagcggccccatcgtagtccattgttccgccggggtgggcaggactggtacctatatcggcattgacgcaatgctggaggggttggaagccgagaataaagtggatgtctacggctatgtggtgaagctgcggcgccagaggtgcctcatggtacaggtcgaagcgcaatacatcctgattcaccaggccctcgtggagtataaccagtttggggaaacggaggtgaatctgagcgagttgcatccatacctgcacaacatgaaaaagcgggacccgcccagtgaaccaagtcccctggaggcagagttccagcgcctcccaagctacaggtcctggcggacccaacacatcggcaatcaggaagagaacaaaagcaagaatcgcaacagtaacgtcattccctatgattacaatagggtgccgctgaagcatgaattggagatgtccaaagaaagcgagcacgacagtgatgaatccagcgacgatgactccgacagcgaggagcccagtaagtatatcaacgccagcttcatcatgtcctactggaaaccagaagtaatgattgcagcccagggtcccctgaaggagactatcggggatttttggcaaatgattttccagcggaaagtgaaggtcatcgtgatgctcaccgaactgaaacatggcgaccaggagatttgcgcgcagtattggggtgaaggcaagcaaacttacggggatatcgaggtggacctcaaggataccgacaaaagtagcacgtatactctgagggtctttgagttgcgccactccaagcggaaagatagcaggaccgtgtaccagtaccagtataccaattggtccgtagaacagctgccagccgagcccaaggaactgattagtatgatccaagtggtcaaacagaagctcccacagaagaacagctccgagggcaataaacaccataagagcactccgctgttgatccactgtcgcgacgggagtcagcaaaccggcattttctgcgcactgctcaacctgctggagtccgccgaaactgaggaagtggtggatatctttcaggtcgtgaaagccctccggaaggcaaggcccggtatggtaagcaccttcgagcagtaccaatttctgtatgacgtgattgcctccacgtacccagcgcagaatgggcaggtcaaaaagaacaatcatcaggaagataagatcgagttcgacaacgaggtggataaagtgaagcaagacgccaattgtgtcaaccccttgggcgcaccagaaaaactgcccgaggccaaggaacaggcagagggcagtgaaccgaccagcgggactgagggtccagagcactccgtgaatggccccgccagccccgccctcaaccaggggagttga

SEQ ID NO: 1829 - RNA, 765 nt, synthetic construct
  misc_feature 1..765: note = P08637
  source 1..765: mol_type = other RNA
atgtggcagctgctcctgcccaccgccttgctgctcctggtgagcgcaggcatgaggactgaggacttgccaaaggccgtcgtgttcctggaaccgcaatggtaccgggtactcgagaaagattccgtgaccctgaagtgccagggggcgtatagtcccgaagacaacagcacgcagtggtttcacaatgagtccctgatcagtagccaggcctccagctacttcattgatgcagccactgtcgacgattccggtgaatatcgctgtcaaaccaacctcagtaccctgagcgacccagtgcagttggaggtgcatatcggctggctgctcctgcaggcacccaggtgggtctttaaagaggaagatccaattcatctgcggtgccactcctggaagaatactgccttgcacaaagtgacctacctccagaacgggaagggccgcaagtatttccatcacaatagcgacttttacatccccaaagcgacgctgaaggatagtggttcctatttctgtagggggctgtttggcagcaaaaacgtatccagtgagactgtgaatattaccatcactcaaggcctcgccgtcagcaccatctccagcttctttccaccggggtaccaggtgagtttctgcctggtgatggtcttgctgtttgcagtggacaccggtctctacttctccgtaaagacgaacattcggagcagtactcgcgattggaaagaccacaagttcaaatggaggaaggatccccaggacaagtga

SEQ ID NO: 1830 - RNA, 663 nt, synthetic construct
  misc_feature 1..663: note = P10747
  source 1..663: mol_type = other RNA
atgctgaggctcctgttggccctgaacctcttccccagcatccaggtgaccggcaataagattctggtcaaacaatccccaatgttggtggcatacgacaacgccgtaaatctgagttgcaagtatagctacaacctcttttcccgggagttccgcgcgagtctgcacaaagggctggatagcgccgtggaagtctgtgtggtgtatggtaattactcccagcagctccaggtctatagcaagactggctttaactgcgacgggaaactgggcaatgagtccgtgaccttctacttgcaaaacctgtatgtaaatcagacggatatctacttttgtaagattgaagtgatgtacccgcccccatatctcgacaacgagaagagtaatggtactatcattcatgtcaaagggaagcacctgtgccccagcccactgttccccggcccatccaaaccgttttgggtgttggtggtcgtgggcggggtactcgcatgttacagcctgctggtgaccgtcgccttcatcatcttttgggtgaggagtaagcggtcccgcctcctgcatagcgattatatgaacatgacccccaggcggccaggtcccactcgcaaacactaccagccatatgcacccccgagggacttcgccgcgtaccggtcctga

SEQ ID NO: 1831 - RNA, 681 nt, synthetic construct
  misc_feature 1..681: note = P11912
  source 1..681: mol_type = other RNA
atgcccggcgggccaggtgtgctgcaggccctcccggcaaccatcttcctgttgtttctgctcagcgccgtctacctgggccccgggtgccaagcgttgtggatgcacaaggtgccagcctccctgatggtaagtctcggcgaggacgcacatttccagtgtccccacaacagctccaataacgccaatgtgacttggtggagggtcctgcatggtaactatacctggccacccgaatttctggggccaggcgaggatccgaatggcacgctcattatccagaacgtgaataaaagtcacgggggtatttacgtgtgccgggtccaggaaggcaacgagagctatcaacagtcctgtgggacttacctgcgcgtgaggcagcccccaccccggccattcttggacatgggcgaaggtaccaagaatcgcatcattaccgcagaggggatcatcctgctcttttgcgccgtagtgcccggcactctgctgttgttcaggaaacggtggcagaacgagaagctcggcctggatgcgggggacgaatatgaggatgaaaatctgtacgagggtctcaacctggacgattgtagcatgtatgaggacatttcccgcggcttgcaagggacctaccaggatgtcggcagtctgaatatcggtgacgtgcagctcgaaaaaccgtga

SEQ ID NO: 1832 - RNA, 1671 nt, synthetic construct
  misc_feature 1..1671: note = P15391
  source 1..1671: mol_type = other RNA
atgcccccaccgaggctgctgttctttctgttgttcctgacccccatggaggtgcggccagaggaacccctcgtcgtgaaggtagaagagggcgacaacgccgtgctgcagtgcttgaaagggactagcgatggtccaacccaacagctgacgtggtcccgcgaaagtcccctcaagccatttctgaaactgagcctcggcctgccggggttgggcatccacatgaggcccctggcaatttggctctttatctttaatgtctcccagcagatgggtgggttctacctgtgtcaaccagggcccccaagtgagaaggcctggcagcccggctggactgtgaacgtggagggcagcggtgaactgtttcggtggaatgtctccgacttgggcgggctcggctgcggtctgaaaaaccgcagctccgaggggccgagtagcccctccggcaagctgatgagcccaaagctctatgtgtgggcgaaagataggcccgaaatttgggagggcgagccaccctgtctgccaccgcgggacagtttgaatcagtccctgagccaggatctcaccatggcccccgggtccaccctgtggctgagttgcggtgtaccacccgacagcgtgtcccgcggcccattgagctggactcatgtccaccccaaggggccgaaaagtctcctgtccctggaactcaaggatgacaggccagcacgggatatgtgggtgatggagaccggcctgttgctgccccgcgccacggcacaagacgccggtaaatactattgtcataggggcaacctcactatgagcttccacctggaaatcaccgcgcggcccgtgctgtggcattggttgctccgcactgggggctggaaggtcagtgccgtgaccctggcatacctgattttctgcctctgttccctggtagggatcttgcacctccagagggccctcgtgctgcggcgcaaaaggaagcggatgaccgatccaacgcgcaggttctttaaggtcactcccccaccgggtagcggcccccagaatcagtatgggaacgtgctgagcttgccaacccccacttccggcctgggtcgggcccaaaggtgggcagccggcctcgggggcaccgcgccaagttacgggaatcccagctccgacgtgcaggccgatggcgcactgggtagccgcagtccgccaggggtcggccccgaggaagaggagggtgaaggctatgaggaaccagactccgaggaagacagcgagttctacgagaacgattccaatctcgggcaggaccaactgagtcaggatggcagcgggtacgaaaaccccgaggacgaaccgttgggccccgaggatgaagactccttcagcaatgccgagagttatgagaacgaagatgaggaactgacccagccagtggcacggactatggactttctcagcccccacggttccgcctgggatccatccagggaggccacgagtctggggagccagtcctacgaggacatgcgcggcatcctgtatgcggcaccccaattgcggagcattaggggccagccagggccgaatcatgaagaggatgccgacagttacgaaaacatggacaaccccgatggtccagaccccgcctggggcgggggcggtcgcatggggacctggtccactcggtga

SEQ ID NO: 1833 - RNA, 672 nt, synthetic construct
  misc_feature 1..672: note = P16410
  source 1..672: mol_type = other RNA
atggcctgcctgggcttccagaggcacaaggcacaactcaacctggccacccggacttggccctgtaccttgctgtttttcctcctgtttatcccagtgttctgcaaagcgatgcatgtcgcccagccggcagtggtattggccagctcccgcgggattgcaagttttgtgtgtgagtacgccagccccggtaaggcgacggaagtcagggtgactgtgctgcggcaggccgactcccaggtcaccgaggtgtgcgcagccacctatatgatgggcaatgaactcactttcctggatgacagtatctgtaccgggacgagctccggcaaccaagtaaatctgactattcagggtctccgcgccatggataccgggctgtacatctgcaaagtggagttgatgtatccacccccatactatctgggcattggcaacgggactcagatctacgtcatcgaccccgaaccatgtccggatagcgactttctcctgtggattctggcagccgtgtccagtggtttgttcttttatagcttcctcctgaccgcggtgtccctgagcaagatgctcaaaaagaggagtcccctgaccacgggcgtctacgtgaagatgccacccactgagccagagtgcgaaaaacagtttcaaccctacttcatcccgattaattga

SEQ ID NO: 1834 - RNA, 1419 nt, synthetic construct
  misc_feature 1..1419: note = P16671
  source 1..1419: mol_type = other RNA
atgggctgcgacaggaactgtgggctgatcgccggtgcagtgattggcgccgtcctcgcggtgttcgggggcatcctgatgcccgtaggtgatttgctgattcagaagaccatcaaaaagcaagtggtcctcgaggaagggactattgcctttaaaaattgggtgaagaccggcacggaggtgtaccggcagttctggatctttgacgtccagaacccacaggaagtgatgatgaatagctccaacatccaagtaaaacagcgcggcccgtatacttacagggtgcggttcctggcaaaggagaatgtcacccaggatgccgaagacaacaccgtgagctttttgcagcccaatggggcaattttcgagccaagtctgtccgtgggtactgaggccgataactttaccgtcctcaatctggcggtggccgcagccagtcacatctatcaaaaccagttcgtacagatgattctgaatagcctcatcaacaagtccaaaagctccatgtttcaggtgcgcacgctgagggaattgctgtggggctaccgggaccccttcctcagtctggtcccatatcccgtgactaccactgtggggctgttttacccatataataacaccgccgatggcgtctacaaggtgttcaatggtaaagacaacattagcaaggtagcaatcattgatacctacaaagggaagcgcaacttgtcctattgggagagccattgcgacatgatcaatggcacggatgccgcgagtttcccgccctttgtggaaaaatcccaagtcctccagttctttagctccgacatctgtaggagtatttacgccgtgttcgagagcgatgtcaacctgaagggcatcccagtgtatcggtttgtgctgccctccaaggcattcgccagcccagtagagaatcccgacaactactgcttttgtactgagaaaattatcagtaagaattgcacctcctatggggtgctcgacattagcaaatgtaaggagggtcgcccggtctacatcagtctgccccacttcttgtatgcatccccagatgtgagcgaacccatcgacggcctgaacccaaatgaggaagaacataggacttacctcgatattgagcccatcaccgggtttaccctgcagttcgccaaacggctgcaagtcaacttgctcgtgaagccaagcgaaaagattcaggtgctgaaaaatctgaagcgcaactacatcgtaccgattctctggctgaatgagactggcacgatcggtgacgaaaaagccaacatgtttaggtcccaggtgaccggcaagatcaatttgctggggctcattgagatgatcctgctgagtgtcggcgtggtcatgttcgtggcgtttatgattagctattgcgcatgtcggtccaaaactatcaagtga

SEQ ID NO: 1835 - RNA, 651 nt, synthetic construct
  misc_feature 1..651: note = P26718
  source 1..651: mol_type = other RNA
atgggctggatcagggggcggcgcagcaggcactcctgggagatgagtgagttccataactacaatctggacctcaagaaaagcgatttttccacccggtggcagaagcaacgctgccccgtggtcaaaagtaagtgtagggaaaacgccagcccattctttttctgctgttttattgcagtggccatgggtatccggttcattatcatggtagcgatttggtccgccgtgtttctgaatagcttgttcaaccaggaagtccagatcccgctgactgagtcctattgcggcccctgtccaaagaattggatctgctacaagaacaattgttatcagtttttcgacgaaagtaagaactggtacgagagccaagcatcctgcatgagccagaatgccagtctcctgaaagtgtattccaaggaggatcaggacttgctgaaactcgtgaaaagctaccactggatggggctggtccatattcccaccaacggctcctggcagtgggaagatggtagtatcctgagcccaaatctcctgacgattatcgagatgcaaaaaggggactgtgcattgtatgcctccagctttaagggctacattgaaaactgcagtactcccaatacctacatctgcatgcagcgcaccgtgtga

SEQ ID NO: 1836 - RNA, 261 nt, synthetic construct
  misc_feature 1..261: note = P30273
  source 1..261: mol_type = other RNA
atgatccccgccgtggtcctgctcctgttgctgctcgtggagcaggcagccgcgctgggcgaaccacaattgtgctacattctggacgccatcctcttcctgtatgggattgtactgaccctcctgtactgtaggttgaagatccaggtgcggaaagcagccattactagctatgagaagtccgatggtgtctacaccggcctgagtacgcgcaaccaggaaacttatgagaccctcaaacacgaaaagccgccccagtag

SEQ ID NO: 1837 - RNA, 1137 nt, synthetic construct
  misc_feature 1..1137: note = P32248
  source 1..1137: mol_type = other RNA
atggacctgggcaagcccatgaaaagcgtgctcgtcgtggccctgttggtaatcttccaggtgtgcctgtgtcaagatgaggtcaccgacgattacattggggacaacactaccgtggattatacgctctttgaatccctgtgcagtaagaaagacgtgaggaatttcaaggcatggtttttgccaatcatgtacagcattatctgtttcgtcggtctgctcggcaacgggctggtggtactgacttatatttactttaaacggctcaagaccatgaccgatacttatctgttgaatctggccgtggcggacatcctcttcctgctgaccttgccgttttgggcctactccgcagccaagagttgggtcttcggcgtgcacttttgcaaactcatcttcgcaatttataagatgagctttttctccggtatgctgctgctcctgtgtatcagcattgatcgctacgtggccatcgtccaggcggtgtccgcccataggcaccgggcacgcgtattgctgattagtaaactcagctgcgtggggatctggattctggccacggtcctgtccatccccgagttgctctacagcgacctgcagaggagttccagcgaacaggccatgcggtgttccctgatcactgagcatgtggaagcattcattaccatccaagtggcccagatggtcattggctttctcgtgccactgttggcgatgagtttctgctatctggtaatcattcgcactctcctgcaggccaggaactttgagcggaataaggcaatcaaagtgatcattgccgtcgtggtcgtgttcatcgtgtttcagctgccctacaacggcgtagtgttggcacaaaccgtcgccaatttcaacattaccagctccacgtgtgagctcagcaagcagctgaatatcgcctatgatgtgacttacagtctggcgtgcgtccgctgctgtgtgaacccatttctctatgcattcattggggtgaaatttaggaatgacctgttcaagttgtttaaggatctgggttgcctctcccaggaacagctgcggcaatggagcagttgtcgccacatcaggcggtccagcatgagcgtagaggccgaaaccactaccaccttctccccctga

SEQ ID NO: 1838 - RNA, 690 nt, synthetic construct
  misc_feature 1..690: note = P40259
  source 1..690: mol_type = other RNA
atggccaggctggcactcagccccgtgccatcccactggatggtcgccctgttgctgctcctgagtgcggagccggtgcccgccgcacggagcgaagaccgctacaggaacccaaagggctccgcctgcagtcggatctggcagagcccccgcttcattgcaaggaaacgggggtttaccgtaaagatgcattgttatatgaactccgccagcggtaatgtgtcctggttgtggaaacaagagatggatgaaaatccacagcagctgaagctcgagaaaggccgcatggaagagagtcagaacgagagcctggcgactctgaccatccaagggattaggttcgaagacaatggcatctacttttgccagcagaagtgtaacaatacgtccgaggtctatcagggttgcgggactgaactccgggtgatgggcttcagcaccctggcccaattgaagcagcgcaacaccctgaaagatggcattatcatgatccagactctcctgattatcctgtttattatcgtgcccattttcttgctcctggacaaggatgacagtaaagcagggatggaggaggatcacacctacgaaggtctggacatcgatcagacggccacttatgaggacattgtcaccctcaggactggcgaagtgaagtggtccgtaggggagcatccaggccaagaatga

SEQ ID NO: 1839 - RNA, 990 nt, synthetic construct
  misc_feature 1..990: note = P42081
  source 1..990: mol_type = other RNA
atggacccccagtgcaccatgggcctgagcaacatcctcttcgtgatggcctttctgttgtccggggcagccccactgaagattcaagcgtacttcaatgagactgccgatctcccgtgtcagtttgcaaacagtcagaatcagagcctgtccgaattggtcgtgttctggcaagaccaggagaacctggtactcaatgaagtgtatctgggtaaagagaagtttgatagtgtccacagcaaatacatgggcaggacctccttcgacagcgattcctggacgctgcggctccataacctgcagatcaaggacaaagggttgtatcagtgcattatccaccataagaagcccactggcatgattcgcatccaccaaatgaatagtgaactgagcgtgctcgccaacttttcccagccagagatcgtgcccattagcaatatcaccgagaacgtctacattaatctgacctgtagttccatccatggttatccagaacccaaaaagatgagcgtgctgttgaggactaaaaactccaccattgagtacgatggggtaatgcagaagagtcaggacaatgtgacggaactctatgatgtcagcatctccctgagcgtgagtttcccagacgtgacttccaacatgaccatcttttgcattctggagactgataaaacccggctcctgagcagtccgttctccatcgagttggaagacccccaaccacccccagatcacattccctggatcaccgcagtcctgccgacggtgattatctgtgtaatggtgttttgcctcattctgtggaagtggaaaaagaagaaacgccccaggaatagctacaagtgtggcactaacaccatggagcgggaagagagcgaacagactaaaaagcgcgagaaaatccacatcccagagaggtccgacgaagcccagcgggtcttcaagagtagcaagacctccagctgcgacaaaagtgatacctgtttctga

SEQ ID NO: 1840 - RNA, 1011 nt, synthetic construct
  misc_feature 1..1011: note = Q15762
  source 1..1011: mol_type = other RNA
atggactaccccaccctgctcctggccttgctgcacgtgtatagggcactctgcgaggaagtcctgtggcatactagcgtgccattcgccgagaacatgtccttggaatgtgtatacccgagtatgggcatcctgacccaggtggagtggtttaagattgggacgcaacaggatagcatcgcgattttctcccccactcacggtatggtcatccggaaaccatatgccgaacgcgtgtactttctcaatagtaccatggcaagcaacaatatgaccctgttctttaggaacgcctccgaggacgatgtgggctattacagctgctccctgtatacttacccccaggggacctggcagaaggtcattcaagtggtacagagtgacagcttcgaggcagccgtgccatccaatagccatatcgtcagtgaacccggcaaaaacgtgacgctcacttgtcagccacagatgacctggccggtgcaagcggtccggtgggagaagatccagccccgccagattgatctgttgacttactgcaatctggtgcacggtaggaactttacctccaaattcccacggcagatcgtaagcaattgttcccatgggcgctggagtgtgattgtcatccccgacgtgaccgtgagcgattccggcctctataggtgctacctgcaagccagcgcaggcgaaaacgagacgtttgtcatgcggctgactgtggccgaggggaagaccgacaatcagtatactttgttcgtagccggtggcaccgtgctcctgctgctctttgtcattagtatcaccactattatcgtgatcttcctgaaccgcaggcggcgcagggaacggcgcgatttgttcacggagtcctgggacacccagaaggcaccaaataactacaggagccccattagtacttcccaaccgaccaatcagagcatggatgacacccgggaagatatctatgtcaactaccccacttttagccgcaggccaaaaacgcgggtgtga

SEQ ID NO: 1841 - RNA, 13482 nt, synthetic construct
  misc_feature 1..13482: note = Q685J3
  source 1..13482: mol_type = other RNA
atgcccaggccaggcactatggccctgtgcctcctgactttggtgctgtccctcctgccgccccaggcagccgcggagcaagacttgtccgtcaaccgggccgtgtgggatgggggtggctgtatcagtcagggggacgtactgaatcgccagtgccagcaactcagccagcacgtgaggactggctccgcagccaacaccgcaactggtactactagcactaatgtcgtggaaccacggatgtacctgagctgttccactaaccccgagatgaccagcattgaatccagtgtgactagcgatactccaggggtctccagcactcgcatgactcccaccgagagtaggacgacttccgaaagcacctccgacagtactaccctgttcccaagctccaccgaggatactagcagtccgacgacccccgagggcactgacgtgccaatgtccacccccagcgaagagagtatctccagcaccatggcctttgtaagcactgcgccactcccctccttcgaagcctatacgagtctgacctacaaggtggatatgagcactccgttgaccacctccactcaggcaagcagttcccccacgaccccagagagcactaccattcccaaatccactaatagtgagggcagcaccccactgacgtccatgcccgccagcaccatgaaggtcgccagttccgaagcaatcactctcctgaccactccagtggagattagcaccccggtgacgatctccgcccaggcgagtagctcccccaccactgccgaagggccaagcctgagtaactccgcacccagcggtggctccaccccattgactcggatgcccctcagcgtcatgctggtggtaagtagcgaggcctccaccctgagtacgaccccggcagccactaatatcccagtgattaccagcactgaagcctccagctcccccaccacggcggaggggaccagtatccccactagcacctatactgagggctccaccccactcaccagcacccccgcaagcacgatgccagtcgccacctccgaaatgagcactctgagtattaccccggtggacacttccaccttggtgacgaccagcactgagccctccagcctgccaaccactgccgaagcaaccagtatgctcacgtccaccctgagcgagggtagtactcccctgaccaacatgccagtctccactatcttggtggccagctccgaagcgagcaccacgagtaccattcccgtagatagcaaaacttttgtgaccactgcctccgaggcaagtagctccccgaccacggccgaggacactagcatcgcaacctccaccccaagtgaagggagcactcccctcacctccatgccagtcagcactacccccgtggccagttccgaggccagcaatctgtccacgaccccggtcgatagtaagactcaagtgaccactagcaccgaagcatccagcagtcccccaacggccgaggtgaactccatgcccaccagcactccatccgaaggcagcactcccctgaccagtatgtccgtaagcaccatgccagtggcgagtagcgaggcctccacgctcagcactaccccggtcgacacctccactcccgtgaccacgagtagcgaggcatccagtagctccactaccccagaaggcaccagcattcccaccagtaccccatccgaggggagcacgcccctgactaatatgccggtctccacccgcttggtggtgagcagtgaagcctccaccactagcaccacgcccgccgatagtaacactttcgtaaccacctccagcgaggcatccagcagttccactaccgcggagggtactagcatgccaacgagtacctacagcgaaaggggcactaccatcacctccatgagcgtgtccactacgctggtcgccagtagcgaggcatccaccctcagcactacccccgtggacagtaataccccagtcactacgtccaccgaagccactagctccagtaccaccgccgaggggactagcatgcccacgtccacctatactgaaggcagcaccccactgaccagtatgccggtgaacaccacgctggtggcatccagcgaggcctccaccttgagtactacccccgtagacactagcaccccagtcacgacctccactgaggcgagcagtagccccaccactgccgatggtgcatccatgccaaccagtacccccagcgaaggctccactccgctcacgagcatgccagtgtccaaaaccctgctgaccagtagcgaggcctccaccctcagcactactcccctggacacgagtacccatatcactacctccactgaagccagctgctcccccaccacgaccgaggggaccagtatgccaattagcaccccctccgaaggcagcccattgctgaccagtatcccggtgtccattacccccgtcacgagcccagaggcatccaccctcagcactacccccgtggatagtaattccccagtgactaccagcacggaggtaagtagctcccccaccccggccgaagggactagcatgccaacctccacttacagtgagggtcggactcccctgacgagcatgccagtctccaccactctggtggcgaccagtgccatcagcactttgtccaccacgcccgtggacactagcaccccggtcaccaactccactgaagcacgcagtagccccaccacttccgagggcaccagcatgccaacgagtacccccggggaaggctccactccactgaccagcatgcccgatagtactaccccagtggtatccagcgaggccaggacgctctccgcaaccccggtggacactagcacccccgtcactaccagtacggaggccacctccagcccaactaccgcggaaggtaccagtattcccaccagcacgccatccgagggcactactcccctgaccagcactccggtgtcccacaccctcgtggccaacagtgaagcaagcacgctgtccactaccccagtcgatagcaatacccccttgactaccagtactgaggcctccagtcccccacccacggccgaggggacctccatgcccaccagtactccgagcgaaggctccactcccctgactcggatgccagtgagcaccacgatggtagcaagttccgagactagcaccctctccaccactcccgccgacaccagcacgccagtgactacctatagtcaggcgtccagcagttccaccactgccgatgggaccagcatgcccacgagcacttactccgaaggcagtaccccgctgaccagcgtcccagtgtccactcgcctggtggtcagtagcgaggcatccaccttgagcacgactcccgtggacacctccatcccagtaactaccagtaccgaagccagctccagtcccacgactgcagagggtaccagcatcccgactagcccacccagcgaggggaccactcccctggccagtatgcccgtgtccactacgctcgtcgtgagctccgaagccaacaccctgagcactacccccgtggatagtaagacccaggtcgcaacttccacggaggcgagcagtccacccccgaccgccgaagtgacttccatgccaaccagcacccccggcgagaggagcactccactcacgtccatgcccgtacggcataccccggtggccagtagcgaagcatccactctgagtaccagcccagtcgacacttccacccccgtgacgaccagcgccgagacttccagtagccccaccactgcagagggtacctccttgccaacgagcaccaccagtgaaggctccaccctgctgactagcattcccgtgtccaccacgctcgtcaccagtccagaggccagcactctgttgaccactccggtggacaccaaggggcccgtagtgacgtccaatgaagtcagcagttccccaacccccgcggagggcactagcatgccaacctccacttacagcgaggggcgcactcccctgaccagtatcccggtgaacaccacgctcgtggccagctccgcaattagtatcctgagcaccactccagtcgataattccacccccgtgactaccagcacggaagcctgttccagtccaaccactagcgagggcacctccatgcccaacagtaatcccagcgaaggtactaccccactcacgtccattccggtaagcaccactcccgtggtcagttccgaggccagcaccctgtccgcaactccagtggacaccagcacgcccgggaccaccagtgccgaagcgacctccagcccaactaccgccgagggcatcagtatccccacgtccactccgagcgagggcaaaaccccattgaagtccattcccgtcagcaacaccccagtggcaaatagtgaagccagcactctgtccaccactcccgtggatagtaacagcccagtcgtgacctccacggcagtaagctccagtcccaccccggccgaggggactagcatcgcgatttccacccccagcgaaggtagtactgccctgacctccatcccagtgagcacgaccactgtcgcatccagtgagattaatagcctctccaccactcccgccgtgaccagcacgccagtgaccacttatagtcaggcctccagcagtcccaccactgcagacggcacctccatgcaaacgagcacttactccgaagggagcaccccgctgaccagtttgccagtcagcactatgctggtggtatccagcgaggccaacaccctcagtacgactcccatcgattccaaaacccaggtgaccgcgagcactgaggcctccagtagcaccacggcagaaggctccagcatgactattagtaccccatccgagggtagccccctgctgacctccatcccagtcagtactacccccgtggccagcccggaagcatccactctcagcacgaccccagtggacagtaattcccccgtcatcactagcaccgaggtgtccagcagtcccaccccagccgaagggacttccatgccgacgagcacctatactgagggcaggaccccactgaccagtattactgtacggacgaccccagtggccagctccgcgatcagcactttgtccaccacccccgtcgataacagtactccagtgacgaccagcactgaggcacgctccagtcccaccactagcgaaggcacctccatgccaaatagcaccccgtccgaggggacgactcccctgaccagtattccagtgagcactacccccgtcctctccagcgaagccagtaccctgtccgccactccaatcgacacgagcacccccgtgactaccagtaccgaggcaacttccagcccgacgaccgccgagggtacttccattcccaccagcaccttgagtgaaggcatgactccactgacgtccacccccgtaagccacactctcgtggcgaacagtgaggccagcaccctgtccactaccccagtcgatagcaactcccccgtggtgacgagtaccgcagtcagctccagcccgactccagccgaagggaccagtatcgccacttccacccccagcgagggctccacggcactgaccagtatcccagtgagcactaccactgtagcctccagcgaaaccaatacgctcagtaccactcccgcagtgacctccactccagtcaccacgtacgcccaggtgagctccagccccaccactgcggacggtagttccatgccgaccagcactcccagggaggggcggccacccctgaccagtattccagtgagcactaccacggtcgcctccagcgagatcaacaccttgtccactaccctggcagatactaggacccccgtgacgacctatagtcaagccagctccagtccgactaccgccgacggcactagcatgccaacccccgcatactccgaaggcagcacgccactcacctccatgcccctgagtactaccttggtagtgagctccgaggcgagcactctgagtaccacgccagtcgatacctccactcccgccaccactagcaccgaagggagttccagcccgacgactgccggtggcacctccattcagaccagcactccaagtgagcgcaccacgcccctcgcagggatgcccgtgtccactaccctggtggtcagcagtgaaggcaataccctgagcactaccccagtggactccaagactcaggtaaccaacagcacggaggcctccagtagcgcaaccgccgagggttccagtatgactatcagcgcgccgtccgaagggagccccctcctgacctccattccattgagtactacccccgtggccagcccagaggcatccacgctgagcactacccccgtcgacagtaattccccagtgatcaccagcactgaagtctccagtagcccgatccccaccgagggcacgtccatgcagactagcacctatagtgatcggaggaccccactcacttccatgcccgtgagcaccacggtagtggccagtagcgccatttccactctgagcaccaccccagtggacacttccacccccgtcacgaacagtactgaagcacgcagctccccgaccaccagcgagggcaccagtatgcccacctccactccaagcgaggggtccacgccctttaccagtatgccagtgagcactatgcccgtcgtgacctccgaagccagcaccctgagtgcgactccagtagatacgtccaccccggtgactaccagcaccgaggccacttccagccccacgaccgcagaaggtaccagtatcccaacctccaccctcagcgagggcactacgcccttgaccagtattccagtgtcccatactctggtcgccaatagcgaggtgagcaccctgtccactacccccgtcgacagtaacacgccgttcaccactagcaccgaagcatccagtccaccacccactgccgaggggaccagcatgccaacgtccaccagctccgaaggcaatactccgctcacccggatgcccgtgagtactaccatggtagcgagctttgagacgtccaccctgagcactaccccagccgataccagtacccccgtgactacctactcccaagcaggtagctccccaacgaccgccgacgataccagtatgcccactagcacttactccgaaggcagcaccccattgacgagtgtccccgtgtccaccatgccggtggtcagcagtgaggcctccactcacagcaccactccagtggacaccagcacgcccgtaaccacttccaccgaggcaagtagctccccaactaccgccgaagggacgagcatccccaccagtccgccctccgagggcactaccccactggcgagcatgcccgtgtccactaccccagtcgtgagtagcgaagccgggacgctctccaccactcccgtggataccagcactccaatgaccacgagtactgaggcatccagctccccgaccaccgccgaagacattgtcgtgcccatcagtactgcaagcgagggttccaccctgctgactagcattccagtaagtaccacgcccgtggcctccccagaggccagcaccctctccactacccccgtcgatagcaacagtccggtggtgactagcaccgaaatctccagtagcgcaacgtccgcggagggcaccagcatgccaacttccacctatagtgaagggagcactcccttgaggtccatgcccgtcagtaccaaaccactggccagctccgaggccagcacgctgagtaccactcccgtggacacctccatcccagtaactaccagcacggagacttccagcagtccgaccaccgcaaaggacacttccatgcccattagcaccccaagtgaagtgtccacgagcctcacttccatcctggtcagcaccatgcccgtggccagtagcgaggcatccaccttgagtactaccccagtggatactcgcacgctggtcaccaccagcactggcacctccagctcccccactacggccgaaggtagtagcatgccgacctccactccaggcgagcggagcactcccttgaccaatattctggtgagtactacgctgctcgcgaactccgaagccagcaccttgtccactaccccagtagacaccagtactcccgtgaccacgagcgcagaggcctccagcagtccgactaccgccgaggggacctccatgaggatcagcactccctccgatggcagcaccccactgacgagtattctggtctccactctccccgtggcaagcagtgaagccagcaccgtgtccactaccgcggtcgacaccagcatcccagtgacgacttccaccgaggccagtagctcccccactaccgcagaagtaaccagtatgccaactagcacgccctccgagaccagcactccgctgaccagtatgccagtgaatcacacccccgtcgcctccagcgaagcagggactttgtccacgaccccagtggatactagcacccccgtgaccaccagtacgaaagcctccagcagtccgaccactgcggagggtatcgtcgtgccaatttccaccgccagcgagggctccactctgctcaccagcatccccgtaagtacgacccccgtggcatccagcgaagccagtactctgagcaccactccagtcgacacctccattcccgtgacgaccagcactgaggggtccagtagcccaaccactgccgaaggcacctccatgccgatcagtacgcccagcgaggtgtccaccccactgactagcattctcgtctccaccgtgcccgtagcaggtagtgaagccagcactttgtccaccacgccagtggatacccggactcccgtcaccactagcgcggaggccagttccagcccgaccactgcagagggcacctccatgccaatcagtacgcccggggaacgcaggaccccactgactagcatgtccgtgagcaccatgcccgtcgccagttccgaggccagcactctgagtcggacccccgcagacacgagcaccccagtgactacctccactgaagccagctccagtccgaccacggcggagggcaccgggatccccattagcactccatccgagggcagcactcccctcaccagtatcccagtgtccaccacgcccgtagcaattccggaagccagcaccctgtccactaccccagtggatagtaacagccccgtcgtgacttccaccgaggtcagcagttccccaacgcccgccgaaggtactagcatgccgatctccacctacagcgaggggagtacccccttgactggcgtgccagtgtccaccacgcccgtaactagcagtgcaatttccaccctgagcaccactccagtcgacaccagcactcccgtgaccacgtccaccgaagcccatagtagcccaactacctccgagggtaccagtatgcccaccagcacgccgtccgagggcagcaccccactcacttatatgcccgtgtccaccatgctggtcgtgagtagcgaagattccactctgagcgcgaccccagtggacacgagtactcccgtaaccacctccactgaggccaccagcagtacgactgcagaagggacctccatcccgaccagcactccatccgagggcatgactcccctcacgagcgtccccgtgagtaatactccagtggcctccagcgaagccagtatcctgagcaccacccccgtcgattccaacactccattgaccactagcacggaggcatccagtagcccgcccaccgccgaggggacttccatgccaaccagcacccccagtgaaggctccactccactgacgagcatgcccgtgtccaccactaccgtggcaagtagcgagacctccactctcagcacgaccccggccgacaccagtaccccagtaaccacttactcccaggcgagctccagtcccccaattgccgacggtacgagcatgcccacctccacttatagcgaagggagtactcccctgactaacatgtccttcagcaccacgccagtcgtgtccagcgaggcaagtaccttgagcactaccccggtggatacttccacccccgtcacgaccagtactgaggccagcctgtccccaaccactgccgaaggcaccagcatccccacctccagtccaagcgagggcactacgcccctcgcatccatgccggtgagtaccactccagtggtcagctccgaagtaaataccctgagcaccactcccgtggacagtaacacgctggtgaccacttccaccgaggcgagctccagcccaactattgccgaagggaccagtctccccacgtccaccactagcgagggtagtaccccactgtccatcatgcccttgagcactaccccggtcgcctccagcgaggcaagtacgctgagcaccactcccgtggatacctccactccagtgaccacgagtagccccaccaattccagcccaactaccgccgaagtcacttccatgcccaccagtacggcaggcgaggggagcaccccgctcactaacatgccagtatccaccactcccgtggccagcagtgaagcgtccaccctgagcacgaccccagtggactccaatacttttgtcaccagtagctcccaggccagcagttcccccgcaactctccaggtgaccactatgcgcatgagcaccccatccgagggcagcagtagcctgacgaccatgctcctgtccagtacttacgtgaccagctccgaagccagcactccctccaccccgagtgtcgataggagcacgccagtaaccacttccacccaaagtaacagcactcccacgcccccagaggtgattacgctgccgatgtccacccccagcgaggtgagtactccactcaccatcatgcccgtctccactaccagcgtgacgatttccgaagccggtactgcaagcaccctgccagtagacaccagtactcccgtgatcacctccacgcaggtcagcagttccccagtgactccggaggggaccaccatgcccatctggactccaagcgaaggctccacccccttgactacgatgccagtgagcaccacccgggtcaccagtagcgagggctccaccctgagtactcccagcgtggtcacctccacgccggtgactaccagcaccgaagccatttccagtagcgcgactctcgattccaccacgatgagcgtaagtatgcccatggagatctccactctggggaccaccattctggtgagcactaccccagtgacgcgcttccccgagtccagtactccaagcatcccctccgtctataccagcatgagtatgaccactgcctccgaaggtagcagttccccaaccacgttggagggcactaccaccatgccgatgagcactacctccgaaaggagcacgctcctgactaccgtgctgattagtcccatcagcgtcatgtccccaagtgaggcaagcactctctccacgcccccaggggacaccagcactcccctgttgacgtccaccaaggccggcagttttagcatcccggcagaggtgactaccattcggatctccattaccagcgaaaggagtactccactgacgaccctcctggtatccactaccctgcccaccagcttccccggtgcctccatcgcgagtactccaccgttggatacgagcaccactttcaccccctccactgacaccgccagcacgccaaccattcccgtggcaactaccatcagtgtctccgtgatcactgaggggagcaccccaggcacgaccatttttatcccctccactccagtgaccagcagtactgccgatgtcttccccgccaccacgggcgcagtgtccaccccggtaattactagcaccgaactcaatactccaagtaccagctccagctccacgaccaccagttttagcaccactaaggagttcaccactcccgccatgaccacggcggccccactgacctacgtgactatgtccaccgcacccagtactccgcgcaccacgagccgggggtgcaccacttccgccagcaccctgtccgcaaccagtactccccacacgagcacctccgtcactaccaggccagtgactcccagcagtgaatccagccgcccaagtaccatcacgtcccataccattcccccaacttttccgcccgcccacagctccaccccacccactaccagcgccagttccacgactgtgaacccagaggcggtcaccaccatgactacccggactaaacccagcaccaggacgaccagtttcccgactgtgaccactaccgcagtaccaacgaataccactatcaagagcaaccccacctccactcccaccgtgccacgcacgaccacttgttttggtgacggctgccagaataccgccagccggtgtaaaaacgggggcacttgggacggtctcaagtgccagtgccccaatctgtactatggggagttgtgtgaagaggtcgtgtccagtattgatatcggcccaccggaaaccatcagcgcccaaatggagctgacggtgactgtcacctccgtgaaattcaccgaagaactcaagaaccacagcagtcaggagtttcaggagttcaagcagacttttaccgagcaaatgaatattgtatactccggcatccccgaatatgtgggggtcaacattacgaaactgaggctgggtagcgtggtggtcgagcatgacgtgttgctgcgcactaagtacaccccagaatataaaaccgtactcgataacgcaactgaggtggtcaaggagaaaatcaccaaggtgacgactcagcagattatgatcaatgacatctgctccgatatgatgtgtttcaacaccaccggcactcaagtgcagaatattaccgtcactcagtacgaccccgaagaggattgccggaagatggccaaagaatatggggactactttgtggtagagtacagggatcagaagccatattgtatcagtccctgcgagccgggcttcagcgtgtccaaaaactgtaatctgggtaagtgccaaatgagcctcagtggcccacagtgtctgtgcgtcacgaccgaaactcactggtactccggggagacctgcaaccagggcacccagaaaagtttggtgtatgggctggtgggtgcgggcgtcgtgctcatgctgattatcctggtagccttgctgatgctcgtgttccgctccaagcgggaagtcaagaggcaaaaataccgcctgagtcagctctataagtggcaggaggaagacagcgggcccgcaccaggcacttttcagaatattggtttcgatatctgtcaagacgatgactccatccatctggagagcatttacagtaactttcagccctccttgcggcacatcgacccggagacgaaaattaggatccagcgcccccaagtgatgaccactagcttctga

SEQ ID NO: 1842 - RNA, 1215 nt, synthetic construct
  misc_feature 1..1215: note = Q9NNX6
  source 1..1215: mol_type = other RNA
atgagcgactccaaggagcccaggctgcagcaactcggcctgttggaagaggaacagctgcgggggctcggtttccgccagaccaggggctacaaaagtctggccgggtgcttgggccacggtccactggtgctccagctgctgagctttactctcctggcagggttgctggtccaagtgtccaaggtaccgagtagcatctcccaggagcagagccggcaggatgccatttatcaaaacctcacccagctgaaagcggccgtgggcgaactgtccgagaagagtaaattgcaggagatctaccaggaactcacgcaactgaaggcagccgtcggcgagctgcccgaaaagagcaaactccaggagatttatcaggagctgactcgcttgaaggcagccgtgggggaactgccagagaaatccaagctccaagaaatctaccaggagctgacctggctgaaagcggccgtgggtgaattgcccgaaaagagcaaaatgcaggagatttatcaggaactcaccaggctgaaggcagccgtcggcgagctgccagaaaagagtaaacaacaggagatctaccaggaactcactcggctgaaggccgcagtgggggagttgcccgagaaatccaagcagcaagaaatctatcaggagctgacccgcctcaaagccgcggtaggcgaactgccagaaaagagcaagcagcaggaaatttaccaagagctgacgcagttgaaagccgcagtggagaggctctgtcatccgtgcccctgggaatggactttctttcagggtaattgttacttcatgtccaacagtcagcggaattggcacgacagcatcaccgcctgcaaggaggtcggggcacaactggtggtgattaaatccgccgaggagcagaactttctgcagctccaaagcagtcgctccaataggttcacttggatgggcctgagcgatttgaaccaggagggcacctggcagtgggtcgacgggagtccactgctcccctcctttaagcagtattggaatcggggtgaaccaaacaatgtgggcgaggaagattgtgccgagttcagcgggaacggctggaatgacgataaatgcaacctggcgaagttttggatctgtaagaaaagcgcagcctcctgcagtcgcgacgaggagcaattcctgagccccgccccggcaacccccaatccacccccagcctga

SEQ ID NO: 1843 - RNA, 3126 nt, synthetic construct
  misc_feature 1..3126: note = Q9NR97
  source 1..3126: mol_type = other RNA
atggagaacatgttcctgcagagctccatgctgacctgcatctttctgttgattagtggcagctgtgaactgtgcgccgaggaaaatttctccaggagttacccctgtgacgagaagaaacaaaacgatagcgtgatcgcagaatgctccaatcggcgcctccaggaggtcccacagactgtggggaagtatgtaaccgagctggacttgagcgataactttattacgcacatcactaatgaatccttccagggtctgcaaaacctcaccaaaattaatctgaaccataatccgaacgtgcagcaccagaatggcaaccccgggatccagagtaatggcctgaacatcaccgacggtgcctttctcaatctgaagaacttgagggagctgctcctggaagataaccaactgccacagattcccagcgggttgccagagtccctcactgagctgagcctgatccagaataacatttacaatatcaccaaagaaggcattagtcggctcatcaacctgaagaatttgtatctggcgtggaactgttacttcaataaggtctgcgagaaaacgaacattgaagacggcgtgtttgagactctcaccaatctggaactgttgtccctcagcttcaactccctgagtcatgtgcccccaaagctgccgagctccctccgcaaactgtttttgagcaatactcagatcaagtatatcagtgaggaggatttcaaagggctgattaacctcaccctgctggacttgtccggtaattgtcccaggtgctttaacgccccattcccctgtgtcccatgcgatggcggggcaagcatcaatattgaccggttcgcctttcaaaacctcacccagctgcgctacctgaacctcagttccacgagcctgaggaagatcaatgcagcctggttcaaaaacatgccccacttgaaggtgctggatctcgaatttaattatctggtaggcgagattgcgagcggtgccttcctgactatgttgccgcggctggaaatcctcgacctgtcctttaactacatcaaggggagttacccccagcatattaatatcagccgcaacttctccaaactcctgagcttgagggcactgcacctccggggctatgtgtttcaagagctgcgcgaagatgacttccagccactgatgcagttgcccaatctgagtaccattaacctcggcatcaattttattaagcagatcgacttcaaactgtttcaaaacttctccaatctcgagatcatttacctgagcgagaacaggatctccccattggtcaaggatactcggcagagttatgccaatagctccagctttcagcgccacattaggaaacggcgcagtaccgacttcgaatttgatccccattccaacttttaccacttcaccaggccactgatcaagccgcagtgcgccgcatatgggaaggccctggacctcagcctcaattccattttcttcatcggtcccaaccaatttgagaacttgccagatattgcgtgtctgaatctcagtgccaacagcaatgcacaggtgctgtccggcactgagttcagcgccatcccccatgtgaaatacctcgacctgacgaacaatcggttggattttgacaacgcaagtgccctgaccgaactgtccgatctcgaagtcctggacttgagctataattcccactacttcaggatcgccggggtgactcaccatctggagtttattcagaacttcaccaatctcaaggtactgaacctgagccacaataacatctacaccctcactgataaatataatctggagagtaagagcttggtggaactggtcttttccggcaaccgcctcgacattctgtggaatgacgatgacaaccggtacatcagtattttcaaaggtttgaagaacctgacgaggctcgatctgagcctgaatcgcctcaagcatatcccaaacgaggcgttcctgaatttgcccgcatccctgaccgaactccacatcaacgacaatatgctgaaatttttcaactggactttgctgcagcaatttccgcggctcgagctgctggatctcaggggcaataagctgttgttcctgaccgacagcctctccgattttaccagtagcctgcgcactctgctcttgtcccataaccggattagtcatctgccaagcgggttcctgtccgaggtgagcagtctcaaacacctggacttgtccagcaatctgctcaagacgatcaacaaatccgccctggaaaccaagactaccactaagctgagcatgctcgagttgcacggcaatccctttgaatgcacctgtgatattggggacttcaggcggtggatggatgagcacctgaacgtgaaaatcccccgcctggtcgacgtgatttgcgccagtccaggtgatcagaggggcaagtccatcgtaagcctcgaactgacgacctgtgtgagtgacgtcactgcagtgatcttgtttttctttaccttctttattactaccatggtcatgctggccgcgctcgcccatcacctgttctattgggacgtgtggttcatctacaatgtgtgcctggcaaaagtaaaggggtatcggtccctcagcacgtcccagaccttttacgatgcctatattagctacgacactaaagatgcaagtgtgaccgactgggtcatcaacgagttgcgctaccacctggaggaaagcagggataagaatgtgctgctctgtctggaggaacgggactgggatcccggcttggccattatcgacaacctgatgcagtccattaaccaaagtaaaaagactgtcttcgtgctcaccaagaaatatgccaagagctggaattttaaaacggcattctacctggccctgcagcgcctcatggatgagaacatggacgtgatcatctttattttgctggaaccagtactgcagcattcccaatatctcaggctgcggcagaggatctgcaagagctccattttgcagtggccggataatcccaaagcggagggtctgttctggcagaccctccgcaacgtggtcctgactgagaatgacagtcggtacaacaatatgtatgtggacagcatcaagcaatactga

SEQ ID NO: 1844 - RNA, 66 nt, synthetic construct
  misc_feature 1..66: note = P16671_TM_1_8-29
  source 1..66: mol_type = other RNA
ggcctgatcgccggggcagtgattggtgccgtcctcgcggtgttcggcgggatcctgatgcccgta

SEQ ID NO: 1845 - RNA, 81 nt, synthetic construct
  misc_feature 1..81: note = P32248_TM_1_60-86
  source 1..81: mol_type = other RNA
ttcctgcccatcatgtacagcattatctgctttgtgggcctcctggggaacggtttggtcgtgctgacctatatttacttc

SEQ ID NO: 1846 - RNA, 66 nt, synthetic construct
  misc_feature 1..66: note = P16671_TM_2_440-461
  source 1..66: mol_type = other RNA
ctgctcggcctgatcgagatgattttgctgagcgtgggggtcgtgatgttcgtagcctttatgatc

SEQ ID NO: 1847 - RNA, 63 nt, synthetic construct
  misc_feature 1..63: note = P32248_TM_2_96-116
  source 1..63: mol_type = other RNA
tacctgctcaacctggccgtggcagacatcttgttcctgctcaccctgcccttttgggcctat

SEQ ID NO: 1848 - RNA, 66 nt, synthetic construct
  misc_feature 1..66: note = P32248_TM_3_131-152
  source 1..66: mol_type = other RNA
ctgatcttcgccatttacaagatgagctttttctccggcatgctcctgttgctgtgcatcagtatt

SEQ ID NO: 1849 - RNA, 63 nt, synthetic construct
  misc_feature 1..63: note = P32248_TM_4_171-191
  source 1..63: mol_type = other RNA
gtgctgctcatcagcaagctgtcctgcgtcggcatttggatcttggccaccgtgctgagtatt

SEQ ID NO: 1850 - RNA, 84 nt, synthetic construct
  misc_feature 1..84: note = P32248_TM_5_220-247
  source 1..84: mol_type = other RNA
ttcatcaccattcaggtggcccaaatggtcatcggctttctggtgcccctcctggcaatgagcttctgctacttggtaattatc

SEQ ID NO: 1851 - RNA, 78 nt, synthetic construct
  misc_feature 1..78: note = P32248_TM_6_264-289
  source 1..78: mol_type = other RNA
gtgatcattgccgtcgtggtagtgttcatcgtctttcagctgccctacaacggcgtggtgctcgcacaaaccgtcgcc

SEQ ID NO: 1852 - RNA, 54 nt, synthetic construct
  misc_feature 1..54: note = P32248_TM_7_314-331
  source 1..54: mol_type = other RNA
ctggcctgcgtgaggtgttgcgtcaaccccttcctctacgcatttatcggcgtg

SEQ ID NO: 1853 - RNA, 69 nt, synthetic construct
  misc_feature 1..69: note = A0A5B9_TM_145-167
  source 1..69: mol_type = other RNA
accatcctgtacgagattctcctgggcaaggccactttgtatgcagtgctggtcagcgccctcgtgctg

SEQ ID NO: 1854 - RNA, 69 nt, synthetic construct
  misc_feature 1..69: note = B7Z8K6_TM_130-152
  source 1..69: mol_type = other RNA
ctgggcctcaggatgctgttcgccaagaccgtggcagtcaactttttgctgactgccaaactcttcttt

SEQ ID NO: 1855 - RNA, 63 nt, synthetic construct
  misc_feature 1..63: note = O00206_TM_632-652
  source 1..63: mol_type = other RNA
accatcattggcgtgagcgtcctgtccgtgctcgtagtgagtgtcgtggccgtgctggtctac

SEQ ID NO: 1856 - RNA, 66 nt, synthetic construct
  misc_feature 1..66: note = P01730_TM_397-418
  source 1..66: mol_type = other RNA
atggccctgatcgtgctcggcggggtcgcaggtctgttgctgttcattggcctcgggatctttttc

SEQ ID NO: 1857 - RNA, 63 nt, synthetic construct
  misc_feature 1..63: note = P01850_TM_151-171
  source 1..63: mol_type = other RNA
atcctgctcggcaaggccaccctgtacgcagtgttggtcagcgccctggtgctcatggcgatg

SEQ ID NO: 1858 - RNA, 78 nt, synthetic construct
  misc_feature 1..78: note = P07766_TM_127-152
  source 1..78: mol_type = other RNA
gtgatgagcgtcgccaccatcgtgattgtagacatctgcattactggcgggctgctcctgttggtgtactattggtcc

SEQ ID NO: 1859 - RNA, 66 nt, synthetic construct
  misc_feature 1..66: note = P08575_TM_576-597
  source 1..66: mol_type = other RNA
gccctgatcgcattcctcgcctttctgattatcgtgaccagcattgcgttgctggtcgtgctctac

SEQ ID NO: 1860 - RNA, 63 nt, synthetic construct
  misc_feature 1..63: note = P08637_TM_209-229
  source 1..63: mol_type = other RNA
gtgagcttctgcctggtcatggtgctcctgtttgccgtagacaccggcttgtacttctccgtg

SEQ ID NO: 1861 - RNA, 81 nt, synthetic construct
  misc_feature 1..81: note = P10747_TM_153-179
  source 1..81: mol_type = other RNA
ttctgggtgctggtcgtggtaggcggggtgctcgcctgctacagcctgttggtcaccgtggcatttatcattttctgggtg

SEQ ID NO: 1862 - RNA, 66 nt, synthetic construct
  misc_feature 1..66: note = P11912_TM_144-165
  source 1..66: mol_type = other RNA
atcattaccgccgagggcatcattctcctgttctgcgcagtggtccccgggactctgttgctgttt

SEQ ID NO: 1863 - RNA, 66 nt, synthetic construct
  misc_feature 1..66: note = P15391_TM_292-313
  source 1..66: mol_type = other RNA
gtgagcgccgtcaccctggcatacctcatcttctgcctgtgttccttggtgggcattctgcacctc

SEQ ID NO: 1864 - RNA, 63 nt, synthetic construct
  misc_feature 1..63: note = P16410_TM_162-182
  source 1..63: mol_type = other RNA
ttcctgctctggatcctggccgcagtgagctccggcttgtttttctacagttttctgctcacc

SEQ ID NO: 1865 - RNA, 63 nt, synthetic construct
  misc_feature 1..63: note = P26718_TM_52-72
  source 1..63: mol_type = other RNA
cccttctttttctgctgttttatcgccgtggcaatgggcattaggttcatcattatggtcgcc

SEQ ID NO: 1866 - RNA, 63 nt, synthetic construct
  misc_feature 1..63: note = P30273_TM_24-44
  source 1..63: mol_type = other RNA
ctgtgctacatcctcgacgccattctgttcttgtatggcatcgtgctgaccctcctgtactgt

SEQ ID NO: 1867 - RNA, 63 nt, synthetic construct
  misc_feature 1..63: note = P40259_TM_160-180
  source 1..63: mol_type = other RNA
ggcatcattatgatccagaccctgctcattatcctgttcattatcgtgcccatctttttgctg

SEQ ID NO: 1868 - RNA, 63 nt, synthetic construct
  misc_feature 1..63: note = P42081_TM_248-268
  source 1..63: mol_type = other RNA
tggatcaccgccgtgctgcccactgtcattatctgcgtgatggtattctgtctcattctgtgg

SEQ ID NO: 1869 - RNA, 63 nt, synthetic construct
  misc_feature 1..63: note = Q15762_TM_255-275
  source 1..63: mol_type = other RNA
ggcgggaccgtgctgctcctgttgttcgtcatcagcattactaccatcattgtgatctttctg

SEQ ID NO: 1870 - RNA, 63 nt, synthetic construct
  misc_feature 1..63: note = Q685J3_TM_4394-4414
  source 1..63: mol_type = other RNA
ctggtgggcgccggggtcgtgctcatgctgatcattttggtagcactgctcatgctggtgttc

SEQ ID NO: 1871 - RNA, 63 nt, synthetic construct
  misc_feature 1..63: note = Q9NNX6_TM_38-58
  source 1..63: mol_type = other RNA
ctgggccacgggcccctcgtgctgcagttgctgagcttcaccctcctggccggtttgctggtc

SEQ ID NO: 1872 - RNA, 63 nt, synthetic construct
  misc_feature 1..63: note = Q9NR97_TM_828-848
  source 1..63: mol_type = other RNA
gccgtgatcctgttctttttcacctttttcattactaccatggtcatgctcgcagccctggcg

SEQ ID NO: 1873 - RNA, 48 nt, synthetic construct
  misc_feature 1..48: note = P14207_1-16
  source 1..48: mol_type = other RNA
atggtctggaaatggatgcccctactcctcctcctcgtctgcgtcgcc

SEQ ID NO: 1874 - RNA, 48 nt, synthetic construct
  misc_feature 1..48: note = O75787_1-16
  source 1..48: mol_type = other RNA
atggcggtgtttgtggtgttgttggcgttggtggcgggggtgttgggg

SEQ ID NO: 1875 - RNA, 48 nt, synthetic construct
  misc_feature 1..48: note = P07359_1-16
  source 1..48: mol_type = other RNA
atgcccctcctcctcctccttctccttctcccctcccctctccacccc

SEQ ID NO: 1876 - RNA, 48 nt, synthetic construct
  misc_feature 1..48: note = P08637_1-16
  source 1..48: mol_type = other RNA
atgtggcaactcctcctccccaccgccctccttctcctcgtctccgcc

SEQ ID NO: 1877 - RNA, 51 nt, synthetic construct
  misc_feature 1..51: note = P07237_1-17
  source 1..51: mol_type = other RNA
atgctcaggcgcgcgctcttatgcttggctgtggccgcgctcgtgcgcgcg

SEQ ID NO: 1878 - RNA, 51 nt, synthetic construct
  misc_feature 1..51: note = O60911_1-17
  source 1..51: mol_type = other RNA
atgaacctctccctcgtcctagccgccttctgcctcggaatcgcctccgcc

SEQ ID NO: 1879 - RNA, 51 nt, synthetic construct
  misc_feature 1..51: note = P20138_1-17
  source 1..51: mol_type = other RNA
atgcccttactcctcctcctccccctcctttgggccggcgccctagccatg

SEQ ID NO: 1880 - RNA, 51 nt, synthetic construct
  misc_feature 1..51: note = P27797_1-17
  source 1..51: mol_type = other RNA
atgctcctatccgtacccctactcctcggcctcctcggcctcgccgtcgcc

SEQ ID NO: 1881 - RNA, 54 nt, synthetic construct
  misc_feature 1..54: note = P10747_1-18
  source 1..54: mol_type = other RNA
atgctacgcctccttctcgccctcaacctcttcccctccatccaagtcaccggc

SEQ ID NO: 1882 - RNA, 54 nt, synthetic construct
  misc_feature 1..54: note = O75487_1-18
  source 1..54: mol_type = other RNA
atggcccgcttcggcctacccgccctcctctgcacactcgcagtcctatccgcc

SEQ ID NO: 1883 - RNA, 54 nt, synthetic construct
  misc_feature 1..54: note = P07996_1-18
  source 1..54: mol_type = other RNA
atgggcttggcctggggcttgggcgtgctctttctcatgcacgtgtgcgggacc

SEQ ID NO: 1884 - RNA, 54 nt, synthetic construct
  misc_feature 1..54: note = P22748_1-18
  source 1..54: mol_type = other RNA
atgcgcatgcttttggctttactcgcgctctcggccgcgcgcccgagcgcgagt

SEQ ID NO: 1885 - RNA, 54 nt, synthetic construct
  misc_feature 1..54: note = Q15762_1-18
  source 1..54: mol_type = other RNA
atggactaccccaccctcctccttgccctcttacacgtctaccgagctctctgc

SEQ ID NO: 1886 - RNA, 54 nt, synthetic construct
  misc_feature 1..54: note = P30273_1-18
  source 1..54: mol_type = other RNA
atgatacccgccgtcgtcctcctcctcctcctcctcgtcgaacaagccgccgcc

SEQ ID NO: 1887 - RNA, 54 nt, synthetic construct
  misc_feature 1..54: note = P38570_1-18
  source 1..54: mol_type = other RNA
atgtggctattccacaccctactctgcatcgcctccctcgccctcctcgccgcc

SEQ ID NO: 1888 - RNA, 54 nt, synthetic construct
  misc_feature 1..54: note = Q01638_1-18
  source 1..54: mol_type = other RNA
atgggtttctggatccttgccatcctcaccatcctcatgtactccaccgcagcc

SEQ ID NO: 1889 - RNA, 54 nt, synthetic construct
  misc_feature 1..54: note = Q9NZQ7_1-18
  source 1..54: mol_type = other RNA
atgcgcatctttgctgtctttatcttcatgacctactggcaccttcttaacgcc

SEQ ID NO: 1890 - RNA, 57 nt, synthetic construct
  misc_feature 1..57: note = P13591_1-19
  source 1..57: mol_type = other RNA
atgctccaaaccaaagacctaatctggaccctcttcttcctcggcaccgccgtctcc

SEQ ID NO: 1891 - RNA, 57 nt, synthetic construct
  misc_feature 1..57: note = P26842_1-19
  source 1..57: mol_type = other RNA
atggcgcgaccgcacccgtggtggctctgtgtcttgggcacgctagtgggcttgagc

SEQ ID NO: 1892 - RNA, 57 nt, synthetic construct
  misc_feature 1..57: note = P15391_1-19
  source 1..57: mol_type = other RNA
atgccccctccccgcctcctcttcttcctcctcttccttactcccatggaagtccgt

SEQ ID NO: 1893 - RNA, 57 nt, synthetic construct
  misc_feature 1..57: note = Q8NI17_1-19
  source 1..57: mol_type = other RNA
atgatgtggacctgggccttgtggatgctcccgagcttgtgcaagttctcgctcgcg

SEQ ID NO: 1894 - RNA, 57 nt, synthetic construct
  misc_feature 1..57: note = P08571_1-19
  source 1..57: mol_type = other RNA
atggaacgcgcttcctgcctcctcctactcctcctcccactcgtccacgtctccgcc

SEQ ID NO: 1895 - RNA, 57 nt, synthetic construct
  misc_feature 1..57: note = P05154_1-19
  source 1..57: mol_type = other RNA
atgcaactattcctcctcctctgcctcgtcctcctctccccccaaggcgcctccctc

SEQ ID NO: 1896 - RNA, 57 nt, synthetic construct
  misc_feature 1..57: note = P02787_1-19
  source 1..57: mol_type = other RNA
atgagattggccgtgggcgcgctattggtctgtgccgtgctcgggctctgtctcgcg

SEQ ID NO: 1897 - RNA, 57 nt, synthetic construct
  misc_feature 1..57: note = P02671_1-19
  source 1..57: mol_type = other RNA
atgttctcgatgaggatcgtgtgcttggtcttgagtgtggtcgggaccgcgtggacg

SEQ ID NO: 1898 - RNA, 57 nt, synthetic construct
  misc_feature 1..57: note = P04216_1-19
  source 1..57: mol_type = other RNA
atgaacctcgctatatctatcgccctcctcctcaccgtcctccaagtctcccgtggc

SEQ ID NO: 1899 - RNA, 57 nt, synthetic construct
  misc_feature 1..57: note = P00747_1-19
  source 1..57: mol_type = other RNA
atggaacacaaagaagtcgtcctcctcctcctcctcttcctcaaatccggccaaggc

SEQ ID NO: 1900 - RNA, 57 nt, synthetic construct
  misc_feature 1..57: note = P01764_1-19
  source 1..57: mol_type = other RNA
atggaattcggcctgagctggctcttcctcgtggccatactcaaaggcgtgcaatgc

SEQ ID NO: 1901 - RNA, 57 nt, synthetic construct
  misc_feature 1..57: note = P16150_1-19
  source 1..57: mol_type = other RNA
atggccaccctactactcctcctcggcgtcctcgtcgtctcacccgacgccctcggc

SEQ ID NO: 1902 - RNA, 57 nt, synthetic construct
  misc_feature 1..57: note = Q6DN72_1-19
  source 1..57: mol_type = other RNA
atgctattgtggacggccgtgctcttgttcgtgccctgtgtcgggaaaacggtctgg

SEQ ID NO: 1903 - RNA, 57 nt, synthetic construct
  misc_feature 1..57: note = Q01151_1-19
  source 1..57: mol_type = other RNA
atgagcaggggcttgcaattgctcttgctctcgtgcgcgtactcgctcgcgcccgcg

SEQ ID NO: 1904 - RNA, 57 nt, synthetic construct
  misc_feature 1..57: note = P07093_1-19
  source 1..57: mol_type = other RNA
atgaactggcacctccccctcttcctcctcgcctccgtcaccctaccctcaatctgc

SEQ ID NO: 1905 - RNA, 57 nt, synthetic construct
  misc_feature 1..57: note = Q8WWQ8_1-19
  source 1..57: mol_type = other RNA
atgatgctccaacacctcgtaatcttctgcctcggactcgtcgtccaaaatttctgc

SEQ ID NO: 1906 - RNA, 60 nt, synthetic construct
  misc_feature 1..60: note = Q13291_1-20
  source 1..60: mol_type = other RNA
atggaccccaaaggcctcctctccctcaccttcgttctcttcctctccctcgccttcggc

SEQ ID NO: 1907 - RNA, 60 nt, synthetic construct
  misc_feature 1..60: note = P35225_1-20
  source 1..60: mol_type = other RNA
atggccctcctcctcacaaccgtcatcgccctaacctgcctcggcggcttcgcatccccc

SEQ ID NO: 1908 - RNA, 60 nt, synthetic construct
  misc_feature 1..60: note = P25942_1-20
  source 1..60: mol_type = other RNA
atggtacgactacccctccaatgcgtcctatggggctgcctcctcacagccgtccacccc

SEQ ID NO: 1909 - RNA, 60 nt, synthetic construct
  misc_feature 1..60: note = P52803_1-20
  source 1..60: mol_type = other RNA
atgctccacgtcgaaatgctcaccctcgtcttcctcgtcctatggatgtgcgtattctcc

SEQ ID NO: 1910 - RNA, 60 nt, synthetic construct
  misc_feature 1..60: note = Q15116_1-20
  source 1..60: mol_type = other RNA
atgcagataccgcaggcgccgtggccggtggtgtgggcggtattgcagttagggtggagg

SEQ ID NO: 1911 - RNA, 60 nt, synthetic construct
  misc_feature 1..60: note = P05556_1-20
  source 1..60: mol_type = other RNA
atgaacctccaacccatcttctggatcggcctcatctcctccgtttgctgcgtctttgcc

SEQ ID NO: 1912 - RNA, 60 nt, synthetic construct
  misc_feature 1..60: note = Q12891_1-20
  source 1..60: mol_type = other RNA
atgagggcagggccagggccaacggtaacgctagcgctagtgctagcggtagcgtgggcg

SEQ ID NO: 1913 - RNA, 60 nt, synthetic construct
  misc_feature 1..60: note = Q8IV16_1-20
  source 1..60: mol_type = other RNA
atgaaggcgttgggggcggtgttgttggcgttgttgttgtgtgggaggccggggaggggg

SEQ ID NO: 1914 - RNA, 60 nt, synthetic construct
  misc_feature 1..60: note = Q03167_1-20
  source 1..60: mol_type = other RNA
atgacctcacactacgtcatcgccatcttcgccctcatgtcctcatgcctagccacagcc

SEQ ID NO: 1915 - RNA, 60 nt, synthetic construct
  misc_feature 1..60: note = Q14246_1-20
  source 1..60: mol_type = other RNA
atgagggggtttaatttgttgttgttttgggggtgttgtgtgatgcatagttgggagggg

SEQ ID NO: 1916 - RNA, 60 nt, synthetic construct
  misc_feature 1..60: note = P16871_1-20
  source 1..60: mol_type = other RNA
atgaccatactcggcaccaccttcggcatggtcttctccctcctccaagtcgtctcagga

SEQ ID NO: 1917 - RNA, 60 nt, synthetic construct
  misc_feature 1..60: note = P61769_1-20
  source 1..60: mol_type = other RNA
atgagcaggagcgtggccttggcagtgctcgcgctcttgagcttgagcgggctcgaggcc

SEQ ID NO: 1918 - RNA, 60 nt, synthetic construct
  misc_feature 1..60: note = Q9Y6W8_1-20
  source 1..60: mol_type = other RNA
atgaaatcaggcctatggtacttcttcctcttctgcctccgcatcaaagtcctcaccggt

SEQ ID NO: 1919 - RNA, 63 nt, synthetic construct
  misc_feature 1..63: note = P10966_1-21
  source 1..63: mol_type = other RNA
atgcgcccacgcctatggctactcctagccgcacaactaaccgtactccacggcaactccgta

SEQ ID NO: 1920 - RNA, 63 nt, synthetic construct
  misc_feature 1..63: note = Q9BZW8_1-21
  source 1..63: mol_type = other RNA
atgctcggccaagtcgtcaccctcatactcctcctcctcctcaaagtctaccaaggcaaaggc

SEQ ID NO: 1921 - RNA, 63 nt, synthetic construct
  misc_feature 1..63: note = P02778_1-21
  source 1..63: mol_type = other RNA
atgaaccaaaccgcaatcctcatctgctgcctcatcttcctaaccctctcaggcatacaaggc

SEQ ID NO: 1922 - RNA, 63 nt, synthetic construct
  misc_feature 1..63: note = P18564_1-21
  source 1..63: mol_type = other RNA
atgggcatagaactcctctgcctcttcttcctattcctaggccgcaacgaccacgtccaaggc

SEQ ID NO: 1923 - RNA, 63 nt, synthetic construct
  misc_feature 1..63: note = O14525_1-21
  source 1..63: mol_type = other RNA
atggccttggccgggctctgtgccttgctagcgtgctgttgggggccagcggcagtgctagcg

SEQ ID NO: 1924 - RNA, 63 nt, synthetic construct
  misc_feature 1..63: note = P01130_1-21
  source 1..63: mol_type = other RNA
atggggccgtgggggtggaagttgaggtggacggtggcgttgttgttggcggcggcagggacg

SEQ ID NO: 1925 - RNA, 63 nt, synthetic construct
  misc_feature 1..63: note = P01732_1-21
  source 1..63: mol_type = other RNA
atggccttacccgtcaccgcactcctactccccctcgcactcctcctccatgccgcccgtccc

SEQ ID NO: 1926 - RNA, 63 nt, synthetic construct
  misc_feature 1..63: note = P48061_1-21
  source 1..63: mol_type = other RNA
atgaacgccaaagtcgtcgtcgtcctcgtcctcgtcctcaccgccctatgcctatccgacggc

SEQ ID NO: 1927 - RNA, 63 nt, synthetic construct
  misc_feature 1..63: note = P01589_1-21
  source 1..63: mol_type = other RNA
atggactcgtacttgctcatgtgggggctcctgacctttatcatggtcccgggctgtcaagcg

SEQ ID NO: 1928 - RNA, 63 nt, synthetic construct
  misc_feature 1..63: note = Q86T13_1-21
  source 1..63: mol_type = other RNA
atgaggccggcgtttgcgttgtgtttgttgtggcaggcgttgtggccggggccgggggggggg

SEQ ID NO: 1929 - RNA, 63 nt, synthetic construct
  misc_feature 1..63: note = Q5DID0_1-21
  source 1..63: mol_type = other RNA
atgctcagaacctccggcctcgccctactcgccctcgtctcagccgtcggcccctcccaagcc

SEQ ID NO: 1930 - RNA, 66 nt, synthetic construct
  misc_feature 1..66: note = P40189_1-22
  source 1..66: mol_type = other RNA
atgctcaccctccaaacctggctcgtccaagccctattcatcttcctcaccaccgaatccacaggc

SEQ ID NO: 1931 - RNA, 66 nt, synthetic construct
  misc_feature 1..66: note = Q86YL7_1-22
  source 1..66: mol_type = other RNA
atgtggaaagtgagcgcgctcttgttcgtgctcgggagcgcgagcttgtgggtgctcgcggaaggg

SEQ ID NO: 1932 - RNA, 66 nt, synthetic construct
  misc_feature 1..66: note = P55075_1-22
  source 1..66: mol_type = other RNA
atgggctctccccgctctgccctctcttgcctccttctccatctcctcgtcctctgcctccaagct

SEQ ID NO: 1933 - RNA, 66 nt, synthetic construct
  misc_feature 1..66: note = Q30201_1-22
  source 1..66: mol_type = other RNA
atgggcccccgcgcccgcccagccctactcctactcatgctcctacaaacagccgtcctccaaggc

SEQ ID NO: 1934 - RNA, 66 nt, synthetic construct
  misc_feature 1..66: note = P07766_1-22
  source 1..66: mol_type = other RNA
atgcaatcgggaacgcactggcgcgtgctcgggctatgtctcttgagcgtgggcgtgtgggggcaa

SEQ ID NO: 1935 - RNA, 66 nt, synthetic construct
  misc_feature 1..66: note = P18827_1-22
  source 1..66: mol_type = other RNA
atgagacgcgccgccctctggctctggctctgcgcactagccctctccctccaacccgccctaccc

SEQ ID NO: 1936 - RNA, 66 nt, synthetic construct
  misc_feature 1..66: note = P55290_1-22
  source 1..66: mol_type = other RNA
atgcaaccccgcaccccactcgtcctctgcgtccttctctcccaagtcctcctcttaacctccgct

SEQ ID NO: 1937 - RNA, 66 nt, synthetic construct
  misc_feature 1..66: note = P37173_1-22
  source 1..66: mol_type = other RNA
atggggcgcgggctcttgcgcgggctctggcccttgcacatagtcttgtggacgagaatagcctcg

SEQ ID NO: 1938 - RNA, 66 nt, synthetic construct
  misc_feature 1..66: note = Q07325_1-22
  source 1..66: mol_type = other RNA
atgaagaaatcgggcgtgctctttctcttgggcataatcttgctcgtgctcataggcgtgcaaggg

SEQ ID NO: 1939 - RNA, 66 nt, synthetic construct
  misc_feature 1..66: note = P04156_1-22
  source 1..66: mol_type = other RNA
atggcgaacttgggctgttggatgctagtgctctttgtcgcgacctggagcgatctcgggctctgt

SEQ ID NO: 1940 - RNA, 66 nt, synthetic construct
  misc_feature 1..66: note = P31785_1-22
  source 1..66: mol_type = other RNA
atgctcaaaccctccctccccttcacctccctactcttcctccaactcccccttctcggcgtcggc

SEQ ID NO: 1941 - RNA, 69 nt, synthetic construct
  misc_feature 1..69: note = P01579_1-23
  source 1..69: mol_type = other RNA
atgaaatacacctcctacatcctcgccttccaactctgcatcgtcctaggctcactcggctgctactgc

SEQ ID NO: 1942 - RNA, 69 nt, synthetic construct
  misc_feature 1..69: note = P23229_1-23
  source 1..69: mol_type = other RNA
atggccgccgccggccaactctgcctcctatatctctccgccggcctcctctcccgactaggcgcagcc

SEQ ID NO: 1943 - RNA, 69 nt, synthetic construct
  misc_feature 1..69: note = O60494_1-23
  source 1..69: mol_type = other RNA
atgatgaacatgtccctcccattcctctggtccctcctaaccctcctcatcttcgccgaagtcaacggc

SEQ ID NO: 1944 - RNA, 69 nt, synthetic construct
  misc_feature 1..69: note = P08575_1-23
  source 1..69: mol_type = other RNA
atgtacttgtggttgaaattgctcgcgttcgggttcgcgttcttggacacggaagtgttcgtgaccggg

SEQ ID NO: 1945 - RNA, 69 nt, synthetic construct
  misc_feature 1..69: note = Q8IWY4_1-23
  source 1..69: mol_type = other RNA
atgggggcggcggcggtgaggtggcatttgtgtgtgttgttggcgttggggacgagggggaggttggcg

SEQ ID NO: 1946 - RNA, 69 nt, synthetic construct
  misc_feature 1..69: note = Q08431_1-23
  source 1..69: mol_type = other RNA
atgccacgaccccgcctactagccgccctctgcggcgccctcctatgcgccccctcactcctagtcgcc

SEQ ID NO: 1947 - RNA, 69 nt, synthetic construct
  misc_feature 1..69: note = Q99665_1-23
  source 1..69: mol_type = other RNA
atggcccacacttttcgcggatgctcactcgccttcatgttcatcatcacctggctactcatcaaagcc

SEQ ID NO: 1948 - RNA, 69 nt, synthetic construct
  misc_feature 1..69: note = Q6Q8B3_1-23
  source 1..69: mol_type = other RNA
atgtccgccccccgcctactcatatccataatcataatggtctccgcctcttcatcttcctgcatgggc

SEQ ID NO: 1949 - RNA, 69 nt, synthetic construct
  misc_feature 1..69: note = Q07011_1-23
  source 1..69: mol_type = other RNA
atgggcaatagctgttacaatatcgtggccacgctcttgctcgtgctcaatttcgagcgcacgcgctcg

SEQ ID NO: 1950 - RNA, 69 nt, synthetic construct
  misc_feature 1..69: note = Q8NHL6_1-23
  source 1..69: mol_type = other RNA
atgaccccgatcttgaccgtgctcatatgcttgggcttgagcttgggcccgcgcacgcacgtgcaagcg

SEQ ID NO: 1951 - RNA, 69 nt, synthetic construct
  misc_feature 1..69: note = P36894_1-23
  source 1..69: mol_type = other RNA
atgccccaactctacatctacatcagactcctcggcgcctacctcttcatcatatcccgagtacaaggc

SEQ ID NO: 1952 - RNA, 69 nt, synthetic construct
  misc_feature 1..69: note = Q16552_1-23
  source 1..69: mol_type = other RNA
atgacccccggcaaaacctccctcgtctccctactcctcctcctatccctcgaagccatcgtcaaagcc

SEQ ID NO: 1953 - RNA, 69 nt, synthetic construct
  misc_feature 1..69: note = P42081_1-23
  source 1..69: mol_type = other RNA
atggacccccaatgcaccatgggcctctccaatatcctattcgtcatggccttcctcctctccggcgcc

SEQ ID NO: 1954 - RNA, 69 nt, synthetic construct
  misc_feature 1..69: note = P43121_1-23
  source 1..69: mol_type = other RNA
atgggcttgcccaggcttgtgtgcgcgttcttgctcgcggcctgttgctgttgcccgcgtgtggccggg

SEQ ID NO: 1955 - RNA, 69 nt, synthetic construct
  misc_feature 1..69: note = O00206_1-23
  source 1..69: mol_type = other RNA
atgatgtccgcctcccgactcgccggcacactaataccagccatggccttcctctcctgcgtccgcccc

SEQ ID NO: 1956 - RNA, 69 nt, synthetic construct
  misc_feature 1..69: note = P42701_1-23
  source 1..69: mol_type = other RNA
atggaacccctagtcacctgggtcgtcccactcctcttcctcttcctcctctcaagacaaggcgccgcc

SEQ ID NO: 1957 - RNA, 72 nt, synthetic construct
  misc_feature 1..72: note = P06729_1-24
  source 1..72: mol_type = other RNA
atgtcctttccctgcaaattcgtcgcctccttcctccttattttcaacgtttcctccaaaggcgccgtctcc

SEQ ID NO: 1958 - RNA, 72 nt, synthetic construct
  misc_feature 1..72: note = P15328_1-24
  source 1..72: mol_type = other RNA
atggcccaacgcatgaccacacaactactcctactcctcgtctgggtcgccgtcgtcggcgaagcccaaacc

SEQ ID NO: 1959 - RNA, 72 nt, synthetic construct
  misc_feature 1..72: note = P05112_1-24
  source 1..72: mol_type = other RNA
atgggactcacctcccaactcctcccccccctcttcttcctccttgcctgcgccggcaatttcgtacacggc

SEQ ID NO: 1960 - RNA, 72 nt, synthetic construct
  misc_feature 1..72: note = P06127_1-24
  source 1..72: mol_type = other RNA
atgcccatgggctcactccaacccctcgccacactctacctcctaggcatgctcgtcgcctcctgcctcggc

SEQ ID NO: 1961 - RNA, 72 nt, synthetic construct
  misc_feature 1..72: note = P32248_1-24
  source 1..72: mol_type = other RNA
atggacctcggcaaacccatgaaatccgtcctagtcgtcgccctactcgtcatcttccaagtctgcctctgc

SEQ ID NO: 1962 - RNA, 72 nt, synthetic construct
  misc_feature 1..72: note = Q7Z7D3_1-24
  source 1..72: mol_type = other RNA
atggcctccctcggccaaatcctattctggtccatcatctcaatcataatcatactcgccggcgccatcgcc

SEQ ID NO: 1963 - RNA, 72 nt, synthetic construct
  misc_feature 1..72: note = P54756_1-24
  source 1..72: mol_type = other RNA
atgagggggagtgggccgaggggggcggggaggaggaggccgccgagtggggggggggatacgccgataacg

SEQ ID NO: 1964 - RNA, 72 nt, synthetic construct
  misc_feature 1..72: note = Q92823_1-24
  source 1..72: mol_type = other RNA
atgcaactcaaaatcatgcccaaaaaaaaacgcctctcagccggccgcgtccccctcatcctcttcctatgc

SEQ ID NO: 1965 - RNA, 72 nt, synthetic construct
  misc_feature 1..72: note = P19320_1-24
  source 1..72: mol_type = other RNA
atgccgggcaagatggtggtcatactcggggcctcgaacatactctggatcatgttcgcggcctcgcaagcg

SEQ ID NO: 1966 - RNA, 72 nt, synthetic construct
  misc_feature 1..72: note = Q86UN2_1-24
  source 1..72: mol_type = other RNA
atgttgagaaagggctgttgcgtggaattgctcttgctcttggtcgcggccgagctcccgctcgggggcggg

SEQ ID NO: 1967 - RNA, 75 nt, synthetic construct
  misc_feature 1..75: note = P33151_1-25
  source 1..75: mol_type = other RNA
atgcaaaggctcatgatgttgctcgcgacctcgggcgcgtgcttgggcttgctcgcggtcgcggccgtggccgcg

SEQ ID NO: 1968 - RNA, 75 nt, synthetic construct
  misc_feature 1..75: note = P17813_1-25
  source 1..75: mol_type = other RNA
atggaccgaggcacactcccactcgccgtcgcactcctactcgcctcctgctccctctcccccacttcactcgcc

SEQ ID NO: 1969 - RNA, 75 nt, synthetic construct
  misc_feature 1..75: note = P25445_1-25
  source 1..75: mol_type = other RNA
atgctcggcatctggaccctactccccctagtcctcacctccgtcgcccgcctctcatcaaaatccgtaaacgca

SEQ ID NO: 1970 - RNA, 75 nt, synthetic construct
  misc_feature 1..75: note = P01730_1-25
  source 1..75: mol_type = other RNA
atgaaccgaggcgtccccttccgccacctcctactcgtcctccaactcgccctcctacccgccgccacacaaggc

SEQ ID NO: 1971 - RNA, 75 nt, synthetic construct
  misc_feature 1..75: note = Q685J3_1-25
  source 1..75: mol_type = other RNA
atgccccgacccggcaccatggccctctgcctcctcacactcgtcctctcactcctacccccacaagccgccgcc

SEQ ID NO: 1972 - RNA, 75 nt, synthetic construct
  misc_feature 1..75: note = P17787_1-25
  source 1..75: mol_type = other RNA
atggcgaggaggtgtgggccggtggcgttgttgttggggtttgggttgttgaggttgtgtagtggggtgtggggg

SEQ ID NO: 1973 - RNA, 75 nt, synthetic construct
  misc_feature 1..75: note = Q6UQ28_1-25
  source 1..75: mol_type = other RNA
atggccgtcttccacgacatgctactccaacccctcggcatgttcctctgcctctccctacaactctcttccgcc

SEQ ID NO: 1974 - RNA, 75 nt, synthetic construct
  misc_feature 1..75: note = P13987_1-25
  source 1..75: mol_type = other RNA
atgggcatacaagggggctcggtcttgttcgggctcttgctcgtgctcgcggtcttttgccatagcgggcactcg

SEQ ID NO: 1975 - RNA, 75 nt, synthetic construct
  misc_feature 1..75: note = P10721_1-25
  source 1..75: mol_type = other RNA
atgaggggggcgaggggggcgtgggattttttgtgtgtgttgttgttgttgttgagggtgcagacggggagtagt

SEQ ID NO: 1976 - RNA, 75 nt, synthetic construct
  misc_feature 1..75: note = P12319_1-25
  source 1..75: mol_type = other RNA
atggccccagccatggaatcacccaccctcctctgcgtagccctcctcttcttcgcccccgacggcgtactcgcc

SEQ ID NO: 1977 - RNA, 78 nt, synthetic construct
  misc_feature 1..78: note = Q9BZR6_1-26
  source 1..78: mol_type = other RNA
atgaagagggcgagtgcgggggggagtaggttgttggcgtgggtgttgtggttgcaggcgtggcaggtggcggcgccg

SEQ ID NO: 1978 - RNA, 78 nt, synthetic construct
  misc_feature 1..78: note = P25063_1-26
  source 1..78: mol_type = other RNA
atgggccgagccatggtcgcccgcctcggcctcggcctcctcctcctcgccctactactcccaacccaaatctattcc

SEQ ID NO: 1979 - RNA, 78 nt, synthetic construct
  misc_feature 1..78: note = Q9NR97_1-26
  source 1..78: mol_type = other RNA
atggaaaacatgttcctacaatcctccatgctaacctgcatattcctcctcatctccggctcctgcgaactctgcgcc

SEQ ID NO: 1980 - RNA, 78 nt, synthetic construct
  misc_feature 1..78: note = Q8N131_1-26
  source 1..78: mol_type = other RNA
atggggttgggggcgaggggggcgtgggcggcgttgttgttggggacgttgcaggtgttggcgttgttgggggcggcg

SEQ ID NO: 1981 - RNA, 78 nt, synthetic construct
  misc_feature 1..78: note = P49771_1-26
  source 1..78: mol_type = other RNA
atgaccgtcctcgctcccgcctggtcccccactacttatctccttctccttctcctcctctcctccggcctctccggc

SEQ ID NO: 1982 - RNA, 78 nt, synthetic construct
  misc_feature 1..78: note = P02679_1-26
  source 1..78: mol_type = other RNA
atgtcctggtcccttcacccccgtaacctcattctctacttctatgccctccttttcctctcctctacttgcgtcgcc

SEQ ID NO: 1983 - RNA, 78 nt, synthetic construct
  misc_feature 1..78: note = P14784_1-26
  source 1..78: mol_type = other RNA
atggccgcccctgccctctcctggcgcctcccccttctcattctccttcttcctctcgccacctcctgggcttctgcc

SEQ ID NO: 1984 - RNA, 81 nt, synthetic construct
  misc_feature 1..81: note = P05362_1-27
  source 1..81: mol_type = other RNA
atggccccatcctcccccagacccgccctcccagccctactcgtcctactcggcgcactcttccccggccccggcaacgca

SEQ ID NO: 1985 - RNA, 81 nt, synthetic construct
  misc_feature 1..81: note = Q13740_1-27
  source 1..81: mol_type = other RNA
atggaatcaaaaggcgcctcatcctgccgcctcctattctgcctactcatatccgccaccgtcttccgacccggcctcggc

SEQ ID NO: 1986 - RNA, 84 nt, synthetic construct
  misc_feature 1..84: note = Q13443_1-28
  source 1..84: mol_type = other RNA
atggggagtggggcgaggtttccgagtgggacgttgagggtgaggtggttgttgttgttggggttggtggggccggtgttgggg

SEQ ID NO: 1987 - RNA, 84 nt, synthetic construct
  misc_feature 1..84: note = P14151_1-28
  source 1..84: mol_type = other RNA
atgatattcccgtggaagtgccagagcacgcaaagggacttatggaatatcttcaaactgtggggatggacgatgctgtgctgc

SEQ ID NO: 1988 - RNA, 84 nt, synthetic construct
  misc_feature 1..84: note = P56199_1-28
  source 1..84: mol_type = other RNA
atggccccgcgcccgcgcgcacgcccgggcgtagctgtggcctgttgctggctcttgaccgtagtcttgcgctgttgcgtaagc

SEQ ID NO: 1989 - RNA, 84 nt, synthetic construct
  misc_feature 1..84: note = P11279_1-28
  source 1..84: mol_type = other RNA
atggccgcacccggctcagcccgccgcccactcctactactactcctcctcctcctcctcggcctcatgcactgcgcctcagcc

SEQ ID NO: 1990 - RNA, 84 nt, synthetic construct
  misc_feature 1..84: note = P40259_1-28
  source 1..84: mol_type = other RNA
atggcccgcctagccctatcccccgtcccatcccactggatggtcgccctcctactcctactctccgccgaaccagtccccgca

SEQ ID NO: 1991 - RNA, 84 nt, synthetic construct
  misc_feature 1..84: note = P43681_1-28
  source 1..84: mol_type = other RNA
atggaactcggcggccccggcgcaccccgcctactacccccactcctcctcctcctcggcaccggcctcctacgcgcctcatcc

SEQ ID NO: 1992 - RNA, 84 nt, synthetic construct
  misc_feature 1..84: note = P18627_1-28
  source 1..84: mol_type = other RNA
atgtgggaagcccaattcctcggcctcctcttcctccaacccctctgggtcgcccccgtcaaacccctccaacccggcgccgaa

SEQ ID NO: 1993 - RNA, 84 nt, synthetic construct
  misc_feature 1..84: note = Q5ZPR3_1-28
  source 1..84: mol_type = other RNA
atgttgagaaggcgcgggagcccgggaatgggcgtgcacgtgggagcggcattgggcgcgctctggttctgtctaacgggcgcg

SEQ ID NO: 1994 - RNA, 84 nt, synthetic construct
  misc_feature 1..84: note = P23415_1-28
  source 1..84: mol_type = other RNA
atgtactcattcaacacactacgcctctacctctgggaaaccatagtcttcttctcactcgccgcctccaaagaagccgaagcc

SEQ ID NO: 1995 - RNA, 84 nt, synthetic construct
  misc_feature 1..84: note = Q8TD46_1-28
  source 1..84: mol_type = other RNA
atgctctgcccctggcgtactgccaatctcggcctcctcctcatcctcactattttcctcgttgccgcctcttcctccttatgc

SEQ ID NO: 1996 - RNA, 87 nt, synthetic construct
  misc_feature 1..87: note = P17301_1-29
  source 1..87: mol_type = other RNA
atggggccagagcgcacgggcgcggccccgctcccgctcttgctagtgctcgcgctatcgcaagggatcttgaactgttgcttggcc

SEQ ID NO: 1997 - RNA, 87 nt, synthetic construct
  misc_feature 1..87: note = P12821_1-29
  source 1..87: mol_type = other RNA
atgggagccgcctccggccgccgcggccccggcctcctactacccctccccctcctactcctcctaccaccccaacccgcactcgcc

SEQ ID NO: 1998 - RNA, 87 nt, synthetic construct
  misc_feature 1..87: note = Q14118_1-29
  source 1..87: mol_type = other RNA
atgcgcatgagcgtgggcttgagcttgctcttgcccttgtgggggcgcacgttcttgctcttgctctcggtcgtgatggcgcaatcg

SEQ ID NO: 1999 - RNA, 87 nt, synthetic construct
  misc_feature 1..87: note = P05231_1-29
  source 1..87: mol_type = other RNA
atgaactctttctccacatccgccttcggccccgtcgccttctccctcggcctacttctagtcctacccgccgccttccctgccccc

SEQ ID NO: 2000 - RNA, 87 nt, synthetic construct
  misc_feature 1..87: note = O00602_1-29
  source 1..87: mol_type = other RNA
atggaactctccggcgccaccatggcccgcggcctcgccgtcctcctcgtcctcttcctccacatcaaaaacctacccgcccaagca

SEQ ID NO: 2001 - RNA, 87 nt, synthetic construct
  misc_feature 1..87: note = Q9Y6Q6_1-29
  source 1..87: mol_type = other RNA
atggccccacgagcccgccgccgccgacccctattcgccctcctactcctatgcgccctcctagcccgactccaagtcgccctccaa

SEQ ID NO: 2002 - RNA, 87 nt, synthetic construct
  misc_feature 1..87: note = Q9ULI3_1-29
  source 1..87: mol_type = other RNA
atggcttctccccgcgcctcccgctggccccctccccttcttctcctcctcctccccttactcctcctccctcccgccgcccccggc

SEQ ID NO: 2003 - RNA, 90 nt, synthetic construct
  misc_feature 1..90: note = Q8NBP7_1-30
  source 1..90: mol_type = other RNA
atgggcaccgtctcctcacgccgatcctggtggccactcccactcctactcctactcctcctcctactcggacccgccggcgcccgcgcc

SEQ ID NO: 2004 - RNA, 90 nt, synthetic construct
  misc_feature 1..90: note = P02675_1-30
  source 1..90: mol_type = other RNA
atgaaacgaatggtatcctggtccttccacaaactcaaaaccatgaaacacctcctcctcctactcctctgcgtattcctagtcaaatcc

SEQ ID NO: 2005 - RNA, 90 nt, synthetic construct
  misc_feature 1..90: note = P06756_1-30
  source 1..90: mol_type = other RNA
atggccttcccaccccgccgccgcctacgtctaggcccccgcggactcccactcctactctccggcctactcctccccctctgcagagcc

SEQ ID NO: 2006 - RNA, 93 nt, synthetic construct
  misc_feature 1..93: note = O60609_1-31
  source 1..93: mol_type = other RNA
atggtccgccccctcaatccccgcccccttccccctgtcgtccttatgctccttcttcttctccctccctctccccttcccctcgccgccggc

SEQ ID NO: 2007 - RNA, 93 nt, synthetic construct
  misc_feature 1..93: note = P50895_1-31
  source 1..93: mol_type = other RNA
atggaacccccagacgcccccgcccaagcccgcggcgcaccccgcctactcctactagccgtactactcgccgcccaccccgacgcccaagcc

SEQ ID NO: 2008 - RNA, 93 nt, synthetic construct
  misc_feature 1..93: note = P28906_1-31
  source 1..93: mol_type = other RNA
atgctagtgcgcaggggcgcgcgcgcgggaccgcgcatgccaaggggctggaccgcgctctgtctcttgagcttgctcccgagcgggttcatg

SEQ ID NO: 2009 - RNA, 93 nt, synthetic construct
  misc_feature 1..93: note = P08514_1-31
  source 1..93: mol_type = other RNA
atggccagagccctatgcccactccaagccctatggctactcgaatgggtactcctactcctaggcccatgcgcagccccacccgcctgggcc

SEQ ID NO: 2010 - RNA, 93 nt, synthetic construct
  misc_feature 1..93: note = P00742_1-31
  source 1..93: mol_type = other RNA
atgggccgacccctccacctcgtcctcctctccgcctcactcgccggcctcctactcctcggcgaatcactattcatccgccgcgaacaagcc

SEQ ID NO: 2011 - RNA, 96 nt, synthetic construct
  misc_feature 1..96: note = P26006_1-32
  source 1..96: mol_type = other RNA
atggggccagggccctcgagagcgccaagggccccgagattgatgttgtgcgcgctcgcgctaatggtcgcggccgggggctgtgtagtgagcgcg

SEQ ID NO: 2012 - RNA, 96 nt, synthetic construct
  misc_feature 1..96: note = P13726_1-32
  source 1..96: mol_type = other RNA
atggaaacgcccgcgtggccgcgagtgcccaggcccgagaccgcggtcgcgcgcacgctattactcgggtgggtattcgcgcaagtggccggggcc

SEQ ID NO: 2013 - RNA, 96 nt, synthetic construct
  misc_feature 1..96: note = P11912_1-32
  source 1..96: mol_type = other RNA
atgcccggcggcccaggcgtcctccaagccctccccgccaccatcttcctcctcttcctcctatccgccgtctacctaggacccggctgccaagcc

SEQ ID NO: 2014 - RNA, 96 nt, synthetic construct
  misc_feature 1..96: note = Q9H6X2_1-32
  source 1..96: mol_type = other RNA
atggcgacagcggaaaggcgagcgctcgggatcgggttccagtggttgagcttggccacgctagtgctaatatgcgcgggccagggagggcgcagg

SEQ ID NO: 2015 - RNA, 99 nt, synthetic construct
  misc_feature 1..99: note = Q8IWK6_1-33
  source 1..99: mol_type = other RNA
atggaaccgcccgggcgcaggcgcgggcgcgcgcaaccgccattgctattgcccttgagcttgctcgcgctcttggccttgctcgggggcgggggcggg

SEQ ID NO: 2016 - RNA, 99 nt, synthetic construct
  misc_feature 1..99: note = P58335_1-33
  source 1..99: mol_type = other RNA
atggtcgcggaaaggagcccggccaggagcccgggctcgtggttgttcccgggcttgtggttgctcgtgctctcgggcccgggcgggctcttgcgcgcg

SEQ ID NO: 2017 - RNA, 102 nt, synthetic construct
  misc_feature 1..102: note = P06731_1-34
  source 1..102: mol_type = other RNA
atggaatcaccctcagcacccccccaccgatggtgcatcccctggcaacgcctcctcctcaccgcctccctcctcacattctggaacccacccaccaccgcc

SEQ ID NO: 2018 - RNA, 102 nt, synthetic construct
  misc_feature 1..102: note = P33681_1-34
  source 1..102: mol_type = other RNA
atgggccacacccgccgccaaggcacatccccatccaaatgcccctacctcaatttcttccaactcctagtcctagccggactctcacacttctgctcaggc

SEQ ID NO: 2019 - RNA, 105 nt, synthetic construct
  misc_feature 1..105: note = P38567_1-35
  source 1..105: mol_type = other RNA
atgggcgtcctcaaattcaaacacatattcttccgttcatttgtcaaatcatccggcgtctcacaaatagtcttcaccttcctcctcatcccctgctgcctcaca

SEQ ID NO: 2020 - RNA, 105 nt, synthetic construct
  misc_feature 1..105: note = P16410_1-35
  source 1..105: mol_type = other RNA
atggcctgcctcggcttccaacgccacaaagcccaactaaacctagccacccgtacctggccctgcacactcctcttcttcctcctcttcatacccgtattttgc

SEQ ID NO: 2021 - RNA, 111 nt, synthetic construct
  misc_feature 1..111: note = P15814_1-37
  source 1..111: mol_type = other RNA
atgagaccgggaacaggacaaggcggactagaagccccaggcgagcccgggccaaacctcagacaaagatggccactactgctactgggactggcagtagtaacacacgga

SEQ ID NO: 2022 - RNA, 114 nt, synthetic construct
  misc_feature 1..114: note = Q92956_1-38
  source 1..114: mol_type = other RNA
atggaaccccccggcgactggggccccccaccctggcgctcaacccccaaaacagacgtcctccgactcgtactctacctcacattcctaggcgccccatgctacgcacccgcc

SEQ ID NO: 2023 - RNA, 123 nt, synthetic construct
  misc_feature 1..123: note = Q86VB7_1-41
  source 1..123: mol_type = other RNA
atgtcaaaactccgcatggtcctactcgaagactccggctccgccgacttccgccgacacttcgtcaacctctcaccattcaccataaccgtagtactcctcctctccgcctgcttcgtcacc

SEQ ID NO: 2024 - RNA, 123 nt, synthetic construct
  misc_feature 1..123: note = P08648_1-41
  source 1..123: mol_type = other RNA
atgggctcccgcacacccgaatccccactccacgccgtccaactccgctggggcccccgccgccgcccacccctcctccccctcctactcttactcctacccccaccaccccgcgtcggcggc

SEQ ID NO: 2025 - RNA, 123 nt, synthetic construct
  misc_feature 1..123: note = P16109_1-41
  source 1..123: mol_type = other RNA
atggccaactgccaaatcgccatcctctaccaacgcttccaacgcgtagtcttcggcatctcccaactcctatgcttctccgccctcatatcagaactcaccaaccaaaaagaagtcgcagca

SEQ ID NO: 2026 - RNA, 132 nt, synthetic construct
  misc_feature 1..132: note = O75326_1-44
  source 1..132: mol_type = other RNA
atgaccccacccccaccaggccgagccgccccctccgcccccagagcccgagtccccggcccacccgcccgcctaggcctacccctccgcctacgcctactcctactcctctgggcagccgccgcctcagcc

SEQ ID NO: 2027 - RNA, 135 nt, synthetic construct
  misc_feature 1..135: note = Q8N2Q7_1-45
  source 1..135: mol_type = other RNA
atggccctgcccagatgcacatggccaaactacgtctggcgcgcagtcatggcctgcctcgtacacagaggcctaggcgcacccctgaccctatgcatgctcggatgcctactccaggccggacacgtactctca

SEQ ID NO: 2028 - RNA, 138 nt, synthetic construct
  misc_feature 1..138: note = Q86UN3_1-46
  source 1..138: mol_type = other RNA
atgctcccaggcctccgccgcctcctacaagcccccgcctccgcctgcctcctcttaatgctcctcgcactcccactcgcagccccctcctgccccatgctctgcacttgctactcatccccacccacagtctcatgc

SEQ ID NO: 2029 - RNA, 540 nt, synthetic construct
  misc_feature 1..540: note = A0A5B9
  source 1..540: mol_type = other RNA
atggacctcaaaaacgtattcccacccgaagtagccgtcttcgaaccctcagaagcagaaatatcccacacccaaaaagcaaccctcgtctgcctagccaccggattctaccccgaccacgtcgaactctcctggtgggtcaacggcaaagaagtccactccggcgtcagcaccgacccccaacccctcaaagaacaaccagcactcaacgactcacgatactgcctctcctcccgcctacgagtctccgccaccttctggcaaaacccacgaaaccacttccgctgccaagtacaattctacggcctctcagaaaacgacgaatggacccaagaccgagcaaaacccgtcacccaaatcgtatccgccgaagcctggggccgcgccgactgcggcttcaccagcgaatcataccaacaaggagtcctctccgcaacaatcctatacgaaatcctcctcggcaaagccaccctatacgccgtactcgtctccgccctagtcctcatggccatggtcaaacgcaaagactcccgaggttaa

SEQ ID NO: 2030 - RNA, 465 nt, synthetic construct
  misc_feature 1..465: note = B7Z8K6
  source 1..465: mol_type = other RNA
atgtcacaaccccacaccaaaccctcagtcttcgtcatgaaaaacggcaccaacgtagcctgcctcgtcaaagaattctaccccaaagacatacgcatcaacctcgtctcatcaaaaaaaatcaccgaattcgacccagccatcgtaatatccccctccggtaaatacaacgccgtcaaactcggcaaatacgaagactccaactccgtcacctgctccgtccaacacgacaacaaaaccgtccactccaccgacttcgaagtaaaaaccgactccaccgaccatgtcaaaccaaaagaaacagaaaacaccaaacaaccctccaaatcctgccacaaaccaaaagccatagtccacaccgaaaaagtcaacatgatgtcactcaccgtcctcggcctcagaatgctcttcgccaaaaccgtagccgtcaacttcctactaaccgccaaactcttcttcctataa

SEQ ID NO: 2031 - RNA, 645 nt, synthetic construct
  misc_feature 1..645: note = B9A064
  source 1..645: mol_type = other RNA
atgcgcccaaaaaccggccaagtcggatgcgaaacacccgaagaactcggacccggcccccgccaacgatggcccctcctactcctcggcctcgccatggtcgcacacggactactccgccccatggtagcaccccaatcaggcgaccccgaccccggagcctcagtcggatcctcccgctcctccctccgatcactctggggacgcctcctcctccaaccctcaccccaacgagccgacccccgctgctggccccgcggcttctggtcagaaccccaatcactctgctacgtcttcggcaccggcaccaaagtcaccgtcctaggccaacccaaagctaaccccaccgtaaccctcttcccaccctcatccgaagaactacaagccaacaaagccaccctcgtctgcctcatctcagatttctaccccggcgcagtaaccgtcgcctggaaagccgacggctcccccgtcaaagccggcgtcgaaacaacaaaaccatccaaacaatccaacaacaaatacgcagcctcatcctacctctccctcacacccgaacaatggaaatcccaccgatcctactcctgccaagtcacccacgaaggctccaccgtcgagaaaaccgtagcccccaccgaatgctcctga

SEQ ID NO: 2032 - RNA, 2520 nt, synthetic construct
  misc_feature 1..2520: note = O00206
  source 1..2520: mol_type = other RNA
atgatgtcagcatcaagactcgccggcaccctcataccagccatggcgttcctctcctgcgtccgccctgagtcttgggagccatgcgtcgaagtagtccccaacatcacctaccaatgcatggagctcaacttctacaaaatcccagacaatctcccattttccaccaaaaacctcgacctctctttcaatcccctccgccacctcggttcatacagtttcttctccttccccgaactccaagtgcttgacctctcccgatgcgaaatacaaacgatcgaggacggagcataccaatccttatcccatctctccacccttatccttaccggcaacccaattcaatcgctcgccctcggcgccttcagcggtctgtcctctctacaaaaactcgtcgcagtagaaaccaaccttgcaagcctcgagaacttccccattgggcatctcaaaactctcaaagaattaaacgtcgcccacaaccttatccaatccttcaagctccccgaatacttcagcaacctcaccaacctcgaacaccttgacctatcaagcaacaaaatccagagcatatactgcacagacctaagagtcctccaccaaatgccactcctgaacctcagcctagacctatcccttaaccccatgaacttcatccaacccggagccttcaaagaaatacggctacacaaattaacacttcgtaacaatttcgacagcctcaacgtcatgaaaacctgtatccaaggcctggccgggttggaggtccaccgcctcgtactaggcgagttccgaaacgaaggcaacctcgaaaaattcgacaagtctgccctcgaaggcctgtgcaacctcaccatagaagagttccgcctcgcctacctagattactacctagacgacattatagaccttttcaactgcctaaccaacgtctcttctttctctctcgtctccgtcaccatcgaacgcgtcaaagatttttcctacaatttcggatggcagcaccttgaactcgtcaactgcaaattcggccagttccccacactgaaactcaaatcccttaaacgacttacattcacctcaaacaaaggcggaaacgccttctccgaagtcgacctcccttccctcgaatttctcgatctctcgcgcaacggccttagcttcaaaggctgctgctcccagagcgacttcggcacaacctcactcaaatacctagaccttagcttcaatggcgtcattaccatgtcatctaatttcctagggctagaacaattagaacaccttgatttccaacactcaaacctcaaacagatgtccgagttctccgtattcttaagcctacgcaatctcatttatctcgacatctcccatacccacacccgcgtcgccttcaacggcatcttcaacggcctctcctcccttgaagtccttaaaatggccggcaactccttccaagaaaacttcctcccagacatcttcacggaacttcgaaacttaacctttttagacctctcacaatgtcagcttgaacagctctctccaaccgccttcaactctctctccagcctgcaagtcctcaatatgtcacacaacaacttcttctcccttgatactttcccctacaagtgcctaaattcacttcaagtcctcgactactcactcaaccacatcatgacgagcaagaaacaagaacttcaacacttcccgtcctcactagctttcctaaaccttacccaaaatgatttcgcctgtacctgcgaacaccaatctttcctccagtggataaaagatcagcgccaacttcttgttgaagtagaacgcatggaatgcgctacccccagcgacaaacaaggcatgccagtcctttcgctaaacattacctgccaaatgaacaaaaccatcatcggggtctccgttctgagcgtcctcgtcgtctccgtcgtcgccgtgctggtctacaaattctattttcacctcatgctcctggccggctgcatcaagtatggacgcggcgaaaacatttatgacgctttcgtcatctattcctcccaagacgaagactgggtacgcaacgagctagtcaaaaacctagaagaaggagttcctccttttcaactatgcctacactaccgcgacttcatcccaggagtcgccatagctgcaaacatcatccatgaaggcttccacaaatctcgcaaggtcatagtcgtagtctcccaacacttcatccaatccagatggtgcatattcgaatacgaaatcgcccaaacctggcaattcctctcatcacgcgccgggatcatcttcatcgtccttcaaaaagtcgaaaagacactactacgtcaacaggtcgaactataccgtctcctctcacgaaacacctaccttgaatgggaagactccgtactcggtcgccacattttctggcgccgcctgcgaaaagccctcctcgacggcaaatcctggaaccccgaaggcaccgtcggaaccggctgcaattggcaggaagccacctccatttga

SEQ ID NO: 2033 - RNA, 1377 nt, synthetic construct
  misc_feature 1..1377: note = P01730
  source 1..1377: mol_type = other RNA
atgaaccgcggcgtccccttccgacaccttctactagtactccaactcgccctcctacccgccgcaacccaaggcaaaaaagtagtcctaggaaaaaaaggcgacaccgtcgaactcacatgcacggcatcccaaaaaaagagcatccaattccactggaaaaactccaaccaaatcaaaatcctcggcaaccaaggctcttttctcacaaaaggcccatccaaacttaacgaccgcgccgactcccgccgcagcctctgggaccagggcaacttccccctcatcatcaagaacctaaaaatcgaggactccgacacctacatctgcgaagtagaagaccaaaaggaagaggtgcaactcctcgtattcggcctcaccgctaactccgatacccacctcctccaaggccagagcctcaccctaacccttgaatcaccccccgggtcctccccctccgtacaatgccgctccccccgcggcaaaaacatacaaggaggaaaaaccctctccgtatcccaactcgaactccaagacagcggcacgtggacttgcacagttctacaaaaccaaaaaaaagtcgagtttaaaatagacatagtagtcctcgccttccaaaaagccagctcaatcgtctataaaaaagaaggcgaacaagtcgaattctctttccccctcgcattcacagtcgaaaaacttaccggctccggcgaactctggtggcaagccgaacgcgcctcctcctccaaatcctggatcaccttcgacctcaaaaacaaagaagtcagcgtcaaacgcgtcacccaagaccccaaattacaaatgggcaaaaaactccccctccacctaaccctcccacaagccctcccacaatacgcgggaagcggtaacctcacactcgccctcgaagccaaaactggaaaactccaccaagaagtcaacctcgtcgtcatgcgcgccacccaactccaaaaaaacctcacctgcgaagtctggggcccaacctcccccaagctcatgctctccctcaaactggaaaacaaagaagcaaaagtatcaaagcgagaaaaagccgtatgggtcctcaaccccgaagccggaatgtggcaatgcctattatcagactccggccaagtcctcctagaaagcaacatcaaagtcctccccacatggtccaccccagtacagcccatggctctcatcgtcctcggtggagtcgccggcctcctgctattcatcggcctcggaatcttcttctgcgtccgatgcagacaccgccgccgccaagccgaacgcatgtcccaaatcaaaagactcttgagcgaaaaaaaaacatgccaatgcccacaccgcttccaaaaaacatgcagccccatctga

SEQ ID NO: 2034 - RNA, 537 nt, synthetic construct
  misc_feature 1..537: note = P01850
  source 1..537: mol_type = other RNA
atggaagacctcaacaaagtcttcccacccgaagtcgccgtattcgaaccctccgaagccgaaatatcacacacccaaaaagccaccctcgtctgcctcgccaccggcttcttccccgaccacgtagaactctcatggtgggtcaacggcaaagaagtccactcaggcgtatccactgacccccaacccctcaaagaacaacccgcactcaacgactcccgctactgcctatcctcacgactacgcgtaagcgcaacattctggcaaaacccacgaaaccacttccgctgccaagtccaattctacggactctcagaaaacgacgaatggacccaagaccgcgccaaacccgtcacccaaatcgtctccgccgaagcctggggccgcgccgactgcggcttcacctccgtctcctaccaacaaggcgtcctatcagccacaatcctctacgaaatcctactcggcaaagccacactctacgcagtcctagtctcagccctagtcctaatggccatggtcaaacgcaaagacttctaa

SEQ ID NO: 2035 - RNA, 624 nt, synthetic construct
  misc_feature 1..624: note = P07766
  source 1..624: mol_type = other RNA
atgcagtcagggacccactggagagtcctgggactgtgcctgctctcggtcggggtctggggacaggacggaaacgaggaaatgggcggaatcacacaaacgccatacaaagtcagcataagcgggacaacggtcatactcacgtgcccgcaatatcccgggagcgaaatcttatggcaacacaacgacaaaaacataggcggggacgaagacgataaaaatatcgggagcgacgaagatcacctgagcctgaaagagttctcggaattggaacagagcgggtactacgtctgctatccgcgcggaagcaagccagaggacgcgaacttctacctgtacctacgcgcgcgagtgtgcgaaaactgtatggagatggatgtcatgagcgtggccacaatcgtgatagtagacatatgcataaccgggggcctgctcctgctcgtgtactactggagtaaaaatcgaaaggcaaaggccaagcccgtgaccagaggcgcgggcgcgggagggcgccagcgagggcaaaataaagaacgcccgccaccagtaccgaacccagactatgaaccgatcagaaaaggacaaagggacctatactcaggcttaaaccagcgacggatatga

SEQ ID NO: 2036 - RNA, 3915 nt, synthetic construct
  misc_feature 1..3915: note = P08575
  source 1..3915: mol_type = other RNA
atgtacctatggctaaaactcctggctttcggattcgccttcttggacaccgaagtcttcgtaaccggtcaatctcccaccccgtcgccaacgggactaacgaccgcaaaaatgccttccgtcccactatcatccgaccccctacccacgcacaccacggcattctctccggcctccacattcgagcgagaaaacgacttttcagaaactaccaccagcttgtctcccgacaacacatccacccaagtcagccccgactcactagacaacgcgtccgccttcaacaccaccggagtctcctccgtccaaacaccacacctaccaactcacgcagactcccaaacgccctcggccggcaccgacacccagaccttctcaggatcggcagcaaacgccaagctaaatccaacgcccggctccaacgccataagcgacgtacctggagagcggtcaaccgcctctacgttccccacagaccccgtatccccactcacgaccaccctgtcactcgcccatcatagcagtgcagcccttccagctcgaacctccaacacaaccatcacggccaacacctcagacgcgtatctaaatgccagcgaaacgacaacgctcagcccctcggggtcagctgttataagcacgacaacaatcgccaccaccccatccaaacccacatgcgacgaaaaatacgcaaacatcactgtagactacctctacaacaaagaaaccaaactcttcaccgcaaaactcaacgtaaacgaaaacgtagaatgcggcaacaatacctgcacaaacaacgaagtccacaacctaacagagtgcaaaaacgccagcgtatccatcagccacaactcctgcacagcccccgacaaaacactcatcctagacgtccctcccggcgtggaaaaattccaactgcacgattgcactcaagtcgaaaaagccgacaccaccatctgcctcaaatggaagaatatagaaactttcacatgcgacacgcaaaatatcacctaccgctttcagtgcggaaacatgatctttgacaacaaggaaataaaactagaaaacctagagcccgaacacgaatataaatgcgactccgagatactctacaacaatcacaaattcaccaacgcctccaagataatcaagaccgatttcggatcgccgggagagccccaaatcatcttctgcagaagcgaagccgcccaccaaggagtcataacctggaacccgccgcaacgctccttccacaacttcaccctgtgctatatcaaagaaaccgagaaggactgtctcaatctcgacaaaaacctcattaaatatgacctccaaaacctgaaaccctacactaaatacgtgcttagtttacacgcatacatcatcgccaaagtccaacgaaatgggtccgcagcaatgtgccacttcaccacaaagagcgccccaccctcccaggtatggaacatgacagtctccatgacgagcgacaacagcatgcacgtaaagtgccgcccaccccgagaccgtaacgggccccacgagcgttaccacttagaagtagaagctggaaacacactggttcgaaacgagtcccacaagaactgtgacttccgagtcaaggaccttcagtacagcacagactataccttcaaagcatattttcacaacggcgactacccaggggaaccattcattctgcatcactctaccagctacaactcgaaagcgctgatagcctttctagcattcctaatcatcgtcacatcaatcgcactcttagtagtcctatacaaaatctacgaccttcataagaaacgatcatgtaacctggacgaacagcaggagttggttgaacgcgacgacgagaaacaactaatgaacgtagaacccatacacgccgacatactactagaaacatacaagcgcaaaattgccgacgaaggccggctctttctagccgaatttcaatctattccacgggtcttcagcaagttccccattaaggaagccaggaaaccctttaaccagaacaaaaacagatacgtcgacatactgccttacgattataaccgagtagaactaagtgagatcaatggcgacgccgggtccaactacatcaacgcctcatacatagacggattcaaggaaccgcgcaaatacatagccgcacaaggccctagagacgagacagtagacgacttctggagaatgatctgggagcaaaaagcaacagtcatcgtcatggtcacccgatgtgaagagggaaaccgcaacaaatgcgccgaatattggccctcaatggaagaaggcacacgagcattcggagacgtagtcgtaaagattaaccaacacaaacgctgcccagactacataattcaaaaattaaacattgtaaacaaaaaggagaaagccacaggcagagaggtcacacatatccaattcacctcctggccagaccacggagtccctgaagaccctcacctcctgctcaaattacgaaggcgagtcaacgcattctccaacttcttcagcggacccattgtcgtccattgcagtgccggagtagggcgcaccggcacctacattggcatcgacgcgatgctggaaggattagaggcagaaaataaagtggacgtctatggctacgtagtgaaactgcgcaggcagagatgccttatggtacaagtagaagcacaatacatactaatccaccaagccttggtagaatacaaccaattcggcgaaacagaggtaaacctcagcgaactccatccttatctacacaacatgaagaaacgtgacccaccctccgaaccctcccctctagaagccgagttccagcgcctgccatcctacagatcatggcggacgcaacacataggaaaccaagaagaaaacaagtccaagaacaggaactccaacgtcatcccttatgattacaaccgagtccctctcaaacacgagttggaaatgtcgaaggaatccgagcacgactccgacgagagctccgacgacgactcagatagcgaggaaccttccaagtacatcaatgcctcctttatcatgtcctactggaagccagaagtaatgatcgccgcccaaggaccgctcaaggaaacaatcggcgatttctggcaaatgatcttccagcgcaaagtcaaggtaatcgtcatgctaaccgagttaaaacacggagaccaggaaatctgcgcacaatactggggcgaaggcaaacaaacgtatggggacatagaggtagacctgaaagatacagacaaatcttccacctacacactcagagtatttgaactacgccactcaaaacgcaaagacagcagaacggtttaccaataccaatacacaaactggtcagtcgagcaactacccgcagagccaaaggagctgatatccatgatacaagtggtcaaacaaaaactcccacagaaaaactccagcgaaggcaacaaacaccataagtcaacaccattgctcattcactgccgcgacggaagccaacaaaccggaatcttttgcgcactcttaaacctcttagaatccgcggagacagaagaagtcgtcgacatctttcaagtagtcaaagccctacgaaaggcccgcccagggatggtctccacattcgaacaataccaatttctttacgacgtaatagcttctacctaccccgcacaaaatggccaagtcaagaagaacaaccaccaagaagacaagattgagttcgataacgaagtggacaaagtcaaacaagacgcaaactgcgttaatccgctcggcgctccggaaaaacttccagaagctaaggaacaagctgaaggctccgaacccaccagcggcaccgaaggacccgaacactcagtcaacggcccagcaagccccgcgctaaaccaaggcagctaa

SEQ ID NO: 2037 - RNA, 765 nt, synthetic construct
  misc_feature 1..765: note = P08637
  source 1..765: mol_type = other RNA
atgtggcaactcctcctccccaccgccctcctcctcctagtctcagccggaatgcgcacagaagacctcccaaaagccgtcgtcttcctcgaaccacaatggtatcgcgtcctcgaaaaagattccgtaaccctaaaatgccaaggcgcatactcaccagaagacaactcaacccaatggttccacaacgaatccctaatctcctcccaagcctcctcttacttcatcgacgccgccaccgtcgacgactcaggcgaataccgctgccaaaccaacctctccactctctctgaccccgtccaactcgaagtacacataggctggctcctcctacaagctccccgctgggtcttcaaagaagaagacccaatccacctccgctgccactcctggaaaaacaccgccctccacaaagtcacatacctccaaaacggaaaaggacgcaaatacttccatcacaactccgacttctacattcccaaagccaccctcaaagactcaggctcctatttctgccgaggcctcttcggatccaaaaacgtctcatcagaaaccgtcaacatcaccatcacccaaggcctcgcagtatccaccatatcctcattcttcccacccggctaccaagtctccttttgcctcgtcatggtcctactcttcgccgtcgacaccggcctctacttctccgtcaaaaccaacatacgctcatcaacacgcgattggaaagaccacaaattcaaatggcgcaaagacccccaagacaaatga

SEQ ID NO: 2038 - RNA, 663 nt, synthetic construct
  misc_feature 1..663: note = P10747
  source 1..663: mol_type = other RNA
atgctacgactacttctcgcactcaacctcttcccctcaatacaagtcacaggcaacaaaattctagtaaaacaatcccccatgctagtcgcctatgacaacgccgttaacctctcctgcaaatactcatacaacctcttctcacgcgaattccgcgcatccctccacaaaggactagactccgccgtcgaagtctgcgtcgtctacggcaactactcccaacaactccaagtctactcaaaaaccggcttcaactgcgacggcaaactcggcaacgaatccgtaaccttctacctccaaaacctttacgtcaaccaaaccgacatctacttctgcaaaatcgaagtaatgtacccccccccctacctcgacaacgaaaaatccaacggaacaataatacacgtcaaaggtaaacacctctgcccctccccactcttccccggaccctccaaacccttctgggtcctcgtcgtcgtcggcggagtcctcgcatgctactcacttctcgtaacagtagccttcatcatcttctgggttcgctctaaacgctcccgactacttcactcagactacatgaatatgaccccccgccgcccaggccccacacgcaaacactatcaaccctacgcacccccccgcgacttcgccgcctaccgatcatga

SEQ ID NO: 2039 - RNA, 681 nt, synthetic construct
  misc_feature 1..681: note = P11912
  source 1..681: mol_type = other RNA
atgccaggtggccccggcgtactccaagccctacccgcaaccatcttcctactattcctactttccgccgtctacctcggacccggctgccaagccctctggatgcacaaagtccccgcctccctaatggtctcactaggagaagacgcccacttccaatgccctcacaactcctccaacaacgctaacgtcacctggtggcgcgtccttcacggaaactacacatggcccccagaattcctcggacccggcgaagaccccaacggcaccctcatcatacaaaacgtaaacaaatcccacggcggaatatacgtatgccgcgtacaagaaggcaacgaaagctaccaacaatcctgcggcacatacctacgcgtccgacaaccccccccacgcccattcctcgacatgggcgaaggcaccaaaaaccgcataataacagccgaaggcatcatcctactcttctgcgccgtcgtacccggcaccctcctcctattccgaaaacgctggcaaaacgaaaaactcggcctcgacgccggcgacgaatacgaagacgaaaacctctacgaaggcctcaacctcgacgactgctccatgtacgaagacatatcccgcggactccaaggcacctaccaagacgtaggctcccttaatatcggcgacgtacaactcgaaaaaccatga

SEQ ID NO: 2040 - RNA, 1671 nt, synthetic construct
  misc_feature 1..1671: note = P15391
  source 1..1671: mol_type = other RNA
atgccacccccacgcctactcttcttcctattattcctcacccccatggaagtcagacccgaggaaccactcgtcgtcaaagtcgaagaaggagacaacgcagtcctccaatgcctcaaaggcacgtccgacggccccacccaacaactaacctggtctcgcgaaagccccctaaaacccttcctcaaactatccctgggactccccggccttggcattcacatgagacccctcgcgatatggctgttcatctttaatgtaagccaacaaatgggtggattctacctgtgccaacctggcccgccaagcgaaaaagcatggcaacccggatggaccgtcaacgtcgaaggctccggcgaactattccgctggaacgtatcagacctcgggggtctaggatgcggtctgaaaaaccgcagctcagaaggaccctcctcaccatcaggcaaactcatgtcacccaaactctacgtctgggccaaagaccgtcccgaaatatgggagggcgaaccaccctgcctccctcccagagactccctcaaccaatccctatcacaagacctcaccatggctcccggctccaccctctggctatcttgcggcgtacccccagacagcgtctcacgcggtccactctcatggacccacgtccacccaaaaggccccaaatcactactcagccttgaactcaaagacgaccgacccgcacgagacatgtgggtcatggaaacaggattactcctcccccgagctaccgcacaagacgccggcaaatactactgccaccgcggtaacctcaccatgagcttccacctagaaataaccgcacgacccgtcctctggcattggctcctccgcaccggcggctggaaagtctccgcagtaacacttgcatacctcatattctgcctttgctccctagtaggaatcctccacctccaacgggctctcgtactccgacgcaagcgcaaacgaatgacagaccccacacgccggttcttcaaagtaacacccccacccggctcaggcccccaaaaccagtacggcaacgtcctctccctaccaacacccacctccggactcggcagagcacaacgctgggccgctggcctcggcggcacagcaccatcctacggcaacccctcatccgacgtacaagccgacggcgccctcggctcccgaagcccaccaggcgtaggtcccgaggaagaagaaggagaaggctacgaagaaccagactcagaagaagacagcgagttctacgaaaacgactctaatctcggccaagaccagctctcacaagacggatcaggctacgaaaaccccgaagatgagcccctaggtcccgaagacgaagactcattcagcaacgcagagagctatgaaaatgaagacgaagaactaacacaacccgtcgcccgaactatggacttcctctcaccacacggctccgcctgggatccatcacgcgaagccacctcactcggtagccaatcgtacgaagacatgcggggaatcctctacgcagcaccacaactccgatccatacgcgggcagccaggaccaaaccacgaagaagatgccgactcatacgaaaacatggacaaccccgacggacctgaccccgcctggggcggcggcggccgaatgggcacctggtcaacccgctaa

SEQ ID NO: 2041 - RNA, 672 nt, synthetic construct
  misc_feature 1..672: note = P16410
  source 1..672: mol_type = other RNA
atggcctgcctaggcttccaaaggcacaaagcccaactaaacctcgccacacgcacctggccctgcaccctactcttcttcctcctcttcatcccagtcttctgcaaagcaatgcacgtagcacaaccagccgtagtcctagcctcctcacgcggcatcgcctccttcgtctgcgaatacgcatcacccggcaaagccacagaagtccgcgtcaccgtcctccgccaagccgactcacaagtcacagaagtctgcgccgccacttacatgatgggcaacgaactcacattcctagacgactcaatctgcacaggcacctcctccggcaaccaagtcaacctcacaatccaaggcctccgcgccatggacacaggcctatacatctgcaaagtagaactcatgtaccccccaccctactacctcggcatcggaaacggaacccaaatctacgtcatagatcccgaaccctgcccagactcagacttcctcctctggatactagcagccgtctcatcaggactcttcttctactccttcctactcacagccgtctcactctccaaaatgctcaaaaaacgctcacccctcacaaccggcgtctacgtcaaaatgcccccaaccgaaccagaatgcgaaaaacaatttcaaccctacttcatccccatcaactga

SEQ ID NO: 2042 - RNA, 1419 nt, synthetic construct
  misc_feature 1..1419: note = P16671
  source 1..1419: mol_type = other RNA
atgggctgcgaccgcaactgtggactaatagccggagccgtaatcggcgccgtcctcgccgtattcggaggcatcctcatgcccgtcggcgacctacttatccagaaaaccataaagaaacaagtcgtcctcgaagaaggcaccatagccttcaaaaactgggtcaaaaccggaaccgaagtctaccgccaattctggatattcgacgtccaaaacccacaagaagtcatgatgaactcgtcaaacatccaagttaaacaacgcggaccctacacataccgcgtacgcttcctagccaaagaaaacgttacccaagacgcagaagacaacaccgtcagcttcctgcaaccaaacggcgcaatcttcgaaccctccctttctgtcggcacagaggccgacaacttcaccgtactcaacctcgccgttgccgccgcgtctcacatctaccaaaaccaattcgtacaaatgatcctaaacagcctcatcaacaaatctaaaagcagtatgttccaagtcagaaccctccgcgaactcctctggggctacagagaccccttcctgtcactcgttccctaccccgtaacaactaccgtggggctgttctacccatacaacaacacggcagacggcgtatacaaagtcttcaatggcaaagacaacatctccaaagtagcaataattgacacctacaaaggcaaacgcaacctatcctactgggaatcacactgcgacatgatcaacggcacggacgccgcatcattcccacccttcgtcgaaaaatcccaagtcctacaattcttctcctcggacatatgccgctccatatacgccgtattcgagtccgatgtcaacctcaaaggcatcccagtataccgcttcgtcctcccctcaaaagccttcgcctcaccagtcgaaaacccagacaactactgcttctgcaccgagaaaatcatatccaaaaactgcacctcatacggcgtgctggacatctccaaatgcaaggaaggtcgcccagtctacatctccctcccccacttcctatacgcaagcccagacgtatccgaaccaatcgatggcctcaacccaaacgaagaagaacaccgcacctacctagacatagaaccaatcaccggcttcaccctacaattcgccaaacgcctgcaagtcaaccttctagttaaaccctcagagaaaatccaagtcctcaaaaacctcaagcgcaattacatcgttccaatcctctggctcaacgaaaccggcaccatcggcgacgaaaaagccaacatgttccgctctcaagtcacaggtaaaatcaacctcctaggactgatagaaatgatcctactaagtgtaggagtagtaatgttcgtcgccttcatgatatcctactgcgcatgccgcagcaaaacaataaaatga

SEQ ID NO: 2043 - RNA, 651 nt, synthetic construct
  misc_feature 1..651: note = P26718
  source 1..651: mol_type = other RNA
atgggctggatccgaggccgcagatcccgccactcatgggaaatgtccgaattccacaactacaacctcgacctcaaaaaatcagacttctccacccgctggcaaaaacaaagatgcccagtcgtaaaatcaaaatgccgcgaaaacgcctccccattcttcttctgctgcttcatcgcagtcgcaatgggcatccgattcatcataatggtcgccatctggtccgccgtattcctcaactccctcttcaatcaagaagtccaaatcccactcaccgaatcttactgcggcccctgccccaaaaactggatctgctataaaaataactgctaccaattcttcgacgaatccaaaaactggtacgaatcccaagcctcctgcatgagccaaaacgcatccctcttaaaagtatactccaaagaagaccaagacctcctaaaactagtcaaatcctaccactggatgggacttgtacacatccccaccaacggatcatggcaatgggaagacggctcaatactctccccaaacctactcaccatcatcgaaatgcaaaaaggcgactgcgccctatacgcctcctccttcaaaggctacatcgaaaactgctccacaccaaacacctacatatgcatgcaacgaaccgtctaa

SEQ ID NO: 2044 - RNA, 261 nt, synthetic construct
  misc_feature 1..261: note = P30273
  source 1..261: mol_type = other RNA
atgatacccgcagtcgtgctcttactcttgctcctggtcgaacaagcggccgcgctcggagaaccgcaattgtgctacatcctggacgcgatcttattcttgtacgggatcgtgctcacgctcttgtactgccgcttgaaaatacaagtgcgcaaggccgcgatcacgagctatgaaaagagcgacggcgtgtacacgggcctgagcacgcgcaatcaagagacctatgaaacgctcaagcacgaaaaaccgccccagtag

SEQ ID NO: 2045 - RNA, 1137 nt, synthetic construct
  misc_feature 1..1137: note = P32248
  source 1..1137: mol_type = other RNA
atggatctaggcaaacccatgaaatcagttctagtagtagccctcctcgtcatattccaagtctgcctttgccaggatgaagtcaccgacgactacatcggagacaacaccaccgtcgactacactctcttcgaatccctatgctccaagaaagacgtacgcaacttcaaagcctggtttctcccaatcatgtactccatcatctgcttcgtcggccttctaggaaacggtctcgtcgtcctcacctacatctacttcaaacgcctaaaaactatgaccgacacctacctcctcaacctcgcagtcgccgacatcctcttcctactcaccttacccttttgggcatactccgccgccaaatcctgggtattcggcgtccacttctgtaaactcatcttcgccatctacaaaatgtcatttttctccggtatgctcctactcctctgcatctctatcgaccgctacgtcgctatcgtccaagctgtatctgcccaccgccaccgagcccgcgttctactaatctcaaaactatcctgcgtcggaatctggatcctcgccacggtcctatcaatccccgaactcctatactcagacctacaacggtcatcatccgaacaagcaatgcgctgctctctcataaccgaacacgtcgaagccttcatcactatacaagtcgcccaaatggtcatcggtttcctcgtccccctactagccatgtcattctgctatctcgtcatcatccgcaccctcctccaagcccgaaacttcgaacgaaacaaagctatcaaagtcataatcgccgtcgtagtcgtgttcatcgtcttccaactaccctacaacggcgtcgtactcgctcaaaccgtcgctaacttcaacattacctcctccacctgtgagctctctaaacagctcaacatagcctacgatgtaacctactccctagcctgtgtccgatgctgcgtaaaccccttcttatacgccttcatcggcgtcaaattccgcaacgacctattcaaactctttaaggacctaggctgcctttcccaagaacagctacgtcaatggtcctcctgccgccacatccgacgctcatcaatgtccgtcgaagccgaaaccaccaccacattctcaccctga

SEQ ID NO: 2046 - RNA, 690 nt, synthetic construct
  misc_feature 1..690: note = P40259
  source 1..690: mol_type = other RNA
atggcccgcctagccctgagccccgtcccaagccactggatggtcgccctcctcctcctactatccgccgaaccagtaccagcggcccgaagcgaagaccgataccgaaaccccaaaggcagcgcgtgctcgcgcatctggcaaagcccccgcttcatcgcacgaaaacgcggattcacagtcaaaatgcactgctacatgaactcagcaagcggaaacgtcagctggctctggaaacaagaaatggacgaaaacccacaacaactcaaactcgaaaaaggccgcatggaagaaagccaaaacgaaagcctcgcaacactcacaatccaaggcataagattcgaagacaacggcatatacttctgccaacaaaaatgcaacaacacctcagaagtctaccaaggctgcggaaccgaactgcgcgtcatgggattctccaccctagcccaactcaagcaaagaaacacactaaaagacggcatcataatgatccaaacactcctaatcatactattcatcatagtccccatcttcctcctcctcgacaaagacgactcaaaagccggcatggaagaagaccacacatacgaaggcctcgacatcgaccaaacagcaacatacgaagacatagtcacactccgaaccggcgaagtcaaatggagcgtcggcgaacaccccggccaggaatga

SEQ ID NO: 2047 - RNA, 990 nt, synthetic construct
  misc_feature 1..990: note = P42081
  source 1..990: mol_type = other RNA
atggaccctcaatgcaccatgggcctctccaacatcctattcgtcatggccttcctcctctccggcgccgcccccctcaaaatccaagcctacttcaatgaaacagccgacctaccttgccaattcgcaaactcccaaaaccaatctctctccgaacttgtagtattctggcaagaccaagaaaacctcgtcctaaacgaagtctacctcggcaaagagaaattcgactccgtacactccaaatacatgggcagaacctcattcgactccgactcctggaccctacgcttacacaacctccaaatcaaagacaagggcctttaccaatgcatcatacaccacaaaaaacctacaggaatgatccgcatccatcaaatgaactccgaactctccgtcctagccaacttctcccaacccgaaatagtccccatctccaacatcaccgaaaacgtttacataaacctcacctgctcctccatccacggctaccccgaacccaaaaaaatgtccgtcctcctccgcacaaaaaactctacaatcgaatacgacggcgtcatgcaaaaatcccaagacaacgtcaccgaactctacgacgtcagcatatcccttagcgtctccttccccgacgtcacctccaacatgaccatattctgcatcctcgaaacagacaaaacccgactcctctccagccctttctccatcgaactcgaagatcctcaacccccccccgaccatatcccatggatcaccgcagtcctaccaaccgtcatcatctgcgttatggtattctgcctaattctatggaaatggaaaaaaaaaaaacgcccccgaaactcctacaaatgtggcaccaacaccatggaaagagaagaatccgaacaaaccaagaaacgagaaaaaatacacatccccgagcgatccgacgaagcccaacgcgtcttcaaaagctccaaaacctcttcctgcgacaaatcagacacctgcttctga

SEQ ID NO: 2048 - RNA, 1011 nt, synthetic construct
  misc_feature 1..1011: note = Q15762
  source 1..1011: mol_type = other RNA
atggactacccaaccctcctcctcgccctacttcacgtataccgcgcattatgcgaagaagtcttatggcacacctccgtcccctttgccgaaaacatgtcactcgaatgcgtctatcctagcatgggaatactcacccaagtcgaatggttcaaaatcggcacccaacaagactccatcgcaatattctccccaacacacggcatggtaatacgcaaaccctacgccgaacgagtctacttcctcaactcaaccatggcctccaacaatatgaccctcttcttccgaaacgcctccgaagacgacgtaggctactactcctgctccctatacacatacccccaaggcacctggcaaaaagtaatccaagtcgtacaatcagattccttcgaagccgccgtcccctcaaactctcacatcgtcagcgaaccaggcaaaaacgtcaccctcacatgccaaccacaaatgacctggcccgtacaagccgtccgatgggaaaagatccaacctcgccaaatagacctactaacctactgcaacctagtccacggccgcaacttcacctccaaattccccagacaaattgtctccaattgctcccacggacgctggtccgtcatcgttatcccagatgtcaccgtctccgactcaggactctaccgatgctacctccaggcttccgccggcgaaaacgaaaccttcgtcatgcgcctcaccgtagccgaaggaaaaaccgacaaccaatacaccctcttcgtcgccggcggaacagtacttcttctgcttttcgtcatctcaatcaccaccataatcgtaatcttcctaaaccgacgccgccgccgagaacgacgagacctcttcaccgaatcctgggacacccaaaaagcccccaacaactaccgatccccgatctccacatcccaacccacaaaccaatcaatggacgacacccgagaagacatctatgtaaactaccctaccttctcccgccgccccaaaacccgcgtctga

SEQ ID NO: 2049 - RNA, 13482 nt, synthetic construct; identical to SEQ ID NO: 1425
  misc_feature 1..13482: note = Q685J3
  source 1..13482: mol_type = other RNA

SEQ ID NO: 2050 - RNA, 1215 nt, synthetic construct
  misc_feature 1..1215: note = Q9NNX6
  source 1..1215: mol_type = other RNA
atgtccgacagcaaagaaccacgcttacaacaactcggcctcctcgaagaagaacaactccgcggcctaggcttcagacaaacacgcggctacaaatccctggcaggctgcctcggacacggccccctagtgctccaacttctcagcttcacactactcgcagggcttctcgtccaagtctccaaagtcccatcctcaatatcacaagaacagtcccgacaagacgccatctaccaaaacctcacccaactcaaagccgccgtcggcgaactatcggaaaaatccaaactacaagaaatctaccaagaactcacccaactcaaagccgccgtcggagaacttcccgaaaaatcaaaactacaagaaatctaccaagaactaacccgactaaaagccgccgtcggcgaactacccgaaaaatcaaaactacaagaaatataccaagaactcacatggctgaaagccgcagttggcgaactccccgaaaaatccaaaatgcaggaaatataccaagaactaacccggctcaaagccgccgtaggagaactccccgaaaagagcaaacaacaagaaatctaccaagaactaacccgactcaaagcagccgtcggcgaactccccgaaaaatccaaacaacaagaaatctaccaagaactaacccgactcaaagccgccgtaggagaactccccgagaaaagcaagcaacaggaaatataccaagaactcactcaactcaaagccgccgtcgaacgcctctgccacccctgcccatgggaatggaccttcttccaaggcaactgctacttcatgtcaaactcccaacgcaactggcacgactcaatcaccgcatgcaaagaagtcggcgcacaactcgtcgtaatcaaatccgccgaagaacagaacttcctccaactccaatccagccgctcaaaccgcttcacctggatgggcctctccgacctcaaccaagaaggcacctggcaatgggttgacggaagcccactcctcccatccttcaagcaatactggaaccgaggcgaaccaaacaatgtcggagaagaagactgcgcagagttcagcggcaacggatggaacgacgacaaatgcaacctagccaaattctggatctgcaagaaatccgccgcatcctgctcccgcgacgaagaacaattcctatcccccgcccccgccacacccaacccaccacccgcctga

SEQ ID NO: 2051 - RNA, 3126 nt, synthetic construct
  misc_feature 1..3126: note = Q9NR97
  source 1..3126: mol_type = other RNA
atggaaaacatgtttcttcaatcctccatgctcacctgtatattcctcctcatctcaggatcatgtgaactctgcgcagaagaaaacttctcccgctcctacccctgtgacgagaagaaacagaacgactctgtcatcgcagaatgctcgaaccgtcgcctccaggaggtaccccaaacggtgggcaagtacgtaaccgaactcgatctttcagacaatttcatcacccacatcaccaatgaatcattccaaggccttcaaaacttaaccaaaatcaacctcaaccacaaccccaatgtacaacaccaaaatggcaaccccggaatccaatccaacggactcaatataaccgacggagcattcctaaacctaaagaacctccgcgaattacttctcgaggacaaccagctcccacaaatcccatccggactgcccgagtcgctcaccgaactctcactcatacagaataacatctataacatcaccaaggagggcatttcacgcctcataaatctcaaaaacctgtacctcgcatggaactgttacttcaacaaagtctgcgagaaaaccaacatcgaagacggagtcttcgaaaccctcaccaacctagagctcctatccctctcctttaactccctatcacacgtacctcccaaacttcccagctccctccggaaactgttcctctccaacacccagataaaatacataagcgaagaagacttcaaaggcctcatcaatctaaccctcctcgacctctctgggaactgtccccgttgcttcaacgcccccttcccctgcgtcccgtgcgacggcggcgcttcaatcaacatcgaccgctttgccttccagaacctgactcaactccgatacctcaacctctcaagcacctccttacgcaaaataaacgccgcctggtttaaaaacatgccccacctaaaagtcttagatctcgagttcaactacctcgttggagaaatagcctcgggcgcctttcttacaatgctacctcgactcgaaatcctcgacctatcctttaactacataaaaggatcgtacccccagcacataaacatctcccggaatttctcgaaactcctttcgctccgcgcacttcacctaagagggtacgtcttccaagaactacgtgaagacgatttccaacccctaatgcagctaccaaacctctctacgatcaacttaggaatcaacttcatcaaacagatcgacttcaaactgtttcaaaacttctccaacctggaaatcatctacctctctgagaaccgaatctcaccactcgtaaaagacacccgccaatcatacgcgaactcatcctcctttcaacgtcacatacgaaagcgtcgttccacggattttgagttcgacccccactctaatttctaccacttcacacgaccgcttattaagccccagtgcgcggcatacggaaaagccctggacctctcactcaactccatcttcttcatcggaccaaatcaattcgaaaacttgccagacatagcctgcctcaacctatccgccaactccaacgcgcaggtattaagcggcacagagttctcagccattcctcatgtgaaatacctcgacctaacgaacaaccgactggacttcgacaacgccagtgccctcacggaactctccgacttagaagtacttgacttatcatacaactcacattacttcaggattgccggagtaacccaccacctcgagttcatccaaaacttcaccaaccttaaggtcctcaacctttcacacaacaacatctacactcttacagacaaatacaacctcgaatccaaatctctcgtcgaactcgtcttcagcggcaacagattagacatactttggaacgacgatgacaaccggtacatctcaatattcaaaggcctcaaaaacctaacccgcctagatctatccttgaaccgactcaaacatatacccaacgaagccttccttaacctcccggcctccctcaccgagctccacataaacgacaacatgctaaaattcttcaactggaccctattacagcaattccctcgccttgaactccttgacctgcgcggaaacaagctccttttcctcaccgactccctatccgacttcacctcatccctgagaactctactactatcccacaatcgaatatcccaccttccctcaggcttcctctccgaagtctcgtcccttaagcacctcgatctatcttccaacctactcaaaacaattaacaaatcggcactagaaacgaaaacaaccaccaaactctccatgctcgaactccatggtaaccctttcgaatgtacgtgcgacatcggtgacttcagacgctggatggacgaacatctgaatgtcaagataccacgcctagtggacgtcatatgtgcttcgcccggcgaccaacgcggcaaatccatcgtgtcccttgagctcacaacctgcgtctccgatgtcaccgccgtcattctatttttcttcaccttcttcattaccacgatggtcatgctcgcagccctagcccaccacttattctactgggacgtatggttcatctataacgtctgcctcgcaaaggttaaaggctaccgttccctctcaacctcccagacattctacgacgcctacatctcgtacgacaccaaagacgcctcagtgaccgactgggttatcaatgagctgcgctatcacctagaggaatcccgagataagaacgtacttctctgcctcgaagaacgagactgggaccccggtctcgccataatcgacaaccttatgcaatctatcaaccaatccaagaaaaccgtcttcgtgctaaccaagaaatacgccaaatcctggaactttaaaaccgcattctacctcgcgctccagcgactcatggacgagaatatggacgtcattattttcatcttactcgagcccgtacttcagcactcccaataccttcgcctacgccagcgcatatgcaaatccagtatcctgcaatggccagacaacccaaaagcggaaggcctgttttggcagaccttgcgcaacgtcgtccttactgaaaacgactcacgctacaacaacatgtacgtcgactccataaagcaatattag

SEQ ID NO: 2052 - RNA, 66 nt, synthetic construct
  misc_feature 1..66: note = P16671_TM_1_8-29
  source 1..66: mol_type = other RNA
gggttgatagcgggggcggtgataggggcggtgttggcggtgtttggggggatattgatgccggtg

SEQ ID NO: 2053 - RNA, 81 nt, synthetic construct
  misc_feature 1..81: note = P32248_TM_1_60-86
  source 1..81: mol_type = other RNA
ttcctcccaattatgtactcaatcatctgcttcgtcggcctcctaggtaacggcctcgtcgtccttacatacatctacttc

SEQ ID NO: 2054 - RNA, 66 nt, synthetic construct
  misc_feature 1..66: note = P16671_TM_2_440-461
  source 1..66: mol_type = other RNA
ctcttgggcttgatcgagatgatactcttgagcgtgggcgtggtcatgttcgtggcctttatgata

SEQ ID NO: 2055 - RNA, 63 nt, synthetic construct
  misc_feature 1..63: note = P32248_TM_2_96-116
  source 1..63: mol_type = other RNA
tacctccttaacctcgccgtcgccgacatcctcttccttctcactctccccttctgggcctat

SEQ ID NO: 2056 - RNA, 66 nt, synthetic construct
  misc_feature 1..66: note = P32248_TM_3_131-152
  source 1..66: mol_type = other RNA
ctcatattcgccatctacaaaatgtccttcttctccggcatgctcctactcctctgcatatccata

SEQ ID NO: 2057 - RNA, 63 nt, synthetic construct
  misc_feature 1..63: note = P32248_TM_4_171-191
  source 1..63: mol_type = other RNA
gtcttgctcataagcaagctctcatgcgtgggcatatggatactcgcgaccgtgctctcgatc

SEQ ID NO: 2058 - RNA, 84 nt, synthetic construct
  misc_feature 1..84: note = P32248_TM_5_220-247
  source 1..84: mol_type = other RNA
ttcataactatccaagtcgcccaaatggtaatcggcttcctcgtccccctcctagccatgtccttctgctacctcgtcatcata

SEQ ID NO: 2059 - RNA, 78 nt, synthetic construct
  misc_feature 1..78: note = P32248_TM_6_264-289
  source 1..78: mol_type = other RNA
gtcataatcgccgtagtcgtcgtcttcatagtcttccaactcccctacaacggcgtcgtactcgcccaaaccgtcgcc

SEQ ID NO: 2060 - RNA, 54 nt, synthetic construct
  misc_feature 1..54: note = P32248_TM_7_314-331
  source 1..54: mol_type = other RNA
ctcgcatgcgtgcgttgttgcgtgaacccgttcttgtacgcattcataggcgtg

SEQ ID NO: 2061 - RNA, 69 nt, synthetic construct
  misc_feature 1..69: note = A0A5B9_TM_145-167
  source 1..69: mol_type = other RNA
accatactctacgaaatcctcctaggcaaagccaccctctacgccgtcctagtctcagccctcgtcctc

SEQ ID NO: 2062 - RNA, 69 nt, synthetic construct
  misc_feature 1..69: note = B7Z8K6_TM_130-152
  source 1..69: mol_type = other RNA
ctcggcctacgcatgctattcgctaaaaccgtagccgtaaactttctcctcaccgccaaactcttcttc

SEQ ID NO: 2063 - RNA, 63 nt, synthetic construct
  misc_feature 1..63: note = O00206_TM_632-652
  source 1..63: mol_type = other RNA
accatcatcggcgtctccgtcctctccgtcctagtcgtctccgtagttgccgtcctagtctac

SEQ ID NO: 2064 - RNA, 66 nt, synthetic construct
  misc_feature 1..66: note = P01730_TM_397-418
  source 1..66: mol_type = other RNA
atggccctcatcgtactcggcggcgtcgccggactactactcttcatcggcctcggcatattcttc

SEQ ID NO: 2065 - RNA, 63 nt, synthetic construct
  misc_feature 1..63: note = P01850_TM_151-171
  source 1..63: mol_type = other RNA
atactcttgggcaaggccacgctctatgccgtgctcgtgagcgcgctcgtgctcatggccatg

SEQ ID NO: 2066 - RNA, 78 nt, synthetic construct
  misc_feature 1..78: note = P07766_TM_127-152
  source 1..78: mol_type = other RNA
gtcatgtccgtcgccaccatcgtcatcgtcgacatatgcatcaccggcggcctacttctactcgtatactactggtca

SEQ ID NO: 2067 - RNA, 66 nt, synthetic construct
  misc_feature 1..66: note = P08575_TM_576-597
  source 1..66: mol_type = other RNA
gccctcatcgccttcctcgccttcctcattatcgttacctctatcgctctactcgtcgtcctctat

SEQ ID NO: 2068 - RNA, 63 nt, synthetic construct
  misc_feature 1..63: note = P08637_TM_209-229
  source 1..63: mol_type = other RNA
gtctccttctgcctcgtcatggtcctactcttcgccgtcgacaccggcctatacttctctgtc

SEQ ID NO: 2069 - RNA, 81 nt, synthetic construct
  misc_feature 1..81: note = P10747_TM_153-179
  source 1..81: mol_type = other RNA
ttctgggtcttagtcgtcgtcggcggcgtcctcgcctgctattccctcctcgtcactgtcgcctttattatcttctgggtc

SEQ ID NO: 2070 - RNA, 66 nt, synthetic construct
  misc_feature 1..66: note = P11912_TM_144-165
  source 1..66: mol_type = other RNA
ataatcaccgccgaaggcatcattctactcttctgcgccgtcgtccccggcaccctactcctattc

SEQ ID NO: 2071 - RNA, 66 nt, synthetic construct
  misc_feature 1..66: note = P15391_TM_292-313
  source 1..66: mol_type = other RNA
gtgagcgcggtcacgctcgcgtacttgatcttttgcttgtgctcgctcgtgggcatactccatctc

SEQ ID NO: 2072 - RNA, 63 nt, synthetic construct
  misc_feature 1..63: note = P16410_TM_162-182
  source 1..63: mol_type = other RNA
ttccttctctggatcctcgccgccgtctcctccggtctcttcttctactctttcctccttact

SEQ ID NO: 2073 - RNA, 63 nt, synthetic construct
  misc_feature 1..63: note = P26718_TM_52-72
  source 1..63: mol_type = other RNA
ccctttttcttttgctgctttatcgccgtagccatgggaatacgtttcattatcatggtcgct

SEQ ID NO: 2074 - RNA, 63 nt, synthetic construct
  misc_feature 1..63: note = P30273_TM_24-44
  source 1..63: mol_type = other RNA
ctctgctacatcctcgacgccatcctatttctctacggcatcgtccttacactcctctactgc

SEQ ID NO: 2075 - RNA, 63 nt, synthetic construct
  misc_feature 1..63: note = P40259_TM_160-180
  source 1..63: mol_type = other RNA
ggcatcatcatgatccaaactctcctcatcatcctcttcatcatcgtccccatattcctactt

SEQ ID NO: 2076 - RNA, 63 nt, synthetic construct
  misc_feature 1..63: note = P42081_TM_248-268
  source 1..63: mol_type = other RNA
tggatcactgccgttcttcccaccgttatcatctgcgtcatggtcttctgtctcatcctctgg

SEQ ID NO: 2077 - RNA, 63 nt, synthetic construct
  misc_feature 1..63: note = Q15762_TM_255-275
  source 1..63: mol_type = other RNA
ggcggtaccgtcctcctcctcttattcgtcatctccatcaccactattatcgttatcttcctc

SEQ ID NO: 2078 - RNA, 63 nt, synthetic construct
  misc_feature 1..63: note = Q685J3_TM_4394-4414
  source 1..63: mol_type = other RNA
ctcgtgggcgcgggcgtggtcttgatgttgatcatactcgtggccttgctcatgctcgtgttc

SEQ ID NO: 2079 - RNA, 63 nt, synthetic construct
  misc_feature 1..63: note = Q9NNX6_TM_38-58
  source 1..63: mol_type = other RNA
ctcggccacggccccctcgtcctccaacttctctccttcactctcctcgccggcctcctcgtc

SEQ ID NO: 2080 - RNA, 63 nt, synthetic construct
  misc_feature 1..63: note = Q9NR97_TM_828-848
  source 1..63: mol_type = other RNA
gccgtcattcttttcttctttactttcttcatcactaccatggtcatgctcgccgccctcgcc

SEQ ID NO: 2081 - RNA, 48 nt, synthetic construct
  misc_feature 1..48: note = P14207_1-16
  source 1..48: mol_type = other RNA
atggtgtggaagtggatgcccttgctcttgctcttggtctgtgtcgcg

SEQ ID NO: 2082 - RNA, 48 nt, synthetic construct
  misc_feature 1..48: note = O75787_1-16
  source 1..48: mol_type = other RNA
atggccgtattcgtagtcctactcgccctcgtagccggcgtcctaggc

SEQ ID NO: 2083 - RNA, 48 nt, synthetic construct
  misc_feature 1..48: note = P07359_1-16
  source 1..48: mol_type = other RNA
atgcccctcctccttctcctcctcctcctcccttctcccctccacccc

SEQ ID NO: 2084 - RNA, 48 nt, synthetic construct; identical to SEQ ID NO: 1876
  misc_feature 1..48: note = P08637_1-16
  source 1..48: mol_type = other RNA

SEQ ID NO: 2085 - RNA, 51 nt, synthetic construct
  misc_feature 1..51: note = P07237_1-17
  source 1..51: mol_type = other RNA
atgctcaggcgcgcgctcttgtgcttggccgtggccgcgctcgtgcgcgcg

SEQ ID NO: 2086 - RNA, 51 nt, synthetic construct
  misc_feature 1..51: note = O60911_1-17
  source 1..51: mol_type = other RNA
atgaatctctccctcgtcctagccgccttctgcctcggcatcgcctccgcc

SEQ ID NO: 2087 - RNA, 51 nt, synthetic construct
  misc_feature 1..51: note = P20138_1-17
  source 1..51: mol_type = other RNA
atgcctctacttctcctcctccccctcctctgggccggcgccctagccatg

SEQ ID NO: 2088 - RNA, 51 nt, synthetic construct
  misc_feature 1..51: note = P27797_1-17
  source 1..51: mol_type = other RNA
atgctcttgagcgtgcccttgctcttgggcttgctcgggctcgcggtcgcg

SEQ ID NO: 2089 - RNA, 54 nt, synthetic construct
  misc_feature 1..54: note = P10747_1-18
  source 1..54: mol_type = other RNA
atgctccgcctcctcctagccctcaacctcttcccctccatccaagtcaccggc

SEQ ID NO: 2090 - RNA, 54 nt, synthetic construct
  misc_feature 1..54: note = O75487_1-18
  source 1..54: mol_type = other RNA
atggcgcgctttggcttgcccgcgctcttgtgcacgctcgcggtcttgagcgcg

SEQ ID NO: 2091 - RNA, 54 nt, synthetic construct; identical to SEQ ID NO: 1883
  misc_feature 1..54: note = P07996_1-18
  source 1..54: mol_type = other RNA

SEQ ID NO: 2092 - RNA, 54 nt, synthetic construct
  misc_feature 1..54: note = P22748_1-18
  source 1..54: mol_type = other RNA
atgcgcatgctcttggccttgctcgcgctatcggccgcgcgcccaagcgcgagc

SEQ ID NO: 2093 - RNA, 54 nt, synthetic construct
  misc_feature 1..54: note = Q15762_1-18
  source 1..54: mol_type = other RNA
atggactaccctacacttctcctcgccctcctccacgtctaccgagccctctgc

SEQ ID NO: 2094 - RNA, 54 nt, synthetic construct
  misc_feature 1..54: note = P30273_1-18
  source 1..54: mol_type = other RNA
atgatccccgccgtcgtcctcctcctcctcctcctcgtcgaacaagccgccgcc

SEQ ID NO: 2095 - RNA, 54 nt, synthetic construct
  misc_feature 1..54: note = P38570_1-18
  source 1..54: mol_type = other RNA
atgtggctattccacaccctcctctgcatcgcctcactcgccctcctcgccgcc

SEQ ID NO: 2096 - RNA, 54 nt, synthetic construct
  misc_feature 1..54: note = Q01638_1-18
  source 1..54: mol_type = other RNA
atgggcttctggatactcgccatcctgaccatactcatgtactcaaccgcagcc

SEQ ID NO: 2097 - RNA, 54 nt, synthetic construct
  misc_feature 1..54: note = Q9NZQ7_1-18
  source 1..54: mol_type = other RNA
atgcgcatattcgccgttttcatcttcatgacctactggcacctccttaacgct

SEQ ID NO: 2098 - RNA, 57 nt, synthetic construct; identical to SEQ ID NO: 1890
  misc_feature 1..57: note = P13591_1-19
  source 1..57: mol_type = other RNA

SEQ ID NO: 2099 - RNA, 57 nt, synthetic construct; identical to SEQ ID NO: 1891
  misc_feature 1..57: note = P26842_1-19
  source 1..57: mol_type = other RNA

SEQ ID NO: 2100 - RNA, 57 nt, synthetic construct
  misc_feature 1..57: note = P15391_1-19
  source 1..57: mol_type = other RNA
atgccccctccccgcctcctcttcttcctccttttcctcacccccatggaagtccgt

SEQ ID NO: 2101 - RNA, 57 nt, synthetic construct
  misc_feature 1..57: note = Q8NI17_1-19
  source 1..57: mol_type = other RNA
atgatgtggacctgggccctctggatgctcccctccctatgcaaattctccctcgcc

SEQ ID NO: 2102 - RNA, 57 nt, synthetic construct
  misc_feature 1..57: note = P08571_1-19
  source 1..57: mol_type = other RNA
atggaacgcgcctcatgcctcctcctcctcctccttcccctcgtccacgtctccgcc

SEQ ID NO: 2103 - RNA, 57 nt, synthetic construct
  misc_feature 1..57: note = P05154_1-19
  source 1..57: mol_type = other RNA
atgcaactcttcctccttctctgcctcgtcctcctctccccccaaggcgcctccctc

SEQ ID NO: 2104 - RNA, 57 nt, synthetic construct
  misc_feature 1..57: note = P02787_1-19
  source 1..57: mol_type = other RNA
atgaggttggcggtgggggcgttgttggtgtgtgcggtgttggggttgtgtttggcg

SEQ ID NO: 2105 - RNA, 57 nt, synthetic construct
  misc_feature 1..57: note = P02671_1-19
  source 1..57: mol_type = other RNA
atgttctcgatgaggatcgtgtgcttggtcttgagcgtggtcgggaccgcgtggacg

SEQ ID NO: 2106 - RNA, 57 nt, synthetic construct
  misc_feature 1..57: note = P04216_1-19
  source 1..57: mol_type = other RNA
atgaacctcgccatctcaatagccctcctcctcaccgtcctccaagtctcccgcgga

SEQ ID NO: 2107 - RNA, 57 nt, synthetic construct; identical to SEQ ID NO: 1899
  misc_feature 1..57: note = P00747_1-19
  source 1..57: mol_type = other RNA

SEQ ID NO: 2108 - RNA, 57 nt, synthetic construct
  misc_feature 1..57: note = P01764_1-19
  source 1..57: mol_type = other RNA
atggagttcgggctctcgtggttgttcttggtcgcgatcttgaaaggggtccagtgc

SEQ ID NO: 2109 - RNA, 57 nt, synthetic construct
  misc_feature 1..57: note = P16150_1-19
  source 1..57: mol_type = other RNA
atggccacactcctcctcctcctcggcgtcctcgtcgtctcccccgacgcccttggc

SEQ ID NO: 2110 - RNA, 57 nt, synthetic construct
  misc_feature 1..57: note = Q6DN72_1-19
  source 1..57: mol_type = other RNA
atgttgctctggaccgcggtcttgctctttgtcccgtgcgtgggcaagaccgtgtgg

SEQ ID NO: 2111 - RNA, 57 nt, synthetic construct; identical to SEQ ID NO: 1903
  misc_feature 1..57: note = Q01151_1-19
  source 1..57: mol_type = other RNA

SEQ ID NO: 2112 - RNA, 57 nt, synthetic construct
  misc_feature 1..57: note = P07093_1-19
  source 1..57: mol_type = other RNA
atgaactggcacctccccctattcctcctcgcctccgtcaccctaccctccatctgc

SEQ ID NO: 2113 - RNA, 57 nt, synthetic construct
  misc_feature 1..57: note = Q8WWQ8_1-19
  source 1..57: mol_type = other RNA
atgatgctccaacacctcgtcatcttttgcctcggcctagtcgtccaaaacttctgc

SEQ ID NO: 2114 - RNA, 60 nt, synthetic construct
  misc_feature 1..60: note = Q13291_1-20
  source 1..60: mol_type = other RNA
atggaccccaaaggcctcctctccctcaccttcgtcctattcctctccctcgccttcggc

SEQ ID NO: 2115 - RNA, 60 nt, synthetic construct
  misc_feature 1..60: note = P35225_1-20
  source 1..60: mol_type = other RNA
atggcactcttgctcacgaccgtgatcgcgctcacgtgcttgggcgggttcgcgagcccg

SEQ ID NO: 2116 - RNA, 60 nt, synthetic construct
  misc_feature 1..60: note = P25942_1-20
  source 1..60: mol_type = other RNA
atggtccgcctacccctccaatgcgtcctatggggctgcctccttaccgccgtccacccc

SEQ ID NO: 2117 - RNA, 60 nt, synthetic construct
  misc_feature 1..60: note = P52803_1-20
  source 1..60: mol_type = other RNA
atgttgcacgtggaaatgctcacgctcgtgttcttggtcttgtggatgtgcgtgttctcg

SEQ ID NO: 2118 - RNA, 60 nt, synthetic construct
  misc_feature 1..60: note = Q15116_1-20
  source 1..60: mol_type = other RNA
atgcaaataccccaggccccgtggccggtcgtgtgggcggtcttgcaattgggctggcgc

SEQ ID NO: 2119 - RNA, 60 nt, synthetic construct
  misc_feature 1..60: note = P05556_1-20
  source 1..60: mol_type = other RNA
atgaacctacaacccatcttctggatcggcctcatctcctccgtctgctgcgtcttcgct

SEQ ID NO: 2120 - RNA, 60 nt, synthetic construct; identical to SEQ ID NO: 1912
  misc_feature 1..60: note = Q12891_1-20
  source 1..60: mol_type = other RNA

SEQ ID NO: 2121 - RNA, 60 nt, synthetic construct
  misc_feature 1..60: note = Q8IV16_1-20
  source 1..60: mol_type = other RNA
atgaaagcgctcggggccgtgctcttggccttgctcttgtgcgggcgcccgggcaggggc

SEQ ID NO: 2122 - RNA, 60 nt, synthetic construct
  misc_feature 1..60: note = Q03167_1-20
  source 1..60: mol_type = other RNA
atgacctcccactatgttatcgccatctttgccctcatgtcctcatgcctcgccaccgcc

SEQ ID NO: 2123 - RNA, 60 nt, synthetic construct
  misc_feature 1..60: note = Q14246_1-20
  source 1..60: mol_type = other RNA
atgcgcgggttcaatctcttgctcttttgggggtgctgtgtcatgcactcgtgggagggc

SEQ ID NO: 2124 - RNA, 60 nt, synthetic construct
  misc_feature 1..60: note = P16871_1-20
  source 1..60: mol_type = other RNA
atgaccatcctcggcaccaccttcggcatggtattctccctactccaagtcgtctccggc

SEQ ID NO: 2125 - RNA, 60 nt, synthetic construct
  misc_feature 1..60: note = P61769_1-20
  source 1..60: mol_type = other RNA
atgtcgcgctcggtcgcgctcgcggtcttggccttgctatcgctatcgggcttggaagcg

SEQ ID NO: 2126 - RNA, 60 nt, synthetic construct
  misc_feature 1..60: note = Q9Y6W8_1-20
  source 1..60: mol_type = other RNA
atgaaatcaggcctctggtacttcttcctcttctgcctacgcatcaaagtcctcaccggc

SEQ ID NO: 2127 - RNA, 63 nt, synthetic construct; identical to SEQ ID NO: 1919
  misc_feature 1..63: note = P10966_1-21
  source 1..63: mol_type = other RNA

SEQ ID NO: 2128 - RNA, 63 nt, synthetic construct
  misc_feature 1..63: note = Q9BZW8_1-21
  source 1..63: mol_type = other RNA
atgctcggccaagtcgtcaccctcatcctcctcctcctcctcaaagtctaccaaggcaaaggc

SEQ ID NO: 2129 - RNA, 63 nt, synthetic construct
  misc_feature 1..63: note = P02778_1-21
  source 1..63: mol_type = other RNA
atgaaccaaaccgccatcctaatctgttgcctcatattcctcaccctctcaggcatccaaggc

SEQ ID NO: 2130 - RNA, 63 nt, synthetic construct
  misc_feature 1..63: note = P18564_1-21
  source 1..63: mol_type = other RNA
atgggcatcgaactactctgcctcttcttcctattcctcggccgcaacgaccacgtccaaggc

SEQ ID NO: 2131 - RNA, 63 nt, synthetic construct
  misc_feature 1..63: note = O14525_1-21
  source 1..63: mol_type = other RNA
atggcgctagcgggattgtgcgcgctattggcctgttgctggggcccggcagcggtcttggcc

SEQ ID NO: 2132 - RNA, 63 nt, synthetic construct
  misc_feature 1..63: note = P01130_1-21
  source 1..63: mol_type = other RNA
atgggaccgtgggggtggaagctaaggtggacggtcgcgctattgctagcggccgcgggaacg

SEQ ID NO: 2133 - RNA, 63 nt, synthetic construct
  misc_feature 1..63: note = P01732_1-21
  source 1..63: mol_type = other RNA
atggccctccccgtcaccgccctcctccttccccttgcccttctcctccacgccgcccgtcca

SEQ ID NO: 2134 - RNA, 63 nt, synthetic construct
  misc_feature 1..63: note = P48061_1-21
  source 1..63: mol_type = other RNA
atgaatgccaaggtcgtggtcgtgctcgtgctcgtgctcacggccttgtgcttgagcgatggc

SEQ ID NO: 2135 - RNA, 63 nt, synthetic construct
  misc_feature 1..63: note = P01589_1-21
  source 1..63: mol_type = other RNA
atggactcctacctcctcatgtggggcctcctcaccttcatcatggtccccggctgccaagcc

SEQ ID NO: 2136 - RNA, 63 nt, synthetic construct
  misc_feature 1..63: note = Q86T13_1-21
  source 1..63: mol_type = other RNA
atgaggccagcgttcgcgctatgtctattgtggcaggcattgtggccgggaccgggcgggggc

SEQ ID NO: 2137 - RNA, 63 nt, synthetic construct
  misc_feature 1..63: note = Q5DID0_1-21
  source 1..63: mol_type = other RNA
atgctccgcacatccggcctagccctactcgccctcgtctccgccgtcggcccctcccaagcc

SEQ ID NO: 2138 - RNA, 66 nt, synthetic construct
  misc_feature 1..66: note = P40189_1-22
  source 1..66: mol_type = other RNA
atgctcacgctccagacctggctcgtgcaagcactctttatctttctcacgaccgagagcacaggc

SEQ ID NO: 2139 - RNA, 66 nt, synthetic construct; identical to SEQ ID NO: 1931
  misc_feature 1..66: note = Q86YL7_1-22
  source 1..66: mol_type = other RNA

SEQ ID NO: 2140 - RNA, 66 nt, synthetic construct
  misc_feature 1..66: note = P55075_1-22
  source 1..66: mol_type = other RNA
atgggctccccccgctccgcactttcctgcctactcctccacctactcgtcctttgcctccaagcc

SEQ ID NO: 2141 - RNA, 66 nt, synthetic construct; identical to SEQ ID NO: 1933
  misc_feature 1..66: note = Q30201_1-22
  source 1..66: mol_type = other RNA

SEQ ID NO: 2142 - RNA, 66 nt, synthetic construct
  misc_feature 1..66: note = P07766_1-22
  source 1..66: mol_type = other RNA
atgcaatcgggcacgcactggcgcgtgctcgggctctgtctcttgagcgtgggcgtgtgggggcaa

SEQ ID NO: 2143 - RNA, 66 nt, synthetic construct
  misc_feature 1..66: note = P18827_1-22
  source 1..66: mol_type = other RNA
atgaggcgcgcggccttgtggttgtggttgtgcgcgctcgcgctctcgctccagcccgcgctcccg

SEQ ID NO: 2144 - RNA, 66 nt, synthetic construct
  misc_feature 1..66: note = P55290_1-22
  source 1..66: mol_type = other RNA
atgcaaccccgcacacccctcgtcctctgcgtcctcctctctcaagtcctcctcctaacctccgcc

SEQ ID NO: 2145 - RNA, 66 nt, synthetic construct
  misc_feature 1..66: note = P37173_1-22
  source 1..66: mol_type = other RNA
atgggccgaggcctcctccgcggcctatggcccctccacatcgtactctggacccgaatcgcctcc

SEQ ID NO: 2146 - RNA, 66 nt, synthetic construct; identical to SEQ ID NO: 1938
  misc_feature 1..66: note = Q07325_1-22
  source 1..66: mol_type = other RNA

SEQ ID NO: 2147 - RNA, 66 nt, synthetic construct
  misc_feature 1..66: note = P04156_1-22
  source 1..66: mol_type = other RNA
atggccaatctcgggtgctggatgttggtcttgttcgtggccacgtggtcggacttgggcttgtgc

SEQ ID NO: 2148 - RNA, 66 nt, synthetic construct
  misc_feature 1..66: note = P31785_1-22
  source 1..66: mol_type = other RNA
atgctcaaaccctcactccccttcacctccctcctcttcctccaactcccactcctcggcgtcggc

SEQ ID NO: 2149 - RNA, 69 nt, synthetic construct
  misc_feature 1..69: note = P01579_1-23
  source 1..69: mol_type = other RNA
atgaaatacacctcatacatactcgccttccaactctgcatcgtcctcggctccctcggctgctactgc

SEQ ID NO: 2150 - RNA, 69 nt, synthetic construct
  misc_feature 1..69: note = P23229_1-23
  source 1..69: mol_type = other RNA
atggcggccgcgggccagctctgtctcttgtacttgagcgcgggcttgctctcgcgcttgggcgcggcc

SEQ ID NO: 2151 - RNA, 69 nt, synthetic construct
  misc_feature 1..69: note = O60494_1-23
  source 1..69: mol_type = other RNA
atgatgaacatgtccctcccattcctctggtccctcctcaccctcctcatattcgccgaagtcaacggc

SEQ ID NO: 2152 - RNA, 69 nt, synthetic construct; identical to SEQ ID NO: 1944
  misc_feature 1..69: note = P08575_1-23
  source 1..69: mol_type = other RNA

SEQ ID NO: 2153 - RNA, 69 nt, synthetic construct
  misc_feature 1..69: note = Q8IWY4_1-23
  source 1..69: mol_type = other RNA
atgggggccgcggccgtgcgctggcacttgtgcgtgctcttggccttgggcacgcgcgggcgattggcc

SEQ ID NO: 2154 - RNA, 69 nt, synthetic construct
  misc_feature 1..69: note = Q08431_1-23
  source 1..69: mol_type = other RNA
atgccccgcccccgactactagccgccctctgcggcgcactactctgcgccccctccctcctcgtcgcc

SEQ ID NO: 2155 - RNA, 69 nt, synthetic construct
  misc_feature 1..69: note = Q99665_1-23
  source 1..69: mol_type = other RNA
atggcccacaccttccgcggctgctccctcgccttcatgttcataatcacatggctactcataaaagcc

SEQ ID NO: 2156 - RNA, 69 nt, synthetic construct
  misc_feature 1..69: note = Q6Q8B3_1-23
  source 1..69: mol_type = other RNA
atgtcagccccccgcctccttatctccataatcataatggtctccgcctcttcctcttcctgcatgggc

SEQ ID NO: 2157 - RNA, 69 nt, synthetic construct
  misc_feature 1..69: note = Q07011_1-23
  source 1..69: mol_type = other RNA
atgggcaactcctgctacaacatcgtagccacactcctcctcgtactcaacttcgaacgcacccgctcc

SEQ ID NO: 2158 - RNA, 69 nt, synthetic construct; identical to SEQ ID NO: 1950
  misc_feature 1..69: note = Q8NHL6_1-23
  source 1..69: mol_type = other RNA

SEQ ID NO: 2159 - RNA, 69 nt, synthetic construct
  misc_feature 1..69: note = P36894_1-23
  source 1..69: mol_type = other RNA
atgccccaactctatatatacatccgcctcctcggcgcttacctcttcattatctcccgcgtccaaggc

SEQ ID NO: 2160 - RNA, 69 nt, synthetic construct
  misc_feature 1..69: note = Q16552_1-23
  source 1..69: mol_type = other RNA
atgacccccggcaaaacctccctcgtctccctcctcctcctcttatccctcgaagccatcgtcaaagcc

SEQ ID NO: 2161 - RNA, 69 nt, synthetic construct
  misc_feature 1..69: note = P42081_1-23
  source 1..69: mol_type = other RNA
atggacccccaatgcaccatgggcctatccaacatcctcttcgtcatggccttcctcctatccggcgcc

SEQ ID NO: 2162 - RNA, 69 nt, synthetic construct
  misc_feature 1..69: note = P43121_1-23
  source 1..69: mol_type = other RNA
atgggcttgcccaggctcgtgtgcgcgtttttgctcgcggcctgttgctgttgcccgcgcgtggccggg

SEQ ID NO: 2163 - RNA, 69 nt, synthetic construct
  misc_feature 1..69: note = O00206_1-23
  source 1..69: mol_type = other RNA
atgatgtcagcctcccgcctagccggcaccctcatccccgccatggccttcctatcctgcgtccgaccc

SEQ ID NO: 2164 - RNA, 69 nt, synthetic construct
  misc_feature 1..69: note = P42701_1-23
  source 1..69: mol_type = other RNA
atggaacccctagtcacctgggtcgtccccctcctcttcctcttcctactttcccgccaaggcgccgcc

SEQ ID NO: 2165 - RNA, 72 nt, synthetic construct
  misc_feature 1..72: note = P06729_1-24
  source 1..72: mol_type = other RNA
atgtcattcccctgcaaattcgtcgcctccttcctcctcatcttcaacgtttcctccaaaggcgccgtctca

SEQ ID NO: 2166 - RNA, 72 nt, synthetic construct
  misc_feature 1..72: note = P15328_1-24
  source 1..72: mol_type = other RNA
atggcgcaaaggatgacgacacagctattgctattgctcgtgtgggtggccgtggtcggggaagcgcaaacg

SEQ ID NO: 2167 - RNA, 72 nt, synthetic construct
  misc_feature 1..72: note = P05112_1-24
  source 1..72: mol_type = other RNA
atgggcctcacatcccaactcctacccccactcttcttcctcctcgcctgcgccggcaacttcgtacacggc

SEQ ID NO: 2168 - RNA, 72 nt, synthetic construct
  misc_feature 1..72: note = P06127_1-24
  source 1..72: mol_type = other RNA
atgcccatgggctcactccaacccctcgccaccctctacctcctcggcatgctcgtagcctcatgcctcggc

SEQ ID NO: 2169 - RNA, 72 nt, synthetic construct; identical to SEQ ID NO: 1961
  misc_feature 1..72: note = P32248_1-24
  source 1..72: mol_type = other RNA

SEQ ID NO: 2170 - RNA, 72 nt, synthetic construct
  misc_feature 1..72: note = Q7Z7D3_1-24
  source 1..72: mol_type = other RNA
atggcgagcttgggccagatcttgttctggagcataatctcgatcataatcatactcgcgggcgcgatcgcg

SEQ ID NO: 2171 - RNA, 72 nt, synthetic construct
  misc_feature 1..72: note = P54756_1-24
  source 1..72: mol_type = other RNA
atgagagggagcgggccaaggggagcgggaaggagaaggccgccgagcgggggaggggacacgccaataaca

SEQ ID NO: 2172 - RNA, 72 nt, synthetic construct
  misc_feature 1..72: note = Q92823_1-24
  source 1..72: mol_type = other RNA
atgcaactaaaaatcatgcccaaaaaaaaacgcctctccgccggccgcgtccccctcatcctcttcctctgc

SEQ ID NO: 2173 - RNA, 72 nt, synthetic construct
  misc_feature 1..72: note = P19320_1-24
  source 1..72: mol_type = other RNA
atgcccggcaaaatggtcgtcatcctcggcgcctccaacatcctctggatcatgttcgccgcctcccaagcc

SEQ ID NO: 2174 - RNA, 72 nt, synthetic construct
  misc_feature 1..72: note = Q86UN2_1-24
  source 1..72: mol_type = other RNA
atgttgaggaaggggtgttgtgtggagttgttgttgttgttggtggcggcggagttgccgttgggggggggg

SEQ ID NO: 2175 - RNA, 75 nt, synthetic construct; identical to SEQ ID NO: 1967
  misc_feature 1..75: note = P33151_1-25
  source 1..75: mol_type = other RNA

SEQ ID NO: 2176 - RNA, 75 nt, synthetic construct
  misc_feature 1..75: note = P17813_1-25
  source 1..75: mol_type = other RNA
atggaccgcggcacactcccactcgccgtcgcactcctcctcgcctcctgctcactctcccccacatccctagcc

SEQ ID NO: 2177 - RNA, 75 nt, synthetic construct
  misc_feature 1..75: note = P25445_1-25
  source 1..75: mol_type = other RNA
atgctcggaatctggaccttgctcccgctcgtgctcacaagcgtggccagactctcgagcaagagcgtgaacgcg

SEQ ID NO: 2178 - RNA, 75 nt, synthetic construct
  misc_feature 1..75: note = P01730_1-25
  source 1..75: mol_type = other RNA
atgaaccgaggcgtccccttccgccacctcctcctcgtcctccaactcgcactcctacccgccgccacccaaggc

SEQ ID NO: 2179 - RNA, 75 nt, synthetic construct
  misc_feature 1..75: note = Q685J3_1-25
  source 1..75: mol_type = other RNA
atgccccgccccggcaccatggccctctgcctcctcacactcgtcctctcactcctccccccccaagcagccgca

SEQ ID NO: 2180 - RNA, 75 nt, synthetic construct
  misc_feature 1..75: note = P17787_1-25
  source 1..75: mol_type = other RNA
atggccaggcgctgtggcccggtcgcgctcttgctcgggttcgggctcttgcgattgtgctcgggcgtgtggggg

SEQ ID NO: 2181 - RNA, 75 nt, synthetic construct
  misc_feature 1..75: note = Q6UQ28_1-25
  source 1..75: mol_type = other RNA
atggccgtcttccacgacatgctcctccaacccctcggcatgtttctctgcctctccctacaactatcctccgcc

SEQ ID NO: 2182 - RNA, 75 nt, synthetic construct; identical to SEQ ID NO: 1974
  misc_feature 1..75: note = P13987_1-25
  source 1..75: mol_type = other RNA

SEQ ID NO: 2183 - RNA, 75 nt, synthetic construct
  misc_feature 1..75: note = P10721_1-25
  source 1..75: mol_type = other RNA
atgaggggagcgcgcggggcctgggactttctctgtgtcttgctattgctattgagagtgcaaacgggatcgagc

SEQ ID NO: 2184 - RNA, 75 nt, synthetic construct
  misc_feature 1..75: note = P12319_1-25
  source 1..75: mol_type = other RNA
atggccccagccatggaatcacccaccctcctctgcgtagccctcctcttcttcgcccccgacggcgtcctcgcc

SEQ ID NO: 2185 - RNA, 78 nt, synthetic construct; identical to SEQ ID NO: 1977
  misc_feature 1..78: note = Q9BZR6_1-26
  source 1..78: mol_type = other RNA

SEQ ID NO: 2186 - RNA, 78 nt, synthetic construct
  misc_feature 1..78: note = P25063_1-26
  source 1..78: mol_type = other RNA
atgggccgcgccatggtcgcccgcctcggcctcggcctactcctactcgccctactactccccacccaaatctactcc

SEQ ID NO: 2187 - RNA, 78 nt, synthetic construct
  misc_feature 1..78: note = Q9NR97_1-26
  source 1..78: mol_type = other RNA
atggaaaacatgttcctccaatcatccatgctaacctgcatcttcctcctcatctccggatcctgcgaactctgcgcc

SEQ ID NO: 2188 - RNA, 78 nt, synthetic construct; identical to SEQ ID NO: 1980
  misc_feature 1..78: note = Q8N131_1-26
  source 1..78: mol_type = other RNA

SEQ ID NO: 2189 - RNA, 78 nt, synthetic construct
  misc_feature 1..78: note = P49771_1-26
  source 1..78: mol_type = other RNA
atgaccgtcctcgcccccgcttggtctcccactacctatctcctcctcctcctccttctctcctccggcctctctggc

SEQ ID NO: 2190 - RNA, 78 nt, synthetic construct
  misc_feature 1..78: note = P02679_1-26
  source 1..78: mol_type = other RNA
atgtcctggtcccttcacccccgcaatctcattctctacttctacgcccttctctttctctcctctacctgcgtcgcc

SEQ ID NO: 2191 - RNA, 78 nt, synthetic construct
  misc_feature 1..78: note = P14784_1-26
  source 1..78: mol_type = other RNA
atggcagccccagccctatcctggcgcctacccctactcatcctcctactccccctcgccacttcctgggcctccgcc

SEQ ID NO: 2192 - RNA, 81 nt, synthetic construct
  misc_feature 1..81: note = P05362_1-27
  source 1..81: mol_type = other RNA
atggccccatcctcaccccgccccgcactcccagccctcctcgtcctcctcggcgccctcttccccggccccggaaatgcc

SEQ ID NO: 2193 - RNA, 81 nt, synthetic construct
  misc_feature 1..81: note = Q13740_1-27
  source 1..81: mol_type = other RNA
atggaatccaaaggcgcctcctcctgccgcctactcttctgcctcctcatatcagccaccgtcttccgacccggcctcgga

SEQ ID NO: 2194 - RNA, 84 nt, synthetic construct
  misc_feature 1..84: note = Q13443_1-28
  source 1..84: mol_type = other RNA
atgggctcgggcgcgagatttccatcgggcacgctcagggtcaggtggttgctattgctcgggctcgtgggcccggtcttgggc

SEQ ID NO: 2195 - RNA, 84 nt, synthetic construct
  misc_feature 1..84: note = P14151_1-28
  source 1..84: mol_type = other RNA
atgatcttcccctggaaatgccaatcaacccagagagacctctggaacatattcaaactctggggctggaccatgctctgctgc

SEQ ID NO: 2196 - RNA, 84 nt, synthetic construct
  misc_feature 1..84: note = P56199_1-28
  source 1..84: mol_type = other RNA
atggccccgcgcccgcgcgcacgaccgggcgtggccgtggcctgttgctggctcttgaccgtagtcttgcgctgttgcgtgagc

SEQ ID NO: 2197 - RNA, 84 nt, synthetic construct
  misc_feature 1..84: note = P11279_1-28
  source 1..84: mol_type = other RNA
atggccgcccccggctccgcccgccgccccctactcctcctcctcctcctacttctactcggcctcatgcactgcgcttccgcc

SEQ ID NO: 2198 - RNA, 84 nt, synthetic construct
  misc_feature 1..84: note = P40259_1-28
  source 1..84: mol_type = other RNA
atggcccgcctagccctatccccagtcccctcccactggatggtcgccctcctcctcctactctccgccgaacccgtccccgcc

SEQ ID NO: 2199 - RNA, 84 nt, synthetic construct
  misc_feature 1..84: note = P43681_1-28
  source 1..84: mol_type = other RNA
atggagctcgggggcccgggcgcgcccaggctcttgcccccgctcttgctcttgctcgggaccgggctattgcgcgcgagctcg

SEQ ID NO: 2200 - RNA, 84 nt, synthetic construct; identical to SEQ ID NO: 1992
  misc_feature 1..84: note = P18627_1-28
  source 1..84: mol_type = other RNA

SEQ ID NO: 2201 - RNA, 84 nt, synthetic construct; identical to SEQ ID NO: 1993
  misc_feature 1..84: note = Q5ZPR3_1-28
  source 1..84: mol_type = other RNA

SEQ ID NO: 2202 - RNA, 84 nt, synthetic construct
  misc_feature 1..84: note = P23415_1-28
  source 1..84: mol_type = other RNA
atgtactcattcaacaccctccgcctctacctctgggaaacaatagtcttcttctccctcgccgcctcaaaagaagccgaagcc

SEQ ID NO: 2203 - RNA, 84 nt, synthetic construct
  misc_feature 1..84: note = Q8TD46_1-28
  source 1..84: mol_type = other RNA
atgctctgcccctggcgtactgccaatctcggcctccttctcattctcactatttttctcgtcgccgcctcctcctccctctgc

SEQ ID NO: 2204 - RNA, 87 nt, synthetic construct
  misc_feature 1..87: note = P17301_1-29
  source 1..87: mol_type = other RNA
atgggccccgaacgcaccggcgccgccccactccccctcctactcgtactcgcactctcccaaggaatcctcaactgctgcctcgcc

SEQ ID NO: 2205 - RNA, 87 nt, synthetic construct
  misc_feature 1..87: note = P12821_1-29
  source 1..87: mol_type = other RNA
atgggcgccgcctccggccgccgcggccccggactcctactacccctacccctcctcctcctcctcccaccccaacccgcactcgcc

SEQ ID NO: 2206 - RNA, 87 nt, synthetic construct; identical to SEQ ID NO: 1998
  misc_feature 1..87: note = Q14118_1-29
  source 1..87: mol_type = other RNA

SEQ ID NO: 2207 - RNA, 87 nt, synthetic construct
  misc_feature 1..87: note = P05231_1-29
  source 1..87: mol_type = other RNA
atgaactccttctctacatccgccttcggccccgtcgctttctctctcggcctcctcctagtcctacccgccgccttccccgccccc

SEQ ID NO: 2208 - RNA, 87 nt, synthetic construct
  misc_feature 1..87: note = O00602_1-29
  source 1..87: mol_type = other RNA
atggaattgagcggggccacgatggcgcgcgggctcgcggtcttgctcgtgctctttctccatatcaagaacttgcccgcgcaagcg

SEQ ID NO: 2209 - RNA, 87 nt, synthetic construct
  misc_feature 1..87: note = Q9Y6Q6_1-29
  source 1..87: mol_type = other RNA
atggcaccccgcgcccgccgacgccgccccctcttcgccctcctactcctctgcgccctcctagccagactccaagtcgccctccaa

SEQ ID NO: 2210 - RNA, 87 nt, synthetic construct
  misc_feature 1..87: note = Q9ULI3_1-29
  source 1..87: mol_type = other RNA
atggcctccccacgcgcctcccgctggcccccaccccttctcctcctcctcctccccctacttctactcccacccgccgcccccggc

SEQ ID NO: 2211 - RNA, 90 nt, synthetic construct
  misc_feature 1..90: note = Q8NBP7_1-30
  source 1..90: mol_type = other RNA
atggggacagtgagctcgcgcaggagctggtggccgctcccgctcttgctcttactcttgctcttgctcgggcccgcgggcgcgcgcgcg

SEQ ID NO: 2212 - RNA, 90 nt, synthetic construct
  misc_feature 1..90: note = P02675_1-30
  source 1..90: mol_type = other RNA
atgaaacgcatggtctcctggtccttccacaaactcaaaactatgaaacacctcctcctcctactcctatgcgtcttcctcgtcaaatcc

SEQ ID NO: 2213 - RNA, 90 nt, synthetic construct
  misc_feature 1..90: note = P06756_1-30
  source 1..90: mol_type = other RNA
atggccttcccaccccgccgccgcctacgcctcggcccccgcggactccccctcctactctccggcctacttctacccctctgccgagcc

SEQ ID NO: 2214 - RNA, 93 nt, synthetic construct
  misc_feature 1..93: note = O60609_1-31
  source 1..93: mol_type = other RNA
atggtccgtccccttaacccccgccccctacccccagtcgtcctcatgctcctacttctcctcccaccctcacccctccccctcgccgccggc

SEQ ID NO: 2215 - RNA, 93 nt, synthetic construct
  misc_feature 1..93: note = P50895_1-31
  source 1..93: mol_type = other RNA
atggaacccccagacgcccccgcccaagcccgaggagccccccgcctactcctactcgccgtcctactcgccgcccaccccgacgcccaagcc

SEQ ID NO: 2216 - RNA, 93 nt, synthetic construct
  misc_feature 1..93: note = P28906_1-31
  source 1..93: mol_type = other RNA
atgctcgtgcgcaggggcgcgcgcgcgggcccgcgaatgcccaggggctggaccgcgctctgtctcttgagcttgctcccgagcgggttcatg

SEQ ID NO: 2217 - RNA, 93 nt, synthetic construct; identical to SEQ ID NO: 2009
  misc_feature 1..93: note = P08514_1-31
  source 1..93: mol_type = other RNA

SEQ ID NO: 2218 - RNA, 93 nt, synthetic construct
  misc_feature 1..93: note = P00742_1-31
  source 1..93: mol_type = other RNA
atgggccgccccctccacctcgtcctcctctccgcctccctagccggcctcctactcctaggcgaatccctattcatccgccgcgaacaagcc

SEQ ID NO: 2219 - RNA, 96 nt, synthetic construct; identical to SEQ ID NO: 2011
  misc_feature 1..96: note = P26006_1-32
  source 1..96: mol_type = other RNA

SEQ ID NO: 2220 - RNA, 96 nt, synthetic construct
  misc_feature 1..96: note = P13726_1-32
  source 1..96: mol_type = other RNA
atggaaacgccagcgtggccgcgcgtgcccagacccgagaccgcggtcgcgcgcacgctcttgctcgggtgggtattcgcgcaagtggccggggcc

SEQ ID NO: 2221 - RNA, 96 nt, synthetic construct
  misc_feature 1..96: note = P11912_1-32
  source 1..96: mol_type = other RNA
atgcccggcggccccggcgtcctccaagccctccccgccaccatattcctactcttcctcctatccgccgtctacctcggacccggctgccaagcc

SEQ ID NO: 2222 - RNA, 96 nt, synthetic construct
  misc_feature 1..96: note = Q9H6X2_1-32
  source 1..96: mol_type = other RNA
atggcgacagcggaaaggcgagcgctcgggatcgggttccagtggttgagcttggccacgctagtgctaatatgcgcgggccagggcgggcgcagg

SEQ ID NO: 2223 - RNA, 99 nt, synthetic construct
  misc_feature 1..99: note = Q8IWK6_1-33
  source 1..99: mol_type = other RNA
atggaaccgcccgggcgcaggcgcgggcgcgcgcaaccgcccttgctcttgcccttgagcttgctcgcgctcttggccttgctcgggggcgggggcggg

SEQ ID NO: 2224 - RNA, 99 nt, synthetic construct
  misc_feature 1..99: note = P58335_1-33
  source 1..99: mol_type = other RNA
atggtggccgagcgatcgcccgcgcgctcgcccgggagctggctatttcccgggctctggctattggtcttgagcgggcccgggggcttgctcagggcc

SEQ ID NO: 2225 - RNA, 102 nt, synthetic construct
  misc_feature 1..102: note = P06731_1-34
  source 1..102: mol_type = other RNA
atggaatccccctccgccccaccccaccgctggtgcatcccctggcaacgcctactcctaaccgcctccctcctcacattctggaacccacccaccaccgcc

SEQ ID NO: 2226 - RNA, 102 nt, synthetic construct
  misc_feature 1..102: note = P33681_1-34
  source 1..102: mol_type = other RNA
atgggccacacccgccgccaaggaacctccccatccaaatgcccatacctaaacttcttccaactcctcgtcctagccggcctatcccacttctgctcaggc

SEQ ID NO: 2227 - RNA, 105 nt, synthetic construct
  misc_feature 1..105: note = P38567_1-35
  source 1..105: mol_type = other RNA
atgggcgtactcaaattcaaacacatattcttccgttccttcgtcaaatcatccggcgtctcccaaatagtcttcaccttcctcctcatcccatgctgcctcaca

SEQ ID NO: 2228 - RNA, 105 nt, synthetic construct
  misc_feature 1..105: note = P16410_1-35
  source 1..105: mol_type = other RNA
atggcctgcctcggcttccaacgccacaaagcacaactcaacctagccacccgcacctggccctgcacactcctcttcttcctcctattcatacccgtattctgc

SEQ ID NO: 2229 - RNA, 111 nt, synthetic construct; identical to SEQ ID NO: 2021
  misc_feature 1..111: note = P15814_1-37
  source 1..111: mol_type = other RNA

SEQ ID NO: 2230 - RNA, 114 nt, synthetic construct
  misc_feature 1..114: note = Q92956_1-38
  source 1..114: mol_type = other RNA
atggaacccccaggcgactggggaccccccccctggcgctcaacacccaaaaccgacgtcctcagactcgtcctctacctcacattcctaggcgccccctgctacgcccccgcc

SEQ ID NO: 2231 - RNA, 123 nt, synthetic construct
  misc_feature 1..123: note = Q86VB7_1-41
  source 1..123: mol_type = other RNA
atgtcaaaactccgcatggtcctcctagaagactccggctccgccgacttccgccgccacttcgtcaacctctcccccttcaccataaccgtagtcctactcctatcagcctgcttcgtcacc

SEQ ID NO: 2232 - RNA, 123 nt, synthetic construct
  misc_feature 1..123: note = P08648_1-41
  source 1..123: mol_type = other RNA
atgggctcccgcacccccgaatcccccctccacgccgtccaactccgctggggcccccgccgccgcccacccctactccccctcctactactcctcctacccccacccccccgcgtcggcgga

SEQ ID NO: 2233 - RNA, 123 nt, synthetic construct
  misc_feature 1..123: note = P16109_1-41
  source 1..123: mol_type = other RNA
atggccaactgccaaatagccatactataccaacgcttccaacgcgtcgtcttcggcatctcccaactcctctgcttctccgccctcatctccgaactcaccaaccaaaaagaagtcgccgcc

SEQ ID NO: 2234 - RNA, 132 nt, synthetic construct
  misc_feature 1..132: note = O75326_1-44
  source 1..132: mol_type = other RNA
atgaccccacccccccccggccgcgccgccccctccgcaccccgagcccgcgtcccaggcccccccgcccgcctcggcctacccctacgcctacgcctactcctactcctctgggcagccgcagcctcagcc

SEQ ID NO: 2235 - RNA, 135 nt, synthetic construct; identical to SEQ ID NO: 2027
  misc_feature 1..135: note = Q8N2Q7_1-45
  source 1..135: mol_type = other RNA

SEQ ID NO: 2236 - RNA, 138 nt, synthetic construct
  misc_feature 1..138: note = Q86UN3_1-46
  source 1..138: mol_type = other RNA
atgctccccggcctccgccgactcctacaagcccctgcctccgcctgcctcctcctaatgctcctcgcccttccactcgcagccccatcctgccccatgctctgcacatgctactcctctccccctaccgtctcctgc

SEQ ID NO: 2237 - RNA, 540 nt, synthetic construct
  misc_feature 1..540: note = A0A5B9
  source 1..540: mol_type = other RNA
atggacctcaaaaacgtcttcccaccagaagtcgccgtcttcgaacccagcgaagccgaaatctcccacacccaaaaagccactctagtctgcctcgccaccggcttctaccccgaccacgtcgaactatcctggtgggtcaacggcaaagaagtccactccggcgtctccacagacccacaacccctcaaagaacaacccgccctcaacgactcccgatactgcctcagctccagactccgcgtctccgccaccttctggcaaaacccccgcaaccacttccgctgccaagtacaattctacggcctctccgaaaacgacgaatggacccaagaccgcgccaaacccgtcacccaaatcgtctccgccgaagcctggggccgagccgactgcggattcacctccgaatcataccaacaaggcgtactctcagccacaatcctatacgaaatcctcctaggcaaagccaccctctacgccgtcctagtctccgccctagtactcatggcaatggtaaaacgcaaagactcccgaggctaa

SEQ ID NO: 2238 - RNA, 465 nt, synthetic construct
  misc_feature 1..465: note = B7Z8K6
  source 1..465: mol_type = other RNA
atgtcccaaccccacaccaaaccctccgtcttcgtcatgaaaaacggcaccaacgtcgcctgcctcgtaaaagaattctaccccaaagacatccgcataaacctcgtctcatccaaaaaaatcaccgaatttgaccccgccatcgtcatctccccctccggaaaatacaacgccgtcaaactaggcaaatacgaagactcaaactcagtcacctgctcagtacaacacgacaacaaaaccgtccactcaaccgacttcgaagtcaaaaccgactccaccgaccacgtcaaacccaaagaaaccgaaaacaccaaacaaccctcaaaatcatgtcacaaacccaaagccatagtccacaccgaaaaagtaaacatgatgtcactcaccgtcctaggcctccgcatgctattcgccaaaaccgtcgccgtcaacttcctcctcacagccaaactcttcttcctctaa

SEQ ID NO: 2239 - RNA, 645 nt, synthetic construct
  misc_feature 1..645: note = B9A064
  source 1..645: mol_type = other RNA
atgcgaccaaaaaccggccaagtcggctgcgaaacccccgaagaactcggccccggaccccgccaacgctggcccctcctcctcctcggcctagcaatggtcgcccacggcctactacgccccatggtcgcaccccaatcaggcgaccccgacccaggcgcctcagtcggctcatcccgatcatccctccgatccctctggggccgcctcctccttcaaccctcaccccaacgcgccgacccccgctgctggccccgcggcttctggtccgaaccccaatccctctgctacgtcttcggcaccggcaccaaagtaaccgtcctaggccaacccaaagcaaaccccaccgtcaccctcttcccaccctcctccgaagaactccaagccaacaaagccaccctcgtctgcctcatctcagacttctaccccggcgccgtcaccgtcgcctggaaagccgacggctcacccgtaaaagcaggagtagaaaccaccaaaccctccaaacaatccaacaacaaatacgccgcatcctcctacctctccctcacacccgaacaatggaaatcacacagatcctactcctgccaagtcacccacgaaggatccacagtcgaaaagaccgtcgcacccaccgaatgctcctga

SEQ ID NO: 2240 - RNA, 2520 nt, synthetic construct
  misc_feature 1..2520: note = O00206
  source 1..2520: mol_type = other RNA
atgatgagcgcctcacgcctcgccggcacactgataccagcaatggcattcctttcctgcgtccgacctgaatcctgggaaccctgcgtcgaggtcgttcccaacataacataccagtgcatggaactgaatttctataaaatacccgacaaccttcctttctctacaaagaacctcgacctctccttcaaccccctacgtcacctaggctcctacagcttcttctcattccccgagctccaagtcctagacctctctcgctgcgaaatccaaacaattgaggatggggcctaccaatcactatcacacctttccaccttaatactcactggaaatcctatacaatccttagcactcggcgctttctccggactctctagcctccaaaaactcgtcgccgtcgagactaacctcgcctcccttgaaaactttccaatcgggcacctcaaaactctcaaagaacttaatgttgcccacaaccttatacaatcattcaaactaccagagtacttctcaaacctcacaaacctggagcaccttgacctgtcctccaacaaaattcaatccatctactgcactgatcttcgagtcctccaccaaatgcccctccttaacctttcactcgacctctccctcaaccccatgaatttcatccaacccggcgcattcaaagaaataaggctccacaaactcaccctccgtaacaacttcgatagcctgaacgtcatgaaaacctgtatccagggtctcgctggactcgaagtccaccgactcgtcctcggcgagttccgaaacgaaggcaacctagaaaagttcgacaagtccgccctcgaaggcctctgcaacctcacaatagaagagttccgactcgcatacctcgactactacctggacgatataatcgaccttttcaactgcctgactaacgtttcctccttctcactcgtatcggtcactatcgaacgagtcaaagacttttcctacaacttcggttggcaacacctcgaactcgtcaattgcaaattcggccaattccccacacttaaacttaaaagtctcaagcgcctcacgttcacctccaacaaaggcggcaacgcattctccgaagtcgacctcccctcactagagttcctcgacctctctcgcaacgggctcagcttcaaaggatgctgctcacaatcagacttcggcaccacatccctaaaatacctcgacctcagcttcaacggcgtaattaccatgtcgtctaacttcttaggactagaacaactcgaacatctcgatttccagcattcaaacctcaaacaaatgtccgagttctctgttttcctgtccctgaggaacctcatctacctcgacatcagccacacacacacccgagtcgcattcaatggaattttcaacggcctatcctccctagaagtcctaaaaatggccggcaactcattccaagaaaacttcctccccgacatcttcaccgaactccgaaacctcaccttcctcgacctatcacaatgccaactcgaacaactatccccaacagccttcaactcactaagctccttacaagttctaaacatgtcccacaacaacttcttcagtctagacacattcccctataaatgcctcaacagcctccaggttctcgactattcactaaaccacataatgacaagcaagaaacaggaactgcaacatttcccctcctccctcgcattcctgaacctcactcagaacgatttcgcctgtacctgcgaacaccaatcgttcctccagtggattaaagaccaacgacaattactcgtcgaagtggaacgcatggaatgcgccacccccagtgataagcaaggcatgccagtactctctttaaatatcacttgccagatgaataaaaccatcatcggcgtctccgttctttccgtcctcgttgtctccgtcgtcgccgtcctcgtctacaaattctacttccaccttatgctcctggcaggctgcatcaaatacggtcgcggcgaaaacatctacgacgccttcgttatctactcgtctcaagacgaagactgggttagaaatgaactcgtaaagaacctcgaagaaggagtaccccctttccaactatgcctccattaccgcgatttcatcccaggcgtcgccatcgcagcaaatatcatccacgaaggcttccataaatccagaaaagtcatcgtcgtcgtgagccagcactttatacaatcacgctggtgcatctttgagtacgaaatcgcccaaacgtggcaattcctctcaagcagagccggcataatcttcattgtactacagaaagtcgaaaagacccttcttcgacaacaagttgaactctaccgtctcctctcccgaaatacatacctcgaatgggaagactcagtccttggccggcacatattttggcgtcggctacgtaaagcactcctcgacggcaaatcctggaaccccgaaggaactgtgggcaccggctgcaattggcaagaagcaacctcgatatga

SEQ ID NO: 2241 - RNA, 1377 nt, synthetic construct
  misc_feature 1..1377: note = P01730
  source 1..1377: mol_type = other RNA
atgaaccgcggagtcccattccgtcacctactcctcgtcctccaactagcactcctacccgccgccacccaaggcaaaaaagtcgtcctaggcaagaaaggcgacaccgtagaactcacctgcacagcctcccaaaaaaagagcatccaattccactggaaaaactccaaccaaataaaaatcctcggaaaccaaggctcattcctgaccaaaggacccagcaaactcaacgaccgcgccgactcaagacgatccctatgggaccaaggcaacttccccctcatcataaaaaacctcaagatagaagactccgacacctacatctgcgaagtcgaagaccaaaaagaggaagtccaactactagtattcggcctcaccgccaactccgacacccacctactacaaggacaatctctaacactcaccctcgaatccccccccggctcctcaccctcagtccaatgccgatccccccgcggaaaaaacatccaaggtggcaaaaccctctcagtctcccaactcgaactccaagactccggcacatggacctgcaccgtcctgcaaaaccagaaaaaagtcgaattcaaaatcgacattgtagtactcgccttccaaaaagcctcgtcaatcgtctacaaaaaagaaggcgaacaagtcgaattctccttccctctcgcctttacagtcgaaaagctcaccggctccggcgaactctggtggcaagccgaacgcgcctccagctccaaatcctggatcaccttcgacctaaaaaacaaagaagtctcagtaaaacgagtcacacaagacccaaaactccaaatgggcaaaaaactcccactgcacctcactctaccccaagccctcccccaatacgccggctccggcaacctcaccctagccctcgaagccaaaaccggcaaacttcaccaagaagtaaacctagttgtcatgcgcgccacccaactacaaaaaaacctcacatgcgaagtgtggggccccactagcccaaaactcatgctctccctcaagctagagaacaaagaagccaaagtctccaaaagagaaaaggcagtctgggtactaaaccccgaagccggcatgtggcaatgcctactctccgactccggacaagtcctcctagaatccaacattaaagtcctgcccacctggtctacccccgtccagccaatggccctaatcgtactcggtggagtcgccggactcctcctcttcatcggccttggtatcttcttctgcgtcagatgccgccaccgacgtcgccaagccgaacgcatgtctcaaatcaaacggctgctctcagagaaaaaaacctgccaatgcccacaccgcttccaaaaaacctgctccccaatctga

SEQ ID NO: 2242 - RNA, 537 nt, synthetic construct
  misc_feature 1..537: note = P01850
  source 1..537: mol_type = other RNA
atggaagacctcaacaaagtcttcccacccgaagtcgccgtcttcgaaccctccgaagccgaaatctcacacacccaaaaagccaccctagtctgcctagcaacaggcttcttccccgaccacgtcgaactctcatggtgggtcaacggcaaagaagtccactcaggcgtatcaaccgacccccaacccctcaaagaacaacccgcactcaacgactcccgctactgcctctcatcccgcctccgcgtctcagcaacattctggcaaaacccccgcaaccacttccgctgccaagtccaattctacggcctctccgaaaacgacgaatggacacaagaccgcgccaaacccgtcacccaaatcgtctctgccgaagcctggggccgcgccgactgcggcttcacctcagtaagctaccaacaaggcgtactctccgccaccatactatacgaaatcctcctcggcaaagccaccctctacgccgtcctagtctccgccctagtcctcatggcaatggtaaaacgcaaagacttctaa

SEQ ID NO: 2243 - RNA, 624 nt, synthetic construct
  misc_feature 1..624: note = P07766
  source 1..624: mol_type = other RNA
atgcaaagcggaacccactggagggtcctaggcctatgcctcctctccgtcggagtctggggccaagacggaaacgaagaaatgggaggaatcacgcaaacaccctacaaagtaagcataagcggaaccacagtaatactcacatgcccacaataccccggatccgaaatcctatggcaacacaacgacaaaaacataggcggagacgaagacgacaaaaacatcggaagcgacgaagaccacctaagcctaaaagaattctcagaactagaacaaagcggctactacgtctgctacccgcgcggaagcaaacccgaagacgcaaacttctacctgtacctacgcgcgcgcgtatgcgaaaactgcatggaaatggacgtaatgagcgtagccacaatcgtaatcgtagacatctgcataaccggaggcctactactcctcgtatactactggtcaaaaaaccgaaaagccaaagcaaaaccagtaaccaggggcgcaggcgcaggaggacgccaacgcggacaaaacaaagaacgcccacccccagtcccaaacccagactacgaaccaatcagaaaagggcaaagagacctgtactccggcctaaaccaacgcagaatctga

SEQ ID NO: 2244 - RNA, 3915 nt, synthetic construct
  misc_feature 1..3915: note = P08575
  source 1..3915: mol_type = other RNA
atgtacctctggctcaagctactcgcctttggcttcgcctttcttgacaccgaagtctttgtcaccggacaatcacccacgcctagcccaaccggcctcacaacagcaaaaatgcccagcgtccctctcagctctgacccactccccacgcataccacagctttctcaccagccagtacatttgaacgagaaaacgacttctccgaaacgacgacatcactaagccccgacaacacctcgacacaggtatcgcccgactccttggacaacgcgagtgcattcaacacaaccggagtatcttctgtacaaacaccccatctgccaacccacgccgacagccaaacacccagcgcgggcaccgacacacagaccttctccggaagcgctgccaatgcgaaactcaacccgacccccggctctaatgcaatctccgacgtgccgggtgaacgctccacggcctcaacttttcctactgacccagtatccccactgaccacaacactaagcctcgcccaccactcctccgcagcgctcccagcccgcacatctaacaccacgataacggctaacacatccgacgcctacttaaacgcctcggaaactacaaccctctccccctccggctctgccgtcataagcaccacaaccatcgcaactaccccctcgaaaccgacatgcgacgaaaagtacgccaacataaccgtagactacctatacaacaaggaaacgaagctatttaccgccaaactaaacgtcaacgagaacgtcgaatgcggcaacaacacgtgtacaaataacgaagtacacaacctcacagaatgcaaaaacgcctcagtaagtatatcacacaattcatgcaccgcacccgacaaaacactcatcctcgacgtcccacccggcgtcgaaaagtttcaactccatgactgcacacaagtagaaaaagctgacaccacgatctgcctgaaatggaaaaacatagaaacctttacatgcgacacccagaatataacctatcgctttcaatgcggaaatatgatattcgacaataaggaaataaaactcgaaaacctcgaacccgaacacgaatacaaatgtgacagcgagatactctacaacaaccacaagttcaccaatgcctcaaaaatcatcaaaactgacttcggctcgccaggggaaccgcaaatcatcttctgccgctcagaagccgcgcatcaaggtgtcatcacgtggaaccctccacaacggagctttcacaacttcacactctgctatattaaagaaacagaaaaggattgtctgaacctggacaagaacttaatcaaatacgacctccaaaacttaaagccatacacaaagtacgtgctctctctacacgcctacatcatcgccaaagtacagcgaaacggctccgccgcgatgtgccacttcactacgaaaagcgcaccaccatcacaagtatggaacatgacagtcagtatgacctccgacaactccatgcacgtcaaatgccgaccgccgagagaccgcaacgggccccacgaacgctaccacctcgaggtcgaagcgggtaacacgcttgtacgaaacgagtcccacaaaaactgtgacttccgcgtcaaagacctacagtactccacagactacacgttcaaagcatacttccacaacggcgactacccaggcgaaccattcatactacaccattcgacctcatataactcaaaagccttaatagccttcctagcattcctaatcatcgtgaccagcatagcccttctagtcgtcctctataaaatctacgacctgcacaaaaagagatcatgtaacttggatgaacaacaagaattagtcgaaagagacgacgagaaacaactgatgaacgtagagcctatacacgccgacatcctcctcgaaacatataaacgcaagatcgccgacgaaggcagactattcctcgcggagttccaatcaataccgcgcgtattctcgaagttccctatcaaagaagcacgcaaaccattcaaccagaacaaaaaccggtacgtcgatatattaccatacgactataaccgcgtcgaactgtccgaaatcaacggcgacgccggctccaactacataaacgcctcctacatagatggattcaaagagccacgaaagtatatcgcagctcaaggtccaagagacgaaaccgtagacgatttctggcgaatgatctgggaacaaaaggccaccgtaatcgtaatggtcactcggtgcgaagaaggcaaccgtaataaatgcgcggaatactggccctcaatggaagaaggaacaagagccttcggcgatgtcgtcgtcaagatcaaccaacataaaagatgccctgattacataatccaaaaactcaacatcgttaacaagaaagaaaaagcaacaggcagggaggtaactcacatacagttcacaagttggccagaccacggggtaccagaagaccctcatctactcctcaaactgcgccgccgcgtcaacgcattttcaaacttcttctccggcccgatcgtagtacattgcagcgctggcgtcggccgcacaggcacctatatcggcatagacgctatgctggaagggcttgaggccgaaaacaaagtagacgtatacggctacgtcgtcaaattgcgccgccagcggtgtctcatggttcaggtcgaagcgcagtacatcctgattcaccaggccctcgtagagtacaaccaattcggcgagaccgaagtcaacctttccgaactccatccctacctccacaacatgaagaaacgcgatcccccttccgaacctagtcccctcgaggccgagttccagcgcctcccctcctaccgctcctggagaacacaacacataggcaatcaagaagaaaacaaatccaaaaaccgaaattcaaatgtcatcccctacgactacaaccgagtccccctcaaacacgaactagaaatgtcaaaagaatctgaacacgacagcgacgaatccagcgacgacgactcagactctgaagaaccatcaaaatacatcaatgcctcgttcatcatgtcttattggaaacccgaagtcatgatagccgcacaaggcccgctgaaggaaaccatcggtgacttctggcaaatgattttccaacgtaaagtcaaagtcatagtaatgctcacggaactaaaacacggcgaccaagaaatctgcgcccaatactggggagagggcaaacaaacctacggtgacatcgaagtagacctcaaagacaccgacaagtccagcacatacaccctacgcgtcttcgagctcagacattccaaacgaaaagactcccgcaccgtttaccaataccaatacacaaactggtccgtagaacaacttcctgcagagcccaaagaactcatctctatgatccaagtcgtaaaacaaaaactgccccagaaaaactcgtccgagggcaacaaacaccacaaatccacgcccctactgattcattgcagagacggttcccaacaaaccggtatcttctgcgccctcctaaacctcctcgaatcagccgaaaccgaagaagtggtggacatcttccaagtcgtcaaagctctccgcaaggcacgacccggaatggttagcacattcgagcaataccagttcctctacgacgttatagctagcacatacccagcacaaaatggccaggtcaaaaagaacaaccaccaagaggacaaaatagagttcgacaacgaagtagacaaagtgaaacaagacgccaactgcgtcaatcccctcggagcccctgaaaaactcccagaagccaaagaacaggccgaaggctcagaacccacctctggcacggagggacctgagcacagcgtcaacggaccagcatcaccagccctaaaccagggtagctaa

SEQ ID NO: 2245 - RNA, 765 nt, synthetic construct
  misc_feature 1..765: note = P08637
  source 1..765: mol_type = other RNA
atgtggcaactcctactccccaccgccctactcctactagtctccgccggaatgcgaaccgaagacctccccaaagccgtcgtcttcctcgaaccccaatggtaccgagtcctagaaaaagactccgtcaccctcaaatgccaaggcgcctactcccccgaagacaactccacccaatggttccacaacgaatcactcatctcctcccaagcctcctcctacttcatagatgccgccaccgtcgacgactccggcgaataccgttgccaaacaaacctatcaaccctctccgaccccgtacaactagaagtacacatcggctggctcctcctccaagccccccgatgggtcttcaaagaagaagaccccatccacctacgttgccactcctggaaaaacaccgcactccacaaagtcacctacctccaaaatggaaaaggacgcaaatacttccaccacaactccgacttctacatccccaaagccaccctcaaagactccggctcctacttctgccgcggactcttcggatccaaaaacgtctcctccgaaaccgtcaacatcacaataacacaaggcctcgcagtctccaccatctcttccttcttcccccccggataccaagtatcattctgccttgtaatggtcctactcttcgccgtcgacaccggcctctacttctccgtcaaaaccaacatccgctcctctactcgcgactggaaagaccacaaattcaaatggcgaaaagacccccaagacaaatga

SEQ ID NO: 2246 - RNA, 663 nt, synthetic construct
  misc_feature 1..663: note = P10747
  source 1..663: mol_type = other RNA
atgctacgcctcctattagccctaaacctcttcccttccatccaagtcaccggaaacaaaatcctagtcaaacaatcacctatgctcgtcgcctacgacaacgcagtcaacctttcctgtaaatattcctacaacctcttctcccgcgaattccgcgcatcactccacaaaggcctcgactccgcagtcgaagtctgtgtcgtatacggcaactactcccaacaactccaagtatactccaaaacaggcttcaactgcgacggcaaactaggcaacgaatccgtcacattctaccttcaaaacctctacgtaaaccaaacagacatatacttctgcaaaatcgaagtcatgtaccccccaccctacctcgacaacgaaaaatccaacggaacaatcatccacgtcaaaggcaaacacctatgcccctcacccctcttccccggcccatccaaacccttctgggtcctcgtcgtagtcggcggagtcctagcctgctactccctactcgtcaccgtcgccttcataatcttctgggtccgctccaaacgctcacgactcctccactccgactacatgaacatgacaccacgccgccccggccccacacgcaaacactaccaaccctacgcccccccccgcgacttcgccgcctaccgctcctga

SEQ ID NO: 2247 - RNA, 681 nt, synthetic construct
  misc_feature 1..681: note = P11912
  source 1..681: mol_type = other RNA
atgcccggaggccccggcgtactccaagccctccctgcaacaatcttcctcctcttcctcctctccgcagtctacctcggccccggctgccaagccctctggatgcacaaagtccccgcctccctcatggtctcactcggcgaagacgcccacttccaatgcccacacaactcctcaaacaacgccaacgtaacctggtggcgcgtcctccacggaaactacacctggccccccgaattcctcggccccggcgaagaccccaacggaacactcatcatacaaaacgtaaacaaaagccacggaggcatatacgtctgcagagtacaagaaggcaacgaatcataccaacaatcctgcggcacatacctacgagtccgacaaccacccccccgcccattcctcgacatgggcgaaggcaccaaaaaccgcatcataaccgccgaaggcatcatcctcctcttctgcgccgtcgtcccaggcacactcctcctattccgcaaacgctggcaaaacgaaaaacttggactcgacgccggtgacgaatacgaagacgaaaacctatacgaaggcctcaacctcgacgactgctccatgtacgaagacatctcccgcggactccaaggcacctaccaagacgttggctccctaaacatcggcgacgtccaactagaaaaaccctga

SEQ ID NO: 2248 - RNA, 1671 nt, synthetic construct
  misc_feature 1..1671: note = P15391
  source 1..1671: mol_type = other RNA
atgccacccccacggctactcttcttcctgctgttccttacccccatggaagtacgccccgaagaacccctagtcgtaaaagtcgaagaaggcgacaacgctgtcctgcaatgcctaaaagggacaagcgacggacccacacaacaactaacctggtcaagagaatcccctcttaaacccttcctaaaactatctctcggcctcccaggactcggcatccacatgagacccctagccatctggctattcattttcaacgtctcccaacaaatgggcggcttctacctatgccagcccggcccacccagcgaaaaagcgtggcaacccggatggacagtaaacgtcgaaggcagcggcgaactcttcagatggaacgtatcagaccttggcggcctaggctgcggcctcaaaaaccgctcatcagaaggccccagcagccccagcggcaaactcatgtcacccaaactatacgtctgggcaaaagacagacccgaaatatgggaaggggaaccaccgtgcctgccaccccgagactcactaaaccaaagccttagccaagacctaacgatggcacccggatccacactatggctatcctgcggcgttccacccgactcagtaagccgtggacccctctcctggacacacgtccaccccaagggaccaaaatccctactaagcctcgaactgaaagacgaccggcccgcacgcgatatgtgggtcatggaaacgggcctactactcccccgagccacagcacaggacgcaggcaaatactactgtcaccgcggcaacttaaccatgagcttccacctagaaataaccgcacgcccagtactctggcactggctactccgcaccggcggatggaaagtctccgcagttaccctagcatacctaatcttttgcctatgctcgctcgtaggcatcctacacctccaacgcgccctcgtgctcagacggaaacgcaaacgcatgacagaccccacacggagattcttcaaagtaaccccaccacccggctcaggcccccaaaaccaatacggcaatgtcctatccctacctacacctacatcagggctaggccgagcccaaagatgggcagcaggactcggcggcaccgcccccagttacggcaacccctcaagcgacgtccaagccgacggggcactcggctcccgatccccgcccggagtcgggcccgaagaagaggaaggagaaggatacgaagaacccgactcagaagaagatagcgagttctacgaaaacgactccaacctcggacaagaccaactttcccaagatggaagcggctacgaaaaccccgaagacgaacccttaggccccgaagacgaagactcattctccaacgcggaatcatacgaaaacgaagacgaagaactaacacaaccagtcgcacgaaccatggacttcctctcaccacacgggtcagcctgggacccaagccgagaagcaactagcctgggatcccaaagctacgaagacatgcgcggaatactctacgcagcaccccaactccgaagtataagaggacaacccggccccaatcacgaagaagacgccgacagctacgaaaacatggacaacccagatggcccagacccagcctggggcggaggcggccgaatggggacttggtccactagataa

SEQ ID NO: 2249 - RNA, 672 nt, synthetic construct
  misc_feature 1..672: note = P16410
  source 1..672: mol_type = other RNA
atggcctgtctcggcttccaacgccacaaagcccaacttaacctagcaactcgcacctggccctgcaccctcctcttcttcctactattcatccccgtcttctgcaaagccatgcacgtcgcacaacccgcagtcgtcctcgcctcctcacgtggcatagcatccttcgtctgcgaatacgcctcccccggcaaagcaacagaagtccgagtcaccgtcctccgccaagccgactcccaagtcacagaagtctgcgccgcaacatacatgatgggcaacgaactaacattcctcgacgactccatctgcacaggcacctcctccggcaaccaagtcaacctcacaatccaaggcctccgcgccatggacactggcctatacatatgcaaagtcgaactcatgtacccacctccctactacctcggcataggaaacggcacccaaatctacgtaatagaccccgaaccctgccccgactcagacttcctcctctggatcctcgcagccgtctcatccggcctcttcttctactctttcctcctcaccgccgtctcactctccaaaatgctcaaaaaacgctcacccctcacaaccggagtctatgtcaaaatgccccccaccgaacccgaatgcgaaaaacaattccaaccatacttcatccccatcaactga

SEQ ID NO: 2250 - RNA, 1419 nt, synthetic construct
  misc_feature 1..1419: note = P16671
  source 1..1419: mol_type = other RNA
atgggctgcgaccgaaactgtggtctaatcgccggcgccgtcatcggcgccgtcctcgcagtatttggcggcatcctcatgcccgtaggcgacttactcatacagaaaaccatcaagaaacaagtcgtcctagaagaaggcaccatagcattcaaaaactgggtcaaaacgggcaccgaagtctaccgccaattctggatcttcgacgtccaaaacccccaagaagtcatgatgaactcctccaacatacaagtcaaacagagaggaccgtacacatatcgcgtccgcttccttgccaaagaaaacgtcacccaagacgctgaagacaacaccgtctccttcctccaaccaaacggcgcaatattcgaaccctcactctccgtcggcaccgaggccgacaacttcactgtactcaacctggccgttgccgcagcctcccacatataccaaaaccaattcgtacaaatgatcctaaactcactcatcaacaagagcaaatcgtccatgtttcaagtacgcacactccgcgaactcctctgggggtaccgcgatcccttcctcagcctcgtcccctacccagtcaccaccacagtcggcctcttctacccttacaacaacaccgccgacggagtctataaagtctttaacggcaaagacaacatctcaaaagtcgccatcatcgacacctacaaaggaaaacgcaacctctcctactgggaatcacactgcgacatgatcaacggcaccgacgccgcgtccttcccgcccttcgtggaaaagtcacaagtgcttcaattcttctcatccgacatctgccgctccatctacgcagtcttcgaaagcgacgtcaacctcaagggcatccccgtctaccgcttcgtactcccctcaaaagccttcgcctcacccgtcgaaaacccagacaactactgcttctgcaccgagaaaataatcagtaaaaactgcacatcctacggcgtactcgacatatccaaatgcaaagaaggacgccccgtctacataagcctcccccacttcctctacgcatcaccggacgtctccgaacccatagacggcctgaaccctaacgaagaagaacaccgaacctatctcgacatagaacctatcaccggcttcaccctacaattcgccaaacgcctccaagttaacctactcgtcaaaccatccgaaaagatacaagtactcaaaaacctaaagcgaaattacatcgtcccaatcctttggctcaacgaaaccggaaccatcggcgacgaaaaagcaaacatgttccgaagccaggtcaccggtaaaataaacctactaggcctcatagaaatgattctcctctccgtaggcgtcgttatgttcgtcgcctttatgatatcatactgcgcctgccgctccaaaacaatcaaatga

SEQ ID NO: 2251 - RNA, 651 nt, synthetic construct
  misc_feature 1..651: note = P26718
  source 1..651: mol_type = other RNA
atgggctggatccgcggccgcagaagccgacactcctgggaaatgtcagaattccacaactacaacctcgacctaaaaaaatccgacttctccacccgatggcaaaaacaacgatgcccagtcgtaaaatcaaaatgccgcgaaaacgcaagtcccttcttcttctgctgcttcatagccgtagcaatgggcatccgattcatcatcatggtcgccatctggagcgcagtcttcctcaacagcctcttcaaccaagaagtccaaatcccattaacagaatcatactgcggcccctgccccaaaaactggatctgctacaaaaacaactgctaccaattcttcgacgaatccaaaaactggtacgaatcccaagcctcctgcatgagccaaaacgcctccctgctcaaagtctactccaaggaagaccaagacctcctaaaactcgtcaaaagctaccactggatgggactcgtacacatccccacaaacggcagctggcaatgggaagacggctcaatcctcagccccaacctgctcacaatcatcgaaatgcaaaaaggagactgcgccctctacgcctcctccttcaaaggctacatagaaaactgctccaccccaaacacatacatctgcatgcaaagaaccgtctaa

SEQ ID NO: 2252 - RNA, 261 nt, synthetic construct
  misc_feature 1..261: note = P30273
  source 1..261: mol_type = other RNA
atgatccccgccgtcgtcctcctcctcctactcctagtcgaacaagccgccgccctaggagaaccccaactctgctacatcctagacgccatcctcttcctatacggcatcgtcctcaccctcctatactgccgcctaaaaatccaagtccgcaaagccgccatcacctcctacgaaaaatcagacggcgtctacaccggcctctccacccgcaaccaagaaacctacgaaaccctcaaacacgaaaaaccaccccaatag

SEQ ID NO: 2253 - RNA, 1137 nt, synthetic construct
  misc_feature 1..1137: note = P32248
  source 1..1137: mol_type = other RNA
atggacctcggcaaacccatgaaatccgtcctagtcgtcgccctcctagtcatcttccaagtctgcctctgccaagacgaagtcacagacgactacatcggcgataacactaccgtcgactacaccctattcgaatccctctgctccaaaaaagacgtacgcaacttcaaagcatggttcctcccaataatgtactccataatctgcttcgtcggcctcctaggaaacggcctcgtcgtcctaacttacatctacttcaaacgcctcaaaaccatgaccgacacgtatctactcaacctcgcagtagccgacatactcttcctcctaaccctccccttctgggcctactcagctgccaaatcttgggtcttcggagtacacttctgcaaactcatattcgccatctacaaaatgtccttcttctcaggcatgcttctccttttatgcatctcaatagaccgctacgtagccattgtccaagccgtctccgcccatcgccaccgcgcccgtgtcctcctcatctccaaactatcatgcgtcggaatatggatcctcgctactgtcctctccatccccgagctactctactcagacctccaacgctcctccagcgaacaagccatgagatgctccctcatcactgagcacgtcgaagccttcatcacaattcaagtagcccaaatggtcatcggattcctcgtcccacttctcgccatgtccttctgctacctcgtcatcatccgtaccctacttcaagcccgaaacttcgaacgcaataaagccatcaaagttataatagccgtcgtcgtcgtattcatcgtcttccaattaccctacaacggcgtcgtcctcgctcaaacagtcgcaaacttcaacatcacctcctccacctgcgaactctccaaacaactcaacatcgcctacgacgttacctactccctagcctgcgtccgttgctgcgtcaaccccttcctctacgcctttatcggcgtcaaattccgcaacgacctattcaaactcttcaaagacctcggctgcctttcccaggaacagctccgacaatggtcctcctgtcgacacatacgccgctcctccatgtccgtagaggccgaaaccaccaccacattttctccctga

SEQ ID NO: 2254 - RNA, 690 nt, synthetic construct
  misc_feature 1..690: note = P40259
  source 1..690: mol_type = other RNA
atggcccgcctagccctctcccccgtcccctcacactggatggtcgccctcctactcctcctctcagcagaacccgtccccgccgccagatccgaagaccgctaccgcaacccaaaaggaagcgcctgctcacgcatatggcaaagcccccgcttcatcgcccgcaaacgcggcttcacagtcaaaatgcactgctacatgaactccgcctccggcaacgtctcctggctatggaaacaagaaatggacgaaaacccccaacaactcaaactcgaaaaaggccgcatggaagaatcccaaaacgaaagcctagccaccctcaccatccaaggcatcagatttgaagacaacgggatctacttctgccaacaaaaatgcaacaacacctccgaagtataccaaggctgcggcaccgaactccgcgtcatgggattctccaccctcgcccaactcaaacaacgcaacaccctcaaagacggcatcatcatgatacaaacactcctaataatcctcttcatcatcgtccccatcttcctcctactcgacaaagacgactccaaagccggcatggaagaagaccacacctacgaaggcctcgacatcgaccaaaccgccacctacgaagacatcgtcacactacgcaccggagaagtaaaatggtccgtcggagaacaccccggacaagaatga

SEQ ID NO: 2255 - RNA, 990 nt, synthetic construct
  misc_feature 1..990: note = P42081
  source 1..990: mol_type = other RNA
atggacccccaatgtaccatgggccttagcaacatcctatttgtcatggccttcctcctctcaggcgcagcacccctcaaaatccaagcctacttcaacgaaaccgcagacctaccctgccaattcgcaaactcacaaaaccaatccctatccgaactagtcgtcttctggcaagaccaagaaaacctagtcctcaacgaagtctacctgggcaaagaaaaattcgactccgtccactccaaatacatgggccgaacctcattcgactccgactcctggacactccgcctccacaacctccaaatcaaagacaaaggcttgtaccaatgcataatccaccacaaaaaacccaccggtatgatccgcatacaccagatgaactcagaactctccgttctcgccaacttctcccaacccgaaattgtcccaatatcaaacataaccgaaaacgtctacatcaaccttacctgcagctctatccacggataccccgaacccaaaaaaatgtccgtactcctccgcaccaaaaactccaccatcgaatacgacggcgttatgcaaaaatcccaagacaacgtcaccgaactctacgacgtctccatctccttatccgtctccttccccgacgtcacctccaacatgacaatcttctgcatcctcgaaaccgacaaaacccgcctcctatcatcccccttctcaatcgaactcgaagacccacaacccccccccgaccacatcccctggataaccgccgtcctccccactgtcatcatctgcgtaatggtcttctgcctcatcctatggaaatggaaaaaaaaaaaacgcccccgcaactcatacaaatgcggcaccaacacaatggagcgcgaagaatccgagcaaaccaaaaaacgagaaaaaatccacatccccgaacgctccgacgaggcccaacgcgtcttcaaatcatccaaaaccagctcatgcgataaatccgacacctgcttctga

SEQ ID NO: 2256 - RNA, 1011 nt, synthetic construct
  misc_feature 1..1011: note = Q15762
  source 1..1011: mol_type = other RNA
atggactaccccaccctcctcctagccctcctacacgtctaccgcgccctctgcgaagaagtcctctggcacacctctgtcccattcgccgaaaacatgtccctggaatgcgtctacccttccatgggcatcctcacccaagtagaatggttcaaaatcggaacccaacaagactccatagccatcttctccccaacccacggcatggtcattcgcaaaccctacgctgaacgcgtttacttcctaaacagcaccatggcctccaacaacatgactctattcttccgcaacgcctccgaagacgacgtaggatactactcatgctccctatacacctacccccaaggcacctggcaaaaagtcatacaagtcgtccaatctgacagcttcgaagcagccgtcccctccaactcccacatagtatcggaacccggaaaaaacgtcaccctcacctgccaaccccaaatgacatggcccgtccaagcagtccgatgggaaaaaatacagccccgccaaatcgacctcctcacttactgcaacctcgtacacggccgcaacttcacctccaaattcccacgccaaatcgtctcaaactgctcccacggtcgctggtccgtcatagtaatacccgacgtcaccgtctcagactccggactctaccgctgctacctccaagcctccgcaggcgaaaacgaaaccttcgtcatgcgcctcaccgtcgccgaaggaaaaacagacaaccaatatacactcttcgtagccggcggcacagtcctcctcctactcttcgtaatctctatcacaaccatcatcgtaatcttcctcaaccgccgccgccgccgcgaacggcgagatctattcacagaatcatgggacactcaaaaagcacccaacaactaccgctcaccaatcagcacttcccagcccacaaaccaatccatggacgacacccgcgaagacatatacgtcaattaccccaccttctccagacgaccgaaaactcgcgtctga

SEQ ID NO: 2257 - RNA, 13482 nt, synthetic construct
  misc_feature 1..13482: note = Q685J3
  source 1..13482: mol_type = other RNA
atgcctcgcccgggcaccatggcgctatgcttactcaccctggttctctctctgctaccaccccaagctgcggctgaacaagacctttccgtaaatagagccgtgtgggacgggggaggatgcatatcgcagggcgatgttttgaaccgacagtgccagcaactgagtcaacatgtgcgtacaggttccgctgccaacactgcaaccggaaccacttccacgaacgtagttgaaccgagaatgtatctgtcatgcagcaccaaccccgaaatgacttcgatagaatcctccgtgacctccgacactcccggggtctcttcgactaggatgacccctactgaatcccgtaccacctctgaatcgacctcagactctaccacgcttttcccctcctccaccgaagacacctcgtcccccaccacccctgaagggaccgacgtccccatgagcaccccctcagaagaatccatctcttccaccatggccttcgtttccacagcccctcttccgagttttgaagcctacacatcccttacttacaaggtggatatgtccactcccctaactacctcgactcaagcatcctcaagccccactacacccgaatctactaccataccgaagtctaccaactcagaaggatccacgcccctgacctcgatgcccgcatccaccatgaaagtagcatcatctgaagcgattacgcttctcaccacccccgtcgaaatcagcactcctgtaaccatctcagctcaggcatcatcgtcccccactaccgcagaaggacccagcctgtccaactccgcgccaagtggaggctctacccctctgacaaggatgcctctatccgtaatgctcgttgtatccagcgaagcgtccacactgtcgaccactcccgcggctacaaatattccagtaatcaccagcaccgaggcttcctcctcacctaccacagcagaaggaacttcaatccctacctcaacctacacggaaggttccacgccactaacctcaacaccggcttctaccatgcctgtagcaacctctgaaatgtccaccctctcaatcacacctgtagacacctccaccctcgtaacaacatcgactgaacccagcagtctgcctaccacggctgaagcgacctccatgttaaccagtacactctcggaaggctcaacacccctgaccaatatgccagtatctaccatcctggtcgcatcatctgaagcatccacaacttccactataccagtcgactcaaagacctttgtaactacggcctccgaagcctctagcagccccaccactgccgaagacacctctattgccacgtccacaccctccgaaggatcaacaccacttacatctatgccagtctccaccacgcctgtcgcctcctctgaagccagtaatctctctactacccccgtagattccaaaacacaagtaaccacgtcaacagaagcgtcgagctcaccgcctactgctgaggtaaactctatgccgacctctacacctagtgaaggaagcactcccctcacctcaatgagtgtaagcactatgcccgttgcctcctccgaagcgtctaccttatcaacaacaccagtcgacacgtcgacccctgtaaccacctcgagcgaagcctcctcttcgtccacgacacccgaggggacatcaatccccacttcaacaccatctgaaggatcgacacccttgacgaacatgcccgtgtccacaaggctagtagtatcaagtgaggcttcaactacctccactacgccagccgacagtaataccttcgtgactaccagctcagaagcgtccagttcatcaactactgcagaagggacctcaatgccaaccagtacttactctgaacggggtacaactatcacaagtatgagcgtcagtacaacgttagtcgcgtcgagcgaagcatccaccttgtcgaccacacccgttgattcaaacaccccagtaacaacctccacagaagcgacttcctcatctactactgcagagggaactagcatgcccacctctacctacaccgaaggcagcacccctctcacttccatgcccgtaaatacaactttagtcgcctcatcagaggcttcaaccttatcaacaactccagtggacacgagcactcccgttacaacttccactgaggcctcgtcctccccaactaccgctgacggcgcctctatgccaacgtctaccccatcagaaggatcaacccctctaacatctatgccagtatcaaagaccctcctaacaagttctgaggcttccacactatccacaacacccctggatacatctacgcatatcacaacttcgaccgaagcaagctgctcacccacaaccactgaaggaaccagcatgcccatctcaaccccatctgaaggctcgccgctactaacctcaattcctgtatcgattacccccgtgacgagcccagaggcatcgaccctgtctactaccccggtcgactcaaactccccagtgaccacctcgacggaagttagctcgtcccctactcccgctgaaggaacctcaatgcctacatcgacatactcggaaggtcggacccctctcacgagcatgccagtctccactacccttgtcgccacctcggcgatctctacactgtcaacaacacccgtcgatacctccacacctgtaaccaattcaacagaggcgcgatcgtctcccacgacttccgaaggcacaagtatgcctacatctaccccaggcgaagggagtacaccactaacatccatgccagatagcaccacgcccgtcgtatcctccgaagcccgcaccctctcagccacgcccgttgacacctccacccccgttaccacctccaccgaagccacatcgtcccccactacagccgaaggtacttccatccccactagcacaccttcggaaggaaccactcccctcacttcaactcccgttagtcatactctagtggcaaactcagaagcatcaacactctcgaccaccccagttgactcgaacactcccttgaccacaagtaccgaagcctctagtcctccacccaccgccgaaggaacttccatgcccacatcaacgcccagcgaaggaagcacaccactaacccgcatgccagtctcaaccacaatggtcgcttcctctgaaacgtcaacactatcaactactcctgcagatacgtccacacccgttaccacttatagccaggcatcctcttcttcaaccactgccgacggcacctccatgcctacttcaacatattcggaaggcagtacacctcttacctccgtacccgtttctactagattggtcgtcagctccgaggcatccacgctaagcactactccagttgacacctccatcccggtgactacaagcaccgaagccagctcatcacctactacagcggagggaacctccattcccactagcccaccctctgaaggaacaacaccgctagcatctatgcctgtctcaacaacccttgttgtaagctcagaagcaaacacactttcgaccacaccggtcgattctaaaactcaagttgcgacgtcaacagaagcgtcatcgccacccccaaccgcagaggtgacctccatgccaacctccacccccggggaacgctccactccattgacgagcatgcccgtcagacacacacctgtagcgtcgtcagaggcgtccacgctgtctacatctcctgtcgacacctcaacacctgttaccacttccgccgaaacctcctcgtctcccactacggccgaaggcacctctctcccaacctctacgacttccgagggatcgacccttctgacctcgatcccggtctcaacaacactcgtcacctccccagaagcatccaccttactcacaacaccagtggacacgaaaggtcccgtggtcacttcaaacgaagtttccagctcccccactcccgccgagggcacttctatgccaacatccacctattccgaaggtcgtaccccgttaacctcaatcccggtcaatactacacttgtagcaagtagcgccatcagcatcttaagcacgacaccagttgataattcgaccccagtaactacgtcaacagaagcctgttcttcccctaccactagcgaaggtacttcaatgcccaacagcaatccgtcggaaggcaccacgcctctgacctccatccctgtctccacgactccggttgtaagctctgaagcgtccaccctttcagccactccagtcgatacttcgacccccgggacaacctcggcagaggcgacaagttctcctacaaccgccgaaggcatttcaatccctacgtcaaccccctctgaaggcaagactccactcaaatccatccctgtctcaaatacccctgtagctaactcagaagcgtccacgctctcaactacccccgtggatagcaactcgcctgtagttacgtcgacggctgtttcatcatccccgactcccgccgaaggcacatctatagcaatttcaacgccgtctgaaggtagcaccgcacttacttctatacccgtttccacgacaacagtggctagtagcgaaataaactccctatccacaacacccgcggttacctctactccagtgaccacctactcacaagcatccagttccccgacaacagctgacggaacctccatgcaaacttccacatattcggaaggttccacacccctgacctccctcccggtatccacaatgcttgtagtttcaagcgaggccaatactctgtcaactactcccattgacagtaagactcaagtcaccgcttccaccgaagcatcctccagtaccacagctgaaggatcatccatgaccatcagcacgccttcagaaggttcaccacttcttactagcataccggtatccaccactcccgtggcttcgcccgaggcttcaaccctaagtacaactcctgttgatagtaactcaccggtcataacctcaacagaggtttcctcctctcccacaccggccgagggtacgagcatgccgacatctacctacacagaggggaggacaccactgaccagcatcactgttcgaactactcccgttgcctcctctgctatctcgaccttatccactacgcctgtagacaactcgactccggttaccacctctacggaagccagatcatcccctaccacgtcagagggtacttcaatgccaaatagtacaccctcagaggggacgacgcccctcacctcaattccagtctcgacaacccccgttctgagttctgaggcttcgaccctttcggccaccccaatagacacatcaacaccagtcacaaccagcactgaagcaacctcatcacctaccaccgccgaaggcacttctatacccacgagcacactatctgaaggaatgacacccctaacatccaccccagtctctcacacactggtagcgaactcagaggcttccactctctcaacaaccccagtagacagcaactccccagtcgtaacaagtaccgccgtctcatcaagtcccacccctgccgagggcacgtcaatcgccacctctacccctagtgaagggtccaccgctctaacgtcaatccctgtatcaactactacagtcgcctcttctgaaactaacactctctccactacgccagccgtgacatcaactcccgttacgacctatgcacaagtctcatcttcccccaccaccgctgatggtagcagtatgcccacaagtacgccgagggaaggtcggccccctcttacctcaatccccgtatcaactaccaccgtcgcctcaagtgagatcaataccctaagcactaccctggctgacacccggacccccgtaacgacctactcacaagcaagttcaagtcccacgaccgctgatggcacaagcatgcccactcctgcatacagcgaagggtctacgccacttacgagcatgcccctctctaccactcttgtcgtcagcagtgaggcttcaactctatcgaccaccccagttgatacatccactccagccaccacctctactgaaggctcgtcaagtccgactaccgccggcggcactagcatccaaacgtccacgccctccgaacgaaccacaccactagcgggcatgccagtctctacgacccttgttgtatcgagcgagggaaatacactttccactacgcctgtagattcaaaaacccaggtcacaaacagcacagaggcatcgagctctgctaccgcagaaggctcctcaatgacaatctctgccccatccgaaggcagcccccttctaacttcaataccgctatccactaccccggtagcatctcctgaggcttccacactttccacaacaccagtagactccaactcaccagtcataacatcaacagaagtttcctcctcccctatcccgacagaagggacttccatgcagacctccacatactctgatcgtcgaactccactaacaagtatgcctgtctccacaacagtcgtagcttcctccgcaatctctacgctctcaactaccccagtggatacctcaaccccagtaacaaattcaactgaagcccgctcatcacctaccacttcagaaggtacatccatgcccaccagtaccccctccgagggatccaccccgttcacaagcatgccggtatctaccatgcccgtcgtcacttcagaggcctccaccctatcagcaaccccagttgacacctccacacccgtaaccacctcgactgaagcgacatcctcaccaacgaccgccgaaggtacctccatccccacatcaactctctcagaaggaaccacaccccttacctctatcccagtctcccacaccttagtagcaaactcagaggtctccactctttcaacaaccccagtggactctaacactccctttacgacgtccactgaggcttcttcacctccaccgaccgcggaaggtacctcaatgcctacaagtacttcttctgaaggcaatactcctctaaccagaatgcccgtctcaaccaccatggtagcgtcattcgagacttcaaccctatcaacgactccagcggacaccagcacacccgtaaccacatactcccaagccggttcttcacccaccacagcagatgatacgtctatgccaacttcgacctactctgaaggctcgacacccctcacctcagtccctgtctctaccatgcctgtcgtttcatcagaggcttcgacccattctacaaccccagtcgatacaagcactcctgtaactacttccaccgaagcctcctcttctccgaccactgcagaaggcacgtccattccaacatctccaccgtcggaaggaaccacaccgcttgcttccatgcccgtctcgaccactcccgtggtctcctccgaggctgggaccttatccaccacgcccgtagacacctctaccccgatgaccacctcaactgaggcatccagttcccctaccaccgcggaagacatcgttgtgcccatctcgaccgcctcagaaggtagcacactactcacctcgattccagtgtccacgacgcctgttgcaagccccgaagccagtacgctatcaaccacccctgtggatagcaactccccggttgtcacctcaacggagataagttcatccgccacctcggccgagggtacctcgatgcctacttccacgtattcggagggctccacccctctacggtctatgccagtctctacaaaacccctagcctctagcgaagcctcgaccctatctacaacaccagttgacacctccatacctgtcaccacgtcaaccgaaacttcttcctctcccaccacggcaaaagacacctcaatgcctatctcaaccccttctgaagtttccacctcgctcacgtccattctggtatctacaatgcccgttgccagctctgaagcctccactctatcgacaaccccagtagatacccggactctggtcacaacatctaccggcacctcctctagtcctacaaccgctgaaggctcctcaatgccaacgtccaccccaggagagcgctcaacacccctaacgaacattctagtatctactacattattggccaactccgaggcttcgactctctcgacgacgcccgttgacacatccacaccagtcaccacatccgccgaagcctctagctccccgaccaccgcagaaggtacatctatgcgaatttctaccccctcggacggatcaactcctctcacaagtattttagtctcgactttgccagttgcatcatctgaagcctctaccgtctccacaactgccgtcgatacatcgatcccagtcaccacatcaacagaagcgtcctcttctccgacgaccgcagaagtcacatcgatgcctacgagtactccgagtgaaacatccactccactaacgtcaatgcccgtaaaccacacaccagtagcctcgtccgaagccggtacgctgtcaacaacacctgttgatacttccaccccggtaacaacttcaacgaaagcatcctcatcgcccacgacggcagagggtattgttgttcccatctctaccgcctcggaaggctcgacgttacttacctctattcccgttagtactacccccgtagcatcttctgaggcatctacactatctaccaccccggttgacacttctatccccgttacaacttctaccgaaggaagttcatccccaactaccgccgaaggcacttctatgccaatttcaacccctagcgaagtttccacacctctgacatcaattctagtgtctacggtccctgtggcaggtagtgaagcctccacgctcagcacaaccccagtagacactcggacccctgtaactacctcagccgaagcatcatcaagtcccaccaccgccgaaggcactagcatgccaatctctacccccggcgaaaggaggacacccttaacctcaatgtcagtgtcaaccatgcctgttgcctccagcgaagcaagtacactatcacgaaccccagccgatacgtcaacaccagtaactacctccacagaagcgtcctccagtcctaccactgcagagggtacaggcatccccataagcacgccaagtgaaggctccacaccactgacatcaataccagttagcacaacccccgtagcaatccctgaagcatcaacactctcgaccacccccgttgacagcaattccccagtcgtcacctctaccgaggtctcatcgtcacccacacccgcggagggtacatccatgcccatcagtacctatagcgagggttctacgccactgaccggcgtacccgtctctacaacaccggtaacaagcagcgctatttccaccctttccaccactcccgtagacacctctaccccggtcacaacatcaacggaggcccattcatctcctactacctctgaaggcacctctatgccaacatctactccctctgaaggctcaacacctctcacttacatgccggtctcgaccatgctcgtggtgtcgtctgaggattctaccctatctgccacaccggtcgatacttcgactcccgtgacaacaagcaccgaggcaacctcatccactaccgccgaaggcacgtccattccgacctcaacaccatccgagggcatgaccccgctgacttccgtacccgtttcgaacacaccagttgcttcctcagaagcgtcaattctgtccacaaccccagttgatagcaacacccctctcacgacctcaactgaagctagctcctcaccacctacagcagagggaacatcgatgcccacatcaactccatccgaggggtcgacacctcttacttccatgcccgtgtcgaccacaacagtggcctctagcgaaacatccacactctccacaactccggcggacacatctacacccgtaacgacgtacagtcaagcatcgtcatcgccacccatagcagatgggacatccatgccaacttccacatactcagaaggttccactcctctgacaaatatgtctttttcgacaactcccgtggtctcctcggaagcatcaaccctatcgaccaccccagtagacacatcgacgcccgtaaccacctctacagaggcctcactgtcgccaacgacagccgagggtacttctatcccgacttcaagcccttccgaaggaacgacgcccttggcgtccatgcctgtctctacaacgcctgtggtgtcgtcagaagtaaacactctttctaccacccccgtagactctaatacacttgtgacgacttctacggaagcctccagttcccccacgatcgcagaagggaccagcttacccaccagtaccacctcggaggggtccacaccactgtcgatcatgccgctatcaaccacaccagttgctagctcggaggcatccacgctatcaacaaccccagttgatacatccactcccgtgaccacctcatcccccacaaactcttcccctactacagcagaggtgacgtccatgcccacaagcacagcgggagagggctccacacccctaacgaatatgccagtaagtaccacgcccgttgccagctcggaagcgtccactttatcaacaaccccggtcgacagcaacacttttgttacatcatcctcacaggcatcctcctccccagccacattacaagttaccacgatgcgaatgagcacgccgtccgaaggcagctcgagccttactacgatgctactatcgagcacgtatgtcacaagctcggaggcttccacccccagtaccccatctgtagaccgatctactcctgtgacaacctcaacccaatccaactctactccaacaccaccggaggttattactctacccatgtccacgccctcagaagtcagcacccctctgaccataatgccagtatccacgacaagcgttacaattagtgaagctgggacagcctccaccctccctgttgacactagcactccagtaataacaagtacacaagtatcaagtagccctgtaactcccgaaggcaccacgatgcccatatggacgccttcagaaggttcaacccctcttacaacaatgcccgtatccactacacgggtcacatcaagcgaggggtccacactgtcaacaccatcggtcgtaacctcgactccagtcacgacctctacagaagccatatctagttccgctacccttgacagcaccacaatgagtgtctctatgccaatggagatatctactctcggcaccaccatactggtctccacaaccccagttactcgcttcccggagagctccacaccatccataccttccgtatatacgagcatgtctatgacaacagcctcagaaggttcctcttccccgacgaccctagaaggaacaaccaccatgcccatgagtactacatccgaaagaagcaccctcctaacaacggtcctaatctctccaatatccgtcatgtcaccaagcgaggccagcacattatcaaccccacctggtgatacctccacgccgcttctcacctcaacaaaagccgggtcattttccatccccgctgaagtcactacgatccggatttctataacgagtgagcgcagcactcccctcacgaccctccttgtcagcaccacacttccaacatcttttccaggtgcgagcatagcatcaacccctccccttgatacatccacaactttcactccttcgacagacacagcatccacccctactatccccgtagccaccacgatctccgtgagcgttatcaccgaagggtcgacaccaggaacgacgatcttcattccatcaacgccagtcacttcctctacggccgacgtgttccccgcaaccacaggagcagtctcaacaccagtcataacatctaccgaactcaacacgccgtcaacttcctcatcttccacaactacgtcattctcaactacaaaagagtttaccacaccagctatgactacagcagccccgctaacttacgtcactatgtctactgccccatcaactcctagaacgacctcccgtggctgcactacgtcggctagtactttatccgccacatcaactccccataccagcactagcgttacaaccagacccgttacaccttcgagtgaatctagccgcccttctacgataacctcacatacgatcccacctacgtttccgccagctcactcgtccacgcccccaaccacaagcgcctccagtaccactgttaacccagaggccgttaccactatgacaacacgcacgaagccctccacccgcacaaccagcttccctactgtaaccaccactgctgtccccaccaatactacaatcaagtccaatcccacgtcaacgcccaccgtaccccgcacgaccacgtgctttggtgacggttgccagaacaccgcctcaagatgtaagaacggcggcacttgggacggcctaaaatgtcaatgccctaacttatattatggcgaattgtgcgaagaagtcgtaagttccattgatataggtcccccggaaacgatctcagcccaaatggagctgactgtcaccgtgacttccgttaagtttacagaggaactcaagaaccattccagccaagagttccaagagttcaaacaaacctttaccgaacagatgaatatagtatattctggcataccagagtacgtgggagtgaacattacaaaactacgcctaggatctgttgtagtcgagcacgatgttctcctccgcacgaaatacacccccgaatataaaaccgtcctagacaatgccacagaggtagtgaaggagaaaatcactaaagtcaccacacagcaaatcatgattaatgacatctgcagtgatatgatgtgcttcaacacaacagggacacaagtccaaaatatcacagttactcaatatgatccagaagaagactgccgcaaaatggcaaaagaatacggcgattacttcgtagtagagtatcgggaccaaaaaccctactgtataagcccctgcgaaccgggattttcggtgtccaaaaattgcaatctgggtaaatgccaaatgtcactctccggccctcagtgcctatgcgtcacgaccgaaacccactggtactcaggggaaacgtgtaatcagggtacacagaaaagcctggtctacggcctcgttggggctggcgtagtgctaatgctcatcatcttagtcgccctcctcatgctggtcttccgtagcaaacgggaggttaaacgacaaaaataccgactttcgcaattatataagtggcaggaagaagactcaggaccagcccccggaaccttccagaatatcggtttcgatatttgccaagacgacgactccatacacctcgaatctatttattcaaatttccaaccttcccttcgtcatatagatccggaaaccaagatccgaatacaacgtcctcaggtgatgactacttccttttga

SEQ ID NO: 2258 - RNA, 1215 nt, synthetic construct
  misc_feature 1..1215: note = Q9NNX6
  source 1..1215: mol_type = other RNA
atgtcggactcaaaagaaccccgcctccaacaactcggactactcgaagaagaacaacttcgaggcctcggattccgccaaacacgtggctacaaatccctcgccggatgcctcggccacggacccctcgtactacaactcctctccttcacactcctcgccgggctactcgtccaagtctccaaagttccctcgagcatcagccaagaacaatcccggcaagacgcaatataccaaaacctaacccagttaaaagcagccgtcggcgaactgagcgagaaaagcaaactacaagaaatataccaagaactcacacagctcaaagccgcggtcggcgaactccccgaaaaatccaaactccaagaaatctaccaagaactcacacgcctaaaagccgccgtaggcgaactccccgaaaaatccaaactccaagaaatataccaagaactcacctggctcaaagccgcagtaggcgaactccccgaaaaatccaagatgcaagaaatctaccaagaactcacacgactgaaagccgcagtaggcgaactacctgaaaaatcaaaacagcaagaaatctaccaagaactaacccgcctaaaagccgcggtaggcgaactacccgaaaaatcaaaacagcaagaaatctaccaagaactaacccgactaaaagccgccgtaggagaactccccgaaaaatccaaacaacaagaaatctaccaagaactcacacaactaaaagcagcagtggaaagactctgccacccctgcccctgggaatggaccttcttccaaggcaactgctacttcatgagcaacagccaaagaaactggcacgactcaataaccgcatgcaaagaagtcggcgcccaactcgtagtcataaaatcagcagaagaacaaaacttcctacagctccaatccagcagaagcaaccgcttcacatggatgggcctctccgacctcaaccaagaaggcacatggcaatgggtcgacggctccccactcctcccctcattcaaacaatactggaacagaggcgaaccgaacaacgtcggcgaagaagactgcgccgagttcagcggcaacggctggaacgacgacaaatgcaacctcgccaaattctggatatgcaagaaatccgccgcctcctgctcccgcgacgaagaacaattcctctcaccagcccccgcaacccccaacccaccacccgcctga

SEQ ID NO: 2259 - RNA, 3126 nt, synthetic construct
  misc_feature 1..3126: note = Q9NR97
  source 1..3126: mol_type = other RNA
atggaaaatatgttcctccaatcttccatgctaacatgtatcttcctactcatctccggctcctgcgaactctgcgccgaggagaacttctcccgctcgtacccctgcgacgaaaagaaacagaacgacagcgtcatcgcggagtgttccaaccgccgcttacaagaagtaccccagacagtcgggaaatacgtcacagaactcgacctgtccgacaatttcataacccacatcaccaacgagagcttccaaggcctgcaaaatctcaccaaaatcaacttaaaccacaaccccaacgtacagcaccaaaacggcaaccccggtatccagtccaacgggttaaacataacagacggcgcattcctaaacctcaaaaacctccgtgaactcctcctagaagataatcaactcccacaaatcccgtccggtctgcccgagtcacttaccgagctgtccctcatccagaacaacatatacaatataaccaaagagggaatctcccgccttattaacctcaaaaatctgtatctcgcgtggaactgctacttcaacaaagtatgcgagaaaaccaacatcgaagacggagttttcgaaactctaaccaacctggaactgctctctctatcctttaactctctgtcccacgtacctcctaagctaccttctagcctccgcaaactcttcttatcaaacactcaaatcaaatacatatccgaagaggactttaaaggcctcatcaatttaaccctcctagacctttccggcaactgcccgcgttgcttcaacgcccccttcccatgcgtaccctgcgacggtggagcctcgataaacatagaccgattcgccttccaaaacctgactcagctccgatacctaaacctctctagcacctctttacgcaagataaatgctgcctggttcaaaaacatgccccacctcaaagtcctcgatctggaatttaactacctagtcggcgagatcgcctcaggagcctttctcaccatgctcccgcgcttagaaatactcgacctctcttttaactatatcaaaggctcttacccccagcacataaacatatcccggaacttctccaaactactgtcactccgcgcccttcacctccgcggctatgtcttccaggaactacgcgaagatgacttccagccgctcatgcagttaccaaacttgtcaaccattaaccttggaatcaacttcataaaacaaatcgacttcaaattgttccaaaacttctccaacctagagatcatttacctttccgaaaaccgtatctccccgctcgtcaaagacacccgccagtcatacgccaacagctcctcattccaacgccacatccggaaacgacggtccaccgatttcgaatttgacccccactcaaatttctaccacttcactcgccccctaataaaaccccaatgcgcagcatacggcaaggccctcgacctctccctcaactctatcttctttatcggaccaaaccaattcgaaaatctgcccgacatcgcctgcctgaacctctcagccaactcaaacgcccaggttctctccggcaccgagttctccgccatcccccatgtaaaatacctcgacctaaccaacaacagactggactttgacaacgcctccgcactcaccgagctctcggacctagaagtccttgacctatcgtacaacagccactacttccgtatcgccggcgtcactcaccacttagagttcatccaaaacttcaccaacctcaaagtcctaaacctctcgcataacaacatatacacactcacagacaaatacaacctcgaaagcaagtcgctcgtcgaacttgtcttctcaggcaaccgcctcgatatcctatggaacgacgatgacaaccgctacatatcaatattcaaaggtctcaaaaacctgacgcgcctcgacctaagcctcaacagacttaagcacatccccaacgaggcattccttaacctccccgcatcgctgaccgagctccacatcaacgacaacatgctgaaattctttaattggaccctgctccaacagtttccccgcttagagctcctcgacctacgtggcaacaaactccttttcctaaccgactccttatctgactttacttcaagtcttcgcactctcctgctatctcataatcgcatatcccatctcccttccggcttcctctccgaggtaagctcgctaaaacatctcgacctctcatctaacctactcaaaacaatcaacaaatcagccttagaaacaaagaccaccacaaaactctccatgcttgagctccacggcaaccccttcgagtgcacctgtgacataggagattttcgcagatggatggacgaacacctaaatgtcaagatcccccgtctcgttgatgtcatctgcgcatcccccggcgaccagcgaggtaaaagcatcgtctcgctagaactcacgacctgcgtctccgacgttaccgcagtcatcctcttcttcttcaccttcttcatcactacaatggtcatgcttgcagcgctagcacaccacctattctactgggacgtttggttcatatacaacgtctgcctcgcaaaagtgaagggctaccgatccctctcgacaagtcaaacattctacgacgcctacatcagttacgacaccaaagacgcatccgtaaccgattgggtcataaacgaactacgataccacctcgaagaatcccgcgacaagaacgtccttctctgcctcgaagaacgagactgggaccccgggcttgcaatcatcgataacctaatgcaatcaatcaaccaatccaaaaagacagtattcgtcttaactaaaaagtacgcgaaaagctggaacttcaaaacggccttctacctggctctacagcgcctcatggacgaaaacatggacgtcattatcttcattctcctcgaacccgtgctccaacacagtcaatacctacgactacgtcaacgtatctgtaaaagctcaatattacagtggcccgacaatcccaaggccgaaggcctattctggcaaacacttcgaaacgtcgtcctgaccgaaaacgactcccgttacaacaacatgtacgtagactcaatcaaacaatactga

SEQ ID NO: 2260 - RNA, 66 nt, synthetic construct
  misc_feature 1..66: note = P16671_TM_1_8-29
  source 1..66: mol_type = other RNA
ggcttgatcgcgggcgcggtcataggcgcggtcttggccgtgttcgggggcatactcatgcccgtg

SEQ ID NO: 2261 - RNA, 81 nt, synthetic construct
  misc_feature 1..81: note = P32248_TM_1_60-86
  source 1..81: mol_type = other RNA
ttccttccaattatgtactcaatcatctgcttcgttggcctcctcggcaacggtctcgtcgtcctcacctacatctacttc

SEQ ID NO: 2262 - RNA, 66 nt, synthetic construct
  misc_feature 1..66: note = P16671_TM_2_440-461
  source 1..66: mol_type = other RNA
ctgttggggttgatagagatgatactgttgagcgtgggggtggtgatgttcgtggcgtttatgata

SEQ ID NO: 2263 - RNA, 63 nt, synthetic construct
  misc_feature 1..63: note = P32248_TM_2_96-116
  source 1..63: mol_type = other RNA
tatctccttaacctcgccgtcgccgacatcctcttcctcctaaccctacccttctgggcctac

SEQ ID NO: 2264 - RNA, 66 nt, synthetic construct
  misc_feature 1..66: note = P32248_TM_3_131-152
  source 1..66: mol_type = other RNA
ctcatattcgccatctacaaaatgtccttcttctccggcatgctcctactcctatgcatatccatc

SEQ ID NO: 2265 - RNA, 63 nt, synthetic construct
  misc_feature 1..63: note = P32248_TM_4_171-191
  source 1..63: mol_type = other RNA
gtcctactcatctccaaactctcatgcgtcggcatctggatcctcgcaaccgtcctctccatc

SEQ ID NO: 2266 - RNA, 84 nt, synthetic construct
  misc_feature 1..84: note = P32248_TM_5_220-247
  source 1..84: mol_type = other RNA
ttcatcaccatacaagtcgcccaaatggtaatcggcttcctagtcccactcctcgccatgtccttctgctacctcgtcatcata

SEQ ID NO: 2267 - RNA, 78 nt, synthetic construct
  misc_feature 1..78: note = P32248_TM_6_264-289
  source 1..78: mol_type = other RNA
gtcataatcgccgtagtcgtcgtcttcatcgtcttccaactcccctacaacggcgtagtcctcgcccaaaccgtcgcc

SEQ ID NO: 2268 - RNA, 54 nt, synthetic construct
  misc_feature 1..54: note = P32248_TM_7_314-331
  source 1..54: mol_type = other RNA
ctcgcgtgcgtacgctgttgcgtgaacccgttcttgtacgcgttcataggcgtg

SEQ ID NO: 2269 - RNA, 69 nt, synthetic construct
  misc_feature 1..69: note = A0A5B9_TM_145-167
  source 1..69: mol_type = other RNA
accatcctctacgaaatcctcctcggcaaagccaccctctacgccgtcctcgtctcagccctcgtacta

SEQ ID NO: 2270 - RNA, 69 nt, synthetic construct
  misc_feature 1..69: note = B7Z8K6_TM_130-152
  source 1..69: mol_type = other RNA
ctcggcctacgcatgcttttcgccaaaaccgtcgctgtcaacttcctcctcaccgcaaaactattcttc

SEQ ID NO: 2271 - RNA, 63 nt, synthetic construct
  misc_feature 1..63: note = O00206_TM_632-652
  source 1..63: mol_type = other RNA
actatcatcggcgtctccgtcctctctgtccttgtcgtctccgtcgtcgccgtcctcgtctac

SEQ ID NO: 2272 - RNA, 66 nt, synthetic construct
  misc_feature 1..66: note = P01730_TM_397-418
  source 1..66: mol_type = other RNA
atggcgctcatagtcctgggcggggtcgcgggcctgctcctgttcataggcttgggcatattcttt

SEQ ID NO: 2273 - RNA, 63 nt, synthetic construct; identical to SEQ ID NO: 2065
  misc_feature 1..63: note = P01850_TM_151-171
  source 1..63: mol_type = other RNA

SEQ ID NO: 2274 - RNA, 78 nt, synthetic construct
  misc_feature 1..78: note = P07766_TM_127-152
  source 1..78: mol_type = other RNA
gtcatgagcgtggccacaatcgtgatcgtggacatatgcataaccgggggcttgctcttgctcgtgtactattggtcg

SEQ ID NO: 2275 - RNA, 66 nt, synthetic construct
  misc_feature 1..66: note = P08575_TM_576-597
  source 1..66: mol_type = other RNA
gccctcatcgctttcctcgccttcctcatcatcgtcacctccatcgctctccttgtcgtcctttat

SEQ ID NO: 2276 - RNA, 63 nt, synthetic construct
  misc_feature 1..63: note = P08637_TM_209-229
  source 1..63: mol_type = other RNA
gtatccttctgcctcgtcatggtcctccttttcgccgtcgacaccggcctctacttctctgtc

SEQ ID NO: 2277 - RNA, 81 nt, synthetic construct
  misc_feature 1..81: note = P10747_TM_153-179
  source 1..81: mol_type = other RNA
ttttgggtgctcgtggtcgtgggcggggtcttggcctgttactcgctcttggtcacggtcgcgttcataatcttttgggtg

SEQ ID NO: 2278 - RNA, 66 nt, synthetic construct
  misc_feature 1..66: note = P11912_TM_144-165
  source 1..66: mol_type = other RNA
atcatcacagccgaaggcatcatcctactcttctgcgccgtcgtccccggaactctcctcctattc

SEQ ID NO: 2279 - RNA, 66 nt, synthetic construct
  misc_feature 1..66: note = P15391_TM_292-313
  source 1..66: mol_type = other RNA
gtatccgccgtcacactcgcctacctcatcttctgcctctgctcactcgtcggcatactccacctc

SEQ ID NO: 2280 - RNA, 63 nt, synthetic construct
  misc_feature 1..63: note = P16410_TM_162-182
  source 1..63: mol_type = other RNA
ttccttctttggatcctcgccgccgtctcctccggtctcttcttctactctttccttctcacc

SEQ ID NO: 2281 - RNA, 63 nt, synthetic construct
  misc_feature 1..63: note = P26718_TM_52-72
  source 1..63: mol_type = other RNA
cccttcttcttttgctgctttatcgctgtcgccatgggtatccgtttcattatcatggttgcc

SEQ ID NO: 2282 - RNA, 63 nt, synthetic construct
  misc_feature 1..63: note = P30273_TM_24-44
  source 1..63: mol_type = other RNA
ctctgttacatcctagacgccatcctatttctctacggcatcgtcctcaccctcctctactgc

SEQ ID NO: 2283 - RNA, 63 nt, synthetic construct
  misc_feature 1..63: note = P40259_TM_160-180
  source 1..63: mol_type = other RNA
ggcatcatcatgatccaaaccctcctcatcatcctattcataatcgtccccatattcctcctt

SEQ ID NO: 2284 - RNA, 63 nt, synthetic construct
  misc_feature 1..63: note = P42081_TM_248-268
  source 1..63: mol_type = other RNA
tggatcaccgccgtactccccaccgtcatcatctgcgtaatggtattctgcctaatactctgg

SEQ ID NO: 2285 - RNA, 63 nt, synthetic construct
  misc_feature 1..63: note = Q15762_TM_255-275
  source 1..63: mol_type = other RNA
ggcggtaccgtcctcctcctcctcttcgtcatctccatcactaccatcatcgttatctttcta

SEQ ID NO: 2286 - RNA, 63 nt, synthetic construct; identical to SEQ ID NO: 2078
  misc_feature 1..63: note = Q685J3_TM_4394-4414
  source 1..63: mol_type = other RNA

SEQ ID NO: 2287 - RNA, 63 nt, synthetic construct
  misc_feature 1..63: note = Q9NNX6_TM_38-58
  source 1..63: mol_type = other RNA
ctcggccacggccccctcgtcctccaacttctctccttcaccctactcgccggcctcctcgtc

SEQ ID NO: 2288 - RNA, 63 nt, synthetic construct
  misc_feature 1..63: note = Q9NR97_TM_828-848
  source 1..63: mol_type = other RNA
gccgtcatcctctttttctttacctttttcatcaccaccatggtcatgctcgctgccctcgct

SEQ ID NO: 2289 - RNA, 48 nt, synthetic construct
  misc_feature 1..48: note = P14207_1-16
  source 1..48: mol_type = other RNA
atggtctggaaatggatgcccctcctcctcctcctcgtctgcgtcgcc

SEQ ID NO: 2290 - RNA, 48 nt, synthetic construct
  misc_feature 1..48: note = O75787_1-16
  source 1..48: mol_type = other RNA
atggccgtgttcgtggtcttgctcgcgctcgtggccggggtcttgggc

SEQ ID NO: 2291 - RNA, 48 nt, synthetic construct; identical to SEQ ID NO: 627
  misc_feature 1..48: note = P07359_1-16
  source 1..48: mol_type = other RNA

SEQ ID NO: 2292 - RNA, 48 nt, synthetic construct
  misc_feature 1..48: note = P08637_1-16
  source 1..48: mol_type = other RNA
atgtggcaactcctcctccccaccgccctcctcctcctcgtctccgcc

SEQ ID NO: 2293 - RNA, 51 nt, synthetic construct; identical to SEQ ID NO: 2085
  misc_feature 1..51: note = P07237_1-17
  source 1..51: mol_type = other RNA

SEQ ID NO: 2294 - RNA, 51 nt, synthetic construct; identical to SEQ ID NO: 630
  misc_feature 1..51: note = O60911_1-17
  source 1..51: mol_type = other RNA

SEQ ID NO: 2295 - RNA, 51 nt, synthetic construct; identical to SEQ ID NO: 631
  misc_feature 1..51: note = P20138_1-17
  source 1..51: mol_type = other RNA

SEQ ID NO: 2296 - RNA, 51 nt, synthetic construct; identical to SEQ ID NO: 2088
  misc_feature 1..51: note = P27797_1-17
  source 1..51: mol_type = other RNA

SEQ ID NO: 2297 - RNA, 54 nt, synthetic construct
  misc_feature 1..54: note = P10747_1-18
  source 1..54: mol_type = other RNA
atgctccgcctcctcctcgccctcaacctcttcccctccatccaagtcaccggc

SEQ ID NO: 2298 - RNA, 54 nt, synthetic construct; identical to SEQ ID NO: 1882
  misc_feature 1..54: note = O75487_1-18
  source 1..54: mol_type = other RNA

SEQ ID NO: 2299 - RNA, 54 nt, synthetic construct; identical to SEQ ID NO: 1883
  misc_feature 1..54: note = P07996_1-18
  source 1..54: mol_type = other RNA

SEQ ID NO: 2300 - RNA, 54 nt, synthetic construct
  misc_feature 1..54: note = P22748_1-18
  source 1..54: mol_type = other RNA
atgcgcatgctcctagccctactcgccctctcagccgcccgcccatccgcctcc

SEQ ID NO: 2301 - RNA, 54 nt, synthetic construct; identical to SEQ ID NO: 637
  misc_feature 1..54: note = Q15762_1-18
  source 1..54: mol_type = other RNA

SEQ ID NO: 2302 - RNA, 54 nt, synthetic construct; identical to SEQ ID NO: 2094
  misc_feature 1..54: note = P30273_1-18
  source 1..54: mol_type = other RNA

SEQ ID NO: 2303 - RNA, 54 nt, synthetic construct; identical to SEQ ID NO: 639
  misc_feature 1..54: note = P38570_1-18
  source 1..54: mol_type = other RNA

SEQ ID NO: 2304 - RNA, 54 nt, synthetic construct
  misc_feature 1..54: note = Q01638_1-18
  source 1..54: mol_type = other RNA
atgggcttctggatactcgcaatcctgaccatactcatgtactcgaccgcggcc

SEQ ID NO: 2305 - RNA, 54 nt, synthetic construct; identical to SEQ ID NO: 641
  misc_feature 1..54: note = Q9NZQ7_1-18
  source 1..54: mol_type = other RNA

SEQ ID NO: 2306 - RNA, 57 nt, synthetic construct
  misc_feature 1..57: note = P13591_1-19
  source 1..57: mol_type = other RNA
atgctccaaaccaaagacctcatctggaccctcttcttcctcggcaccgccgtctcc

SEQ ID NO: 2307 - RNA, 57 nt, synthetic construct
  misc_feature 1..57: note = P26842_1-19
  source 1..57: mol_type = other RNA
atggcgcgaccgcacccgtggtggctctgtgtcttgggcacgctcgtgggcttgagc

SEQ ID NO: 2308 - RNA, 57 nt, synthetic construct
  misc_feature 1..57: note = P15391_1-19
  source 1..57: mol_type = other RNA
atgccccccccccgcctcctcttcttcctcctcttcctcacccccatggaagtccgc

SEQ ID NO: 2309 - RNA, 57 nt, synthetic construct; identical to SEQ ID NO: 1893
  misc_feature 1..57: note = Q8NI17_1-19
  source 1..57: mol_type = other RNA

SEQ ID NO: 2310 - RNA, 57 nt, synthetic construct
  misc_feature 1..57: note = P08571_1-19
  source 1..57: mol_type = other RNA
atggaacgcgcctcctgcctcctcctcctcctcctccccctcgtccacgtctccgcc

SEQ ID NO: 2311 - RNA, 57 nt, synthetic construct
  misc_feature 1..57: note = P05154_1-19
  source 1..57: mol_type = other RNA
atgcaactcttcctcctcctctgcctcgtcctcctctccccccaaggcgcctccctc

SEQ ID NO: 2312 - RNA, 57 nt, synthetic construct
  misc_feature 1..57: note = P02787_1-19
  source 1..57: mol_type = other RNA
atgcgcttggccgtgggcgcgctattggtctgtgccgtgctcgggctctgtctcgcg

SEQ ID NO: 2313 - RNA, 57 nt, synthetic construct
  misc_feature 1..57: note = P02671_1-19
  source 1..57: mol_type = other RNA
atgttcagcatgcgaatagtctgtctcgtgctctcggtcgtgggcacggcctggacc

SEQ ID NO: 2314 - RNA, 57 nt, synthetic construct
  misc_feature 1..57: note = P04216_1-19
  source 1..57: mol_type = other RNA
atgaacctcgccatctccatcgccctcctcctcaccgtcctccaagtctcccgcggc

SEQ ID NO: 2315 - RNA, 57 nt, synthetic construct
  misc_feature 1..57: note = P00747_1-19
  source 1..57: mol_type = other RNA
atggaacacaaggaagtagtcctgctcctgctcctgttcctgaaatcgggccagggc

SEQ ID NO: 2316 - RNA, 57 nt, synthetic construct; identical to SEQ ID NO: 2108
  misc_feature 1..57: note = P01764_1-19
  source 1..57: mol_type = other RNA

SEQ ID NO: 2317 - RNA, 57 nt, synthetic construct
  misc_feature 1..57: note = P16150_1-19
  source 1..57: mol_type = other RNA
atggcgaccttgctcttgctcttgggcgtgctcgtggtctcgcccgatgccttgggc

SEQ ID NO: 2318 - RNA, 57 nt, synthetic construct
  misc_feature 1..57: note = Q6DN72_1-19
  source 1..57: mol_type = other RNA
atgctactctggaccgccgtcctcctcttcgtcccctgcgtcggcaaaaccgtctgg

SEQ ID NO: 2319 - RNA, 57 nt, synthetic construct
  misc_feature 1..57: note = Q01151_1-19
  source 1..57: mol_type = other RNA
atgtcccgcggcctccaactactcctcctctcctgcgcctactccctcgcccccgcc

SEQ ID NO: 2320 - RNA, 57 nt, synthetic construct; identical to SEQ ID NO: 656
  misc_feature 1..57: note = P07093_1-19
  source 1..57: mol_type = other RNA

SEQ ID NO: 2321 - RNA, 57 nt, synthetic construct
  misc_feature 1..57: note = Q8WWQ8_1-19
  source 1..57: mol_type = other RNA
atgatgctccaacacctcgtcatcttctgcctcggcctcgtcgtccaaaacttctgc

SEQ ID NO: 2322 - RNA, 60 nt, synthetic construct
  misc_feature 1..60: note = Q13291_1-20
  source 1..60: mol_type = other RNA
atggaccccaaaggcctcctctccctcaccttcgtcctcttcctctccctcgccttcggc

SEQ ID NO: 2323 - RNA, 60 nt, synthetic construct
  misc_feature 1..60: note = P35225_1-20
  source 1..60: mol_type = other RNA
atggcgctcttgctcacgaccgtgatcgcgctcacgtgcttgggcgggttcgcgagcccg

SEQ ID NO: 2324 - RNA, 60 nt, synthetic construct
  misc_feature 1..60: note = P25942_1-20
  source 1..60: mol_type = other RNA
atggtccgcctccccctccaatgcgtcctctggggctgcctcctcaccgccgtccacccc

SEQ ID NO: 2325 - RNA, 60 nt, synthetic construct; identical to SEQ ID NO: 2117
  misc_feature 1..60: note = P52803_1-20
  source 1..60: mol_type = other RNA

SEQ ID NO: 2326 - RNA, 60 nt, synthetic construct
  misc_feature 1..60: note = Q15116_1-20
  source 1..60: mol_type = other RNA
atgcaaataccccaagccccatggccagtcgtctgggccgtcctacaactcggctggcgc

SEQ ID NO: 2327 - RNA, 60 nt, synthetic construct
  misc_feature 1..60: note = P05556_1-20
  source 1..60: mol_type = other RNA
atgaacctccaacccatcttctggatcggcctcatctcctccgtctgctgcgtcttcgcc

SEQ ID NO: 2328 - RNA, 60 nt, synthetic construct
  misc_feature 1..60: note = Q12891_1-20
  source 1..60: mol_type = other RNA
atgagggccgggccagggccaacggtaacgctagcgctagtgctagcggtagcgtgggcg

SEQ ID NO: 2329 - RNA, 60 nt, synthetic construct; identical to SEQ ID NO: 1913
  misc_feature 1..60: note = Q8IV16_1-20
  source 1..60: mol_type = other RNA

SEQ ID NO: 2330 - RNA, 60 nt, synthetic construct; identical to SEQ ID NO: 666
  misc_feature 1..60: note = Q03167_1-20
  source 1..60: mol_type = other RNA

SEQ ID NO: 2331 - RNA, 60 nt, synthetic construct; identical to SEQ ID NO: 2123
  misc_feature 1..60: note = Q14246_1-20
  source 1..60: mol_type = other RNA

SEQ ID NO: 2332 - RNA, 60 nt, synthetic construct
  misc_feature 1..60: note = P16871_1-20
  source 1..60: mol_type = other RNA
atgacgatcttgggcacgacctttggcatggtctttagcttgctccaggtcgtgagcggg

SEQ ID NO: 2333 - RNA, 60 nt, synthetic construct
  misc_feature 1..60: note = P61769_1-20
  source 1..60: mol_type = other RNA
atgagcaggagcgtggccttggccgtgctcgcgctcttgagcttgagcgggctcgaggcc

SEQ ID NO: 2334 - RNA, 60 nt, synthetic construct
  misc_feature 1..60: note = Q9Y6W8_1-20
  source 1..60: mol_type = other RNA
atgaaatccggcctctggtacttcttcctcttctgcctccgcatcaaagtcctcaccggc

SEQ ID NO: 2335 - RNA, 63 nt, synthetic construct; identical to SEQ ID NO: 1919
  misc_feature 1..63: note = P10966_1-21
  source 1..63: mol_type = other RNA

SEQ ID NO: 2336 - RNA, 63 nt, synthetic construct
  misc_feature 1..63: note = Q9BZW8_1-21
  source 1..63: mol_type = other RNA
atgctcgggcaagtggtcacgctcatactcctgctcctgctcaaggtctatcaagggaaaggg

SEQ ID NO: 2337 - RNA, 63 nt, synthetic construct
  misc_feature 1..63: note = P02778_1-21
  source 1..63: mol_type = other RNA
atgaaccaaaccgccatcctcatctgctgcctcatcttcctcaccctctccggcatccaaggc

SEQ ID NO: 2338 - RNA, 63 nt, synthetic construct
  misc_feature 1..63: note = P18564_1-21
  source 1..63: mol_type = other RNA
atgggcatcgaactcctctgcctcttcttcctcttcctcggccgcaacgaccacgtccaaggc

SEQ ID NO: 2339 - RNA, 63 nt, synthetic construct
  misc_feature 1..63: note = O14525_1-21
  source 1..63: mol_type = other RNA
atggccttggccgggctctgtgccttgctcgcgtgctgttgggggccagcggcagtgctagcg

SEQ ID NO: 2340 - RNA, 63 nt, synthetic construct
  misc_feature 1..63: note = P01130_1-21
  source 1..63: mol_type = other RNA
atgggaccgtgggggtggaagctcaggtggacggtcgcgctattgctagcggccgcgggaacg

SEQ ID NO: 2341 - RNA, 63 nt, synthetic construct
  misc_feature 1..63: note = P01732_1-21
  source 1..63: mol_type = other RNA
atggccctacccgtcaccgccctcctactccccctcgccctcctactccacgccgcccgcccc

SEQ ID NO: 2342 - RNA, 63 nt, synthetic construct; identical to SEQ ID NO: 2134
  misc_feature 1..63: note = P48061_1-21
  source 1..63: mol_type = other RNA

SEQ ID NO: 2343 - RNA, 63 nt, synthetic construct; identical to SEQ ID NO: 2135
  misc_feature 1..63: note = P01589_1-21
  source 1..63: mol_type = other RNA

SEQ ID NO: 2344 - RNA, 63 nt, synthetic construct
  misc_feature 1..63: note = Q86T13_1-21
  source 1..63: mol_type = other RNA
atgcgaccggcctttgccttgtgcttgctctggcaagcgctctggcccgggcccgggggcggg

SEQ ID NO: 2345 - RNA, 63 nt, synthetic construct
  misc_feature 1..63: note = Q5DID0_1-21
  source 1..63: mol_type = other RNA
atgctccgcacctccggcctcgccctcctcgccctcgtctccgccgtcggcccctcccaagcc

SEQ ID NO: 2346 - RNA, 66 nt, synthetic construct
  misc_feature 1..66: note = P40189_1-22
  source 1..66: mol_type = other RNA
atgctcaccctccaaacctggctcgtccaagccctcttcatcttcctcaccaccgaatccaccggc

SEQ ID NO: 2347 - RNA, 66 nt, synthetic construct; identical to SEQ ID NO: 1931
  misc_feature 1..66: note = Q86YL7_1-22
  source 1..66: mol_type = other RNA

SEQ ID NO: 2348 - RNA, 66 nt, synthetic construct
  misc_feature 1..66: note = P55075_1-22
  source 1..66: mol_type = other RNA
atgggctccccccgctccgccctctcctgcctcctcctccacctcctcgtcctctgcctccaagcc

SEQ ID NO: 2349 - RNA, 66 nt, synthetic construct
  misc_feature 1..66: note = Q30201_1-22
  source 1..66: mol_type = other RNA
atgggcccccgcgcccgccccgccctactcctactcatgctcctacaaaccgccgtcctccaaggc

SEQ ID NO: 2350 - RNA, 66 nt, synthetic construct; identical to SEQ ID NO: 2142
  misc_feature 1..66: note = P07766_1-22
  source 1..66: mol_type = other RNA

SEQ ID NO: 2351 - RNA, 66 nt, synthetic construct
  misc_feature 1..66: note = P18827_1-22
  source 1..66: mol_type = other RNA
atgcgccgcgccgccctctggctctggctctgcgccctcgccctctccctccaacccgccctcccc

SEQ ID NO: 2352 - RNA, 66 nt, synthetic construct
  misc_feature 1..66: note = P55290_1-22
  source 1..66: mol_type = other RNA
atgcaaccccgcacccccctcgtcctctgcgtcctcctctcccaagtcctcctcctcacctccgcc

SEQ ID NO: 2353 - RNA, 66 nt, synthetic construct; identical to SEQ ID NO: 1937
  misc_feature 1..66: note = P37173_1-22
  source 1..66: mol_type = other RNA

SEQ ID NO: 2354 - RNA, 66 nt, synthetic construct
  misc_feature 1..66: note = Q07325_1-22
  source 1..66: mol_type = other RNA
atgaaaaaatccggcgtcctcttcctcctcggcatcatcctcctcgtcctcatcggcgtccaaggc

SEQ ID NO: 2355 - RNA, 66 nt, synthetic construct; identical to SEQ ID NO: 2147
  misc_feature 1..66: note = P04156_1-22
  source 1..66: mol_type = other RNA

SEQ ID NO: 2356 - RNA, 66 nt, synthetic construct
  misc_feature 1..66: note = P31785_1-22
  source 1..66: mol_type = other RNA
atgctcaaaccctccctccccttcacctccctcctcttcctccaactccccctcctcggcgtcggc

SEQ ID NO: 2357 - RNA, 69 nt, synthetic construct
  misc_feature 1..69: note = P01579_1-23
  source 1..69: mol_type = other RNA
atgaaatacacctcctacatcctcgccttccaactctgcatcgtcctcggctccctcggctgctactgc

SEQ ID NO: 2358 - RNA, 69 nt, synthetic construct
  misc_feature 1..69: note = P23229_1-23
  source 1..69: mol_type = other RNA
atggccgccgccggccaactctgcctcctctacctctccgccggcctcctctcccgcctcggcgccgcc

SEQ ID NO: 2359 - RNA, 69 nt, synthetic construct
  misc_feature 1..69: note = O60494_1-23
  source 1..69: mol_type = other RNA
atgatgaacatgtccctccccttcctctggtccctcctcaccctcctcatcttcgccgaagtcaacggc

SEQ ID NO: 2360 - RNA, 69 nt, synthetic construct; identical to SEQ ID NO: 1944
  misc_feature 1..69: note = P08575_1-23
  source 1..69: mol_type = other RNA

SEQ ID NO: 2361 - RNA, 69 nt, synthetic construct; identical to SEQ ID NO: 1945
  misc_feature 1..69: note = Q8IWY4_1-23
  source 1..69: mol_type = other RNA

SEQ ID NO: 2362 - RNA, 69 nt, synthetic construct; identical to SEQ ID NO: 698
  misc_feature 1..69: note = Q08431_1-23
  source 1..69: mol_type = other RNA

SEQ ID NO: 2363 - RNA, 69 nt, synthetic construct
  misc_feature 1..69: note = Q99665_1-23
  source 1..69: mol_type = other RNA
atggcccacaccttccgcggctgctcactcgccttcatgttcatcatcacctggctcctcatcaaagcc

SEQ ID NO: 2364 - RNA, 69 nt, synthetic construct
  misc_feature 1..69: note = Q6Q8B3_1-23
  source 1..69: mol_type = other RNA
atgtcggccccgcgcttgctcataagcataatcataatggtgagcgcgagctcgagctcgtgcatgggc

SEQ ID NO: 2365 - RNA, 69 nt, synthetic construct
  misc_feature 1..69: note = Q07011_1-23
  source 1..69: mol_type = other RNA
atgggcaactcctgctacaacatcgtcgccaccctcctcctcgtcctcaacttcgaacgcacccgctcc

SEQ ID NO: 2366 - RNA, 69 nt, synthetic construct; identical to SEQ ID NO: 1950
  misc_feature 1..69: note = Q8NHL6_1-23
  source 1..69: mol_type = other RNA

SEQ ID NO: 2367 - RNA, 69 nt, synthetic construct
  misc_feature 1..69: note = P36894_1-23
  source 1..69: mol_type = other RNA
atgccccaactctacatctacatccgcctcctcggcgcctacctcttcatcatctcccgcgtccaaggc

SEQ ID NO: 2368 - RNA, 69 nt, synthetic construct
  misc_feature 1..69: note = Q16552_1-23
  source 1..69: mol_type = other RNA
atgacccccggcaaaacctccctcgtctccctcctcctcctcctctccctcgaagccatcgtcaaagcc

SEQ ID NO: 2369 - RNA, 69 nt, synthetic construct
  misc_feature 1..69: note = P42081_1-23
  source 1..69: mol_type = other RNA
atggacccccaatgcaccatgggcctctccaacatcctcttcgtcatggccttcctcctctccggcgcc

SEQ ID NO: 2370 - RNA, 69 nt, synthetic construct
  misc_feature 1..69: note = P43121_1-23
  source 1..69: mol_type = other RNA
atgggcttgcccaggctcgtgtgcgcgttcttgctcgcggcctgttgctgttgcccgcgcgtggccggg

SEQ ID NO: 2371 - RNA, 69 nt, synthetic construct; identical to SEQ ID NO: 707
  misc_feature 1..69: note = O00206_1-23
  source 1..69: mol_type = other RNA

SEQ ID NO: 2372 - RNA, 69 nt, synthetic construct
  misc_feature 1..69: note = P42701_1-23
  source 1..69: mol_type = other RNA
atggaacccctcgtcacctgggtcgtccccctcctcttcctcttcctcctctcccgccaaggcgccgcc

SEQ ID NO: 2373 - RNA, 72 nt, synthetic construct
  misc_feature 1..72: note = P06729_1-24
  source 1..72: mol_type = other RNA
atgtccttcccctgcaaattcgtcgcctccttcctcctcatcttcaacgtctcctccaaaggcgccgtctcc

SEQ ID NO: 2374 - RNA, 72 nt, synthetic construct
  misc_feature 1..72: note = P15328_1-24
  source 1..72: mol_type = other RNA
atggcgcaaaggatgacgacccagctcttgctcttgctcgtgtgggtggccgtggtcggggaagcgcaaacg

SEQ ID NO: 2375 - RNA, 72 nt, synthetic construct
  misc_feature 1..72: note = P05112_1-24
  source 1..72: mol_type = other RNA
atgggcctcacctcccaactcctcccccccctcttcttcctcctcgcctgcgccggcaacttcgtccacggc

SEQ ID NO: 2376 - RNA, 72 nt, synthetic construct
  misc_feature 1..72: note = P06127_1-24
  source 1..72: mol_type = other RNA
atgcccatgggctccctccaacccctcgccaccctctacctcctcggcatgctcgtcgcctcctgcctcggc

SEQ ID NO: 2377 - RNA, 72 nt, synthetic construct
  misc_feature 1..72: note = P32248_1-24
  source 1..72: mol_type = other RNA
atggacttgggcaagcccatgaaatcggtcttggtcgtggccttgctcgtgatctttcaagtgtgcttgtgc

SEQ ID NO: 2378 - RNA, 72 nt, synthetic construct
  misc_feature 1..72: note = Q7Z7D3_1-24
  source 1..72: mol_type = other RNA
atggcctccctcggccaaatcctcttctggtccatcatctccatcatcatcatcctcgccggcgccatcgcc

SEQ ID NO: 2379 - RNA, 72 nt, synthetic construct; identical to SEQ ID NO: 1963
  misc_feature 1..72: note = P54756_1-24
  source 1..72: mol_type = other RNA

SEQ ID NO: 2380 - RNA, 72 nt, synthetic construct
  misc_feature 1..72: note = Q92823_1-24
  source 1..72: mol_type = other RNA
atgcaactcaaaatcatgcccaaaaaaaaacgcctctccgccggccgcgtccccctcatcctcttcctctgc

SEQ ID NO: 2381 - RNA, 72 nt, synthetic construct; identical to SEQ ID NO: 1965
  misc_feature 1..72: note = P19320_1-24
  source 1..72: mol_type = other RNA

SEQ ID NO: 2382 - RNA, 72 nt, synthetic construct; identical to SEQ ID NO: 1966
  misc_feature 1..72: note = Q86UN2_1-24
  source 1..72: mol_type = other RNA

SEQ ID NO: 2383 - RNA, 75 nt, synthetic construct; identical to SEQ ID NO: 1967
  misc_feature 1..75: note = P33151_1-25
  source 1..75: mol_type = other RNA

SEQ ID NO: 2384 - RNA, 75 nt, synthetic construct; identical to SEQ ID NO: 720
  misc_feature 1..75: note = P17813_1-25
  source 1..75: mol_type = other RNA

SEQ ID NO: 2385 - RNA, 75 nt, synthetic construct
  misc_feature 1..75: note = P25445_1-25
  source 1..75: mol_type = other RNA
atgctcggcatctggaccctcctccccctcgtcctcacctccgtcgcccgcctctcctccaaatccgtcaacgcc

SEQ ID NO: 2386 - RNA, 75 nt, synthetic construct
  misc_feature 1..75: note = P01730_1-25
  source 1..75: mol_type = other RNA
atgaaccgcggcgtccccttccgccacctcctcctcgtcctccaactcgccctcctccccgccgccacccaaggc

SEQ ID NO: 2387 - RNA, 75 nt, synthetic construct
  misc_feature 1..75: note = Q685J3_1-25
  source 1..75: mol_type = other RNA
atgccccgccccggcaccatggccctctgcctcctcaccctcgtcctctccctcctccccccccaagccgccgcc

SEQ ID NO: 2388 - RNA, 75 nt, synthetic construct; identical to SEQ ID NO: 1972
  misc_feature 1..75: note = P17787_1-25
  source 1..75: mol_type = other RNA

SEQ ID NO: 2389 - RNA, 75 nt, synthetic construct
  misc_feature 1..75: note = Q6UQ28_1-25
  source 1..75: mol_type = other RNA
atggccgtcttccacgacatgctcctccaacccctcggcatgttcctctgcctctccctccaactctcctccgcc

SEQ ID NO: 2390 - RNA, 75 nt, synthetic construct
  misc_feature 1..75: note = P13987_1-25
  source 1..75: mol_type = other RNA
atgggcatccaaggcggctccgtcctcttcggcctcctcctcgtcctcgccgtcttctgccactccggccactcc

SEQ ID NO: 2391 - RNA, 75 nt, synthetic construct; identical to SEQ ID NO: 1975
  misc_feature 1..75: note = P10721_1-25
  source 1..75: mol_type = other RNA

SEQ ID NO: 2392 - RNA, 75 nt, synthetic construct
  misc_feature 1..75: note = P12319_1-25
  source 1..75: mol_type = other RNA
atggccccagccatggaatcacccaccctcctctgcgtcgccctcctcttcttcgcccccgacggcgtcctcgcc

SEQ ID NO: 2393 - RNA, 78 nt, synthetic construct; identical to SEQ ID NO: 1977
  misc_feature 1..78: note = Q9BZR6_1-26
  source 1..78: mol_type = other RNA

SEQ ID NO: 2394 - RNA, 78 nt, synthetic construct
  misc_feature 1..78: note = P25063_1-26
  source 1..78: mol_type = other RNA
atgggcagggccatggtcgcgcgcttgggcttgggcttgctcttgctcgcgctcttgctcccgacccagatctatagc

SEQ ID NO: 2395 - RNA, 78 nt, synthetic construct
  misc_feature 1..78: note = Q9NR97_1-26
  source 1..78: mol_type = other RNA
atggaaaacatgttcctccaatcctccatgctcacctgcatcttcctcctcatctccggctcctgcgaactctgcgcc

SEQ ID NO: 2396 - RNA, 78 nt, synthetic construct
  misc_feature 1..78: note = Q8N131_1-26
  source 1..78: mol_type = other RNA
atgggcttgggcgcgcgcggggcctgggccgcgctcttgctcgggaccttgcaagtgctcgcgctcttgggcgcggcc

SEQ ID NO: 2397 - RNA, 78 nt, synthetic construct; identical to SEQ ID NO: 733
  misc_feature 1..78: note = P49771_1-26
  source 1..78: mol_type = other RNA

SEQ ID NO: 2398 - RNA, 78 nt, synthetic construct; identical to SEQ ID NO: 734
  misc_feature 1..78: note = P02679_1-26
  source 1..78: mol_type = other RNA

SEQ ID NO: 2399 - RNA, 78 nt, synthetic construct; identical to SEQ ID NO: 735
  misc_feature 1..78: note = P14784_1-26
  source 1..78: mol_type = other RNA

SEQ ID NO: 2400 - RNA, 81 nt, synthetic construct; identical to SEQ ID NO: 736
  misc_feature 1..81: note = P05362_1-27
  source 1..81: mol_type = other RNA

SEQ ID NO: 2401 - RNA, 81 nt, synthetic construct
  misc_feature 1..81: note = Q13740_1-27
  source 1..81: mol_type = other RNA
atggaatccaaaggcgcctcctcctgccgcctcctcttctgcctcctcatctccgccaccgtcttccgccccggcctcggc

SEQ ID NO: 2402 - RNA, 84 nt, synthetic construct
  misc_feature 1..84: note = Q13443_1-28
  source 1..84: mol_type = other RNA
atggggagcggggccaggttcccgagcgggaccttgcgcgtgcgctggctcttgctattgggcttggtcgggccagtgctcggg

SEQ ID NO: 2403 - RNA, 84 nt, synthetic construct
  misc_feature 1..84: note = P14151_1-28
  source 1..84: mol_type = other RNA
atgatcttcccctggaaatgccaatccacccaacgcgacctctggaacatcttcaaactctggggctggaccatgctctgctgc

SEQ ID NO: 2404 - RNA, 84 nt, synthetic construct
  misc_feature 1..84: note = P56199_1-28
  source 1..84: mol_type = other RNA
atggccccgcgcccgcgcgcgcgcccgggcgtggccgtggcctgttgctggctcttgaccgtggtcttgcgctgttgcgtgagc

SEQ ID NO: 2405 - RNA, 84 nt, synthetic construct; identical to SEQ ID NO: 741
  misc_feature 1..84: note = P11279_1-28
  source 1..84: mol_type = other RNA

SEQ ID NO: 2406 - RNA, 84 nt, synthetic construct
  misc_feature 1..84: note = P40259_1-28
  source 1..84: mol_type = other RNA
atggcccgcctcgccctctcccccgtcccctcccactggatggtcgccctcctcctcctcctctccgccgaacccgtccccgcc

SEQ ID NO: 2407 - RNA, 84 nt, synthetic construct
  misc_feature 1..84: note = P43681_1-28
  source 1..84: mol_type = other RNA
atggaactcggcggccccggcgccccccgcctcctcccccccctcctcctcctcctcggcaccggcctcctccgcgcctcctcc

SEQ ID NO: 2408 - RNA, 84 nt, synthetic construct; identical to SEQ ID NO: 1992
  misc_feature 1..84: note = P18627_1-28
  source 1..84: mol_type = other RNA

SEQ ID NO: 2409 - RNA, 84 nt, synthetic construct; identical to SEQ ID NO: 1993
  misc_feature 1..84: note = Q5ZPR3_1-28
  source 1..84: mol_type = other RNA

SEQ ID NO: 2410 - RNA, 84 nt, synthetic construct
  misc_feature 1..84: note = P23415_1-28
  source 1..84: mol_type = other RNA
atgtactccttcaacaccctccgcctctacctctgggaaaccatcgtcttcttctccctcgccgcctccaaagaagccgaagcc

SEQ ID NO: 2411 - RNA, 84 nt, synthetic construct; identical to SEQ ID NO: 747
  misc_feature 1..84: note = Q8TD46_1-28
  source 1..84: mol_type = other RNA

SEQ ID NO: 2412 - RNA, 87 nt, synthetic construct
  misc_feature 1..87: note = P17301_1-29
  source 1..87: mol_type = other RNA
atgggccccgaacgcaccggcgccgcccccctccccctcctcctcgtcctcgccctctcccaaggcatcctcaactgctgcctcgcc

SEQ ID NO: 2413 - RNA, 87 nt, synthetic construct
  misc_feature 1..87: note = P12821_1-29
  source 1..87: mol_type = other RNA
atgggcgccgcctccggccgccgcggccccggcctcctcctccccctccccctcctcctcctcctccccccccaacccgccctcgcc

SEQ ID NO: 2414 - RNA, 87 nt, synthetic construct
  misc_feature 1..87: note = Q14118_1-29
  source 1..87: mol_type = other RNA
atgcgcatgtccgtcggcctctccctcctcctccccctctggggccgcaccttcctcctcctcctctccgtcgtcatggcccaatcc

SEQ ID NO: 2415 - RNA, 87 nt, synthetic construct; identical to SEQ ID NO: 751
  misc_feature 1..87: note = P05231_1-29
  source 1..87: mol_type = other RNA

SEQ ID NO: 2416 - RNA, 87 nt, synthetic construct; identical to SEQ ID NO: 2208
  misc_feature 1..87: note = O00602_1-29
  source 1..87: mol_type = other RNA

SEQ ID NO: 2417 - RNA, 87 nt, synthetic construct
  misc_feature 1..87: note = Q9Y6Q6_1-29
  source 1..87: mol_type = other RNA
atggccccccgcgcccgccgccgccgccccctattcgccctcctcctcctctgcgccctcctcgcccgcctccaagtcgccctccaa

SEQ ID NO: 2418 - RNA, 87 nt, synthetic construct; identical to SEQ ID NO: 754
  misc_feature 1..87: note = Q9ULI3_1-29
  source 1..87: mol_type = other RNA

SEQ ID NO: 2419 - RNA, 90 nt, synthetic construct
  misc_feature 1..90: note = Q8NBP7_1-30
  source 1..90: mol_type = other RNA
atggggaccgtgagctcgcgcaggagctggtggccgctcccgctcttgctcttgctcttgctcttgctcgggcccgcgggcgcgcgagcg

SEQ ID NO: 2420 - RNA, 90 nt, synthetic construct
  misc_feature 1..90: note = P02675_1-30
  source 1..90: mol_type = other RNA
atgaaacgcatggtctcctggtccttccacaaactcaaaaccatgaaacacctcctcctcctcctcctctgcgtcttcctcgtcaaatcc

SEQ ID NO: 2421 - RNA, 90 nt, synthetic construct; identical to SEQ ID NO: 757
  misc_feature 1..90: note = P06756_1-30
  source 1..90: mol_type = other RNA

SEQ ID NO: 2422 - RNA, 93 nt, synthetic construct; identical to SEQ ID NO: 758
  misc_feature 1..93: note = O60609_1-31
  source 1..93: mol_type = other RNA

SEQ ID NO: 2423 - RNA, 93 nt, synthetic construct
  misc_feature 1..93: note = P50895_1-31
  source 1..93: mol_type = other RNA
atggaaccccccgacgcccccgcccaagcccgcggcgccccccgcctcctcctcctcgccgtcctactcgccgcccaccccgacgcccaagcc

SEQ ID NO: 2424 - RNA, 93 nt, synthetic construct
  misc_feature 1..93: note = P28906_1-31
  source 1..93: mol_type = other RNA
atgctcgtgcgcaggggcgcgcgcgcgggcccgcgcatgcccaggggctggaccgcgctctgtctcttgagcttgctcccgagcgggttcatg

SEQ ID NO: 2425 - RNA, 93 nt, synthetic construct
  misc_feature 1..93: note = P08514_1-31
  source 1..93: mol_type = other RNA
atggccagagccctctgcccactccaagccctctggctactcgaatgggtactcctactcctcggcccctgcgccgccccacccgcctgggcc

SEQ ID NO: 2426 - RNA, 93 nt, synthetic construct
  misc_feature 1..93: note = P00742_1-31
  source 1..93: mol_type = other RNA
atgggccgccccctccacctcgtcctcctctccgcctccctcgccggcctcctcctcctcggcgaatccctcttcatccgccgcgaacaagcc

SEQ ID NO: 2427 - RNA, 96 nt, synthetic construct
  misc_feature 1..96: note = P26006_1-32
  source 1..96: mol_type = other RNA
atggggcccgggccctcgagagcgcccagggccccgagattgatgttgtgcgcgctcgcgctaatggtcgcggccgggggctgtgtagtgagcgcg

SEQ ID NO: 2428 - RNA, 96 nt, synthetic construct
  misc_feature 1..96: note = P13726_1-32
  source 1..96: mol_type = other RNA
atggaaacgcccgcgtggccgcgcgtgcccaggcccgagaccgcggtcgcgcgcacgctcttgctcgggtgggtgttcgcgcaagtggccggggcc

SEQ ID NO: 2429 - RNA, 96 nt, synthetic construct
  misc_feature 1..96: note = P11912_1-32
  source 1..96: mol_type = other RNA
atgcccggcggccccggcgtcctccaagccctccccgccaccatcttcctcctcttcctcctctccgccgtctacctcggccccggctgccaagcc

SEQ ID NO: 2430 - RNA, 96 nt, synthetic construct
  misc_feature 1..96: note = Q9H6X2_1-32
  source 1..96: mol_type = other RNA
atggcgaccgcggaaaggcgcgcgctcgggatcgggttccagtggttgagcttggccacgctcgtgctcatatgcgcgggccagggcgggcgcagg

SEQ ID NO: 2431 - RNA, 99 nt, synthetic construct
  misc_feature 1..99: note = Q8IWK6_1-33
  source 1..99: mol_type = other RNA
atggaaccacccggccgccgccgcggccgcgcacaaccacccctactcctacccctatccctactcgcactcctagccctactcggcggcggcggcggc

SEQ ID NO: 2432 - RNA, 99 nt, synthetic construct
  misc_feature 1..99: note = P58335_1-33
  source 1..99: mol_type = other RNA
atggtggccgagcgatcgcccgcgcgctcgcccgggagctggctctttcccgggctctggctcttggtcttgagcgggcccgggggcttgctcagggcc

SEQ ID NO: 2433 - RNA, 102 nt, synthetic construct
  misc_feature 1..102: note = P06731_1-34
  source 1..102: mol_type = other RNA
atggaatccccctccgcccccccccaccgctggtgcatcccctggcaacgcctcctcctcaccgcctccctcctcaccttctggaacccccccaccaccgcc

SEQ ID NO: 2434 - RNA, 102 nt, synthetic construct
  misc_feature 1..102: note = P33681_1-34
  source 1..102: mol_type = other RNA
atgggccacacccgccgccaaggcacctccccctccaaatgcccctacctcaacttcttccaactcctcgtcctcgccggcctctcccacttctgctccggc

SEQ ID NO: 2435 - RNA, 105 nt, synthetic construct
  misc_feature 1..105: note = P38567_1-35
  source 1..105: mol_type = other RNA
atgggcgtcctcaaattcaaacacatcttcttccgctccttcgtcaaatcctccggcgtctcccaaatcgtcttcaccttcctcctcatcccctgctgcctcacc

SEQ ID NO: 2436 - RNA, 105 nt, synthetic construct
  misc_feature 1..105: note = P16410_1-35
  source 1..105: mol_type = other RNA
atggcctgcctcggcttccaacgccacaaagcccaactcaacctcgccacccgcacctggccctgcaccctcctcttcttcctcctcttcatccccgtcttctgc

SEQ ID NO: 2437 - RNA, 111 nt, synthetic construct
  misc_feature 1..111: note = P15814_1-37
  source 1..111: mol_type = other RNA
atgagaccgggaacgggacagggcgggctagaggccccgggcgagcccgggccaaatctcaggcaaaggtggccgctattgctattgggattggcagtggtaacgcacggg

SEQ ID NO: 2438 - RNA, 114 nt, synthetic construct
  misc_feature 1..114: note = Q92956_1-38
  source 1..114: mol_type = other RNA
atggaaccccccggcgactggggcccccccccctggcgctccacccccaaaaccgacgtcctccgcctcgtcctctacctcaccttcctcggcgccccctgctacgcccccgcc

SEQ ID NO: 2439 - RNA, 123 nt, synthetic construct
  misc_feature 1..123: note = Q86VB7_1-41
  source 1..123: mol_type = other RNA
atgtccaaactccgcatggtcctcctcgaagactccggctccgccgacttccgccgccacttcgtcaacctctcccccttcaccatcaccgtcgtcctcctcctctccgcctgcttcgtcacc

SEQ ID NO: 2440 - RNA, 123 nt, synthetic construct
  misc_feature 1..123: note = P08648_1-41
  source 1..123: mol_type = other RNA
atgggctcccgcacccccgaatcccccctccacgccgtccaactccgctggggcccccgccgccgcccccccctcctccccctcctactcctcctcctccccccccccccccgcgtcggcggc

SEQ ID NO: 2441 - RNA, 123 nt, synthetic construct
  misc_feature 1..123: note = P16109_1-41
  source 1..123: mol_type = other RNA
atggccaactgccaaatcgccatcctctaccaacgcttccaacgcgtcgtcttcggcatctcccaactcctctgcttctccgccctcatctccgaactcaccaaccaaaaagaagtcgccgcc

SEQ ID NO: 2442 - RNA, 132 nt, synthetic construct
  misc_feature 1..132: note = O75326_1-44
  source 1..132: mol_type = other RNA
atgaccccccccccccccggccgcgccgccccctccgccccccgcgcccgagtccccggcccccccgcccgcctcggcctccccctccgcctccgcctcctcctactcctctgggccgccgccgcctccgcc

SEQ ID NO: 2443 - RNA, 135 nt, synthetic construct
  misc_feature 1..135: note = Q8N2Q7_1-45
  source 1..135: mol_type = other RNA
atggccctaccccgctgcacctggcccaactacgtctggcgcgccgtcatggcctgcctcgtccaccgcggcctcggcgcccccctcaccctctgcatgctcggctgcctcctccaagccggccacgtcctctca

SEQ ID NO: 2444 - RNA, 138 nt, synthetic construct
  misc_feature 1..138: note = Q86UN3_1-46
  source 1..138: mol_type = other RNA
atgctccccggcctccgccgcctcctccaagcccccgcctccgcctgcctcctcctcatgctcctcgccctccccctcgccgccccctcctgccccatgctctgcacctgctactcctccccccccaccgtctcctgc

SEQ ID NO: 2445 - RNA, 540 nt, synthetic construct
  misc_feature 1..540: note = A0A5B9
  source 1..540: mol_type = other RNA
atggacctcaaaaacgtcttcccacccgaagtcgccgtattcgaaccctccgaagcagaaatctcacacacacaaaaagccaccctcgtctgcctcgccaccggcttctaccccgaccacgtcgaactctcctggtgggtcaacggcaaagaagtccactccggcgtctcaaccgacccccaacccctcaaagaacaacccgccctaaacgactcccgctactgcctctcctcccgcctccgcgtatccgccaccttctggcaaaacccccgcaaccacttcagatgccaagtacaattctacggcctctccgaaaacgacgaatggacccaagaccgagccaaacccgtcacccaaatcgtctcagccgaagcctggggccgcgccgactgcggattcacctccgaatcctaccaacaaggcgtactctccgccaccatcctctacgaaatcctcctcggcaaagccaccctctacgccgtcctcgtctccgccctagtcctcatggccatggtcaaacgcaaagactcccgcggctaa

SEQ ID NO: 2446 - RNA, 465 nt, synthetic construct
  misc_feature 1..465: note = B7Z8K6
  source 1..465: mol_type = other RNA
atgtcccaaccccacaccaaaccctccgtcttcgtcatgaaaaacggcaccaacgtcgcctgcctcgtaaaagaattctaccccaaagacattcgcatcaacctcgtctcctccaaaaaaatcaccgaattcgaccccgccatcgtcatctccccctccggcaaatacaacgccgtcaaactcggcaaatacgaagactccaactccgtcacctgctccgtccaacacgacaacaaaaccgtacactccaccgacttcgaagtcaaaaccgactccaccgaccacgtcaaacccaaagaaaccgaaaacaccaaacaaccctccaaatcctgccacaaacccaaagccatcgtccacaccgaaaaagtcaacatgatgtccctcaccgtcctcggcctacgcatgctcttcgcaaaaaccgtcgccgtcaacttcctcctcaccgccaaactcttcttcctctaa

SEQ ID NO: 2447 - RNA, 645 nt, synthetic construct
  misc_feature 1..645: note = B9A064
  source 1..645: mol_type = other RNA
atgcgccccaaaactggccaagtaggatgcgaaacccccgaagaactcggtcccggcccccgacaacgctggcccctcctcctcctcggcctcgccatggtcgcccacggactactccgcccaatggtcgccccccaatccggcgaccccgaccccggcgcctccgtcggctcctcccgatcatccttacgcagcctctggggaagactactactccaaccctccccccaacgcgccgacccccgctgctggccccgcggcttctggtccgaaccccaatccctatgctacgtattcggcaccggcacaaaagtcacagtcctcggccaaccaaaagccaaccccaccgtcacactcttccccccatcctcagaagaactccaagccaacaaagccaccctcgtctgcctcatctccgacttctacccaggcgccgttaccgtagcctggaaagccgacggctcccccgtcaaagccggagtcgaaaccaccaaaccctccaaacaatccaacaacaaatacgccgcatcctcctacctctccctaacccccgaacaatggaaatcacaccgctcctactcctgccaagtcacccacgaaggctccacagtcgaaaaaaccgtcgcccccaccgaatgctcctga

SEQ ID NO: 2448 - RNA, 2520 nt, synthetic construct
  misc_feature 1..2520: note = O00206
  source 1..2520: mol_type = other RNA
atgatgtccgcatcacgcctcgccggaaccctcatacccgccatggcgttcctctcctgcgtaagaccggaatcctgggaaccctgcgtggaagtcgtccccaacatcacctatcaatgcatggaattaaacttttacaaaataccggacaacctccccttctccaccaaaaacctcgacttatcattcaaccccctacgacacctcggctcatattctttcttctccttcccagaactacaagtcctcgaccttagccgttgcgaaatacaaaccattgaggacggcgcctaccaaagcctaagccacctctccacactcatcctcaccggcaaccccattcagagtctagctctcggcgccttcagtggactttcctccctacagaaactcgtcgcagtcgaaacaaaccttgcctccctcgaaaacttccccatcggacacctaaagacccttaaagagctaaacgtcgcccacaatctcatacagtcattcaaactacccgaatacttctccaacctgaccaacctagaacacttagacctctcaagcaacaaaatccaatcaatttactgcaccgacctccgagttctccaccagatgcccctcctcaacctctcactcgacctttcacttaaccctatgaacttcatacagcccggcgccttcaaagaaatacgattacacaaacttaccctccgcaacaacttcgactccctaaacgtcatgaaaacctgtatccaggggctcgccggactcgaagtccaccgcctcgtactcggagagttccgcaacgaaggcaacctcgaaaaattcgacaaatccgccctagaaggactatgtaacctcacaatcgaagaatttcgactagcctacctcgactactacctggacgacataatcgacctattcaactgtctcaccaacgtttcctccttctccttagtgtcagtcaccatcgaacgcgttaaagacttctcctacaatttcggttggcaacatctagagctcgtcaactgtaagttcggccagttcccaacactcaaactgaaatccctcaaacgccttacgttcacatcgaacaagggaggcaacgccttcagcgaagtcgacctcccctcactcgagttcctcgacctatcccgtaacggccttagctttaaaggctgctgctcccagtcagacttcgggaccacctctctaaagtaccttgacctctccttcaacggcgtcataaccatgtcatcaaactttctcggccttgaacaactcgaacacctcgactttcagcactccaacctcaaacaaatgagcgagttctccgtatttctttccctacgtaacctcatctacttggacatctcccacacccacaccagagtagccttcaacggcatcttcaacggtctctcctcactagaagtactcaagatggccggcaactccttccaggaaaactttcttccagacatattcaccgaactccgcaacctcacctttctagacctctctcaatgccaattagaacagctatccccaaccgcgttcaattccctttcctcccttcaagtcctcaacatgtcccacaacaactttttctccctcgatacattcccctacaaatgcctaaattccctgcaagtgcttgactactcactcaaccacatcatgacatcaaagaaacaagaactgcaacacttcccctcttcactcgcattcttaaacctaacccaaaacgacttcgcctgtacctgcgaacaccaatccttcctccagtggataaaagaccaacgccaacttctcgttgaagtcgaacgcatggagtgcgccaccccctccgacaaacaaggcatgcccgtactgtccctcaacatcacatgccaaatgaacaaaacaataataggcgtctcagtcctttcagtcctcgtcgtcagtgtcgtcgcagtgctagtctataaattctacttccacctaatgctccttgccggctgcatcaaatacggccgcggcgaaaacatctacgacgcgttcgtcatctactccagccaggacgaagattgggtccgaaacgaactggttaaaaaccttgaagaaggggtcccacccttccagctatgcctccactacagagacttcatccccggagtcgcgatcgccgccaacataatacatgaaggcttccataaaagccggaaagtcatagttgtagtctcccagcattttatccagtcgagatggtgcattttcgaatacgaaatagctcaaacatggcaattccttagtagccgcgccggaatcatattcatcgtgcttcagaaagtcgagaaaacgttactacgccagcaagtggaactctaccggcttctgtcccgaaacacttatctagaatgggaagactcagtcctcggacgacacattttctggcgccgacttcgcaaggcactcctcgacggaaaatcatggaatcccgagggaaccgtaggtaccggttgcaactggcaagaagccacctcaatctga

SEQ ID NO: 2449 - RNA, 1377 nt, synthetic construct
  misc_feature 1..1377: note = P01730
  source 1..1377: mol_type = other RNA
atgaaccgaggcgtaccattccgccacctcctactagtgctccaactagccctcctcccagcagcaacccaagggaaaaaagtagtcctaggaaaaaaaggcgacacagtcgaactaacctgcaccgcatcccaaaaaaaatcaatccagttccactggaaaaacagcaaccagatcaaaatactaggcaaccaaggctccttcctaacgaaaggcccctccaaactcaacgatcgcgcagacagccgccgctcactctgggaccaaggcaacttccccctcatcatcaaaaacctgaaaatcgaagactccgacacctacatctgcgaagtcgaagaccaaaaagaagaagtacaactcctagtattcggcctcaccgccaactccgatacacacctactccaaggacaatccctcactctaaccctcgaatcccccccgggatccagcccatccgtccaatgtagatcacccagaggcaaaaatatacaaggcgggaaaaccctctccgtaagccaactagaactacaagactccggtacatggacctgtaccgttctccaaaaccaaaaaaaagtcgaattcaaaatagacatagtcgttctcgccttccaaaaggcctcctcaatcgtctacaaaaaagaaggcgaacaagtcgaattcagtttccccctagccttcacagttgaaaaactaacaggctccggcgaactctggtggcaggccgagcgcgcctcctcatccaaatcctggatcacattcgaccttaaaaacaaagaagtctcagtaaaacgcgttacgcaagaccccaaactacaaatgggcaaaaagctccccctccacctcacgctcccccaagccctcccccaatacgccggcagcggcaacctaaccctcgccctcgaagccaagaccggtaaactccaccaagaagtcaacctagtcgtcatgcgagccacacaactccaaaaaaacctcacgtgcgaagtctggggacccacatcccccaaactaatgctctccctaaaactcgagaacaaagaagcaaaagtcagcaagcgcgaaaaagccgtctgggtcctcaaccccgaagcaggcatgtggcaatgcctcctctcagacagcggccaagtcctactagaatcaaacatcaaagtcctaccgacctggagcacaccagtccaacccatggccctcatcgtcctcggcggcgtcgccggcctccttctattcatcggtctaggcatattcttctgcgtccgctgccgacaccggcgccgacaagccgaacgcatgtcacaaatcaaacgactcctttctgaaaaaaaaacctgccaatgcccccaccgtttccaaaaaacctgctccccaatctga

SEQ ID NO: 2450 - RNA, 537 nt, synthetic construct
  misc_feature 1..537: note = P01850
  source 1..537: mol_type = other RNA
atggaagacctcaacaaagtcttcccccccgaagtcgccgtcttcgaaccctccgaagccgaaatctcacacacccaaaaagccaccctagtctgcctcgccaccggcttcttccccgaccatgtcgaactctcctggtgggtcaacggcaaagaagtacactccggcgtctccacagacccccaacccctcaaagaacaacccgccctcaacgactcccgctactgcctctcctcccgcctccgcgtctccgccaccttctggcaaaacccccgcaaccacttccgctgccaagtccaattctacggcctctccgaaaacgacgaatggacccaagaccgcgccaaacccgtcacacaaatcgtctccgccgaagcctggggccgcgccgactgcggcttcacctcagtctcctaccaacaaggcgtcctctccgccaccatcctctacgaaatcctcctcggcaaagccaccctctacgccgtcctcgtctccgccctagtcctcatggccatggtaaaacgcaaagacttctaa

SEQ ID NO: 2451 - RNA, 624 nt, synthetic construct
  misc_feature 1..624: note = P07766
  source 1..624: mol_type = other RNA
atgcagagcggaacccattggagagtcctgggcttgtgcctgctctcggtaggggtctggggccaggacgggaacgaggaaatgggcgggatcacgcaaacgccctataaagtgagcataagcgggaccacagtcatactcacgtgcccacaatatcccggaagcgagatcttgtggcagcacaacgacaaaaacataggcggggacgaggacgataaaaacatcgggagcgatgaagatcacctgagcctgaaagagttctcggaactggaacagagcgggtactatgtctgttacccacgcgggagcaagcccgaggacgcaaacttttacctgtacttacgcgcgcgcgtgtgcgagaactgcatggagatggatgtcatgagcgtggccacgatcgtgatcgtggacatatgcataaccggaggcctgctcttgctagtgtactattggtcgaaaaaccgcaaggccaaggcaaagcccgtgaccaggggcgcgggcgcgggcgggcgacagcgcgggcaaaacaaagagagaccgcccccggtcccgaacccggactatgaaccgatcaggaaagggcaaagggacctgtactcgggcttgaaccagcgcaggatctga

SEQ ID NO: 2452 - RNA, 3915 nt, synthetic construct
  misc_feature 1..3915: note = P08575
  source 1..3915: mol_type = other RNA
atgtacttgtggctgaaactcctcgcattcggcttcgcattcctcgacaccgaagtattcgtaaccggacaatcccccacaccttcaccaacaggcctgacaaccgcaaagatgccctccgtaccactctcatcagatcctctcccaacccacacgaccgccttcagccccgcttctacttttgaacgagagaacgacttctcggagaccacaacatcactcagccccgacaacacatcaacccaggtcagccccgactccctagacaacgccagcgccttcaatacaaccggagttagcagcgtgcaaacaccccacctcccgacccacgccgactctcagaccccctccgccggcaccgatactcaaacattctcaggctctgcagcaaacgccaaactaaaccccacccccggatcaaacgcaattagcgacgtgcccggagaacgctcaactgcctccaccttcccgaccgacccggtgagccccttaacgaccacactttcgctggcccaccattcatccgccgctttacccgccagaacatccaacaccactataactgccaacacttccgacgcatacctcaacgcttccgaaacaaccacccttagcccttccgggtccgccgttatcagcaccacaacgatagccaccaccccctcaaaacctacctgtgacgaaaagtacgccaacatcacggtcgattacctatacaacaaagagacaaagttattcaccgccaaattaaacgtcaacgagaacgtagagtgcggaaacaacacctgtacgaacaacgaggtgcacaacttaacagaatgtaaaaatgcatccgtttcaatatcccacaacagctgcacggccccagacaaaacgttaatcctagacgtcccacccggcgtagaaaaattccaactccacgactgtacccaagttgagaaggccgatacaacaatatgcttaaagtggaaaaacatcgaaacattcacctgtgacacacaaaacatcacctaccgctttcaatgcggcaacatgatattcgacaacaaagaaataaaactcgaaaaccttgagccagaacacgaatacaaatgtgattccgagatcctatataacaaccacaaattcaccaacgcctcaaagataatcaaaaccgacttcggctccccaggcgaaccccaaatcatcttctgccgctccgaagcagcccatcaaggggtaatcacctggaacccacctcaacgcagtttccacaacttcacgctatgctatatcaaggaaacggaaaaagactgcctaaatctcgacaaaaacttaataaagtacgacctgcagaacctgaaaccgtacaccaaatacgtgttgagcctacatgcgtacatcatcgcaaaagtacagagaaatggatccgcggcaatgtgccactttacaaccaaatccgcgccgccatcccaggtatggaacatgaccgtctcgatgacctcagacaacagcatgcacgtaaaatgcaggcccccgcgcgaccgcaacggtccacacgaacgctaccaccttgaagtcgaagctggcaataccctcgtccgcaacgaatcacacaagaactgcgacttccgagtaaaagacctacagtatagcaccgactatacgttcaaagcctacttccataatggtgactaccccggggaacccttcatcctccatcactcaacgtcatacaactccaaagcactaatagcattcctcgcattccttataatagtgacctcaatagccctactcgtcgtcctatacaaaatctatgacctccacaagaagagaagttgtaatctagacgaacaacaagaactcgtagagcgagatgacgaaaagcaactaatgaacgtagaacccatccacgcagatatactcctcgagacctacaagcgcaaaatagctgacgaaggccgtctatttctcgccgagttccaatcaatccccagagtcttctcaaaattccccatcaaagaagcgcgcaaaccctttaaccaaaacaaaaaccggtacgtcgacatcctaccctacgactacaaccgcgtcgaactcagcgaaatcaacggagacgcaggatcaaactacatcaacgcaagctatatcgatggattcaaagaaccacggaaatatatcgccgcccagggaccacgagacgaaacagtagacgacttctggcgtatgatctgggaacaaaaagccaccgttatagtaatggtcacccgatgcgaggaaggaaaccgaaataaatgcgccgaatactggccaagtatggaggaaggcactagagccttcggtgacgtcgttgtgaaaataaatcagcacaaaagatgcccagactacataatacaaaagctaaacatcgtcaacaagaaagagaaagcgacgggcagagaagtcacacacatccagttcacctcatggcccgaccacggtgtccccgaggacccgcacctcctcctcaaactccgccgacgtgtcaacgcattctcaaactttttcagcggcccgatcgtagtccactgctccgcaggagtgggtcgaacaggcacctacatcggaatcgacgccatgctcgaaggcttagaagcagaaaacaaagttgatgtttacggctacgttgtcaaactaagacgccagcgctgccttatggtccaggtagaagcacaatacatcctcattcaccaagccctagtagaatataatcaattcggggaaacggaggttaacctttcggagcttcacccctacctccacaacatgaagaaacgagatccaccctccgaacccagccccctagaagccgaatttcagcgcttaccatcctaccgatcgtggcgcacccaacacatcggcaaccaagaagagaacaaatccaagaaccgaaacagcaatgtcatcccctacgactataaccgcgtccccctaaaacacgagctcgaaatgtcaaaagaatcagaacacgactccgacgaatccagcgacgacgattccgactcggaggaaccctccaaatacatcaatgctagcttcatcatgtcgtactggaagcccgaagtgatgattgccgcacagggccccctgaaagaaaccataggcgacttttggcaaatgatcttccaacgcaaagtaaaagtaatagtcatgcttacagaactgaagcacggcgaccaagaaatctgcgctcagtactggggagagggaaagcaaacctatggcgacatcgaggttgacctaaaggacaccgataaatcaagtacctacacccttagagtgttcgaacttcggcacagcaaaaggaaggactctaggacagtctaccaataccaatataccaattggtcagtcgagcaacttccagccgaaccgaaagaacttatatccatgatacaagtcgtcaaacaaaaacttccccagaaaaattcaagcgaggggaacaaacatcacaaatcgaccccgctactaattcactgccgtgacggaagtcaacaaacaggaatcttttgcgcactactaaacctgctagaatccgccgaaaccgaagaagtcgtcgacatctttcaggtcgttaaggcactccgcaaagcccgccccggtatggtgtcaacgttcgagcagtaccaatttctttacgacgtcatagcatccacttaccccgcacaaaacggtcaagtgaagaaaaacaaccatcaagaggacaaaatcgagttcgacaacgaagttgacaaagtgaagcaagacgccaactgcgtaaacccactcggcgcgccagaaaagctccccgaagcaaaagaacaagccgaagggagtgagcccaccagcggaaccgaagggcctgaacactcggtcaacgggcccgccagccccgcactaaaccaagggtcataa

SEQ ID NO: 2453 - RNA, 765 nt, synthetic construct
  misc_feature 1..765: note = P08637
  source 1..765: mol_type = other RNA
atgtggcaactcctcctccccacagccctcctactcctcgtctccgccggaatgcgcaccgaagacctccccaaagccgtcgtcttcctcgaaccccaatggtaccgcgtcctcgaaaaagactccgtcaccctcaaatgccaaggcgcctactcccccgaagacaactccacccaatggttccacaacgaatcccttatctcctcccaagcctcctcctacttcatcgacgccgccacagtcgacgactccggagaataccgttgccaaaccaacctctccaccctctccgaccccgtacaactcgaagtccacatcggatggctcctcctccaagctccccgctgggtcttcaaagaagaagaccccatccacctccgctgccactcttggaaaaacactgccctacacaaagtcacctacctacaaaacggcaaaggacgcaaatacttccaccacaactccgacttctacatccccaaagccacactcaaagactcaggctcatacttctgccgcggcctcttcggctctaaaaacgtctcttcagaaaccgtcaacatcaccatcacacaaggcctcgccgtctccaccatctcatccttcttcccacccggctaccaagtctcattctgcctcgtcatggtcctcctcttcgccgtcgacactggcctctacttctccgtcaaaaccaacatccgctcatccacccgcgactggaaagaccacaaattcaaatggcggaaagacccccaagacaaatga

SEQ ID NO: 2454 - RNA, 663 nt, synthetic construct
  misc_feature 1..663: note = P10747
  source 1..663: mol_type = other RNA
atgctccgcctcctactcgccctcaacctcttcccctccatccaagtcaccggcaacaaaatcctagtcaaacaatcccccatgctcgtcgcgtacgacaacgccgtcaacctctcctgcaaatactcctacaacctcttctcccgcgaattccgcgcctcccttcacaaaggcctcgactccgccgtcgaagtctgcgtcgtatacggcaactattcccagcaactccaagtctactctaaaaccggcttcaactgcgacggcaaactcggcaacgaatccgtcacattctacctccaaaacctctacgtcaaccaaaccgacatctacttctgcaaaatcgaagtaatgtacccccccccctacctcgacaacgaaaaatccaacggcaccatcatccacgtaaaaggcaaacacctttgcccctcccccctcttccccggcccctctaaacccttctgggtcctcgtcgtcgtcggcggcgtcctcgcctgctactccctcctagtcaccgtagccttcatcatcttctgggtccgctccaaacgctcccgtcttctccactccgactacatgaacatgaccccccgccgccccggccccacccgcaaacactaccaaccctacgcccccccccgagacttcgccgcctaccgctcctga

SEQ ID NO: 2455 - RNA, 681 nt, synthetic construct
  misc_feature 1..681: note = P11912
  source 1..681: mol_type = other RNA
atgcccggcggccctggagtccttcaagccctacccgccaccatcttcctcctcttcctactctccgccgtctacctcggccccggctgccaagccctctggatgcacaaagtccccgcatccctaatggtctcactcggcgaagacgcacacttccaatgcccccacaactcctcaaacaacgccaacgtcacctggtggcgcgtcctccacggaaactacacctggccaccagaattcctcggccccggcgaagaccccaacggcaccctcatcatccaaaacgtcaacaaatctcacggaggcatctacgtctgcagagtacaagaaggaaacgaatcctaccaacaatcctgcggcacatacctacgagtccgccaaccccccccgcgcccattcctcgacatgggagaaggcaccaaaaaccgcatcatcactgccgaaggaatcatcttactattctgcgccgtcgtccccggcaccctactactcttccgcaaacgctggcaaaacgaaaaactcggcctagacgccggagacgaatacgaagacgaaaacctctacgaaggcctcaacctagacgactgctccatgtacgaagacatatcacgcggcctacaaggcacctaccaagacgtaggctccctcaacatcggcgacgtccaactcgaaaaaccctga

SEQ ID NO: 2456 - RNA, 1671 nt, synthetic construct
  misc_feature 1..1671: note = P15391
  source 1..1671: mol_type = other RNA
atgcccccaccccgtctactatttttcctcctcttcctaacacccatggaagtaagacccgaagaacccctcgtcgtcaaagtcgaggaaggagacaacgcagtgctccagtgcctaaaaggcacatccgacggacctacccaacaactcacctggtcccgcgaaagtccattaaaacccttcctcaaactatccctaggcctcccaggactaggcatccacatgcgacccctagcaatatggctattcatattcaacgtctcacagcaaatgggaggcttctacctctgccaaccaggcccaccctctgaaaaagcatggcaacccggatggaccgtaaacgtcgaaggaagcggagaactcttccgctggaacgtctcagacctcggcggacttggctgcggcctaaagaaccgctcatccgaaggaccatcatcaccctccggcaaactcatgtccccaaaactatacgtatgggctaaagacagaccagaaatatgggaaggagagccgccctgccttcccccacgcgacagcctcaaccaatcactctcccaagacctcacaatggcacccggcagcactctttggctatcctgcggagtcccacccgactccgtctcacgcggcccactatcatggacccacgtacatcccaaaggccccaagtcactgctcagcctagaactcaaagacgacaggcccgcacgagacatgtgggtcatggagacaggcctcctccttccccgcgccaccgcacaagatgctggtaaatactactgccaccgaggcaatctaacaatgtccttccacctagaaatcaccgcacgaccagtcctttggcactggctcctccgcaccggcggctggaaggtctccgccgtcacccttgcctacctaatcttctgcctctgctcactcgtcggaatcctccacctccaacgcgcactcgtcctccgaagaaaaagaaaacgcatgacagaccccacacgccggttcttcaaggtcactcccccaccaggctccggcccccaaaaccaatacggcaacgtgctcagcctcccgaccccgacctccggactcggccgagcacaaagatgggccgccggcctcggaggaaccgccccctcatacggcaaccccagttccgacgtacaagcagacggcgccctcggttcaagatcaccaccaggagtaggccccgaagaagaagaaggcgaaggctacgaagaacccgatagcgaagaagacagcgagttctacgaaaacgactccaaccttggccaagaccaactctcacaagacggatccggatacgaaaaccctgaagacgagccattaggcccagaagacgaagacagcttctccaacgcagaatcctacgaaaacgaagacgaagaactcacacaacccgtagctagaacaatggacttcctaagcccacacggctcagcctgggatccctcacgcgaagctacctccctaggaagccaaagctacgaagacatgcgaggtatcctttacgccgctccccaattacgatcaatccgcggccaaccaggcccaaaccacgaagaagacgcagactcctacgaaaacatggacaacccagacgggcccgaccccgcctggggagggggagggcgcatgggaacatggtccacacgctaa

SEQ ID NO: 2457 - RNA, 672 nt, synthetic construct
  misc_feature 1..672: note = P16410
  source 1..672: mol_type = other RNA
atggcatgcctcggcttccaacgccacaaagcccaacttaacctcgccacccgaacatggccctgcaccctcctcttcttcctcctcttcatccccgtcttctgcaaagcaatgcacgtagcacaacccgccgtcgtcctcgcctcatcccgcggcatcgcctccttcgtatgcgaatacgcctcccccggcaaagccacagaagtccgagtcaccgtcctccgtcaagccgactcccaagtcaccgaagtatgcgcagccacatacatgatgggcaatgaactaaccttcctcgacgactccatctgcacaggcacctcctctggcaaccaagtaaacctcaccatccaaggcctccgcgccatggacacaggactctacatctgcaaagtcgaactcatgtacccccccccctactacctcggcatcggcaacggcacccaaatctacgtcatcgaccccgaaccctgcccagactcagacttcctcctctggatcctcgccgccgtctcctccggcctcttcttctactccttcctcctaaccgccgtctccctctctaaaatgctcaaaaaacgctcccccctcaccaccggcgtctacgtcaaaatgccccccaccgaacccgaatgcgaaaaacaattccaaccctacttcatccctatcaactga

SEQ ID NO: 2458 - RNA, 1419 nt, synthetic construct
  misc_feature 1..1419: note = P16671
  source 1..1419: mol_type = other RNA
atgggctgcgaccgcaactgcggcctcatagccggcgccgtaatcggcgctgtcctcgcagtcttcggtggcatactaatgcccgtcggcgacctcctcatccagaaaaccatcaagaaacaagtcgtcctcgaagaaggaacaatcgccttcaaaaactgggttaaaaccggcaccgaagtctaccgtcagttctggatattcgacgtccagaacccccaagaagtcatgatgaactccagcaacatccaagtcaaacaacgaggcccctacacctaccgcgtacgatttctcgccaaagaaaacgtaacccaagacgccgaagacaacaccgtctcattcctacaacccaacggagccatcttcgaaccatcactatccgtcggcaccgaagccgacaacttcaccgtcctaaacctagcagtcgccgccgcctcgcatatctaccaaaaccaattcgtccagatgatcctaaactcattaatcaacaaatccaagtcctccatgttccaagtccgcaccctcagagaactcctctggggctacagagacccgttcctaagcctcgtcccgtacccagtcactaccacagtaggactattctacccatacaataacacagccgacggtgtctacaaagtcttcaacggaaaagacaacatatctaaagtagccatcatcgacacctacaaaggcaaacgaaacctctcgtactgggaatcccactgcgacatgataaacggcacagacgccgcctcatttccaccattcgtcgaaaaatcacaagtcctccaattctttagctccgacatatgccgctcaatctacgctgtcttcgaatctgacgtcaacctcaagggaatccccgtataccgcttcgtcctaccctccaaagccttcgcctcccccgtcgaaaatcccgacaactactgcttctgcaccgagaaaataatctccaaaaactgcacctcctacggcgtcctagacatctccaaatgcaaggaaggccgccccgtatacatctccctcccccacttcctgtacgcctcccctgacgtaagcgaacccatcgacggcctcaaccccaatgaggaagaacaccgaacctacctcgacatcgaacccatcacaggattcaccctacaattcgccaaacgcctccaggtcaacctcctcgtcaaaccatccgagaaaatccaagtcctcaaaaacctcaaacgcaactacatcgtacccatcctctggctcaacgaaaccggcaccattggcgacgaaaaagcaaacatgtttcgctcacaggtcacaggcaaaatcaacctcctaggtctcatagaaatgatcctcctctccgttggcgtagtcatgttcgtcgccttcatgatatcctactgcgcctgccgatcaaaaaccataaaatga

SEQ ID NO: 2459 - RNA, 651 nt, synthetic construct
  misc_feature 1..651: note = P26718
  source 1..651: mol_type = other RNA
atgggctggatccgcggccgccgctcccgccactcctgggaaatgtctgaattccacaactacaacctagacctcaaaaaatccgacttcagcacacgctggcaaaaacaacgatgccccgtcgtcaaatccaaatgccgcgaaaacgcctcccccttcttcttctgctgcttcatcgccgtcgccatgggcatccgcttcatcatcatggtcgccatctggtccgccgtcttcctcaactccctcttcaaccaagaagtccaaatccccctcaccgaatcctactgcggaccctgccccaaaaactggatctgctacaaaaacaactgctaccaattcttcgacgaaagcaaaaactggtacgaatcccaagcctcctgcatgtcccaaaacgcctccctcctcaaagtctacagcaaagaagaccaagacctcctcaaactcgtcaaaagctaccactggatgggcctagtccacatccccaccaacggctcatggcaatgggaagacggctcaatcctctcccccaacctcctaaccatcatcgagatgcaaaaaggcgactgcgccctctacgcctccagcttcaaaggctacatcgaaaactgctcgacccccaacacatacatctgcatgcaacgcaccgtctaa

SEQ ID NO: 2460 - RNA, 261 nt, synthetic construct
  misc_feature 1..261: note = P30273
  source 1..261: mol_type = other RNA
atgatccccgccgtcgtcctcctcctcctcctcctcgtcgaacaagccgccgccctcggcgaaccccaactctgctacatcctcgacgccatcctcttcctctacggcatcgtcctcaccctcctctactgccgcctcaaaatccaagtccgcaaagccgccatcacctcctacgaaaaatccgacggcgtctacaccggcctctcaacccgcaaccaagaaacctacgaaaccctcaaacacgaaaaacccccccaatag

SEQ ID NO: 2461 - RNA, 1137 nt, synthetic construct
  misc_feature 1..1137: note = P32248
  source 1..1137: mol_type = other RNA
atggacctcggtaaacccatgaaatccgtcctcgtcgtcgcccttctcgtaatcttccaagtttgcctatgccaagacgaagtcaccgacgattacataggcgacaacaccaccgtcgactacaccctcttcgagagcctatgctcaaagaaagacgtccgcaacttcaaagcctggttcctccccataatgtactcaattatctgcttcgtcggcctcctcggaaacggcctcgtcgtactcacctacatctacttcaaacgactcaaaaccatgaccgacacatacctcctaaacctcgccgtcgccgacatcctcttcctactcaccctccccttctgggcatactcagccgccaaatcatgggtgttcggagtccacttctgcaaactcatcttcgccatctacaaaatgtctttcttctccggcatgctcctcctcctctgcatctccatcgaccgctacgtcgccatcgtccaagccgtctcagcccaccgccaccgtgcccgcgtcctgctaatctccaaactctcatgcgtcggcatctggatcctcgccaccgttctctccatccctgaattactctactccgacctccaacgcagctcctccgagcaagccatgcgctgctccctcataaccgaacacgtcgaagcattcatcacaattcaagtagcccaaatggtcataggattcctcgttcccctcctcgccatgtcattctgttacctcgtcataattcgcaccctcctccaagcacgcaacttcgagcgcaacaaagccatcaaagtcatcatcgccgtcgtcgtagtcttcattgtattccaactaccctacaacggggtcgtcctcgcccaaaccgtcgccaacttcaacatcacctcttcgacctgcgaactctccaaacaactaaacatcgcatacgacgtcacctactccctcgcctgcgtacgctgctgcgtaaaccccttcctatacgcattcatcggcgtaaaattccgcaacgacctattcaagctattcaaagacctcggctgcctctcacaagaacaactccgtcaatggtcctcctgcagacatatacgccgctcctcaatgtccgttgaagccgaaaccaccaccaccttctccccctga

SEQ ID NO: 2462 - RNA, 690 nt, synthetic construct
  misc_feature 1..690: note = P40259
  source 1..690: mol_type = other RNA
atggcccgactcgccctctcccccgtcccctcccactggatggtagccctcctactcctactatccgccgaacccgtccccgcagcccgctccgaagaccgctaccgcaacccaaaaggctccgcatgctcccgcatctggcaatcaccccgcttcatcgcccgcaaacgcggattcaccgtcaaaatgcactgctacatgaactccgcctccggcaacgtctcctggctatggaaacaagaaatggacgaaaacccccaacaactcaaactagaaaaaggccgcatggaagaatcccaaaacgaatccctcgccaccctcaccatccaaggcatccgattcgaagacaacggcatctacttctgccaacaaaaatgcaacaacacctccgaagtttaccaaggctgcggaaccgaactccgagtcatgggcttctccaccctcgcacaactcaaacaaagaaacaccctcaaagacggcatcatcatgatccaaaccctcctaatcatcctcttcatcatcgtaccaatcttcctcctactcgacaaagacgactccaaagccggcatggaagaagaccacacctatgaaggcctcgacatagaccaaaccgcaacctacgaagacatcgtcaccctccgcaccggcgaagtcaaatggtccgtcggcgaacaccccggccaagaatga

SEQ ID NO: 2463 - RNA, 990 nt, synthetic construct
  misc_feature 1..990: note = P42081
  source 1..990: mol_type = other RNA
atggacccccaatgcaccatgggcctctccaacatcctcttcgtaatggcctttctcctctccggcgccgcccccctcaaaatccaagcctacttcaacgaaaccgccgacctcccctgccaattcgccaactcccaaaaccaaagcctctccgaactcgtcgtattctggcaagaccaagagaacctcgtactcaacgaagtctacctcggcaaagaaaaattcgactcagtccactccaagtacatgggccgtacctccttcgactccgacagctggacactacgactacacaacctacaaatcaaagacaaaggcctctaccaatgcatcatccaccacaaaaaacccaccggcatgatccgtatacaccaaatgaactccgaactctctgtcctcgccaacttctcacagcccgaaatcgtccccatctctaacataaccgaaaacgtctacatcaacctaacctgctcctccatccacggataccccgaacccaaaaaaatgtccgtcctactccgcaccaaaaactccaccatcgaatacgacggcgtcatgcaaaaatcgcaggacaacgtcaccgagctttacgacgtatccatctccctctccgtctccttccccgacgtcacctccaacatgacaatcttctgcatcctcgaaactgataaaacacgcctcctctcctcacctttctcaatcgagctcgaagacccccaacccccccccgaccacatcccttggatcaccgccgtcctacccaccgtcatcatctgcgttatggtcttctgcctaatcctctggaaatggaaaaaaaaaaaacgtccccgcaactcatacaaatgcggcaccaacaccatggaacgagaagaatccgaacaaaccaaaaaacgcgaaaaaatacacatccccgagcgctccgacgaagcccaacgcgtcttcaaatcctccaaaacctcctcctgcgacaaatccgacacatgcttctga

SEQ ID NO: 2464 - RNA, 1011 nt, synthetic construct
  misc_feature 1..1011: note = Q15762
  source 1..1011: mol_type = other RNA
atggactaccccaccctcctactagccctcctccacgtctaccgagcactctgcgaagaagtcctatggcacacatcggtccccttcgccgaaaacatgtccctcgaatgcgtatacccctccatgggcatacttacccaagtcgaatggttcaaaatcggcacccaacaagactccatcgccatcttctcaccaacacacggcatggtcatccgaaaaccctacgctgaacgcgtctacttcctcaactctaccatggcctcaaacaacatgaccctatttttccgcaacgcaagcgaagacgacgtcggatactactcctgctccctctacacctacccccaaggaacctggcaaaaagtcatccaagtcgtccaatcagacagcttcgaagccgcggtcccctccaactcccacatcgtctccgaacccggcaaaaacgtcaccctcacatgccaaccccaaatgacctggccagtacaagccgtcagatgggagaaaatacagccccgccaaatcgacctcctaacttactgcaaccttgtacacggacgaaacttcaccagcaaattcccacgccaaatcgtatccaattgctcacacggccgatggagcgtcatcgtcatccctgacgtcaccgtctccgacagcggcctctatcgctgctacctccaagcctcagccggcgaaaacgaaaccttcgtaatgcgcctaaccgtagccgaaggcaaaaccgacaaccaatacaccctcttcgtcgccggcggaacggtactcctcctactcttcgtcatctccatcaccaccataatcgtaatcttcctaaaccgccgccgccgacgcgaacgccgagacctattcaccgaatcctgggacacccaaaaagcacccaacaactaccgctccccaatctccacctcacaacccaccaaccaatccatggacgacacccgcgaagacatctacgtcaattacccaaccttctctcgccgcccaaaaacccgcgtctga

SEQ ID NO: 2465 - RNA, 13482 nt, synthetic construct
  misc_feature 1..13482: note = Q685J3
  source 1..13482: mol_type = other RNA
atgcctcgacctggcaccatggccttatgcctcctcaccttggtattatccctgcttccaccccaggccgctgccgaacaagacttatccgtcaatcgtgctgtctgggacggtggcggatgtatatcgcaaggtgatgtccttaaccgccaatgccaacagctctcacaacacgtacgaactggcagtgctgcaaataccgctactggcacgacctccactaacgtcgtagaacccaggatgtacttaagctgctcaactaaccccgaaatgacttccatagaatcctccgtaactagcgacacgccgggcgtctccagcactcgtatgactcccactgaatcaagaaccacttcagaaagtaccagtgactccactaccctattcccatcatcaaccgaagacacttcgtccccaacgactcccgaaggcactgatgttcccatgtccaccccgtcagaagaatccatctcatctactatggcttttgtttctactgcccctctaccttctttcgaagcatacacttccttgacctacaaggttgacatgtcgaccccgctcaccacttcaacccaggcgtctagctccccgaccacccccgaatcaaccaccattcccaagtctacgaatagcgaaggcagcacacctctcacatccatgcccgcctccaccatgaaagtagcctcatcggaagccataacgcttctcactacaccggtagaaattagcacgccagttacaatttctgcacaagctagctccagtccaaccacggccgaaggtccttcgttgtcaaatagcgcaccatccggcggcagcaccccacttacccgtatgcccctctcagtaatgttagttgtcagcagcgaagcatctacactgtccactacccccgccgctaccaacatacccgtcattactagcacagaagcctccagctcgcctacaacggccgaaggtaccagtatacccaccagcacatacacagaaggcagcactcccctaacatccacgccagcaagcacaatgcccgttgccaccagcgaaatgtctactctatccataacgcctgttgatacctcgacattagtcaccacctctaccgaacccagctccctccctacgaccgcagaagccacctcaatgctgacaagcacgttgtctgaggggtcaacgccacttacaaacatgccggtttcgactatcttagtggccagttccgaggcctctactacatccacgatcccagtagactctaagacttttgttaccaccgcatcagaagcgtcaagctcacccactactgctgaagacacttctatagctacgtctacaccgtccgaaggatctacgccattgacatccatgcccgtatccaccacccccgtcgcgagcagcgaggcttcgaatctcagtaccacccccgttgactcgaaaacacaggtaaccacgtctactgaagccagctcatctccgccaaccgctgaagtgaacagtatgcctacgtctacgccctccgaaggatcaacacccctgaccagcatgtcagtctccactatgccagttgcttcatccgaggcttcgactctatcaactacgcccgtggacacatcaacaccagtaacgacttcctctgaagcaagtagcagctccacaactcctgaaggcacatcgattcctacaagtaccccatcggaaggatccacgcctctgactaacatgccagtttcgacacgtctcgtcgtcagtagtgaagcatcgaccacttcaacaacaccagccgactctaataccttcgtcactacgagttctgaggcatcatcaagctccaccaccgcagaaggcactagcatgccaacgtccacctactcagaacgcgggaccaccatcacctccatgtctgtgtcaacgacccttgtagcatcctctgaagcctccactctatcgaccacacccgtagatagcaatactcctgtaacaacttccaccgaagcaacatcgtcctctacaaccgccgaaggtacatcgatgcctacatcaacatataccgaaggaagtacacctttgactagcatgccagtgaacaccacgttagtagcttcttccgaagcctccaccttaagtactactccagtagatacatcgacacccgtaacgacgtccaccgaagcatccagctctccaactacagctgatggcgcctcaatgcctacctccactccctcagaaggctccacgcctctgacgtctatgcccgtatcaaaaacactcctaacctcgtctgaagcctccacactctctacaactcccttagacactagcactcacattaccaccagcaccgaagcgagttgttcacctacaaccaccgaaggaacctctatgccaatttccaccccgtccgaagggtccccactcctgacctccattccagtcagcataacccccgtcacctcccccgaagcaagtactctctcaacgactcctgttgactccaattcgcccgtcaccacatcaacagaagtttcttcctcgccaaccccagccgaaggcacgagcatgccgacttcaacttacagtgagggtcgaacgccgctcacctccatgcccgtatcgactacgcttgtcgcaaccagcgcaattagcactcttagtacaacaccggtcgatacaagtacaccggtcaccaactcgaccgaagcacgtagttccccgacgaccagtgaagggacctccatgcccacttccactcccggtgaaggatcaaccccactcacctccatgccagacagcaccaccccggtcgtgtcatcagaagccagaactttgtcagctacccccgtagacacatcaacaccagtgaccacgtctactgaagcaacatcttccccaacaaccgcagaaggaacctcgatacccacatctaccccctctgagggaactactcccttaacgtcaactccagtctcacatacactcgtcgctaattccgaggcttccacactatcaacgacgcctgtggattcaaataccccactaactacttcaaccgaagcctcttcacctcccccaacagccgagggaacctcgatgcccacatctactccttctgaaggctcgacaccactaacgagaatgcccgtctccacaacaatggtagcgtcaagcgagacatctaccctgtcaacaacaccagcagacaccagcacgcctgtgacaacatactcgcaagcatcttcttcatcaaccaccgccgacggcacaagcatgccgacatctacctattcagagggctcgacaccccttacctcagttccagtctccactcgcctagtagtctcctctgaagcatccacgcttagcacaactcccgtcgacacttctatcccagtcactacctcaacggaagcaagctcctcgcctaccaccgcggagggaacaagtatacccacatcacctcccagcgaggggacaacacccctggcatctatgccggtttccacgaccctcgttgtatcctccgaggctaacaccctaagcacgacaccagtcgatagcaaaacccaagtggctacttccactgaagcctcatcccctccacccaccgcagaagtaacatcaatgcccacgtcaacccccggggaacgatcaactccgctaacgtctatgccggtaagacacacccccgtagcatcttcggaagcctccacactctcaacttcacccgttgacacaagtacccccgtaacaacttccgccgagacatcctcatccccaaccactgcggaaggcacctcactacccacatctaccacctctgaaggttctacattacttaccagcattcccgtctctactacactcgttacatcaccggaagcctcgacactcctaactactcctgtcgacacaaaaggaccagtagtaacgtcaaacgaggtctcgagctcgcccactccagcggaaggcacaagtatgcctacgtccacttactcagagggccgaactccgctcaccagcatacccgtcaacacaactctcgtggcctcaagcgccattagcatactgtccaccacacctgttgacaacagcacgccggttactacctccacagaagcatgcagctcgcccacaacgtccgagggtacctccatgccgaacagcaacccctcggaaggtaccacgcccttaacgtccattcctgtctcaaccacccccgttgtttcatcagaggcgagtacactgtccgcaactccagtagacacctccacacccggcaccacttccgccgaagccacaagttctcccacgacagccgaaggcataagcatccccacctccacgccaagtgaaggcaagacccctctgaaatcaatcccggtcagtaacacacctgtcgccaactcagaagcaagcacgctttccactactcccgttgacagtaactctccagtagtcacatctaccgcagttagctctagccccacaccagccgagggtaccagcatagcaattagtacgccatctgagggcagcacggctttgacatcaatccctgtatccacaacaacggtagcatcgtcggaaatcaacagcctttcaactacgcccgcagttacgagcacccctgtaacaacttacagccaggcctcttcgtctcctacaactgctgacggaacgtcgatgcagacctcaacctacagcgagggatccacccccttaacctcactgccagtctcaacgatgctagtcgtctcttcggaagctaataccctaagcacaactccaatcgactcgaaaacacaggtcaccgcttcaactgaagctagttcttcaactacggcagaaggaagctccatgactatctccacacctagcgaaggttctcctcttctcacatctataccagtctccaccacacccgtagcgtctccagaggcttccacgctttcaaccacgccagtcgactcgaactctcccgtaattacctccaccgaagtttccagctcccccacccccgctgaagggacctcaatgcccacttcaacatataccgaaggacgaacacccctaacatcgataacggtccgcaccaccccggtcgcaagttccgcgatctcaacccttagcaccaccccagtagacaattccactccagtcacgacctccactgaggcacgatcctcccccaccaccagtgaaggtacttcaatgccgaactccactccttcggagggcacaacaccgctaacatctattcccgtgtccacaactcccgtcctctcctcagaagccagcacgttgagcgccacccctatagatacgtctacccccgttaccacttcaacggaggcaacctcctcacccactaccgctgagggcacgtccattcctacctcaacgttatcggaaggcatgaccccgctaacttctacgccggtttctcacaccttagtggcaaactcagaagcatccactttatctacgactcctgtggattccaattcaccagtcgtcacaagcacagccgtctccagttcgcccactcccgcagaaggtacatctatcgctacctctacaccatccgagggctcaaccgccctaacctctataccggtctcgactaccaccgtcgcatcctcggaaacaaataccttaagtacaacaccagccgttacctccacccccgtcaccacatatgcacaagtgagcagctctccaaccactgcggacggctccagcatgcccacttcgacacctcgggaggggcgcccaccattaacatccattccggtatctaccaccaccgtagcctccagcgaaatcaataccctatctacgaccctggccgacactagaactcccgtaaccacctactcgcaagcatcctcgtcgccaacgactgccgacggcacatccatgcccaccccggcctactccgaagggtccactccgctcactagcatgcctctctcgaccacgctagtggtgtcttccgaagcaagcacactttctacaacacccgtagacacatcaactccggccaccacgtctacggaaggatcttcatcaccaacaacagccggcggaacgtcaatccaaaccagcacaccgtccgaaagaactactcctttggcagggatgcccgtatccacgacactcgtcgtatcatccgagggcaataccctgtccactaccccagttgacagcaaaacccaggttacaaactcgacagaagcatcatcgtcggcaacagccgaagggagcagtatgacgatctccgccccctccgagggatctcccctcctaacatcaattccactttccacgacaccagtagcttcccccgaggcttcaacactaagtactacccctgtagattcaaattcgccggtcataaccagtacagaagtatcctcctcacccatcccgactgaaggcacaagtatgcaaaccagcacttattctgaccgccggactccacttacgtcaatgcctgtttccactacagtcgtggcctcatcagctatctccacactatctaccacaccggtcgatacttccacacccgttactaactcaacagaagcacggagctccccgacaacctctgagggaacctcaatgcccacatcaaccccatctgaaggctcgactccgtttacttcaatgcccgtttccacgatgcccgtggtcacaagtgaagcgtccacactatcagccaccccggtcgacacatcgacgccagtgacgacatccacagaggcaacaagctcaccaacgacagcagaaggcacgtccattcccaccagcaccctcagcgagggaactaccccattaacttccatccccgtttcacatacgctcgtggccaactcagaggtctcgacattatccacgacccccgtagactctaacacgccttttacaacgagcaccgaagctagttcaccccctcccacagcagaagggacttccatgcccaccagtacaagtagcgaaggaaacacaccactcactagaatgccagtaagcactacgatggtggctagctttgaaacgtcgaccttatcaaccacccccgccgacacttcgaccccggtaacaacatactcccaagcaggatcatctcctactacagcagacgatacatctatgccgacctctacatattcagagggttccacacccctcacttcagtccctgtctcaactatgccagtagtgtcatctgaagcgtctacacactcaacgactcctgtggatacaagtaccccagtaaccacgagtaccgaagcctcttcatcacccactactgctgaaggaacatctatccccacctcgccccctagcgaaggcacgactcccctagccagcatgccggtctccacaacacctgtagtctctagtgaggccgggactctctctactacacctgtcgacacatccacccctatgactacctcgacggaggcttcatcttcacccacaaccgcggaggacattgttgtacccatctctacggcctcggaaggatccacactcctcaccagcatccctgtctctaccacacccgtcgcatcccctgaggcttccacactctctaccaccccagtcgattccaattcaccggtcgtcacgtctaccgagatttccagttctgctacatctgcggaaggcacatccatgccaacgtcaacttacagtgagggctccacgcccttgagaagcatgcctgtctccactaagccattagcaagctcggaggcatccaccctctcaacgacacccgtcgacacgtcgataccggtcactacaagtaccgaaacttcatcgagcccaactactgccaaagacacctcaatgccaatatcaaccccctccgaggtctcgacaagtctgacatcgatcctagtatctactatgcctgtcgcctcgagtgaagcatctacactctccacgaccccggtggatacccgcactctagtcacaacctcgactggcacatcatcatctcctacaacagccgaaggttctagtatgccgacctctactcccggagagcgctccaccccgcttactaatatattagtatcgacaactctcctcgccaacagtgaagcatcgactttgagcaccactccggtagatacgagcaccccagttactacctctgctgaagcctcctcttcgccaaccactgccgagggcacctcgatgcgtatatccacgccctcggatggatccactcccctaacttccatcctcgtgagcacccttccagtcgcatcgagcgaggcttctaccgtatcgaccacagctgtagacaccagcatacccgttaccacatccaccgaagcgagcagctcccctactaccgctgaggtcactagcatgcccacgtcaacaccttctgaaacctcaactcctctgacgtccatgcctgtgaatcacactcctgtggcatcctcggaagccggcaccctcagcactacacccgttgacacctctaccccagttaccacttcaacgaaggcctcttcttcacccacaacagcagagggtatagttgtcccaatatccactgcttcggagggtagcactcttctcacctcgatcccagtcagcactaccccggtggcctcatccgaagcctcgaccctatcaaccaccccggtagacacctcaatccctgtcacgacctctacagaagggtctagttctccaacaacagccgaagggacctcaatgccaatatcgactccaagcgaagtttcaactccactcacctccatccttgtctccaccgtccctgtcgcaggatccgaggcttccacgctctccacaacccccgttgatactcgcactccggtgactactagcgcggaggcctcgtcctcccccacaacagcagagggaacaagtatgcccatttcgacgccaggtgaacggagaacaccactgacatctatgagcgtatctactatgcccgtagcctcatcagaagctagcacattatcacgaactcccgcggacacgagtacccccgttactacatccactgaagcaagttcatctccaacaacggcagaaggtaccgggattcctattagtactcccagtgagggatccacccccttaacctcaattcccgtatcgaccacccccgtcgcaatcccggaggcctccaccctgtctaccactccggtcgacagtaacagcccagtcgtcacttccactgaggtctcttcttctccaactcctgcagaaggcacatccatgcccatctccacatattcggagggttccacacccctgacaggtgtgccagtctctacgaccccagtcacatcctcagccatcagcacgctgagtaccacacctgtcgacacatcgactcctgttactacaagcacagaggctcactcctcgcccactaccagtgagggcacgtctatgccaacatccaccccttccgagggatccacgccactcacttatatgccggtatcaacgatgctagtagttagcagtgaagactccactctctctgcaaccccagtagacacatcaaccccggtcaccacctcaactgaggcaacttcctctaccaccgctgaaggaacgtccatacctacctcaaccccctcggagggaatgaccccattgacttcagtcccagtttctaatacacctgtcgccagctccgaagcctctatcctcagtacaacccccgtcgatagcaataccccgctaacaacgtcaacagaagctagctcatctcctcccactgctgagggtacctcaatgcccacctcaacaccgagcgagggctctacaccattaacctcaatgcccgtttcaaccactacagtcgcatcctctgagacttccacattgtctacgacaccagccgacacatctacccctgtcacaacctattctcaggcttcgtcctcgccccctatcgccgatggaacaagcatgcctacatcaacctacagcgaaggatctacacccctgaccaacatgagtttctccacaacccccgtcgtgagcagcgaagcctccaccctcagcaccacacccgtcgacacatctaccccagtgaccacaagtaccgaggcctccctttcaccaacaacagctgaaggtacctccatccctacatcctcaccttcagagggcacaacgcccctagcatcgatgccagtatccaccactcctgtggttagcagcgaagtcaataccctatcaactactccagtcgactctaataccctagtaactacgtctacagaagcctcctcaagccccacaatagccgaaggaacttcacttcccacatcaaccacttcagaggggtccacgccactatcaataatgccactctcaaccacacccgtcgccagcagtgaagccagtaccctctcgactactcctgttgatacttccaccccagtaactaccagttctcccactaattcgagtcctaccactgctgaggtcacaagtatgccgacatcaaccgccggcgagggttcaacacccctcactaatatgccggtctcgacaactccggtagccagctcagaagcctccactctgtccacaacccccgttgactcaaacacctttgtaacctcgtcttcgcaggcttcttcctccccggcaacgctccaagtcacaacaatgagaatgtctacgccctctgaaggcagctcctctcttaccacaatgctcctctcctccacttacgttacttcatcagaagcctcgacgcctagtactccaagcgttgaccgatcgacaccagtaacaacctctactcaaagcaactcaacacccactccgcccgaggtaataaccttacctatgtctaccccatctgaagtctctacaccgcttactatcatgccagtctcgacaacgtccgtgaccataagtgaagccggaacggccagcaccctccccgttgacacctctacgccagtcataacctcaacgcaagtcagctcgtcacccgtcacccctgaaggcaccactatgcccatttggacgccgtctgaaggttcgacccccttaacaacgatgccagtctcgacaacccgtgttacttcatcggagggctccactttatctaccccaagtgtcgtcacttcaacccctgtgaccacatccacagaagcaatttcctcaagcgcaaccctggattctaccacaatgtcagtttccatgccaatggaaatatctaccttaggcactactatcttagtttcgactacacccgttaccagatttccagagtcctcaacgccttccatcccaagtgtctatacctctatgtccatgaccaccgccagtgaagggagcagctcccccacgactcttgagggaaccacaactatgcccatgtccaccacatccgaaaggtctacacttctaaccactgtactcatatctccaattagcgtaatgtctccttccgaagcctcaacattatccacaccacccggcgatacctctacaccacttcttacatccacaaaggcgggctcattctccatccctgctgaggtcacgaccataagaatttccatcacctccgaacgcagtactcctttaaccaccctattggtatcgacaaccctgcctacctcatttccaggcgcctcgattgcgagtacaccaccccttgatacgtccaccacgtttactccttccacagacaccgcctcaactcctaccatcccagtagctactactatctccgtctccgtaatcacagaagggagcacgcccggcaccacaatattcattccgtcaaccccagtcacctcctcaactgccgacgtgttcccagcaacgacgggggcagtttctacgcccgtcattacttcgacagaactaaacactccctccacgagcagctctagcacaacaacctcattctctaccactaaagagttcacgacgccagccatgacaactgccgcccccttaacctacgtcaccatgagtacggccccgtccacaccccgcaccacctcgcgcggctgtactacaagcgctagtacattatctgcaacctccacaccccacacatccacatccgttaccacgcggccagtaactccgagcagcgagagttccaggccttccactattactagccataccatccctcctacatttccacccgcccactcgtcgactccacccacgacctcagcgtccagcactacggtaaatcccgaagctgttaccaccatgacaacccgtactaaaccaagcacacgtactacctcttttcccacagtaacgactaccgcggtccccaccaatactacgatcaaaagcaaccccacgtctaccccaacagttccacgcaccactacttgcttcggcgatggctgccaaaacactgcttcacgttgcaaaaacggtggtacatgggacggtctgaaatgtcaatgccctaacctgtattacggtgagctatgcgaagaagtagtatctagcatcgacattgggccacccgaaacgatctccgcccagatggagctcactgtgactgttacttctgtgaaattcaccgaggaactcaaaaaccactcctcacaagaatttcaagaatttaaacagacattcactgaacagatgaacatagtttactcaggcattccggagtacgtaggagttaacattacaaaactacgcctggggagcgtggtcgtagaacatgacgttctccttcgcacaaaatacactccggaatataaaaccgtactagacaatgcaacagaagtggtgaaagaaaagatcactaaagttacgactcaacagataatgataaatgatatctgctcagatatgatgtgtttcaatactacgggcacccaagtccaaaatataacggtaacccaatatgatccagaagaggactgcaggaaaatggcgaaagagtatggtgactacttcgtagtcgagtatcgcgaccaaaaaccttactgcatcagtccttgcgaacccgggttcagcgtatccaaaaattgcaacttaggaaaatgccaaatgagtttgagcggacctcaatgcctttgcgttacgacagagacccattggtacagcggtgaaacctgtaaccagggtacacagaagtctctagtctatggtctcgttggagccggcgtagttctaatgttaataatattagtagccctcttgatgctagtattccgcagtaaacgcgaagttaaacgccagaaataccgcttatctcagctgtataaatggcaagaagaagactcaggaccagcccccgggactttccagaatatcgggttcgatatctgccaagatgacgactcaattcatctagaatctatatactccaatttccaaccttcactgagacacatagatcccgaaacaaaaattcgtattcagcgcccacaggtgatgaccaccagcttttga

SEQ ID NO: 2466 - RNA, 1215 nt, synthetic construct
  misc_feature 1..1215: note = Q9NNX6
  source 1..1215: mol_type = other RNA
atgtcagactcaaaagaaccccgcctccaacaactcggcctcctcgaagaagaacaactacgaggactcggattccgtcaaacaagaggatacaaaagcctcgccggatgcctgggccacggcccgctcgtactacaactcctctcattcaccctcctcgcaggactcctagtccaagtcagcaaggtcccctccagcatatcacaagaacaatcgcgccaagacgcaatctaccaaaacctaacccaactcaaagctgccgtcggagaactctccgagaaaagcaaactccaagaaatctaccaagaactaacccaactaaaggccgcggttggcgaactccccgaaaaatcaaaactgcaagaaatctaccaagaactcacccgcctaaaagcagccgtaggagaactaccagaaaagagcaaactccaggaaatataccaggaactaacctggctcaaggcagccgtaggcgaactacccgagaaatcaaaaatgcaagaaatctaccaagaactcacacgcctcaaagccgccgtcggcgaactcccggagaaaagcaaacaacaggaaatataccaagaactaacccgcctcaaagcagccgtaggagaactacccgaaaagtccaaacaacaagaaatctaccaagagctcacacgcctaaaagcagcagtcggcgaactcccagagaaaagcaaacaacaagaaatctaccaagaactcacccaactcaaggccgccgtcgaacgtctctgccacccctgcccctgggaatggacattcttccaaggcaactgctacttcatgtcaaacagccaacgcaactggcacgacagcataacagcctgcaaagaagtcggggcccaactcgtagtaatcaaatcagccgaagaacagaacttcctccaactccaaagctcacgctcaaacagattcacctggatgggcctaagcgacctaaaccaagaaggcacctggcagtgggtagacggaagcccgctactacccagcttcaagcaatactggaaccgaggcgaacccaacaacgtaggcgaagaagactgcgccgagttctccggcaacggctggaacgacgacaaatgcaacctcgccaaattctggatctgcaagaaatcggccgcgtcctgcagccgagacgaagaacaattcctaagcccagcccccgccacgcccaacccacccccagcatga

SEQ ID NO: 2467 - RNA, 3126 nt, synthetic construct; identical to SEQ ID NO: 595
  misc_feature 1..3126: note = Q9NR97
  source 1..3126: mol_type = other RNA

SEQ ID NO: 2468 - RNA, 66 nt, synthetic construct; identical to SEQ ID NO: 2052
  misc_feature 1..66: note = P16671_TM_1_8-29
  source 1..66: mol_type = other RNA

SEQ ID NO: 2469 - RNA, 81 nt, synthetic construct; identical to SEQ ID NO: 805
  misc_feature 1..81: note = P32248_TM_1_60-86
  source 1..81: mol_type = other RNA

SEQ ID NO: 2470 - RNA, 66 nt, synthetic construct
  misc_feature 1..66: note = P16671_TM_2_440-461
  source 1..66: mol_type = other RNA
ctgctcgggctcatagaaatgatcctgctctcggtcggggtcgtgatgtttgtcgcgttcatgatc

SEQ ID NO: 2471 - RNA, 63 nt, synthetic construct; identical to SEQ ID NO: 807
  misc_feature 1..63: note = P32248_TM_2_96-116
  source 1..63: mol_type = other RNA

SEQ ID NO: 2472 - RNA, 66 nt, synthetic construct
  misc_feature 1..66: note = P32248_TM_3_131-152
  source 1..66: mol_type = other RNA
ctcatcttcgccatctacaaaatgtccttcttctccggcatgctcctcctcctctgcatctccatc

SEQ ID NO: 2473 - RNA, 63 nt, synthetic construct
  misc_feature 1..63: note = P32248_TM_4_171-191
  source 1..63: mol_type = other RNA
gtcttgctcataagcaagctctcgtgcgtgggcatatggatactcgcgaccgtgctctcgatc

SEQ ID NO: 2474 - RNA, 84 nt, synthetic construct
  misc_feature 1..84: note = P32248_TM_5_220-247
  source 1..84: mol_type = other RNA
ttcatcaccatccaagtcgcccaaatggtcatcggcttcctcgtccccctcctcgccatgtccttctgctacctcgtcatcatc

SEQ ID NO: 2475 - RNA, 78 nt, synthetic construct
  misc_feature 1..78: note = P32248_TM_6_264-289
  source 1..78: mol_type = other RNA
gtcatcatcgccgtcgtcgtcgtcttcatcgtcttccaactcccctacaacggcgtcgtcctcgcccaaaccgtcgcc

SEQ ID NO: 2476 - RNA, 54 nt, synthetic construct
  misc_feature 1..54: note = P32248_TM_7_314-331
  source 1..54: mol_type = other RNA
ctcgcgtgcgtgcgctgttgcgtgaacccgttcttgtacgcgttcataggcgtg

SEQ ID NO: 2477 - RNA, 69 nt, synthetic construct
  misc_feature 1..69: note = A0A5B9_TM_145-167
  source 1..69: mol_type = other RNA
accatcctctacgaaatcctcctcggcaaagccaccctctacgccgtcctcgtctccgccctcgtcctc

SEQ ID NO: 2478 - RNA, 69 nt, synthetic construct
  misc_feature 1..69: note = B7Z8K6_TM_130-152
  source 1..69: mol_type = other RNA
ctcggcctccgcatgctcttcgccaaaaccgtcgccgtcaacttcctcctcaccgccaaactcttcttc

SEQ ID NO: 2479 - RNA, 63 nt, synthetic construct
  misc_feature 1..63: note = O00206_TM_632-652
  source 1..63: mol_type = other RNA
acgatcataggcgtgagcgtgctctcggtcttggtcgtgagcgtggtcgcggtcttggtctat

SEQ ID NO: 2480 - RNA, 66 nt, synthetic construct; identical to SEQ ID NO: 816
  misc_feature 1..66: note = P01730_TM_397-418
  source 1..66: mol_type = other RNA

SEQ ID NO: 2481 - RNA, 63 nt, synthetic construct; identical to SEQ ID NO: 2065
  misc_feature 1..63: note = P01850_TM_151-171
  source 1..63: mol_type = other RNA

SEQ ID NO: 2482 - RNA, 78 nt, synthetic construct
  misc_feature 1..78: note = P07766_TM_127-152
  source 1..78: mol_type = other RNA
gtcatgagcgtggccacgatcgtgatcgtggacatatgcataaccgggggcttgctcttgctcgtgtactattggtcg

SEQ ID NO: 2483 - RNA, 66 nt, synthetic construct; identical to SEQ ID NO: 819
  misc_feature 1..66: note = P08575_TM_576-597
  source 1..66: mol_type = other RNA

SEQ ID NO: 2484 - RNA, 63 nt, synthetic construct; identical to SEQ ID NO: 820
  misc_feature 1..63: note = P08637_TM_209-229
  source 1..63: mol_type = other RNA

SEQ ID NO: 2485 - RNA, 81 nt, synthetic construct; identical to SEQ ID NO: 821
  misc_feature 1..81: note = P10747_TM_153-179
  source 1..81: mol_type = other RNA

SEQ ID NO: 2486 - RNA, 66 nt, synthetic construct
  misc_feature 1..66: note = P11912_TM_144-165
  source 1..66: mol_type = other RNA
atcatcaccgccgaaggcatcatcctcctcttctgcgccgtcgtccccggcaccctcctcctcttc

SEQ ID NO: 2487 - RNA, 66 nt, synthetic construct; identical to SEQ ID NO: 823
  misc_feature 1..66: note = P15391_TM_292-313
  source 1..66: mol_type = other RNA

SEQ ID NO: 2488 - RNA, 63 nt, synthetic construct; identical to SEQ ID NO: 824
  misc_feature 1..63: note = P16410_TM_162-182
  source 1..63: mol_type = other RNA

SEQ ID NO: 2489 - RNA, 63 nt, synthetic construct; identical to SEQ ID NO: 825
  misc_feature 1..63: note = P26718_TM_52-72
  source 1..63: mol_type = other RNA

SEQ ID NO: 2490 - RNA, 63 nt, synthetic construct; identical to SEQ ID NO: 826
  misc_feature 1..63: note = P30273_TM_24-44
  source 1..63: mol_type = other RNA

SEQ ID NO: 2491 - RNA, 63 nt, synthetic construct
  misc_feature 1..63: note = P40259_TM_160-180
  source 1..63: mol_type = other RNA
ggcatcatcatgatccaaaccctcctcatcatcctcttcatcatcgtccccatcttcctcctc

SEQ ID NO: 2492 - RNA, 63 nt, synthetic construct; identical to SEQ ID NO: 828
  misc_feature 1..63: note = P42081_TM_248-268
  source 1..63: mol_type = other RNA

SEQ ID NO: 2493 - RNA, 63 nt, synthetic construct; identical to SEQ ID NO: 829
  misc_feature 1..63: note = Q15762_TM_255-275
  source 1..63: mol_type = other RNA

SEQ ID NO: 2494 - RNA, 63 nt, synthetic construct; identical to SEQ ID NO: 2078
  misc_feature 1..63: note = Q685J3_TM_4394-4414
  source 1..63: mol_type = other RNA

SEQ ID NO: 2495 - RNA, 63 nt, synthetic construct
  misc_feature 1..63: note = Q9NNX6_TM_38-58
  source 1..63: mol_type = other RNA
ctcggccacggccccctcgtcctccaactcctctccttcaccctcctcgccggcctcctcgtc

SEQ ID NO: 2496 - RNA, 63 nt, synthetic construct; identical to SEQ ID NO: 832
  misc_feature 1..63: note = Q9NR97_TM_828-848
  source 1..63: mol_type = other RNA

SEQ ID NO: 2497 - RNA, 48 nt, synthetic construct; identical to SEQ ID NO: 1457
  misc_feature 1..48: note = P14207_1-16
  source 1..48: mol_type = other RNA

SEQ ID NO: 2498 - RNA, 48 nt, synthetic construct; identical to SEQ ID NO: 1458
  misc_feature 1..48: note = O75787_1-16
  source 1..48: mol_type = other RNA

SEQ ID NO: 2499 - RNA, 48 nt, synthetic construct; identical to SEQ ID NO: 1459
  misc_feature 1..48: note = P07359_1-16
  source 1..48: mol_type = other RNA

SEQ ID NO: 2500 - RNA, 48 nt, synthetic construct
  misc_feature 1..48: note = P08637_1-16
  source 1..48: mol_type = other RNA
atgtggcaactacttctacctacagctctacttctacttgtatctgca

SEQ ID NO: 2501 - RNA, 51 nt, synthetic construct; identical to SEQ ID NO: 1461
  misc_feature 1..51: note = P07237_1-17
  source 1..51: mol_type = other RNA

SEQ ID NO: 2502 - RNA, 51 nt, synthetic construct
  misc_feature 1..51: note = O60911_1-17
  source 1..51: mol_type = other RNA
atgaatttatctttagttttagctgcattttgtcttggaattgcatctgca

SEQ ID NO: 2503 - RNA, 51 nt, synthetic construct; identical to SEQ ID NO: 1463
  misc_feature 1..51: note = P20138_1-17
  source 1..51: mol_type = other RNA

SEQ ID NO: 2504 - RNA, 51 nt, synthetic construct; identical to SEQ ID NO: 1464
  misc_feature 1..51: note = P27797_1-17
  source 1..51: mol_type = other RNA

SEQ ID NO: 2505 - RNA, 54 nt, synthetic construct
  misc_feature 1..54: note = P10747_1-18
  source 1..54: mol_type = other RNA
atgctaagactactactagccctaaacctattcccatcaatacaagtaaccgga

SEQ ID NO: 2506 - RNA, 54 nt, synthetic construct
  misc_feature 1..54: note = O75487_1-18
  source 1..54: mol_type = other RNA
atggctcgttttggtttacctgctcttttatgtactcttgctgttttatctgct

SEQ ID NO: 2507 - RNA, 54 nt, synthetic construct; identical to SEQ ID NO: 1467
  misc_feature 1..54: note = P07996_1-18
  source 1..54: mol_type = other RNA

SEQ ID NO: 2508 - RNA, 54 nt, synthetic construct
  misc_feature 1..54: note = P22748_1-18
  source 1..54: mol_type = other RNA
atgagaatgctattagcattactagcactatcagccgcaagaccaagcgcaagc

SEQ ID NO: 2509 - RNA, 54 nt, synthetic construct; identical to SEQ ID NO: 1469
  misc_feature 1..54: note = Q15762_1-18
  source 1..54: mol_type = other RNA

SEQ ID NO: 2510 - RNA, 54 nt, synthetic construct; identical to SEQ ID NO: 1470
  misc_feature 1..54: note = P30273_1-18
  source 1..54: mol_type = other RNA

SEQ ID NO: 2511 - RNA, 54 nt, synthetic construct; identical to SEQ ID NO: 1471
  misc_feature 1..54: note = P38570_1-18
  source 1..54: mol_type = other RNA

SEQ ID NO: 2512 - RNA, 54 nt, synthetic construct; identical to SEQ ID NO: 1472
  misc_feature 1..54: note = Q01638_1-18
  source 1..54: mol_type = other RNA

SEQ ID NO: 2513 - RNA, 54 nt, synthetic construct
  misc_feature 1..54: note = Q9NZQ7_1-18
  source 1..54: mol_type = other RNA
atgcgtatttttgccgtttttatttttatgacttattggcatttacttaatgct

SEQ ID NO: 2514 - RNA, 57 nt, synthetic construct
  misc_feature 1..57: note = P13591_1-19
  source 1..57: mol_type = other RNA
atgctacaaacaaaagacttaatatggacattattcttcctaggcacagcagtatca

SEQ ID NO: 2515 - RNA, 57 nt, synthetic construct
  misc_feature 1..57: note = P26842_1-19
  source 1..57: mol_type = other RNA
atggcaagaccacatccatggtggttatgtgtattaggaacattagtaggattaagt

SEQ ID NO: 2516 - RNA, 57 nt, synthetic construct; identical to SEQ ID NO: 1476
  misc_feature 1..57: note = P15391_1-19
  source 1..57: mol_type = other RNA

SEQ ID NO: 2517 - RNA, 57 nt, synthetic construct; identical to SEQ ID NO: 1477
  misc_feature 1..57: note = Q8NI17_1-19
  source 1..57: mol_type = other RNA

SEQ ID NO: 2518 - RNA, 57 nt, synthetic construct; identical to SEQ ID NO: 1478
  misc_feature 1..57: note = P08571_1-19
  source 1..57: mol_type = other RNA

SEQ ID NO: 2519 - RNA, 57 nt, synthetic construct; identical to SEQ ID NO: 1479
  misc_feature 1..57: note = P05154_1-19
  source 1..57: mol_type = other RNA

SEQ ID NO: 2520 - RNA, 57 nt, synthetic construct; identical to SEQ ID NO: 1480
  misc_feature 1..57: note = P02787_1-19
  source 1..57: mol_type = other RNA

SEQ ID NO: 2521 - RNA, 57 nt, synthetic construct; identical to SEQ ID NO: 1481
  misc_feature 1..57: note = P02671_1-19
  source 1..57: mol_type = other RNA

SEQ ID NO: 2522 - RNA, 57 nt, synthetic construct
  misc_feature 1..57: note = P04216_1-19
  source 1..57: mol_type = other RNA
atgaatctagctatatctatagctctattactaactgtacttcaagttagccgtgga

SEQ ID NO: 2523 - RNA, 57 nt, synthetic construct; identical to SEQ ID NO: 1483
  misc_feature 1..57: note = P00747_1-19
  source 1..57: mol_type = other RNA

SEQ ID NO: 2524 - RNA, 57 nt, synthetic construct
  misc_feature 1..57: note = P01764_1-19
  source 1..57: mol_type = other RNA
atggaatttggattaagttggttatttttagttgcaattttaaaaggagttcagtgt

SEQ ID NO: 2525 - RNA, 57 nt, synthetic construct
  misc_feature 1..57: note = P16150_1-19
  source 1..57: mol_type = other RNA
atggctacattactattactattaggagttctagttgtatctccagatgcattagga

SEQ ID NO: 2526 - RNA, 57 nt, synthetic construct
  misc_feature 1..57: note = Q6DN72_1-19
  source 1..57: mol_type = other RNA
atgttattatggacagcagtattattatttgtaccatgtgtaggaaaaacagtatgg

SEQ ID NO: 2527 - RNA, 57 nt, synthetic construct; identical to SEQ ID NO: 1487
  misc_feature 1..57: note = Q01151_1-19
  source 1..57: mol_type = other RNA

SEQ ID NO: 2528 - RNA, 57 nt, synthetic construct; identical to SEQ ID NO: 1488
  misc_feature 1..57: note = P07093_1-19
  source 1..57: mol_type = other RNA

SEQ ID NO: 2529 - RNA, 57 nt, synthetic construct; identical to SEQ ID NO: 1489
  misc_feature 1..57: note = Q8WWQ8_1-19
  source 1..57: mol_type = other RNA

SEQ ID NO: 2530 - RNA, 60 nt, synthetic construct; identical to SEQ ID NO: 1490
  misc_feature 1..60: note = Q13291_1-20
  source 1..60: mol_type = other RNA

SEQ ID NO: 2531 - RNA, 60 nt, synthetic construct
  misc_feature 1..60: note = P35225_1-20
  source 1..60: mol_type = other RNA
atggcactattactaacaacagtaatagcactaacatgcttaggcggattcgcaagtcca

SEQ ID NO: 2532 - RNA, 60 nt, synthetic construct; identical to SEQ ID NO: 1492
  misc_feature 1..60: note = P25942_1-20
  source 1..60: mol_type = other RNA

SEQ ID NO: 2533 - RNA, 60 nt, synthetic construct; identical to SEQ ID NO: 1493
  misc_feature 1..60: note = P52803_1-20
  source 1..60: mol_type = other RNA

SEQ ID NO: 2534 - RNA, 60 nt, synthetic construct; identical to SEQ ID NO: 1494
  misc_feature 1..60: note = Q15116_1-20
  source 1..60: mol_type = other RNA

SEQ ID NO: 2535 - RNA, 60 nt, synthetic construct
  misc_feature 1..60: note = P05556_1-20
  source 1..60: mol_type = other RNA
atgaatttacaaccaattttctggataggtctaatttcatctgtatgttgtgttttcgct

SEQ ID NO: 2536 - RNA, 60 nt, synthetic construct; identical to SEQ ID NO: 1496
  misc_feature 1..60: note = Q12891_1-20
  source 1..60: mol_type = other RNA

SEQ ID NO: 2537 - RNA, 60 nt, synthetic construct; identical to SEQ ID NO: 1497
  misc_feature 1..60: note = Q8IV16_1-20
  source 1..60: mol_type = other RNA

SEQ ID NO: 2538 - RNA, 60 nt, synthetic construct; identical to SEQ ID NO: 1498
  misc_feature 1..60: note = Q03167_1-20
  source 1..60: mol_type = other RNA

SEQ ID NO: 2539 - RNA, 60 nt, synthetic construct
  misc_feature 1..60: note = Q14246_1-20
  source 1..60: mol_type = other RNA
atgagagggtttaatttattgttattttgggggtgttgtgttatgcatagttgggagggt

SEQ ID NO: 2540 - RNA, 60 nt, synthetic construct
  misc_feature 1..60: note = P16871_1-20
  source 1..60: mol_type = other RNA
atgactatattaggaactacatttggaatggtattttcattattacaagtagtttcaggt

SEQ ID NO: 2541 - RNA, 60 nt, synthetic construct; identical to SEQ ID NO: 1501
  misc_feature 1..60: note = P61769_1-20
  source 1..60: mol_type = other RNA

SEQ ID NO: 2542 - RNA, 60 nt, synthetic construct; identical to SEQ ID NO: 1502
  misc_feature 1..60: note = Q9Y6W8_1-20
  source 1..60: mol_type = other RNA

SEQ ID NO: 2543 - RNA, 63 nt, synthetic construct; identical to SEQ ID NO: 1503
  misc_feature 1..63: note = P10966_1-21
  source 1..63: mol_type = other RNA

SEQ ID NO: 2544 - RNA, 63 nt, synthetic construct; identical to SEQ ID NO: 1504
  misc_feature 1..63: note = Q9BZW8_1-21
  source 1..63: mol_type = other RNA

SEQ ID NO: 2545 - RNA, 63 nt, synthetic construct; identical to SEQ ID NO: 1505
  misc_feature 1..63: note = P02778_1-21
  source 1..63: mol_type = other RNA

SEQ ID NO: 2546 - RNA, 63 nt, synthetic construct; identical to SEQ ID NO: 1506
  misc_feature 1..63: note = P18564_1-21
  source 1..63: mol_type = other RNA

SEQ ID NO: 2547 - RNA, 63 nt, synthetic construct; identical to SEQ ID NO: 1507
  misc_feature 1..63: note = O14525_1-21
  source 1..63: mol_type = other RNA

SEQ ID NO: 2548 - RNA, 63 nt, synthetic construct; identical to SEQ ID NO: 1508
  misc_feature 1..63: note = P01130_1-21
  source 1..63: mol_type = other RNA

SEQ ID NO: 2549 - RNA, 63 nt, synthetic construct
  misc_feature 1..63: note = P01732_1-21
  source 1..63: mol_type = other RNA
atggccttaccagttacagctctattactacctctagctctattactacatgccgctagacct

SEQ ID NO: 2550 - RNA, 63 nt, synthetic construct; identical to SEQ ID NO: 1510
  misc_feature 1..63: note = P48061_1-21
  source 1..63: mol_type = other RNA

SEQ ID NO: 2551 - RNA, 63 nt, synthetic construct; identical to SEQ ID NO: 1511
  misc_feature 1..63: note = P01589_1-21
  source 1..63: mol_type = other RNA

SEQ ID NO: 2552 - RNA, 63 nt, synthetic construct; identical to SEQ ID NO: 1512
  misc_feature 1..63: note = Q86T13_1-21
  source 1..63: mol_type = other RNA

SEQ ID NO: 2553 - RNA, 63 nt, synthetic construct; identical to SEQ ID NO: 1513
  misc_feature 1..63: note = Q5DID0_1-21
  source 1..63: mol_type = other RNA

SEQ ID NO: 2554 - RNA, 66 nt, synthetic construct
  misc_feature 1..66: note = P40189_1-22
  source 1..66: mol_type = other RNA
atgctaacactacaaacctggctagtacaagcactatttatatttctaacaacagaaagcacaggc

SEQ ID NO: 2555 - RNA, 66 nt, synthetic construct; identical to SEQ ID NO: 1515
  misc_feature 1..66: note = Q86YL7_1-22
  source 1..66: mol_type = other RNA

SEQ ID NO: 2556 - RNA, 66 nt, synthetic construct
  misc_feature 1..66: note = P55075_1-22
  source 1..66: mol_type = other RNA
atgggttcacctagatctgcactttcatgtctacttctacatttacttgtactttgccttcaagct

SEQ ID NO: 2557 - RNA, 66 nt, synthetic construct; identical to SEQ ID NO: 1517
  misc_feature 1..66: note = Q30201_1-22
  source 1..66: mol_type = other RNA

SEQ ID NO: 2558 - RNA, 66 nt, synthetic construct; identical to SEQ ID NO: 1518
  misc_feature 1..66: note = P07766_1-22
  source 1..66: mol_type = other RNA

SEQ ID NO: 2559 - RNA, 66 nt, synthetic construct; identical to SEQ ID NO: 1519
  misc_feature 1..66: note = P18827_1-22
  source 1..66: mol_type = other RNA

SEQ ID NO: 2560 - RNA, 66 nt, synthetic construct; identical to SEQ ID NO: 1520
  misc_feature 1..66: note = P55290_1-22
  source 1..66: mol_type = other RNA

SEQ ID NO: 2561 - RNA, 66 nt, synthetic construct; identical to SEQ ID NO: 1521
  misc_feature 1..66: note = P37173_1-22
  source 1..66: mol_type = other RNA

SEQ ID NO: 2562 - RNA, 66 nt, synthetic construct; identical to SEQ ID NO: 1522
  misc_feature 1..66: note = Q07325_1-22
  source 1..66: mol_type = other RNA

SEQ ID NO: 2563 - RNA, 66 nt, synthetic construct; identical to SEQ ID NO: 1523
  misc_feature 1..66: note = P04156_1-22
  source 1..66: mol_type = other RNA

SEQ ID NO: 2564 - RNA, 66 nt, synthetic construct
  misc_feature 1..66: note = P31785_1-22
  source 1..66: mol_type = other RNA
atgcttaaaccttctcttccttttacttctcttctttttcttcaacttcctcttcttggcgtcggc

SEQ ID NO: 2565 - RNA, 69 nt, synthetic construct; identical to SEQ ID NO: 1525
  misc_feature 1..69: note = P01579_1-23
  source 1..69: mol_type = other RNA

SEQ ID NO: 2566 - RNA, 69 nt, synthetic construct; identical to SEQ ID NO: 1526
  misc_feature 1..69: note = P23229_1-23
  source 1..69: mol_type = other RNA

SEQ ID NO: 2567 - RNA, 69 nt, synthetic construct
  misc_feature 1..69: note = O60494_1-23
  source 1..69: mol_type = other RNA
atgatgaatatgtctcttccttttctttggtctttacttactcttttaatttttgctgaagttaatggt

SEQ ID NO: 2568 - RNA, 69 nt, synthetic construct
  misc_feature 1..69: note = P08575_1-23
  source 1..69: mol_type = other RNA
atgtatttatggctaaaattacttgcatttggatttgcatttctagatacagaagtatttgtaactgga

SEQ ID NO: 2569 - RNA, 69 nt, synthetic construct; identical to SEQ ID NO: 1529
  misc_feature 1..69: note = Q8IWY4_1-23
  source 1..69: mol_type = other RNA

SEQ ID NO: 2570 - RNA, 69 nt, synthetic construct
  misc_feature 1..69: note = Q08431_1-23
  source 1..69: mol_type = other RNA
atgcctagacctagattattagctgcattatgtggtgcattattatgtgcaccttcattattagttgca

SEQ ID NO: 2571 - RNA, 69 nt, synthetic construct; identical to SEQ ID NO: 1531
  misc_feature 1..69: note = Q99665_1-23
  source 1..69: mol_type = other RNA

SEQ ID NO: 2572 - RNA, 69 nt, synthetic construct
  misc_feature 1..69: note = Q6Q8B3_1-23
  source 1..69: mol_type = other RNA
atgtcagcaccaagattactaataagcataataataatggtaagcgcaagctcaagctcatgcatggga

SEQ ID NO: 2573 - RNA, 69 nt, synthetic construct
  misc_feature 1..69: note = Q07011_1-23
  source 1..69: mol_type = other RNA
atgggaaatagctgttacaatatagtggcaacactactattagtactaaatttcgaaagaacaagatca

SEQ ID NO: 2574 - RNA, 69 nt, synthetic construct; identical to SEQ ID NO: 1534
  misc_feature 1..69: note = Q8NHL6_1-23
  source 1..69: mol_type = other RNA

SEQ ID NO: 2575 - RNA, 69 nt, synthetic construct
  misc_feature 1..69: note = P36894_1-23
  source 1..69: mol_type = other RNA
atgccacaactatacatatacatcagactactaggcgcatacctattcataatatcaagagtacaagga

SEQ ID NO: 2576 - RNA, 69 nt, synthetic construct
  misc_feature 1..69: note = Q16552_1-23
  source 1..69: mol_type = other RNA
atgaccccaggcaaaacaagcctagtatcactactattactcttaagcctagaagcaatagtaaaagca

SEQ ID NO: 2577 - RNA, 69 nt, synthetic construct; identical to SEQ ID NO: 1537
  misc_feature 1..69: note = P42081_1-23
  source 1..69: mol_type = other RNA

SEQ ID NO: 2578 - RNA, 69 nt, synthetic construct; identical to SEQ ID NO: 1538
  misc_feature 1..69: note = P43121_1-23
  source 1..69: mol_type = other RNA

SEQ ID NO: 2579 - RNA, 69 nt, synthetic construct; identical to SEQ ID NO: 1539
  misc_feature 1..69: note = O00206_1-23
  source 1..69: mol_type = other RNA

SEQ ID NO: 2580 - RNA, 69 nt, synthetic construct
  misc_feature 1..69: note = P42701_1-23
  source 1..69: mol_type = other RNA
atggaacctttagttacatgggtagttccattattatttttatttttattatcacgtcaaggtgcagct

SEQ ID NO: 2581 - RNA, 72 nt, synthetic construct; identical to SEQ ID NO: 1541
  misc_feature 1..72: note = P06729_1-24
  source 1..72: mol_type = other RNA

SEQ ID NO: 2582 - RNA, 72 nt, synthetic construct; identical to SEQ ID NO: 1542
  misc_feature 1..72: note = P15328_1-24
  source 1..72: mol_type = other RNA

SEQ ID NO: 2583 - RNA, 72 nt, synthetic construct
  misc_feature 1..72: note = P05112_1-24
  source 1..72: mol_type = other RNA
atgggacttacatctcaacttttacctccacttttttttttacttgcatgtgcaggtaattttgtacatgga

SEQ ID NO: 2584 - RNA, 72 nt, synthetic construct
  misc_feature 1..72: note = P06127_1-24
  source 1..72: mol_type = other RNA
atgcctatgggttcacttcaacctttagctacactttatcttttaggtatgcttgtagcttcatgtttaggt

SEQ ID NO: 2585 - RNA, 72 nt, synthetic construct; identical to SEQ ID NO: 1545
  misc_feature 1..72: note = P32248_1-24
  source 1..72: mol_type = other RNA

SEQ ID NO: 2586 - RNA, 72 nt, synthetic construct; identical to SEQ ID NO: 1546
  misc_feature 1..72: note = Q7Z7D3_1-24
  source 1..72: mol_type = other RNA

SEQ ID NO: 2587 - RNA, 72 nt, synthetic construct; identical to SEQ ID NO: 1547
  misc_feature 1..72: note = P54756_1-24
  source 1..72: mol_type = other RNA

SEQ ID NO: 2588 - RNA, 72 nt, synthetic construct; identical to SEQ ID NO: 1548
  misc_feature 1..72: note = Q92823_1-24
  source 1..72: mol_type = other RNA

SEQ ID NO: 2589 - RNA, 72 nt, synthetic construct; identical to SEQ ID NO: 1549
  misc_feature 1..72: note = P19320_1-24
  source 1..72: mol_type = other RNA

SEQ ID NO: 2590 - RNA, 72 nt, synthetic construct; identical to SEQ ID NO: 1550
  misc_feature 1..72: note = Q86UN2_1-24
  source 1..72: mol_type = other RNA

SEQ ID NO: 2591 - RNA, 75 nt, synthetic construct
  misc_feature 1..75: note = P33151_1-25
  source 1..75: mol_type = other RNA
atgcaaagattaatgatgttattagcaacatcaggagcatgtttaggattattagcagtagcagcagtagcagca

SEQ ID NO: 2592 - RNA, 75 nt, synthetic construct
  misc_feature 1..75: note = P17813_1-25
  source 1..75: mol_type = other RNA
atggaccgtggaactctacctctagctgtagctctattactagcttcatgttcactttcacctacatctctagct

SEQ ID NO: 2593 - RNA, 75 nt, synthetic construct
  misc_feature 1..75: note = P25445_1-25
  source 1..75: mol_type = other RNA
atgctaggaatatggacactactaccattagtactaacaagcgtagcaagactatcaagcaaaagcgtaaacgca

SEQ ID NO: 2594 - RNA, 75 nt, synthetic construct
  misc_feature 1..75: note = P01730_1-25
  source 1..75: mol_type = other RNA
atgaatagaggtgtacctttccgtcatcttttacttgtacttcaacttgcacttttacctgcagctacacaagga

SEQ ID NO: 2595 - RNA, 75 nt, synthetic construct
  misc_feature 1..75: note = Q685J3_1-25
  source 1..75: mol_type = other RNA
atgccaagaccaggaacaatggcactatgcctactaacattagtactatcactactaccaccacaagcagcagca

SEQ ID NO: 2596 - RNA, 75 nt, synthetic construct; identical to SEQ ID NO: 1556
  misc_feature 1..75: note = P17787_1-25
  source 1..75: mol_type = other RNA

SEQ ID NO: 2597 - RNA, 75 nt, synthetic construct
  misc_feature 1..75: note = Q6UQ28_1-25
  source 1..75: mol_type = other RNA
atggcagttttccatgacatgctacttcaacctttaggtatgtttctatgtctatctctacaattatcttcagct

SEQ ID NO: 2598 - RNA, 75 nt, synthetic construct; identical to SEQ ID NO: 1558
  misc_feature 1..75: note = P13987_1-25
  source 1..75: mol_type = other RNA

SEQ ID NO: 2599 - RNA, 75 nt, synthetic construct; identical to SEQ ID NO: 1559
  misc_feature 1..75: note = P10721_1-25
  source 1..75: mol_type = other RNA

SEQ ID NO: 2600 - RNA, 75 nt, synthetic construct; identical to SEQ ID NO: 1560
  misc_feature 1..75: note = P12319_1-25
  source 1..75: mol_type = other RNA

SEQ ID NO: 2601 - RNA, 78 nt, synthetic construct; identical to SEQ ID NO: 1561
  misc_feature 1..78: note = Q9BZR6_1-26
  source 1..78: mol_type = other RNA

SEQ ID NO: 2602 - RNA, 78 nt, synthetic construct; identical to SEQ ID NO: 1562
  misc_feature 1..78: note = P25063_1-26
  source 1..78: mol_type = other RNA

SEQ ID NO: 2603 - RNA, 78 nt, synthetic construct
  misc_feature 1..78: note = Q9NR97_1-26
  source 1..78: mol_type = other RNA
atggagaatatgtttttgcaatcgagtatgcttacgtgtatattcttactcataagcggaagctgtgaattgtgtgcg

SEQ ID NO: 2604 - RNA, 78 nt, synthetic construct; identical to SEQ ID NO: 1564
  misc_feature 1..78: note = Q8N131_1-26
  source 1..78: mol_type = other RNA

SEQ ID NO: 2605 - RNA, 78 nt, synthetic construct
  misc_feature 1..78: note = P49771_1-26
  source 1..78: mol_type = other RNA
atgactgttcttgctcctgcttggtctcctactacttatcttttacttttacttttactttcttctggtctttctggt

SEQ ID NO: 2606 - RNA, 78 nt, synthetic construct; identical to SEQ ID NO: 1566
  misc_feature 1..78: note = P02679_1-26
  source 1..78: mol_type = other RNA

SEQ ID NO: 2607 - RNA, 78 nt, synthetic construct
  misc_feature 1..78: note = P14784_1-26
  source 1..78: mol_type = other RNA
atggctgctcctgctttatcttggcgtttacctttacttattcttttacttcctcttgctacttcttgggcttctgct

SEQ ID NO: 2608 - RNA, 81 nt, synthetic construct; identical to SEQ ID NO: 1568
  misc_feature 1..81: note = P05362_1-27
  source 1..81: mol_type = other RNA

SEQ ID NO: 2609 - RNA, 81 nt, synthetic construct
  misc_feature 1..81: note = Q13740_1-27
  source 1..81: mol_type = other RNA
atggaatcaaaaggagcttcatcttgtcgtctattattctgtctattaatatctgcaactgtatttagacctggacttgga

SEQ ID NO: 2610 - RNA, 84 nt, synthetic construct; identical to SEQ ID NO: 1570
  misc_feature 1..84: note = Q13443_1-28
  source 1..84: mol_type = other RNA

SEQ ID NO: 2611 - RNA, 84 nt, synthetic construct; identical to SEQ ID NO: 1571
  misc_feature 1..84: note = P14151_1-28
  source 1..84: mol_type = other RNA

SEQ ID NO: 2612 - RNA, 84 nt, synthetic construct; identical to SEQ ID NO: 1572
  misc_feature 1..84: note = P56199_1-28
  source 1..84: mol_type = other RNA

SEQ ID NO: 2613 - RNA, 84 nt, synthetic construct
  misc_feature 1..84: note = P11279_1-28
  source 1..84: mol_type = other RNA
atggctgcacctggatctgcacgtagacctttacttctattattattattacttttacttggacttatgcattgcgcttcagct

SEQ ID NO: 2614 - RNA, 84 nt, synthetic construct
  misc_feature 1..84: note = P40259_1-28
  source 1..84: mol_type = other RNA
atggcaagattagcattatcaccagtaccatcacattggatggtagcactattactattactatcagcagaaccagtaccagca

SEQ ID NO: 2615 - RNA, 84 nt, synthetic construct; identical to SEQ ID NO: 1575
  misc_feature 1..84: note = P43681_1-28
  source 1..84: mol_type = other RNA

SEQ ID NO: 2616 - RNA, 84 nt, synthetic construct; identical to SEQ ID NO: 1576
  misc_feature 1..84: note = P18627_1-28
  source 1..84: mol_type = other RNA

SEQ ID NO: 2617 - RNA, 84 nt, synthetic construct; identical to SEQ ID NO: 1577
  misc_feature 1..84: note = Q5ZPR3_1-28
  source 1..84: mol_type = other RNA

SEQ ID NO: 2618 - RNA, 84 nt, synthetic construct
  misc_feature 1..84: note = P23415_1-28
  source 1..84: mol_type = other RNA
atgtattcatttaacactctacgtctatatctatgggaaactatagttttcttttcacttgcagcttcaaaagaagctgaagct

SEQ ID NO: 2619 - RNA, 84 nt, synthetic construct; identical to SEQ ID NO: 1579
  misc_feature 1..84: note = Q8TD46_1-28
  source 1..84: mol_type = other RNA

SEQ ID NO: 2620 - RNA, 87 nt, synthetic construct; identical to SEQ ID NO: 1580
  misc_feature 1..87: note = P17301_1-29
  source 1..87: mol_type = other RNA

SEQ ID NO: 2621 - RNA, 87 nt, synthetic construct; identical to SEQ ID NO: 1581
  misc_feature 1..87: note = P12821_1-29
  source 1..87: mol_type = other RNA

SEQ ID NO: 2622 - RNA, 87 nt, synthetic construct
  misc_feature 1..87: note = Q14118_1-29
  source 1..87: mol_type = other RNA
atgcgtatgagtgtaggtttaagtttacttttgcctttatggggacgtacatttttacttttactttcagttgtaatggcacaatca

SEQ ID NO: 2623 - RNA, 87 nt, synthetic construct; identical to SEQ ID NO: 1583
  misc_feature 1..87: note = P05231_1-29
  source 1..87: mol_type = other RNA

SEQ ID NO: 2624 - RNA, 87 nt, synthetic construct; identical to SEQ ID NO: 1584
  misc_feature 1..87: note = O00602_1-29
  source 1..87: mol_type = other RNA

SEQ ID NO: 2625 - RNA, 87 nt, synthetic construct; identical to SEQ ID NO: 1585
  misc_feature 1..87: note = Q9Y6Q6_1-29
  source 1..87: mol_type = other RNA

SEQ ID NO: 2626 - RNA, 87 nt, synthetic construct
  misc_feature 1..87: note = Q9ULI3_1-29
  source 1..87: mol_type = other RNA
atggcatctccacgtgcatctagatggccacctccacttctacttctacttctacctctacttctacttcctccagcagctccaggt

SEQ ID NO: 2627 - RNA, 90 nt, synthetic construct; identical to SEQ ID NO: 1587
  misc_feature 1..90: note = Q8NBP7_1-30
  source 1..90: mol_type = other RNA

SEQ ID NO: 2628 - RNA, 90 nt, synthetic construct; identical to SEQ ID NO: 1588
  misc_feature 1..90: note = P02675_1-30
  source 1..90: mol_type = other RNA

SEQ ID NO: 2629 - RNA, 90 nt, synthetic construct; identical to SEQ ID NO: 1589
  misc_feature 1..90: note = P06756_1-30
  source 1..90: mol_type = other RNA

SEQ ID NO: 2630 - RNA, 93 nt, synthetic construct
  misc_feature 1..93: note = O60609_1-31
  source 1..93: mol_type = other RNA
atggtaagaccactaaacccaagaccactaccaccagtagtactaatgctactattactactaccaccatcaccactaccattagcagcagga

SEQ ID NO: 2631 - RNA, 93 nt, synthetic construct; identical to SEQ ID NO: 1591
  misc_feature 1..93: note = P50895_1-31
  source 1..93: mol_type = other RNA

SEQ ID NO: 2632 - RNA, 93 nt, synthetic construct; identical to SEQ ID NO: 1592
  misc_feature 1..93: note = P28906_1-31
  source 1..93: mol_type = other RNA

SEQ ID NO: 2633 - RNA, 93 nt, synthetic construct; identical to SEQ ID NO: 1593
  misc_feature 1..93: note = P08514_1-31
  source 1..93: mol_type = other RNA

SEQ ID NO: 2634 - RNA, 93 nt, synthetic construct; identical to SEQ ID NO: 1594
  misc_feature 1..93: note = P00742_1-31
  source 1..93: mol_type = other RNA

SEQ ID NO: 2635 - RNA, 96 nt, synthetic construct; identical to SEQ ID NO: 1595
  misc_feature 1..96: note = P26006_1-32
  source 1..96: mol_type = other RNA

SEQ ID NO: 2636 - RNA, 96 nt, synthetic construct; identical to SEQ ID NO: 1596
  misc_feature 1..96: note = P13726_1-32
  source 1..96: mol_type = other RNA

SEQ ID NO: 2637 - RNA, 96 nt, synthetic construct
  misc_feature 1..96: note = P11912_1-32
  source 1..96: mol_type = other RNA
atgccaggaggaccaggagtactacaagcattaccagcaacaatattcttactatttctattatcagcagtatatctaggaccaggatgtcaagca

SEQ ID NO: 2638 - RNA, 96 nt, synthetic construct
  misc_feature 1..96: note = Q9H6X2_1-32
  source 1..96: mol_type = other RNA
atggcaacagcagaaagaagagcattaggaataggatttcaatggttaagtttagcaacattagtactaatatgtgcaggacaaggaggaagaaga

SEQ ID NO: 2639 - RNA, 99 nt, synthetic construct; identical to SEQ ID NO: 1599
  misc_feature 1..99: note = Q8IWK6_1-33
  source 1..99: mol_type = other RNA

SEQ ID NO: 2640 - RNA, 99 nt, synthetic construct; identical to SEQ ID NO: 1600
  misc_feature 1..99: note = P58335_1-33
  source 1..99: mol_type = other RNA

SEQ ID NO: 2641 - RNA, 102 nt, synthetic construct; identical to SEQ ID NO: 1601
  misc_feature 1..102: note = P06731_1-34
  source 1..102: mol_type = other RNA

SEQ ID NO: 2642 - RNA, 102 nt, synthetic construct; identical to SEQ ID NO: 1602
  misc_feature 1..102: note = P33681_1-34
  source 1..102: mol_type = other RNA

SEQ ID NO: 2643 - RNA, 105 nt, synthetic construct
  misc_feature 1..105: note = P38567_1-35
  source 1..105: mol_type = other RNA
atgggcgtactaaaattcaaacacatattcttcagatcattcgtaaaatcatccggagtctcacaaatagtcttcacattcctactaataccatgctgcctaaca

SEQ ID NO: 2644 - RNA, 105 nt, synthetic construct; identical to SEQ ID NO: 1604
  misc_feature 1..105: note = P16410_1-35
  source 1..105: mol_type = other RNA

SEQ ID NO: 2645 - RNA, 111 nt, synthetic construct
  misc_feature 1..111: note = P15814_1-37
  source 1..111: mol_type = other RNA
atgagaccaggaacaggacaaggaggattagaagcaccaggagaaccaggaccaaatttaagacaaagatggccattattattattaggattagcagtagtaactcatgga

SEQ ID NO: 2646 - RNA, 114 nt, synthetic construct; identical to SEQ ID NO: 1606
  misc_feature 1..114: note = Q92956_1-38
  source 1..114: mol_type = other RNA

SEQ ID NO: 2647 - RNA, 123 nt, synthetic construct
  misc_feature 1..123: note = Q86VB7_1-41
  source 1..123: mol_type = other RNA
atgtcaaaactacgtatggttttacttgaagattcaggttcagctgactttagacgtcactttgtaaatctatctccatttacaattacagttgtacttctactttcagcttgctttgtaact

SEQ ID NO: 2648 - RNA, 123 nt, synthetic construct; identical to SEQ ID NO: 1608
  misc_feature 1..123: note = P08648_1-41
  source 1..123: mol_type = other RNA

SEQ ID NO: 2649 - RNA, 123 nt, synthetic construct; identical to SEQ ID NO: 1609
  misc_feature 1..123: note = P16109_1-41
  source 1..123: mol_type = other RNA

SEQ ID NO: 2650 - RNA, 132 nt, synthetic construct; identical to SEQ ID NO: 1610
  misc_feature 1..132: note = O75326_1-44
  source 1..132: mol_type = other RNA

SEQ ID NO: 2651 - RNA, 135 nt, synthetic construct
  misc_feature 1..135: note = Q8N2Q7_1-45
  source 1..135: mol_type = other RNA
atggcattaccaagatgtacatggccaaattatgtatggagagcagtaatggcatgtttagtacatagaggattaggagcaccattaacattatgtatgttaggatgtttattacaagcaggacatgtattatca

SEQ ID NO: 2652 - RNA, 138 nt, synthetic construct
  misc_feature 1..138: note = Q86UN3_1-46
  source 1..138: mol_type = other RNA
atgcttcctggtcttcgtcgtcttcttcaagctcctgcttctgcttgtcttcttcttatgttacttgctttacctcttgctgctccttcttgtcctatgctttgtacttgttattcttctcctcctactgtttcttgt

SEQ ID NO: 2653 - RNA, 540 nt, synthetic construct
  misc_feature 1..540: note = A0A5B9
  source 1..540: mol_type = other RNA
atggacctaaaaaacgtattcccaccagaagtagcagtattcgaaccatcagaagcagaaatatcacacacacaaaaagcaaccctagtatgcctagcaacaggattttacccagaccatgtagaactatcatggtgggtaaacggaaaagaagtacactcaggagtatcaacagacccacaaccactaaaagaacaaccagcactaaatgactcaagatattgcttatcatcaagattaagagtatcagcaacattctggcaaaacccaagaaaccactttagatgccaagtacaattctacggactatctgaaaacgacgaatggacacaagacagagcaaaaccagtaacacaaatagtatcagccgaagcatggggaagagcagactgcggattcacatcagaatcataccaacaaggagtactatcagcaactatattatacgaaatactactaggaaaagcaacactttacgcagtattagtatcagcattagtactaatggcaatggtcaaaagaaaagacagcagaggataa

SEQ ID NO: 2654 - RNA, 465 nt, synthetic construct
  misc_feature 1..465: note = B7Z8K6
  source 1..465: mol_type = other RNA
atgtcacaaccacacacaaaaccatcagtattcgtaatgaaaaacggaacaaatgtagcctgcctagtaaaagaattctacccaaaagacatacgaataaacctagtatcatcaaaaaaaataacagaattcgacccagcaatagtaatatcaccatcaggaaaatacaacgcagtaaaattaggcaaatacgaagactcaaactcagtaacatgctcagtacaacacgacaacaaaacagtacactcaacagacttcgaagtaaaaacagactcaacagaccacgtaaaaccaaaagaaacagaaaacacaaaacaaccatccaaatcatgccacaaaccaaaagcaatagtacacacagaaaaagtaaacatgatgtcactaacagtactaggactaagaatgctattcgcaaaaacagtagcagtaaacttcctactaacagcaaaattattcttcctataa

SEQ ID NO: 2655 - RNA, 645 nt, synthetic construct
  misc_feature 1..645: note = B9A064
  source 1..645: mol_type = other RNA
atgagaccaaaaacaggacaagtcggctgcgaaacaccagaagaactaggaccaggaccaagacaaagatggccattattattactaggactagcaatggtagcacacggattattaagaccaatggtagcaccacaatcaggagatccagatccaggagcatcagtaggaagttcaagatcatcattaagatcattatggggaagactattactacaaccatcaccacaaagagcagacccacgatgttggccaagaggattctggtcagaaccacaatcattatgctacgtatttggcacaggaactaaagtaacagtactaggacaaccaaaagcaaacccaacagtaacattatttccaccttcaagcgaagaattacaagcaaacaaagcaacattagtatgcctaatatcagacttttaccctggagcagtaacagtagcatggaaagccgatggatctcccgtaaaagcaggagtagaaacaacaaaaccatcaaaacaaagtaataacaaatacgcagcttcaagttatctatctctaacaccagaacaatggaaatcacacagatcatactcatgtcaagtaacacatgaaggatcaacagtagaaaaaacagtcgcaccaacagaatgttcatga

SEQ ID NO: 2656 - RNA, 2520 nt, synthetic construct
  misc_feature 1..2520: note = O00206
  source 1..2520: mol_type = other RNA
atgatgtcagccagcagactcgcaggcacattaattcctgcaatggcattcttatcatgcgttagacccgaatcatgggaaccatgcgtagaagtcgtacctaacataacctatcaatgcatggaattaaacttttataaaatacctgacaatttaccattttcaactaaaaatctagacctatctttcaatcccctccgtcacttaggatcatacagtttcttttctttcccagaattacaagtacttgatctatcacgatgtgaaattcaaacaatagaagatggagcctaccaatccttatcacatctctcaaccttaatactaacaggaaaccccatccaatctctagcccttggcgcattctcaggcttatccagcctacaaaagctagttgccgtagaaacaaacctcgcatcactagaaaacttcccaataggacacctaaaaacactcaaagaactaaacgttgctcacaatctaatccaatctttcaaattaccagaatacttttctaatcttacaaacctagaacacctagacctcagctccaataaaatacagtccatatattgcacagatttacgcgtactccatcaaatgccactcttaaatctctccctagacctatctctcaatccaatgaacttcatacaaccaggcgcatttaaagaaatcagactccacaaactcactctacgtaataatttcgactcattaaacgttatgaaaacatgtatacaaggtttagcaggtctagaagttcacagacttgtcctaggcgaatttcgaaacgaaggtaatcttgaaaaattcgacaaatcagcgctagaaggcctatgcaacctaaccatcgaagaatttagactagcataccttgactactatttagacgacataatagatctattcaattgcttaacaaatgtaagctcattcagtttagtgtcagtaacgatagaacgtgttaaagacttttcttataatttcggttggcaacatctcgaactggtaaactgcaaattcggacaatttcccacactaaaactaaaatctctaaaacgcctaacattcacgtcaaacaaaggaggaaacgcattctcagaagtagacctaccttcccttgaatttctcgacttatcacgcaacggattatcttttaaaggctgttgctcacaatcagatttcggaactacttctctaaaatatttagatctctcctttaacggagttattactatgtcatccaactttttaggactggaacaacttgaacacttagacttccaacactcaaacttaaaacaaatgtcggaattttctgtattcttatccctcagaaacctcatatacctagacatatcgcacacccacacccgagtagcatttaacggaatattcaatggtctcagttcccttgaagtccttaaaatggcaggtaactctttccaagaaaacttcttacccgacatatttacagaactacgaaatttgacattcctcgacctatctcaatgtcaactagaacaattatcaccaacagcttttaatagcttatcatcactacaagtactaaacatgtcccacaacaacttcttctcactagacaccttcccatacaaatgcctaaattcactccaagtcctagactactcactgaaccacatcatgacttctaagaaacaagaacttcaacactttccatcatcactcgctttcttaaatctcacacaaaatgattttgcctgtacttgcgaacaccaatccttcttacaatggataaaagatcaacgccaactattagtagaagtagaaagaatggaatgtgctaccccctcagacaaacaaggcatgccagtcttatccttaaacataacatgccaaatgaacaaaaccataattggagtgagcgtactttcagtcctcgtcgtctccgtagtcgccgtacttgtatacaaattctattttcacttaatgttattagcaggatgcataaaatatggaagaggagaaaacatatatgatgcattcgttatttactcatcccaagacgaagactgggtacgtaatgaattagtgaaaaacttagaagaaggcgtaccaccatttcaactatgtctacactaccgtgacttcattcccggagtagcaatagccgcaaatatcatacacgaaggattccataaatcacgaaaagttatcgtagttgtatctcaacatttcatacaatctagatggtgtatatttgaatatgaaattgcccaaacctggcaatttctctcttctagagcaggaataattttcatcgtcctacaaaaagttgagaaaacactactccgtcaacaagtagaattataccgcttactaagtagaaatacctacttagaatgggaagactccgtattaggaagacacatattctggagaagactaagaaaagccctattagatggaaaatcatggaacccagaaggcacagtcggcacaggttgtaactggcaagaagctacatcaatatga

SEQ ID NO: 2657 - RNA, 1377 nt, synthetic construct
  misc_feature 1..1377: note = P01730
  source 1..1377: mol_type = other RNA
atgaacagaggtgttcctttcagacacttactactcgtcttacaacttgcactactaccagcagcaacacaaggtaaaaaagtcgtcctagggaaaaaaggagatacggtcgaactaacatgcacagcttcacagaaaaaatccatacaatttcattggaaaaatagcaaccaaataaaaatcctaggaaatcaaggatcattcctaacaaaaggaccatcaaaactcaacgacagagcagactcaagaagatcactatgggaccaaggaaatttcccactcatcatcaaaaacctaaaaatagaagattcagatacatacatctgtgaagtagaagaccaaaaagaagaagtacaattattagtcttcggactcacagcaaactcagacacacatttactacaaggacaatcactaactctaaccctagaaagtccaccaggctcaagcccaagtgtacaatgcagatcaccaagaggaaaaaatatacaaggcggaaaaacactatcagtatcacaattagaactccaagactcaggaacatggacttgcacagtactacaaaaccaaaaaaaagtagaatttaaaatagacatagtcgtactagcattccaaaaggcaagctcaatagtatacaaaaaagaaggagagcaagtagaattctccttcccactagcattcacagtagaaaaattaacaggatcaggagaactatggtggcaagccgaacgagctagctcctcaaaatcatggataacattcgacctaaaaaacaaagaagtatcagtcaaaagagtaactcaagatccaaaactccaaatgggaaaaaaattaccattacacttaactctacctcaagcccttccacaatacgcaggttcaggaaacctcactctagcattagaagccaaaacaggcaaactacatcaagaagtaaacctagtagtaatgagagccacgcaactacaaaaaaacttaacatgcgaagtatggggacccacttcacccaaactcatgctatcactaaaactcgaaaacaaagaagccaaagtatcaaaaagagaaaaagcagtatgggttctaaacccagaagcaggaatgtggcaatgcctattatcagactccggtcaagtactattagaatcaaacataaaagtactcccaacatggtcgacaccagttcaaccaatggcactaatcgtcctaggaggcgtagcaggactactcctatttataggcttaggaatattcttctgcgtaagatgcagacatagaagaaggcaagcagaaagaatgtcacaaatcaaaagattactaagtgaaaaaaaaacatgccaatgtccacatagattccaaaaaacatgctcaccaatatga

SEQ ID NO: 2658 - RNA, 537 nt, synthetic construct
  misc_feature 1..537: note = P01850
  source 1..537: mol_type = other RNA
atggaagatttaaataaagtattcccaccagaagtagcagtatttgaaccaagtgaagccgaaatatcacacacacaaaaagcaactctagtatgcctagcaacaggatttttcccagaccatgtcgaattatcatggtgggtaaatggaaaggaagtacactcaggagtaagcacagacccacaaccactaaaagaacaacctgcactaaatgactcaagatattgcttaagctcaagactaagagtaagcgcaacattttggcaaaacccaagaaatcactttagatgtcaagtacaattttacggactatcagaaaacgacgaatggacacaagatagagctaaaccagtaacacaaatagtatcagcagaagcatggggcagagcagattgcggattcacaagcgttagctatcaacaaggagtattatcagcaacaatattatacgaaatattattaggaaaagcaacattatacgcagtattagtatcggcattagtattaatggcaatggtaaaaagaaaagatttctaa

SEQ ID NO: 2659 - RNA, 624 nt, synthetic construct
  misc_feature 1..624: note = P07766
  source 1..624: mol_type = other RNA
atgcaatcagggacacattggagagtattaggactatgcttattatcagtaggagtatggggacaagacggaaacgaagaaatgggaggaataacacaaacaccatataaagtaagcataagtggaacaacagtaatactaacatgcccacaatatccaggaagtgaaatattatggcaacacaatgacaaaaacataggaggagacgaagacgataaaaatataggaagcgatgaagatcacctaagtttaaaagaatttagtgaattagaacaaagcggatactatgtatgttacccaagaggaagcaaaccagaagacgcaaacttctacttatatttaagagcaagagtatgcgaaaactgtatggaaatggatgtcatgagcgtagcaacaatagtaatagtagacatatgcataacaggaggattattactattagtatactattggagcaaaaatagaaaagcaaaagccaaaccagtaacaaggggagcaggagcaggaggacgacaaagaggacaaaataaagaaagaccaccaccagtaccaaacccagactatgaaccaataaggaaaggacaaagagacctatactcaggactaaaccaaagaagaatatga

SEQ ID NO: 2660 - RNA, 3915 nt, synthetic construct
  misc_feature 1..3915: note = P08575
  source 1..3915: mol_type = other RNA
atgtatctctggttaaaacttcttgcttttggattcgcttttctagacactgaggtttttgtaacagggcaatcgccaaccccttcaccaacaggcttaacgaccgctaaaatgccatcagtaccactaagcagcgatccgctgccaactcatactacagcattcagcccagctagtacattcgaacgagaaaacgatttttctgaaaccactactagcctctcacctgacaacacctcaactcaagtatcacctgattccttagacaacgcatctgctttcaacacaaccggcgtatcatcagttcaaacaccccacctcccaacgcacgcagacagtcaaaccccatccgcaggcacagacacccaaaccttctcagggtcagcagccaacgcaaaattaaatcctactcctggttcaaacgcaataagcgatgtaccaggagaaagatcgaccgcctcaacttttccaactgatccagtatcacccctaacgacaacattatcattagcacaccattcctcagcagcactaccagcaaggacatcaaacacaacaataaccgcaaacacatcagacgcatacctcaatgcttccgagacgaccactttaagcccctcaggctcagcagtaatctcaactaccacaattgccacaaccccatcaaagcctacatgcgacgaaaaatatgccaatataacagtagattatctatataataaagaaacaaaactattcacagcaaaactcaatgtaaacgaaaatgtagaatgcggaaacaatacttgtacaaacaatgaagttcataatctcacagaatgtaaaaacgcttcagtatccataagtcacaactcatgcacagctccagacaaaaccttaatattagacgtcccacccggggtcgaaaaatttcaactacatgattgcacacaagttgaaaaagctgatactactatctgtctcaaatggaagaatatagaaacattcacttgcgacacacaaaacattacatacaggtttcaatgcggtaacatgatattcgacaataaagaaattaaacttgaaaacctagaaccggaacacgaatacaaatgcgattctgaaattctatataacaaccataaattcacgaatgcatctaaaattataaaaactgacttcggttcacccggcgaaccacaaattatattctgtcgatctgaagccgcccaccaaggagtaataacttggaatcccccacaaagatctttccataatttcactctctgctatataaaagaaacagagaaggactgtctaaaccttgataaaaatttaattaaatacgaccttcaaaatctaaaaccatatacaaaatacgtactgagcctacatgcgtacataatcgcaaaagttcaaagaaatgggtcagcggccatgtgtcacttcacaacgaaaagcgcaccaccctcacaagtctggaatatgacggtaagcatgacctcagacaacagtatgcacgttaagtgccgaccaccaagagatagaaatggaccacacgaaagataccatctggaggtagaagccggaaacacattagtacgcaacgaatcacacaaaaactgtgatttcagggttaaagatcttcaatactcaaccgattacaccttcaaggcatatttccataatggagactacccaggtgaacctttcattttacaccattcaacttcatacaactccaaagcactcatagcatttctagcgtttttgatcatagtaacatctatcgccttgctagtggtactatacaagatttatgacctacataaaaagcgaagttgcaacctagatgaacaacaagaattagtagaaagggatgacgaaaaacaactaatgaacgtagagcctatccatgcagacatactcctagaaacctacaaaagaaaaatagcagatgaaggaagactatttcttgcagaatttcaatccataccaagagtattttcaaaattccccattaaagaagcgagaaaaccattcaatcaaaataaaaatagatatgtagatattctgccatacgactacaaccgtgtagaattatcagaaataaacggtgacgcaggttccaactatataaacgcctcatatatagatggcttcaaagaaccgcgaaaatacattgctgcacaaggaccccgagatgaaacagtagacgatttctggagaatgatatgggaacaaaaagctacagttatagtaatggtcactcgatgtgaagaaggaaacagaaacaaatgtgcagaatactggcctagcatggaagaaggcactagagccttcggcgatgtagtcgtaaaaataaatcagcacaaaagatgccctgactacattattcaaaaactaaacattgtcaacaaaaaggaaaaagctacaggacgggaagtaacgcacatccaatttaccagctggcccgatcacggcgtacctgaggatccccacctgttattaaaattacgacgacgtgttaacgcattttccaactttttctccggaccaatcgttgttcattgctcagccggagtaggacgaacaggaacctatatcggtatagatgcaatgctagaaggcctcgaggccgaaaataaagtcgatgtttacggctacgtagttaaactgcgaagacagcgctgtttaatggttcaagtagaagcccaatatatcttgatccaccaggctttagttgaatataatcaatttggagaaacagaagtcaatttatcagaattacacccttacctacataatatgaagaaaagagacccaccatcagagccatcacctctagaagcagagttccaaagactaccatcatacagatcatggcgaacccaacacatcggtaaccaagaagaaaacaaatccaaaaaccgaaactcaaacgtgatcccctatgattataacagagtaccattaaaacacgaattagaaatgtcaaaagaatcagaacacgatagtgacgaaagttcagatgatgattccgacagtgaagaacctagtaaatacataaatgcatcatttattatgagttattggaaaccagaagtcatgattgcagcacaaggaccattaaaagaaactatcggagacttttggcaaatgatcttccaaagaaaagtaaaggtaatagtcatgttaactgaattaaagcacggagaccaagaaatatgtgcacaatactggggagaaggaaaacaaacatacggcgatatcgaagtagatctaaaagacacagacaaatcatccacttatacactccgagtatttgaacttagacactcaaaacgaaaagactcacgcacagtataccaataccaatacactaactggtcagtcgaacaattacccgctgagccaaaagaattaatatccatgatccaagttgtaaaacaaaaactaccacagaaaaattcatcagaaggaaacaaacatcataaatcaacacctctactcattcactgtagagatggatcccaacaaacagggatattctgcgctttacttaatcttctagaatccgcagaaacagaagaagtagttgacatatttcaagtagtaaaagcattgagaaaagcacgccctggtatggtctcaacttttgaacaatatcaatttctatacgacgtcatagccagtacctatccagcacaaaatggacaagtcaaaaagaacaaccaccaagaagataaaatagaatttgataacgaggtagacaaagtaaaacaagacgctaactgtgtaaaccctctaggagccccagaaaaattacccgaagctaaagaacaagcagaaggttcagaaccaaccagtggcaccgaaggtccagaacattctgtcaatggacctgcctcaccagccctaaaccaaggatcataa

SEQ ID NO: 2661 - RNA, 765 nt, synthetic construct
  misc_feature 1..765: note = P08637
  source 1..765: mol_type = other RNA
atgtggcaactattacttccaacagcactactactattagtatcagcaggaatgagaacagaagacctaccaaaagccgtagtattcctcgaaccacaatggtatagagtactcgaaaaagactcagtaacattaaaatgccaaggagcatactccccagaagacaactcaacccaatggttccacaatgaatcactaatatcctcacaagcatcctcatactttatagacgcagcaaccgtagacgactcaggagaataccgatgccaaacaaacctatcaacactatcagacccagtacaactagaagtacacataggatggctactattacaagcaccaagatgggtattcaaagaagaggacccaatacacctaagatgccattcatggaaaaatacagcactacacaaagtaacatacctacaaaacggcaaaggaagaaaatacttccatcacaactccgacttctacataccaaaagcaacactaaaagactcaggctcatatttctgcagaggactattcggctccaaaaacgtatcctcagaaactgtaaacataacaataacacaaggattagcagtatccacaatttcatcattctttcctccaggatatcaagtatcattttgcttagtcatggtactactattcgcagtagacacaggactatatttctcagtaaaaacaaatataagatcctctacaagagactggaaagaccataaattcaaatggagaaaagacccacaagacaaatga

SEQ ID NO: 2662 - RNA, 663 nt, synthetic construct
  misc_feature 1..663: note = P10747
  source 1..663: mol_type = other RNA
atgttaagactactactagcattaaacctattcccttccatacaagtcacaggtaacaaaatactagtaaaacaatctccaatgctagtagcatatgacaacgcagtcaacctatcatgcaaatactcatacaacctattctcacgagaattcagagcctccctacacaaaggattagactcagcagtagaagtatgtgtagtatacggaaactactcacaacaactacaagtatactcaaaaaccggattcaactgcgacggaaaactaggaaacgaatcagtaacattctacttacaaaacctatacgtaaaccaaacagacatatacttctgcaaaatagaagtaatgtacccaccaccatacctagacaacgaaaaatccaacggaacaataatacacgtaaaaggaaaacacctatgcccatcaccactattcccaggaccatccaaaccattctgggtactagtagtagtcggaggagtactagcatgttactcattactagtaacagtagcattcataatattctgggtaagatcaaaaagatcaagactcttacactcagactacatgaatatgacaccacgaagacccggaccaacaagaaaacactaccaaccatacgcaccaccaagagatttcgcagcatacagatcatga

SEQ ID NO: 2663 - RNA, 681 nt, synthetic construct
  misc_feature 1..681: note = P11912
  source 1..681: mol_type = other RNA
atgccaggaggaccaggagtactacaagcactaccagcaacaatatttctattattcctattatcagcagtatacttaggaccaggatgtcaagctctatggatgcacaaagtacccgcatcattaatggtatcattaggagaagacgcacacttccaatgtccacataactcatcaaataacgcaaacgtaacatggtggagagtattacacggaaactatacatggccaccagaatttttaggtccaggagaagatccaaatggaacactaataatacaaaacgtaaacaaatcacatggaggaatatatgtatgtagagtacaagaaggaaatgaatcataccaacaatcatgcggaacatatttaagagtacgacaaccaccaccaagaccattcttagatatgggagaaggaactaaaaatagaataataacagcagaaggaataatattactattttgcgctgtagtaccaggaacattactattattcagaaaaagatggcaaaatgaaaaattaggattagacgcaggagatgaatacgaagatgaaaacttatatgaaggattaaatctagatgactgttcaatgtacgaagatatttcaagaggactacaaggaacatatcaagatgtaggaagtttaaacataggagatgtccaattagaaaaaccatga

SEQ ID NO: 2664 - RNA, 1671 nt, synthetic construct
  misc_feature 1..1671: note = P15391
  source 1..1671: mol_type = other RNA
atgcccccaccaagattattattttttttattatttctcacacctatggaagtaagaccagaagaaccattagtagttaaagttgaagaaggagataatgctgtactacaatgcctcaaaggtacaagtgatggaccaacacaacaattaacatggagtagagaatcaccattaaaaccatttctaaaactttcattaggattaccaggattaggaattcatatgagacctctagcaatatggctatttatctttaatgtatcacaacaaatgggaggattttacctctgtcaacccggaccaccttccgaaaaagcatggcagccaggatggaccgtaaatgtagaaggttcaggagaattatttcgatggaatgtttcagatctaggaggtttaggttgcggcttaaaaaatagatcatcggaaggaccatcttcaccatcaggaaaattaatgtccccaaaattatacgtatgggcaaaagacagaccagaaatttgggaaggtgaaccaccctgtttaccaccaagagacagtctaaatcaaagtttaagccaagatctaactatggcaccaggaagtacgttatggctatcatgtggagtacctccggattcagtatcaagaggacctcttagttggactcatgtccatcccaaaggtccaaaatcactattatctctagaactaaaagatgatagaccagctagagacatgtgggtaatggaaacaggactgttactacctagagctacagctcaggatgcaggaaaatattattgccatagaggcaacttaacaatgtcattccacttagaaattacagctaggccagttctttggcattggttattaagaactggaggatggaaagtatctgcagttacactagcatatttaatattttgcttatgtagtttagtaggcatacttcacctacaaagagcactagtattaagacgaaaaagaaaaagaatgacagatccaacacgaagattctttaaagtaaccccacctccaggatccggtccacaaaatcagtatggtaatgtactaagtctaccgacacctacatcaggacttggaagagcacaaagatgggcagcaggattaggtggaacagcaccatcatatggaaatccttcatctgacgtacaagcagatggagcattaggatctagatcaccacccggagtaggacctgaagaagaagaaggcgaaggatacgaagaacctgatagtgaagaggatagtgaattttacgaaaacgatagtaatttaggacaagatcaactcagtcaagacggttccggatacgaaaatccagaagatgaaccactaggaccagaagacgaagacagcttttcaaatgcagaatcatacgaaaatgaagatgaagaattgacacaaccagtagctcgtacaatggattttttaagtccgcatggaagtgcatgggatccatctagagaagccacaagtttaggaagtcaatcatatgaagatatgcgaggaatattatacgcagctccacaattaagatctataagaggacaaccaggaccaaatcacgaagaagacgcagacagttatgaaaacatggataatccagatggaccagatccagcatggggcggaggaggaagaatgggaacttggtcaactagataa

SEQ ID NO: 2665 - RNA, 672 nt, synthetic construct
  misc_feature 1..672: note = P16410
  source 1..672: mol_type = other RNA
atggcatgtctaggattccaaagacacaaagcacaattaaacctagcaacaagaacatggccatgcacactattatttttcctattattcataccagtcttctgcaaagcaatgcacgtcgcccaaccagcagtagtactcgcatcttcacgaggaatagcctcattcgtctgcgaatacgcatcaccaggaaaagcaacagaagtcagagtaacagtactacgccaagcagactcacaagtaacagaagtatgcgcagctacatacatgatgggaaacgaattaacatttctagacgattccatatgcacaggaacatcatcaggaaaccaagttaatctaacaatacaaggacttagagcaatggacacaggactatacatatgtaaagtagaactaatgtacccaccaccatactacctcggaataggaaatggaacacaaatatacgtaatagatccagaaccatgcccagactcagacttcttactatggatactagccgcagtatcatcaggattattcttctactcatttctattaacagcagtatcactatctaaaatgctaaaaaaaagatcaccactaactacaggagtatacgtaaaaatgccaccaacagaaccagaatgcgaaaaacaatttcaaccatatttcataccaataaactga

SEQ ID NO: 2666 - RNA, 1419 nt, synthetic construct
  misc_feature 1..1419: note = P16671
  source 1..1419: mol_type = other RNA
atgggctgcgatcgaaactgcggactaatagcaggagcagtaataggagctgtattagcagttttcgggggtatactaatgccagtaggagaccttttaatacagaaaacaatcaaaaaacaagtagtattagaagaaggcaccatagctttcaaaaactgggtaaaaacaggaaccgaagtatacagacaattctggatattcgacgtacaaaatccacaagaagttatgatgaactcatccaacatacaagtaaaacaacgcggaccatacacatacagagtaagatttctagcaaaagaaaacgtaacacaagatgcagaagacaacacagtcagtttcctacaaccaaatggagccatattcgaaccatcattatccgtaggtaccgaagcagataatttcacagtactaaacttagcagttgctgcagctagtcacatctaccaaaaccaattcgtacaaatgatactcaattccctaatcaacaaatcaaaatcaagtatgttccaagtacgaacactaagagaactattatggggatatagagatccatttctatcactagtaccatatccagtaacaacaacagtaggactcttctatccatacaataacacagctgacggcgtatataaagtattcaatggaaaagataatatatctaaagttgcaataatagatacttacaaaggaaaaagaaacctatcatactgggaatcgcattgcgatatgatcaacggaacagacgccgcatccttcccaccctttgtcgaaaaatcacaagtactacaattcttcagttcagacatctgcagatcaatatacgcagtgttcgaatccgacgtaaatttaaaaggaataccagtctacagattcgtattaccatcaaaagcattcgcttcaccagtcgaaaacccagataattattgcttctgcacagaaaaaataatatccaaaaattgtacatcatatggagtattagacatatcaaaatgcaaagaaggacgaccagtatacatatcactaccacactttttatacgcatcaccagatgtatcagaacccatagacggtctcaatcccaatgaagaagaacatagaacatatttagacatagaaccaatcacaggctttaccctacaattcgcaaaaagactacaagtaaatctcttagtaaaaccatcagaaaaaatacaagtattaaaaaatttaaaaaggaattatatagtcccaatactctggctaaacgaaacaggaacaataggagacgagaaagcaaacatgttcagaagccaagtaactggaaaaatcaatctattaggccttatagaaatgatactattaagtgtaggtgtagtaatgtttgtagcattcatgatatcatactgcgcatgcagaagtaaaaccataaaatga

SEQ ID NO: 2667 - RNA, 651 nt, synthetic construct
  misc_feature 1..651: note = P26718
  source 1..651: mol_type = other RNA
atgggatggatacgaggaagaagaagccgacactcatgggaaatgtcagaattccataactacaacctagacctaaaaaaatcagacttcagcacaagatggcaaaaacaaagatgcccagtagtaaaatcaaaatgcagagaaaacgcatcaccattcttcttctgctgtttcatagcagtagcaatgggaataagattcataataatggtagcaatatggtcagcagtattcctaaactcactattcaaccaagaagtacaaataccactaacagaatcatactgcggaccatgcccaaaaaactggatatgctacaaaaacaactgctaccaattcttcgacgaatcaaaaaactggtacgaatcacaagcatcatgtatgtcacaaaacgcatcactactaaaagtatattcaaaagaagaccaagacctactaaaattagtaaaatcataccactggatgggattagtacacataccaacaaacggatcatggcaatgggaagacggatcaatactaagtccaaacctactaacaataatagaaatgcaaaaaggagactgcgcactatatgcatcctcattcaaaggatacatagaaaactgctcaacaccaaacacatatatatgcatgcaaagaacagtataa

SEQ ID NO: 2668 - RNA, 261 nt, synthetic construct
  misc_feature 1..261: note = P30273
  source 1..261: mol_type = other RNA
atgataccagcagtagtactcctactactactactagtagaacaagcagcagcactaggagaaccacaactatgctacatactagacgcaatactattcctatacggaatagtactaacactactatactgcagactaaaaatacaagtaagaaaagcagcaataacaagctacgaaaaaagcgacggagtatacacaggactaagcacaagaaaccaagaaacatacgaaacactaaaacacgaaaaaccaccacaatag

SEQ ID NO: 2669 - RNA, 1137 nt, synthetic construct
  misc_feature 1..1137: note = P32248
  source 1..1137: mol_type = other RNA
atggacctaggaaaaccaatgaaatcagttttagtcgtcgcactattagtaatatttcaagtatgtctttgccaagatgaagtaacagacgactacataggagataacacaaccgtagactacacactatttgaatcattatgctcaaaaaaagacgttagaaacttcaaagcatggttcttacctataatgtactcaataatctgcttcgtaggactacttggaaacggcctcgtggtattaacctatatatacttcaaaagattaaaaaccatgaccgacacatacctactaaacctagcagttgcagatatactattcctcctaacattaccattctgggcatactcagcagcaaaatcctgggtattcggagtccatttctgtaaattaattttcgcaatatataaaatgtcattcttttccggaatgctacttctactatgcatatcaatagatagatacgtagcaatagtacaagctgtttctgcacatagacaccgcgcaagagtattactcatatcaaaactatcatgcgtaggtatatggattctcgcaacagttttatctatacccgaattattatattcagatttacaaagatcatcatcagaacaagcaatgagatgctcactaataaccgaacacgtagaagcattcataacaatacaagtagcacaaatggtaataggatttctagtcccattactagccatgtcattctgctatctagtaataataagaacactcttacaagcaagaaactttgaaagaaacaaagcaattaaagtcataatcgcagtagtagtagtattcatagttttccaactaccatacaacggagtagtactagcacaaacagtagcaaatttcaacataacctcatcaacatgcgaactatcaaaacaattaaacatagcctacgacgtaacatactccctcgcatgcgtacgatgttgcgtaaacccattcctatacgcattcattggagtaaaattcagaaacgacctattcaaactatttaaagacctaggatgcctatcccaagaacaactaagacaatggtcatcatgtagacatataagaagatcttctatgtctgtagaagccgaaaccaccacaacattctccccatga

SEQ ID NO: 2670 - RNA, 690 nt, synthetic construct
  misc_feature 1..690: note = P40259
  source 1..690: mol_type = other RNA
atggcaagactagccctaagtccagtaccatcacattggatggtagcactattactactactatcagcagaaccagtaccagcagcaagatcagaagaccgatacagaaacccaaaaggatcagcatgctcaagaatatggcaaagcccaagattcatagccagaaaaagaggattcacagtaaaaatgcactgctacatgaactcagcatcaggaaacgtaagctggctatggaaacaagaaatggacgaaaacccccaacaactaaaactagaaaaaggaagaatggaagaatcacaaaacgaatcattagcaacattaacaatacaaggaataagattcgaagacaacggaatatacttctgccaacaaaaatgcaacaacacatcagaagtataccaaggatgcggaacagaactaagagttatgggattctcaaccttagcacaactaaaacaaagaaacacactaaaagacggaataataatgatacaaacactattaataatcctattcataatagttcccatattcttactactagacaaagacgactcaaaagcaggaatggaagaagaccatacatacgaaggactagatatagaccaaactgcaacatacgaagacatagtaacattaagaacaggagaagtaaaatggagcgtaggagaacacccaggacaagaatga

SEQ ID NO: 2671 - RNA, 990 nt, synthetic construct
  misc_feature 1..990: note = P42081
  source 1..990: mol_type = other RNA
atggacccacaatgtacaatgggcctatccaacatattattcgtaatggcattcttactatcaggagcagcaccactaaaaatccaagcatatttcaacgaaacagcagacctaccatgccaatttgcaaactcacaaaaccaatcactatcagaattagtagtattttggcaagaccaagaaaacctagtactaaacgaagtatacctaggcaaagaaaaattcgactcagtacacagtaaatacatgggccgaacatcattcgactccgactcatggacactaagactacataacctccaaataaaagacaaaggcctataccaatgcatcatccaccacaaaaaaccaacaggcatgataagaatacaccaaatgaactcagaactctcagtcttagccaacttttcccaaccagaaatagtaccaatatccaacataacagaaaacgtatacataaacctaacctgtagctcaatacatggataccccgaacccaaaaaaatgtcagtactattaagaacaaaaaactccacaatagaatatgacggagtaatgcaaaaatcacaagacaatgtaacagaattatacgacgtatcaatatcactatccgtatcattccccgatgtaacatcaaacatgaccatattctgtatactcgaaacagacaaaacaagactactatcatcaccattttcaatagaactagaagacccccaacccccaccagaccacataccatggataaccgcagtattaccaaccgtaataatatgcgtaatggtattctgcctcatactatggaaatggaaaaaaaaaaaaagaccaagaaattcatacaaatgcggaacaaacacaatggaaagagaagaatcagaacaaacaaaaaaaagagaaaaaatacacataccagaaagatccgacgaagcacaaagagtattcaaatcatcaaaaacctcatcatgcgacaaatcagacacatgcttctga

SEQ ID NO: 2672 - RNA, 1011 nt, synthetic construct
  misc_feature 1..1011: note = Q15762
  source 1..1011: mol_type = other RNA
atggactacccaactttactccttgcacttctacatgtatatagagcactatgtgaagaagtattatggcatacatcagtaccattcgcagaaaacatgtcactagaatgcgtatacccaagcatgggaatactcacacaagtagaatggtttaaaataggaacccaacaagatagcatagcaatattctctccaacacacggaatggtaataagaaaaccatacgcagaaagagtatatttcttaaattccacaatggcctcaaacaatatgacactatttttcagaaatgcatcagaagatgacgtcggttactattcatgcagcttatacacttacccccaaggaacatggcaaaaagtaatacaagtagtacaatcagattcatttgaagcagcagtaccatcaaactcacacatagtatcagaaccaggaaaaaacgtaacattaacatgtcaaccacaaatgacatggccagtacaagcagtcagatgggaaaaaatacaaccaagacaaatagatcttttaacatattgcaatctagtacacggaagaaatttcactagtaaatttccacgacaaatagttagcaattgctcacacggtcgctggagcgttatagttataccagatgtaacagtaagtgattcaggtctatatcgatgttacttacaagcaagcgcaggcgaaaacgaaacttttgtaatgcgattaacagtcgctgaaggaaaaacagataaccaatacacattatttgtagccggtggcacagttctattactattattcgtaatttcaataacaacaataatagtaatctttctaaatagaagaagaagaagagaacgaagagacttattcacagaatcatgggacacccaaaaagcaccaaataactatagatcaccaataagcacatcacaacccaccaaccaaagcatggacgatacaagagaagatatatatgtaaactaccctacattttcaagaagaccaaaaacaagagtatga

SEQ ID NO: 2673 - RNA, 13482 nt, synthetic construct
  misc_feature 1..13482: note = Q685J3
  source 1..13482: mol_type = other RNA
atgccccgcccaggtaccatggctctgtgccttctgaccctcgttttaagtctccttccaccccaagccgctgccgaacaagatttatcggtcaaccgagcagtctgggacgggggaggatgcatatcacagggggatgttttaaacagacagtgccaacaactcagtcaacatgtacgaacagggtctgcagcaaataccgcaactggtaccacttccactaacgttgttgaacccagaatgtacctttcttgcagcaccaaccccgaaatgacaagtatagaatcttcagtaacttcagatacgcccggcgtctcctctactagaatgactcctaccgaatcaagaaccacttctgaatcaacctcagactctaccactcttttcccgagttctaccgaagacacctcatcgccaaccacccccgaagggactgatgtccctatgtccactccttctgaagaatctattagctcaactatggcattcgtatcgactgctcctctcccgtccttcgaagcatacacttccctcacctataaggtggacatgtccacccccttgactacaagtacgcaggccagttcatcaccaaccacgcctgaatcgaccactataccaaaatcaaccaactcagaaggaagcacacccctaactagcatgccggcatcaaccatgaaagtagctagctcagaagcaataaccctcctcaccactcctgtcgaaatatccacgcctgtcaccatcagtgcccaagcctcttcatcccccaccaccgcagaaggtccttccttgagcaactccgcaccctcaggagggtcgactccattaaccagaatgcctctttcagtcatgctggtcgtctcttccgaggcttctacccttagcaccaccccggcagcaaccaatatcccagtcatcacatcaaccgaagctagctcatccccaacaaccgcagaaggcacatcaatcccaacatcaacctacacggaaggatcaactccacttactagcacacccgcatcaaccatgcccgtggccacgtctgaaatgtcgacactatccattacacccgtcgataccagtacacttgtaaccacatctacggaaccttcttctttgccgactactgccgaagccaccagtatgctcacctctactctgtctgaaggatctactcctctcacgaacatgcccgtgagcaccatccttgttgcttcctcagaagctagtactacaagcaccatcccagtagactccaaaacatttgtaaccaccgcctccgaagcctcatcaagccctactacagctgaagatacttcaattgcaacatcaactccctcagaaggttctacacctcttacatcgatgcctgtctcaactacccctgtggcttcatccgaagcctccaacttatcaacaactccggtggactctaaaactcaagtcacaacgagtacggaagcatcaagttcaccacccaccgcagaggtaaattcgatgccaacatcaacaccatcagaaggtagtacgccacttaccagtatgagcgtgtcaactatgccagttgcgtcctctgaagcatcgacactcagtaccacccccgtagacacgtccacacctgtgactaccagttcagaagcgagtagctcatcaacgactcccgaaggtacatcaatacccacatctaccccatcggaaggatcaacaccactcacgaatatgccagtgagcacaagactcgttgtctcgtccgaggccagcacaacaagtaccactcctgccgattccaacacattcgttaccacttcctcggaggcttccagttcatcgactacagccgagggcacatccatgcctacctccacttatagcgaacgtggcacaaccattacgtccatgtccgtaagcaccactctcgtggctagttctgaagcctctacactttctactacacccgtagactcaaacacacctgtgactacatcgaccgaggcgacaagttcatcaacaacggccgaaggtacctccatgcctacctctacatacactgaaggttccacccctttaacaagtatgcctgttaacacgacgctcgtagcaagttccgaggcttcgacattatctactactcctgtagacacttcgacacccgttaccacatcaactgaagcaagttcatctcctactacggctgatggcgccagtatgcctacatctacccctagcgagggatcgactccactcacatctatgcccgtatccaaaacccttcttacgtcctctgaggcatctactttatctactacacccctcgacacttctactcacataaccacttccaccgaagctagctgctcgcccacaacgacggaaggaaccagcatgccaatttcaacaccgtcagaaggctctcccttacttacctcaatacctgtatctattactccggtaacatcacccgaagcctcaacactctcaaccacccccgttgacagtaattctccggtaactacttcgactgaagtctcatcctctccaacccctgcagaaggcacatcaatgcctacttcaacatattcagaaggaagaacgcccttaacatctatgcccgtgagtactacactcgtcgccacatccgctatatctactctctcaaccacccccgttgatacatcgacaccagtaaccaactctaccgaagctagatcttcaccaacgacttcagaaggaacatcaatgcctacttcgacccccggagaaggttctacaccccttacttcgatgccagactctactacacccgttgtttcttcagaagcacgtactctatcggctacgcccgtagatacatcaactccagtgacgacgagcacggaagccacaagttcccccacaacagcagaaggaacgtcgatcccaaccagcactccgagtgaaggaacaacccctcttacctcaacacccgtaagccacactctggtggctaattcagaagcctctactctttctactaccccagttgactccaacacgccattaacaacatccacagaagcatcctccccacctcctacagcagaaggaacatccatgcccacgtcaacacccagtgaagggtccacccctttaacgcgcatgcctgtctctacgacgatggttgcttctagtgagacatccacactatcaacgactccagccgatacgagcacgcctgtcacgacgtactctcaagcctcctcatcatcaaccacagctgatggcacttctatgccgacgtctacatattccgaaggaagcactccattgacatctgtgccagtttccactcgtctcgttgttagttctgaggcttctacactctcgaccactcccgtcgacacaagcattccagtgacaacctccaccgaagcatcatcgtcacctaccaccgcagaaggaacatccatacctacatcgcccccttctgaaggtacgacacccctagcttcaatgccagtcagtaccactctagtcgttagctctgaagcgaacacattatcaacaactccagtggatagcaaaacacaagttgcaacgagtactgaggcttcaagtccaccgccaaccgccgaagtaactagcatgcccacatcaactccaggcgagagatccacgccccttacttcgatgccagttcggcatacgcctgtcgcttcttctgaagcaagcacactttctacatccccagtagacacatctaccccggtcacaacctcagccgaaacatcctcaagtccaacaactgccgagggaacatctctcccgactagcaccacctcagaaggttctactctactaacttctatcccagtctccaccactctagtcacatcccccgaagcatcaaccctactcacgacacccgttgacacaaaagggcctgtagtgactagcaatgaagtctcatcttcacctacaccagcagaaggaacatctatgccaacctcaacatattctgaaggtcgaactcctcttacaagtatcccagtaaataccactctcgtggcctcatctgctatctctatactaagcacaacacctgtggacaactctactcctgtaaccacgtcaacagaggcctgttcgtctcctactactagcgaaggcacaagtatgcctaatagcaacccctctgaagggacgacaccactcacgtctataccagtgagcaccacccccgtcgtcagctcggaagcgtccactctttccgctactcccgttgacacctctacacctggcaccacatcagccgaagcaacgagtagtcctacaactgctgagggaatatcaattcctacctctacaccctcggaaggcaaaacacctttgaaatctatacccgtaagtaacacacccgtggcaaactcggaagcatctactctgtcaaccacgcctgtcgactccaattcacctgtagtaacttcaacagcggtcagctcgagtccgacacccgccgagggtacatcaatagcgattagcactccctctgaagggtccacggcacttacgtctattccggtttcgactaccacagttgcaagttccgaaataaacagcctttcaactacacccgctgtaacctccactcctgtaacaacatattcccaagcgtcaagctcaccgacaacggccgatgggacttcgatgcaaacctctacctactcagaaggtagtacaccccttacatctttgcctgtcagcaccatgttagtagtaagtagcgaagcgaatacactttcaacaactcccattgatagtaaaactcaagtaactgcatctacagaagcaagttcgtctactaccgcagagggctcctcaatgacaataagcacaccctccgaagggtctccattacttacgtccataccggtatcaacaacaccggtcgcgtccccggaggcttcaaccttaagtacgacaccggtagattcaaattcacctgttatcacttcaacagaagtgagttcgagtccaactcctgccgagggtacctcaatgccaacgtcaacttacaccgagggcagaacaccccttacttccattacagttcgaactactcccgtcgcaagcagcgcaatcagtacgttaagtactacaccagtagataattccacacctgtcaccacctcaacagaagctcgatcttcgccaaccacgtcagaagggacgagcatgcccaactcaacaccttccgagggaactactccacttacctctatacccgtttcgactaccccagtgctatcctcagaagcctcgactttatcagcaactccaatagatacaagtacgcccgtcacaacatccaccgaagcaacaagctctccaaccaccgcagaaggcacctcgattccaacatctactctatctgaaggaatgactccgctaacttctaccccagttagtcatacgctggtggctaactcagaagccagcaccctgtcaacaacacctgttgacagcaattcaccagtagtcacatccaccgcagtttcgagctcgcccacaccggccgagggcacttctatagccacatctaccccctcagaaggctccacggccttaacctccataccggtttctacaactaccgtcgcttcttcggagactaacacattatcaactactcctgcagtaaccagtacacctgtcactacatacgcacaagtatcttcttcccccacaactgcggacgggtcatctatgcctacgtccacgcccagagaagggcgtccaccacttacatcaataccagtctccacaacaacggttgctagcagtgagataaatacgctatctacaacactagctgacacgagaacacccgttactacgtactcccaagctagtagcagtcctacaacagccgacggaacaagtatgcctacacccgcgtattctgaaggcagtacaccccttacctcaatgcctttaagtacgaccctcgtggtatcaagcgaggcatctacgttaagtactactccggtcgacacatctacaccagcgaccacatctaccgaaggttcctcgagcccaacaacagccggtggaacctctattcaaacaagcactccaagtgaaagaactacaccactagccggaatgccggtctccacaactctagttgtgagttccgaaggtaacactctctcaacgacaccagttgactccaaaacacaagtaacaaattccacagaggcatcctcttccgccacagcagagggctcctccatgacgatctctgctccatccgaaggctctcctctcctcacttcaataccattatccacgactcctgtagcgtctcctgaagctagtacattatccacaacgccggttgatagcaattccccagtcatcacatctactgaggtctcttcctccccaattcccactgaaggcacatcaatgcagacgtcaacatacagtgatagaagaacacccctaacgtcaatgcctgtttctaccacagtagttgctagttcagctatttcaaccttaagcaccactccggttgataccagtacacccgtgacaaactcgacagaagcacgttcctcacctactacttccgaaggaacctccatgccaacctccactcctagcgaaggctccactccttttacatctatgccagttagtacaatgcccgtagtaacgagtgaggccagtacattatccgcaaccccggtagatacctctacccctgtcactacaagtacagaagcgacctcgagtccaaccacagcagagggtacgtctatccccacttcgacactaagtgaaggcacaacccctttgacgtccataccagtatcgcataccctagttgcaaattctgaagtatccactcttagtacgacccctgtggatagcaacacccctttcactacttccaccgaagcatcttcaccaccacccactgctgaaggcacctctatgccgacatccactagcagtgaaggtaatacaccactaacgagaatgccggtttctacaaccatggtcgcatctttcgaaactagcacgctttcaaccacaccggcggacaccagcactcctgttacaacctattcccaggctggaagttcccctaccacggccgatgatacttctatgcctacaagtacctactcagaagggagcaccccactcactagcgtacctgtgtctaccatgcccgtcgtctcttcagaagcgagcacgcattcaaccacgcctgtcgacacctctactccagtaactacatctacagaagcatcgagctcaccaactactgctgaaggaacttctattccaacctcaccgcctagtgaaggaacaactcccttagcctctatgccggtatcgacaacccctgttgtgtcctcggaagcaggaaccttatctacaacccctgtggacacatcaactccaatgacaacatcaactgaagcaagctcctccccaacgacagcagaagatattgttgtgccgatttctaccgctagcgaaggctccacattacttacctcaataccggtttccactacaccggtggcttcacccgaggcatctaccctaagcacgacccccgtcgactctaactcacccgtagttacttctactgagataagtagcagtgcgacaagcgccgaaggaacctcaatgcctacatcaacttattccgaaggatctaccccactccgctcgatgccagtctcaaccaagccactcgcatctagcgaagcatctaccctgagcacaacccctgtagatacatctatacctgttacgacatcgacagaaacgtcctcatcgccaaccacagcgaaagacacctcaatgcccatatcaacaccctcagaagtatcaacatcactcacttccattctcgtatccacaatgcccgttgcatcaagtgaagctagcactctctccacaaccccggtggatacacgaactttagtgacaaccagcaccggcacatcttcgtcacctacgactgcggaaggatcatcaatgcccaccagtactccaggcgagcggtcaacaccactaacaaatatcctagtatcaactacactgctggccaattcagaggcttctaccctaagtacaacaccagttgatacgagtaccccggtgacaacctcagccgaagcgagctcatcgcccacaactgcagaaggtacaagcatgcgaatatctacacctagcgatggatcaacaccattaaccagtattcttgtgtcaacattaccggtagcttcctcagaggctagtacagtatctaccaccgctgttgacacttcaatacctgttactactagcacagaggcctcgagtagtcctaccacagcagaggtaacgtcgatgcccacgagcactcctagcgaaacttcgacgcccttaaccagcatgcccgtcaaccatacgccagttgcgtcttccgaagccgggactttatcaacaactcccgtagacacatccacgcctgtaacaacctcgacaaaagcctcctcgtctcccacaacagcagaaggcatagttgttcccatatcaaccgcctcagagggctctaccctattaacatccatcccagtctccactacaccggtcgcctcgagtgaagcaagcacattatctacaacacctgttgatacaagtataccagtgactacatctactgaagggagttcatcacccaccacagcagaagggacctctatgcccatcagtacaccatctgaagtaagcacaccattgacctcaatcctggtctcaactgttccagtcgcaggatcggaagcgagcactttatccaccacgccagttgacactcgaacgccagtaactacatctgctgaggcctccagctcccctaccactgcagaaggtacctctatgccaatttcaaccccaggcgaacggcgtacaccgttgacatctatgtcagtatctacaatgccggtcgcgagtagtgaagcgtctaccctttccaggactccagcggatactagcacccccgttacgacatctacagaagcgagctcaagccccaccaccgccgaaggcaccgggattccgatctccaccccctctgaaggtagtacccctcttacgtcaatccctgtatcaaccacgccagtggccattcctgaggcttcaaccctatccacaacaccggtagattccaactcgccagtagttacaagtacagaagtttcaagtagcccaactcccgctgaaggaacgtcaatgccaatttcgacatactccgaaggtagtacaccattaactggtgtaccagtttccaccactccggtaacaagtagtgctatatccacactctctactactcccgtagatacttctacaccagtaacgacttcgactgaagcccatagttctcccactacctcagagggtacttccatgcccacctcaacaccgtccgagggatccactcctttaacttatatgccagtatccacgatgttggtagtatcatccgaggactctactctatccgcgaccccggttgacacaagtacacccgtaaccactagcacagaggcaacctcaagcacgacagcggaaggtacttctatacctacttcaacaccctccgaaggcatgacgccattaacctctgtccccgtttcaaacacccccgtcgcatcctccgaagcgtcgatcctctccaccactcctgtcgattccaatacgccacttactacaagtacagaggcgtcatcttctcctcctaccgccgagggcacgtccatgcccacttcaactccttctgaaggatcaacacccctaacaagtatgccagtgtccacaacaacagttgcctcgtccgagacttccactctatctactactccggcagacacttcgacaccggtcaccacatatagccaagcatcttccagcccacccatagcagacgggactagcatgccaacgtccacctactcagaaggttccactcctctcacaaatatgtcgttttcaaccactcctgtcgtgtctagtgaggcctcaacactttctaccactccagttgataccagtacaccagttacaacatcaacagaagcatctctcagtccaacaactgcagaaggtacttccatcccgacatcatccccatcagaaggaacgacgcctttagcgtcaatgccagtgtcaacaacacctgtggtttcatctgaagtgaatacactttccactactccagtagattctaacactctggttacaacaagcactgaagcctcgagctcacctaccattgcagagggaacttcgctacccacctcaacaacaagtgaagggagcacccctctctccattatgcctttgagtactaccccagtagcctcttctgaagcatcaacactctccaccacacccgtggacactagcactccagttactactagctcccctaccaactcttcccctaccaccgcagaagttacatcaatgccaacatcaacagcaggagaaggatctacacctctgactaatatgccggttagtacaacgccagttgcatcaagtgaggcctcgacgctttccacaactcctgtagactccaatacatttgtaacctccagttctcaagctagttcttccccagctactctccaagttacaacaatgagaatgtcaacaccctcagagggaagcagtagcctaactacaatgttactctcatccacatatgtgacctcatcagaagcctcgacgccgtcaaccccatcagtagacaggagcactccagtaacaacttcaactcaaagtaactcaacacctacaccgcccgaagttatcacgttgcccatgagcacaccctctgaagtatctaccccgcttactattatgcccgtttctacgacttcagtcacaatctctgaagccggaactgccagcactctgccagtggacactagcaccccagtgataacttctacacaagtatctagttcgccagtaactccggaaggcacaaccatgccaatatggacaccctcagaaggatccactcctctgaccactatgccggtttcgaccacacgcgtaacaagttcggaagggtccaccttatccactccttctgttgtaacctcaactcctgtgaccacgtcaaccgaagctataagttcttcagcaaccctcgattcaactacaatgagtgtttctatgcctatggaaatatctacccttgggactacaatcttggtctctactactcctgtaactagatttccagaatcttcgaccccatctataccctctgtttacacctccatgtcaatgacgacagccagcgaaggatcctccagtccaacgacactcgaaggaacaaccacgatgccaatgagcactacttcggaacgatcgacgctgctcacgactgtcttaatttctccgataagcgtcatgtcaccatcggaagcctcaaccttatctacaccgccaggcgatacttctacccctcttttaacttctaccaaagcaggatcattctcaataccagccgaggttacaacaatccgcatttctataacttcggaaagatcaactcctcttaccacactccttgtgtccacaacgctccctacatcttttccaggtgcatcaatagcgtctacaccgccactggacacaagcacaacattcacgccaagcacagataccgcctcaacacctaccatccccgttgctacgacaatatccgtttctgttattacagagggatccacaccgggcaccaccatttttatcccctctacccccgtcacctcttcgacagccgacgtttttcccgctactactggtgcggtatcaactccagtaataacctcgacggaactaaacaccccctctacttcttcgtcatccactacgaccagcttttcaacaactaaagagttcaccacaccagcaatgacaactgcagcacctctcacatacgtaactatgtccactgctccgagtacaccccgtaccaccagtcggggttgcacaacctccgctagcaccctttcagcaacttctactccacatacctctacttctgttactacacgtcctgtaacaccgtcttcagaatcctctaggcccagcactatcacaagtcacacgattccacccacattcccgcccgcccatagtagtactcctccgacaacatccgcaagcagtactactgttaatcctgaagcagtcacaaccatgacgacccgaacaaaaccctcaacacgcacaaccagctttccaacagtaacaacaactgccgtccctacaaacactaccataaaatcaaatccaacatcaaccccgacagtaccaagaaccacaacctgcttcggtgacggatgtcagaatacagcgtcaaggtgcaagaacggtggcacatgggatggcctaaagtgccaatgcccaaacctttactacggagaattgtgtgaagaagtagtttcctcaatagatataggtccacccgaaactatatcagcacaaatggaattaactgtgacagttacctccgtcaagtttacagaagaactcaaaaatcacagcagtcaagagttccaggaatttaaacaaaccttcacagaacaaatgaatatcgtatactccgggattcctgaatacgtcggcgtcaatattactaaattgagattagggagtgttgttgtagagcatgatgtactacttcgtaccaaatatactccagaatacaagaccgtacttgacaatgctacagaggtggttaaagagaaaattacgaaggtcacaactcaacaaattatgattaacgatatatgttccgatatgatgtgtttcaatactaccggtactcaggttcaaaatataacggttacgcaatacgatcccgaagaagattgtcgaaagatggccaaagagtacggcgactacttcgtcgtggaatatagggatcagaaaccttattgtatatccccctgtgaaccaggattcagcgtatctaaaaattgtaatctaggaaaatgccaaatgagcctctccggaccccaatgtctctgtgtcactacggagacgcactggtacagcggtgaaacatgcaatcaaggtactcaaaaatcactcgtctacggcctagttggcgctggtgtcgtacttatgctcataatattagtagctttactcatgctcgtctttcgaagtaagcgcgaggtaaaaaggcaaaaatatcgtctcagtcaattatacaaatggcaagaagaggattcagggcccgctcccggcactttccagaatataggatttgacatctgtcaagacgacgattcaatacacttggaaagtatctattcaaattttcaaccttccttgagacatatcgatccagaaactaaaataaggattcagcgacctcaagtcatgacaacttccttttga

SEQ ID NO: 2674 - RNA, 1215 nt, synthetic construct
  misc_feature 1..1215: note = Q9NNX6
  source 1..1215: mol_type = other RNA
atgtcagactcaaaagaaccaaggttacaacaactaggattattagaagaagaacaactcagaggactaggattcagacaaaccagaggttacaaaagcctagcaggatgtttaggacacggaccattagtactacaactactcagcttcaccttattagcaggactattagtacaagtatcaaaagtaccctccagtataagccaagaacaatcaaggcaagacgcaatctaccaaaacttaacacaattaaaagcagctgtaggcgaactatcagaaaaatcaaaactacaagaaatctaccaagaactaacacaactaaaagcagcagtaggagaattaccagagaaaagcaaattacaagaaatatatcaagaactaaccagactaaaagcagcagtaggcgaactaccagaaaaatcaaaattacaagaaatatatcaagaattaacatggctaaaagccgcagtaggagaactaccagaaaaatcaaaaatgcaagaaatataccaagaactaacaagattaaaagcagcagtaggagaactcccagaaaaatcaaaacaacaagaaatataccaagaattaaccagactaaaagcagcagtaggcgaactaccagaaaaatcaaaacaacaagaaatataccaagaactcacacgattaaaagcagcagtaggcgaacttccagaaaaatcaaaacaacaagaaatataccaagaactaacacaactaaaagcggccgtagaaagattatgtcatccctgtccatgggaatggacatttttccaaggaaactgttacttcatgagcaacagccaacgcaattggcacgattcaataacagcctgtaaagaagtaggcgcacaattagtagtaattaaatcagccgaagaacaaaattttctccaattacaaagcagcagatcaaatcgattcacatggatgggactatcagacttaaaccaagaaggaacatggcaatgggtagatggctctccactattaccatcattcaaacaatattggaacagaggagaaccgaataacgttggcgaagaagactgcgcagaattttcaggaaacggatggaacgatgacaaatgcaatttagcaaaattttggatatgtaagaaatcagcagcctcatgttcaagagacgaagaacaatttttaagccccgcaccagcaaccccaaatccaccaccagcatga

SEQ ID NO: 2675 - RNA, 3126 nt, synthetic construct
  misc_feature 1..3126: note = Q9NR97
  source 1..3126: mol_type = other RNA
atggaaaacatgttcttacaatcatcaatgttaacatgtatatttctccttatatccggatcttgcgaattatgcgccgaagaaaacttctcacgatcttacccctgtgatgaaaagaaacaaaacgattcagtgattgcagaatgctcaaatcgacgactccaagaagttccacaaaccgttggcaaatacgtcacggaactagatctctcggataatttcatcacccatataactaacgaatctttccaagggttacaaaacttaacaaaaataaatctcaatcacaacccaaatgtacaacaccaaaacggaaaccccgggatacaatcaaacggactcaacataaccgacggcgcatttctcaatttaaagaatctacgcgagctactattagaagacaaccaactaccccaaatcccaagtggacttcctgaatccctaactgagctttcattaatacaaaataatatatacaacataaccaaagaaggaatatcaaggttaattaaccttaaaaacctataccttgcttggaattgctacttcaacaaagtatgcgaaaagaccaacatagaagacggagtttttgaaacattaactaatctagaactcctatccttatcatttaactccctctctcacgtacctcccaaactaccatcaagtttaagaaaactattcctatcaaacacccaaataaaatatattagcgaagaagatttcaaaggactgattaacctaacactactcgatttatcgggcaattgtccccgatgtttcaacgcacccttcccatgtgttccttgtgacggtggcgcatccataaacatagacagattcgcattccaaaacttaacccaactccgctacctaaacctctcctccacctcactacgaaaaataaatgcagcctggtttaaaaacatgccacacctaaaagtactagatcttgaatttaactacctggtcggagaaatcgcatctggcgctttcctaacaatgctaccccgcttagaaatattagatttatcttttaactatataaaaggctcatacccacaacatataaacatatccagaaacttttcaaaactcctctcattaagagcccttcatcttagaggatatgtattccaagaactccgcgaagacgacttccaacccttaatgcaattaccaaacctttcaaccataaacctcggaataaacttcattaaacaaatcgattttaaactttttcaaaatttctccaacttagaaataatctatctctcagaaaacagaatctccccattagtcaaagacactcgccaatcctatgccaactcctcatcattccaaagacacatcagaaaaagacgttcaaccgacttcgaatttgacccacattccaatttttaccactttacccgacctcttataaaaccacaatgtgccgcatacggaaaagcactagatctctccttaaactcaatattctttatcggtcccaatcaattcgaaaacctcccagatatagcatgcttaaatttatctgccaacagtaatgcacaagtcctatcaggaaccgaattttcagctatcccccacgtcaaatatctagacctcacaaacaacagattagatttcgacaatgcatcagcactaactgaactctccgatttagaagtacttgacctcagctataactctcactatttccgcatcgcaggagtgacacaccaccttgagttcatccaaaattttaccaaccttaaagtactaaacttatcccacaataacatatacactctcacagataaatacaatctcgaatccaaatctctcgtagaacttgtattttcaggaaaccgcctagatattctatggaatgacgatgacaatcgatacatatcaatctttaaaggactcaaaaacctcacccgactcgatctcagtttaaacagattaaaacacatccctaacgaagcctttttaaatctaccagcatcactcacagaactacacattaacgataacatgttgaaattctttaactggaccttactccaacaattccctcgactagaattactcgacctaagaggaaataaacttctattcctcacagatagcctatcagactttacatcttccctccgcacactccttttatcacacaaccgcatatcccatctaccctccggcttcctaagtgaagtcagctcattaaaacaccttgacttatcctccaatctgctaaaaactattaataaatctgcactcgaaacaaaaactaccacaaaactatctatgctcgaactgcacggcaacccctttgaatgcacatgtgacataggtgactttagacgatggatggacgaacacttaaacgttaaaataccacgacttgtcgacgtcatctgcgcctcacccggcgatcaaagggggaaatcaatagtaagtctagaattaacaacctgcgtttccgatgtaaccgcagtcattctcttctttttcactttcttcatcaccactatggtaatgctagctgccttagcgcatcatctcttttactgggatgtttggttcatctacaatgtctgcctagcaaaagtaaaaggatacagatcattatctacctcccaaaccttttatgatgcatacatctcatacgacactaaagacgcttctgtaactgattgggtcatcaatgaactcagataccatctagaagaaagcagagataaaaatgtattactttgcctagaagaacgagactgggacccaggactagccatcatagacaacctcatgcaatccataaaccaatcaaagaaaactgtctttgtccttactaagaaatacgcaaaatcatggaacttcaaaacagcattttatctcgccttacaaagattaatggacgaaaacatggatgtaatcatcttcatactcctagaaccagtactccaacactcacaatatttaagactaagacaacgcatatgtaaatcctcaatcctacaatggccagacaatcctaaagctgaaggcttattttggcaaactctccgaaacgttgtattaaccgaaaatgactcaagatacaacaatatgtacgtagattcaatcaaacaatactaa

SEQ ID NO: 2676 - RNA, 66 nt, synthetic construct
  misc_feature 1..66: note = P16671_TM_1_8-29
  source 1..66: mol_type = other RNA
ggattaatagcaggagcagtaataggagcagtattagcagtatttggaggaatattaatgccagta

SEQ ID NO: 2677 - RNA, 81 nt, synthetic construct
  misc_feature 1..81: note = P32248_TM_1_60-86
  source 1..81: mol_type = other RNA
tttcttcctattatgtattctattatttgttttgttggtcttcttggtaatggtcttgttgttcttacttatatttatttt

SEQ ID NO: 2678 - RNA, 66 nt, synthetic construct
  misc_feature 1..66: note = P16671_TM_2_440-461
  source 1..66: mol_type = other RNA
ttgttaggtttaattgaaatgatattgttatctgtaggtgtagttatgtttgtagcttttatgata

SEQ ID NO: 2679 - RNA, 63 nt, synthetic construct
  misc_feature 1..63: note = P32248_TM_2_96-116
  source 1..63: mol_type = other RNA
tatttacttaatcttgctgttgctgatattctttttcttcttactcttcctttctgggcttat

SEQ ID NO: 2680 - RNA, 66 nt, synthetic construct; identical to SEQ ID NO: 1640
  misc_feature 1..66: note = P32248_TM_3_131-152
  source 1..66: mol_type = other RNA

SEQ ID NO: 2681 - RNA, 63 nt, synthetic construct; identical to SEQ ID NO: 1641
  misc_feature 1..63: note = P32248_TM_4_171-191
  source 1..63: mol_type = other RNA

SEQ ID NO: 2682 - RNA, 84 nt, synthetic construct
  misc_feature 1..84: note = P32248_TM_5_220-247
  source 1..84: mol_type = other RNA
tttataactatacaagtagctcaaatggtaattggatttctagttccacttctagctatgtctttctgttaccttgtaattata

SEQ ID NO: 2683 - RNA, 78 nt, synthetic construct
  misc_feature 1..78: note = P32248_TM_6_264-289
  source 1..78: mol_type = other RNA
gtaattatagctgtagttgtagtttttattgtatttcaacttccatataacggtgtagttttagctcaaactgtagct

SEQ ID NO: 2684 - RNA, 54 nt, synthetic construct; identical to SEQ ID NO: 1644
  misc_feature 1..54: note = P32248_TM_7_314-331
  source 1..54: mol_type = other RNA

SEQ ID NO: 2685 - RNA, 69 nt, synthetic construct
  misc_feature 1..69: note = A0A5B9_TM_145-167
  source 1..69: mol_type = other RNA
acaattctatatgaaattctacttggaaaagcaactctatatgcagttctagtttcagctctagttcta

SEQ ID NO: 2686 - RNA, 69 nt, synthetic construct; identical to SEQ ID NO: 1646
  misc_feature 1..69: note = B7Z8K6_TM_130-152
  source 1..69: mol_type = other RNA

SEQ ID NO: 2687 - RNA, 63 nt, synthetic construct
  misc_feature 1..63: note = O00206_TM_632-652
  source 1..63: mol_type = other RNA
acgataataggagtgagtgtgttatcggtattggtagtgagtgtggtagcggtattggtatat

SEQ ID NO: 2688 - RNA, 66 nt, synthetic construct; identical to SEQ ID NO: 1648
  misc_feature 1..66: note = P01730_TM_397-418
  source 1..66: mol_type = other RNA

SEQ ID NO: 2689 - RNA, 63 nt, synthetic construct; identical to SEQ ID NO: 1649
  misc_feature 1..63: note = P01850_TM_151-171
  source 1..63: mol_type = other RNA

SEQ ID NO: 2690 - RNA, 78 nt, synthetic construct; identical to SEQ ID NO: 1650
  misc_feature 1..78: note = P07766_TM_127-152
  source 1..78: mol_type = other RNA

SEQ ID NO: 2691 - RNA, 66 nt, synthetic construct; identical to SEQ ID NO: 1651
  misc_feature 1..66: note = P08575_TM_576-597
  source 1..66: mol_type = other RNA

SEQ ID NO: 2692 - RNA, 63 nt, synthetic construct
  misc_feature 1..63: note = P08637_TM_209-229
  source 1..63: mol_type = other RNA
gtatctttctgtctagttatggttttactttttgctgtagatacaggtctatatttttctgta

SEQ ID NO: 2693 - RNA, 81 nt, synthetic construct; identical to SEQ ID NO: 1653
  misc_feature 1..81: note = P10747_TM_153-179
  source 1..81: mol_type = other RNA

SEQ ID NO: 2694 - RNA, 66 nt, synthetic construct; identical to SEQ ID NO: 1654
  misc_feature 1..66: note = P11912_TM_144-165
  source 1..66: mol_type = other RNA

SEQ ID NO: 2695 - RNA, 66 nt, synthetic construct
  misc_feature 1..66: note = P15391_TM_292-313
  source 1..66: mol_type = other RNA
gtttctgctgtcactcttgcttatttaattttttgtttatgttctcttgttggcattcttcatctt

SEQ ID NO: 2696 - RNA, 63 nt, synthetic construct; identical to SEQ ID NO: 1656
  misc_feature 1..63: note = P16410_TM_162-182
  source 1..63: mol_type = other RNA

SEQ ID NO: 2697 - RNA, 63 nt, synthetic construct; identical to SEQ ID NO: 1657
  misc_feature 1..63: note = P26718_TM_52-72
  source 1..63: mol_type = other RNA

SEQ ID NO: 2698 - RNA, 63 nt, synthetic construct; identical to SEQ ID NO: 1658
  misc_feature 1..63: note = P30273_TM_24-44
  source 1..63: mol_type = other RNA

SEQ ID NO: 2699 - RNA, 63 nt, synthetic construct; identical to SEQ ID NO: 1659
  misc_feature 1..63: note = P40259_TM_160-180
  source 1..63: mol_type = other RNA

SEQ ID NO: 2700 - RNA, 63 nt, synthetic construct; identical to SEQ ID NO: 1660
  misc_feature 1..63: note = P42081_TM_248-268
  source 1..63: mol_type = other RNA

SEQ ID NO: 2701 - RNA, 63 nt, synthetic construct; identical to SEQ ID NO: 1661
  misc_feature 1..63: note = Q15762_TM_255-275
  source 1..63: mol_type = other RNA

SEQ ID NO: 2702 - RNA, 63 nt, synthetic construct; identical to SEQ ID NO: 1662
  misc_feature 1..63: note = Q685J3_TM_4394-4414
  source 1..63: mol_type = other RNA

SEQ ID NO: 2703 - RNA, 63 nt, synthetic construct; identical to SEQ ID NO: 1663
  misc_feature 1..63: note = Q9NNX6_TM_38-58
  source 1..63: mol_type = other RNA

SEQ ID NO: 2704 - RNA, 63 nt, synthetic construct
  misc_feature 1..63: note = Q9NR97_TM_828-848
  source 1..63: mol_type = other RNA
gctgttattctttttttttttactttttttattactactatggttatgcttgctgctcttgct

SEQ ID NO: 2705 - RNA, 48 nt, synthetic construct
  misc_feature 1..48: note = P14207_1-16
  source 1..48: mol_type = other RNA
atggtatggaaatggatgcctttattattattattagtttgtgttgca

SEQ ID NO: 2706 - RNA, 48 nt, synthetic construct
  misc_feature 1..48: note = O75787_1-16
  source 1..48: mol_type = other RNA
atggcagtatttgtagtattattggcattagtagcaggagtattagga

SEQ ID NO: 2707 - RNA, 48 nt, synthetic construct; identical to SEQ ID NO: 1459
  misc_feature 1..48: note = P07359_1-16
  source 1..48: mol_type = other RNA

SEQ ID NO: 2708 - RNA, 48 nt, synthetic construct
  misc_feature 1..48: note = P08637_1-16
  source 1..48: mol_type = other RNA
atgtggcaattacttttacctactgctttacttttacttgtctctgcc

SEQ ID NO: 2709 - RNA, 51 nt, synthetic construct; identical to SEQ ID NO: 1461
  misc_feature 1..51: note = P07237_1-17
  source 1..51: mol_type = other RNA

SEQ ID NO: 2710 - RNA, 51 nt, synthetic construct; identical to SEQ ID NO: 2502
  misc_feature 1..51: note = O60911_1-17
  source 1..51: mol_type = other RNA

SEQ ID NO: 2711 - RNA, 51 nt, synthetic construct; identical to SEQ ID NO: 1463
  misc_feature 1..51: note = P20138_1-17
  source 1..51: mol_type = other RNA

SEQ ID NO: 2712 - RNA, 51 nt, synthetic construct; identical to SEQ ID NO: 1464
  misc_feature 1..51: note = P27797_1-17
  source 1..51: mol_type = other RNA

SEQ ID NO: 2713 - RNA, 54 nt, synthetic construct
  misc_feature 1..54: note = P10747_1-18
  source 1..54: mol_type = other RNA
atgctacgtctacttctagctctaaatctatttccatctatacaagtaactgga

SEQ ID NO: 2714 - RNA, 54 nt, synthetic construct
  misc_feature 1..54: note = O75487_1-18
  source 1..54: mol_type = other RNA
atggcaagatttggattgccagcactattatgtacattagcagtcttaagtgca

SEQ ID NO: 2715 - RNA, 54 nt, synthetic construct; identical to SEQ ID NO: 1467
  misc_feature 1..54: note = P07996_1-18
  source 1..54: mol_type = other RNA

SEQ ID NO: 2716 - RNA, 54 nt, synthetic construct; identical to SEQ ID NO: 1468
  misc_feature 1..54: note = P22748_1-18
  source 1..54: mol_type = other RNA

SEQ ID NO: 2717 - RNA, 54 nt, synthetic construct; identical to SEQ ID NO: 1469
  misc_feature 1..54: note = Q15762_1-18
  source 1..54: mol_type = other RNA

SEQ ID NO: 2718 - RNA, 54 nt, synthetic construct
  misc_feature 1..54: note = P30273_1-18
  source 1..54: mol_type = other RNA
atgattccagctgtagttctattactattactattagtagaacaagctgcagct

SEQ ID NO: 2719 - RNA, 54 nt, synthetic construct; identical to SEQ ID NO: 1471
  misc_feature 1..54: note = P38570_1-18
  source 1..54: mol_type = other RNA

SEQ ID NO: 2720 - RNA, 54 nt, synthetic construct; identical to SEQ ID NO: 1472
  misc_feature 1..54: note = Q01638_1-18
  source 1..54: mol_type = other RNA

SEQ ID NO: 2721 - RNA, 54 nt, synthetic construct; identical to SEQ ID NO: 2513
  misc_feature 1..54: note = Q9NZQ7_1-18
  source 1..54: mol_type = other RNA

SEQ ID NO: 2722 - RNA, 57 nt, synthetic construct; identical to SEQ ID NO: 1474
  misc_feature 1..57: note = P13591_1-19
  source 1..57: mol_type = other RNA

SEQ ID NO: 2723 - RNA, 57 nt, synthetic construct; identical to SEQ ID NO: 2515
  misc_feature 1..57: note = P26842_1-19
  source 1..57: mol_type = other RNA

SEQ ID NO: 2724 - RNA, 57 nt, synthetic construct; identical to SEQ ID NO: 1476
  misc_feature 1..57: note = P15391_1-19
  source 1..57: mol_type = other RNA

SEQ ID NO: 2725 - RNA, 57 nt, synthetic construct; identical to SEQ ID NO: 1477
  misc_feature 1..57: note = Q8NI17_1-19
  source 1..57: mol_type = other RNA

SEQ ID NO: 2726 - RNA, 57 nt, synthetic construct; identical to SEQ ID NO: 1478
  misc_feature 1..57: note = P08571_1-19
  source 1..57: mol_type = other RNA

SEQ ID NO: 2727 - RNA, 57 nt, synthetic construct; identical to SEQ ID NO: 1479
  misc_feature 1..57: note = P05154_1-19
  source 1..57: mol_type = other RNA

SEQ ID NO: 2728 - RNA, 57 nt, synthetic construct; identical to SEQ ID NO: 1480
  misc_feature 1..57: note = P02787_1-19
  source 1..57: mol_type = other RNA

SEQ ID NO: 2729 - RNA, 57 nt, synthetic construct; identical to SEQ ID NO: 1481
  misc_feature 1..57: note = P02671_1-19
  source 1..57: mol_type = other RNA

SEQ ID NO: 2730 - RNA, 57 nt, synthetic construct
  misc_feature 1..57: note = P04216_1-19
  source 1..57: mol_type = other RNA
atgaatctagctatatctatagctctacttctaactgtacttcaagtttcacgtgga

SEQ ID NO: 2731 - RNA, 57 nt, synthetic construct; identical to SEQ ID NO: 1483
  misc_feature 1..57: note = P00747_1-19
  source 1..57: mol_type = other RNA

SEQ ID NO: 2732 - RNA, 57 nt, synthetic construct; identical to SEQ ID NO: 2524
  misc_feature 1..57: note = P01764_1-19
  source 1..57: mol_type = other RNA

SEQ ID NO: 2733 - RNA, 57 nt, synthetic construct; identical to SEQ ID NO: 2525
  misc_feature 1..57: note = P16150_1-19
  source 1..57: mol_type = other RNA

SEQ ID NO: 2734 - RNA, 57 nt, synthetic construct
  misc_feature 1..57: note = Q6DN72_1-19
  source 1..57: mol_type = other RNA
atgttattatggacagctgtattattatttgtaccttgtgttggaaaaacagtttgg

SEQ ID NO: 2735 - RNA, 57 nt, synthetic construct; identical to SEQ ID NO: 1487
  misc_feature 1..57: note = Q01151_1-19
  source 1..57: mol_type = other RNA

SEQ ID NO: 2736 - RNA, 57 nt, synthetic construct; identical to SEQ ID NO: 1488
  misc_feature 1..57: note = P07093_1-19
  source 1..57: mol_type = other RNA

SEQ ID NO: 2737 - RNA, 57 nt, synthetic construct
  misc_feature 1..57: note = Q8WWQ8_1-19
  source 1..57: mol_type = other RNA
atgatgttacaacatctagttatattttgccttggattagtagttcaaaatttctgt

SEQ ID NO: 2738 - RNA, 60 nt, synthetic construct; identical to SEQ ID NO: 1490
  misc_feature 1..60: note = Q13291_1-20
  source 1..60: mol_type = other RNA

SEQ ID NO: 2739 - RNA, 60 nt, synthetic construct; identical to SEQ ID NO: 1491
  misc_feature 1..60: note = P35225_1-20
  source 1..60: mol_type = other RNA

SEQ ID NO: 2740 - RNA, 60 nt, synthetic construct; identical to SEQ ID NO: 1492
  misc_feature 1..60: note = P25942_1-20
  source 1..60: mol_type = other RNA

SEQ ID NO: 2741 - RNA, 60 nt, synthetic construct; identical to SEQ ID NO: 1493
  misc_feature 1..60: note = P52803_1-20
  source 1..60: mol_type = other RNA

SEQ ID NO: 2742 - RNA, 60 nt, synthetic construct; identical to SEQ ID NO: 1494
  misc_feature 1..60: note = Q15116_1-20
  source 1..60: mol_type = other RNA

SEQ ID NO: 2743 - RNA, 60 nt, synthetic construct; identical to SEQ ID NO: 1495
  misc_feature 1..60: note = P05556_1-20
  source 1..60: mol_type = other RNA

SEQ ID NO: 2744 - RNA, 60 nt, synthetic construct; identical to SEQ ID NO: 1496
  misc_feature 1..60: note = Q12891_1-20
  source 1..60: mol_type = other RNA

SEQ ID NO: 2745 - RNA, 60 nt, synthetic construct; identical to SEQ ID NO: 1497
  misc_feature 1..60: note = Q8IV16_1-20
  source 1..60: mol_type = other RNA

SEQ ID NO: 2746 - RNA, 60 nt, synthetic construct
  misc_feature 1..60: note = Q03167_1-20
  source 1..60: mol_type = other RNA
atgacttctcattatgttattgctatttttgctcttatgtcttcttgtcttgctactgct

SEQ ID NO: 2747 - RNA, 60 nt, synthetic construct; identical to SEQ ID NO: 2539
  misc_feature 1..60: note = Q14246_1-20
  source 1..60: mol_type = other RNA

SEQ ID NO: 2748 - RNA, 60 nt, synthetic construct; identical to SEQ ID NO: 1500
  misc_feature 1..60: note = P16871_1-20
  source 1..60: mol_type = other RNA

SEQ ID NO: 2749 - RNA, 60 nt, synthetic construct; identical to SEQ ID NO: 1501
  misc_feature 1..60: note = P61769_1-20
  source 1..60: mol_type = other RNA

SEQ ID NO: 2750 - RNA, 60 nt, synthetic construct; identical to SEQ ID NO: 1502
  misc_feature 1..60: note = Q9Y6W8_1-20
  source 1..60: mol_type = other RNA

SEQ ID NO: 2751 - RNA, 63 nt, synthetic construct; identical to SEQ ID NO: 1503
  misc_feature 1..63: note = P10966_1-21
  source 1..63: mol_type = other RNA

SEQ ID NO: 2752 - RNA, 63 nt, synthetic construct
  misc_feature 1..63: note = Q9BZW8_1-21
  source 1..63: mol_type = other RNA
atgctagggcaagtggtaacgctaatactattgctattgctaaaggtatatcaagggaaaggg

SEQ ID NO: 2753 - RNA, 63 nt, synthetic construct
  misc_feature 1..63: note = P02778_1-21
  source 1..63: mol_type = other RNA
atgaaccaaacagctatattaatatgttgccttatatttctaactctatctggtattcaagga

SEQ ID NO: 2754 - RNA, 63 nt, synthetic construct; identical to SEQ ID NO: 1506
  misc_feature 1..63: note = P18564_1-21
  source 1..63: mol_type = other RNA

SEQ ID NO: 2755 - RNA, 63 nt, synthetic construct; identical to SEQ ID NO: 1507
  misc_feature 1..63: note = O14525_1-21
  source 1..63: mol_type = other RNA

SEQ ID NO: 2756 - RNA, 63 nt, synthetic construct; identical to SEQ ID NO: 1508
  misc_feature 1..63: note = P01130_1-21
  source 1..63: mol_type = other RNA

SEQ ID NO: 2757 - RNA, 63 nt, synthetic construct; identical to SEQ ID NO: 1509
  misc_feature 1..63: note = P01732_1-21
  source 1..63: mol_type = other RNA

SEQ ID NO: 2758 - RNA, 63 nt, synthetic construct
  misc_feature 1..63: note = P48061_1-21
  source 1..63: mol_type = other RNA
atgaatgcaaaagtagtagtagtattagtattagtactgacagcattatgtttaagtgatgga

SEQ ID NO: 2759 - RNA, 63 nt, synthetic construct; identical to SEQ ID NO: 1511
  misc_feature 1..63: note = P01589_1-21
  source 1..63: mol_type = other RNA

SEQ ID NO: 2760 - RNA, 63 nt, synthetic construct; identical to SEQ ID NO: 1512
  misc_feature 1..63: note = Q86T13_1-21
  source 1..63: mol_type = other RNA

SEQ ID NO: 2761 - RNA, 63 nt, synthetic construct; identical to SEQ ID NO: 1513
  misc_feature 1..63: note = Q5DID0_1-21
  source 1..63: mol_type = other RNA

SEQ ID NO: 2762 - RNA, 66 nt, synthetic construct; identical to SEQ ID NO: 2554
  misc_feature 1..66: note = P40189_1-22
  source 1..66: mol_type = other RNA

SEQ ID NO: 2763 - RNA, 66 nt, synthetic construct; identical to SEQ ID NO: 1515
  misc_feature 1..66: note = Q86YL7_1-22
  source 1..66: mol_type = other RNA

SEQ ID NO: 2764 - RNA, 66 nt, synthetic construct; identical to SEQ ID NO: 2556
  misc_feature 1..66: note = P55075_1-22
  source 1..66: mol_type = other RNA

SEQ ID NO: 2765 - RNA, 66 nt, synthetic construct; identical to SEQ ID NO: 1517
  misc_feature 1..66: note = Q30201_1-22
  source 1..66: mol_type = other RNA

SEQ ID NO: 2766 - RNA, 66 nt, synthetic construct; identical to SEQ ID NO: 1518
  misc_feature 1..66: note = P07766_1-22
  source 1..66: mol_type = other RNA

SEQ ID NO: 2767 - RNA, 66 nt, synthetic construct; identical to SEQ ID NO: 1519
  misc_feature 1..66: note = P18827_1-22
  source 1..66: mol_type = other RNA

SEQ ID NO: 2768 - RNA, 66 nt, synthetic construct; identical to SEQ ID NO: 1520
  misc_feature 1..66: note = P55290_1-22
  source 1..66: mol_type = other RNA

SEQ ID NO: 2769 - RNA, 66 nt, synthetic construct; identical to SEQ ID NO: 1521
  misc_feature 1..66: note = P37173_1-22
  source 1..66: mol_type = other RNA

SEQ ID NO: 2770 - RNA, 66 nt, synthetic construct
  misc_feature 1..66: note = Q07325_1-22
  source 1..66: mol_type = other RNA
atgaaaaaatcaggagtactattcctactaggaataatactactagtactaataggagtacaagga

SEQ ID NO: 2771 - RNA, 66 nt, synthetic construct; identical to SEQ ID NO: 1523
  misc_feature 1..66: note = P04156_1-22
  source 1..66: mol_type = other RNA

SEQ ID NO: 2772 - RNA, 66 nt, synthetic construct; identical to SEQ ID NO: 2564
  misc_feature 1..66: note = P31785_1-22
  source 1..66: mol_type = other RNA

SEQ ID NO: 2773 - RNA, 69 nt, synthetic construct; identical to SEQ ID NO: 1525
  misc_feature 1..69: note = P01579_1-23
  source 1..69: mol_type = other RNA

SEQ ID NO: 2774 - RNA, 69 nt, synthetic construct; identical to SEQ ID NO: 1526
  misc_feature 1..69: note = P23229_1-23
  source 1..69: mol_type = other RNA

SEQ ID NO: 2775 - RNA, 69 nt, synthetic construct
  misc_feature 1..69: note = O60494_1-23
  source 1..69: mol_type = other RNA
atgatgaacatgtcattaccatttctatggtcattactaactctattaatatttgcagaagtaaacgga

SEQ ID NO: 2776 - RNA, 69 nt, synthetic construct; identical to SEQ ID NO: 2568
  misc_feature 1..69: note = P08575_1-23
  source 1..69: mol_type = other RNA

SEQ ID NO: 2777 - RNA, 69 nt, synthetic construct; identical to SEQ ID NO: 1529
  misc_feature 1..69: note = Q8IWY4_1-23
  source 1..69: mol_type = other RNA

SEQ ID NO: 2778 - RNA, 69 nt, synthetic construct; identical to SEQ ID NO: 1530
  misc_feature 1..69: note = Q08431_1-23
  source 1..69: mol_type = other RNA

SEQ ID NO: 2779 - RNA, 69 nt, synthetic construct; identical to SEQ ID NO: 1531
  misc_feature 1..69: note = Q99665_1-23
  source 1..69: mol_type = other RNA

SEQ ID NO: 2780 - RNA, 69 nt, synthetic construct; identical to SEQ ID NO: 1532
  misc_feature 1..69: note = Q6Q8B3_1-23
  source 1..69: mol_type = other RNA

SEQ ID NO: 2781 - RNA, 69 nt, synthetic construct; identical to SEQ ID NO: 2573
  misc_feature 1..69: note = Q07011_1-23
  source 1..69: mol_type = other RNA

SEQ ID NO: 2782 - RNA, 69 nt, synthetic construct; identical to SEQ ID NO: 1534
  misc_feature 1..69: note = Q8NHL6_1-23
  source 1..69: mol_type = other RNA

SEQ ID NO: 2783 - RNA, 69 nt, synthetic construct; identical to SEQ ID NO: 2575
  misc_feature 1..69: note = P36894_1-23
  source 1..69: mol_type = other RNA

SEQ ID NO: 2784 - RNA, 69 nt, synthetic construct
  misc_feature 1..69: note = Q16552_1-23
  source 1..69: mol_type = other RNA
atgaccccaggcaaaacatcactcgtatccctactcctactcctatccctagaagcaatagtaaaagca

SEQ ID NO: 2785 - RNA, 69 nt, synthetic construct
  misc_feature 1..69: note = P42081_1-23
  source 1..69: mol_type = other RNA
atggacccacaatgtacaatgggattaagtaatatattattcgtaatggcattcttactatcaggagca

SEQ ID NO: 2786 - RNA, 69 nt, synthetic construct; identical to SEQ ID NO: 1538
  misc_feature 1..69: note = P43121_1-23
  source 1..69: mol_type = other RNA

SEQ ID NO: 2787 - RNA, 69 nt, synthetic construct
  misc_feature 1..69: note = O00206_1-23
  source 1..69: mol_type = other RNA
atgatgagtgcaagtagattagcaggaacattaataccagcaatggcatttttaagttgtgtaagacca

SEQ ID NO: 2788 - RNA, 69 nt, synthetic construct; identical to SEQ ID NO: 2580
  misc_feature 1..69: note = P42701_1-23
  source 1..69: mol_type = other RNA

SEQ ID NO: 2789 - RNA, 72 nt, synthetic construct; identical to SEQ ID NO: 1541
  misc_feature 1..72: note = P06729_1-24
  source 1..72: mol_type = other RNA

SEQ ID NO: 2790 - RNA, 72 nt, synthetic construct; identical to SEQ ID NO: 1542
  misc_feature 1..72: note = P15328_1-24
  source 1..72: mol_type = other RNA

SEQ ID NO: 2791 - RNA, 72 nt, synthetic construct; identical to SEQ ID NO: 2583
  misc_feature 1..72: note = P05112_1-24
  source 1..72: mol_type = other RNA

SEQ ID NO: 2792 - RNA, 72 nt, synthetic construct; identical to SEQ ID NO: 2584
  misc_feature 1..72: note = P06127_1-24
  source 1..72: mol_type = other RNA

SEQ ID NO: 2793 - RNA, 72 nt, synthetic construct; identical to SEQ ID NO: 1545
  misc_feature 1..72: note = P32248_1-24
  source 1..72: mol_type = other RNA

SEQ ID NO: 2794 - RNA, 72 nt, synthetic construct
  misc_feature 1..72: note = Q7Z7D3_1-24
  source 1..72: mol_type = other RNA
atggctagcttaggacaaatattattctggagcattatatctataattataattctagctggagctatagct

SEQ ID NO: 2795 - RNA, 72 nt, synthetic construct; identical to SEQ ID NO: 1547
  misc_feature 1..72: note = P54756_1-24
  source 1..72: mol_type = other RNA

SEQ ID NO: 2796 - RNA, 72 nt, synthetic construct; identical to SEQ ID NO: 1548
  misc_feature 1..72: note = Q92823_1-24
  source 1..72: mol_type = other RNA

SEQ ID NO: 2797 - RNA, 72 nt, synthetic construct; identical to SEQ ID NO: 1549
  misc_feature 1..72: note = P19320_1-24
  source 1..72: mol_type = other RNA

SEQ ID NO: 2798 - RNA, 72 nt, synthetic construct; identical to SEQ ID NO: 1550
  misc_feature 1..72: note = Q86UN2_1-24
  source 1..72: mol_type = other RNA

SEQ ID NO: 2799 - RNA, 75 nt, synthetic construct; identical to SEQ ID NO: 2591
  misc_feature 1..75: note = P33151_1-25
  source 1..75: mol_type = other RNA

SEQ ID NO: 2800 - RNA, 75 nt, synthetic construct
  misc_feature 1..75: note = P17813_1-25
  source 1..75: mol_type = other RNA
atggacagaggaacactaccactagcagtagcactattactagcaagctgtagcttaagcccaacatcactagca

SEQ ID NO: 2801 - RNA, 75 nt, synthetic construct; identical to SEQ ID NO: 2593
  misc_feature 1..75: note = P25445_1-25
  source 1..75: mol_type = other RNA

SEQ ID NO: 2802 - RNA, 75 nt, synthetic construct; identical to SEQ ID NO: 1554
  misc_feature 1..75: note = P01730_1-25
  source 1..75: mol_type = other RNA

SEQ ID NO: 2803 - RNA, 75 nt, synthetic construct; identical to SEQ ID NO: 1555
  misc_feature 1..75: note = Q685J3_1-25
  source 1..75: mol_type = other RNA

SEQ ID NO: 2804 - RNA, 75 nt, synthetic construct; identical to SEQ ID NO: 1556
  misc_feature 1..75: note = P17787_1-25
  source 1..75: mol_type = other RNA

SEQ ID NO: 2805 - RNA, 75 nt, synthetic construct; identical to SEQ ID NO: 1557
  misc_feature 1..75: note = Q6UQ28_1-25
  source 1..75: mol_type = other RNA

SEQ ID NO: 2806 - RNA, 75 nt, synthetic construct; identical to SEQ ID NO: 1558
  misc_feature 1..75: note = P13987_1-25
  source 1..75: mol_type = other RNA

SEQ ID NO: 2807 - RNA, 75 nt, synthetic construct; identical to SEQ ID NO: 1559
  misc_feature 1..75: note = P10721_1-25
  source 1..75: mol_type = other RNA

SEQ ID NO: 2808 - RNA, 75 nt, synthetic construct; identical to SEQ ID NO: 1560
  misc_feature 1..75: note = P12319_1-25
  source 1..75: mol_type = other RNA

SEQ ID NO: 2809 - RNA, 78 nt, synthetic construct; identical to SEQ ID NO: 1561
  misc_feature 1..78: note = Q9BZR6_1-26
  source 1..78: mol_type = other RNA

SEQ ID NO: 2810 - RNA, 78 nt, synthetic construct; identical to SEQ ID NO: 1562
  misc_feature 1..78: note = P25063_1-26
  source 1..78: mol_type = other RNA

SEQ ID NO: 2811 - RNA, 78 nt, synthetic construct; identical to SEQ ID NO: 1563
  misc_feature 1..78: note = Q9NR97_1-26
  source 1..78: mol_type = other RNA

SEQ ID NO: 2812 - RNA, 78 nt, synthetic construct; identical to SEQ ID NO: 1564
  misc_feature 1..78: note = Q8N131_1-26
  source 1..78: mol_type = other RNA

SEQ ID NO: 2813 - RNA, 78 nt, synthetic construct; identical to SEQ ID NO: 2605
  misc_feature 1..78: note = P49771_1-26
  source 1..78: mol_type = other RNA

SEQ ID NO: 2814 - RNA, 78 nt, synthetic construct; identical to SEQ ID NO: 1566
  misc_feature 1..78: note = P02679_1-26
  source 1..78: mol_type = other RNA

SEQ ID NO: 2815 - RNA, 78 nt, synthetic construct
  misc_feature 1..78: note = P14784_1-26
  source 1..78: mol_type = other RNA
atggcagctccagctttatcttggcgtttacctttacttatacttttacttccacttgcaacttcatgggcatctgca

SEQ ID NO: 2816 - RNA, 81 nt, synthetic construct
  misc_feature 1..81: note = P05362_1-27
  source 1..81: mol_type = other RNA
atggcaccatcatcaccaagaccagcactaccagcattattagtactattaggagcactatttccaggaccaggaaatgca

SEQ ID NO: 2817 - RNA, 81 nt, synthetic construct
  misc_feature 1..81: note = Q13740_1-27
  source 1..81: mol_type = other RNA
atggaatcaaaaggagcatcatcatgtagactattattctgtctattaatatcagcaacagtatttagaccaggactagga

SEQ ID NO: 2818 - RNA, 84 nt, synthetic construct; identical to SEQ ID NO: 1570
  misc_feature 1..84: note = Q13443_1-28
  source 1..84: mol_type = other RNA

SEQ ID NO: 2819 - RNA, 84 nt, synthetic construct; identical to SEQ ID NO: 1571
  misc_feature 1..84: note = P14151_1-28
  source 1..84: mol_type = other RNA

SEQ ID NO: 2820 - RNA, 84 nt, synthetic construct; identical to SEQ ID NO: 1572
  misc_feature 1..84: note = P56199_1-28
  source 1..84: mol_type = other RNA

SEQ ID NO: 2821 - RNA, 84 nt, synthetic construct
  misc_feature 1..84: note = P11279_1-28
  source 1..84: mol_type = other RNA
atggctgcacctggatctgcacgtagacctctacttctattattattattattattacttggacttatgcattgcgcttcagct

SEQ ID NO: 2822 - RNA, 84 nt, synthetic construct
  misc_feature 1..84: note = P40259_1-28
  source 1..84: mol_type = other RNA
atggcacgtttagctttatctccagttccatctcattggatggttgcacttttacttttactttcagctgaacctgtacctgca

SEQ ID NO: 2823 - RNA, 84 nt, synthetic construct; identical to SEQ ID NO: 1575
  misc_feature 1..84: note = P43681_1-28
  source 1..84: mol_type = other RNA

SEQ ID NO: 2824 - RNA, 84 nt, synthetic construct; identical to SEQ ID NO: 1576
  misc_feature 1..84: note = P18627_1-28
  source 1..84: mol_type = other RNA

SEQ ID NO: 2825 - RNA, 84 nt, synthetic construct; identical to SEQ ID NO: 1577
  misc_feature 1..84: note = Q5ZPR3_1-28
  source 1..84: mol_type = other RNA

SEQ ID NO: 2826 - RNA, 84 nt, synthetic construct; identical to SEQ ID NO: 1578
  misc_feature 1..84: note = P23415_1-28
  source 1..84: mol_type = other RNA

SEQ ID NO: 2827 - RNA, 84 nt, synthetic construct
  misc_feature 1..84: note = Q8TD46_1-28
  source 1..84: mol_type = other RNA
atgctttgtccttggcgtacagctaatcttggacttttacttatacttacaatttttcttgtagctgcatcttcatctttatgt

SEQ ID NO: 2828 - RNA, 87 nt, synthetic construct; identical to SEQ ID NO: 1580
  misc_feature 1..87: note = P17301_1-29
  source 1..87: mol_type = other RNA

SEQ ID NO: 2829 - RNA, 87 nt, synthetic construct; identical to SEQ ID NO: 1581
  misc_feature 1..87: note = P12821_1-29
  source 1..87: mol_type = other RNA

SEQ ID NO: 2830 - RNA, 87 nt, synthetic construct
  misc_feature 1..87: note = Q14118_1-29
  source 1..87: mol_type = other RNA
atgcgtatgtctgtaggtttatctttacttttacctttatggggacgtacatttttacttttactttcagttgtaatggcacaatca

SEQ ID NO: 2831 - RNA, 87 nt, synthetic construct; identical to SEQ ID NO: 1583
  misc_feature 1..87: note = P05231_1-29
  source 1..87: mol_type = other RNA

SEQ ID NO: 2832 - RNA, 87 nt, synthetic construct; identical to SEQ ID NO: 1584
  misc_feature 1..87: note = O00602_1-29
  source 1..87: mol_type = other RNA

SEQ ID NO: 2833 - RNA, 87 nt, synthetic construct; identical to SEQ ID NO: 1585
  misc_feature 1..87: note = Q9Y6Q6_1-29
  source 1..87: mol_type = other RNA

SEQ ID NO: 2834 - RNA, 87 nt, synthetic construct; identical to SEQ ID NO: 2626
  misc_feature 1..87: note = Q9ULI3_1-29
  source 1..87: mol_type = other RNA

SEQ ID NO: 2835 - RNA, 90 nt, synthetic construct; identical to SEQ ID NO: 1587
  misc_feature 1..90: note = Q8NBP7_1-30
  source 1..90: mol_type = other RNA

SEQ ID NO: 2836 - RNA, 90 nt, synthetic construct
  misc_feature 1..90: note = P02675_1-30
  source 1..90: mol_type = other RNA
atgaaaagaatggtaagctggagctttcacaaactaaaaacaatgaaacacctactactattactattatgcgtattcttagtcaaaagc

SEQ ID NO: 2837 - RNA, 90 nt, synthetic construct
  misc_feature 1..90: note = P06756_1-30
  source 1..90: mol_type = other RNA
atggcttttcctccacgtagacgtttacgtttaggtccacgtggacttccacttttactttcaggtttacttttacctttatgtagagct

SEQ ID NO: 2838 - RNA, 93 nt, synthetic construct
  misc_feature 1..93: note = O60609_1-31
  source 1..93: mol_type = other RNA
atggtacgtccacttaaccctagacctctacctccagttgtacttatgcttctacttctacttccaccttcacctctacctctagctgcaggt

SEQ ID NO: 2839 - RNA, 93 nt, synthetic construct; identical to SEQ ID NO: 1591
  misc_feature 1..93: note = P50895_1-31
  source 1..93: mol_type = other RNA

SEQ ID NO: 2840 - RNA, 93 nt, synthetic construct; identical to SEQ ID NO: 1592
  misc_feature 1..93: note = P28906_1-31
  source 1..93: mol_type = other RNA

SEQ ID NO: 2841 - RNA, 93 nt, synthetic construct; identical to SEQ ID NO: 1593
  misc_feature 1..93: note = P08514_1-31
  source 1..93: mol_type = other RNA

SEQ ID NO: 2842 - RNA, 93 nt, synthetic construct; identical to SEQ ID NO: 1594
  misc_feature 1..93: note = P00742_1-31
  source 1..93: mol_type = other RNA

SEQ ID NO: 2843 - RNA, 96 nt, synthetic construct; identical to SEQ ID NO: 1595
  misc_feature 1..96: note = P26006_1-32
  source 1..96: mol_type = other RNA

SEQ ID NO: 2844 - RNA, 96 nt, synthetic construct; identical to SEQ ID NO: 1596
  misc_feature 1..96: note = P13726_1-32
  source 1..96: mol_type = other RNA

SEQ ID NO: 2845 - RNA, 96 nt, synthetic construct; identical to SEQ ID NO: 2637
  misc_feature 1..96: note = P11912_1-32
  source 1..96: mol_type = other RNA

SEQ ID NO: 2846 - RNA, 96 nt, synthetic construct; identical to SEQ ID NO: 1598
  misc_feature 1..96: note = Q9H6X2_1-32
  source 1..96: mol_type = other RNA

SEQ ID NO: 2847 - RNA, 99 nt, synthetic construct; identical to SEQ ID NO: 1599
  misc_feature 1..99: note = Q8IWK6_1-33
  source 1..99: mol_type = other RNA

SEQ ID NO: 2848 - RNA, 99 nt, synthetic construct; identical to SEQ ID NO: 1600
  misc_feature 1..99: note = P58335_1-33
  source 1..99: mol_type = other RNA

SEQ ID NO: 2849 - RNA, 102 nt, synthetic construct; identical to SEQ ID NO: 1601
  misc_feature 1..102: note = P06731_1-34
  source 1..102: mol_type = other RNA

SEQ ID NO: 2850 - RNA, 102 nt, synthetic construct
  misc_feature 1..102: note = P33681_1-34
  source 1..102: mol_type = other RNA
atgggacacacaagaagacaaggaacatcaccatcaaaatgcccatacctaaacttcttccaactactagtactagcaggactatcacacttctgctcagga

SEQ ID NO: 2851 - RNA, 105 nt, synthetic construct
  misc_feature 1..105: note = P38567_1-35
  source 1..105: mol_type = other RNA
atgggtgtacttaaatttaaacatatatttttccgttcatttgtaaaatcatctggagtttcacaaatagttttcactttccttctaattccatgttgccttaca

SEQ ID NO: 2852 - RNA, 105 nt, synthetic construct; identical to SEQ ID NO: 1604
  misc_feature 1..105: note = P16410_1-35
  source 1..105: mol_type = other RNA

SEQ ID NO: 2853 - RNA, 111 nt, synthetic construct; identical to SEQ ID NO: 1605
  misc_feature 1..111: note = P15814_1-37
  source 1..111: mol_type = other RNA

SEQ ID NO: 2854 - RNA, 114 nt, synthetic construct; identical to SEQ ID NO: 1606
  misc_feature 1..114: note = Q92956_1-38
  source 1..114: mol_type = other RNA

SEQ ID NO: 2855 - RNA, 123 nt, synthetic construct
  misc_feature 1..123: note = Q86VB7_1-41
  source 1..123: mol_type = other RNA
atgtcaaaactaagaatggtactactagaagactcaggatcagcagacttcagaagacacttcgtaaacctatcaccattcacaataacagtagtactactactatcagcatgcttcgtaaca

SEQ ID NO: 2856 - RNA, 123 nt, synthetic construct
  misc_feature 1..123: note = P08648_1-41
  source 1..123: mol_type = other RNA
atgggatcaagaacaccagaaagcccactacatgcagtacaattaagatggggaccaagaagaagaccaccattactaccactattactactactattaccaccaccaccaagagtaggagga

SEQ ID NO: 2857 - RNA, 123 nt, synthetic construct
  misc_feature 1..123: note = P16109_1-41
  source 1..123: mol_type = other RNA
atggcaaactgccaaatagcaatactataccaaagattccaaagagtagtattcggaatatcacaactactatgcttctcagcactaatatcagaactaacaaaccaaaaagaagtagcagca

SEQ ID NO: 2858 - RNA, 132 nt, synthetic construct; identical to SEQ ID NO: 1610
  misc_feature 1..132: note = O75326_1-44
  source 1..132: mol_type = other RNA

SEQ ID NO: 2859 - RNA, 135 nt, synthetic construct; identical to SEQ ID NO: 1611
  misc_feature 1..135: note = Q8N2Q7_1-45
  source 1..135: mol_type = other RNA

SEQ ID NO: 2860 - RNA, 138 nt, synthetic construct; identical to SEQ ID NO: 1612
  misc_feature 1..138: note = Q86UN3_1-46
  source 1..138: mol_type = other RNA

SEQ ID NO: 2861 - RNA, 540 nt, synthetic construct
  misc_feature 1..540: note = A0A5B9
  source 1..540: mol_type = other RNA
atggacctcaaaaacgtattcccaccagaagtagcagtatttgaaccatcagaagcagaaatatcacacacacaaaaagcaacattagtctgcctagcaacaggattttacccagaccacgtagaactatcatggtgggtaaacggaaaagaagtacactcaggagtaagcacagacccacaaccactaaaagaacaaccagcactaaacgactcaagatattgcctatcatcaagactaagagtatcagcaacattctggcaaaacccaagaaaccacttccgatgccaagtacaattctacggactatcagaaaacgacgaatggacacaagacagagcaaaaccagtaacacaaatagtatcagcagaagcatggggcagagcagactgcggattcacatcagaatcataccaacaaggagtattatcagcaacaatactatacgaaatactactaggaaaagctacactatacgcagtcctagtatcagccctagtactaatggcaatggtcaaaagaaaagactcacgaggataa

SEQ ID NO: 2862 - RNA, 465 nt, synthetic construct
  misc_feature 1..465: note = B7Z8K6
  source 1..465: mol_type = other RNA
atgtcacaaccacacacaaaaccatcagtattcgtaatgaaaaacggaacaaacgtagcatgcctagtaaaagaattctacccaaaagacataagaataaacctagtatcatcaaaaaaaataacagaattcgacccagcaatagtaatatcaccatccggcaaatacaacgcagtaaaattaggaaaatacgaagactcaaactcagtaacatgctcagtacaacacgacaacaaaacagtacactcaacagacttcgaagtaaaaacagactcaacagaccacgtaaaaccaaaagaaacagaaaacacaaaacaaccatcaaaatcatgccacaaaccaaaagcaatagtacacacagaaaaagtaaacatgatgtcactcacagtactaggactaagaatgctattcgcaaaaacagtagcagtcaacttcctcttaacagcaaaactattcttcctataa

SEQ ID NO: 2863 - RNA, 645 nt, synthetic construct
  misc_feature 1..645: note = B9A064
  source 1..645: mol_type = other RNA
atgagaccaaaaacaggacaagtaggatgcgaaacaccagaagaattaggaccaggaccaagacaaagatggccattattactacttggattagcaatggtagcacacggactattaagaccaatggtagcaccacaatctggagatccagatccaggagcatcagttggaagttcaagatcaagtctaagatcactatggggcagattattactacaaccatctccacaaagagcagacccaagatgttggccaagaggattctggtcagaaccacaatcattatgctatgtattcggaacaggaacaaaagtaacagtactaggacaaccaaaagcaaacccaacagtaacattattcccaccctcatcagaagaactacaagcaaacaaagcaacattagtatgcttaatatcagacttttacccaggagcagtaacagtagcatggaaagcagatggatcaccagtaaaagcaggagtagaaacaacaaaaccatcaaaacaaagcaataataaatacgcagcatcatcatacttatcactaacaccagaacaatggaaaagtcacagaagctattcatgccaagtaacacatgaaggatcaacagtagaaaaaacagtagcaccaacagaatgttcatga

SEQ ID NO: 2864 - RNA, 2520 nt, synthetic construct
  misc_feature 1..2520: note = O00206
  source 1..2520: mol_type = other RNA
atgatgtcagcatctagattagcaggtacactaataccagccatggcatttctttcatgcgttagaccagaatcttgggaaccatgtgtcgaagttgttcctaatataacataccaatgcatggaattaaacttttataaaataccagacaatctaccattttccacaaaaaacttagacttatctttcaacccccttagacacttaggatcatattcattcttctctttcccagaactccaagtcctagatctcagcagatgcgagatacaaacaatagaagatggcgcatatcagtcattatctcacctatctacattaatactaactggaaatccaattcaatccttagctctaggagctttttctggattatcatcattgcaaaaactcgttgcagtagaaaccaatttagcatcattagaaaacttcccaataggccacctaaaaactctaaaagaactaaacgtcgcacataacctaatacaatcctttaaattaccagaatatttctctaacttaactaatctagagcacttagatttaagctcaaataaaatacaatcaatatactgcacagatttacgagtactacatcaaatgcctctactaaacttaagccttgacctctcactaaacccaatgaacttcattcaaccgggagcattcaaagaaatacgcttacacaaacttactctaagaaacaacttcgacagtcttaatgtaatgaaaacctgtatacagggtttagcaggtcttgaagttcacagactcgtcctcggtgaattcagaaatgaaggaaatttagaaaaattcgataaatcagcactcgagggattatgcaatctaacaattgaagaattcagactagcctatctagactactatctagatgatataatagacttatttaactgcttaacaaatgtctcctctttcagcctcgtatccgtaacaatagaaagggtaaaagacttctcatacaatttcggatggcaacacttagaacttgtaaattgtaaattcggccaatttcctactctaaaattaaaatcacttaaacgtttaacattcacatcaaacaaaggaggaaatgcattctcagaagttgatttaccatctctagaattcttagacctttcacgtaacggtttatcatttaaaggatgctgctcacaatccgactttggcaccacctccttaaaatacttagacctatcattcaacggagtcataactatgagctctaatttccttggcctagaacaattagaacacttagacttccaacattccaacttgaaacaaatgtccgaattctccgtattcttaagcttacgaaatcttatatatctagacatctcacatacccataccagagtagccttcaatggaattttcaacggattatcatctctagaagtcttaaaaatggcgggtaactccttccaagaaaacttcttgcctgacatttttacagaactaagaaacctcacattccttgacctctcacaatgccaattagaacaattgtccccaacagcatttaactctctatcaagcctacaagtccttaacatgtctcacaacaatttcttttctcttgataccttcccctacaaatgcctaaactccctacaagttctagattactctttaaatcacataatgacttcaaaaaaacaagaactacaacatttcccttcttccttagctttcttaaacctaacacaaaatgacttcgcctgtacctgtgaacaccaatccttcctacaatggataaaagaccaaagacaactactagtagaagtagaacgtatggaatgtgcaaccccgtccgataaacaaggaatgccagtattatccttaaacatcacatgccaaatgaacaaaaccatcataggagttagtgtcctctctgtactagtagtttcagtagtagcagtccttgtttacaaattttactttcacttaatgctactagccggctgcatcaaatacggaagaggagagaatatatacgatgcatttgtaatttactccagccaagacgaagattgggtacgtaatgaacttgtaaaaaacttagaagaaggcgttcccccatttcaactatgcctacactacagagatttcatacccggcgttgcaatagctgcaaatatcattcatgaaggcttccacaaatcacgcaaagtaatcgtagtagtatctcaacattttatacaatctcgatggtgcatatttgaatatgaaattgcacaaacatggcaattcttatcatcccgtgcaggaataattttcatagtattacaaaaagttgaaaaaacattactgagacaacaagtagagctctacagattattatcacgcaatacttatctcgaatgggaagactcagttctaggccgccacatattctggcgtcgcctaagaaaagccttacttgacggaaaatcgtggaatcccgaaggtactgtagggactggatgcaattggcaagaagcgacctcaatctga

SEQ ID NO: 2865 - RNA, 1377 nt, synthetic construct
  misc_feature 1..1377: note = P01730
  source 1..1377: mol_type = other RNA
atgaacagaggagttccattcagacacctattactagtactccaactagcactactaccagcagccacacaaggtaaaaaagttgtcctaggaaagaaaggagatacagtagaacttacatgcaccgcgtcacaaaagaaatcaattcaattccactggaaaaatagtaaccaaataaaaatcttaggcaaccaaggaagctttcttactaaaggaccaagcaaattaaacgacagagcagacagcagacgatcattatgggaccaaggaaatttccccctaataataaaaaatttaaaaatagaagacagtgatacctatatatgtgaagtagaagaccaaaaagaagaagtacaattactagtattcggactcacagccaacagcgacacacacctactacaaggacaatcactaacactaacactagaatcacccccaggctctagcccctccgtacaatgtagaagtccaagaggcaagaacatacaaggaggcaaaacactatccgtatcacaattagaattacaggacagtggaacatggacctgcacagtactacaaaatcaaaagaaagtagaatttaaaattgacatagtagtactagctttccaaaaagcatccagcatagtctataaaaaagaaggagaacaagtagaattcagcttccctttagccttcacagtcgaaaaactaacaggaagcggcgaattatggtggcaagcagaaagagcaagctcaagtaaaagttggataaccttcgatttaaagaataaagaagtatcagtaaaaagagtcacacaagacccaaaactacaaatgggaaaaaaattacctttacacctcacactaccacaagcactaccacagtacgcaggaagcggaaacttaacactagccctagaagctaaaacaggaaaattacaccaagaagtcaacctagtagtcatgagagcaacacaattacaaaaaaacctaacatgcgaagtatggggaccaacatcacctaaactaatgttaagtttaaaactagaaaacaaagaagcaaaagtatcaaaaagagaaaaagcagtatgggttctaaacccagaagccggaatgtggcaatgccttctatccgactctgggcaagtactactagaatccaacataaaggtactaccaacttggtcaacacctgtacaaccaatggcattaatagtcttaggaggcgtagccggattactattattcataggattaggaatattcttctgtgtaagatgcagacacagaaggagacaagcagaaagaatgagtcaaatcaaaagattattgagtgaaaaaaaaacatgtcaatgcccacacagattccaaaaaacatgttcaccaatatga

SEQ ID NO: 2866 - RNA, 537 nt, synthetic construct
  misc_feature 1..537: note = P01850
  source 1..537: mol_type = other RNA
atggaagacttaaacaaagtattcccaccagaagtagcagtattcgaaccatcagaagcagaaataagccacacacaaaaagcaacactagtatgcctagcaacaggattcttcccagaccacgtagaactatcatggtgggtaaacggaaaagaagtacactcaggagtatcaacagacccacaaccactaaaagaacaaccagcactaaacgactcaagatactgcttatcatcaagactaagagtaagcgcaacattttggcaaaacccaagaaaccactttagatgccaagtacaattctacggattatcagaaaacgatgaatggacacaagacagagcaaaaccagtaacacaaatagtatcagcagaagcatggggaagagctgactgcggattcacatcagtatcataccaacaaggagtcctatcagcaacaatattatacgaaatactactaggaaaagcaacactatacgcagtattagtatcagcactagtattaatggcaatggtaaaaagaaaagacttctaa

SEQ ID NO: 2867 - RNA, 624 nt, synthetic construct
  misc_feature 1..624: note = P07766
  source 1..624: mol_type = other RNA
atgcagagcggaacacattggagagtattaggattatgcttattatcagtaggagtatggggacaagacggaaatgaagaaatgggaggaataacacaaacaccatataaagtaagcataagcggaaccacggtaatactaacatgcccacaatatccaggaagcgaaatactatggcaacataatgacaaaaacataggaggagacgaagacgataaaaatataggaagcgatgaagatcacttatcattaaaagaattttcagaattagaacaaagcggatactatgtatgttacccaagaggcagcaaaccagaagatgcaaacttctacttatacttaagagcaagagtatgcgaaaactgtatggaaatggatgtaatgagtgtagcaacaatagtaatagtagacatatgcataacaggaggattactattattagtatactattggagcaaaaatagaaaagcaaaagcaaaaccagtaacaagaggagcaggagcaggaggaagacaaagaggacaaaataaagaaagaccaccaccagtcccaaacccagactatgaaccaataagaaaagggcaaagagacttatatagtggattaaatcaaagaagaatatga

SEQ ID NO: 2868 - RNA, 3915 nt, synthetic construct
  misc_feature 1..3915: note = P08575
  source 1..3915: mol_type = other RNA
atgtacctatggttaaaactactagccttcgggttcgcattcttagatacagaagtcttcgtaaccggacaatcaccaacaccaagcccaacaggtttaactacagctaaaatgccatccgtgcccttatcatcagacccattacctacacacaccacagctttttcacccgcttcgactttcgaaagagaaaacgattttagtgaaactacaacatctctatcccctgacaacacctccacacaagtaagcccagactctttagacaacgccagtgcattcaataccactggagtatcatccgtccaaactcctcacttgcccacacacgctgactcacaaacgccttccgctggtacagacactcaaactttcagcggctcagcagccaacgcaaaactcaaccctacacctggtagtaacgctattagcgacgttccaggagaacgatccacagcatctacctttcctacagatccagtcagtcctctcacaaccacgctatccctcgcacaccactcatcagccgcactacctgcacgcacttccaatacaacaataacagctaacacttcagatgcatacctaaacgcatcagaaaccaccacactctcaccatcaggatcagcagtaatctcgactactacaatcgcaacaacaccatctaaacctacatgtgatgaaaaatacgctaatataacagtagactacttatataataaagaaacaaaattattcacagccaaactaaacgtaaatgaaaatgtagaatgtggaaataacacatgtaccaacaatgaagtacataatttaactgaatgcaagaatgcatcggttagtatatcacacaactcatgcacagccccagacaaaactctaatattagacgtccctccaggagtagaaaaatttcaactacacgattgtactcaagttgaaaaagcagatacaacaatttgcctaaagtggaaaaatattgaaacctttacttgcgacacacaaaacataacataccgtttccaatgtggtaacatgatctttgacaacaaagaaattaaattggaaaacttagaaccagaacacgaatacaaatgtgactcagaaatactatacaataaccataaatttaccaatgcatccaaaataataaaaacagacttcggatcaccaggagaacctcaaattatcttttgccgttcagaagcagcacatcaaggagtaataacctggaatccaccgcaacgatccttccataatttcacactatgctatataaaagaaacagaaaaagattgtctcaatttagacaaaaatctaatcaaatacgaccttcaaaatttaaaaccgtacactaaatacgtcctatcactccatgcttacattatcgccaaagtacaaagaaatgggtccgccgcaatgtgccactttacaacaaaaagtgcacctccaagccaagtctggaacatgacagtatcaatgacatcagataatagcatgcatgtaaaatgcagaccgccgagggatagaaacggaccacatgaacggtatcacctcgaagttgaagctggaaatacattagttagaaatgaaagccataaaaactgtgactttcgagtaaaagatttacaatattcaactgactatacatttaaagcctactttcataatggggattacccaggagaaccgtttatattacatcattctacatcgtacaattcaaaggctttgatagcgtttttagcattcctaataattgttacttcgatcgccttattagtagtactttataaaatctacgacttacataagaaacgttcgtgcaatctagatgaacaacaggaacttgtagaaagggacgacgaaaaacaattaatgaacgtagaacctatacatgctgacatactattagaaacctacaaacgaaaaatagcagatgaaggaagactatttctggcagagtttcaatccataccgagagtgttttcgaaatttccaattaaagaagcacgaaaaccatttaatcaaaacaagaatcgatacgttgatatattaccgtacgattacaatcgcgtcgaactatcagagataaatggcgacgcaggttcaaactacatcaatgcatcatatatcgatggattcaaagaacctcgaaaatacatcgcagcgcaaggtcccagagacgaaacagtagatgacttttggcgaatgatatgggaacaaaaagcaacagtaatcgttatggtaaccagatgtgaagaaggaaatagaaataaatgtgcggaatattggccatcaatggaagaaggaacacgtgcatttggcgacgttgtagtcaaaataaaccaacacaaacggtgcccagattacataatccaaaaactaaacatagtaaataagaaagaaaaagcaacaggaagggaggtcacgcacatccaatttaccagctggccagaccacggagttccagaagacccacatctccttttaaaattaaggcgcagagttaacgcattctccaatttcttttcgggcccaatagttgttcattgtagcgctggtgtgggtcggacaggtacctacatcggcatcgacgcaatgctggaaggactcgaagccgaaaataaagtagacgtatatggctacgtagtaaaactacgaagacagagatgtctaatggtacaagtagaggcacaatacatattaatccatcaagcattggtagaatataatcaattcggagaaacagaagttaacctttcggagctacacccctatcttcataatatgaagaaaagagatcctccttcagaaccttcacccttagaggcagaatttcaaagattaccctcataccgatcttggcgaacacaacacatcggcaatcaggaagaaaacaaatctaaaaatcgcaactcaaatgttataccatatgattacaaccgcgttccgttgaaacatgagcttgaaatgtcaaaagaaagcgaacatgattctgatgaatcaagcgatgacgactcagacagtgaagaaccttcgaaatacattaatgcttcatttattatgtcttattggaaacccgaagtaatgatagccgcacaagggccactaaaagaaacaataggagatttctggcaaatgatatttcagcgaaaagtaaaagtcatagtcatgcttaccgaactcaagcacggagaccaagaaatatgtgcacaatattggggagaaggtaaacaaacatacggcgacattgaagttgatctgaaagacaccgacaagagctcaacatacacattacgtgtattcgaactaagacactccaaaagaaaagattcaagaacagtttatcaataccaatatacaaactggtcagtagaacaattaccagccgaaccaaaggaactaatatctatgatccaagtcgtaaaacaaaaattaccccagaaaaatagtagcgaaggaaacaaacatcacaaatcaacacccctcttaatccactgccgagatggcagtcaacaaacaggcatattttgtgccctattaaacttgctagagtctgcagaaacagaggaagtagttgacatatttcaagtagtcaaagcattacgaaaagcacgcccggggatggtaagtacttttgaacaatatcaatttctatatgatgtcatagcaagtacctacccagcgcaaaacggccaagtaaagaaaaacaatcatcaagaagataaaatagagttcgacaatgaagtagacaaggttaagcaagatgcgaattgcgtaaatcccctaggagctccggaaaaattaccggaagcaaaagaacaagccgaaggaagtgaacctacatcaggtacagaaggaccagaacattcagtaaatggccccgccagtcccgctttaaaccaaggatcataa

SEQ ID NO: 2869 - RNA, 765 nt, synthetic construct
  misc_feature 1..765: note = P08637
  source 1..765: mol_type = other RNA
atgtggcaactattactaccaacagctctactactattagtatcagcaggaatgagaacagaagatctaccaaaagcagtagtattcctagaaccacaatggtacagagtactagaaaaagacagtgtaacactaaaatgccaaggcgcatattcaccagaagacaactcaacacaatggtttcacaacgaatcactaatatcatcacaagcatcatcttacttcatagacgcagcaacagtagacgactctggcgaatacagatgccaaacaaacctatccaccctatcagacccagtacaattagaagtacacataggctggctactactacaagcaccacgatgggtattcaaagaagaagacccaatacacctacgatgccactcatggaaaaacacagcattacacaaagtaacatacctacaaaacggaaaaggcagaaaatacttccaccacaactcagacttttacattccaaaagcaacactaaaagattcaggatcatacttctgcagaggactattcggatctaaaaacgtatcatcagaaacagtaaatataacaataacacaaggactagcagtatcaacaatatcatcattcttcccaccaggataccaagtatcattctgcctagtaatggtactactattcgctgtagacacaggattatacttctcagtaaaaacaaacataagatcatcaacacgagactggaaagaccacaaattcaaatggagaaaagatccacaagacaaatga

SEQ ID NO: 2870 - RNA, 663 nt, synthetic construct
  misc_feature 1..663: note = P10747
  source 1..663: mol_type = other RNA
atgttaagactcctactagcactaaacctattcccctcaatacaagtaaccggaaacaaaatattagtaaaacaatcaccaatgctagtagcatacgacaacgcagtaaacctatcctgcaaatactcatacaacctattctcaagagaatttcgagcatcactacacaaaggcctagactcagcagtagaagtatgtgtagtatacggaaactactcccaacaactccaagtatactcaaaaacaggcttcaactgtgacggaaaactcggaaacgaatctgtaacattctacctacaaaacctatatgtcaaccaaacagacatctacttctgcaaaatagaagtaatgtatccaccaccatacctagacaacgaaaaatcaaacggaacaataatacacgtaaaaggaaaacacctatgcccatcaccattattcccaggaccatcaaaaccattctgggtcctagtagtagtaggaggagtactagcctgctactcactcctagtaacagtagcattcataatattctgggtaagatcaaaaagatcaagactactacattcagactacatgaacatgacaccaagaagaccaggcccaacaagaaaacactaccaaccatacgcaccaccaagagacttcgcagcatacagatcatga

SEQ ID NO: 2871 - RNA, 681 nt, synthetic construct
  misc_feature 1..681: note = P11912
  source 1..681: mol_type = other RNA
atgccaggaggaccaggagtattacaagcactaccagcaacaatattcttactattcctactatcagcagtatacttaggtccaggatgccaagcattatggatgcataaagtaccagcatcattaatggtatcattaggagaagacgcacactttcaatgcccacacaactcatcaaacaacgcaaacgtaacatggtggagagtactacacggaaactacacatggccaccagaatttttaggaccaggagaagacccaaacggaacactaataatacaaaatgtaaacaaatcacatggcggtatctacgtatgcagagtacaagaaggaaatgaatcataccaacaatcatgcggaacatatttaagagtaagacaaccaccaccaagaccattcctagacatgggcgaaggaaccaaaaatagaataataacagcagaaggaataatattattattttgcgcagtagttccaggaacattattattattcagaaaaagatggcaaaacgaaaaattaggactagacgcaggcgacgaatacgaagacgaaaatctatacgaaggattaaatctagacgactgctcaatgtacgaagacatctcaagaggattacaaggaacataccaagacgtaggctcactcaacataggagacgtacaactagaaaaaccatga

SEQ ID NO: 2872 - RNA, 1671 nt, synthetic construct
  misc_feature 1..1671: note = P15391
  source 1..1671: mol_type = other RNA
atgccaccacctagattattattctttttattgttcttaacaccaatggaagtaaggcccgaagaacccttagtagtaaaagtagaagaaggagataacgctgtactccaatgtctcaaaggaacctcagatggtccaacacaacaattaacatggagcagagaaagtccattaaaaccattcttaaaactctctcttggattaccaggactaggtatacatatgagaccattagcaatttggctttttatatttaatgtatcacaacaaatgggaggattttacttatgtcaacctggaccaccttcagagaaggcttggcaaccaggatggacagtaaatgtagaaggatcaggagaactcttcagatggaatgtaagtgatctaggaggattgggatgtggccttaaaaatcgttcaagtgagggaccatcatcaccttcaggaaaattaatgtctccaaaattatacgtatgggctaaagatagaccagaaatatgggaaggagaaccaccttgtttaccaccaagagacagtttaaatcaatcactaagtcaagacctaaccatggctccaggatcaacattatggttaagctgtggagtaccaccagattctgtatccagaggaccattatcatggactcacgtacatccgaaaggccctaaatcattactatcattggaactaaaagatgatagaccagcaagagacatgtgggtaatggaaacaggattattactaccaagagctacagcgcaagacgcaggcaaatattattgtcatagaggaaatttaacaatgagctttcatttagaaataacagcacgaccagtattatggcattggttactacgaacaggaggatggaaagtatcagcagtaacacttgcatatctaatattctgtttatgctcattagtaggtattctacatctacaacgagcgctcgtattacgaagaaaacgaaaaagaatgactgatccaacaagaagattctttaaagtaactcccccaccaggatcgggacctcaaaaccaatacggtaacgtactatcattaccaacacctacctctggtttaggacgagcacaaagatgggcagcaggtctaggaggtacagccccttcttatggtaacccatcatctgatgtacaagcagatggtgcactaggctccagatcaccaccaggtgtaggaccggaagaagaagaaggtgaaggatacgaagaaccagattcagaagaagatagtgaattttacgaaaatgatagcaatctcggacaagaccaactctcacaagatgggtcaggatatgaaaacccagaagatgaaccattaggtccagaagatgaagattcattctccaacgccgagtcatatgaaaatgaagatgaagaattaactcagccagtagcaagaacaatggattttctatcaccgcatgggtcagcatgggatccatcaagagaagcaacatcactaggaagccaatcatatgaagatatgagaggaattttatatgcagcaccccaattaagaagcatacgaggacaaccaggaccaaatcatgaagaagacgcagactcatatgaaaatatggataacccggacggaccagatccagcatggggaggtggtggaagaatgggaacatggtccacacgataa

SEQ ID NO: 2873 - RNA, 672 nt, synthetic construct
  misc_feature 1..672: note = P16410
  source 1..672: mol_type = other RNA
atggcatgtttaggattccaaagacacaaagcacaactaaacttagcaacaagaacatggccatgcacactactattctttctactattcataccagtattctgtaaagcaatgcacgtagcacaaccagcagtagtactagcatcatcaagaggaatagcatcattcgtatgcgaatacgcatcaccaggaaaagcaacagaagtaagagtaacagtactaagacaagcagactcacaagtaacagaagtatgcgcagcaacatacatgatgggcaacgaacttacattcctagatgactcaatatgcacaggcacatcatcaggaaaccaagtaaacctaacaatacaaggactaagagcaatggacacaggattatacatatgcaaagtagaactaatgtacccaccaccatactatctcggaataggaaacggaacacaaatatatgtaatcgacccagaaccatgcccagactctgacttcctattatggatactagcagcagtatcatcaggactattcttctactcattcttactaacagcagtatcactatctaaaatgctaaaaaaaagatcaccactaacaacaggagtatacgtaaaaatgccacccacagaaccagaatgtgaaaaacaattccaaccatacttcataccaataaactga

SEQ ID NO: 2874 - RNA, 1419 nt, synthetic construct
  misc_feature 1..1419: note = P16671
  source 1..1419: mol_type = other RNA
atgggatgtgacagaaattgcggattaatagcaggagcagttataggcgcagtacttgccgtatttggcggaatcctaatgccagtaggagacttactaatacaaaaaacaatcaaaaaacaagttgtcctagaagaaggaacaatagcattcaaaaattgggtaaaaacaggaacagaagtatatcgacaattttggatatttgacgtacaaaacccacaagaagtaatgatgaactcatccaatattcaagtaaaacaacgaggcccatatacatatagagtaagattccttgccaaagaaaacgtaacacaagatgcagaagacaacacagtctcattccttcaaccaaatggtgcaattttcgaaccctccctttcagtaggaacagaagccgacaacttcactgtactaaatctagctgtcgcagcagcatcacacatataccaaaaccaattcgttcaaatgatattaaactcattaattaataaaagtaaatcatctatgtttcaagtcagaactctaagagaactactatggggttaccgagacccattcttatcattagtaccttaccctgtaacaacaacagtaggactattttatccatacaataacacagcagacggcgtctacaaagtatttaatggaaaagacaacatatcaaaagtagctataatcgatacatacaaaggcaaacgaaacttatcatactgggaatcacactgcgacatgatcaacggaacagacgcagcatcattcccaccatttgtcgaaaaatcacaagtactacaattcttttcctcagatatatgtagatcaatatatgcagttttcgaatcagacgtaaatttaaaaggaataccagtctacagattcgtcctaccctcaaaagcatttgcatcaccagtagaaaatcctgataactactgtttttgtaccgaaaaaataattagcaaaaactgcacttcatacggagtactagacatctcaaaatgcaaagaaggaaggccagtatatatatccctaccacacttcttatacgcatcccccgatgtatcagaaccaatagatggacttaacccaaacgaagaagaacacagaacatacttagatattgaaccaataaccggcttcacactacaatttgctaaaagattacaagttaacctactagtaaaaccatcagaaaaaatacaagtcctaaaaaaccttaaaagaaactacattgtaccaatattatggctaaacgaaacaggaacaatcggagatgagaaagcaaatatgttcagatcacaagttacaggaaaaataaatttattaggcctcatagaaatgatactactatccgtcggagtagtaatgttcgtagcattcatgatatcatattgcgcatgcagatcaaaaacaataaaatga

SEQ ID NO: 2875 - RNA, 651 nt, synthetic construct
  misc_feature 1..651: note = P26718
  source 1..651: mol_type = other RNA
atgggatggataagaggaagaagatcaagacactcatgggaaatgtcagaattccataattacaacctagacctaaaaaaatccgactttagcacaagatggcaaaaacaaagatgcccagtagtaaaatcaaaatgcagagaaaacgcatcaccattcttcttctgctgcttcatagcagtagcaatgggaataagattcataataatggtcgcaatatggtcagcagtattcctaaacagcctattcaaccaagaagtacaaatcccattaaccgaatcatactgcggaccatgtccaaaaaactggatatgctacaaaaacaactgctatcaattcttcgacgaaagtaaaaactggtacgaaagccaagcatcatgcatgtcacaaaacgcatcactattaaaagtatactcaaaagaagaccaagacctactaaaactagtcaaatcatatcactggatgggactagtacacataccaacaaacggatcatggcaatgggaagacggatcaatattatcaccaaacctactaacaataatagaaatgcaaaaaggagactgcgcactatacgcatcatcattcaaaggatacatagaaaactgctcaacaccaaacacatacatatgcatgcaaagaacagtataa

SEQ ID NO: 2876 - RNA, 261 nt, synthetic construct
  misc_feature 1..261: note = P30273
  source 1..261: mol_type = other RNA
atgataccagcagtagtactactactactactactagtagaacaagcagcagcactaggagaaccacaactatgctacatactagacgcaatactattcctatacggaatagtactaacactactatactgcagactaaaaatacaagtaagaaaagcagcaataacatcatacgaaaaatcagacggagtatacacaggactatcaacaagaaaccaagaaacatacgaaacactaaaacacgaaaaaccaccacaatag

SEQ ID NO: 2877 - RNA, 1137 nt, synthetic construct
  misc_feature 1..1137: note = P32248
  source 1..1137: mol_type = other RNA
atggacctaggaaaacccatgaaatcagtactagtagtcgcattattagtaattttccaagtctgtctatgccaagacgaagtaacagacgactacataggagacaacacaaccgtcgactatacactatttgaatcattatgttcaaaaaaagatgtacgtaatttcaaagcatggttcctaccaatcatgtattccataatatgctttgtaggtctattaggcaacggacttgtagtattaacatatatatacttcaaacgactaaaaactatgaccgatacttatttactaaaccttgcagtagccgacatactattcctactaactctaccattctgggcatattctgcagcaaaatcatgggtctttggagtacacttctgcaaattaatctttgcaatatacaaaatgtcattcttctcaggaatgctactcctactatgcatatcaattgacagatatgtagcaatagtacaagcagtatcagcacacagacacagagcacgagtactacttatttccaaattatcatgcgtcggaatatggattctagcaacagtcttatcaataccagaattattatactctgacctacaaagatcatcatccgaacaagccatgagatgttccctcataacagaacacgtagaagcttttataaccattcaagtagcacaaatggtcataggattcctagtaccattattagcaatgtcattctgttacctagtaataataagaaccctcctacaagcaagaaacttcgaaagaaacaaagcaataaaagtaataatagcagtagtagtagtcttcatagtatttcaactaccatacaacggagtagtattagcacaaacagtcgcaaacttcaacatcacttcatccacatgcgaattatcaaaacaattaaacatagcatacgacgttacctactcattagcatgtgtacgatgttgtgtaaatccattcctatacgcattcataggcgtaaaattccgtaacgacctatttaaattattcaaagacttaggctgcctctcacaagaacaactaagacaatggtcatcatgccgacacatacgcagatcctcaatgtcagtagaagccgaaacaacaaccacattctctccatga

SEQ ID NO: 2878 - RNA, 690 nt, synthetic construct
  misc_feature 1..690: note = P40259
  source 1..690: mol_type = other RNA
atggcaagactagcattatcaccagtaccaagccactggatggtagcactactactattactatcagcagaaccagtaccagcagcaagatcagaagatagatacagaaacccaaaaggatcagcatgctcacgaatatggcaaagtccaagatttatagcaagaaaaagaggattcacagtaaaaatgcactgctacatgaactcagcaagcggtaatgtaagctggttatggaaacaagaaatggacgaaaacccacaacaactaaaactagaaaaaggaagaatggaagaatcacaaaacgaatcactagcaacactaacaatacaaggaataagattcgaagacaatggaatatacttctgccaacaaaaatgtaacaacacatcagaagtataccaaggatgcggaacagaactaagagtaatgggattcagcacactagcccaactaaaacaaagaaacacattaaaagacggaataataatgatacaaacactactaataatattatttataatagtaccaatattcctactattagacaaagacgactcaaaagcaggaatggaagaagaccacacatacgaaggactagacatagaccaaacagcaacatacgaagacatagtaacactaagaacaggagaagtaaaatggtcagtaggagaacacccaggccaagaatga

SEQ ID NO: 2879 - RNA, 990 nt, synthetic construct
  misc_feature 1..990: note = P42081
  source 1..990: mol_type = other RNA
atggacccacaatgcaccatgggactatccaatatactctttgtaatggccttcctcttatccggagcagccccactcaaaatacaagcatacttcaacgaaacagcagacctaccatgccaatttgccaactcacaaaaccaatcactctccgaattagtagtattctggcaagatcaagaaaacttagtacttaacgaagtatatctaggaaaagaaaaattcgactcagtacattcaaaatacatgggacgaacatcatttgactccgactcctggacactaagactacacaacctacaaataaaagacaaaggtctataccaatgcataatacatcataaaaaaccaacaggaatgataagaatacaccaaatgaactccgaactatcagtcctagcaaatttctcacaacccgaaatagtacccatatccaacataaccgaaaacgtctacatcaacctaacatgcagttcaatacacggataccctgaaccaaaaaaaatgagcgtattattaagaaccaaaaattcaacaatcgaatacgacggtgtaatgcaaaaatcacaagacaacgtaacagaactatatgacgtatcaatatcactatcagtatcattcccagacgtaacctcaaacatgacaatcttctgcatactcgaaacagacaaaactagactactatcatccccattcagtattgaactagaagacccacaacccccaccagaccacataccatggataaccgcagtcctaccaacagtaataatatgcgtaatggtattctgcctcatcctatggaaatggaaaaaaaaaaaaagacctagaaactcatacaaatgcggaacaaacacaatggaaagagaagaatcagaacaaacaaaaaaaagagaaaaaatacacataccagaaagatcagacgaagcacaaagagtattcaaatcatcaaaaacatcatcatgcgacaaatcagacacatgcttctga

SEQ ID NO: 2880 - RNA, 1011 nt, synthetic construct
  misc_feature 1..1011: note = Q15762
  source 1..1011: mol_type = other RNA
atggactacccaacactattactcgcactactccatgtataccgagccttatgtgaagaagtactatggcatacctccgtcccattcgcagaaaacatgtccctagaatgcgtatacccttcaatgggaatactaacacaagtagaatggttcaaaatcggaacccaacaagacagtatagcaatattctcaccaacacatggaatggtaataagaaaaccatacgcagaaagagtatacttcttaaactcaaccatggcatcaaacaacatgaccctatttttcagaaacgctagcgaagacgacgtaggatactattcatgttcactctacacataccctcaaggcacatggcaaaaagtaatacaagtagttcaaagcgactcattcgaagcagcagtaccatctaactcacacatagtatccgaaccaggaaaaaatgtaacattaacctgccaaccacaaatgacttggccagtacaagcagtaagatgggaaaaaatacaacccagacaaatagacctactaacctactgtaacttagttcacggacgaaacttcacatcaaaattcccaagacaaatagtatctaactgttcacacggaagatggtccgtaattgtaataccagacgtaacagtttcagactcaggactatatagatgttacctacaagcaagcgcaggagaaaacgaaactttcgtaatgagactaaccgtagcagaaggcaaaactgataaccaatacacattatttgtagcaggcggaacagtactcttactactattcgtaatatcaataacaacaataatagtaatatttctaaacagaagaagaagaagagaaagaagagacttattcacagaatcatgggacacacaaaaagcaccaaataactacagatctccaataagcacatcacaaccaacaaaccaatctatggacgatacccgagaagatatatacgtcaactacccaacattttcaagaagaccaaaaacaagagtatga

SEQ ID NO: 2881 - RNA, 13482 nt, synthetic construct
  misc_feature 1..13482: note = Q685J3
  source 1..13482: mol_type = other RNA
atgcctagaccgggaactatggcattatgtctattaactctggtcttatcactacttccaccccaagcagcagctgaacaagatctgtcagtcaatagagctgtctgggatggcggaggttgtatctcacaaggtgatgtattgaatcgacaatgtcaacagctttctcaacatgtcagaacaggcagcgctgctaacactgctactggtactacttccaccaacgtagtcgaacctcgtatgtacttatcctgcagtaccaaccctgaaatgactagcattgaatcctcagttacgtctgatactccgggtgtttcctcaaccaggatgactccgactgaatcacgtaccactagcgaatcaacttctgactcaaccacgttattcccctcaagtactgaagatacgtcatcacccaccactccggaaggcaccgatgtacccatgtctactccctcagaagaatccatttcctcaacgatggcatttgtatcaaccgcgcccttaccatcttttgaagcgtacaccagcttaacctataaagtagatatgtctacacctctcactacatcaactcaagctagctcaagtccaactaccccagaatctaccaccattccaaaatcaacaaattctgaaggcagtacacccttgacctccatgcctgcgtcgacgatgaaagtagcaagttccgaagctataactttacttactactccagtagaaataagtacccccgtgactatctcagcacaagcaagttcatctcctactaccgctgaaggaccatctttgagcaattccgcaccctcagggggatccactccacttacaagaatgccactttcagtcatgttggttgtttcttcagaagcatcgacgttatccaccacaccggcagcgacgaacatacctgtcattacctccacagaagcgtcctcttcacccactactgcggaaggcacttccatccctacatccacttacaccgaaggttcaacaccccttacaagcactcctgcgagcacaatgccagtggcaacctccgaaatgagcaccctttcaataactcctgttgatacgtcgaccctcgtgaccacgtcgactgaaccgtcatcgctacctacgaccgcagaagctacctccatgctcacgagtaccttatccgaaggctcaactccactcacaaacatgccagtctctacaatcttagtcgcaagctcagaagccagcaccacgagtacgatacccgtagactctaaaacatttgtgacaaccgcctcggaagcctcttcatcaccaacgactgcagaagacacatcaatagcaacatccacgccttcggaaggatctacaccacttaccagcatgcccgtatcgactacaccagtcgcctcttcagaagcctcgaatctatcaactacccctgtcgactccaagacccaagtcaccacctctaccgaggcatcgtcctcgccacccacagccgaagtcaactctatgcctaccagcactccttcagaagggagcacacccttaactagcatgagcgtctctacgatgcccgttgcatcaagcgaggcttctaccttgtcaacaacgccggtagatacctctaccccagttactacttctagcgaagcatcatctagctcgacgacccctgaaggtacgagtatacctacgtcaaccccttcagaaggttccacacccctgacaaacatgcctgtaagtacaaggttagtggtatcgtctgaagcgtccaccacctctacgacccccgctgactcaaataccttcgtgacaacgtcgtcagaagcaagcagttcttcaacaactgccgaagggacgtctatgcccactagcacctattcagaaagaggtactaccatcacctcaatgagcgtatctacgaccttagtcgcatcatcagaggcttcaacattgtcaacaactcccgtcgatagtaacactcctgtcactacctcaactgaggcaacatcatcttctaccacagcggaaggaacttcgatgcccacttccacgtacaccgagggctccaccccactaacgagcatgcctgtcaatacaaccctagtcgcttcttccgaagcatctaccctatccacaacaccggtagacacatccacgccagtcacaacaagtaccgaagcatcgagctctccaactacggctgatggagcgtcgatgccaacatcgactccgagtgagggttccaccccgttaacatccatgcccgtctccaagactctattaacaagttcagaagccagcacgctatccactaccccacttgatacatctactcatatcactaccagcacagaagcgtcctgttcaccaaccacaactgaaggcacttctatgccgatttccactccttcagaaggatcgcctcttctaacaagcattccagtatctattaccccagtgacgtctccagaagcatctactctgagcactacccccgtagactctaattcccccgtaaccacttctactgaggtatcgtcctctccgacgcctgcagaaggcacatctatgcccacatcaacttactcagaaggtcgtacgccactgacatctatgccagtcagtaccacactcgttgcaacatccgcgatatcgacactaagtactacacccgtcgatacctccactccagttactaattcaactgaagcaaggtcatctcccacaacatcagagggtacgtcaatgccaacatcaacacccggggaaggttctacaccattaacatccatgcctgattccacgacccccgtagtctcatccgaggcaagaacgctaagcgccacacctgtagatacatcaactccagttaccacctcaacagaagcgacttcctcacctactactgcggaaggtacatctataccaacgtccaccccctcagaaggcacaacaccactaacaagtacgccagtatcacatacccttgttgcaaactctgaggcgtccacattaagcacaactcctgttgactccaacacaccactaaccacgagcacggaagctagttctccaccccctacagccgaaggcacgagtatgcctaccagcacaccgtcagaaggttctactccccttaccagaatgccagtcagtacaaccatggtcgcctcgtccgagacctcaacgctttctacaactccagcagacacatcgaccccggttacaacctattcccaggcttcatcctccagtacgacagccgacggaacttccatgcctacctccacgtactctgagggcagcacgccactcacatctgtccccgtttctaccaggctcgttgttagctcagaagccagtactctatccaccaccccagtggacacatcgattccagttacaaccagtactgaggcttcgagctcccccactaccgctgaagggactagcattcctaccagtccacctagtgaaggcaccactcccctggcctccatgcccgtaagtaccaccttagttgtttcatcagaagctaatacactctctactacaccagttgattctaagacacaagtagccacatcaacagaagcatcctccccacctcctaccgccgaggttacctcaatgccaacgtctacccccggcgaacggtccacacctcttaccagcatgcctgtcagacacacccctgtagcatcctccgaggcaagtactctttcgacatcccctgttgacacttccacccctgtaacaaccagtgcagaaacaagttctagtcccactacggctgaaggcacgtcattgccaacatctaccacctccgaaggaagcacgctattaacttcgatacccgtatcaacgaccctagtaacatcaccagaagcaagtactctgctaactacaccagtggatacaaaaggacccgttgttacatcaaatgaagtatcttcttctcctactcctgcagagggaacctccatgcctacttcaacctatagtgagggacgaaccccgctaacctcaatacctgtaaacacaactttagtagcgagctccgctatcagtatcttgtctactactccagtcgataactctactccagtcactacttctactgaagcctgttcgtcaccaacaacttctgaaggtacatccatgcctaactctaatccttctgaaggtaccacacctcttacaagtatacctgtcagtactacccctgttgtaagctcggaagccagcacactatcggccactcctgttgatacatccacgccaggaacaactagcgcagaagcgacgtcatcaccaacgacggccgaaggtatatcgattcctacctctacaccatccgagggaaaaacacctctaaaatcaattcccgtatccaatacccctgtggcaaattcggaagcatcaactctaagtacgactccagtcgattcgaatagcccggtcgttacttccactgccgtctcctcatccccgactcctgcagaaggaaccagtatagcgatcagtacgccaagcgaaggcagtacagcactaacttccataccagtctcgacaaccacagttgcctcctcagaaatcaattccttaagtacgacgccggctgtcacaagcacccctgttaccacttattctcaagctagcagttcacccaccaccgctgacggtacctccatgcaaacatcaacatattcggagggttccactcccctaacttctctaccagtctcaactatgttggttgtttctagcgaagcaaacaccctaagtactactccgattgattccaaaacacaagtaaccgcatcaactgaggcttcttcgtcaacgactgcagaaggatcttctatgaccatatccaccccgtctgaaggctccccattactcacaagtatccccgtatctactacacccgtagcgagcccggaggcttccacgttatccaccacccctgtggattcaaactcccccgtcatcacctccaccgaagtttcaagttctccaacacccgccgaaggaacctcaatgccgacatcaacgtacacggaggggcgaacgccgctaacctcaattacagttcgtactacgccggtcgcaagttcagcaatctctacactttcaaccacacctgtagacaattcaacaccggttacaacatcaacagaggcacgttcaagcccaactaccagcgaaggcacttctatgcccaacagcactccatctgaaggaaccacacccctcacatctatccctgttagtacgacaccagtactttcttcggaggcttctacattgtccgcaacccccatcgacacttcaacaccggtgacaaccagtacggaagccacatctagtcccacaactgccgaaggaacctcaataccgacctctaccctatctgaaggaatgacaccactcacctcaacccctgtttctcatactctagtcgctaatagtgaagcctcaactttatccaccacaccggttgattctaattctccagtagtaacgtcaacagccgtaagttcatctccaacacccgctgaaggaacctcgatagcaacatctactccctcagaagggagtaccgccctaacctccatacccgtgtcaaccacaactgtcgcctctagcgaaacaaataccctctccacgactcccgctgtcacatctacaccggtcacaacgtatgctcaagtttcctcgtctcctactactgccgacggttcctcgatgcccacatctactccccgtgagggtcgacctcctctaacatcaatcccggtttcaacaacaacagttgcttcatcagaaatcaatacactatcgacaactttagcggacacaaggactccagtcaccacatattctcaggcttcttctagccccactacagcagatggtacaagtatgcctacacccgcgtattctgagggaagtaccccattgacttctatgcctctatctaccacgcttgttgttagttcagaagcaagtacattaagtacaactccggtcgatacatcaactccggcaacaaccagtaccgaaggcagttctagtcccacgactgccggtggaacctctatacaaacctctacaccgtcagagcgaactactcctctggccggtatgcccgtctctacaaccctcgttgtttcttccgaaggtaacacattatcaacaactcccgtggattctaagactcaagttacaaattcaacagaagcatcctcatcagccactgctgaagggtcaagtatgaccattagtgccccaagtgaaggaagcccgctcttgacatccattccattatcaactacacccgttgcatctccagaggcttccacattatcaaccacaccagtggatagtaattctcccgtaataacttcaactgaagtatcaagctctcctatcccaacagaaggaacatcaatgcaaacttcaacttatagtgatcgcaggaccccgcttacctccatgcctgtttcaacaaccgtcgtagcctctagcgcaatctcaactctctcaaccactcctgtggacacgtcgacgcctgtcactaattcgactgaggctagatcctccccgacaacatcggaaggaacctctatgccgacaagcacaccctcggaaggctcgaccccctttacatcaatgcccgtgtcgacaatgccagtagtaacttccgaggctagtactttatcagctactcccgttgatacttcaacccctgtcacaacatcaaccgaagctacctcgtcaccaacaacggctgaaggcacctcaattccaacttccaccttatcagagggaacaacgccacttacttcgattccagtctctcacactctagtagccaattccgaagtctcaactctttcaactacacctgttgattcaaacacccctttcacgacatcaacagaagcgtcatcaccaccaccaaccgcagagggtaccagcatgccaacgtccacgtcatccgaaggaaacactccactgacaagaatgcctgtctcaaccacaatggtagcctcattcgagacctctaccctttccacgactcctgctgacacttctactccagtaactacatactcccaagccgggtcaagtcccaccaccgccgatgacaccagtatgcctacctctacttactctgaagggtctacgcccttgacgagcgttccagtatccacaatgccagttgtatcatctgaagcctctactcactcgaccacgcctgtagatacgagtaccccggttacaacctcaaccgaggcttcatcaagtcctactaccgctgaaggcacctccatccccacttccccaccgtccgaagggactacacccttagcaagcatgccagtatccacaacccccgttgtatcatcagaagccggtacattatcaaccacgccagttgatacctcaacacccatgaccacatctacagaggcttcatcgtctcccacaacagctgaggacattgtcgttcctatatccacagcgtcggaagggtccacactactcacctctattccagtttccacaactcctgtagcctcccccgaagcctcaacattgagtaccactccagtggatagcaacagtcccgtcgtaacaagtactgaaatatcttcttcagccacaagtgccgagggtacatcaatgcctaccagtacttattctgaaggatccactccgttacgctccatgccagtatccacgaaacccctcgcctcttccgaggctagtactttgtcgaccacacctgtagacaccagtattccagttaccacaagtactgaaacgtcttcttcaccaactaccgcaaaagatacctctatgcctatatccacaccctctgaagtctctacctccctcacaagcattctcgtctctacaatgccggtagcttcctctgaagccagtacactatctacaactccagttgatacaagaaccctagtaaccacgtcaactggcacgtcgtcgtccccaaccacagcagagggttcgtccatgccaacctccactccaggtgaacgctcgactccacttacaaacatcctcgtgagcacaactcttttagcaaattcagaggcttcaactctttcaacgacacctgtagacacctctacccccgtaaccacatcagccgaggcttcgtcatcacccactacagctgagggtacatcgatgcgaataagtacgccctcagacggttctactccgctcacatcgatactggtatcaactttaccggtcgcaagttccgaggctagcactgtttctacaacagcagtagatacttccataccagtcacaacatcgacggaagcatctagttccccaaccacagcggaggttacctctatgcccacaagtacacctagcgaaacgtcaaccccgctaacttcgatgccggtaaaccatactccagtcgcctctagcgaagccggaaccctatctacgaccccagttgacacatccacgcctgttacaacaagcacgaaagctagttcatcaccgacaacagcagaaggcatagttgtaccaataagcacagcaagcgaaggctctacccttttaacaagcatccccgtatccactacacccgttgcatccagtgaagccagtactttatctaccacacccgtggatactagcatacctgttactacatctactgaaggtagttcttcacctactacagccgaaggcacaagtatgcctatatccactccgagcgaagtaagcacacccctgactagcatcctcgtaagcactgttccagttgcgggatccgaggcgtctacgctcagcaccactccagttgatacacgaacacccgtgaccaccagtgcagaggcaagttcctcgcccactacggctgaaggcacatccatgccgataagcacccctggggaaagacgtacaccattgactagcatgtcggtatccactatgcctgttgctagctcagaagctagtacactcagcagaacccctgcagatacttcgacacccgtaacaacctccactgaggcctcctcatcccctacaaccgccgaaggcacaggcattcccatctccactccgtcggaaggatccacaccattaacttcgataccagtaagtacaacccctgttgctatccccgaggccagcaccctcagtactactcccgtagatagtaactcacccgtcgttacctctacggaagttagttcctctcccactcccgcggaaggaaccagcatgccaatttccacatattcggagggttctactccattaactggtgtcccagtctctacaacccccgtgacttcctcagcaatatccactctgtcaacaacgccagtcgacacgtcaaccccagtaactacctccacagaggcacattcatcacctacaacatctgaaggaacaagtatgccgactagcacgccatctgagggttccacacccctaacatacatgcccgtaagtacaatgttagtcgttagttcggaagactccacactgagcgcaacgccagttgatacaagcactcccgtaacaacttccacagaagccacttcttcaaccactgcggaaggcacgagtattcccacctcgacaccctccgaagggatgaccccactaacatctgtaccagtaagcaacactcccgttgcaagttcggaggcatccatcttgtctaccacacccgtagattcaaacaccccattaacgaccagtacagaagctagttcgtcaccacccacagctgaaggaacctcaatgcctacctctactccctccgaagggagcaccccgttgacaagtatgcccgtaagcacaacaacagtagcgagctccgagacgtctacgctatcaaccactccagccgacacgagtactccagtaacaacgtattcacaagctagcagctctcctcccattgcagatggtacttcaatgcctacaagtacgtactccgaggggagtacccctctgactaacatgtccttttccaccacccccgtggtttcttctgaagcgagtactctatcaactactcctgtagatacctctacccctgtaacaaccagcactgaggcttcactctccccgactacagccgaaggtaccagcattccaaccagcagcccaagtgaggggacaacccccttagcatcgatgcccgtgtctacaacccccgtggttagttcagaggtcaatacattatcaacaactcccgtagattcgaacactctagttacaacaagcacagaggcttcatcaagtccaacaatagctgaagggacaagtttgcctacatcgacgacttccgaaggtagtacgcctttaagtattatgccactatctacaacgcccgttgcctcaagtgaggcttctacactctcaaccacacctgtagatacttccaccccagtcacaacctcaagtcccaccaacagttctccaacgactgcagaggttacctcaatgcccacatccactgctggtgagggctctacacctctaactaatatgcctgtctccacaactccagtggcttcctctgaggctagcacactctcgaccacacctgttgattccaacacatttgtcaccagctctagtcaagcatcaagcagccccgctacacttcaagtcacaacaatgcgtatgagtacaccttccgagggaagttcttctttaacaaccatgttattatcttcgacctacgtcacttcttctgaagcaagtactccatccactccatcagtagatcgttcaactccagtgactacatctacacaaagtaacagtacaccgacaccaccagaagttatcacactacctatgtcaacaccctccgaagtttcaacacccttaactattatgcccgtaagcactacctctgttacaatatcggaagcaggtacagctagcacgttaccagtagatacttcaacaccagtaattacttcaactcaagttagtagctcccccgtcacacccgaaggtactaccatgccaatatggacgcccagcgaaggatccaccccacttaccacaatgccggtctccacaacacgtgttacctcatcggaaggctcaacgcttagtaccccgtccgtcgtcacgtcaaccccagtcaccacatcaaccgaagcaataagctcctcagcaacactcgattctacaactatgtcagttagcatgcccatggaaattagcacgctaggtactactatccttgtcagcacaacccccgtaacccgttttccagaaagctctaccccaagcatcccaagcgtatacactagcatgtcgatgacaactgctagtgaaggttcatcttcacctactaccctagaaggaactacaacgatgcctatgtccactacgagcgaaaggtccaccttactcacgaccgttctaatctccccaatttctgtcatgtcaccatcagaggcctcaactttaagtactcctcccggcgatacatcaacgcctctcttaacatctactaaagcgggatctttcagcatcccagccgaagtgacaacaataaggatttccataaccagcgagcgcagcaccccgcttaccactctattagtctcaaccacgctacctacaagtttccccggcgcgtctatagcttctacgcctccgctagacacgtcaacaactttcacacctagcactgataccgcgtcaacccctactatacccgtggcaaccacgatttcagtttctgtaataacagagggttcgacccctggcacaactatattcatacccagcacacctgtcacaagctcaaccgctgacgtatttccggcaacaaccggtgctgtgtccactccagttatcacaagcacagaattaaacacaccgagtacaagctcatcttctacaaccacgagtttctctacaaccaaagaatttactaccccggccatgactaccgcggcaccgttaacctacgtaaccatgtccacagcgccaagtactcctcgaacgacatcccgagggtgcacaacctcagcatccaccttatcagcaacctcaacaccgcacacttctacgtccgtcactacacgtccggttaccccatcgtccgaatcttctcgtccttcaacaataacgagtcacaccatcccaccgacattccctcccgcgcactcctcaacaccacccacaacctctgcaagttcaaccaccgtaaacccagaagcagtcaccacaatgactactaggacaaaacccagtacgcgtactacatccttccctactgttactactacagctgtaccaacgaacaccacgatcaaaagcaatcctacctcaaccccgacggtccctaggaccacaacatgctttggtgacggatgccaaaatacagcttctcgctgtaagaatggtggcacatgggatggtttaaagtgtcagtgtcccaacctatactacggggaactgtgtgaggaagtcgtttcttcgatagacatcgggccaccggaaaccataagcgctcaaatggaactgactgtaactgtcacctcagttaaatttacggaagaactcaaaaatcattcttcacaagagtttcaagagtttaaacaaacctttacagaacaaatgaacatcgtgtacagcggcatcccagaatacgtcggtgttaacataacgaaacttcgattaggtagtgtggtggttgaacatgatgttctactccggactaagtacactcctgaatacaagacggttctagacaacgctaccgaagttgtaaaagagaaaatcacaaaagttactacacaacaaatcatgattaatgatatatgctcagacatgatgtgttttaacactacgggaacgcaagtacagaacatcacggtaactcaatacgaccccgaagaggactgtaggaaaatggcaaaggaatacggtgattatttcgtagtagaatacagagatcagaaaccttattgtatatctccttgcgagccaggttttagtgttagcaaaaattgcaaccttggaaaatgccaaatgtcattatcagggcctcaatgcctatgcgttaccacggaaacacactggtattcaggagagacctgcaatcaaggcactcaaaagagcttagtgtatggacttgttggagcaggagtcgtgttaatgttaattattcttgtagcgctattaatgttagttttcagatcaaagcgagaagtcaaacggcagaaataccgcctgtcacaactatataagtggcaagaagaagattctgggcctgcgcccggtacattccagaacatcgggtttgacatttgtcaagacgacgattccatccaccttgaatctatatactcaaacttccagccctctctgaggcacatcgatcctgaaactaaaatacgtattcaacgaccacaagttatgactacatctttctga

SEQ ID NO: 2882 - RNA, 1215 nt, synthetic construct
  misc_feature 1..1215: note = Q9NNX6
  source 1..1215: mol_type = other RNA
atgagcgactccaaagaaccaagactacaacaactaggactgttagaagaagaacaattaagaggattaggattcagacaaacaagaggatacaaaagtttagcgggatgcttaggacacggaccattagtattacaactcctaagtttcacactattagcaggactattagtacaagtatcaaaagtaccaagtagcataagccaagaacaaagcagacaagatgcaatataccaaaacctaacacaactaaaagctgctgtaggagaactctcagaaaaatcaaaactacaagaaatataccaagaactaacacaattaaaagccgctgtaggcgaactaccagaaaaatctaaactacaagaaatataccaagaattaacaagactaaaagcagcagttggcgaactaccagaaaaatctaaattacaagaaatataccaagaactaacctggttaaaagcagcagtaggagaattaccagaaaaatcaaaaatgcaagaaatataccaagaactaaccagactaaaagctgcagtaggagaattacctgaaaaatcaaaacagcaagaaatatatcaagaactaacaagactaaaagcagcagtaggagaactaccagagaaaagcaaacaacaagaaatataccaagaattaacaagattaaaagcagcagtcggagaattaccagaaaaatcaaaacaacaagaaatataccaagaattaacacaactaaaagcagcagtagaaagactatgccacccatgcccatgggaatggacattctttcaaggcaactgctactttatgagcaatagccaaagaaattggcacgattcaataacagcatgcaaagaagtaggagcacagctagtagtgataaaaagcgcagaagaacaaaatttcttacaactacaatcatccagatccaacagattcacatggatgggactatcagatttaaaccaagaaggaacatggcaatgggtagacggatcaccactactacctagcttcaaacaatattggaatagaggagaaccaaacaacgtaggagaagaagactgcgcagaattttcaggcaatggatggaacgacgataaatgcaatttagccaaattctggatatgcaagaaaagcgcagcttcctgcagccgcgacgaagaacaattcctaagcccagcaccagcaacaccaaacccaccaccagcatga

SEQ ID NO: 2883 - RNA, 3126 nt, synthetic construct
  misc_feature 1..3126: note = Q9NR97
  source 1..3126: mol_type = other RNA
atggaaaacatgttcttacagtcatcaatgcttacttgcatctttttattaatttcaggatcttgcgaattatgtgccgaagaaaacttttcacgatcatacccctgtgatgaaaagaaacaaaatgactccgttatcgctgaatgttcaaatagacgattacaagaagtaccacaaacagttggcaaatacgtcaccgaattagacttatcagacaacttcataactcacataacaaacgaatccttccaaggccttcaaaacttaaccaaaataaacctaaatcataaccctaacgtgcaacaccaaaacggcaaccctggcattcaatcaaacggtctcaatataacagacggagccttcctaaacctcaaaaacctccgcgaactactcttagaagacaaccaacttcctcaaataccttccggtctgccagaatccctcacggaactaagcctaattcaaaacaacatatacaatatcacaaaagaaggaatctcaagattaataaacttgaaaaacctctacttagcttggaattgctacttcaataaagtatgcgagaaaaccaacatagaagacggagtattcgaaacattaaccaatctagaattactatcattatcattcaattccctatcccacgtgcccccaaaactaccctcgtctttacgtaaactatttctatctaacacacaaattaaatatatttcagaagaagacttcaaaggtctaataaatttaacactattagacctctcaggtaactgtccacgatgtttcaatgcacccttcccatgcgtcccatgtgatggaggcgcatcaataaatatagacagatttgcttttcaaaacttaactcaattaagatatcttaatctcagttccacttccttacgcaaaattaatgcagcttggtttaaaaacatgccccaccttaaagtgctcgatctagaatttaattatttagtaggagaaattgcctccggtgcattccttactatgctccctagactcgaaattttagacctatcatttaactatattaaaggatcctacccacaacatatcaacatatcaagaaacttttcaaaattactctccttgcgagcattacacttacgtggatatgtattccaagaactaagagaagatgactttcaaccactaatgcagctgccaaacctctcaactatcaacttaggcatcaacttcataaaacaaatagattttaaactcttccaaaacttttcaaatctcgaaataatatacctatcagaaaatagaatatccccattagtaaaagacaccagacaaagctatgcaaattcatcatcttttcaaagacatattcgcaaaagaagatcaacagacttcgaatttgacccacactctaacttctaccacttcactcgtcctttaataaaacctcaatgtgcagcatatggtaaagcactagatctctctttaaattctatctttttcataggacccaatcaatttgaaaatttacccgatattgcttgtctaaacctctctgccaactcaaatgctcaagtactctcaggaacagaattttccgccataccacatgtaaaatatctagatctaacaaacaatcgcctagacttcgacaacgcatcagccttaacagaactctctgacttagaagtacttgacttatcatacaacagccattacttccgcatagccggagtaactcatcatctagaatttatacaaaacttcactaatctcaaagtcctcaacttatcccacaataacatctatacattaacagacaaatacaatctcgaatcaaaatcactcgtcgaactcgtattctctggcaaccgccttgatattctttggaatgacgacgacaacagatacataagtatatttaaaggattaaagaacctaacccgcctagatctctcacttaacagattaaaacatataccaaatgaagcattcctaaatttacctgcctcactaacagaactacacatcaatgataatatgttaaaattcttcaattggactctcttacaacaattcccaagactcgaactactagacctaagaggcaacaaattactatttttaactgattccctatcagacttcacttccagcttaagaaccttactcctctcccacaacagaatatctcatctaccttccggatttctatctgaagtttcatcattaaaacacctagacctttcttcaaaccttttaaaaaccataaataaatcggcactagaaacaaagactaccacaaaactttcaatgttagaattacacggaaacccttttgaatgtacatgtgatataggagactttagaagatggatggacgaacatctaaacgtaaaaatccctcggctagtagatgtaatatgcgcatctccaggagatcaaagagggaaatccatcgtctcattagaactaaccacatgtgtatcagatgtaacagcagtaatactattctttttcacattctttataacaacgatggtcatgctagccgcattagcacaccacctcttctattgggatgtttggttcatatacaacgtttgccttgccaaggtaaaaggctatcgatcattatcaacaagtcaaactttctacgacgcctacataagctacgacacaaaagatgcttcagtcaccgactgggtcatcaatgaactcagataccatctcgaagaatcaagagataaaaatgtacttctctgcctagaagaaagagattgggaccccgggttagccataattgacaacctaatgcaaagtatcaaccagtctaagaaaacagttttcgtcctcactaagaaatatgctaaatcctggaacttcaaaaccgccttttatctcgcattacaaagactcatggacgaaaatatggacgtaatcatattcatactccttgaacccgtattacaacattcacagtatctccgattaagacaacggatatgcaaatcttcaatcctacaatggccagataatcctaaagctgaaggcctattttggcaaacacttagaaacgttgttctcacagaaaacgactcccgttacaataacatgtacgtcgactctattaaacaatattaa

SEQ ID NO: 2884 - RNA, 66 nt, synthetic construct; identical to SEQ ID NO: 2676
  misc_feature 1..66: note = P16671_TM_1_8-29
  source 1..66: mol_type = other RNA

SEQ ID NO: 2885 - RNA, 81 nt, synthetic construct; identical to SEQ ID NO: 2677
  misc_feature 1..81: note = P32248_TM_1_60-86
  source 1..81: mol_type = other RNA

SEQ ID NO: 2886 - RNA, 66 nt, synthetic construct
  misc_feature 1..66: note = P16671_TM_2_440-461
  source 1..66: mol_type = other RNA
cttttaggtttaattgaaatgatacttttatctgtaggtgtagttatgtttgtagcttttatgata

SEQ ID NO: 2887 - RNA, 63 nt, synthetic construct; identical to SEQ ID NO: 1639
  misc_feature 1..63: note = P32248_TM_2_96-116
  source 1..63: mol_type = other RNA

SEQ ID NO: 2888 - RNA, 66 nt, synthetic construct; identical to SEQ ID NO: 1640
  misc_feature 1..66: note = P32248_TM_3_131-152
  source 1..66: mol_type = other RNA

SEQ ID NO: 2889 - RNA, 63 nt, synthetic construct; identical to SEQ ID NO: 1641
  misc_feature 1..63: note = P32248_TM_4_171-191
  source 1..63: mol_type = other RNA

SEQ ID NO: 2890 - RNA, 84 nt, synthetic construct; identical to SEQ ID NO: 1642
  misc_feature 1..84: note = P32248_TM_5_220-247
  source 1..84: mol_type = other RNA

SEQ ID NO: 2891 - RNA, 78 nt, synthetic construct; identical to SEQ ID NO: 1643
  misc_feature 1..78: note = P32248_TM_6_264-289
  source 1..78: mol_type = other RNA

SEQ ID NO: 2892 - RNA, 54 nt, synthetic construct; identical to SEQ ID NO: 1644
  misc_feature 1..54: note = P32248_TM_7_314-331
  source 1..54: mol_type = other RNA

SEQ ID NO: 2893 - RNA, 69 nt, synthetic construct; identical to SEQ ID NO: 1645
  misc_feature 1..69: note = A0A5B9_TM_145-167
  source 1..69: mol_type = other RNA

SEQ ID NO: 2894 - RNA, 69 nt, synthetic construct; identical to SEQ ID NO: 1646
  misc_feature 1..69: note = B7Z8K6_TM_130-152
  source 1..69: mol_type = other RNA

SEQ ID NO: 2895 - RNA, 63 nt, synthetic construct
  misc_feature 1..63: note = O00206_TM_632-652
  source 1..63: mol_type = other RNA
actataattggagtttcagttttatctgtattagtagtttcagttgtagctgtattagtatat

SEQ ID NO: 2896 - RNA, 66 nt, synthetic construct
  misc_feature 1..66: note = P01730_TM_397-418
  source 1..66: mol_type = other RNA
atggcgttaatagttttgggtggggttgcgggtttgttattgtttataggtttgggtatatttttt

SEQ ID NO: 2897 - RNA, 63 nt, synthetic construct; identical to SEQ ID NO: 1649
  misc_feature 1..63: note = P01850_TM_151-171
  source 1..63: mol_type = other RNA

SEQ ID NO: 2898 - RNA, 78 nt, synthetic construct; identical to SEQ ID NO: 1650
  misc_feature 1..78: note = P07766_TM_127-152
  source 1..78: mol_type = other RNA

SEQ ID NO: 2899 - RNA, 66 nt, synthetic construct
  misc_feature 1..66: note = P08575_TM_576-597
  source 1..66: mol_type = other RNA
gcccttatagctttccttgcatttctaattatagttacatctatagctctacttgtagttctatat

SEQ ID NO: 2900 - RNA, 63 nt, synthetic construct; identical to SEQ ID NO: 2692
  misc_feature 1..63: note = P08637_TM_209-229
  source 1..63: mol_type = other RNA

SEQ ID NO: 2901 - RNA, 81 nt, synthetic construct; identical to SEQ ID NO: 1653
  misc_feature 1..81: note = P10747_TM_153-179
  source 1..81: mol_type = other RNA

SEQ ID NO: 2902 - RNA, 66 nt, synthetic construct; identical to SEQ ID NO: 1654
  misc_feature 1..66: note = P11912_TM_144-165
  source 1..66: mol_type = other RNA

SEQ ID NO: 2903 - RNA, 66 nt, synthetic construct; identical to SEQ ID NO: 1655
  misc_feature 1..66: note = P15391_TM_292-313
  source 1..66: mol_type = other RNA

SEQ ID NO: 2904 - RNA, 63 nt, synthetic construct; identical to SEQ ID NO: 1656
  misc_feature 1..63: note = P16410_TM_162-182
  source 1..63: mol_type = other RNA

SEQ ID NO: 2905 - RNA, 63 nt, synthetic construct; identical to SEQ ID NO: 1657
  misc_feature 1..63: note = P26718_TM_52-72
  source 1..63: mol_type = other RNA

SEQ ID NO: 2906 - RNA, 63 nt, synthetic construct
  misc_feature 1..63: note = P30273_TM_24-44
  source 1..63: mol_type = other RNA
ctatgttacattctagatgcaattctatttctatatggaattgtacttacacttctatattgc

SEQ ID NO: 2907 - RNA, 63 nt, synthetic construct
  misc_feature 1..63: note = P40259_TM_160-180
  source 1..63: mol_type = other RNA
ggcattatcatgatccaaaccctcctcattatcctcttcattatcgtccccattttcctcctc

SEQ ID NO: 2908 - RNA, 63 nt, synthetic construct
  misc_feature 1..63: note = P42081_TM_248-268
  source 1..63: mol_type = other RNA
tggataactgcagttttacctacagttataatttgcgttatggttttctgtctaattctatgg

SEQ ID NO: 2909 - RNA, 63 nt, synthetic construct; identical to SEQ ID NO: 1661
  misc_feature 1..63: note = Q15762_TM_255-275
  source 1..63: mol_type = other RNA

SEQ ID NO: 2910 - RNA, 63 nt, synthetic construct
  misc_feature 1..63: note = Q685J3_TM_4394-4414
  source 1..63: mol_type = other RNA
cttgttggtgctggtgttgttttaatgttaattattttagttgctttacttatgcttgttttt

SEQ ID NO: 2911 - RNA, 63 nt, synthetic construct; identical to SEQ ID NO: 1663
  misc_feature 1..63: note = Q9NNX6_TM_38-58
  source 1..63: mol_type = other RNA

SEQ ID NO: 2912 - RNA, 63 nt, synthetic construct; identical to SEQ ID NO: 2704
  misc_feature 1..63: note = Q9NR97_TM_828-848
  source 1..63: mol_type = other RNA

SEQ ID NO: 2913 - RNA, 886 nt, synthetic construct
  misc_feature 1..886: note HsCTLA4(1-105)-(G4S)3-GgOva(792-827)-(G4S)3-PADRE-(G4S)3-Hs CTLA4( 484-672)
  source 1..886: mol_type = other RNA
ggggcgctgcctacggaggtggcagccatctccttctcggcatcaagcttaccatggcctgcctgggcttccagcgccacaaggcccagctcaacctggcgacccggacctggccctgcacgctgctcttcttcctgctgttcatccccgtgttctgcggcgggggcgggagcggcgggggcggctccgggggcgggggcagcctggagtcgatcatcaacttcgagaagctgaccgagggcgggggcgggagcggcgggggcggctccgggggcgggggcagcgccaagttcgtggccgcctggaccctgaaggcggccgccggcgggggcgggagcggcgggggcggctccgggggcgggggcagcttcctcctgtggatcctggccgccgtctccagcggcctcttcttctactccttcctgctgaccgcggtgagcctctccaagatgctgaagaagcgcagccccctgacgaccggggtgtacgtcaagatgccgcccaccgagcccgagtgcgagaagcagttccagccctacttcatccccatcaactgaggactagtgcatcacatttaaaagcatctcagcctaccatgagaataagagaaagaaaatgaagatcaatagcttattcatctctttttctttttcgttggtgtaaagccaacaccctgtctaaaaaacataaatttctttaatcattttgcctcttttctctgtgcttcaattaataaaaaatggaaagaacctagatctaaaaaaaaaaaaaaaaaaaaaaaaaaaaaaaaaaaaaaaaaaaaaaaaaaaaaaaaaaaaaaaatgcatcccccccccccccccccccccccccccccccaaaggctcttttcagagccaccagaatt

SEQ ID NO: 2914 - RNA, 877 nt, synthetic construct
  misc_feature 1..877: note HsCTLA4(1-105)-(G4S)3-MmTrp2(942-968)-(G4S)3-PADRE-(G4S)3-H sCTLA4 (484-672)
  source 1..877: mol_type = other RNA
ggggcgctgcctacggaggtggcagccatctccttctcggcatcaagcttaccatggcctgcctgggcttccagcgccacaaggcccagctcaacctggcgacccggacctggccctgcacgctgctcttcttcctgctgttcatccccgtgttctgcggcgggggcgggagcggcgggggcggctccgggggcgggggcagctccgtgtacgacttcttcgtgtggctgggcgggggcgggagcggcgggggcggctccgggggcgggggcagcgccaagttcgtggccgcctggaccctgaaggcggccgccggcgggggcgggagcggcgggggcggctccgggggcgggggcagcttcctcctgtggatcctggccgccgtctccagcggcctcttcttctactccttcctgctgaccgcggtgagcctctccaagatgctgaagaagcgcagccccctgacgaccggggtgtacgtcaagatgccgcccaccgagcccgagtgcgagaagcagttccagccctacttcatccccatcaactgaggactagtgcatcacatttaaaagcatctcagcctaccatgagaataagagaaagaaaatgaagatcaatagcttattcatctctttttctttttcgttggtgtaaagccaacaccctgtctaaaaaacataaatttctttaatcattttgcctcttttctctgtgcttcaattaataaaaaatggaaagaacctagatctaaaaaaaaaaaaaaaaaaaaaaaaaaaaaaaaaaaaaaaaaaaaaaaaaaaaaaaaaaaaaaaatgcatcccccccccccccccccccccccccccccccaaaggctcttttcagagccaccagaatt

SEQ ID NO: 2915 - RNA, 504 nt, synthetic construct
  misc_feature 1..504: note HsCTLA4(1-105)-(G4S)3-GgOva(792-827)-(G4S)3-PADRE-(G4S)3-Hs CTLA4( 484-672)
  source 1..504: mol_type = other RNA
atggcctgcctgggcttccagcgccacaaggcccagctcaacctggcgacccggacctggccctgcacgctgctcttcttcctgctgttcatccccgtgttctgcggcgggggcgggagcggcgggggcggctccgggggcgggggcagcctggagtcgatcatcaacttcgagaagctgaccgagggcgggggcgggagcggcgggggcggctccgggggcgggggcagcgccaagttcgtggccgcctggaccctgaaggcggccgccggcgggggcgggagcggcgggggcggctccgggggcgggggcagcttcctcctgtggatcctggccgccgtctccagcggcctcttcttctactccttcctgctgaccgcggtgagcctctccaagatgctgaagaagcgcagccccctgacgaccggggtgtacgtcaagatgccgcccaccgagcccgagtgcgagaagcagttccagccctacttcatccccatcaactga

SEQ ID NO: 2916 - RNA, 495 nt, synthetic construct
  misc_feature 1..495: note HsCTLA4(1-105)-(G4S)3-MmTrp2(942-968)-(G4S)3-PADRE-(G4S)3-H sCTLA4 (484-672)
  source 1..495: mol_type = other RNA
atggcctgcctgggcttccagcgccacaaggcccagctcaacctggcgacccggacctggccctgcacgctgctcttcttcctgctgttcatccccgtgttctgcggcgggggcgggagcggcgggggcggctccgggggcgggggcagctccgtgtacgacttcttcgtgtggctgggcgggggcgggagcggcgggggcggctccgggggcgggggcagcgccaagttcgtggccgcctggaccctgaaggcggccgccggcgggggcgggagcggcgggggcggctccgggggcgggggcagcttcctcctgtggatcctggccgccgtctccagcggcctcttcttctactccttcctgctgaccgcggtgagcctctccaagatgctgaagaagcgcagccccctgacgaccggggtgtacgtcaagatgccgcccaccgagcccgagtgcgagaagcagttccagccctacttcatccccatcaactga

SEQ ID NO: 2917 - RNA, 504 nt, synthetic construct
  misc_feature 1..504: note HsCTLA4(1-105)-(G4S)3-GgOva(792-827)-(G4S)3-PADRE-(G4S)3-Hs CTLA4( 316-504)
  source 1..504: mol_type = other RNA
atggcttgccttggatttcagcggcacaaggctcagctgaacctggctaccaggacctggccctgcactctcctgttttttcttctcttcatccctgtcttctgcggaggtggtggatccggcggtggcggttctggtggaggtggatctcttgagagtataatcaactttgaaaaactgactgaaggaggtggtggatccggcggtggcggttctggtggaggtggatctgccaaatttgttgctgcctggaccctgaaagctgctgctggaggtggtggatccggcggtggcggttctggtggaggtggatctttcctcctctggatccttgcagcagttagttcggggttgtttttttatagctttctcctcacagctgtttctttgagcaaaatgctaaagaaaagaagccctcttacaacaggggtctatgtgaaaatgcccccaacagagccagaatgtgaaaagcaatttcagccttattttattcccatcaattga

SEQ ID NO: 2918 - RNA, 495 nt, synthetic construct
  misc_feature 1..495: note HsCTLA4(1-105)-(G4S)3-MmTrp2(942-968)-(G4S)3-PADRE-(G4S)3-H sCTLA4 (316-504)
  source 1..495: mol_type = other RNA
atggcttgccttggatttcagcggcacaaggctcagctgaacctggctaccaggacctggccctgcactctcctgttttttcttctcttcatccctgtcttctgcggaggtggtggatccggcggtggcggttctggtggaggtggatctagcgtgtatgacttttttgtgtggctcggaggtggtggatccggcggtggcggttctggtggaggtggatctgccaaatttgttgctgcctggaccctgaaagctgctgctggaggtggtggatccggcggtggcggttctggtggaggtggatctttcctcctctggatccttgcagcagttagttcggggttgtttttttatagctttctcctcacagctgtttctttgagcaaaatgctaaagaaaagaagccctcttacaacaggggtctatgtgaaaatgcccccaacagagccagaatgtgaaaagcaatttcagccttattttattcccatcaattga

SEQ ID NO: 2919 - protein, 167 aa, synthetic construct
  REGION 1..167: note HsCTLA4(1-35)-(G4S)3-GgOva(256-267)-(G4S)3-PADRE-(G4S)3-HsC TLA4(1 62-223)
MACLGFQRHKAQLNLATRTWPCTLLFFLLFIPVFCGGGGSGGGGSGGGGSLESIINFEKLTEGGGGSGGGGSGGGGSAKFVAAWTLKAAAGGGGSGGGGSGGGGSFLLWILAAVSSGLFFYSFLLTAVSLSKMLKKRSPLTTGVYVKMPPTEPECEKQFQPYFIPIN

SEQ ID NO: 2920 - protein, 164 aa, synthetic construct
  REGION 1..164: note HsCTLA4(1-35)-(G4S)3-MmTrp2(180-188)-(G4S)3-PADRE-(G4S)3-Hs CTLA4( 162-223)
MACLGFQRHKAQLNLATRTWPCTLLFFLLFIPVFCGGGGSGGGGSGGGGSSVYDFFVWLGGGGSGGGGSGGGGSAKFVAAWTLKAAAGGGGSGGGGSGGGGSFLLWILAAVSSGLFFYSFLLTAVSLSKMLKKRSPLTTGVYVKMPPTEPECEKQFQPYFIPIN

SEQ ID NO: 2921 - RNA, 39 nt, synthetic construct
  misc_feature 1..39: note = PADRE epitope
  source 1..39: mol_type = other RNA
gccaaatttgttgctgcctggaccctgaaagctgctgct

SEQ ID NO: 2922 - RNA, 36 nt, synthetic construct
  misc_feature 1..36: note = OVA epitope (792-827)
  source 1..36: mol_type = other RNA
cttgagagtataatcaactttgaaaaactgactgaa

SEQ ID NO: 2923 - RNA, 27 nt, synthetic construct
  misc_feature 1..27: note = Trp2 epitope mus musculus (942-968)
  source 1..27: mol_type = other RNA
agcgtgtatgacttttttgtgtggctc

SEQ ID NO: 2924 - RNA, 1217 nt, synthetic construct
  misc_feature 1..1217: note = Ovalbumin Ova
  source 1..1217: mol_type = other RNA
ggccgcgggaattcgattaaggtaccatgggctccatcggtgcagcaagcatggaattttgttttgatgtattcaaggagctcaaagtccaccatgccaatgagaacatcttctactgccccattgccatcatgtcagctctagccatggtatacctgggtgcaaaagacagcaccaggacacaaataaataaggttgttcgctttgataaacttccaggattcggagacagtattgaagctcagtgtggcacatctgtaaacgttcactcttcacttagagacatcctcaaccaaatcaccaaaccaaatgatgtttattcgttcagccttgccagtagactttatgctgaagagagatacccaatcctgccagaatacttgcagtgtgtgaaggaactgtatagaggaggcttggaacctatcaactttcaaacagctgcagatcaagccagagagctcatcaattcctgggtagaaagtcagmcaaatggaattatcagaaatgtccttcagccaagctccgtggattctcaaactgcaakggttctggttaatgccattgtcttcaaaggactgtgggagaaagcatttaaggatgaagacacacaagcaatgcctttcagagtgactgagcaagaaagcaaacctgtgcagatgatgtaccagattggtttatttagagtggcatcaatggcttctgagaaaatgaagatcctggagcttccatttgccagtgggacaatgagcatgttggtgctgttgcctgatgaagtctcaggccttgagcagcttgagagtataatcaactttgaaaaactgactgaatggaccagttctaatgttatggaagagaggaagatcaaagtgtacttccctcgcatgaagatggaggaaaaatacaacctcacatctgtcttaatggctatgggcattactgacgtgtttagctcttcagccaatctgtctggcatctcctcagcagagagcctgaagatatctcaagctgtccatgcagcacatgcagaaatcaatgaagcaggcagagaggtggtagggtcagcagaggctggagtggatgctgcaagcgtctctgaagaatttagggctgaccatccattcctcttctgtatcaagcacatcgcaaccaacgccgttctcttctttggcagatgtgtttccccttaaaaagaagagctcttaatcactagtgaattc

SEQ ID NO: 2925 - RNA, 2182 nt, synthetic construct
  misc_feature 1..2182: note = Trp2 mus musculus
  source 1..2182: mol_type = other RNA
gcagcataataagcagtatggctggagcactctgtaaattaactcaattagacagagcctgatttaacaaggaagactggcgagaagctcccctcattaaacctgatgttagaggagcttcggatgaaattaaatcagtgttagttgtttgagtcacataaaattgcatgagcgtgtacacatgtgcacacgtgtaggctctgtgatttaggtgggaattttgagaggagaggaaagggctagaactaaacccaaagaaaaggaaagaagagaagaggaaaggaaagaaaaaagaaaaggcaatttgagtgagtaaaggttccagaactcaggagtggaagacaaggagtaaagtcagacagaaaccaggtgggacgccggccaggcctcccaattaagaaggcatgggccttgtgggatgggggcttctgctgggttgtctgggctgcggaattctgctcagagctcgggctcagtttccccgagtctgcatgaccttggatggcgtgctgaacaaggaatgctgcccgcctctgggtcccgaggcaaccaacatctgtggatttctagagggcagggggcagtgcgcagaggtgcaaacagacaccagaccctggagtggcccttatatccttcgaaaccaggatgaccgtgagcaatggccgagaaaattcttcaaccggacatgcaaatgcacaggaaactttgctggttataattgtggaggctgcaagttcggctggaccggccccgactgtaatcggaagaagccggccatcctaagacggaatatccattccctgactgcccaggagagggagcagttcttgggcgccttagacctggccaagaagagtatccatccagactacgtgatcaccacgcaacactggctggggctgctcggacccaacgggacccagccccagatcgccaactgcagcgtgtatgacttttttgtgtggctccattattattctgttcgagacacattattaggtccaggacgcccctataaggccattgatttctctcaccaagggcctgcctttgtcacgtggcacaggtaccatctgttgtggctggaaagagaactccagagactcactggcaatgagtcctttgcgttgccctactggaactttgcaaccgggaagaacgagtgtgacgtgtgcacagacgactggcttggagcagcaagacaagatgacccaacgctgattagtcggaactcgagattctctacctgggagattgtgtgcgacagcttggatgactacaaccgccgggtcacactgtgtaatggaacctatgaaggtttgctgagaagaaacaaagtaggcagaaataatgagaaactgccaaccttaaaaaatgtgcaagattgcctgtctctccagaagtttgacagccctcccttcttccagaactctaccttcagcttcaggaatgcactggaagggtttgataaagcagacggaacactggactctcaagtcatgaaccttcataacttggctcactccttcctgaatgggaccaatgccttgccacactcagcagccaacgaccctgtgtttgtggtcctccactcttttacagacgccatctttgatgagtggctgaagagaaacaacccttccacagatgcctggcctcaggaactggcacccattggtcacaaccgaatgtataacatggtccccttcttcccaccggtgactaatgaggagctcttcctaaccgcagagcaacttggctacaattacgccgttgatctgtcagaggaagaagctccagtttggtccacaactctctcagtggtcattggaatcctgggagctttcgtcttgctcttggggttgctggcttttcttcaatacagaaggcttcgcaaaggctatgcgcccttaatggagacaggtctcagcagcaagagatacacggaggaagcctagcatgctcctacctggcctgacctgggtagtaactaattacaccgtcgctcatcttgagacaggtggaactcttcagcgtgtgctctttagtagtgatgatgatgatgccttagcaatgacaattatctctagttgctgctttgcttattgtacacagacaaaatgcttgggtcattcaccacggtcaaagtaaggtgtggctagtatatgtgacctttgattag

SEQ ID NO: 2926 - protein, 13 aa, synthetic construct
  REGION 1..13: note = PADRE epitope
AKFVAAWTLKAAA

SEQ ID NO: 2927 - protein, 12 aa, synthetic construct
  REGION 1..12: note = OVA epitope (256-267)
LESIINFEKLTE

SEQ ID NO: 2928 - protein, 9 aa, synthetic construct
  REGION 1..9: note = Trp2 epitope mus musculus
SVYDFFVWL

SEQ ID NO: 2929 - protein, 386 aa, synthetic construct
  REGION 1..386: note = Ovalbumin Ova
MGSIGAASMEFCFDVFKELKVHHANENIFYCPIAIMSALAMVYLGAKDSTRTQINKVVRFDKLPGFGDSIEAQCGTSVNVHSSLRDILNQITKPNDVYSFSLASRLYAEERYPILPEYLQCVKELYRGGLEPINFQTAADQARELINSWVESQTNGIIRNVLQPSSVDSQTAMVLVNAIVFKGLWEKAFKDEDTQAMPFRVTEQESKPVQMMYQIGLFRVASMASEKMKILELPFASGTMSMLVLLPDEVSGLEQLESIINFEKLTEWTSSNVMEERKIKVYLPRMKMEEKYNLTSVLMAMGITDVFSSSANLSGISSAESLKISQAVHAAHAEINEAGREVVGSAEAGVDAASVSEEFRADHPFLFCIKHIATNAVLFFGRCVSP

SEQ ID NO: 2930 - protein, 517 aa, synthetic construct
  REGION 1..517: note = Trp2 mus musculus
MGLVGWGLLLGCLGCGILLRARAQFPRVCMTLDGVLNKECCPPLGPEATNICGFLEGRGQCAEVQTDTRPWSGPYILRNQDDREQWPRKFFNRTCKCTGNFAGYNCGGCKFGWTGPDCNRKKPAILRRNIHSLTAQEREQFLGALDLAKKSIHPDYVITTQHWLGLLGPNGTQPQIANCSVYDFFVWLHYYSVRDTLLGPGRPYKAIDFSHQGPAFVTWHRYHLLWLERELQRLTGNESFALPYWNFATGKNECDVCTDELLGAARQDDPTLISRNSRFSTWEIVCDSLDDYNRRVTLCNGTYEGLLRRNKVGRNNEKLPTLKNVQDCLSLQKFDSPPFFQNSTFSFRNALEGFDKADGTLDSQVMNLHNLAHSFLNGTNALPHSAANDPVFVVLHSFTDAIFDEWLKRNNPSTDAWPQELAPIGHNRMYNMVPFFPPVTNEELFLTAEQLGYNYAVDLSEEEAPVWSTTLSVVIGILGAFVLLLGLLAFLQYRRLRKGYAPLMETGLSSKRYTEEA

SEQ ID NO: 2931 - RNA, 499 nt, synthetic construct
  misc_feature 1..499: note = MmTRP2(180-188)(GC)_Linker(GGGGS)3(GC)_PADRE(GC)
  source 1..499: mol_type = other RNA
ggggcgctgcctacggaggtggcagccatctccttctcggcatcaagcttaccatgtccgtgtacgacttcttcgtgtggctgggcgggggcgggagcggcgggggcggctccgggggcgggggcagcgccaagttcgtggccgcctggaccctgaaggcggccgcctgaggactagtgcatcacatttaaaagcatctcagcctaccatgagaataagagaaagaaaatgaagatcaatagcttattcatctctttttctttttcgttggtgtaaagccaacaccctgtctaaaaaacataaatttctttaatcattttgcctcttttctctgtgcttcaattaataaaaaatggaaagaacctagatctaaaaaaaaaaaaaaaaaaaaaaaaaaaaaaaaaaaaaaaaaaaaaaaaaaaaaaaaaaaaaaaatgcatcccccccccccccccccccccccccccccccaaaggctcttttcagagccaccagaatt

SEQ ID NO: 2932 - RNA, 117 nt, synthetic construct
  misc_feature 1..117: note = MmTRP2(180-188)(GC)_Linker(GGGGS)3(GC)_PADRE(GC)
  source 1..117: mol_type = other RNA
atgtccgtgtacgacttcttcgtgtggctgggcgggggcgggagcggcgggggcggctccgggggcgggggcagcgccaagttcgtggccgcctggaccctgaaggcggccgcctga

SEQ ID NO: 2933 - RNA, 117 nt, synthetic construct
  misc_feature 1..117: note = MmTrp2(942-968)-(G4S)3-PADRE
  source 1..117: mol_type = other RNA
atgagcgtgtatgacttttttgtgtggctcggaggtggtggatccggcggtggcggttctggtggaggtggatctgccaaatttgttgctgcctggaccctgaaagctgctgcttaa

SEQ ID NO: 2934 - protein, 38 aa, synthetic construct
  REGION 1..38: note = MmTrp2(180-188)-(G4S)3-PADRE
MSVYDFFVWLGGGGSGGGGSGGGGSAKFVAAWTLKAAA

SEQ ID NO: 2935 - RNA, 1543 nt, synthetic construct
  misc_feature 1..1543: note = OVA RNActive
  source 1..1543: mol_type = other RNA
ggggcgctgcctacggaggtggcagccatctccttctcggcatcaagcttaccatgggcagcatcggggccgcgtcgatggagttctgcttcgacgtgttcaaggagctgaaggtccaccacgccaacgagaacatcttctactgcccgatcgccatcatgagcgcgctcgccatggtgtacctgggcgccaaggacagcacccggacgcagatcaacaaggtggtccgcttcgacaagctgcccggcttcggggactcgatcgaggcgcagtgcggcaccagcgtgaacgtgcacagctcgctccgggacatcctgaaccagatcaccaagccgaacgacgtctacagcttcagcctggcctcgcggctctacgccgaggagcgctacccgatcctgcccgagtacctgcagtgcgtgaaggagctctaccggggcgggctggagccgatcaacttccagacggcggccgaccaggcccgggagctgatcaacagctgggtggagagccagaccaacggcatcatccgcaacgtcctccagccgtcgagcgtggacagccagaccgcgatggtgctggtcaacgccatcgtgttcaagggcctgtgggagaagacgttcaaggacgaggacacccaggccatgcccttccgggtgaccgagcaggagtcgaagccggtccagatgatgtaccagatcgggctcttccgggtggcgagcatggccagcgagaagatgaagatcctggagctgccgttcgcctcgggcacgatgagcatgctcgtgctgctgcccgacgaggtcagcggcctcgagcagctggagtcgatcatcaacttcgagaagctgaccgagtggaccagcagcaacgtgatggaggagcgcaagatcaaggtgtacctcccgcggatgaagatggaggagaagtacaacctgacgtcggtcctgatggcgatggggatcaccgacgtgttcagcagctcggccaacctcagcggcatcagctcggccgagagcctgaagatcagccaggcggtgcacgccgcccacgcggagatcaacgaggccggccgggaggtcgtggggtcggccgaggcgggcgtggacgccgccagcgtcagcgaggagttccgcgcggaccacccgttcctgttctgcatcaagcacatcgccaccaacgccgtgctcttcttcggccggtgcgtgtcgccctgaccactagtgcatcacatttaaaagcatctcagcctaccatgagaataagagaaagaaaatgaagatcaatagcttattcatctctttttctttttcgttggtgtaaagccaacaccctgtctaaaaaacataaatttctttaatcattttgcctcttttctctgtgcttcaattaataaaaaatggaaagaacctagatctaaaaaaaaaaaaaaaaaaaaaaaaaaaaaaaaaaaaaaaaaaaaaaaaaaaaaaaaaaaaaaaatgcatcccccccccccccccccccccccccccccccaaaggctcttttcagagccaccagaatt

SEQ ID NO: 2936 - RNA, 45 nt, synthetic construct
  misc_feature 1..45: note = (G4S)3 Linker
  source 1..45: mol_type = other RNA
ggaggtggtggatccggcggtggcggttctggtggaggtggatct

SEQ ID NO: 2937 - protein, 15 aa, synthetic construct
  REGION 1..15: note = (G4S)3 Linker
GGGGSGGGGSGGGGS

SEQ ID NO: 2938 - RNA, 20 nt, synthetic construct
  misc_feature 1..20: note = Immune stimulatory RNA
  source 1..20: mol_type = other RNA
ggtttttttttttttttggg

SEQ ID NO: 2939 - RNA, 20 nt, synthetic construct
  misc_feature 1..20: note = Immune stimulatory RNA
  source 1..20: mol_type = other RNA
gggggttttttttttggggg

SEQ ID NO: 2940 - RNA, 40 nt, synthetic construct
  misc_feature 1..40: note = Immune stimulatory RNA
  source 1..40: mol_type = other RNA
gggggttttttttttttttttttttttttttttttggggg

SEQ ID NO: 2941 - RNA, 39 nt, synthetic construct
  misc_feature 1..39: note = Immune stimulatory RNA
  source 1..39: mol_type = other RNA
gtgtgtgtgtgttttttttttttttttgtgtgtgtgtgt

SEQ ID NO: 2942 - RNA, 39 nt, synthetic construct
  misc_feature 1..39: note = Immune stimulatory RNA
  source 1..39: mol_type = other RNA
ggttggttggtttttttttttttttttggttggttggtt

SEQ ID NO: 2943 - RNA, 20 nt, synthetic construct
  misc_feature 1..20: note = Immune stimulatory RNA
  source 1..20: mol_type = other RNA
gggggggggtttgggggggg

SEQ ID NO: 2944 - RNA, 20 nt, synthetic construct
  misc_feature 1..20: note = Immune stimulatory RNA
  source 1..20: mol_type = other RNA
ggggggggttttgggggggg

SEQ ID NO: 2945 - RNA, 20 nt, synthetic construct
  misc_feature 1..20: note = Immune stimulatory RNA
  source 1..20: mol_type = other RNA
gggggggttttttggggggg

SEQ ID NO: 2946 - RNA, 20 nt, synthetic construct
  misc_feature 1..20: note = Immune stimulatory RNA
  source 1..20: mol_type = other RNA
gggggggtttttttgggggg

SEQ ID NO: 2947 - RNA, 20 nt, synthetic construct
  misc_feature 1..20: note = Immune stimulatory RNA
  source 1..20: mol_type = other RNA
ggggggttttttttgggggg

SEQ ID NO: 2948 - RNA, 20 nt, synthetic construct
  misc_feature 1..20: note = Immune stimulatory RNA
  source 1..20: mol_type = other RNA
ggggggtttttttttggggg

SEQ ID NO: 2949 - RNA, 20 nt, synthetic construct
  misc_feature 1..20: note = Immune stimulatory RNA
  source 1..20: mol_type = other RNA
ggggggttttttttttgggg

SEQ ID NO: 2950 - RNA, 20 nt, synthetic construct
  misc_feature 1..20: note = Immune stimulatory RNA
  source 1..20: mol_type = other RNA
gggggtttttttttttgggg

SEQ ID NO: 2951 - RNA, 20 nt, synthetic construct
  misc_feature 1..20: note = Immune stimulatory RNA
  source 1..20: mol_type = other RNA
gggggttttttttttttggg

SEQ ID NO: 2952 - RNA, 20 nt, synthetic construct
  misc_feature 1..20: note = Immune stimulatory RNA
  source 1..20: mol_type = other RNA
ggggtttttttttttttggg

SEQ ID NO: 2953 - RNA, 20 nt, synthetic construct
  misc_feature 1..20: note = Immune stimulatory RNA
  source 1..20: mol_type = other RNA
ggggttttttttttttttgg

SEQ ID NO: 2954 - RNA, 20 nt, synthetic construct
  misc_feature 1..20: note = Immune stimulatory RNA
  source 1..20: mol_type = other RNA
ggttttttttttttttttgg

SEQ ID NO: 2955 - RNA, 20 nt, synthetic construct
  misc_feature 1..20: note = Immune stimulatory RNA
  source 1..20: mol_type = other RNA
gttttttttttttttttttg

SEQ ID NO: 2956 - RNA, 22 nt, synthetic construct
  misc_feature 1..22: note = Immune stimulatory RNA
  source 1..22: mol_type = other RNA
ggggggggggtttggggggggg

SEQ ID NO: 2957 - RNA, 22 nt, synthetic construct
  misc_feature 1..22: note = Immune stimulatory RNA
  source 1..22: mol_type = other RNA
gggggggggttttggggggggg

SEQ ID NO: 2958 - RNA, 22 nt, synthetic construct
  misc_feature 1..22: note = Immune stimulatory RNA
  source 1..22: mol_type = other RNA
ggggggggttttttgggggggg

SEQ ID NO: 2959 - RNA, 22 nt, synthetic construct
  misc_feature 1..22: note = Immune stimulatory RNA
  source 1..22: mol_type = other RNA
ggggggggtttttttggggggg

SEQ ID NO: 2960 - RNA, 22 nt, synthetic construct
  misc_feature 1..22: note = Immune stimulatory RNA
  source 1..22: mol_type = other RNA
gggggggttttttttggggggg

SEQ ID NO: 2961 - RNA, 22 nt, synthetic construct
  misc_feature 1..22: note = Immune stimulatory RNA
  source 1..22: mol_type = other RNA
gggggggtttttttttgggggg

SEQ ID NO: 2962 - RNA, 22 nt, synthetic construct
  misc_feature 1..22: note = Immune stimulatory RNA
  source 1..22: mol_type = other RNA
gggggggttttttttttggggg

SEQ ID NO: 2963 - RNA, 22 nt, synthetic construct
  misc_feature 1..22: note = Immune stimulatory RNA
  source 1..22: mol_type = other RNA
ggggggtttttttttttggggg

SEQ ID NO: 2964 - RNA, 22 nt, synthetic construct
  misc_feature 1..22: note = Immune stimulatory RNA
  source 1..22: mol_type = other RNA
ggggggttttttttttttgggg

SEQ ID NO: 2965 - RNA, 22 nt, synthetic construct
  misc_feature 1..22: note = Immune stimulatory RNA
  source 1..22: mol_type = other RNA
gggggtttttttttttttgggg

SEQ ID NO: 2966 - RNA, 22 nt, synthetic construct
  misc_feature 1..22: note = Immune stimulatory RNA
  source 1..22: mol_type = other RNA
gggggttttttttttttttggg

SEQ ID NO: 2967 - RNA, 22 nt, synthetic construct
  misc_feature 1..22: note = Immune stimulatory RNA
  source 1..22: mol_type = other RNA
gggttttttttttttttttggg

SEQ ID NO: 2968 - RNA, 22 nt, synthetic construct
  misc_feature 1..22: note = Immune stimulatory RNA
  source 1..22: mol_type = other RNA
ggttttttttttttttttttgg

SEQ ID NO: 2969 - RNA, 24 nt, synthetic construct
  misc_feature 1..24: note = Immune stimulatory RNA
  source 1..24: mol_type = other RNA
gggggggggggtttgggggggggg

SEQ ID NO: 2970 - RNA, 24 nt, synthetic construct
  misc_feature 1..24: note = Immune stimulatory RNA
  source 1..24: mol_type = other RNA
ggggggggggttttgggggggggg

SEQ ID NO: 2971 - RNA, 24 nt, synthetic construct
  misc_feature 1..24: note = Immune stimulatory RNA
  source 1..24: mol_type = other RNA
gggggggggttttttggggggggg

SEQ ID NO: 2972 - RNA, 24 nt, synthetic construct
  misc_feature 1..24: note = Immune stimulatory RNA
  source 1..24: mol_type = other RNA
gggggggggtttttttgggggggg

SEQ ID NO: 2973 - RNA, 24 nt, synthetic construct
  misc_feature 1..24: note = Immune stimulatory RNA
  source 1..24: mol_type = other RNA
ggggggggttttttttgggggggg

SEQ ID NO: 2974 - RNA, 24 nt, synthetic construct
  misc_feature 1..24: note = Immune stimulatory RNA
  source 1..24: mol_type = other RNA
ggggggggtttttttttggggggg

SEQ ID NO: 2975 - RNA, 24 nt, synthetic construct
  misc_feature 1..24: note = Immune stimulatory RNA
  source 1..24: mol_type = other RNA
ggggggggttttttttttgggggg

SEQ ID NO: 2976 - RNA, 24 nt, synthetic construct
  misc_feature 1..24: note = Immune stimulatory RNA
  source 1..24: mol_type = other RNA
gggggggtttttttttttgggggg

SEQ ID NO: 2977 - RNA, 24 nt, synthetic construct
  misc_feature 1..24: note = Immune stimulatory RNA
  source 1..24: mol_type = other RNA
gggggggttttttttttttggggg

SEQ ID NO: 2978 - RNA, 24 nt, synthetic construct
  misc_feature 1..24: note = Immune stimulatory RNA
  source 1..24: mol_type = other RNA
ggggggtttttttttttttggggg

SEQ ID NO: 2979 - RNA, 24 nt, synthetic construct
  misc_feature 1..24: note = Immune stimulatory RNA
  source 1..24: mol_type = other RNA
ggggggttttttttttttttgggg

SEQ ID NO: 2980 - RNA, 24 nt, synthetic construct
  misc_feature 1..24: note = Immune stimulatory RNA
  source 1..24: mol_type = other RNA
ggggttttttttttttttttgggg

SEQ ID NO: 2981 - RNA, 24 nt, synthetic construct
  misc_feature 1..24: note = Immune stimulatory RNA
  source 1..24: mol_type = other RNA
gggttttttttttttttttttggg

SEQ ID NO: 2982 - RNA, 32 nt, synthetic construct
  misc_feature 1..32: note = Immune stimulatory RNA
  source 1..32: mol_type = other RNA
gttttttttttttttttttttttttttttttg

SEQ ID NO: 2983 - RNA, 34 nt, synthetic construct
  misc_feature 1..34: note = Immune stimulatory RNA
  source 1..34: mol_type = other RNA
ggttttttttttttttttttttttttttttttgg

SEQ ID NO: 2984 - RNA, 36 nt, synthetic construct
  misc_feature 1..36: note = Immune stimulatory RNA
  source 1..36: mol_type = other RNA
gggttttttttttttttttttttttttttttttggg

SEQ ID NO: 2985 - RNA, 37 nt, synthetic construct
  misc_feature 1..37: note = Immune stimulatory RNA
  source 1..37: mol_type = other RNA
ggggttttttttttttttttttttttttttttttggg

SEQ ID NO: 2986 - RNA, 39 nt, synthetic construct
  misc_feature 1..39: note = Immune stimulatory RNA
  source 1..39: mol_type = other RNA
gggggttttttttttttttttttttttttttttttgggg

SEQ ID NO: 2987 - RNA, 41 nt, synthetic construct
  misc_feature 1..41: note = Immune stimulatory RNA
  source 1..41: mol_type = other RNA
ggggggttttttttttttttttttttttttttttttggggg

SEQ ID NO: 2988 - RNA, 43 nt, synthetic construct
  misc_feature 1..43: note = Immune stimulatory RNA
  source 1..43: mol_type = other RNA
gggggggttttttttttttttttttttttttttttttgggggg

SEQ ID NO: 2989 - RNA, 45 nt, synthetic construct
  misc_feature 1..45: note = Immune stimulatory RNA
  source 1..45: mol_type = other RNA
ggggggggttttttttttttttttttttttttttttttggggggg

SEQ ID NO: 2990 - RNA, 47 nt, synthetic construct
  misc_feature 1..47: note = Immune stimulatory RNA
  source 1..47: mol_type = other RNA
gggggggggttttttttttttttttttttttttttttttgggggggg

SEQ ID NO: 2991-2993 - skipped (3 entries)

SEQ ID NO: 2994 - RNA, 10 nt, synthetic construct
  misc_feature 1..10: note = Immune stimulatory RNA
  source 1..10: mol_type = other RNA
ggttttttgg

SEQ ID NO: 2995 - RNA, 11 nt, synthetic construct
  misc_feature 1..11: note = Immune stimulatory RNA
  source 1..11: mol_type = other RNA
ggtttttttgg

SEQ ID NO: 2996 - RNA, 12 nt, synthetic construct
  misc_feature 1..12: note = Immune stimulatory RNA
  source 1..12: mol_type = other RNA
ggttttttttgg

SEQ ID NO: 2997 - RNA, 13 nt, synthetic construct
  misc_feature 1..13: note = Immune stimulatory RNA
  source 1..13: mol_type = other RNA
ggtttttttttgg

SEQ ID NO: 2998 - RNA, 14 nt, synthetic construct
  misc_feature 1..14: note = Immune stimulatory RNA
  source 1..14: mol_type = other RNA
ggttttttttttgg

SEQ ID NO: 2999 - RNA, 15 nt, synthetic construct
  misc_feature 1..15: note = Immune stimulatory RNA
  source 1..15: mol_type = other RNA
ggtttttttttttgg

SEQ ID NO: 3000 - RNA, 16 nt, synthetic construct
  misc_feature 1..16: note = Immune stimulatory RNA
  source 1..16: mol_type = other RNA
ggttttttttttttgg

SEQ ID NO: 3001 - RNA, 17 nt, synthetic construct
  misc_feature 1..17: note = Immune stimulatory RNA
  source 1..17: mol_type = other RNA
ggtttttttttttttgg

SEQ ID NO: 3002 - RNA, 18 nt, synthetic construct
  misc_feature 1..18: note = Immune stimulatory RNA
  source 1..18: mol_type = other RNA
ggttttttttttttttgg

SEQ ID NO: 3003 - RNA, 19 nt, synthetic construct
  misc_feature 1..19: note = Immune stimulatory RNA
  source 1..19: mol_type = other RNA
ggtttttttttttttttgg

SEQ ID NO: 3004 - skipped

SEQ ID NO: 3005 - RNA, 10 nt, synthetic construct
  misc_feature 1..10: note = Immune stimulatory RNA
  source 1..10: mol_type = other RNA
gggttttggg

SEQ ID NO: 3006 - RNA, 11 nt, synthetic construct
  misc_feature 1..11: note = Immune stimulatory RNA
  source 1..11: mol_type = other RNA
gggtttttggg

SEQ ID NO: 3007 - RNA, 12 nt, synthetic construct
  misc_feature 1..12: note = Immune stimulatory RNA
  source 1..12: mol_type = other RNA
gggttttttggg

SEQ ID NO: 3008 - RNA, 13 nt, synthetic construct
  misc_feature 1..13: note = Immune stimulatory RNA
  source 1..13: mol_type = other RNA
gggtttttttggg

SEQ ID NO: 3009 - RNA, 14 nt, synthetic construct
  misc_feature 1..14: note = Immune stimulatory RNA
  source 1..14: mol_type = other RNA
gggttttttttggg

SEQ ID NO: 3010 - RNA, 15 nt, synthetic construct
  misc_feature 1..15: note = Immune stimulatory RNA
  source 1..15: mol_type = other RNA
gggtttttttttggg

SEQ ID NO: 3011 - RNA, 16 nt, synthetic construct
  misc_feature 1..16: note = Immune stimulatory RNA
  source 1..16: mol_type = other RNA
gggttttttttttggg

SEQ ID NO: 3012 - RNA, 17 nt, synthetic construct
  misc_feature 1..17: note = Immune stimulatory RNA
  source 1..17: mol_type = other RNA
gggtttttttttttggg

SEQ ID NO: 3013 - RNA, 18 nt, synthetic construct
  misc_feature 1..18: note = Immune stimulatory RNA
  source 1..18: mol_type = other RNA
gggttttttttttttggg

SEQ ID NO: 3014 - RNA, 19 nt, synthetic construct
  misc_feature 1..19: note = Immune stimulatory RNA
  source 1..19: mol_type = other RNA
gggtttttttttttttggg

SEQ ID NO: 3015 - RNA, 57 nt, synthetic construct
  misc_feature 1..57: note = Immune stimulatory RNA
  source 1..57: mol_type = other RNA
gggtttttttttttttttgggtttttttttttttttgggtttttttttttttttggg

SEQ ID NO: 3016 - RNA, 42 nt, synthetic construct
  misc_feature 1..42: note = Immune stimulatory RNA
  source 1..42: mol_type = other RNA
gggtttttttttttttttggggggtttttttttttttttggg

SEQ ID NO: 3017 - RNA, 51 nt, synthetic construct
  misc_feature 1..51: note = Immune stimulatory RNA
  source 1..51: mol_type = other RNA
gggtttgggtttgggtttgggtttgggtttgggtttgggtttgggtttggg

SEQ ID NO: 3018 - RNA, 20 nt, synthetic construct
  misc_feature 1..20: note = Immune stimulatory RNA
  source 1..20: mol_type = other RNA
ggtttttttttttttttggg

SEQ ID NO: 3019 - RNA, 57 nt, synthetic construct
  misc_feature 1..57: note = Immune stimulatory RNA
  source 1..57: mol_type = other RNA
ccctttttttttttttttccctttttttttttttttccctttttttttttttttccc

SEQ ID NO: 3020 - RNA, 51 nt, synthetic construct
  misc_feature 1..51: note = Immune stimulatory RNA
  source 1..51: mol_type = other RNA
ccctttccctttccctttccctttccctttccctttccctttccctttccc

SEQ ID NO: 3021 - RNA, 42 nt, synthetic construct
  misc_feature 1..42: note = Immune stimulatory RNA
  source 1..42: mol_type = other RNA
ccctttttttttttttttcccccctttttttttttttttccc

SEQ ID NO: 3022 - RNA, 60 nt, synthetic construct
  misc_feature 1..60: note = Immune stimulatory RNA
  source 1..60: mol_type = other RNA
tagcgaagctcttggacctaggtttttttttttttttgggtgcgttcctagaagtacacg

SEQ ID NO: 3023 - RNA, 120 nt, synthetic construct
  misc_feature 1..120: note = Immune stimulatory RNA
  source 1..120: mol_type = other RNA
tagcgaagctcttggacctaggtttttttttttttttgggtgcgttcctagaagtacacgatcgcttcgagaacctggatccaaaaaaaaaaaaaaacccacgcaaggatcttcatgtgc

SEQ ID NO: 3024 - RNA, 229 nt, synthetic construct
  misc_feature 1..229: note = Immune stimulatory RNA
  source 1..229: mol_type = other RNA
gggagaaagctcaagcttggagcaatgcccgcacattgaggaaaccgagttgcatatctcagagtattggcccccgtgtaggttattcttgacagacagtggagcttattcactcccaggatccgagtcgcatactacggtactggtgacagacctaggtcgtcagttgaccagtccgccactagacgtgagtccgtcaaagcagttagatgttacactctattagatc

SEQ ID NO: 3025 - RNA, 547 nt, synthetic construct
  misc_feature 1..547: note = Immune stimulatory RNA
  source 1..547: mol_type = other RNA
gggagaaagctcaagcttggagcaatgcccgcacattgaggaaaccgagttgcatatctcagagtattggcccccgtgtaggttattcttgacagacagtggagcttattcactcccaggatccgagtcgcatactacggtactggtgacagacctaggtcgtcagttgaccagtccgccactagacgtgagtccgtcaaagcagttagatgttacactctattagatctcggattacagctggaaggagcaggagtagtgttcttgctctaagtaccgagtgtgcccaatacccgatcagcttattaacgaacggctcctcctcttagactgcagcgtaagtgcggaatctggggatcaaattactgactgcctggattaccctcggacatataaccttgtagcacgctgttgctgtataggtgaccaacgcccactcgagtagaccagctctcttagtccggacaatgataggaggcgcggtcaatctacttctggctagttaagaataggctgcaccgacctctataagtagcgtgtcctctag

SEQ ID NO: 3026 - RNA, 1083 nt, synthetic construct
  misc_feature 1..1083: note = Immune stimulatory RNA
  source 1..1083: mol_type = other RNA
gggagaaagctcaagcttggagcaatgcccgcacattgaggaaaccgagttgcatatctcagagtattggcccccgtgtaggttattcttgacagacagtggagcttattcactcccaggatccgagtcgcatactacggtactggtgacagacctaggtcgtcagttgaccagtccgccactagacgtgagtccgtcaaagcagttagatgttacactctattagatctcggattacagctggaaggagcaggagtagtgttcttgctctaagtaccgagtgtgcccaatacccgatcagcttattaacgaacggctcctcctcttagactgcagcgtaagtgcggaatctggggatcaaattactgactgcctggattaccctcggacatataaccttgtagcacgctgttgctgtataggtgaccaacgcccactcgagtagaccagctctcttagtccggacaatgataggaggcgcggtcaatctacttctggctagttaagaataggctgcaccgacctctataagtagcgtgtcctctagagctacgcaggttcgcaataaaagcgttgattagtgtgcatagaacagacctcttattcggtgaaacgccagaatgctaaattccaataactcttcccaaaacgcgtacggccgaagacgcgcgcttatcttgtgtacgttctcgcacatggaagaatcagcgggcatggtggtagggcaataggggagctgggtagcagcgaaaaagggcccctgcgcacgtagcttcgctgttcgtctgaaacaacccggcatccgttgtagcgatcccgttatcagtgttattcttgtgcgcactaagattcatggtgtagtcgacaataacagcgtcttggcagattctggtcacgtgccctatgcccgggcttgtgcctctcaggtgcacagcgatacttaaagccttcaaggtactcgacgtgggtaccgattcgtgacacttcctaagattattccactgtgttagccccgcaccgccgacctaaactggtccaatgtatacgcattcgctgagcggatcgataataaaagcttgaatt

SEQ ID NO: 3027 - RNA, 229 nt, synthetic construct
  misc_feature 1..229: note = Immune stimulatory RNA
  source 1..229: mol_type = other RNA
gggagaaagctcaagcttatccaagtaggctggtcacctgtacaacgtagccggtattttttttttttttttttttttgaccgtctcaaggtccaagttagtctgcctataaaggtgcggatccacagctgatgaaagacttgtgcggtacggttaatctcccctttttttttttttttttttttagtaaatgcgtctactgaatccagcgatgatgctggcccagatc

SEQ ID NO: 3028 - RNA, 546 nt, synthetic construct
  misc_feature 1..546: note = Immune stimulatory RNA
  source 1..546: mol_type = other RNA
gggagaaagctcaagcttatccaagtaggctggtcacctgtacaacgtagccggtattttttttttttttttttttttgaccgtctcaaggtccaagttagtctgcctataaaggtgcggatccacagctgatgaaagacttgtgcggtacggttaatctcccctttttttttttttttttttttagtaaatgcgtctactgaatccagcgatgatgctggcccagatcttcgaccacaagtgcatatagtagtcatcgagggtcgcctttttttttttttttttttttttggcccagttctgagacttcgctagagactacagttacagctgcagtagtaaccactgcggctattgcaggaaatcccgttcaggtttttttttttttttttttttccgctcactatgattaagaaccaggtggagtgtcactgctctcgaggtctcacgagagcgctcgatacagtccttggaagaatcttttttttttttttttttttttgtgcgacgatcacagagaacttctattcatgcaggtctgctcta

SEQ ID NO: 3029 - RNA, 547 nt, synthetic construct
  misc_feature 1..547: note = Immune stimulatory RNA
  source 1..547: mol_type = other RNA
gggagaaagctcaagcttatccaagtaggctggtcacctgtacaacgtagccggtattttttttttttttttttttttgaccgtctcaaggtccaagttagtctgcctataaaggtgcggatccacagctgatgaaagacttgtgcggtacggttaatctcccctttttttttttttttttttttagtaaatgcgtctactgaatccagcgatgatgctggcccagatcttcgaccacaagtgcatatagtagtcatcgagggtcgcctttttttttttttttttttttttggcccagttctgagacttcgctagagactacagttacagctgcagtagtaaccactgcggctattgcaggaaatcccgttcaggtttttttttttttttttttttccgctcactatgattaagaaccaggtggagtgtcactgctctcgaggtctcacgagagcgctcgatacagtccttggaagaatcttttttttttttttttttttttgtgcgacgatcacagagaacttctattcatgcaggtctgctctag

SEQ ID NO: 3030 - RNA, 1083 nt, synthetic construct
  misc_feature 1..1083: note = Immune stimulatory RNA
  source 1..1083: mol_type = other RNA
gggagaaagctcaagcttatccaagtaggctggtcacctgtacaacgtagccggtattttttttttttttttttttttgaccgtctcaaggtccaagttagtctgcctataaaggtgcggatccacagctgatgaaagacttgtgcggtacggttaatctcccctttttttttttttttttttttagtaaatgcgtctactgaatccagcgatgatgctggcccagatcttcgaccacaagtgcatatagtagtcatcgagggtcgcctttttttttttttttttttttttggcccagttctgagacttcgctagagactacagttacagctgcagtagtaaccactgcggctattgcaggaaatcccgttcaggtttttttttttttttttttttccgctcactatgattaagaaccaggtggagtgtcactgctctcgaggtctcacgagagcgctcgatacagtccttggaagaatcttttttttttttttttttttttgtgcgacgatcacagagaacttctattcatgcaggtctgctctagaacgaactgacctgacgcctgaacttatgagcgtgcgtatttttttttttttttttttttttcctcccaacaaatgtcgatcaatagctgggctgttggagacgcgtcagcaaatgccgtggctccataggacgtgtagacttctatttttttttttttttttttttcccgggaccacaaataatattcttgcttggttgggcgcaagggccccgtatcaggtcataaacgggtacatgttgcacaggctcctttttttttttttttttttttttcgctgagttattccggtctcaaaagacggcagacgtcagtcgacaacacggtctaaagcagtgctacaatctgccgtgttcgtgttttttttttttttttttttgtgaacctacacggcgtgcactgtagttcgcaattcatagggtaccggctcagagttatgccttggttgaaaactgcccagcatacttttttttttttttttttttcatattcccatgctaagcaagggatgccgcgagtcatgttaagcttgaatt

SEQ ID NO: 3031 - RNA, 59 nt, synthetic construct
  misc_feature 1..59: note = Immune stimulatory RNA
  source 1..59: mol_type = other RNA
tagcgaagctcttggacctaccttttttttttttttccctgcgttcctagaagtacacg

SEQ ID NO: 3032 - RNA, 120 nt, synthetic construct
  misc_feature 1..120: note = Immune stimulatory RNA
  source 1..120: mol_type = other RNA
tagcgaagctcttggacctacctttttttttttttttccctgcgttcctagaagtacacgatcgcttcgagaacctggatggaaaaaaaaaaaaaaagggacgcaaggatcttcatgtgc

SEQ ID NO: 3033 - skipped

SEQ ID NO: 3034 - RNA, 10 nt, synthetic construct
  misc_feature 1..10: note = Cys(Arg8)Cys
  source 1..10: mol_type = other RNA
crrrrrrrrc

SEQ ID NO: 3035 - RNA, 11 nt, synthetic construct
  misc_feature 1..11: note = Cys(Arg9)Cys
  source 1..11: mol_type = other RNA
crrrrrrrrrc

SEQ ID NO: 3036 - RNA, 12 nt, synthetic construct
  misc_feature 1..12: note = Cys(Arg10)Cys
  source 1..12: mol_type = other RNA
crrrrrrrrrrc

SEQ ID NO: 3037 - RNA, 13 nt, synthetic construct
  misc_feature 1..13: note = Cys(Arg11)Cys
  source 1..13: mol_type = other RNA
crrrrrrrrrrrc

SEQ ID NO: 3038 - RNA, 15 nt, synthetic construct
  misc_feature 1..15: note = Cys(Arg13)Cys
  source 1..15: mol_type = other RNA
crrrrrrrrrrrrrc

SEQ ID NO: 3039 - RNA, 16 nt, synthetic construct
  misc_feature 1..16: note = Cys(Arg14)Cys
  source 1..16: mol_type = other RNA
crrrrrrrrrrrrrrc

SEQ ID NO: 3040 - RNA, 17 nt, synthetic construct
  misc_feature 1..17: note = Cys(Arg15)Cys
  source 1..17: mol_type = other RNA
crrrrrrrrrrrrrrrc

SEQ ID NO: 3041 - RNA, 18 nt, synthetic construct
  misc_feature 1..18: note = Cys(Arg16)Cys
  source 1..18: mol_type = other RNA
crrrrrrrrrrrrrrrrc

SEQ ID NO: 3042 - RNA, 19 nt, synthetic construct
  misc_feature 1..19: note = Cys(Arg17)Cys
  source 1..19: mol_type = other RNA
crrrrrrrrrrrrrrrrrc

SEQ ID NO: 3043 - RNA, 20 nt, synthetic construct
  misc_feature 1..20: note = Cys(Arg18)Cys
  source 1..20: mol_type = other RNA
crrrrrrrrrrrrrrrrrrc

SEQ ID NO: 3044 - RNA, 21 nt, synthetic construct
  misc_feature 1..21: note = Cys(Arg19)Cys
  source 1..21: mol_type = other RNA
crrrrrrrrrrrrrrrrrrrc

SEQ ID NO: 3045 - RNA, 22 nt, synthetic construct
  misc_feature 1..22: note = Cys(Arg20)Cys
  source 1..22: mol_type = other RNA
crrrrrrrrrrrrrrrrrrrrc

SEQ ID NO: 3046 - RNA, 14 nt, synthetic construct
  misc_feature 1..14: note = Cys(Arg12)Cys
  source 1..14: mol_type = other RNA
crrrrrrrrrrrrc

SEQ ID NO: 3047 - RNA, 13 nt, synthetic construct
  misc_feature 1..13: note = Cys(Arg12)
  source 1..13: mol_type = other RNA
crrrrrrrrrrrr

SEQ ID NO: 3048-3049 - skipped (2 entries)

SEQ ID NO: 3050 - RNA, 10 nt, synthetic construct
  misc_feature 1..10: note = Cys(Arg9)
  source 1..10: mol_type = other RNA
crrrrrrrrr

SEQ ID NO: 3051 - RNA, 11 nt, synthetic construct
  misc_feature 1..11: note = Cys(Arg10)
  source 1..11: mol_type = other RNA
crrrrrrrrrr

SEQ ID NO: 3052 - RNA, 12 nt, synthetic construct
  misc_feature 1..12: note = Cys(Arg11)
  source 1..12: mol_type = other RNA
crrrrrrrrrrr

SEQ ID NO: 3053 - RNA, 14 nt, synthetic construct
  misc_feature 1..14: note = Cys(Arg13)
  source 1..14: mol_type = other RNA
crrrrrrrrrrrrr

SEQ ID NO: 3054 - RNA, 15 nt, synthetic construct
  misc_feature 1..15: note = Cys(Arg14)
  source 1..15: mol_type = other RNA
crrrrrrrrrrrrrr

SEQ ID NO: 3055 - RNA, 16 nt, synthetic construct
  misc_feature 1..16: note = Cys(Arg15)
  source 1..16: mol_type = other RNA
crrrrrrrrrrrrrrr

SEQ ID NO: 3056 - RNA, 17 nt, synthetic construct
  misc_feature 1..17: note = Cys(Arg16)
  source 1..17: mol_type = other RNA
crrrrrrrrrrrrrrrr

SEQ ID NO: 3057 - RNA, 18 nt, synthetic construct
  misc_feature 1..18: note = Cys(Arg17)
  source 1..18: mol_type = other RNA
crrrrrrrrrrrrrrrrr

SEQ ID NO: 3058 - RNA, 19 nt, synthetic construct
  misc_feature 1..19: note = Cys(Arg18)
  source 1..19: mol_type = other RNA
crrrrrrrrrrrrrrrrrr

SEQ ID NO: 3059 - RNA, 20 nt, synthetic construct
  misc_feature 1..20: note = Cys(Arg19)
  source 1..20: mol_type = other RNA
crrrrrrrrrrrrrrrrrrr

SEQ ID NO: 3060 - RNA, 21 nt, synthetic construct
  misc_feature 1..21: note = Cys(Arg20)
  source 1..21: mol_type = other RNA
crrrrrrrrrrrrrrrrrrrr

SEQ ID NO: 3061 - DNA, 42 bp, synthetic construct
  misc_feature 1..42: note = RPL32 (32L4) 5-UTR
  source 1..42: mol_type = other DNA
ggcgctgcctacggaggtggcagccatctccttctcggcatc

SEQ ID NO: 3062 - RNA, 42 nt, synthetic construct
  misc_feature 1..42: note = RPL32 (32L4) 5-UTR
  source 1..42: mol_type = other RNA
ggcgctgcctacggaggtggcagccatctccttctcggcatc

SEQ ID NO: 3063 - DNA, 75 bp, synthetic construct
  misc_feature 1..75: note = ATP5A1 5-UTR
  source 1..75: mol_type = other DNA
gcggctcggccattttgtcccagtcagtccggaggctgcggctgcagaagtaccgcctgcggagtaactgcaaag

SEQ ID NO: 3064 - RNA, 75 nt, synthetic construct
  misc_feature 1..75: note = ATP5A1 5-UTR
  source 1..75: mol_type = other RNA
gcggctcggccattttgtcccagtcagtccggaggctgcggctgcagaagtaccgcctgcggagtaactgcaaag

SEQ ID NO: 3065 - DNA, 110 bp, synthetic construct
  misc_feature 1..110: note = HBA1 3-UTR
  source 1..110: mol_type = other DNA
gctggagcctcggtggccatgcttcttgccccttgggcctccccccagcccctcctccccttcctgcacccgtacccccgtggtctttgaataaagtctgagtgggcggc

SEQ ID NO: 3066 - RNA, 110 nt, synthetic construct
  misc_feature 1..110: note = HBA1 3-UTR
  source 1..110: mol_type = other RNA
gctggagcctcggtggccatgcttcttgccccttgggcctccccccagcccctcctccccttcctgcacccgtacccccgtggtctttgaataaagtctgagtgggcggc

SEQ ID NO: 3067 - DNA, 108 bp, synthetic construct
  misc_feature 1..108: note = HBA2 3-UTR
  source 1..108: mol_type = other DNA
gctggagcctcggtagccgttcctcctgcccgctgggcctcccaacgggccctcctcccctccttgcaccggcccttcctggtctttgaataaagtctgagtgggcag

SEQ ID NO: 3068 - RNA, 108 nt, synthetic construct
  misc_feature 1..108: note = HBA2 3-UTR
  source 1..108: mol_type = other RNA
gctggagcctcggtagccgttcctcctgcccgctgggcctcccaacgggccctcctcccctccttgcaccggcccttcctggtctttgaataaagtctgagtgggcag

SEQ ID NO: 3069 - DNA, 132 bp, synthetic construct
  misc_feature 1..132: note = HBB 3-UTR
  source 1..132: mol_type = other DNA
gctcgctttcttgctgtccaatttctattaaaggttcctttgttccctaagtccaactactaaactgggggatattatgaagggccttgagcatctggattctgcctaataaaaaacatttattttcattgc

SEQ ID NO: 3070 - RNA, 132 nt, synthetic construct
  misc_feature 1..132: note = HBB 3-UTR
  source 1..132: mol_type = other RNA
gctcgctttcttgctgtccaatttctattaaaggttcctttgttccctaagtccaactactaaactgggggatattatgaagggccttgagcatctggattctgcctaataaaaaacatttattttcattgc

SEQ ID NO: 3071 - DNA, 44 bp, synthetic construct
  misc_feature 1..44: note = muag 3-UTR
  source 1..44: mol_type = other DNA
gcccgatgggcctcccaacgggccctcctcccctccttgcaccg

SEQ ID NO: 3072 - RNA, 44 nt, synthetic construct
  misc_feature 1..44: note = muag 3-UTR
  source 1..44: mol_type = other RNA
gcccgatgggcctcccaacgggccctcctcccctccttgcaccg

SEQ ID NO: 3073 - DNA, 186 bp, synthetic construct
  misc_feature 1..186: note = human albumin 3-UTR
  source 1..186: mol_type = other DNA
catcacatttaaaagcatctcagcctaccatgagaataagagaaagaaaatgaagatcaaaagcttattcatctgtttttctttttcgttggtgtaaagccaacaccctgtctaaaaaacataaatttctttaatcattttgcctcttttctctgtgcttcaattaataaaaaatggaaagaatct

SEQ ID NO: 3074 - RNA, 186 nt, synthetic construct
  misc_feature 1..186: note = human albumin 3-UTR
  source 1..186: mol_type = other RNA
catcacatttaaaagcatctcagcctaccatgagaataagagaaagaaaatgaagatcaaaagcttattcatctgtttttctttttcgttggtgtaaagccaacaccctgtctaaaaaacataaatttctttaatcattttgcctcttttctctgtgcttcaattaataaaaaatggaaagaatct

SEQ ID NO: 3075 - DNA, 186 bp, synthetic construct
  misc_feature 1..186: note = albumin7 3-UTR
  source 1..186: mol_type = other DNA
catcacatttaaaagcatctcagcctaccatgagaataagagaaagaaaatgaagatcaatagcttattcatctctttttctttttcgttggtgtaaagccaacaccctgtctaaaaaacataaatttctttaatcattttgcctcttttctctgtgcttcaattaataaaaaatggaaagaacct

SEQ ID NO: 3076 - RNA, 186 nt, synthetic construct
  misc_feature 1..186: note = albumin7 3-UTR
  source 1..186: mol_type = other RNA
catcacatttaaaagcatctcagcctaccatgagaataagagaaagaaaatgaagatcaatagcttattcatctctttttctttttcgttggtgtaaagccaacaccctgtctaaaaaacataaatttctttaatcattttgcctcttttctctgtgcttcaattaataaaaaatggaaagaacct

SEQ ID NO: 3077 - DNA, 187 bp, synthetic construct
  misc_feature 1..187: note = ALB7 3-UTR
  source 1..187: mol_type = other DNA
gcatcacatttaaaagcatctcagcctaccatgagaataagagaaagaaaatgaagatcaatagcttattcatctctttttctttttcgttggtgtaaagccaacaccctgtctaaaaaacataaatttctttaatcattttgcctcttttctctgtgcttcaattaataaaaaatggaaagaacct

SEQ ID NO: 3078 - RNA, 187 nt, synthetic construct
  misc_feature 1..187: note = ALB7 3-UTR
  source 1..187: mol_type = other RNA
gcatcacatttaaaagcatctcagcctaccatgagaataagagaaagaaaatgaagatcaatagcttattcatctctttttctttttcgttggtgtaaagccaacaccctgtctaaaaaacataaatttctttaatcattttgcctcttttctctgtgcttcaattaataaaaaatggaaagaacct

SEQ ID NO: 3079 - DNA, 24 bp, synthetic construct
  misc_feature 1..24: note = hSL
  source 1..24: mol_type = other DNA
caaaggctcttttcagagccacca

SEQ ID NO: 3080 - RNA, 24 nt, synthetic construct
  misc_feature 1..24: note = hSL
  source 1..24: mol_type = other RNA
caaaggctcttttcagagccacca

SEQ ID NO: 3081 - DNA, 13 bp, synthetic construct
  misc_feature 1..13: note = Kozak sequence
  source 1..13: mol_type = other DNA
gccgccaccatgg

SEQ ID NO: 3082 - RNA, 13 nt, synthetic construct
  misc_feature 1..13: note = Kozak sequence
  source 1..13: mol_type = other RNA
gccgccaccatgg

SEQ ID NO: 3083 - protein, 13 aa, synthetic construct
  REGION 1..13: note = PADRE
AKFVAAWTLKAAA

SEQ ID NO: 3084 - protein, 18 aa, synthetic construct
  REGION 1..18: note = Hepatitis C virus_Core
MSTNPKPQIKTKRNTNRR

SEQ ID NO: 3085 - protein, 20 aa, synthetic construct
  REGION 1..20: note = Hepatitis C virus_Core
MSTNPKPQRKTKRNTNRRQD

SEQ ID NO: 3086 - protein, 20 aa, synthetic construct
  REGION 1..20: note = Hepatitis C virus_Core
DVKFPGGGQIVGGVYLLPRR

SEQ ID NO: 3087 - protein, 15 aa, synthetic construct
  REGION 1..15: note = Hepatitis C virus_Core
VGGVYLLPRRGPRLG

SEQ ID NO: 3088 - protein, 20 aa, synthetic construct
  REGION 1..20: note = Hepatitis C virus_Core
VGGVYLLPRRGPRLGVRATR

SEQ ID NO: 3089 - protein, 15 aa, synthetic construct
  REGION 1..15: note = Hepatitis C virus_Core
RRRSRNLGKVIDTLT

SEQ ID NO: 3090 - protein, 15 aa, synthetic construct
  REGION 1..15: note = Hepatitis C virus_Core
TLTCGFADLMGYIPL

SEQ ID NO: 3091 - protein, 15 aa, synthetic construct
  REGION 1..15: note = Hepatitis C virus_Core
GAPLGGAARALAHGV

SEQ ID NO: 3092 - protein, 20 aa, synthetic construct
  REGION 1..20: note = Hepatitis C virus_Core
GAPLGGAARALAHGVRVLED

SEQ ID NO: 3093 - protein, 15 aa, synthetic construct
  REGION 1..15: note = Hepatitis C virus_Core
APLGGAARALAHGVR

SEQ ID NO: 3094 - protein, 15 aa, synthetic construct
  REGION 1..15: note = Hepatitis C virus_Core
SFSIFLLALLSCLTI

SEQ ID NO: 3095 - protein, 11 aa, synthetic construct
  REGION 1..11: note = Hepatitis C virus_Core
LLSCLTIPASA

SEQ ID NO: 3096 - protein, 15 aa, synthetic construct
  REGION 1..15: note = Hepatitis C virus_E1
HVTNDCPNSSIVYEA

SEQ ID NO: 3097 - protein, 15 aa, synthetic construct
  REGION 1..15: note = Hepatitis C virus_E1
CPNSSIVYEAHDAIL

SEQ ID NO: 3098 - protein, 15 aa, synthetic construct
  REGION 1..15: note = Hepatitis C virus_E1
SRCWVALTPTLAARN

SEQ ID NO: 3099 - protein, 15 aa, synthetic construct
  REGION 1..15: note = Hepatitis C virus_E1
RCWVAMTPTVATRDG

SEQ ID NO: 3100 - protein, 15 aa, synthetic construct
  REGION 1..15: note = Hepatitis C virus_E1
MTPTVATRDGKLPAT

SEQ ID NO: 3101 - protein, 15 aa, synthetic construct
  REGION 1..15: note = Hepatitis C virus_E1
KLPATQLRRHIDLLV

SEQ ID NO: 3102 - protein, 15 aa, synthetic construct
  REGION 1..15: note = Hepatitis C virus_E1
TIRRHVDLLVGAAAF

SEQ ID NO: 3103 - protein, 15 aa, synthetic construct
  REGION 1..15: note = Hepatitis C virus_E1
GSATLCSALYVGDLC

SEQ ID NO: 3104 - protein, 15 aa, synthetic construct
  REGION 1..15: note = Hepatitis C virus_E1
GSVFLIGQLFTFSPR

SEQ ID NO: 3105 - protein, 15 aa, synthetic construct
  REGION 1..15: note = Hepatitis C virus_E1
TFSPRRHQTVQDCNC

SEQ ID NO: 3106 - protein, 15 aa, synthetic construct
  REGION 1..15: note = Hepatitis C virus_E1
SIYPGHITGHRMAWD

SEQ ID NO: 3107 - protein, 15 aa, synthetic construct
  REGION 1..15: note = Hepatitis C virus_E1
HITGHRMAWDMMMNW

SEQ ID NO: 3108 - protein, 15 aa, synthetic construct
  REGION 1..15: note = Hepatitis C virus_E1
HVSGHRMAWDMMMNW

SEQ ID NO: 3109 - protein, 15 aa, synthetic construct
  REGION 1..15: note = Hepatitis C virus_E1
MMMNWSPTAALVMAQ

SEQ ID NO: 3110 - protein, 15 aa, synthetic construct
  REGION 1..15: note = Hepatitis C virus_E1
SPTAALVVSQLLRIP

SEQ ID NO: 3111 - protein, 15 aa, synthetic construct
  REGION 1..15: note = Hepatitis C virus_E1
QAILDMIAGAHWGVL

SEQ ID NO: 3112 - protein, 15 aa, synthetic construct
  REGION 1..15: note = Hepatitis C virus_E1
HWGVLAGLAYYSMVG

SEQ ID NO: 3113 - protein, 15 aa, synthetic construct
  REGION 1..15: note = Hepatitis C virus_E1
FSMVGNWAKVLVVLL

SEQ ID NO: 3114 - protein, 15 aa, synthetic construct
  REGION 1..15: note = Hepatitis C virus_E1
NWAKVLVVLLLFAGV

SEQ ID NO: 3115 - protein, 18 aa, synthetic construct
  REGION 1..18: note = Hepatitis C virus_E2
GFATQRLTSLFALGPSQK

SEQ ID NO: 3116 - protein, 16 aa, synthetic construct
  REGION 1..16: note = Hepatitis C virus_E2
CLWMMLLIAQAEQALL

SEQ ID NO: 3117 - protein, 15 aa, synthetic construct
  REGION 1..15: note = Hepatitis C virus_NS2
AMDREMAASCGGAVF

SEQ ID NO: 3118 - protein, 15 aa, synthetic construct
  REGION 1..15: note = Hepatitis C virus_NS2
RDAIILLTCAVHPEL

SEQ ID NO: 3119 - protein, 15 aa, synthetic construct
  REGION 1..15: note = Hepatitis C virus_NS2
GPLMVLQAGIIRAPY

SEQ ID NO: 3120 - protein, 20 aa, synthetic construct
  REGION 1..20: note = Hepatitis C virus_NS2
PVSARRGREILLGPADGMVS

SEQ ID NO: 3121 - protein, 15 aa, synthetic construct
  REGION 1..15: note = Hepatitis C virus_NS3
GQGWRLLAPITAYSQ

SEQ ID NO: 3122 - protein, 15 aa, synthetic construct
  REGION 1..15: note = Hepatitis C virus_NS3
GPVIQMYTNVDQDLV

SEQ ID NO: 3123 - protein, 15 aa, synthetic construct
  REGION 1..15: note = Hepatitis C virus_NS3
QGSRSLTPCTCGSSD

SEQ ID NO: 3124 - protein, 15 aa, synthetic construct
  REGION 1..15: note = Hepatitis C virus_NS3
SSDLYLVTRHADVIP

SEQ ID NO: 3125 - protein, 20 aa, synthetic construct
  REGION 1..20: note = Hepatitis C virus_NS3
YLVTRHADVIPVRRRGDSRG

SEQ ID NO: 3126 - protein, 15 aa, synthetic construct
  REGION 1..15: note = Hepatitis C virus_NS3
SLLSPRPISYLKGSS

SEQ ID NO: 3127 - protein, 15 aa, synthetic construct
  REGION 1..15: note = Hepatitis C virus_NS3
CPAGHAVGIFRAAVC

SEQ ID NO: 3128 - protein, 20 aa, synthetic construct
  REGION 1..20: note = Hepatitis C virus_NS3
LETTMRSPVFTDNSSPPVVP

SEQ ID NO: 3129 - protein, 14 aa, synthetic construct
  REGION 1..14: note = Hepatitis C virus_NS3
SPVFTDNSSPAVPQ

SEQ ID NO: 3130 - protein, 15 aa, synthetic construct
  REGION 1..15: note = Hepatitis C virus_NS3
VPQSFQVAHLHAPTG

SEQ ID NO: 3131 - protein, 15 aa, synthetic construct
  REGION 1..15: note = Hepatitis C virus_NS3
FQVAHLHAPTGSGKS

SEQ ID NO: 3132 - protein, 15 aa, synthetic construct
  REGION 1..15: note = Hepatitis C virus_NS3
KVPAAYAAQGYKVLV

SEQ ID NO: 3133 - protein, 20 aa, synthetic construct
  REGION 1..20: note = Hepatitis C virus_NS3
PAAYAAQGYKVLVLNPSVAA

SEQ ID NO: 3134 - protein, 14 aa, synthetic construct
  REGION 1..14: note = Hepatitis C virus_NS3
AAKGYKVLVLPSVA

SEQ ID NO: 3135 - protein, 15 aa, synthetic construct
  REGION 1..15: note = Hepatitis C virus_NS3
AQGYKVLVLNPSVAA

SEQ ID NO: 3136 - protein, 15 aa, synthetic construct
  REGION 1..15: note = Hepatitis C virus_NS3
QGYKVLVLNPSVAAT

SEQ ID NO: 3137 - protein, 14 aa, synthetic construct
  REGION 1..14: note = Hepatitis C virus_NS3
GYKVLVLNPSVAAT

SEQ ID NO: 3138 - protein, 18 aa, synthetic construct
  REGION 1..18: note = Hepatitis C virus_NS3
GYKVLVLNPSVAATLGFG

SEQ ID NO: 3139 - protein, 20 aa, synthetic construct
  REGION 1..20: note = Hepatitis C virus_NS3
GYKVLVLNPSVAATLGFGAY

SEQ ID NO: 3140 - protein, 9 aa, synthetic construct
  REGION 1..9: note = Hepatitis C virus_NS3
VLVLNPSVA

SEQ ID NO: 3141 - protein, 20 aa, synthetic construct
  REGION 1..20: note = Hepatitis C virus_NS3
ITYSTYGKFLADGGCSGGAY

SEQ ID NO: 3142 - protein, 18 aa, synthetic construct
  REGION 1..18: note = Hepatitis C virus_NS3
YSTYGKFLADAGCSGGAY

SEQ ID NO: 3143 - protein, 15 aa, synthetic construct
  REGION 1..15: note = Hepatitis C virus_NS3
TYGKFLADGGCSGGA

SEQ ID NO: 3144 - protein, 18 aa, synthetic construct
  REGION 1..18: note = Hepatitis C virus_NS3
LADAGCSGGAYDIIICDE

SEQ ID NO: 3145 - protein, 15 aa, synthetic construct
  REGION 1..15: note = Hepatitis C virus_NS3
GGAYDIIICDECHST

SEQ ID NO: 3146 - protein, 15 aa, synthetic construct
  REGION 1..15: note = Hepatitis C virus_NS3
DIIICDECHSTDATS

SEQ ID NO: 3147 - protein, 20 aa, synthetic construct
  REGION 1..20: note = Hepatitis C virus_NS3
TDATSILGIGTVLDQAETAG

SEQ ID NO: 3148 - protein, 15 aa, synthetic construct
  REGION 1..15: note = Hepatitis C virus_NS3
ATSILGIGTVLDQAE

SEQ ID NO: 3149 - protein, 18 aa, synthetic construct
  REGION 1..18: note = Hepatitis C virus_NS3
VIKGGRHLIFCHSKKKCD

SEQ ID NO: 3150 - protein, 18 aa, synthetic construct
  REGION 1..18: note = Hepatitis C virus_NS3
VIKGGRHLIFCHSHHHCD

SEQ ID NO: 3151 - protein, 15 aa, synthetic construct
  REGION 1..15: note = Hepatitis C virus_NS3
GGRHLIFCHSKKKCD

SEQ ID NO: 3152 - protein, 10 aa, synthetic construct
  REGION 1..10: note = Hepatitis C virus_NS3
GRHLIFCHSK

SEQ ID NO: 3153 - protein, 11 aa, synthetic construct
  REGION 1..11: note = Hepatitis C virus_NS3
GRHLIFCHSKR

SEQ ID NO: 3154 - protein, 15 aa, synthetic construct
  REGION 1..15: note = Hepatitis C virus_NS3
KCDELAAKLVALGIN

SEQ ID NO: 3155 - protein, 15 aa, synthetic construct
  REGION 1..15: note = Hepatitis C virus_NS3
LAAKLVALGINAVAY

SEQ ID NO: 3156 - protein, 15 aa, synthetic construct
  REGION 1..15: note = Hepatitis C virus_NS3
GINAVAYYRGLDVSV

SEQ ID NO: 3157 - protein, 20 aa, synthetic construct
  REGION 1..20: note = Hepatitis C virus_NS3
GINAVAYYRGLDVSVIPTSG

SEQ ID NO: 3158 - protein, 11 aa, synthetic construct
  REGION 1..11: note = Hepatitis C virus_NS3
VAYYRGLDVSV

SEQ ID NO: 3159 - protein, 15 aa, synthetic construct
  REGION 1..15: note = Hepatitis C virus_NS3
VAYYRGLDVSVIPTS

SEQ ID NO: 3160 - protein, 18 aa, synthetic construct
  REGION 1..18: note = Hepatitis C virus_NS3
IPTNGDVVVVSTDALMTG

SEQ ID NO: 3161 - protein, 15 aa, synthetic construct
  REGION 1..15: note = Hepatitis C virus_NS3
ALMTGYTGDFDSVID

SEQ ID NO: 3162 - protein, 18 aa, synthetic construct
  REGION 1..18: note = Hepatitis C virus_NS3
DFDSVIDCNTCVTQTVDF

SEQ ID NO: 3163 - protein, 15 aa, synthetic construct
  REGION 1..15: note = Hepatitis C virus_NS3
VIDCNTCVTQTVDFS

SEQ ID NO: 3164 - protein, 15 aa, synthetic construct
  REGION 1..15: note = Hepatitis C virus_NS3
NTCVTQTVDFSLDPT

SEQ ID NO: 3165 - protein, 15 aa, synthetic construct
  REGION 1..15: note = Hepatitis C virus_NS3
TQTVDFSLDPTFTIE

SEQ ID NO: 3166 - protein, 15 aa, synthetic construct
  REGION 1..15: note = Hepatitis C virus_NS3
EQYVDFSLDPTFSIE

SEQ ID NO: 3167 - protein, 18 aa, synthetic construct
  REGION 1..18: note = Hepatitis C virus_NS3
PTFTIETTTLPQDAVSRT

SEQ ID NO: 3168 - protein, 15 aa, synthetic construct
  REGION 1..15: note = Hepatitis C virus_NS3
MFDSSVLCECYDAGC

SEQ ID NO: 3169 - protein, 20 aa, synthetic construct
  REGION 1..20: note = Hepatitis C virus_NS3
YDAGCAWYELTPAETTVRLR

SEQ ID NO: 3170 - protein, 17 aa, synthetic construct
  REGION 1..17: note = Hepatitis C virus_NS3
MPAETTVRLRAYMNTPG

SEQ ID NO: 3171 - protein, 20 aa, synthetic construct
  REGION 1..20: note = Hepatitis C virus_NS3
TPAETTVRLRAYMNTPGLPV

SEQ ID NO: 3172 - protein, 15 aa, synthetic construct
  REGION 1..15: note = Hepatitis C virus_NS3
TTVRLRAYMNTPGLP

SEQ ID NO: 3173 - protein, 12 aa, synthetic construct
  REGION 1..12: note = Hepatitis C virus_NS3
LRAYMNTPGLPV

SEQ ID NO: 3174 - protein, 15 aa, synthetic construct
  REGION 1..15: note = Hepatitis C virus_NS3
LRAYMNTPGLPVCQD

SEQ ID NO: 3175 - protein, 11 aa, synthetic construct
  REGION 1..11: note = Hepatitis C virus_NS3
RAYMNTPGLPV

SEQ ID NO: 3176 - protein, 10 aa, synthetic construct
  REGION 1..10: note = Hepatitis C virus_NS3
AYMNTPGLPV

SEQ ID NO: 3177 - protein, 15 aa, synthetic construct
  REGION 1..15: note = Hepatitis C virus_NS3
ESVFTGLTHIDAHFL

SEQ ID NO: 3178 - protein, 15 aa, synthetic construct
  REGION 1..15: note = Hepatitis C virus_NS3
TGLTHIDAHFLSQTK

SEQ ID NO: 3179 - protein, 20 aa, synthetic construct
  REGION 1..20: note = Hepatitis C virus_NS3
ENLPYLVAYQATVCARAQAP

SEQ ID NO: 3180 - protein, 15 aa, synthetic construct
  REGION 1..15: note = Hepatitis C virus_NS3
LPYLVAYQATVCARA

SEQ ID NO: 3181 - protein, 14 aa, synthetic construct
  REGION 1..14: note = Hepatitis C virus_NS3
NLPYLVAYQATVCA

SEQ ID NO: 3182 - protein, 10 aa, synthetic construct
  REGION 1..10: note = Hepatitis C virus_NS3
YLVAYQATVC

SEQ ID NO: 3183 - protein, 11 aa, synthetic construct
  REGION 1..11: note = Hepatitis C virus_NS3
YLVAYQATVCA

SEQ ID NO: 3184 - protein, 15 aa, synthetic construct
  REGION 1..15: note = Hepatitis C virus_NS3
VAYQATVCARAQAPP

SEQ ID NO: 3185 - protein, 15 aa, synthetic construct
  REGION 1..15: note = Hepatitis C virus_NS3
TAYQATVCARAQAPP

SEQ ID NO: 3186 - protein, 15 aa, synthetic construct
  REGION 1..15: note = Hepatitis C virus_NS3
AQAPPPSWDQMWKCL

SEQ ID NO: 3187 - protein, 16 aa, synthetic construct
  REGION 1..16: note = Hepatitis C virus_NS3
DQMWLKCLIRLKPTLH

SEQ ID NO: 3188 - protein, 20 aa, synthetic construct
  REGION 1..20: note = Hepatitis C virus_NS3
PTPLLYRLGAVQNEITLTHP

SEQ ID NO: 3189 - protein, 15 aa, synthetic construct
  REGION 1..15: note = Hepatitis C virus_NS3
PVTKYIMACSADLES

SEQ ID NO: 3190 - protein, 18 aa, synthetic construct
  REGION 1..18: note = Hepatitis C virus_NS3
PITKYIMTCMSADLEVVT

SEQ ID NO: 3191 - protein, 15 aa, synthetic construct
  REGION 1..15: note = Hepatitis C virus_NS3
TSTWVLVGGVLAALA

SEQ ID NO: 3192 - protein, 20 aa, synthetic construct
  REGION 1..20: note = Hepatitis C virus_NS4
NFISGIQYLAGLSTLPGNPA

SEQ ID NO: 3193 - protein, 13 aa, synthetic construct
  REGION 1..13: note = Hepatitis C virus_NS4a
TSTWVLVGGVLAA

SEQ ID NO: 3194 - protein, 15 aa, synthetic construct
  REGION 1..15: note = Hepatitis C virus_NS4a
STWVLVGGVLAALAA

SEQ ID NO: 3195 - protein, 10 aa, synthetic construct
  REGION 1..10: note = Hepatitis C virus_NS4a
TWVLVGGVLA

SEQ ID NO: 3196 - protein, 20 aa, synthetic construct
  REGION 1..20: note = Hepatitis C virus_NS4a
AAYCLSTGCVVIVGRVVLSG

SEQ ID NO: 3197 - protein, 20 aa, synthetic construct
  REGION 1..20: note = Hepatitis C virus_NS4a
VVLSGKPAIIPDREVLYREF

SEQ ID NO: 3198 - protein, 15 aa, synthetic construct
  REGION 1..15: note = Hepatitis C virus_NS4a
GKPAIIPDREVLYRE

SEQ ID NO: 3199 - protein, 10 aa, synthetic construct
  REGION 1..10: note = Hepatitis C virus_NS4a
IIPDREVLYR

SEQ ID NO: 3200 - protein, 20 aa, synthetic construct
  REGION 1..20: note = Hepatitis C virus_NS4b
IAPAVQTNWQKLETFWAKHM

SEQ ID NO: 3201 - protein, 20 aa, synthetic construct
  REGION 1..20: note = Hepatitis C virus_NS4b
GIQYLAGLSTLPGNPAIASL

SEQ ID NO: 3202 - protein, 11 aa, synthetic construct
  REGION 1..11: note = Hepatitis C virus_NS4b
QYLAGLSTLPG

SEQ ID NO: 3203 - protein, 10 aa, synthetic construct
  REGION 1..10: note = Hepatitis C virus_NS4b
YLAGLSTLPG

SEQ ID NO: 3204 - protein, 20 aa, synthetic construct
  REGION 1..20: note = Hepatitis C virus_NS4b
LAGLSTLPGNPAIASLMAFT

SEQ ID NO: 3205 - protein, 18 aa, synthetic construct
  REGION 1..18: note = Hepatitis C virus_NS4b
GLSTLPGNPAIASLMAFT

SEQ ID NO: 3206 - protein, 20 aa, synthetic construct
  REGION 1..20: note = Hepatitis C virus_NS4b
LPGNPAIASLMAFTAAVTSP

SEQ ID NO: 3207 - protein, 11 aa, synthetic construct
  REGION 1..11: note = Hepatitis C virus_NS4b
PAIASLMAFTA

SEQ ID NO: 3208 - protein, 10 aa, synthetic construct
  REGION 1..10: note = Hepatitis C virus_NS4b
IASLMAFTAA

SEQ ID NO: 3209 - protein, 20 aa, synthetic construct
  REGION 1..20: note = Hepatitis C virus_NS4b
LTTSQTLLFNILGGWVAAQL

SEQ ID NO: 3210 - protein, 15 aa, synthetic construct
  REGION 1..15: note = Hepatitis C virus_NS4b
TQHTLLFNILGGWVA

SEQ ID NO: 3211 - protein, 10 aa, synthetic construct
  REGION 1..10: note = Hepatitis C virus_NS4b
LFNILGGWVA

SEQ ID NO: 3212 - protein, 9 aa, synthetic construct
  REGION 1..9: note = Hepatitis C virus_NS4b
FNILGGWVA

SEQ ID NO: 3213 - protein, 12 aa, synthetic construct
  REGION 1..12: note = Hepatitis C virus_NS4b
FNILGGWVAAQL

SEQ ID NO: 3214 - protein, 15 aa, synthetic construct
  REGION 1..15: note = Hepatitis C virus_NS4b
LGKVLVDILAGYGAG

SEQ ID NO: 3215 - protein, 18 aa, synthetic construct
  REGION 1..18: note = Hepatitis C virus_NS4b
IMSGEVPSTEDLVNLLPA

SEQ ID NO: 3216 - protein, 20 aa, synthetic construct
  REGION 1..20: note = Hepatitis C virus_NS4b
GEVPSTEDLVNLLPAILSPG

SEQ ID NO: 3217 - protein, 10 aa, synthetic construct
  REGION 1..10: note = Hepatitis C virus_NS4b
LVNLLPAILS

SEQ ID NO: 3218 - protein, 7 aa, synthetic construct
  REGION 1..7: note = Hepatitis C virus_NS4b
NLLPAIL

SEQ ID NO: 3219 - protein, 20 aa, synthetic construct
  REGION 1..20: note = Hepatitis C virus_NS4b
ALVVGVVCAAILRRHVGPGE

SEQ ID NO: 3220 - protein, 20 aa, synthetic construct
  REGION 1..20: note = Hepatitis C virus_NS4b
GPGEGAVQWMNRLIAFASRG

SEQ ID NO: 3221 - protein, 15 aa, synthetic construct
  REGION 1..15: note = Hepatitis C virus_NS4b
EGAVQWMNRLIAFAS

SEQ ID NO: 3222 - protein, 20 aa, synthetic construct
  REGION 1..20: note = Hepatitis C virus_NS4b
GAVQWMNRLIAFASRGNHVS

SEQ ID NO: 3223 - protein, 18 aa, synthetic construct
  REGION 1..18: note = Hepatitis C virus_NS4b
NRLIAFASRGNHVSPTHY

SEQ ID NO: 3224 - protein, 18 aa, synthetic construct
  REGION 1..18: note = Hepatitis C virus_NS5a
SQLSARSLKATCTANHDS

SEQ ID NO: 3225 - protein, 15 aa, synthetic construct
  REGION 1..15: note = Hepatitis C virus_NS5a
IEANLLWRQEMGGNI

SEQ ID NO: 3226 - protein, 14 aa, synthetic construct
  REGION 1..14: note = Hepatitis C virus_NS5a
VSVPAEILRKRRFA

SEQ ID NO: 3227 - protein, 18 aa, synthetic construct
  REGION 1..18: note = Hepatitis C virus_NS5a
PAELRKSRFAQALPVWAR

SEQ ID NO: 3228 - protein, 20 aa, synthetic construct
  REGION 1..20: note = Hepatitis C virus_NS5b
LRHHNLVYSTTSRSACQRQK

SEQ ID NO: 3229 - protein, 20 aa, synthetic construct
  REGION 1..20: note = Hepatitis C virus_NS5b
KVTFDRLQVLDSHYQDVLKE

SEQ ID NO: 3230 - protein, 20 aa, synthetic construct
  REGION 1..20: note = Hepatitis C virus_NS5b
SVWKDLLEDNVTPIDTTIMA

SEQ ID NO: 3231 - protein, 20 aa, synthetic construct
  REGION 1..20: note = Hepatitis C virus_NS5b
KGGRKPARLIVFPDLGVRVC

SEQ ID NO: 3232 - protein, 18 aa, synthetic construct
  REGION 1..18: note = Hepatitis C virus_NS5b
KPARLIVFPDLGVRVCEK

SEQ ID NO: 3233 - protein, 20 aa, synthetic construct
  REGION 1..20: note = Hepatitis C virus_NS5b
KLPLAVMGSSYGFQYSPGQR

SEQ ID NO: 3234 - protein, 20 aa, synthetic construct
  REGION 1..20: note = Hepatitis C virus_NS5b
VEFLVQAWKSKKTPMGFSYD

SEQ ID NO: 3235 - protein, 20 aa, synthetic construct
  REGION 1..20: note = Hepatitis C virus_NS5b
SDIRTEEAIYQCCDLDPQAR

SEQ ID NO: 3236 - protein, 20 aa, synthetic construct
  REGION 1..20: note = Hepatitis C virus_NS5b
QCCDLDPQARVAIKSLTERL

SEQ ID NO: 3237 - protein, 12 aa, synthetic construct
  REGION 1..12: note = Hepatitis C virus_NS5b
GYRRCRASGVLT

SEQ ID NO: 3238 - protein, 14 aa, synthetic construct
  REGION 1..14: note = Hepatitis C virus_NS5b
CSSNVSVAHDGAGK

SEQ ID NO: 3239 - protein, 20 aa, synthetic construct
  REGION 1..20: note = Hepatitis C virus_NS5b
SVAHDGAGKRVYYLTRDPTT

SEQ ID NO: 3240 - protein, 15 aa, synthetic construct
  REGION 1..15: note = Hepatitis C virus_NS5b
RDPTTPLARAAWETA

SEQ ID NO: 3241 - protein, 20 aa, synthetic construct
  REGION 1..20: note = Hepatitis C virus_NS5b
NIIMFAPTLWARMILMTHFF

SEQ ID NO: 3242 - protein, 20 aa, synthetic construct
  REGION 1..20: note = Hepatitis C virus_NS5b
ARMILMTHFFSVLIARDQLE

SEQ ID NO: 3243 - protein, 15 aa, synthetic construct
  REGION 1..15: note = Hepatitis C virus_NS5b
LMIHFFSILAQEQLE

SEQ ID NO: 3244 - protein, 19 aa, synthetic construct
  REGION 1..19: note = Hepatitis C virus_NS5b
INRVAACLRKLGVPPLRAW

SEQ ID NO: 3245 - protein, 14 aa, synthetic construct
  REGION 1..14: note = Hepatitis C virus_NS5b
CGKYLFNWAVTKLK

SEQ ID NO: 3246 - protein, 20 aa, synthetic construct
  REGION 1..20: note = Hepatitis C virus_NS5b
CGKYLFNWAVRTKLKLTPIA

SEQ ID NO: 3247 - protein, 14 aa, synthetic construct
  REGION 1..14: note = Influenza A
ALNNRFQIKGVELK

SEQ ID NO: 3248 - protein, 15 aa, synthetic construct
  REGION 1..15: note = Influenza A
GALNNRFQIKGVELS

SEQ ID NO: 3249 - protein, 14 aa, synthetic construct
  REGION 1..14: note = Measles virus_F
LSEIKGVIVHRLEG

SEQ ID NO: 3250 - protein, 16 aa, synthetic construct
  REGION 1..16: note = Canine distemper virus_Fusion protein
TAAQITAGIALHQSNL

SEQ ID NO: 3251 - protein, 16 aa, synthetic construct
  REGION 1..16: note = Canine distemper virus_Fusion protein
IGTDNVHYKIMTRPSH

SEQ ID NO: 3252 - protein, 16 aa, synthetic construct
  REGION 1..16: note = Canine distemper virus_Fusion protein
YKIMTRPSHQYLVIKI

SEQ ID NO: 3253 - protein, 17 aa, synthetic construct
  REGION 1..17: note = Canine distemper virus_Fusion protein
SHQYLVIKLIPNASLIE

SEQ ID NO: 3254 - protein, 16 aa, synthetic construct
  REGION 1..16: note = Canine distemper virus_Fusion protein
KLIPNASLIENCTKAE

SEQ ID NO: 3255 - protein, 15 aa, synthetic construct
  REGION 1..15: note = Canine distemper virus_Fusion protein
LIENCTKAELGEYEK

SEQ ID NO: 3256 - protein, 17 aa, synthetic construct
  REGION 1..17: note = Canine distemper virus_Fusion protein
AELGEYEKLLNSVLEPI

SEQ ID NO: 3257 - protein, 17 aa, synthetic construct
  REGION 1..17: note = Canine distemper virus_Fusion protein
KLLNSVLEPINQALTLM

SEQ ID NO: 3258 - protein, 17 aa, synthetic construct
  REGION 1..17: note = Canine distemper virus_Fusion protein
EPINQALTLMTKNVKPL

SEQ ID NO: 3259 - protein, 17 aa, synthetic construct
  REGION 1..17: note = Canine distemper virus_Fusion protein
TLMTKNVKPLQSLGSGR

SEQ ID NO: 3260 - protein, 17 aa, synthetic construct
  REGION 1..17: note = Canine distemper virus_Fusion protein
KPLQSLGSGRRQRRFAG

SEQ ID NO: 3261 - protein, 17 aa, synthetic construct
  REGION 1..17: note = Canine distemper virus_Fusion protein
SGRRQRRFAGVVLAGVA

SEQ ID NO: 3262 - protein, 17 aa, synthetic construct
  REGION 1..17: note = Canine distemper virus_Fusion protein
FAGVVLAGVALGVATAA

SEQ ID NO: 3263 - protein, 17 aa, synthetic construct
  REGION 1..17: note = Canine distemper virus_Fusion protein
GVALGVATAAQITAGIA

SEQ ID NO: 3264 - protein, 17 aa, synthetic construct
  REGION 1..17: note = Canine distemper virus_Fusion protein
GIALHQSNLNAQAIQSL

SEQ ID NO: 3265 - protein, 17 aa, synthetic construct
  REGION 1..17: note = Canine distemper virus_Fusion protein
NLNAQAIQSLRTSLEQS

SEQ ID NO: 3266 - protein, 17 aa, synthetic construct
  REGION 1..17: note = Canine distemper virus_Fusion protein
QSLRTSLEQSNKAIEEI

SEQ ID NO: 3267 - protein, 17 aa, synthetic construct
  REGION 1..17: note = Canine distemper virus_Fusion protein
EQSNKAIEEIREATQET

SEQ ID NO: 3268 - protein, 17 aa, synthetic construct
  REGION 1..17: note = Canine distemper virus_Fusion protein
SSKTQTHTQQDRPPQPS

SEQ ID NO: 3269 - protein, 17 aa, synthetic construct
  REGION 1..17: note = Canine distemper virus_Fusion protein
QPSTELEETRTSRARHS

SEQ ID NO: 3270 - protein, 17 aa, synthetic construct
  REGION 1..17: note = Canine distemper virus_Fusion protein
RHSTTSAQRSTHYDPRT

SEQ ID NO: 3271 - protein, 17 aa, synthetic construct
  REGION 1..17: note = Canine distemper virus_Fusion protein
PRTSDRPVSYTMNRTRS

SEQ ID NO: 3272 - protein, 17 aa, synthetic construct
  REGION 1..17: note = Canine distemper virus_Fusion protein
TRSRKQTSHRLKNIPVH

SEQ ID NO: 3273 - protein, 17 aa, synthetic construct
  REGION 1..17: note = Canine distemper virus_Fusion protein
TELLSIFGPSLRDPISA

SEQ ID NO: 3274 - protein, 17 aa, synthetic construct
  REGION 1..17: note = Canine distemper virus_Fusion protein
PRYIATNGYLISNFDES

SEQ ID NO: 3275 - protein, 17 aa, synthetic construct
  REGION 1..17: note = Canine distemper virus_Fusion protein
CIRGDTSSCARTLVSGT

SEQ ID NO: 3276 - protein, 17 aa, synthetic construct
  REGION 1..17: note = Canine distemper virus_Fusion protein
DESSCVFVSESAICSQN

SEQ ID NO: 3277 - protein, 17 aa, synthetic construct
  REGION 1..17: note = Canine distemper virus_Fusion protein
TSTIINQSPDKLLTFIA

SEQ ID NO: 3278 - protein, 17 aa, synthetic construct
  REGION 1..17: note = Canine distemper virus_Fusion protein
SPDKLLTFIASDTCPLV

SEQ ID NO: 3279 - protein, 24 aa, synthetic construct
  REGION 1..24: note = Mucin-1
STAPPAHGVTSAPDTRAPGSTAPP

SEQ ID NO: 3280 - protein, 19 aa, synthetic construct
  REGION 1..19: note = Mucin-1
GVTSAPDTRPAPGSTASSL

SEQ ID NO: 3281 - protein, 18 aa, synthetic construct
  REGION 1..18: note = Mucin-1
GVTSAPDTRPAPGSTASL

SEQ ID NO: 3282 - protein, 27 aa, synthetic construct
  REGION 1..27: note = Mucin-1
TAPPAHGVTSAPDTRPAPGSTAPPKKG

SEQ ID NO: 3283 - protein, 26 aa, synthetic construct
  REGION 1..26: note = Mucin-1
STAPPAHGVTSAPDTRPAPGSTAPPK

SEQ ID NO: 3284 - protein, 4 aa, synthetic construct
  REGION 1..4: note = foot-and-mouth disease virus_VP3
GVAE

SEQ ID NO: 3285 - protein, 10 aa, synthetic construct
  REGION 1..10: note = foot-and-mouth disease virus_VP3
TASGVAETTN

SEQ ID NO: 3286 - protein, 16 aa, synthetic construct
  REGION 1..16: note = foot-and-mouth disease virus
TAKSKKFPSYTATYQF

SEQ ID NO: 3287 - protein, 16 aa, synthetic construct
  REGION 1..16: note = Clostridium tetani
AQYIKANSKFIGITEL

SEQ ID NO: 3288 - protein, 16 aa, synthetic construct
  REGION 1..16: note = Human immunodeficiency virus 1_gp120 protein
KQIINMWQVVGKAMYA

SEQ ID NO: 3289 - protein, 15 aa, synthetic construct
  REGION 1..15: note = Human immunodeficiency virus 1_gag protein
KRWIILGLNKIVRMY

SEQ ID NO: 3290 - protein, 16 aa, synthetic construct
  REGION 1..16: note = Human immunodeficiency virus 1_envelope glycoprotein
KQIINMWQEVGKAMYA

SEQ ID NO: 3291 - protein, 16 aa, synthetic construct
  REGION 1..16: note = Human immunodeficiency virus 1_envelope glycoprotein
KQIINMWQAVGKAMYA

SEQ ID NO: 3292 - protein, 16 aa, synthetic construct
  REGION 1..16: note = Tetanus Toxid
AQYIKANSKFIGITEL

SEQ ID NO: 3293 - protein, 7 aa, synthetic construct
  REGION 1..7: note = Human papilloma virus 16_E17
DRAHYNI

SEQ ID NO: 3294 - protein, 19 aa, synthetic construct
  REGION 1..19: note = Human papilloma virus 16_E17
QAEPDRAHYNIVTFCCKCD

SEQ ID NO: 3295 - RNA, 39 nt, synthetic construct
  misc_feature 1..39: note = PADRE
  source 1..39: mol_type = other RNA
gccaagttcgtggccgcgtggaccctgaaggccgccgcc

SEQ ID NO: 3296 - RNA, 54 nt, synthetic construct
  misc_feature 1..54: note = Hepatitis C virus_Core
  source 1..54: mol_type = other RNA
atgagcaccaaccccaagccgcagatcaagaccaagcgcaacacgaaccggcgc

SEQ ID NO: 3297 - RNA, 60 nt, synthetic construct
  misc_feature 1..60: note = Hepatitis C virus_Core
  source 1..60: mol_type = other RNA
atgagcaccaaccccaagccgcagcgcaagaccaagcggaacacgaaccgccggcaggac

SEQ ID NO: 3298 - RNA, 60 nt, synthetic construct
  misc_feature 1..60: note = Hepatitis C virus_Core
  source 1..60: mol_type = other RNA
gacgtgaagttccccggcgggggccagatcgtcgggggcgtgtacctgctcccgcgccgg

SEQ ID NO: 3299 - RNA, 45 nt, synthetic construct
  misc_feature 1..45: note = Hepatitis C virus_Core
  source 1..45: mol_type = other RNA
gtgggcggggtctacctgctcccccgccggggcccgcgcctgggg

SEQ ID NO: 3300 - RNA, 60 nt, synthetic construct
  misc_feature 1..60: note = Hepatitis C virus_Core
  source 1..60: mol_type = other RNA
gtgggcggggtctacctgctcccccgccggggcccgcgcctgggggtgcgggccacccgc

SEQ ID NO: 3301 - RNA, 45 nt, synthetic construct
  misc_feature 1..45: note = Hepatitis C virus_Core
  source 1..45: mol_type = other RNA
cgccggcgcagccggaacctgggcaaggtgatcgacaccctcacc

SEQ ID NO: 3302 - RNA, 45 nt, synthetic construct
  misc_feature 1..45: note = Hepatitis C virus_Core
  source 1..45: mol_type = other RNA
accctgacctgcggcttcgccgacctcatggggtacatccccctg

SEQ ID NO: 3303 - RNA, 45 nt, synthetic construct
  misc_feature 1..45: note = Hepatitis C virus_Core
  source 1..45: mol_type = other RNA
ggcgcccccctggggggcgccgcgcgcgccctcgcccacggggtg

SEQ ID NO: 3304 - RNA, 60 nt, synthetic construct
  misc_feature 1..60: note = Hepatitis C virus_Core
  source 1..60: mol_type = other RNA
ggcgcccccctggggggcgccgcgcgcgccctcgcccacggggtgcgggtcctggaggac

SEQ ID NO: 3305 - RNA, 45 nt, synthetic construct
  misc_feature 1..45: note = Hepatitis C virus_Core
  source 1..45: mol_type = other RNA
gcccccctgggcggggccgcgcgcgccctcgcccacggcgtgcgg

SEQ ID NO: 3306 - RNA, 45 nt, synthetic construct
  misc_feature 1..45: note = Hepatitis C virus_Core
  source 1..45: mol_type = other RNA
agcttctccatcttcctgctcgccctgctgagctgcctcaccatc

SEQ ID NO: 3307 - RNA, 33 nt, synthetic construct
  misc_feature 1..33: note = Hepatitis C virus_Core
  source 1..33: mol_type = other RNA
ctgctcagctgcctgaccatccccgcctccgcc

SEQ ID NO: 3308 - RNA, 45 nt, synthetic construct
  misc_feature 1..45: note = Hepatitis C virus_E1
  source 1..45: mol_type = other RNA
cacgtgaccaacgactgccccaacagctccatcgtctacgaggcc

SEQ ID NO: 3309 - RNA, 45 nt, synthetic construct
  misc_feature 1..45: note = Hepatitis C virus_E1
  source 1..45: mol_type = other RNA
tgccccaacagctccatcgtgtacgaggcccacgacgccatcctg

SEQ ID NO: 3310 - RNA, 45 nt, synthetic construct
  misc_feature 1..45: note = Hepatitis C virus_E1
  source 1..45: mol_type = other RNA
agccgctgctgggtggccctgacccccaccctcgccgcgcggaac

SEQ ID NO: 3311 - RNA, 45 nt, synthetic construct
  misc_feature 1..45: note = Hepatitis C virus_E1
  source 1..45: mol_type = other RNA
cgctgctgggtggccatgacccccaccgtcgccacgcgggacggc

SEQ ID NO: 3312 - RNA, 45 nt, synthetic construct
  misc_feature 1..45: note = Hepatitis C virus_E1
  source 1..45: mol_type = other RNA
atgacccccaccgtggccacgcgcgacggcaagctgccggccacc

SEQ ID NO: 3313 - RNA, 45 nt, synthetic construct
  misc_feature 1..45: note = Hepatitis C virus_E1
  source 1..45: mol_type = other RNA
aagctgcccgccacccagctccgccggcacatcgacctgctggtg

SEQ ID NO: 3314 - RNA, 45 nt, synthetic construct
  misc_feature 1..45: note = Hepatitis C virus_E1
  source 1..45: mol_type = other RNA
accatccgccggcacgtggacctgctcgtcggcgccgccgcgttc

SEQ ID NO: 3315 - RNA, 45 nt, synthetic construct
  misc_feature 1..45: note = Hepatitis C virus_E1
  source 1..45: mol_type = other RNA
ggcagcgccaccctgtgctccgccctctacgtgggggacctgtgc

SEQ ID NO: 3316 - RNA, 45 nt, synthetic construct
  misc_feature 1..45: note = Hepatitis C virus_E1
  source 1..45: mol_type = other RNA
ggcagcgtgttcctgatcgggcagctcttcaccttctccccccgc

SEQ ID NO: 3317 - RNA, 45 nt, synthetic construct
  misc_feature 1..45: note = Hepatitis C virus_E1
  source 1..45: mol_type = other RNA
accttcagcccccgccggcaccagaccgtgcaggactgcaactgc

SEQ ID NO: 3318 - RNA, 45 nt, synthetic construct
  misc_feature 1..45: note = Hepatitis C virus_E1
  source 1..45: mol_type = other RNA
agcatctaccccggccacatcaccgggcaccgcatggcctgggac

SEQ ID NO: 3319 - RNA, 45 nt, synthetic construct
  misc_feature 1..45: note = Hepatitis C virus_E1
  source 1..45: mol_type = other RNA
cacatcaccggccaccgcatggcctgggacatgatgatgaactgg

SEQ ID NO: 3320 - RNA, 45 nt, synthetic construct
  misc_feature 1..45: note = Hepatitis C virus_E1
  source 1..45: mol_type = other RNA
cacgtgagcggccaccgcatggcctgggacatgatgatgaactgg

SEQ ID NO: 3321 - RNA, 45 nt, synthetic construct
  misc_feature 1..45: note = Hepatitis C virus_E1
  source 1..45: mol_type = other RNA
atgatgatgaactggagccccaccgccgccctggtgatggcgcag

SEQ ID NO: 3322 - RNA, 45 nt, synthetic construct
  misc_feature 1..45: note = Hepatitis C virus_E1
  source 1..45: mol_type = other RNA
agccccaccgccgccctggtggtctcccagctcctgcgcatcccg

SEQ ID NO: 3323 - RNA, 45 nt, synthetic construct
  misc_feature 1..45: note = Hepatitis C virus_E1
  source 1..45: mol_type = other RNA
caggccatcctggacatgatcgccggcgcgcactggggggtgctc

SEQ ID NO: 3324 - RNA, 45 nt, synthetic construct
  misc_feature 1..45: note = Hepatitis C virus_E1
  source 1..45: mol_type = other RNA
cactggggcgtgctggccgggctcgcctactacagcatggtcggc

SEQ ID NO: 3325 - RNA, 45 nt, synthetic construct
  misc_feature 1..45: note = Hepatitis C virus_E1
  source 1..45: mol_type = other RNA
ttcagcatggtgggcaactgggccaaggtcctggtggtgctcctg

SEQ ID NO: 3326 - RNA, 45 nt, synthetic construct
  misc_feature 1..45: note = Hepatitis C virus_E1
  source 1..45: mol_type = other RNA
aactgggccaaggtgctggtcgtgctcctgctgttcgccggcgtg

SEQ ID NO: 3327 - RNA, 54 nt, synthetic construct
  misc_feature 1..54: note = Hepatitis C virus_E2
  source 1..54: mol_type = other RNA
ggcttcgccacccagcgcctgaccagcctcttcgccctggggccctcccagaag

SEQ ID NO: 3328 - RNA, 48 nt, synthetic construct
  misc_feature 1..48: note = Hepatitis C virus_E2
  source 1..48: mol_type = other RNA
tgcctgtggatgatgctcctgatcgcccaggccgagcaggcgctgctc

SEQ ID NO: 3329 - RNA, 45 nt, synthetic construct
  misc_feature 1..45: note = Hepatitis C virus_NS2
  source 1..45: mol_type = other RNA
gccatggaccgcgagatggccgcgagctgcggcggggccgtgttc

SEQ ID NO: 3330 - RNA, 45 nt, synthetic construct
  misc_feature 1..45: note = Hepatitis C virus_NS2
  source 1..45: mol_type = other RNA
cgcgacgccatcatcctgctcacctgcgccgtgcaccccgagctg

SEQ ID NO: 3331 - RNA, 45 nt, synthetic construct
  misc_feature 1..45: note = Hepatitis C virus_NS2
  source 1..45: mol_type = other RNA
ggccccctgatggtgctccaggccgggatcatccgcgccccgtac

SEQ ID NO: 3332 - RNA, 60 nt, synthetic construct
  misc_feature 1..60: note = Hepatitis C virus_NS2
  source 1..60: mol_type = other RNA
cccgtgagcgcccgccggggccgcgagatcctgctcgggccggccgacggcatggtctcc

SEQ ID NO: 3333 - RNA, 45 nt, synthetic construct
  misc_feature 1..45: note = Hepatitis C virus_NS3
  source 1..45: mol_type = other RNA
ggccaggggtggcgcctgctcgcccccatcaccgcctacagccag

SEQ ID NO: 3334 - RNA, 45 nt, synthetic construct
  misc_feature 1..45: note = Hepatitis C virus_NS3
  source 1..45: mol_type = other RNA
ggccccgtgatccagatgtacaccaacgtcgaccaggacctggtg

SEQ ID NO: 3335 - RNA, 45 nt, synthetic construct
  misc_feature 1..45: note = Hepatitis C virus_NS3
  source 1..45: mol_type = other RNA
cagggcagccgctccctgaccccctgcacctgcgggagctccgac

SEQ ID NO: 3336 - RNA, 45 nt, synthetic construct
  misc_feature 1..45: note = Hepatitis C virus_NS3
  source 1..45: mol_type = other RNA
agctccgacctgtacctcgtgacccgccacgccgacgtcatcccc

SEQ ID NO: 3337 - RNA, 60 nt, synthetic construct
  misc_feature 1..60: note = Hepatitis C virus_NS3
  source 1..60: mol_type = other RNA
tacctggtgacccgccacgccgacgtcatccccgtgcggcgccggggcgacagccgcggg

SEQ ID NO: 3338 - RNA, 45 nt, synthetic construct
  misc_feature 1..45: note = Hepatitis C virus_NS3
  source 1..45: mol_type = other RNA
agcctgctctccccccgcccgatcagctacctgaagggctccagc

SEQ ID NO: 3339 - RNA, 45 nt, synthetic construct
  misc_feature 1..45: note = Hepatitis C virus_NS3
  source 1..45: mol_type = other RNA
tgccccgccggccacgccgtggggatcttccgcgcggccgtctgc

SEQ ID NO: 3340 - RNA, 60 nt, synthetic construct
  misc_feature 1..60: note = Hepatitis C virus_NS3
  source 1..60: mol_type = other RNA
ctggagaccaccatgcgcagccccgtgttcacggacaactccagcccgcccgtcgtgccc

SEQ ID NO: 3341 - RNA, 42 nt, synthetic construct
  misc_feature 1..42: note = Hepatitis C virus_NS3
  source 1..42: mol_type = other RNA
agccccgtgttcaccgacaactccagcccggccgtcccccag

SEQ ID NO: 3342 - RNA, 45 nt, synthetic construct
  misc_feature 1..45: note = Hepatitis C virus_NS3
  source 1..45: mol_type = other RNA
gtgccccagagcttccaggtcgcccacctgcacgccccgaccggc

SEQ ID NO: 3343 - RNA, 45 nt, synthetic construct
  misc_feature 1..45: note = Hepatitis C virus_NS3
  source 1..45: mol_type = other RNA
ttccaggtggcccacctgcacgcccccaccggcagcgggaagtcc

SEQ ID NO: 3344 - RNA, 45 nt, synthetic construct
  misc_feature 1..45: note = Hepatitis C virus_NS3
  source 1..45: mol_type = other RNA
aaggtgcccgccgcctacgcggcccagggctacaaggtcctggtg

SEQ ID NO: 3345 - RNA, 60 nt, synthetic construct
  misc_feature 1..60: note = Hepatitis C virus_NS3
  source 1..60: mol_type = other RNA
cccgccgcctacgcggcccagggctacaaggtgctggtcctcaacccgagcgtggccgcc

SEQ ID NO: 3346 - RNA, 42 nt, synthetic construct
  misc_feature 1..42: note = Hepatitis C virus_NS3
  source 1..42: mol_type = other RNA
gccgccaagggctacaaggtgctggtcctccccagcgtggcg

SEQ ID NO: 3347 - RNA, 45 nt, synthetic construct
  misc_feature 1..45: note = Hepatitis C virus_NS3
  source 1..45: mol_type = other RNA
gcccagggctacaaggtgctggtcctcaaccccagcgtggccgcg

SEQ ID NO: 3348 - RNA, 45 nt, synthetic construct
  misc_feature 1..45: note = Hepatitis C virus_NS3
  source 1..45: mol_type = other RNA
cagggctacaaggtgctggtcctcaaccccagcgtggccgccacc

SEQ ID NO: 3349 - RNA, 42 nt, synthetic construct
  misc_feature 1..42: note = Hepatitis C virus_NS3
  source 1..42: mol_type = other RNA
ggctacaaggtgctggtcctcaaccccagcgtggccgccacc

SEQ ID NO: 3350 - RNA, 54 nt, synthetic construct
  misc_feature 1..54: note = Hepatitis C virus_NS3
  source 1..54: mol_type = other RNA
ggctacaaggtgctggtcctcaaccccagcgtggccgccaccctggggttcggc

SEQ ID NO: 3351 - RNA, 60 nt, synthetic construct
  misc_feature 1..60: note = Hepatitis C virus_NS3
  source 1..60: mol_type = other RNA
ggctacaaggtgctggtcctcaaccccagcgtggccgccaccctggggttcggcgcgtac

SEQ ID NO: 3352 - RNA, 27 nt, synthetic construct
  misc_feature 1..27: note = Hepatitis C virus_NS3
  source 1..27: mol_type = other RNA
gtgctggtcctcaaccccagcgtggcc

SEQ ID NO: 3353 - RNA, 60 nt, synthetic construct
  misc_feature 1..60: note = Hepatitis C virus_NS3
  source 1..60: mol_type = other RNA
atcacctacagcacctacggcaagttcctggccgacgggggctgctccgggggcgcctac

SEQ ID NO: 3354 - RNA, 54 nt, synthetic construct
  misc_feature 1..54: note = Hepatitis C virus_NS3
  source 1..54: mol_type = other RNA
tacagcacctacggcaagttcctggccgacgccgggtgctccggcggggcgtac

SEQ ID NO: 3355 - RNA, 45 nt, synthetic construct
  misc_feature 1..45: note = Hepatitis C virus_NS3
  source 1..45: mol_type = other RNA
acctacggcaagttcctggccgacgggggctgcagcgggggcgcc

SEQ ID NO: 3356 - RNA, 54 nt, synthetic construct
  misc_feature 1..54: note = Hepatitis C virus_NS3
  source 1..54: mol_type = other RNA
ctggccgacgccggctgcagcgggggcgcgtacgacatcatcatctgcgacgag

SEQ ID NO: 3357 - RNA, 45 nt, synthetic construct
  misc_feature 1..45: note = Hepatitis C virus_NS3
  source 1..45: mol_type = other RNA
ggcggggcctacgacatcatcatctgcgacgagtgccacagcacc

SEQ ID NO: 3358 - RNA, 45 nt, synthetic construct
  misc_feature 1..45: note = Hepatitis C virus_NS3
  source 1..45: mol_type = other RNA
gacatcatcatctgcgacgagtgccacagcaccgacgccacctcc

SEQ ID NO: 3359 - RNA, 60 nt, synthetic construct
  misc_feature 1..60: note = Hepatitis C virus_NS3
  source 1..60: mol_type = other RNA
accgacgccaccagcatcctgggcatcgggacggtgctcgaccaggccgagaccgcgggc

SEQ ID NO: 3360 - RNA, 45 nt, synthetic construct
  misc_feature 1..45: note = Hepatitis C virus_NS3
  source 1..45: mol_type = other RNA
gccaccagcatcctgggcatcgggaccgtgctcgaccaggccgag

SEQ ID NO: 3361 - RNA, 54 nt, synthetic construct
  misc_feature 1..54: note = Hepatitis C virus_NS3
  source 1..54: mol_type = other RNA
gtgatcaagggcgggcgccacctgatcttctgccacagcaagaagaagtgcgac

SEQ ID NO: 3362 - RNA, 54 nt, synthetic construct
  misc_feature 1..54: note = Hepatitis C virus_NS3
  source 1..54: mol_type = other RNA
gtgatcaagggcgggcgccacctgatcttctgccacagccaccaccactgcgac

SEQ ID NO: 3363 - RNA, 45 nt, synthetic construct
  misc_feature 1..45: note = Hepatitis C virus_NS3
  source 1..45: mol_type = other RNA
ggcgggcgccacctgatcttctgccacagcaagaagaagtgcgac

SEQ ID NO: 3364 - RNA, 30 nt, synthetic construct
  misc_feature 1..30: note = Hepatitis C virus_NS3
  source 1..30: mol_type = other RNA
ggccgccacctgatcttctgccacagcaag

SEQ ID NO: 3365 - RNA, 33 nt, synthetic construct
  misc_feature 1..33: note = Hepatitis C virus_NS3
  source 1..33: mol_type = other RNA
ggccgccacctgatcttctgccacagcaagcgg

SEQ ID NO: 3366 - RNA, 45 nt, synthetic construct
  misc_feature 1..45: note = Hepatitis C virus_NS3
  source 1..45: mol_type = other RNA
aagtgcgacgagctggccgccaagctcgtggcgctgggcatcaac

SEQ ID NO: 3367 - RNA, 45 nt, synthetic construct
  misc_feature 1..45: note = Hepatitis C virus_NS3
  source 1..45: mol_type = other RNA
ctggccgccaagctcgtggcgctgggcatcaacgccgtcgcctac

SEQ ID NO: 3368 - RNA, 45 nt, synthetic construct
  misc_feature 1..45: note = Hepatitis C virus_NS3
  source 1..45: mol_type = other RNA
ggcatcaacgccgtggcctactaccgcgggctggacgtcagcgtg

SEQ ID NO: 3369 - RNA, 60 nt, synthetic construct
  misc_feature 1..60: note = Hepatitis C virus_NS3
  source 1..60: mol_type = other RNA
ggcatcaacgccgtggcctactaccgcgggctggacgtcagcgtgatccccacctccggc

SEQ ID NO: 3370 - RNA, 33 nt, synthetic construct
  misc_feature 1..33: note = Hepatitis C virus_NS3
  source 1..33: mol_type = other RNA
gtggcctactaccgcggcctggacgtcagcgtg

SEQ ID NO: 3371 - RNA, 45 nt, synthetic construct
  misc_feature 1..45: note = Hepatitis C virus_NS3
  source 1..45: mol_type = other RNA
gtggcctactaccgcggcctggacgtcagcgtgatccccacctcc

SEQ ID NO: 3372 - RNA, 54 nt, synthetic construct
  misc_feature 1..54: note = Hepatitis C virus_NS3
  source 1..54: mol_type = other RNA
atccccaccaacggcgacgtggtcgtggtgagcaccgacgccctgatgacgggg

SEQ ID NO: 3373 - RNA, 45 nt, synthetic construct
  misc_feature 1..45: note = Hepatitis C virus_NS3
  source 1..45: mol_type = other RNA
gccctgatgaccggctacaccggggacttcgacagcgtgatcgac

SEQ ID NO: 3374 - RNA, 54 nt, synthetic construct
  misc_feature 1..54: note = Hepatitis C virus_NS3
  source 1..54: mol_type = other RNA
gacttcgacagcgtgatcgactgcaacacctgcgtcacccagacggtggacttc

SEQ ID NO: 3375 - RNA, 45 nt, synthetic construct
  misc_feature 1..45: note = Hepatitis C virus_NS3
  source 1..45: mol_type = other RNA
gtgatcgactgcaacacctgcgtcacccagacggtggacttcagc

SEQ ID NO: 3376 - RNA, 45 nt, synthetic construct
  misc_feature 1..45: note = Hepatitis C virus_NS3
  source 1..45: mol_type = other RNA
aacacctgcgtgacccagacggtcgacttcagcctggaccccacc

SEQ ID NO: 3377 - RNA, 45 nt, synthetic construct
  misc_feature 1..45: note = Hepatitis C virus_NS3
  source 1..45: mol_type = other RNA
acccagaccgtggacttcagcctggaccccacgttcaccatcgag

SEQ ID NO: 3378 - RNA, 45 nt, synthetic construct
  misc_feature 1..45: note = Hepatitis C virus_NS3
  source 1..45: mol_type = other RNA
gagcagtacgtggacttcagcctggaccccaccttctccatcgag

SEQ ID NO: 3379 - RNA, 54 nt, synthetic construct
  misc_feature 1..54: note = Hepatitis C virus_NS3
  source 1..54: mol_type = other RNA
cccaccttcaccatcgagacgaccaccctgccgcaggacgccgtgagccgcacc

SEQ ID NO: 3380 - RNA, 45 nt, synthetic construct
  misc_feature 1..45: note = Hepatitis C virus_NS3
  source 1..45: mol_type = other RNA
atgttcgacagctccgtgctgtgcgagtgctacgacgccggctgc

SEQ ID NO: 3381 - RNA, 60 nt, synthetic construct
  misc_feature 1..60: note = Hepatitis C virus_NS3
  source 1..60: mol_type = other RNA
tacgacgccggctgcgcctggtacgagctgacccccgcggagaccacggtgcgcctccgg

SEQ ID NO: 3382 - RNA, 51 nt, synthetic construct
  misc_feature 1..51: note = Hepatitis C virus_NS3
  source 1..51: mol_type = other RNA
atgcccgccgagaccaccgtgcgcctgcgggcctacatgaacacgccgggc

SEQ ID NO: 3383 - RNA, 60 nt, synthetic construct
  misc_feature 1..60: note = Hepatitis C virus_NS3
  source 1..60: mol_type = other RNA
acccccgccgagaccacggtgcgcctgcgggcctacatgaacaccccgggcctccccgtc

SEQ ID NO: 3384 - RNA, 45 nt, synthetic construct
  misc_feature 1..45: note = Hepatitis C virus_NS3
  source 1..45: mol_type = other RNA
accaccgtgcgcctgcgggcctacatgaacacgcccggcctcccg

SEQ ID NO: 3385 - RNA, 36 nt, synthetic construct
  misc_feature 1..36: note = Hepatitis C virus_NS3
  source 1..36: mol_type = other RNA
ctgcgcgcctacatgaacacccccggcctcccggtg

SEQ ID NO: 3386 - RNA, 45 nt, synthetic construct
  misc_feature 1..45: note = Hepatitis C virus_NS3
  source 1..45: mol_type = other RNA
ctgcgcgcctacatgaacacccccggcctcccggtgtgccaggac

SEQ ID NO: 3387 - RNA, 33 nt, synthetic construct
  misc_feature 1..33: note = Hepatitis C virus_NS3
  source 1..33: mol_type = other RNA
cgcgcctacatgaacacccccggcctgccggtg

SEQ ID NO: 3388 - RNA, 30 nt, synthetic construct
  misc_feature 1..30: note = Hepatitis C virus_NS3
  source 1..30: mol_type = other RNA
gcctacatgaacacccccggcctgccggtg

SEQ ID NO: 3389 - RNA, 45 nt, synthetic construct
  misc_feature 1..45: note = Hepatitis C virus_NS3
  source 1..45: mol_type = other RNA
gagagcgtgttcaccggcctgacccacatcgacgcccacttcctc

SEQ ID NO: 3390 - RNA, 45 nt, synthetic construct
  misc_feature 1..45: note = Hepatitis C virus_NS3
  source 1..45: mol_type = other RNA
accggcctgacccacatcgacgcccacttcctcagccagacgaag

SEQ ID NO: 3391 - RNA, 60 nt, synthetic construct
  misc_feature 1..60: note = Hepatitis C virus_NS3
  source 1..60: mol_type = other RNA
gagaacctgccctacctcgtggcctaccaggccaccgtctgcgcgcgcgcccaggccccg

SEQ ID NO: 3392 - RNA, 45 nt, synthetic construct
  misc_feature 1..45: note = Hepatitis C virus_NS3
  source 1..45: mol_type = other RNA
ctgccctacctcgtggcctaccaggccaccgtctgcgcgcgcgcc

SEQ ID NO: 3393 - RNA, 42 nt, synthetic construct
  misc_feature 1..42: note = Hepatitis C virus_NS3
  source 1..42: mol_type = other RNA
aacctgccctacctcgtggcctaccaggccaccgtctgcgcg

SEQ ID NO: 3394 - RNA, 30 nt, synthetic construct
  misc_feature 1..30: note = Hepatitis C virus_NS3
  source 1..30: mol_type = other RNA
tacctggtggcctaccaggccaccgtctgc

SEQ ID NO: 3395 - RNA, 33 nt, synthetic construct
  misc_feature 1..33: note = Hepatitis C virus_NS3
  source 1..33: mol_type = other RNA
tacctggtggcctaccaggccaccgtctgcgcg

SEQ ID NO: 3396 - RNA, 45 nt, synthetic construct
  misc_feature 1..45: note = Hepatitis C virus_NS3
  source 1..45: mol_type = other RNA
gtggcctaccaggccaccgtctgcgcgcgcgcccaggcccccccg

SEQ ID NO: 3397 - RNA, 45 nt, synthetic construct
  misc_feature 1..45: note = Hepatitis C virus_NS3
  source 1..45: mol_type = other RNA
accgcctaccaggccaccgtgtgcgcgcgcgcccaggcccccccg

SEQ ID NO: 3398 - RNA, 45 nt, synthetic construct
  misc_feature 1..45: note = Hepatitis C virus_NS3
  source 1..45: mol_type = other RNA
gcccaggcccccccgcccagctgggaccagatgtggaagtgcctg

SEQ ID NO: 3399 - RNA, 48 nt, synthetic construct
  misc_feature 1..48: note = Hepatitis C virus_NS3
  source 1..48: mol_type = other RNA
gaccagatgtggctgaagtgcctcatccgcctgaagcccaccctgcac

SEQ ID NO: 3400 - RNA, 60 nt, synthetic construct
  misc_feature 1..60: note = Hepatitis C virus_NS3
  source 1..60: mol_type = other RNA
cccaccccgctgctctaccgcctgggcgccgtgcagaacgagatcaccctgacgcacccc

SEQ ID NO: 3401 - RNA, 45 nt, synthetic construct
  misc_feature 1..45: note = Hepatitis C virus_NS3
  source 1..45: mol_type = other RNA
cccgtgaccaagtacatcatggcctgcagcgccgacctggagtcc

SEQ ID NO: 3402 - RNA, 54 nt, synthetic construct
  misc_feature 1..54: note = Hepatitis C virus_NS3
  source 1..54: mol_type = other RNA
cccatcaccaagtacatcatgacctgcatgagcgccgacctggaggtggtcacg

SEQ ID NO: 3403 - RNA, 45 nt, synthetic construct
  misc_feature 1..45: note = Hepatitis C virus_NS3
  source 1..45: mol_type = other RNA
accagcacctgggtgctggtcggcggggtgctcgccgccctggcg

SEQ ID NO: 3404 - RNA, 60 nt, synthetic construct
  misc_feature 1..60: note = Hepatitis C virus_NS4
  source 1..60: mol_type = other RNA
aacttcatcagcggcatccagtacctggccgggctctccaccctgcccggcaacccggcc

SEQ ID NO: 3405 - RNA, 39 nt, synthetic construct
  misc_feature 1..39: note = Hepatitis C virus_NS4a
  source 1..39: mol_type = other RNA
accagcacctgggtgctggtcggcggggtgctcgccgcc

SEQ ID NO: 3406 - RNA, 45 nt, synthetic construct
  misc_feature 1..45: note = Hepatitis C virus_NS4a
  source 1..45: mol_type = other RNA
agcacctgggtgctggtcggcggggtgctcgccgccctggcggcc

SEQ ID NO: 3407 - RNA, 30 nt, synthetic construct
  misc_feature 1..30: note = Hepatitis C virus_NS4a
  source 1..30: mol_type = other RNA
acctgggtgctggtcggcggggtgctcgcc

SEQ ID NO: 3408 - RNA, 60 nt, synthetic construct
  misc_feature 1..60: note = Hepatitis C virus_NS4a
  source 1..60: mol_type = other RNA
gccgcctactgcctgagcaccggctgcgtggtcatcgtggggcgcgtggtcctctccggc

SEQ ID NO: 3409 - RNA, 60 nt, synthetic construct
  misc_feature 1..60: note = Hepatitis C virus_NS4a
  source 1..60: mol_type = other RNA
gtggtcctgagcggcaagcccgccatcatcccggaccgcgaggtgctctaccgggagttc

SEQ ID NO: 3410 - RNA, 45 nt, synthetic construct
  misc_feature 1..45: note = Hepatitis C virus_NS4a
  source 1..45: mol_type = other RNA
ggcaagcccgccatcatcccggaccgcgaggtgctgtaccgggag

SEQ ID NO: 3411 - RNA, 30 nt, synthetic construct
  misc_feature 1..30: note = Hepatitis C virus_NS4a
  source 1..30: mol_type = other RNA
atcatccccgaccgcgaggtgctgtaccgg

SEQ ID NO: 3412 - RNA, 60 nt, synthetic construct
  misc_feature 1..60: note = Hepatitis C virus_NS4b
  source 1..60: mol_type = other RNA
atcgcccccgccgtgcagaccaactggcagaagctggagaccttctgggcgaagcacatg

SEQ ID NO: 3413 - RNA, 60 nt, synthetic construct
  misc_feature 1..60: note = Hepatitis C virus_NS4b
  source 1..60: mol_type = other RNA
ggcatccagtacctggccgggctcagcaccctgcccggcaacccggccatcgcgtccctg

SEQ ID NO: 3414 - RNA, 33 nt, synthetic construct
  misc_feature 1..33: note = Hepatitis C virus_NS4b
  source 1..33: mol_type = other RNA
cagtacctggccggcctcagcaccctgcccggg

SEQ ID NO: 3415 - RNA, 30 nt, synthetic construct
  misc_feature 1..30: note = Hepatitis C virus_NS4b
  source 1..30: mol_type = other RNA
tacctggccggcctcagcaccctgcccggg

SEQ ID NO: 3416 - RNA, 60 nt, synthetic construct
  misc_feature 1..60: note = Hepatitis C virus_NS4b
  source 1..60: mol_type = other RNA
ctggccggcctcagcaccctgcccgggaacccggccatcgcgtccctgatggccttcacc

SEQ ID NO: 3417 - RNA, 54 nt, synthetic construct
  misc_feature 1..54: note = Hepatitis C virus_NS4b
  source 1..54: mol_type = other RNA
ggcctgagcaccctccccgggaacccggccatcgcctccctgatggcgttcacc

SEQ ID NO: 3418 - RNA, 60 nt, synthetic construct
  misc_feature 1..60: note = Hepatitis C virus_NS4b
  source 1..60: mol_type = other RNA
ctgcccggcaacccggccatcgccagcctcatggcgttcaccgccgccgtgacctccccc

SEQ ID NO: 3419 - RNA, 33 nt, synthetic construct
  misc_feature 1..33: note = Hepatitis C virus_NS4b
  source 1..33: mol_type = other RNA
cccgccatcgccagcctgatggcgttcaccgcc

SEQ ID NO: 3420 - RNA, 30 nt, synthetic construct
  misc_feature 1..30: note = Hepatitis C virus_NS4b
  source 1..30: mol_type = other RNA
atcgccagcctgatggccttcaccgcggcc

SEQ ID NO: 3421 - RNA, 60 nt, synthetic construct
  misc_feature 1..60: note = Hepatitis C virus_NS4b
  source 1..60: mol_type = other RNA
ctgaccaccagccagacgctcctgttcaacatcctgggcgggtgggtggccgcccagctc

SEQ ID NO: 3422 - RNA, 45 nt, synthetic construct
  misc_feature 1..45: note = Hepatitis C virus_NS4b
  source 1..45: mol_type = other RNA
acccagcacaccctgctcttcaacatcctgggcgggtgggtggcc

SEQ ID NO: 3423 - RNA, 30 nt, synthetic construct
  misc_feature 1..30: note = Hepatitis C virus_NS4b
  source 1..30: mol_type = other RNA
ctgttcaacatcctcggcgggtgggtggcc

SEQ ID NO: 3424 - RNA, 27 nt, synthetic construct
  misc_feature 1..27: note = Hepatitis C virus_NS4b
  source 1..27: mol_type = other RNA
ttcaacatcctgggcgggtgggtggcc

SEQ ID NO: 3425 - RNA, 36 nt, synthetic construct
  misc_feature 1..36: note = Hepatitis C virus_NS4b
  source 1..36: mol_type = other RNA
ttcaacatcctgggcgggtgggtggccgcccagctc

SEQ ID NO: 3426 - RNA, 45 nt, synthetic construct
  misc_feature 1..45: note = Hepatitis C virus_NS4b
  source 1..45: mol_type = other RNA
ctgggcaaggtgctcgtcgacatcctggccgggtacggcgccggg

SEQ ID NO: 3427 - RNA, 54 nt, synthetic construct
  misc_feature 1..54: note = Hepatitis C virus_NS4b
  source 1..54: mol_type = other RNA
atcatgagcggcgaggtgccctccaccgaggacctggtcaacctcctgccggcc

SEQ ID NO: 3428 - RNA, 60 nt, synthetic construct
  misc_feature 1..60: note = Hepatitis C virus_NS4b
  source 1..60: mol_type = other RNA
ggcgaggtgcccagcaccgaggacctggtcaacctcctgccggccatcctgtcccccggg

SEQ ID NO: 3429 - RNA, 30 nt, synthetic construct
  misc_feature 1..30: note = Hepatitis C virus_NS4b
  source 1..30: mol_type = other RNA
ctggtgaacctcctgcccgccatcctgagc

SEQ ID NO: 3430 - RNA, 21 nt, synthetic construct
  misc_feature 1..21: note = Hepatitis C virus_NS4b
  source 1..21: mol_type = other RNA
aacctgctccccgccatcctg

SEQ ID NO: 3431 - RNA, 60 nt, synthetic construct
  misc_feature 1..60: note = Hepatitis C virus_NS4b
  source 1..60: mol_type = other RNA
gccctggtggtcggcgtggtgtgcgccgcgatcctccgccggcacgtcgggcccggcgag

SEQ ID NO: 3432 - RNA, 60 nt, synthetic construct
  misc_feature 1..60: note = Hepatitis C virus_NS4b
  source 1..60: mol_type = other RNA
ggccccggggagggcgccgtgcagtggatgaaccgcctgatcgccttcgcgagccggggg

SEQ ID NO: 3433 - RNA, 45 nt, synthetic construct
  misc_feature 1..45: note = Hepatitis C virus_NS4b
  source 1..45: mol_type = other RNA
gagggcgccgtgcagtggatgaaccgcctgatcgccttcgcgagc

SEQ ID NO: 3434 - RNA, 60 nt, synthetic construct
  misc_feature 1..60: note = Hepatitis C virus_NS4b
  source 1..60: mol_type = other RNA
ggcgccgtgcagtggatgaaccgcctgatcgccttcgcgagccgggggaaccacgtctcc

SEQ ID NO: 3435 - RNA, 54 nt, synthetic construct
  misc_feature 1..54: note = Hepatitis C virus_NS4b
  source 1..54: mol_type = other RNA
aaccgcctgatcgccttcgccagccggggcaaccacgtgtcccccacccactac

SEQ ID NO: 3436 - RNA, 54 nt, synthetic construct
  misc_feature 1..54: note = Hepatitis C virus_NS5a
  source 1..54: mol_type = other RNA
agccagctgtccgcccgcagcctcaaggccacctgcaccgcgaaccacgactcc

SEQ ID NO: 3437 - RNA, 45 nt, synthetic construct
  misc_feature 1..45: note = Hepatitis C virus_NS5a
  source 1..45: mol_type = other RNA
atcgaggccaacctgctctggcgccaggagatgggcgggaacatc

SEQ ID NO: 3438 - RNA, 42 nt, synthetic construct
  misc_feature 1..42: note = Hepatitis C virus_NS5a
  source 1..42: mol_type = other RNA
gtgagcgtccccgccgagatcctgcgcaagcggcgcttcgcc

SEQ ID NO: 3439 - RNA, 54 nt, synthetic construct
  misc_feature 1..54: note = Hepatitis C virus_NS5a
  source 1..54: mol_type = other RNA
cccgccgagctgcgcaagagccggttcgcccaggcgctcccggtgtgggcccgc

SEQ ID NO: 3440 - RNA, 60 nt, synthetic construct
  misc_feature 1..60: note = Hepatitis C virus_NS5b
  source 1..60: mol_type = other RNA
ctgcgccaccacaacctcgtgtacagcaccacctcccggagcgcctgccagcgccagaag

SEQ ID NO: 3441 - RNA, 60 nt, synthetic construct
  misc_feature 1..60: note = Hepatitis C virus_NS5b
  source 1..60: mol_type = other RNA
aaggtgaccttcgaccgcctgcaggtcctcgacagccactaccaggacgtgctgaaggag

SEQ ID NO: 3442 - RNA, 60 nt, synthetic construct
  misc_feature 1..60: note = Hepatitis C virus_NS5b
  source 1..60: mol_type = other RNA
agcgtgtggaaggacctgctcgaggacaacgtcacccccatcgacaccacgatcatggcc

SEQ ID NO: 3443 - RNA, 60 nt, synthetic construct
  misc_feature 1..60: note = Hepatitis C virus_NS5b
  source 1..60: mol_type = other RNA
aagggcgggcgcaagcccgcccggctgatcgtgttcccggacctcggcgtccgcgtgtgc

SEQ ID NO: 3444 - RNA, 54 nt, synthetic construct
  misc_feature 1..54: note = Hepatitis C virus_NS5b
  source 1..54: mol_type = other RNA
aagcccgcccgcctgatcgtgttcccggacctcggcgtccgggtgtgcgagaag

SEQ ID NO: 3445 - RNA, 60 nt, synthetic construct
  misc_feature 1..60: note = Hepatitis C virus_NS5b
  source 1..60: mol_type = other RNA
aagctgcccctcgccgtgatgggcagctcctacgggttccagtacagcccgggccagcgc

SEQ ID NO: 3446 - RNA, 60 nt, synthetic construct
  misc_feature 1..60: note = Hepatitis C virus_NS5b
  source 1..60: mol_type = other RNA
gtggagttcctggtccaggcctggaagagcaagaagacccccatgggcttctcctacgac

SEQ ID NO: 3447 - RNA, 60 nt, synthetic construct
  misc_feature 1..60: note = Hepatitis C virus_NS5b
  source 1..60: mol_type = other RNA
agcgacatccgcaccgaggaggccatctaccagtgctgcgacctggacccccaggcccgg

SEQ ID NO: 3448 - RNA, 60 nt, synthetic construct
  misc_feature 1..60: note = Hepatitis C virus_NS5b
  source 1..60: mol_type = other RNA
cagtgctgcgacctggacccccaggcccgcgtggccatcaagagcctcaccgagcggctg

SEQ ID NO: 3449 - RNA, 36 nt, synthetic construct
  misc_feature 1..36: note = Hepatitis C virus_NS5b
  source 1..36: mol_type = other RNA
ggctaccgccggtgccgcgccagcggggtgctgacc

SEQ ID NO: 3450 - RNA, 42 nt, synthetic construct
  misc_feature 1..42: note = Hepatitis C virus_NS5b
  source 1..42: mol_type = other RNA
tgcagctccaacgtgagcgtcgcccacgacggcgccgggaag

SEQ ID NO: 3451 - RNA, 60 nt, synthetic construct
  misc_feature 1..60: note = Hepatitis C virus_NS5b
  source 1..60: mol_type = other RNA
agcgtggcccacgacggcgccgggaagcgcgtctactacctgacccgggaccccaccacg

SEQ ID NO: 3452 - RNA, 45 nt, synthetic construct
  misc_feature 1..45: note = Hepatitis C virus_NS5b
  source 1..45: mol_type = other RNA
cgcgaccccaccaccccgctggcccgggccgcgtgggagacggcc

SEQ ID NO: 3453 - RNA, 60 nt, synthetic construct
  misc_feature 1..60: note = Hepatitis C virus_NS5b
  source 1..60: mol_type = other RNA
aacatcatcatgttcgcccccaccctgtgggcccgcatgatcctcatgacccacttcttc

SEQ ID NO: 3454 - RNA, 60 nt, synthetic construct
  misc_feature 1..60: note = Hepatitis C virus_NS5b
  source 1..60: mol_type = other RNA
gcccgcatgatcctgatgacccacttcttcagcgtgctcatcgcccgggaccagctggag

SEQ ID NO: 3455 - RNA, 45 nt, synthetic construct
  misc_feature 1..45: note = Hepatitis C virus_NS5b
  source 1..45: mol_type = other RNA
ctgatgatccacttcttcagcatcctcgcccaggagcagctggag

SEQ ID NO: 3456 - RNA, 57 nt, synthetic construct
  misc_feature 1..57: note = Hepatitis C virus_NS5b
  source 1..57: mol_type = other RNA
atcaaccgcgtggccgcctgcctgcggaagctcggcgtccccccgctgcgcgcgtgg

SEQ ID NO: 3457 - RNA, 42 nt, synthetic construct
  misc_feature 1..42: note = Hepatitis C virus_NS5b
  source 1..42: mol_type = other RNA
tgcggcaagtacctgttcaactgggccgtgaccaagctcaag

SEQ ID NO: 3458 - RNA, 60 nt, synthetic construct
  misc_feature 1..60: note = Hepatitis C virus_NS5b
  source 1..60: mol_type = other RNA
tgcggcaagtacctgttcaactgggccgtgcgcaccaagctcaagctgacccccatcgcc

SEQ ID NO: 3459 - RNA, 45 nt, synthetic construct
  misc_feature 1..45: note = Influenza A
  source 1..45: mol_type = other RNA
gccctgaacaaccgcttccagatcaagggcgtggagctcaagagc

SEQ ID NO: 3460 - RNA, 48 nt, synthetic construct
  misc_feature 1..48: note = Influenza A
  source 1..48: mol_type = other RNA
ggcgccctgaacaaccgcttccagatcaagggggtggagctcaagagc

SEQ ID NO: 3461 - RNA, 45 nt, synthetic construct
  misc_feature 1..45: note = Measles virus_F
  source 1..45: mol_type = other RNA
ctgagcgagatcaagggcgtgatcgtccaccgcctcgagggggtg

SEQ ID NO: 3462 - RNA, 51 nt, synthetic construct
  misc_feature 1..51: note = Canine distemper virus_Fusion protein
  source 1..51: mol_type = other RNA
accgccgcccagatcaccgcgggcatcgccctgcaccagagcaacctcaac

SEQ ID NO: 3463 - RNA, 51 nt, synthetic construct
  misc_feature 1..51: note = Canine distemper virus_Fusion protein
  source 1..51: mol_type = other RNA
atcggcaccgacaacgtgcactacaagatcatgacccgccccagccaccag

SEQ ID NO: 3464 - RNA, 51 nt, synthetic construct
  misc_feature 1..51: note = Canine distemper virus_Fusion protein
  source 1..51: mol_type = other RNA
tacaagatcatgacccgccccagccaccagtacctggtgatcaagctcatc

SEQ ID NO: 3465 - RNA, 51 nt, synthetic construct
  misc_feature 1..51: note = Canine distemper virus_Fusion protein
  source 1..51: mol_type = other RNA
agccaccagtacctggtgatcaagctcatccccaacgcctccctgatcgag

SEQ ID NO: 3466 - RNA, 51 nt, synthetic construct
  misc_feature 1..51: note = Canine distemper virus_Fusion protein
  source 1..51: mol_type = other RNA
aagctgatccccaacgccagcctcatcgagaactgcaccaaggccgagctg

SEQ ID NO: 3467 - RNA, 51 nt, synthetic construct
  misc_feature 1..51: note = Canine distemper virus_Fusion protein
  source 1..51: mol_type = other RNA
ctgatcgagaactgcaccaaggccgagctcggcgagtacgagaagctgctg

SEQ ID NO: 3468 - RNA, 51 nt, synthetic construct
  misc_feature 1..51: note = Canine distemper virus_Fusion protein
  source 1..51: mol_type = other RNA
gccgagctgggcgagtacgagaagctcctgaacagcgtgctggagcccatc

SEQ ID NO: 3469 - RNA, 51 nt, synthetic construct
  misc_feature 1..51: note = Canine distemper virus_Fusion protein
  source 1..51: mol_type = other RNA
aagctgctcaacagcgtgctggagcccatcaaccaggccctgaccctcatg

SEQ ID NO: 3470 - RNA, 51 nt, synthetic construct
  misc_feature 1..51: note = Canine distemper virus_Fusion protein
  source 1..51: mol_type = other RNA
gagcccatcaaccaggccctgaccctcatgaccaagaacgtgaagccgctg

SEQ ID NO: 3471 - RNA, 51 nt, synthetic construct
  misc_feature 1..51: note = Canine distemper virus_Fusion protein
  source 1..51: mol_type = other RNA
accctgatgaccaagaacgtgaagcccctccagagcctgggctccgggcgc

SEQ ID NO: 3472 - RNA, 51 nt, synthetic construct
  misc_feature 1..51: note = Canine distemper virus_Fusion protein
  source 1..51: mol_type = other RNA
aagcccctgcagagcctcggctccgggcgccggcagcgccggttcgccggc

SEQ ID NO: 3473 - RNA, 51 nt, synthetic construct
  misc_feature 1..51: note = Canine distemper virus_Fusion protein
  source 1..51: mol_type = other RNA
agcggccgccggcagcgccggttcgccggggtggtcctggccggcgtggcg

SEQ ID NO: 3474 - RNA, 51 nt, synthetic construct
  misc_feature 1..51: note = Canine distemper virus_Fusion protein
  source 1..51: mol_type = other RNA
ttcgccggcgtggtcctggccggggtggcgctcggcgtggccaccgccgcc

SEQ ID NO: 3475 - RNA, 51 nt, synthetic construct
  misc_feature 1..51: note = Canine distemper virus_Fusion protein
  source 1..51: mol_type = other RNA
ggcgtggccctgggggtcgccaccgcggcccagatcaccgccggcatcgcc

SEQ ID NO: 3476 - RNA, 51 nt, synthetic construct
  misc_feature 1..51: note = Canine distemper virus_Fusion protein
  source 1..51: mol_type = other RNA
ggcatcgccctgcaccagagcaacctcaacgcccaggcgatccagtccctg

SEQ ID NO: 3477 - RNA, 51 nt, synthetic construct
  misc_feature 1..51: note = Canine distemper virus_Fusion protein
  source 1..51: mol_type = other RNA
aacctgaacgcccaggccatccagagcctccgcacctccctggagcagagc

SEQ ID NO: 3478 - RNA, 51 nt, synthetic construct
  misc_feature 1..51: note = Canine distemper virus_Fusion protein
  source 1..51: mol_type = other RNA
cagagcctgcgcacctccctcgagcagagcaacaaggccatcgaggagatc

SEQ ID NO: 3479 - RNA, 51 nt, synthetic construct
  misc_feature 1..51: note = Canine distemper virus_Fusion protein
  source 1..51: mol_type = other RNA
gagcagagcaacaaggccatcgaggagatccgcgaggccacccaggagacc

SEQ ID NO: 3480 - RNA, 51 nt, synthetic construct
  misc_feature 1..51: note = Canine distemper virus_Fusion protein
  source 1..51: mol_type = other RNA
agctccaagacccagacccacacgcagcaggaccgccccccgcagcccagc

SEQ ID NO: 3481 - RNA, 51 nt, synthetic construct
  misc_feature 1..51: note = Canine distemper virus_Fusion protein
  source 1..51: mol_type = other RNA
cagcccagcaccgagctggaggagacccgcacgtcccgggcccgccacagc

SEQ ID NO: 3482 - RNA, 51 nt, synthetic construct
  misc_feature 1..51: note = Canine distemper virus_Fusion protein
  source 1..51: mol_type = other RNA
cgccacagcaccacctccgcccagcggagcacgcactacgacccccgcacc

SEQ ID NO: 3483 - RNA, 51 nt, synthetic construct
  misc_feature 1..51: note = Canine distemper virus_Fusion protein
  source 1..51: mol_type = other RNA
ccccgcaccagcgaccggccggtgtcctacaccatgaaccgcacgcggagc

SEQ ID NO: 3484 - RNA, 51 nt, synthetic construct
  misc_feature 1..51: note = Canine distemper virus_Fusion protein
  source 1..51: mol_type = other RNA
acccgcagccggaagcagacctcccaccgcctgaagaacatccccgtgcac

SEQ ID NO: 3485 - RNA, 51 nt, synthetic construct
  misc_feature 1..51: note = Canine distemper virus_Fusion protein
  source 1..51: mol_type = other RNA
accgagctgctcagcatcttcggcccctccctgcgcgacccgatcagcgcc

SEQ ID NO: 3486 - RNA, 51 nt, synthetic construct
  misc_feature 1..51: note = Canine distemper virus_Fusion protein
  source 1..51: mol_type = other RNA
ccccgctacatcgccaccaacggctacctgatcagcaacttcgacgagtcc

SEQ ID NO: 3487 - RNA, 51 nt, synthetic construct
  misc_feature 1..51: note = Canine distemper virus_Fusion protein
  source 1..51: mol_type = other RNA
tgcatccgcggcgacaccagctcctgcgcccggaccctggtgagcgggacg

SEQ ID NO: 3488 - RNA, 51 nt, synthetic construct
  misc_feature 1..51: note = Canine distemper virus_Fusion protein
  source 1..51: mol_type = other RNA
gacgagagctcctgcgtgttcgtcagcgagtccgccatctgcagccagaac

SEQ ID NO: 3489 - RNA, 51 nt, synthetic construct
  misc_feature 1..51: note = Canine distemper virus_Fusion protein
  source 1..51: mol_type = other RNA
accagcaccatcatcaaccagtcccccgacaagctgctcacgttcatcgcc

SEQ ID NO: 3490 - RNA, 51 nt, synthetic construct
  misc_feature 1..51: note = Canine distemper virus_Fusion protein
  source 1..51: mol_type = other RNA
agccccgacaagctgctcaccttcatcgcctccgacacctgcccgctggtg

SEQ ID NO: 3491 - RNA, 72 nt, synthetic construct
  misc_feature 1..72: note = Mucin-1
  source 1..72: mol_type = other RNA
agcaccgcccccccggcccacggcgtgacctccgcgcccgacacgcgcgcccccgggagcaccgcccccccg

SEQ ID NO: 3492 - RNA, 57 nt, synthetic construct
  misc_feature 1..57: note = Mucin-1
  source 1..57: mol_type = other RNA
ggcgtgaccagcgcccccgacacccgcccggcccccgggtccacggcgagctccctg

SEQ ID NO: 3493 - RNA, 54 nt, synthetic construct
  misc_feature 1..54: note = Mucin-1
  source 1..54: mol_type = other RNA
ggcgtgaccagcgcccccgacacccgcccggcccccgggtccacggcgagcctg

SEQ ID NO: 3494 - RNA, 81 nt, synthetic construct
  misc_feature 1..81: note = Mucin-1
  source 1..81: mol_type = other RNA
accgcccccccggcccacggcgtgaccagcgcgcccgacacgcgccccgcccccgggtccaccgccccgcccaagaagggc

SEQ ID NO: 3495 - RNA, 78 nt, synthetic construct
  misc_feature 1..78: note = Mucin-1
  source 1..78: mol_type = other RNA
agcaccgcccccccggcccacggcgtgacctccgcgcccgacacgcgccccgcccccgggagcaccgccccgcccaag

SEQ ID NO: 3496 - RNA, 12 nt, synthetic construct
  misc_feature 1..12: note = foot-and-mouth disease virus_VP3
  source 1..12: mol_type = other RNA
ggcgtggccgag

SEQ ID NO: 3497 - RNA, 30 nt, synthetic construct
  misc_feature 1..30: note = foot-and-mouth disease virus_VP3
  source 1..30: mol_type = other RNA
accgccagcggcgtggccgagaccacgaac

SEQ ID NO: 3498 - RNA, 48 nt, synthetic construct
  misc_feature 1..48: note = foot-and-mouth disease virus
  source 1..48: mol_type = other RNA
accgccaagagcaagaagttcccctcctacaccgccacgtaccagttc

SEQ ID NO: 3499 - RNA, 48 nt, synthetic construct
  misc_feature 1..48: note = Clostridium tetani
  source 1..48: mol_type = other RNA
gcccagtacatcaaggccaacagcaagttcatcggcatcaccgagctg

SEQ ID NO: 3500 - RNA, 48 nt, synthetic construct
  misc_feature 1..48: note = Human immunodeficiency virus 1_gp120 protein
  source 1..48: mol_type = other RNA
aagcagatcatcaacatgtggcaggtggtcggcaaggccatgtacgcc

SEQ ID NO: 3501 - RNA, 45 nt, synthetic construct
  misc_feature 1..45: note = Human immunodeficiency virus 1_gag protein
  source 1..45: mol_type = other RNA
aagcgctggatcatcctgggcctcaacaagatcgtgcggatgtac

SEQ ID NO: 3502 - RNA, 48 nt, synthetic construct
  misc_feature 1..48: note = Human immunodeficiency virus 1_envelope glycoprotein
  source 1..48: mol_type = other RNA
aagcagatcatcaacatgtggcaggaggtgggcaaggccatgtacgcc

SEQ ID NO: 3503 - RNA, 48 nt, synthetic construct
  misc_feature 1..48: note = Human immunodeficiency virus 1_envelope glycoprotein
  source 1..48: mol_type = other RNA
aagcagatcatcaacatgtggcaggccgtgggcaaggccatgtacgcg

SEQ ID NO: 3504 - RNA, 48 nt, synthetic construct; identical to SEQ ID NO: 3499
  misc_feature 1..48: note = Tetanus Toxid
  source 1..48: mol_type = other RNA

SEQ ID NO: 3505 - RNA, 21 nt, synthetic construct
  misc_feature 1..21: note = Human papilloma virus 16_E17
  source 1..21: mol_type = other RNA
gaccgcgcccactacaacatc

SEQ ID NO: 3506 - RNA, 57 nt, synthetic construct
  misc_feature 1..57: note = Human papilloma virus 16_E17
  source 1..57: mol_type = other RNA
caggccgagcccgaccgcgcccactacaacatcgtgaccttctgctgcaagtgcgac

SEQ ID NO: 3507 - RNA, 39 nt, synthetic construct
  misc_feature 1..39: note = PADRE
  source 1..39: mol_type = other RNA
gccaagttcgtggctgcatggaccctgaaagccgcggct

SEQ ID NO: 3508 - RNA, 54 nt, synthetic construct
  misc_feature 1..54: note = Hepatitis C virus_Core
  source 1..54: mol_type = other RNA
atgagcaccaaccccaagcctcagatcaaaacaaagagaaatactaacaggcgg

SEQ ID NO: 3509 - RNA, 60 nt, synthetic construct
  misc_feature 1..60: note = Hepatitis C virus_Core
  source 1..60: mol_type = other RNA
atgagcaccaaccccaagcctcagagaaaaacaaagaggaatactaaccggcgccaagac

SEQ ID NO: 3510 - RNA, 60 nt, synthetic construct
  misc_feature 1..60: note = Hepatitis C virus_Core
  source 1..60: mol_type = other RNA
gacgtgaagttccccggcgggggacagatcgtcggtggcgtttacctgctccctagaagg

SEQ ID NO: 3511 - RNA, 45 nt, synthetic construct
  misc_feature 1..45: note = Hepatitis C virus_Core
  source 1..45: mol_type = other RNA
gtgggcggggtctacctgctccccagaaggggacctcggcttggt

SEQ ID NO: 3512 - RNA, 60 nt, synthetic construct
  misc_feature 1..60: note = Hepatitis C virus_Core
  source 1..60: mol_type = other RNA
gtgggcggggtctacctgctccccagaaggggacctcggcttggtgttcgcgccacccga

SEQ ID NO: 3513 - RNA, 45 nt, synthetic construct
  misc_feature 1..45: note = Hepatitis C virus_Core
  source 1..45: mol_type = other RNA
agaaggcggagccgcaacctgggcaaggtgatcgacaccctcaca

SEQ ID NO: 3514 - RNA, 45 nt, synthetic construct
  misc_feature 1..45: note = Hepatitis C virus_Core
  source 1..45: mol_type = other RNA
accctgacatgcggcttcgccgacctcatggggtacatccccctt

SEQ ID NO: 3515 - RNA, 45 nt, synthetic construct
  misc_feature 1..45: note = Hepatitis C virus_Core
  source 1..45: mol_type = other RNA
ggcgcccccctggggggagctgcaagagccctcgcgcacggtgtg

SEQ ID NO: 3516 - RNA, 60 nt, synthetic construct
  misc_feature 1..60: note = Hepatitis C virus_Core
  source 1..60: mol_type = other RNA
ggcgcccccctggggggagctgcaagagccctcgcgcacggtgtgagggtccttgaggac

SEQ ID NO: 3517 - RNA, 45 nt, synthetic construct
  misc_feature 1..45: note = Hepatitis C virus_Core
  source 1..45: mol_type = other RNA
gcccccctgggcggggctgcaagagccctcgcgcacggagtgagg

SEQ ID NO: 3518 - RNA, 45 nt, synthetic construct
  misc_feature 1..45: note = Hepatitis C virus_Core
  source 1..45: mol_type = other RNA
agcttctccatctttctgctcgcccttctgtcttgcttgaccatt

SEQ ID NO: 3519 - RNA, 33 nt, synthetic construct
  misc_feature 1..33: note = Hepatitis C virus_Core
  source 1..33: mol_type = other RNA
ctgctcagctgccttaccatccccgcctccgct

SEQ ID NO: 3520 - RNA, 45 nt, synthetic construct
  misc_feature 1..45: note = Hepatitis C virus_E1
  source 1..45: mol_type = other RNA
cacgtgaccaacgactgccccaatagctccatcgtctacgaggcc

SEQ ID NO: 3521 - RNA, 45 nt, synthetic construct
  misc_feature 1..45: note = Hepatitis C virus_E1
  source 1..45: mol_type = other RNA
tgccccaacagctccatcgtgtacgaggcccacgacgctattctg

SEQ ID NO: 3522 - RNA, 45 nt, synthetic construct
  misc_feature 1..45: note = Hepatitis C virus_E1
  source 1..45: mol_type = other RNA
agcagatgctgggtggccctgacccccacactcgctgcaaggaac

SEQ ID NO: 3523 - RNA, 45 nt, synthetic construct
  misc_feature 1..45: note = Hepatitis C virus_E1
  source 1..45: mol_type = other RNA
agatgctgggtggccatgacccccacagtcgctactagggacggc

SEQ ID NO: 3524 - RNA, 45 nt, synthetic construct
  misc_feature 1..45: note = Hepatitis C virus_E1
  source 1..45: mol_type = other RNA
atgacccccacagtggccactagagacggcaagctgcctgctacg

SEQ ID NO: 3525 - RNA, 45 nt, synthetic construct
  misc_feature 1..45: note = Hepatitis C virus_E1
  source 1..45: mol_type = other RNA
aagctgcccgccacccagctcagaaggcacatcgaccttctggtg

SEQ ID NO: 3526 - RNA, 45 nt, synthetic construct
  misc_feature 1..45: note = Hepatitis C virus_E1
  source 1..45: mol_type = other RNA
accatcagaaggcacgtggacctgctcgtcggcgccgctgcattc

SEQ ID NO: 3527 - RNA, 45 nt, synthetic construct
  misc_feature 1..45: note = Hepatitis C virus_E1
  source 1..45: mol_type = other RNA
ggcagcgccaccctgtgctccgctctctacgtgggggacctttgt

SEQ ID NO: 3528 - RNA, 45 nt, synthetic construct
  misc_feature 1..45: note = Hepatitis C virus_E1
  source 1..45: mol_type = other RNA
ggcagcgtgttcctgatcgggcagctctttaccttctcccccaga

SEQ ID NO: 3529 - RNA, 45 nt, synthetic construct
  misc_feature 1..45: note = Hepatitis C virus_E1
  source 1..45: mol_type = other RNA
accttcagccccagaaggcaccagacagtgcaagactgcaactgt

SEQ ID NO: 3530 - RNA, 45 nt, synthetic construct
  misc_feature 1..45: note = Hepatitis C virus_E1
  source 1..45: mol_type = other RNA
agcatctaccccggccacattaccgggcatagaatggcctgggac

SEQ ID NO: 3531 - RNA, 45 nt, synthetic construct
  misc_feature 1..45: note = Hepatitis C virus_E1
  source 1..45: mol_type = other RNA
cacatcaccggccatagaatggcctgggacatgatgatgaactgg

SEQ ID NO: 3532 - RNA, 45 nt, synthetic construct
  misc_feature 1..45: note = Hepatitis C virus_E1
  source 1..45: mol_type = other RNA
cacgtgagcggccatagaatggcctgggacatgatgatgaactgg

SEQ ID NO: 3533 - RNA, 45 nt, synthetic construct
  misc_feature 1..45: note = Hepatitis C virus_E1
  source 1..45: mol_type = other RNA
atgatgatgaactggagccccaccgccgctctggtgatggcacag

SEQ ID NO: 3534 - RNA, 45 nt, synthetic construct
  misc_feature 1..45: note = Hepatitis C virus_E1
  source 1..45: mol_type = other RNA
agccccaccgccgctctggtggtctcccagctccttagaatccct

SEQ ID NO: 3535 - RNA, 45 nt, synthetic construct
  misc_feature 1..45: note = Hepatitis C virus_E1
  source 1..45: mol_type = other RNA
caggccatcctggacatgattgctggcgcacactggggggtgctc

SEQ ID NO: 3536 - RNA, 45 nt, synthetic construct
  misc_feature 1..45: note = Hepatitis C virus_E1
  source 1..45: mol_type = other RNA
cactggggcgtgctggccgggctcgcttactatagcatggtcgga

SEQ ID NO: 3537 - RNA, 45 nt, synthetic construct
  misc_feature 1..45: note = Hepatitis C virus_E1
  source 1..45: mol_type = other RNA
ttcagcatggtgggcaactgggccaaggtcctggttgtgctcctt

SEQ ID NO: 3538 - RNA, 45 nt, synthetic construct
  misc_feature 1..45: note = Hepatitis C virus_E1
  source 1..45: mol_type = other RNA
aactgggccaaggtgctggtcgttctccttctgttcgctggcgtg

SEQ ID NO: 3539 - RNA, 54 nt, synthetic construct
  misc_feature 1..54: note = Hepatitis C virus_E2
  source 1..54: mol_type = other RNA
ggcttcgccacccagagactgacaagcctctttgctcttgggccctcccaaaag

SEQ ID NO: 3540 - RNA, 48 nt, synthetic construct
  misc_feature 1..48: note = Hepatitis C virus_E2
  source 1..48: mol_type = other RNA
tgcctgtggatgatgctccttatcgcccaggctgagcaagcactgttg

SEQ ID NO: 3541 - RNA, 45 nt, synthetic construct
  misc_feature 1..45: note = Hepatitis C virus_NS2
  source 1..45: mol_type = other RNA
gccatggacagagagatggctgcaagctgcggcggggccgtgttc

SEQ ID NO: 3542 - RNA, 45 nt, synthetic construct
  misc_feature 1..45: note = Hepatitis C virus_NS2
  source 1..45: mol_type = other RNA
agagacgccatcattctgctcacctgcgctgtgcaccccgagctt

SEQ ID NO: 3543 - RNA, 45 nt, synthetic construct
  misc_feature 1..45: note = Hepatitis C virus_NS2
  source 1..45: mol_type = other RNA
ggccccctgatggtgctccaggccgggatcattagagctccttac

SEQ ID NO: 3544 - RNA, 60 nt, synthetic construct
  misc_feature 1..60: note = Hepatitis C virus_NS2
  source 1..60: mol_type = other RNA
cccgtgagcgccagaaggggccgggagatcctgctcgggcctgctgacggaatggtctcc

SEQ ID NO: 3545 - RNA, 45 nt, synthetic construct
  misc_feature 1..45: note = Hepatitis C virus_NS3
  source 1..45: mol_type = other RNA
ggccaggggtggagactgctcgcccccatcaccgcttacagccaa

SEQ ID NO: 3546 - RNA, 45 nt, synthetic construct
  misc_feature 1..45: note = Hepatitis C virus_NS3
  source 1..45: mol_type = other RNA
ggccccgtgatccagatgtacaccaacgtcgaccaagatctggtt

SEQ ID NO: 3547 - RNA, 45 nt, synthetic construct
  misc_feature 1..45: note = Hepatitis C virus_NS3
  source 1..45: mol_type = other RNA
cagggcagcagatccctgaccccctgcacatgtgggtcttcagac

SEQ ID NO: 3548 - RNA, 45 nt, synthetic construct
  misc_feature 1..45: note = Hepatitis C virus_NS3
  source 1..45: mol_type = other RNA
agctccgacctgtacctcgtgaccagacacgccgatgtcatcccc

SEQ ID NO: 3549 - RNA, 60 nt, synthetic construct
  misc_feature 1..60: note = Hepatitis C virus_NS3
  source 1..60: mol_type = other RNA
tacctggtgaccagacacgccgacgtcatccccgttaggcggcgcggcgatagccgaggg

SEQ ID NO: 3550 - RNA, 45 nt, synthetic construct
  misc_feature 1..45: note = Hepatitis C virus_NS3
  source 1..45: mol_type = other RNA
agcctgctctcccccagacctatctcttaccttaagggctcaagt

SEQ ID NO: 3551 - RNA, 45 nt, synthetic construct
  misc_feature 1..45: note = Hepatitis C virus_NS3
  source 1..45: mol_type = other RNA
tgccccgccggccacgctgtggggatcttcagagcagccgtctgt

SEQ ID NO: 3552 - RNA, 60 nt, synthetic construct
  misc_feature 1..60: note = Hepatitis C virus_NS3
  source 1..60: mol_type = other RNA
ctggagaccacaatgagaagccccgtgttcactgacaactcctctcctccagtcgttccg

SEQ ID NO: 3553 - RNA, 42 nt, synthetic construct
  misc_feature 1..42: note = Hepatitis C virus_NS3
  source 1..42: mol_type = other RNA
agccccgtgttcaccgacaactcctctcctgccgtcccacag

SEQ ID NO: 3554 - RNA, 45 nt, synthetic construct
  misc_feature 1..45: note = Hepatitis C virus_NS3
  source 1..45: mol_type = other RNA
gtgccccagagcttccaagtcgcccacctgcatgctcctaccggc

SEQ ID NO: 3555 - RNA, 45 nt, synthetic construct
  misc_feature 1..45: note = Hepatitis C virus_NS3
  source 1..45: mol_type = other RNA
ttccaggtggcccacctgcatgctcccaccggcagcgggaagtcc

SEQ ID NO: 3556 - RNA, 45 nt, synthetic construct
  misc_feature 1..45: note = Hepatitis C virus_NS3
  source 1..45: mol_type = other RNA
aaggtgcccgccgcttacgcagcccagggctataaagtcctggtt

SEQ ID NO: 3557 - RNA, 60 nt, synthetic construct
  misc_feature 1..60: note = Hepatitis C virus_NS3
  source 1..60: mol_type = other RNA
cccgccgcttacgcagcccagggctataaggtgctggtcctcaaccctagcgttgcggct

SEQ ID NO: 3558 - RNA, 42 nt, synthetic construct
  misc_feature 1..42: note = Hepatitis C virus_NS3
  source 1..42: mol_type = other RNA
gccgctaagggctacaaagtgctggtcctccccagcgttgca

SEQ ID NO: 3559 - RNA, 45 nt, synthetic construct
  misc_feature 1..45: note = Hepatitis C virus_NS3
  source 1..45: mol_type = other RNA
gcccagggctacaaggtgctggtcctcaaccccagcgttgctgca

SEQ ID NO: 3560 - RNA, 45 nt, synthetic construct
  misc_feature 1..45: note = Hepatitis C virus_NS3
  source 1..45: mol_type = other RNA
cagggctacaaggtgctggtcctcaaccccagcgttgccgctacc

SEQ ID NO: 3561 - RNA, 42 nt, synthetic construct
  misc_feature 1..42: note = Hepatitis C virus_NS3
  source 1..42: mol_type = other RNA
ggctacaaggtgctggtcctcaaccccagcgttgccgctacc

SEQ ID NO: 3562 - RNA, 54 nt, synthetic construct
  misc_feature 1..54: note = Hepatitis C virus_NS3
  source 1..54: mol_type = other RNA
ggctacaaggtgctggtcctcaaccccagcgttgccgctacccttgggttcgga

SEQ ID NO: 3563 - RNA, 60 nt, synthetic construct
  misc_feature 1..60: note = Hepatitis C virus_NS3
  source 1..60: mol_type = other RNA
ggctacaaggtgctggtcctcaaccccagcgttgccgctacccttgggttcggagcatat

SEQ ID NO: 3564 - RNA, 27 nt, synthetic construct
  misc_feature 1..27: note = Hepatitis C virus_NS3
  source 1..27: mol_type = other RNA
gtgctggtcctcaaccccagcgttgcc

SEQ ID NO: 3565 - RNA, 60 nt, synthetic construct
  misc_feature 1..60: note = Hepatitis C virus_NS3
  source 1..60: mol_type = other RNA
atcacctacagcacatatggcaagttcctggccgacgggggatgctccggtggcgcttac

SEQ ID NO: 3566 - RNA, 54 nt, synthetic construct
  misc_feature 1..54: note = Hepatitis C virus_NS3
  source 1..54: mol_type = other RNA
tacagcacctatggcaagttcctggccgacgctgggtgctccggaggtgcatac

SEQ ID NO: 3567 - RNA, 45 nt, synthetic construct
  misc_feature 1..45: note = Hepatitis C virus_NS3
  source 1..45: mol_type = other RNA
acctacggcaagttcctggccgacgggggatgcagcggtggcgct

SEQ ID NO: 3568 - RNA, 54 nt, synthetic construct
  misc_feature 1..54: note = Hepatitis C virus_NS3
  source 1..54: mol_type = other RNA
ctggccgacgctggctgcagcgggggagcatacgatatcattatatgtgacgag

SEQ ID NO: 3569 - RNA, 45 nt, synthetic construct
  misc_feature 1..45: note = Hepatitis C virus_NS3
  source 1..45: mol_type = other RNA
ggcggggcctacgacatcattatatgcgatgagtgtcacagcacc

SEQ ID NO: 3570 - RNA, 45 nt, synthetic construct
  misc_feature 1..45: note = Hepatitis C virus_NS3
  source 1..45: mol_type = other RNA
gacatcattatatgcgatgagtgtcacagcaccgacgccacatcc

SEQ ID NO: 3571 - RNA, 60 nt, synthetic construct
  misc_feature 1..60: note = Hepatitis C virus_NS3
  source 1..60: mol_type = other RNA
accgacgccacaagcatcctgggcattgggactgtgctcgatcaggctgagacggcagga

SEQ ID NO: 3572 - RNA, 45 nt, synthetic construct
  misc_feature 1..45: note = Hepatitis C virus_NS3
  source 1..45: mol_type = other RNA
gccaccagcatcctgggcattgggacagtgctcgaccaggctgag

SEQ ID NO: 3573 - RNA, 54 nt, synthetic construct
  misc_feature 1..54: note = Hepatitis C virus_NS3
  source 1..54: mol_type = other RNA
gtgatcaagggcgggagacacctgattttctgccatagcaaaaagaaatgtgac

SEQ ID NO: 3574 - RNA, 54 nt, synthetic construct
  misc_feature 1..54: note = Hepatitis C virus_NS3
  source 1..54: mol_type = other RNA
gtgatcaagggcgggagacacctgattttctgccatagccaccatcactgtgac

SEQ ID NO: 3575 - RNA, 45 nt, synthetic construct
  misc_feature 1..45: note = Hepatitis C virus_NS3
  source 1..45: mol_type = other RNA
ggcgggagacacctgatcttctgccatagcaagaaaaagtgtgac

SEQ ID NO: 3576 - RNA, 30 nt, synthetic construct
  misc_feature 1..30: note = Hepatitis C virus_NS3
  source 1..30: mol_type = other RNA
ggcagacacctgatcttctgccatagcaag

SEQ ID NO: 3577 - RNA, 33 nt, synthetic construct
  misc_feature 1..33: note = Hepatitis C virus_NS3
  source 1..33: mol_type = other RNA
ggcagacacctgatcttctgccatagcaagagg

SEQ ID NO: 3578 - RNA, 45 nt, synthetic construct
  misc_feature 1..45: note = Hepatitis C virus_NS3
  source 1..45: mol_type = other RNA
aagtgcgacgagctggccgctaaactcgtggcacttggcatcaac

SEQ ID NO: 3579 - RNA, 45 nt, synthetic construct
  misc_feature 1..45: note = Hepatitis C virus_NS3
  source 1..45: mol_type = other RNA
ctggccgctaagctcgtggcacttggcatcaacgccgtcgcgtac

SEQ ID NO: 3580 - RNA, 45 nt, synthetic construct
  misc_feature 1..45: note = Hepatitis C virus_NS3
  source 1..45: mol_type = other RNA
ggcatcaacgccgtggcttactatagagggctggacgtcagcgtt

SEQ ID NO: 3581 - RNA, 60 nt, synthetic construct
  misc_feature 1..60: note = Hepatitis C virus_NS3
  source 1..60: mol_type = other RNA
ggcatcaacgccgtggcttactatagagggctggacgtcagcgttattcccacctccgga

SEQ ID NO: 3582 - RNA, 33 nt, synthetic construct
  misc_feature 1..33: note = Hepatitis C virus_NS3
  source 1..33: mol_type = other RNA
gtggcctactatagaggcctggacgtcagcgtt

SEQ ID NO: 3583 - RNA, 45 nt, synthetic construct
  misc_feature 1..45: note = Hepatitis C virus_NS3
  source 1..45: mol_type = other RNA
gtggcctactatagaggcctggacgtcagcgttatccccacctcc

SEQ ID NO: 3584 - RNA, 54 nt, synthetic construct
  misc_feature 1..54: note = Hepatitis C virus_NS3
  source 1..54: mol_type = other RNA
atccccaccaacggcgacgtggtcgttgtgagcacagatgccctgatgactggg

SEQ ID NO: 3585 - RNA, 45 nt, synthetic construct
  misc_feature 1..45: note = Hepatitis C virus_NS3
  source 1..45: mol_type = other RNA
gccctgatgaccggctacacaggggacttcgatagcgtgatcgac

SEQ ID NO: 3586 - RNA, 54 nt, synthetic construct
  misc_feature 1..54: note = Hepatitis C virus_NS3
  source 1..54: mol_type = other RNA
gacttcgatagcgtgatcgactgcaacacctgtgtcacacagactgttgatttt

SEQ ID NO: 3587 - RNA, 45 nt, synthetic construct
  misc_feature 1..45: note = Hepatitis C virus_NS3
  source 1..45: mol_type = other RNA
gtgatcgactgcaacacctgtgtcacacagactgttgatttcagc

SEQ ID NO: 3588 - RNA, 45 nt, synthetic construct
  misc_feature 1..45: note = Hepatitis C virus_NS3
  source 1..45: mol_type = other RNA
aacacctgcgtgacacagactgtcgacttcagcctggatcccacg

SEQ ID NO: 3589 - RNA, 45 nt, synthetic construct
  misc_feature 1..45: note = Hepatitis C virus_NS3
  source 1..45: mol_type = other RNA
acccagacagtggacttcagcctggatcccacttttacgatcgag

SEQ ID NO: 3590 - RNA, 45 nt, synthetic construct
  misc_feature 1..45: note = Hepatitis C virus_NS3
  source 1..45: mol_type = other RNA
gagcagtacgtggacttcagcctggatcccaccttttccatcgaa

SEQ ID NO: 3591 - RNA, 54 nt, synthetic construct
  misc_feature 1..54: note = Hepatitis C virus_NS3
  source 1..54: mol_type = other RNA
cccaccttcacaatcgagactacgaccctgcctcaggacgccgtgagcagaaca

SEQ ID NO: 3592 - RNA, 45 nt, synthetic construct
  misc_feature 1..45: note = Hepatitis C virus_NS3
  source 1..45: mol_type = other RNA
atgttcgacagctccgtgctgtgcgagtgttacgatgccggctgc

SEQ ID NO: 3593 - RNA, 60 nt, synthetic construct
  misc_feature 1..60: note = Hepatitis C virus_NS3
  source 1..60: mol_type = other RNA
tacgacgccggctgcgcttggtatgagctgacccccgcagaaacaactgtgagactcagg

SEQ ID NO: 3594 - RNA, 51 nt, synthetic construct
  misc_feature 1..51: note = Hepatitis C virus_NS3
  source 1..51: mol_type = other RNA
atgcccgccgagaccacagtgagactgagggcttacatgaacactcctggc

SEQ ID NO: 3595 - RNA, 60 nt, synthetic construct
  misc_feature 1..60: note = Hepatitis C virus_NS3
  source 1..60: mol_type = other RNA
acccccgccgagacaactgtgagactgagggcttacatgaacacgcctggcctcccagtc

SEQ ID NO: 3596 - RNA, 45 nt, synthetic construct
  misc_feature 1..45: note = Hepatitis C virus_NS3
  source 1..45: mol_type = other RNA
accacagtgagactgagggcctacatgaacactcccggcctccct

SEQ ID NO: 3597 - RNA, 36 nt, synthetic construct
  misc_feature 1..36: note = Hepatitis C virus_NS3
  source 1..36: mol_type = other RNA
ctgagagcctacatgaacacccccggcctccctgtg

SEQ ID NO: 3598 - RNA, 45 nt, synthetic construct
  misc_feature 1..45: note = Hepatitis C virus_NS3
  source 1..45: mol_type = other RNA
ctgagagcctacatgaacacccccggcctccctgtgtgccaggac

SEQ ID NO: 3599 - RNA, 33 nt, synthetic construct
  misc_feature 1..33: note = Hepatitis C virus_NS3
  source 1..33: mol_type = other RNA
agagcctacatgaacacccccggcctgcctgtg

SEQ ID NO: 3600 - RNA, 30 nt, synthetic construct
  misc_feature 1..30: note = Hepatitis C virus_NS3
  source 1..30: mol_type = other RNA
gcctacatgaacacccccggcctgcctgtg

SEQ ID NO: 3601 - RNA, 45 nt, synthetic construct
  misc_feature 1..45: note = Hepatitis C virus_NS3
  source 1..45: mol_type = other RNA
gagagcgtgttcaccggcctgacacacatcgacgcccattttctc

SEQ ID NO: 3602 - RNA, 45 nt, synthetic construct
  misc_feature 1..45: note = Hepatitis C virus_NS3
  source 1..45: mol_type = other RNA
accggcctgacacacatcgacgcccatttcctcagccagactaag

SEQ ID NO: 3603 - RNA, 60 nt, synthetic construct
  misc_feature 1..60: note = Hepatitis C virus_NS3
  source 1..60: mol_type = other RNA
gagaacctgccctacctcgtggcctatcaggctaccgtctgcgcaagagcccaagcgcct

SEQ ID NO: 3604 - RNA, 45 nt, synthetic construct
  misc_feature 1..45: note = Hepatitis C virus_NS3
  source 1..45: mol_type = other RNA
ctgccctacctcgtggcctatcaggctaccgtctgcgcaagagcc

SEQ ID NO: 3605 - RNA, 42 nt, synthetic construct
  misc_feature 1..42: note = Hepatitis C virus_NS3
  source 1..42: mol_type = other RNA
aacctgccctacctcgtggcctatcaggctaccgtctgcgca

SEQ ID NO: 3606 - RNA, 30 nt, synthetic construct
  misc_feature 1..30: note = Hepatitis C virus_NS3
  source 1..30: mol_type = other RNA
tacctggtggcctatcaggctaccgtctgc

SEQ ID NO: 3607 - RNA, 33 nt, synthetic construct
  misc_feature 1..33: note = Hepatitis C virus_NS3
  source 1..33: mol_type = other RNA
tacctggtggcctatcaggctaccgtctgcgca

SEQ ID NO: 3608 - RNA, 45 nt, synthetic construct
  misc_feature 1..45: note = Hepatitis C virus_NS3
  source 1..45: mol_type = other RNA
gtggcctaccaggctaccgtctgcgcaagagcccaagcgccccct

SEQ ID NO: 3609 - RNA, 45 nt, synthetic construct
  misc_feature 1..45: note = Hepatitis C virus_NS3
  source 1..45: mol_type = other RNA
accgcctaccaggctacagtgtgcgcaagagcccaagcgccccct

SEQ ID NO: 3610 - RNA, 45 nt, synthetic construct
  misc_feature 1..45: note = Hepatitis C virus_NS3
  source 1..45: mol_type = other RNA
gcccaggctccccctccaagctgggaccaaatgtggaagtgcctg

SEQ ID NO: 3611 - RNA, 48 nt, synthetic construct
  misc_feature 1..48: note = Hepatitis C virus_NS3
  source 1..48: mol_type = other RNA
gaccagatgtggctgaagtgcctcatcagacttaaacccaccctgcac

SEQ ID NO: 3612 - RNA, 60 nt, synthetic construct
  misc_feature 1..60: note = Hepatitis C virus_NS3
  source 1..60: mol_type = other RNA
cccacccctctgctctacagacttggcgccgtgcagaacgagatcacactgactcaccca

SEQ ID NO: 3613 - RNA, 45 nt, synthetic construct
  misc_feature 1..45: note = Hepatitis C virus_NS3
  source 1..45: mol_type = other RNA
cccgtgaccaagtacatcatggcctgcagcgctgacctggagtcc

SEQ ID NO: 3614 - RNA, 54 nt, synthetic construct
  misc_feature 1..54: note = Hepatitis C virus_NS3
  source 1..54: mol_type = other RNA
cccatcaccaagtacattatgacatgcatgagcgccgacctggaggtggtcact

SEQ ID NO: 3615 - RNA, 45 nt, synthetic construct
  misc_feature 1..45: note = Hepatitis C virus_NS3
  source 1..45: mol_type = other RNA
accagcacatgggtgctggtcggcggggttctcgccgctcttgca

SEQ ID NO: 3616 - RNA, 60 nt, synthetic construct
  misc_feature 1..60: note = Hepatitis C virus_NS4
  source 1..60: mol_type = other RNA
aacttcatcagcggcattcagtacctggccgggctctccacccttcccggaaatcctgct

SEQ ID NO: 3617 - RNA, 39 nt, synthetic construct
  misc_feature 1..39: note = Hepatitis C virus_NS4a
  source 1..39: mol_type = other RNA
accagcacatgggtgctggtcggcggggttctcgccgct

SEQ ID NO: 3618 - RNA, 45 nt, synthetic construct
  misc_feature 1..45: note = Hepatitis C virus_NS4a
  source 1..45: mol_type = other RNA
agcacctgggtgctggtcggcggggttctcgccgctcttgcagcc

SEQ ID NO: 3619 - RNA, 30 nt, synthetic construct
  misc_feature 1..30: note = Hepatitis C virus_NS4a
  source 1..30: mol_type = other RNA
acctgggtgctggtcggcggggttctcgcc

SEQ ID NO: 3620 - RNA, 60 nt, synthetic construct
  misc_feature 1..60: note = Hepatitis C virus_NS4a
  source 1..60: mol_type = other RNA
gccgcttactgcctgagcaccggctgtgtggtcatcgttgggagagtggtactctccgga

SEQ ID NO: 3621 - RNA, 60 nt, synthetic construct
  misc_feature 1..60: note = Hepatitis C virus_NS4a
  source 1..60: mol_type = other RNA
gtggtcctgagcggcaagcccgccatcattcctgacagagaggttctctacagggaattc

SEQ ID NO: 3622 - RNA, 45 nt, synthetic construct
  misc_feature 1..45: note = Hepatitis C virus_NS4a
  source 1..45: mol_type = other RNA
ggcaagcccgccatcattcctgacagagaggtgctgtacagggaa

SEQ ID NO: 3623 - RNA, 30 nt, synthetic construct
  misc_feature 1..30: note = Hepatitis C virus_NS4a
  source 1..30: mol_type = other RNA
atcattcccgacagagaggtgctgtacagg

SEQ ID NO: 3624 - RNA, 60 nt, synthetic construct
  misc_feature 1..60: note = Hepatitis C virus_NS4b
  source 1..60: mol_type = other RNA
atcgcccccgctgtgcagaccaactggcaaaagctggagacattctgggcaaaacacatg

SEQ ID NO: 3625 - RNA, 60 nt, synthetic construct
  misc_feature 1..60: note = Hepatitis C virus_NS4b
  source 1..60: mol_type = other RNA
ggcatccagtacctggccgggctcagcacccttcccggaaaccctgctattgcatccctg

SEQ ID NO: 3626 - RNA, 33 nt, synthetic construct
  misc_feature 1..33: note = Hepatitis C virus_NS4b
  source 1..33: mol_type = other RNA
cagtacctggccggcctcagcacccttcccggg

SEQ ID NO: 3627 - RNA, 30 nt, synthetic construct
  misc_feature 1..30: note = Hepatitis C virus_NS4b
  source 1..30: mol_type = other RNA
tacctggccggcctcagcacccttcccggg

SEQ ID NO: 3628 - RNA, 60 nt, synthetic construct
  misc_feature 1..60: note = Hepatitis C virus_NS4b
  source 1..60: mol_type = other RNA
ctggccggcctcagcacccttcccgggaaccctgctatcgcatccctgatggccttcaca

SEQ ID NO: 3629 - RNA, 54 nt, synthetic construct
  misc_feature 1..54: note = Hepatitis C virus_NS4b
  source 1..54: mol_type = other RNA
ggcctgagcaccctccccgggaaccctgccatcgcttcccttatggcattcaca

SEQ ID NO: 3630 - RNA, 60 nt, synthetic construct
  misc_feature 1..60: note = Hepatitis C virus_NS4b
  source 1..60: mol_type = other RNA
ctgcccggcaaccctgccatcgctagcctcatggcattcaccgccgcggtgacatcccca

SEQ ID NO: 3631 - RNA, 33 nt, synthetic construct
  misc_feature 1..33: note = Hepatitis C virus_NS4b
  source 1..33: mol_type = other RNA
cccgccatcgctagcctgatggcattcaccgcc

SEQ ID NO: 3632 - RNA, 30 nt, synthetic construct
  misc_feature 1..30: note = Hepatitis C virus_NS4b
  source 1..30: mol_type = other RNA
atcgccagcctgatggctttcaccgcagcc

SEQ ID NO: 3633 - RNA, 60 nt, synthetic construct
  misc_feature 1..60: note = Hepatitis C virus_NS4b
  source 1..60: mol_type = other RNA
ctgaccacaagccagactctccttttcaacatcctgggcgggtgggtggccgctcaattg

SEQ ID NO: 3634 - RNA, 45 nt, synthetic construct
  misc_feature 1..45: note = Hepatitis C virus_NS4b
  source 1..45: mol_type = other RNA
acccagcacacactgctcttcaacatccttggcgggtgggtggcc

SEQ ID NO: 3635 - RNA, 30 nt, synthetic construct; identical to SEQ ID NO: 3423
  misc_feature 1..30: note = Hepatitis C virus_NS4b
  source 1..30: mol_type = other RNA

SEQ ID NO: 3636 - RNA, 27 nt, synthetic construct
  misc_feature 1..27: note = Hepatitis C virus_NS4b
  source 1..27: mol_type = other RNA
ttcaacatcctgggcgggtgggtggcc

SEQ ID NO: 3637 - RNA, 36 nt, synthetic construct
  misc_feature 1..36: note = Hepatitis C virus_NS4b
  source 1..36: mol_type = other RNA
ttcaacatcctgggcgggtgggtggccgctcagctc

SEQ ID NO: 3638 - RNA, 45 nt, synthetic construct
  misc_feature 1..45: note = Hepatitis C virus_NS4b
  source 1..45: mol_type = other RNA
ctgggcaaggtgctcgtcgacatccttgccgggtacggagctggt

SEQ ID NO: 3639 - RNA, 54 nt, synthetic construct
  misc_feature 1..54: note = Hepatitis C virus_NS4b
  source 1..54: mol_type = other RNA
atcatgagcggcgaggtgccctccaccgaagacctggtcaacctccttcctgcc

SEQ ID NO: 3640 - RNA, 60 nt, synthetic construct
  misc_feature 1..60: note = Hepatitis C virus_NS4b
  source 1..60: mol_type = other RNA
ggcgaggtgcccagcaccgaagacctggtcaacctccttcctgccatcctgtccccaggg

SEQ ID NO: 3641 - RNA, 30 nt, synthetic construct
  misc_feature 1..30: note = Hepatitis C virus_NS4b
  source 1..30: mol_type = other RNA
ctggtgaacctccttcccgccatcctgagc

SEQ ID NO: 3642 - RNA, 21 nt, synthetic construct
  misc_feature 1..21: note = Hepatitis C virus_NS4b
  source 1..21: mol_type = other RNA
aacctgctccccgccatcctt

SEQ ID NO: 3643 - RNA, 60 nt, synthetic construct
  misc_feature 1..60: note = Hepatitis C virus_NS4b
  source 1..60: mol_type = other RNA
gccctggtggtcggcgttgtgtgcgctgcaatcctcagaaggcacgtagggcccggagag

SEQ ID NO: 3644 - RNA, 60 nt, synthetic construct
  misc_feature 1..60: note = Hepatitis C virus_NS4b
  source 1..60: mol_type = other RNA
ggccccggggagggagccgtgcagtggatgaacagactgatcgctttcgcaagcaggggt

SEQ ID NO: 3645 - RNA, 45 nt, synthetic construct
  misc_feature 1..45: note = Hepatitis C virus_NS4b
  source 1..45: mol_type = other RNA
gagggcgccgtgcagtggatgaacagactgatcgctttcgcaagc

SEQ ID NO: 3646 - RNA, 60 nt, synthetic construct
  misc_feature 1..60: note = Hepatitis C virus_NS4b
  source 1..60: mol_type = other RNA
ggcgccgtgcagtggatgaacagactgatcgctttcgcaagcagggggaatcacgtctcc

SEQ ID NO: 3647 - RNA, 54 nt, synthetic construct
  misc_feature 1..54: note = Hepatitis C virus_NS4b
  source 1..54: mol_type = other RNA
aacagactgatcgccttcgctagcaggggcaatcacgtgtcccccacccattac

SEQ ID NO: 3648 - RNA, 54 nt, synthetic construct
  misc_feature 1..54: note = Hepatitis C virus_NS5a
  source 1..54: mol_type = other RNA
agccagctgtccgccagatctctcaaggctacctgcacagcaaaccacgactca

SEQ ID NO: 3649 - RNA, 45 nt, synthetic construct
  misc_feature 1..45: note = Hepatitis C virus_NS5a
  source 1..45: mol_type = other RNA
atcgaggccaacctgctctggagacaggaaatgggcgggaatatt

SEQ ID NO: 3650 - RNA, 42 nt, synthetic construct
  misc_feature 1..42: note = Hepatitis C virus_NS5a
  source 1..42: mol_type = other RNA
gtgagcgtccccgccgagatcctgagaaagaggcggttcgct

SEQ ID NO: 3651 - RNA, 54 nt, synthetic construct
  misc_feature 1..54: note = Hepatitis C virus_NS5a
  source 1..54: mol_type = other RNA
cccgccgagctgagaaagagcaggttcgctcaggcactccctgtgtgggcccgg

SEQ ID NO: 3652 - RNA, 60 nt, synthetic construct
  misc_feature 1..60: note = Hepatitis C virus_NS5b
  source 1..60: mol_type = other RNA
ctgagacaccataacctcgtgtacagcaccacatccaggtctgcctgccagcggcaaaag

SEQ ID NO: 3653 - RNA, 60 nt, synthetic construct
  misc_feature 1..60: note = Hepatitis C virus_NS5b
  source 1..60: mol_type = other RNA
aaggtgaccttcgacagactgcaggtcctcgatagccactaccaagacgttcttaaagag

SEQ ID NO: 3654 - RNA, 60 nt, synthetic construct
  misc_feature 1..60: note = Hepatitis C virus_NS5b
  source 1..60: mol_type = other RNA
agcgtgtggaaggacctgctcgaggataacgtcacccccatcgacacaactattatggcc

SEQ ID NO: 3655 - RNA, 60 nt, synthetic construct
  misc_feature 1..60: note = Hepatitis C virus_NS5b
  source 1..60: mol_type = other RNA
aagggcgggagaaaacccgccaggctgatcgtgttccctgacctcggagtccgggtttgc

SEQ ID NO: 3656 - RNA, 54 nt, synthetic construct
  misc_feature 1..54: note = Hepatitis C virus_NS5b
  source 1..54: mol_type = other RNA
aagcccgccagactgatcgtgttccctgacctcggcgtcagggtttgcgagaaa

SEQ ID NO: 3657 - RNA, 60 nt, synthetic construct
  misc_feature 1..60: note = Hepatitis C virus_NS5b
  source 1..60: mol_type = other RNA
aagctgcccctcgccgtgatgggcagctcctacgggttccagtattctcctggacaaaga

SEQ ID NO: 3658 - RNA, 60 nt, synthetic construct
  misc_feature 1..60: note = Hepatitis C virus_NS5b
  source 1..60: mol_type = other RNA
gtggagttcctggtccaggcctggaagagcaaaaagacccccatgggcttttcctacgac

SEQ ID NO: 3659 - RNA, 60 nt, synthetic construct
  misc_feature 1..60: note = Hepatitis C virus_NS5b
  source 1..60: mol_type = other RNA
agcgacatcagaaccgaggaagccatttaccagtgctgtgatctggacccccaagctagg

SEQ ID NO: 3660 - RNA, 60 nt, synthetic construct
  misc_feature 1..60: note = Hepatitis C virus_NS5b
  source 1..60: mol_type = other RNA
cagtgctgtgacctggatccccaagccagagtggctatcaagagcctcaccgagaggctt

SEQ ID NO: 3661 - RNA, 36 nt, synthetic construct
  misc_feature 1..36: note = Hepatitis C virus_NS5b
  source 1..36: mol_type = other RNA
ggctacagaaggtgccgggccagcggggtgctgacc

SEQ ID NO: 3662 - RNA, 42 nt, synthetic construct
  misc_feature 1..42: note = Hepatitis C virus_NS5b
  source 1..42: mol_type = other RNA
tgcagctccaacgtgtctgtcgcccacgacggcgctgggaag

SEQ ID NO: 3663 - RNA, 60 nt, synthetic construct
  misc_feature 1..60: note = Hepatitis C virus_NS5b
  source 1..60: mol_type = other RNA
agcgtggcccacgacggcgctgggaagagagtctactatctgaccagggatcccacaact

SEQ ID NO: 3664 - RNA, 45 nt, synthetic construct
  misc_feature 1..45: note = Hepatitis C virus_NS5b
  source 1..45: mol_type = other RNA
agagaccccaccacacctctggccagggctgcatgggagactgcc

SEQ ID NO: 3665 - RNA, 60 nt, synthetic construct
  misc_feature 1..60: note = Hepatitis C virus_NS5b
  source 1..60: mol_type = other RNA
aacatcattatgttcgcccccaccctgtgggctagaatgatactcatgacacactttttc

SEQ ID NO: 3666 - RNA, 60 nt, synthetic construct
  misc_feature 1..60: note = Hepatitis C virus_NS5b
  source 1..60: mol_type = other RNA
gccagaatgatcctgatgacccacttctttagcgtgctcattgctagggaccagcttgag

SEQ ID NO: 3667 - RNA, 45 nt, synthetic construct
  misc_feature 1..45: note = Hepatitis C virus_NS5b
  source 1..45: mol_type = other RNA
ctgatgatccacttctttagcattctcgcccaggagcaacttgaa

SEQ ID NO: 3668 - RNA, 57 nt, synthetic construct
  misc_feature 1..57: note = Hepatitis C virus_NS5b
  source 1..57: mol_type = other RNA
atcaacagagtggccgcttgcctgaggaagctcggcgtcccccctcttcgggcatgg

SEQ ID NO: 3669 - RNA, 42 nt, synthetic construct
  misc_feature 1..42: note = Hepatitis C virus_NS5b
  source 1..42: mol_type = other RNA
tgcggcaagtacctgttcaactgggccgtgaccaaactcaag

SEQ ID NO: 3670 - RNA, 60 nt, synthetic construct
  misc_feature 1..60: note = Hepatitis C virus_NS5b
  source 1..60: mol_type = other RNA
tgcggcaagtacctgttcaactgggccgtgagaaccaaactcaagcttacacccatcgct

SEQ ID NO: 3671 - RNA, 45 nt, synthetic construct
  misc_feature 1..45: note = Influenza A
  source 1..45: mol_type = other RNA
gccctgaacaatagattccagatcaagggcgtggagctcaaaagc

SEQ ID NO: 3672 - RNA, 48 nt, synthetic construct
  misc_feature 1..48: note = Influenza A
  source 1..48: mol_type = other RNA
ggcgccctgaacaatagattccagatcaagggggtggagctcaaaagc

SEQ ID NO: 3673 - RNA, 45 nt, synthetic construct
  misc_feature 1..45: note = Measles virus_F
  source 1..45: mol_type = other RNA
ctgagcgagatcaagggcgtgattgtccacagactcgaaggggtt

SEQ ID NO: 3674 - RNA, 51 nt, synthetic construct
  misc_feature 1..51: note = Canine distemper virus_Fusion protein
  source 1..51: mol_type = other RNA
accgccgctcagatcacagcaggcattgccctgcaccaaagcaacctcaat

SEQ ID NO: 3675 - RNA, 51 nt, synthetic construct
  misc_feature 1..51: note = Canine distemper virus_Fusion protein
  source 1..51: mol_type = other RNA
atcggcaccgacaacgtgcactacaagattatgacaagacccagccatcag

SEQ ID NO: 3676 - RNA, 51 nt, synthetic construct
  misc_feature 1..51: note = Canine distemper virus_Fusion protein
  source 1..51: mol_type = other RNA
tacaagatcatgaccagacccagccaccagtatctggtgattaaactcata

SEQ ID NO: 3677 - RNA, 51 nt, synthetic construct
  misc_feature 1..51: note = Canine distemper virus_Fusion protein
  source 1..51: mol_type = other RNA
agccaccagtacctggtgatcaagctcattcccaacgcctcccttatagag

SEQ ID NO: 3678 - RNA, 51 nt, synthetic construct
  misc_feature 1..51: note = Canine distemper virus_Fusion protein
  source 1..51: mol_type = other RNA
aagctgatccccaacgccagcctcattgagaattgcaccaaagctgaactt

SEQ ID NO: 3679 - RNA, 51 nt, synthetic construct
  misc_feature 1..51: note = Canine distemper virus_Fusion protein
  source 1..51: mol_type = other RNA
ctgatcgagaactgcaccaaggccgaactcggcgagtacgaaaaacttctg

SEQ ID NO: 3680 - RNA, 51 nt, synthetic construct
  misc_feature 1..51: note = Canine distemper virus_Fusion protein
  source 1..51: mol_type = other RNA
gccgagctgggcgaatacgagaagctccttaacagcgtgctggaacccatc

SEQ ID NO: 3681 - RNA, 51 nt, synthetic construct
  misc_feature 1..51: note = Canine distemper virus_Fusion protein
  source 1..51: mol_type = other RNA
aagctgctcaacagcgtgcttgagcccatcaatcaggccctgaccttgatg

SEQ ID NO: 3682 - RNA, 51 nt, synthetic construct
  misc_feature 1..51: note = Canine distemper virus_Fusion protein
  source 1..51: mol_type = other RNA
gagcccatcaaccaggccctgaccctcatgacaaagaatgtgaaacctctt

SEQ ID NO: 3683 - RNA, 51 nt, synthetic construct
  misc_feature 1..51: note = Canine distemper virus_Fusion protein
  source 1..51: mol_type = other RNA
accctgatgacaaagaacgtgaaacccctccagagccttggctccgggaga

SEQ ID NO: 3684 - RNA, 51 nt, synthetic construct
  misc_feature 1..51: note = Canine distemper virus_Fusion protein
  source 1..51: mol_type = other RNA
aagcccctgcagagcctcggctccgggagaaggcaacggcgcttcgccgga

SEQ ID NO: 3685 - RNA, 51 nt, synthetic construct
  misc_feature 1..51: note = Canine distemper virus_Fusion protein
  source 1..51: mol_type = other RNA
agcggcagaaggcagcggcgcttcgccggggtggtcctggctggagttgca

SEQ ID NO: 3686 - RNA, 51 nt, synthetic construct
  misc_feature 1..51: note = Canine distemper virus_Fusion protein
  source 1..51: mol_type = other RNA
ttcgccggcgtggtcctggctggggttgcactcggagtggccaccgcggct

SEQ ID NO: 3687 - RNA, 51 nt, synthetic construct
  misc_feature 1..51: note = Canine distemper virus_Fusion protein
  source 1..51: mol_type = other RNA
ggcgtggccctgggggtcgctaccgcagcccagatcacagcgggaattgct

SEQ ID NO: 3688 - RNA, 51 nt, synthetic construct
  misc_feature 1..51: note = Canine distemper virus_Fusion protein
  source 1..51: mol_type = other RNA
ggcatcgccctgcaccagagcaacctcaatgctcaagcaattcagtccctt

SEQ ID NO: 3689 - RNA, 51 nt, synthetic construct
  misc_feature 1..51: note = Canine distemper virus_Fusion protein
  source 1..51: mol_type = other RNA
aacctgaatgcccaggctatccaaagcctcagaacctcccttgagcagtct

SEQ ID NO: 3690 - RNA, 51 nt, synthetic construct
  misc_feature 1..51: note = Canine distemper virus_Fusion protein
  source 1..51: mol_type = other RNA
cagagcctgagaacctccctcgagcaatctaacaaggccatcgaagagatt

SEQ ID NO: 3691 - RNA, 51 nt, synthetic construct
  misc_feature 1..51: note = Canine distemper virus_Fusion protein
  source 1..51: mol_type = other RNA
gagcagagcaacaaggccatcgaagagattagagaagctacccaagagaca

SEQ ID NO: 3692 - RNA, 51 nt, synthetic construct
  misc_feature 1..51: note = Canine distemper virus_Fusion protein
  source 1..51: mol_type = other RNA
agctccaagacccagacacacactcaacaggacagaccccctcagccatct

SEQ ID NO: 3693 - RNA, 51 nt, synthetic construct
  misc_feature 1..51: note = Canine distemper virus_Fusion protein
  source 1..51: mol_type = other RNA
cagcccagcaccgagctggaagagacaagaacttccagggcccggcactct

SEQ ID NO: 3694 - RNA, 51 nt, synthetic construct
  misc_feature 1..51: note = Canine distemper virus_Fusion protein
  source 1..51: mol_type = other RNA
agacacagcaccacatccgcccagaggtctactcattacgacccccggacg

SEQ ID NO: 3695 - RNA, 51 nt, synthetic construct
  misc_feature 1..51: note = Canine distemper virus_Fusion protein
  source 1..51: mol_type = other RNA
cccagaaccagcgacaggcctgtgtcctacacaatgaaccggactcgctct

SEQ ID NO: 3696 - RNA, 51 nt, synthetic construct
  misc_feature 1..51: note = Canine distemper virus_Fusion protein
  source 1..51: mol_type = other RNA
accagaagcaggaagcagacatcccaccggctgaaaaacatccccgtgcat

SEQ ID NO: 3697 - RNA, 51 nt, synthetic construct
  misc_feature 1..51: note = Canine distemper virus_Fusion protein
  source 1..51: mol_type = other RNA
accgagctgctcagcatcttcggcccctcccttagagaccctatttctgcc

SEQ ID NO: 3698 - RNA, 51 nt, synthetic construct
  misc_feature 1..51: note = Canine distemper virus_Fusion protein
  source 1..51: mol_type = other RNA
cccagatacatcgccaccaacggctatctgattagcaatttcgacgagtcc

SEQ ID NO: 3699 - RNA, 51 nt, synthetic construct
  misc_feature 1..51: note = Canine distemper virus_Fusion protein
  source 1..51: mol_type = other RNA
tgcatcagaggcgacaccagctcctgtgccaggacactggtgtctgggact

SEQ ID NO: 3700 - RNA, 51 nt, synthetic construct
  misc_feature 1..51: note = Canine distemper virus_Fusion protein
  source 1..51: mol_type = other RNA
gacgagagctcctgcgtgttcgtctctgaatcagccatctgtagtcagaac

SEQ ID NO: 3701 - RNA, 51 nt, synthetic construct
  misc_feature 1..51: note = Canine distemper virus_Fusion protein
  source 1..51: mol_type = other RNA
accagcacaatcattaaccagtcccccgacaagctgctcactttcatagcc

SEQ ID NO: 3702 - RNA, 51 nt, synthetic construct
  misc_feature 1..51: note = Canine distemper virus_Fusion protein
  source 1..51: mol_type = other RNA
agccccgacaagctgctcaccttcatcgcctccgatacatgccctcttgtg

SEQ ID NO: 3703 - RNA, 72 nt, synthetic construct
  misc_feature 1..72: note = Mucin-1
  source 1..72: mol_type = other RNA
agcaccgccccccctgctcacggcgtgacatccgcaccagacactagagccccggggtctacggcgccccct

SEQ ID NO: 3704 - RNA, 57 nt, synthetic construct
  misc_feature 1..57: note = Mucin-1
  source 1..57: mol_type = other RNA
ggcgtgaccagcgcccccgacacaagacctgctccagggtccactgcatcttcactg

SEQ ID NO: 3705 - RNA, 54 nt, synthetic construct
  misc_feature 1..54: note = Mucin-1
  source 1..54: mol_type = other RNA
ggcgtgaccagcgcccccgacacaagacctgctccagggtccactgcatctctg

SEQ ID NO: 3706 - RNA, 81 nt, synthetic construct
  misc_feature 1..81: note = Mucin-1
  source 1..81: mol_type = other RNA
accgccccccctgctcacggcgtgacaagcgcaccagacactagaccggcccccgggtccacggcgcctccaaagaaagga

SEQ ID NO: 3707 - RNA, 78 nt, synthetic construct
  misc_feature 1..78: note = Mucin-1
  source 1..78: mol_type = other RNA
agcaccgccccccctgctcacggcgtgacatccgcaccagacactagaccggcccccgggtctacggcgcctccaaag

SEQ ID NO: 3708 - RNA, 12 nt, synthetic construct
  misc_feature 1..12: note = foot-and-mouth disease virus_VP3
  source 1..12: mol_type = other RNA
ggcgtggccgag

SEQ ID NO: 3709 - RNA, 30 nt, synthetic construct
  misc_feature 1..30: note = foot-and-mouth disease virus_VP3
  source 1..30: mol_type = other RNA
accgccagcggcgtggctgagacaactaac

SEQ ID NO: 3710 - RNA, 48 nt, synthetic construct
  misc_feature 1..48: note = foot-and-mouth disease virus
  source 1..48: mol_type = other RNA
accgccaagagcaaaaagttcccctcctacacagctacttatcagttt

SEQ ID NO: 3711 - RNA, 48 nt, synthetic construct
  misc_feature 1..48: note = Clostridium tetani
  source 1..48: mol_type = other RNA
gcccagtacatcaaggctaacagcaaattcattggcataaccgagctg

SEQ ID NO: 3712 - RNA, 48 nt, synthetic construct
  misc_feature 1..48: note = Human immunodeficiency virus 1_gp120 protein
  source 1..48: mol_type = other RNA
aagcagatcattaacatgtggcaagtggtcggcaaagccatgtacgct

SEQ ID NO: 3713 - RNA, 45 nt, synthetic construct
  misc_feature 1..45: note = Human immunodeficiency virus 1_gag protein
  source 1..45: mol_type = other RNA
aagagatggatcattctgggcctcaacaaaatagtgaggatgtac

SEQ ID NO: 3714 - RNA, 48 nt, synthetic construct
  misc_feature 1..48: note = Human immunodeficiency virus 1_envelope glycoprotein
  source 1..48: mol_type = other RNA
aagcagatcattaacatgtggcaagaggtgggcaaagccatgtacgct

SEQ ID NO: 3715 - RNA, 48 nt, synthetic construct
  misc_feature 1..48: note = Human immunodeficiency virus 1_envelope glycoprotein
  source 1..48: mol_type = other RNA
aagcagatcattaacatgtggcaagccgtgggcaaagctatgtacgca

SEQ ID NO: 3716 - RNA, 48 nt, synthetic construct; identical to SEQ ID NO: 3711
  misc_feature 1..48: note = Tetanus Toxid
  source 1..48: mol_type = other RNA

SEQ ID NO: 3717 - RNA, 21 nt, synthetic construct
  misc_feature 1..21: note = Human papilloma virus 16_E17
  source 1..21: mol_type = other RNA
gacagagcccactacaacatc

SEQ ID NO: 3718 - RNA, 57 nt, synthetic construct
  misc_feature 1..57: note = Human papilloma virus 16_E17
  source 1..57: mol_type = other RNA
caggccgagcccgacagagctcactacaacatcgtgaccttctgctgtaagtgcgat

SEQ ID NO: 3719 - protein, 9 aa, synthetic construct
  REGION 1..9: note = Melanoma antigen recognized by T-cells 1 (27-35)
AAGIGILTV

SEQ ID NO: 3720 - protein, 9 aa, synthetic construct
  REGION 1..9: note = Eukaryotic translation initiation factor 4 gamma 1 (1073-1081)
AARPATSTL

SEQ ID NO: 3721 - protein, 11 aa, synthetic construct
  REGION 1..11: note = Histone H1.2 (49-59)
AASKERSGVSL

SEQ ID NO: 3722 - protein, 10 aa, synthetic construct
  REGION 1..10: note = Cyclin-dependent kinase 4 (23-32)
ACDPHSGHFV

SEQ ID NO: 3723 - protein, 10 aa, synthetic construct
  REGION 1..10: note = 40S ribosomal protein S21 (37-46)
AEVDKVTGRF

SEQ ID NO: 3724 - protein, 9 aa, synthetic construct
  REGION 1..9: note = DNA replication licensing factor MCM4 (694-702)
AHSTIMPRL

SEQ ID NO: 3725 - protein, 9 aa, synthetic construct
  REGION 1..9: note = Actin, gamma-enteric smooth muscle (277-285)
ALAPSTMKI

SEQ ID NO: 3726 - protein, 10 aa, synthetic construct
  REGION 1..10: note = Melanocyte protein PMEL (231-240)
ALDGGNKHFL

SEQ ID NO: 3727 - protein, 9 aa, synthetic construct
  REGION 1..9: note = Phospholipid transfer protein (2-10)
ALFGALFLA

SEQ ID NO: 3728 - protein, 9 aa, synthetic construct
  REGION 1..9: note = Vimentin (332-340)
ALKGTNESL

SEQ ID NO: 3729 - protein, 9 aa, synthetic construct
  REGION 1..9: note = Eukaryotic translation initiation factor 3 subunit D (439-447)
ALLAGSEYL

SEQ ID NO: 3730 - protein, 9 aa, synthetic construct
  REGION 1..9: note = Melanocyte protein PMEL (24-32)
ALLAVGATK

SEQ ID NO: 3731 - protein, 9 aa, synthetic construct
  REGION 1..9: note = Melanoma antigen recognized by T-cells 1 (56-64)
ALMDKSLHV

SEQ ID NO: 3732 - protein, 9 aa, synthetic construct
  REGION 1..9: note = Melanocyte protein PMEL (94-102)
ALNFPGSQK

SEQ ID NO: 3733 - protein, 9 aa, synthetic construct
  REGION 1..9: note = Melanoma-associated antigen 1 (301-309)
ALREEEEGV

SEQ ID NO: 3734 - protein, 9 aa, synthetic construct
  REGION 1..9: note = Fructose-bisphosphate aldolase A (98-106)
ALSDHHIYL

SEQ ID NO: 3735 - protein, 12 aa, synthetic construct
  REGION 1..12: note = Guanine nucleotide-binding protein G(I)/G(S)/G(T) subunit beta-2 (167-178)
ALWDIETGQQTV

SEQ ID NO: 3736 - protein, 9 aa, synthetic construct
  REGION 1..9: note = ER membrane protein complex subunit 7 (4-12)
ALWGFFPVL

SEQ ID NO: 3737 - protein, 10 aa, synthetic construct
  REGION 1..10: note = Melanocyte protein PMEL (184-193)
AMLGTHTMEV

SEQ ID NO: 3738 - protein, 9 aa, synthetic construct
  REGION 1..9: note = Actin, cytoplasmic 1 (14-22)
APEEHPVLL

SEQ ID NO: 3739 - protein, 9 aa, synthetic construct
  REGION 1..9: note = High mobility group protein B1 (94-102)
APKRPPSAF

SEQ ID NO: 3740 - protein, 9 aa, synthetic construct
  REGION 1..9: note = Coiled-coil-helix-coiled-coil-helix domain-containing protein 2 (49-57)
APRQPGLMA

SEQ ID NO: 3741 - protein, 9 aa, synthetic construct
  REGION 1..9: note = HLA class II histocompatibility antigen, DP beta 1 chain (9-17)
APRTVALTA

SEQ ID NO: 3742 - protein, 9 aa, synthetic construct
  REGION 1..9: note = 60S ribosomal protein L13 (189-197)
ARLFGIRAK

SEQ ID NO: 3743 - protein, 9 aa, synthetic construct
  REGION 1..9: note = Thymosin beta-10 (16-24)
ASFDKAKLK

SEQ ID NO: 3744 - protein, 9 aa, synthetic construct
  REGION 1..9: note = Guanine nucleotide-binding protein G(s) subunit alpha isoforms short (239-247)
ASSSYNMVI

SEQ ID NO: 3745 - protein, 8 aa, synthetic construct
  REGION 1..8: note = Guanine nucleotide-binding protein subunit beta-2-like 1 (251-258)
ATGPSIKI

SEQ ID NO: 3746 - protein, 9 aa, synthetic construct
  REGION 1..9: note = Bax inhibitor 1 (91-99)
AYVHMVTHF

SEQ ID NO: 3747 - protein, 9 aa, synthetic construct
  REGION 1..9: note = Wilms tumor protein (235-243)
CMTWNQMNL

SEQ ID NO: 3748 - protein, 9 aa, synthetic construct
  REGION 1..9: note = Melanocyte protein PMEL (647-655)
CPIGENSPL

SEQ ID NO: 3749 - protein, 16 aa, synthetic construct
  REGION 1..16: note = Gamma-secretase C-terminal fragment 59 (562-577)
DAEFRHDSGYEVHHQK

SEQ ID NO: 3750 - protein, 17 aa, synthetic construct
  REGION 1..17: note = Gamma-secretase C-terminal fragment 59 (562-578)
DAEFRHDSGYEVHHQKL

SEQ ID NO: 3751 - protein, 9 aa, synthetic construct
  REGION 1..9: note = Thymidylate synthase (254-262)
DAHIYLNHI

SEQ ID NO: 3752 - protein, 9 aa, synthetic construct
  REGION 1..9: note = 60S ribosomal protein L10 (28-36)
DAKIRIFDL

SEQ ID NO: 3753 - protein, 9 aa, synthetic construct
  REGION 1..9: note = Lys-63-specific deubiquitinase BRCC36 (221-229)
DAYRRIHSL

SEQ ID NO: 3754 - protein, 9 aa, synthetic construct
  REGION 1..9: note = Myelin basic protein (109-117)
DENPVVHFF

SEQ ID NO: 3755 - protein, 9 aa, synthetic construct
  REGION 1..9: note = Vimentin (219-227)
DLERKVESL

SEQ ID NO: 3756 - protein, 15 aa, synthetic construct
  REGION 1..15: note = HLA class I histocompatibility antigen, A-2 alpha chain (29-43)
DTQFVRFDSDAASQR

SEQ ID NO: 3757 - protein, 18 aa, synthetic construct
  REGION 1..18: note = HLA class I histocompatibility antigen, A-2 alpha chain (29-46)
DTQFVRFDSDAASQRMEP

SEQ ID NO: 3758 - protein, 10 aa, synthetic construct
  REGION 1..10: note = Melanoma antigen recognized by T-cells 1 (26-35)
EAAGIGILTV

SEQ ID NO: 3759 - protein, 9 aa, synthetic construct
  REGION 1..9: note = Melanoma-associated antigen 1 (161-169)
EADPTGHSY

SEQ ID NO: 3760 - protein, 9 aa, synthetic construct
  REGION 1..9: note = Ragulator complex protein LAMTOR5 (40-48)
EHAGVISVL

SEQ ID NO: 3761 - protein, 10 aa, synthetic construct
  REGION 1..10: note = Mart-1 (26-35)
ELAGIGILTV

SEQ ID NO: 3762 - protein, 9 aa, synthetic construct
  REGION 1..9: note = 40S ribosomal protein S25 (75-83)
ERLKIRGSL

SEQ ID NO: 3763 - protein, 9 aa, synthetic construct
  REGION 1..9: note = Actin, cytoplasmic 1 (364-372)
ESGPSIVHR

SEQ ID NO: 3764 - protein, 9 aa, synthetic construct
  REGION 1..9: note = POTE ankyrin domain family member F (825-833)
ETFNTPAMY

SEQ ID NO: 3765 - protein, 10 aa, synthetic construct
  REGION 1..10: note = Mortality factor 4-like protein 1 (312-321)
EVAPPEYHRK

SEQ ID NO: 3766 - protein, 9 aa, synthetic construct
  REGION 1..9: note = Melanoma-associated antigen 3 (168-176)
EVDPIGHLY

SEQ ID NO: 3767 - protein, 9 aa, synthetic construct
  REGION 1..9: note = Heme oxygenase 1 (103-111)
EVIPYTPAM

SEQ ID NO: 3768 - protein, 9 aa, synthetic construct
  REGION 1..9: note = G2/mitotic-specific cyclin-B1 (18-26)
FAFVTDNTY

SEQ ID NO: 3769 - protein, 9 aa, synthetic construct
  REGION 1..9: note = Proteasome subunit alpha type-5 (154-162)
FHMDPSGTF

SEQ ID NO: 3770 - protein, 9 aa, synthetic construct
  REGION 1..9: note = Protein THEMIS2 (597-605)
FIKDGSSTY

SEQ ID NO: 3771 - protein, 10 aa, synthetic construct
  REGION 1..10: note = Vimentin (123-132)
FLEQQNKILL

SEQ ID NO: 3772 - protein, 10 aa, synthetic construct
  REGION 1..10: note = Fatty acid synthase (2335-2344)
FLFDGSPTYV

SEQ ID NO: 3773 - protein, 11 aa, synthetic construct
  REGION 1..11: note = Fatty acid synthase (2335-2345)
FLFDGSPTYVL

SEQ ID NO: 3774 - protein, 9 aa, synthetic construct
  REGION 1..9: note = Mammaglobin-A (66-74)
FLNQTDETL

SEQ ID NO: 3775 - protein, 9 aa, synthetic construct
  REGION 1..9: note = Melanoma-associated antigen 3 (271-279)
FLWGPRALV

SEQ ID NO: 3776 - protein, 9 aa, synthetic construct
  REGION 1..9: note = Actin-related protein 2 (27-35)
FPEHIFPAL

SEQ ID NO: 3777 - protein, 9 aa, synthetic construct
  REGION 1..9: note = 60S ribosomal protein L28 (38-46)
FRYNGLIHR

SEQ ID NO: 3778 - protein, 9 aa, synthetic construct
  REGION 1..9: note = 60S acidic ribosomal protein P0 (67-75)
GHLENNPAL

SEQ ID NO: 3779 - protein, 11 aa, synthetic construct
  REGION 1..11: note = Cellular tumor antigen p53 (62-72)
GLAPPQHLIRV

SEQ ID NO: 3780 - protein, 9 aa, synthetic construct
  REGION 1..9: note = Proteasome subunit beta type-3 (55-63)
GLATDVQTV

SEQ ID NO: 3781 - protein, 9 aa, synthetic construct
  REGION 1..9: note = DNA (cytosine-5)-methyltransferase 1 (425-433)
GLIEKNIEL

SEQ ID NO: 3782 - protein, 9 aa, synthetic construct
  REGION 1..9: note = Catenin beta-1 (400-408)
GLLGTLVQL

SEQ ID NO: 3783 - protein, 9 aa, synthetic construct
  REGION 1..9: note = Myosin-9 (338-346)
GLLRVISGV

SEQ ID NO: 3784 - protein, 10 aa, synthetic construct
  REGION 1..10: note = Reticulocalbin-2 (4-13)
GPRTAALGLL

SEQ ID NO: 3785 - protein, 10 aa, synthetic construct
  REGION 1..10: note = Heterogeneous nuclear ribonucleoprotein A1 (339-348)
GPYGGGGQYF

SEQ ID NO: 3786 - protein, 9 aa, synthetic construct
  REGION 1..9: note = 60S ribosomal protein L8 (127-135)
GRIDKPILK

SEQ ID NO: 3787 - protein, 9 aa, synthetic construct
  REGION 1..9: note = Cellular tumor antigen p53 (5-13)
GRNSFEVRV

SEQ ID NO: 3788 - protein, 10 aa, synthetic construct
  REGION 1..10: note = Ribonucleoside-diphosphate reductase subunit M2 (238-247)
GSFASIFWLK

SEQ ID NO: 3789 - protein, 9 aa, synthetic construct
  REGION 1..9: note = Melanocyte protein PMEL (467-475)
GTATLRLVK

SEQ ID NO: 3790 - protein, 10 aa, synthetic construct
  REGION 1..10: note = Melanoma-associated antigen B2 (231-240)
GVYDGEEHSV

SEQ ID NO: 3791 - protein, 9 aa, synthetic construct
  REGION 1..9: note = Protein SSX2 (17-25)
GYDQIMPKK

SEQ ID NO: 3792 - protein, 9 aa, synthetic construct
  REGION 1..9: note = Proliferating cell nuclear antigen (241-249)
IADMGHLKY

SEQ ID NO: 3793 - protein, 9 aa, synthetic construct
  REGION 1..9: note = Receptor tyrosine-protein kinase erbB-2 (654-662)
IISAVVGIL

SEQ ID NO: 3794 - protein, 9 aa, synthetic construct
  REGION 1..9: note = Heat shock protein HSP 90-beta (496-504)
ILDKKVEKV

SEQ ID NO: 3795 - protein, 9 aa, synthetic construct
  REGION 1..9: note = Ornithine decarboxylase (23-31)
ILDQKINEV

SEQ ID NO: 3796 - protein, 9 aa, synthetic construct
  REGION 1..9: note = Ubiquitin-conjugating enzyme E2 E3 (97-105)
ILGPPGSVY

SEQ ID NO: 3797 - protein, 9 aa, synthetic construct
  REGION 1..9: note = Vimentin (130-138)
ILLAELEQL

SEQ ID NO: 3798 - protein, 9 aa, synthetic construct
  REGION 1..9: note = 60S ribosomal protein L19 (137-145)
ILMEHIHKL

SEQ ID NO: 3799 - protein, 9 aa, synthetic construct
  REGION 1..9: note = Small nuclear ribonucleoprotein-associated proteins B and B' (13-21)
ILQDGRIFI

SEQ ID NO: 3800 - protein, 9 aa, synthetic construct
  REGION 1..9: note = Elongation factor 2 (161-169)
ILTDITKGV

SEQ ID NO: 3801 - protein, 9 aa, synthetic construct
  REGION 1..9: note = Melanoma antigen recognized by T-cells 1 (32-40)
ILTVILGVL

SEQ ID NO: 3802 - protein, 9 aa, synthetic construct
  REGION 1..9: note = Putative small nuclear ribonucleoprotein G-like protein 15 (68-76)
IMLEALERV

SEQ ID NO: 3803 - protein, 9 aa, synthetic construct
  REGION 1..9: note = Serine-tRNA ligase, cytoplasmic (357-365)
IPYHIVNIV

SEQ ID NO: 3804 - protein, 16 aa, synthetic construct
  REGION 1..16: note = Beta-2-microglobulin (21-36)
IQRTPKIQVYSRHPAE

SEQ ID NO: 3805 - protein, 9 aa, synthetic construct
  REGION 1..9: note = ADP/ATP translocase 2 (79-87)
IRYFPTQAL

SEQ ID NO: 3806 - protein, 9 aa, synthetic construct
  REGION 1..9: note = Acyl-CoA desaturase (20-28)
ITAPPSRVL

SEQ ID NO: 3807 - protein, 9 aa, synthetic construct
  REGION 1..9: note = Melanocyte protein PMEL (216-224)
ITDQVPFSV

SEQ ID NO: 3808 - protein, 9 aa, synthetic construct
  REGION 1..9: note = Ubiquitin-60S ribosomal protein L40 (68-76)
KESTLHLVL

SEQ ID NO: 3809 - protein, 18 aa, synthetic construct
  REGION 1..18: note = Receptor tyrosine-protein kinase erbB-2 (369-386)
KIFGSLAFLPESFDGDPA

SEQ ID NO: 3810 - protein, 15 aa, synthetic construct
  REGION 1..15: note = Protein SSX2 (45-59)
KIFYVYMKRKYEAMT

SEQ ID NO: 3811 - protein, 10 aa, synthetic construct
  REGION 1..10: note = Vimentin (236-245)
KLHEEEIQEL

SEQ ID NO: 3812 - protein, 9 aa, synthetic construct
  REGION 1..9: note = Myosin-9 (1843-1851)
KLKDVLLQV

SEQ ID NO: 3813 - protein, 10 aa, synthetic construct
  REGION 1..10: note = Prelamin-A/C (297-306)
KLLEGEEERL

SEQ ID NO: 3814 - protein, 9 aa, synthetic construct
  REGION 1..9: note = Mammaglobin-A (2-10)
KLLMVLMLA

SEQ ID NO: 3815 - protein, 9 aa, synthetic construct
  REGION 1..9: note = Heat shock cognate 71 kDa protein (126-134)
KMKEIAEAY

SEQ ID NO: 3816 - protein, 9 aa, synthetic construct
  REGION 1..9: note = Melanoma-associated antigen 2 (140-148)
KMVELVHFL

SEQ ID NO: 3817 - protein, 9 aa, synthetic construct
  REGION 1..9: note = Beta-adrenergic receptor kinase 1 (667-675)
KPRSPVVEL

SEQ ID NO: 3818 - protein, 9 aa, synthetic construct
  REGION 1..9: note = Farnesyl pyrophosphate synthase (184-192)
KRYKSIVKY

SEQ ID NO: 3819 - protein, 9 aa, synthetic construct
  REGION 1..9: note = Cellular tumor antigen p53 (139-147)
KTCPVQLWV

SEQ ID NO: 3820 - protein, 9 aa, synthetic construct
  REGION 1..9: note = 40S ribosomal protein S8 (75-83)
KTRIIDVVY

SEQ ID NO: 3821 - protein, 9 aa, synthetic construct
  REGION 1..9: note = Melanocyte protein PMEL (161-169)
KTWGQYWQV

SEQ ID NO: 3822 - protein, 9 aa, synthetic construct
  REGION 1..9: note = Melanoma-associated antigen 1 (278-286)
KVLEYVIKV

SEQ ID NO: 3823 - protein, 9 aa, synthetic construct
  REGION 1..9: note = Glutamate carboxypeptidase 2 (298-306)
KYADKIYSI

SEQ ID NO: 3824 - protein, 9 aa, synthetic construct
  REGION 1..9: note = Serine/threonine-protein phosphatase PP1-beta catalytic subunit (112-120)
KYPENFFLL

SEQ ID NO: 3825 - protein, 10 aa, synthetic construct
  REGION 1..10: note = Mammaglobin-A (83-92)
LIYDSSLCDL

SEQ ID NO: 3826 - protein, 9 aa, synthetic construct
  REGION 1..9: note = ATP-binding cassette sub-family F member 2 (251-259)
LLDEPTNHL

SEQ ID NO: 3827 - protein, 9 aa, synthetic construct
  REGION 1..9: note = Gamma-interferon-inducible lysosomal thiol reductase (24-32)
LLDVPTAAV

SEQ ID NO: 3828 - protein, 9 aa, synthetic construct
  REGION 1..9: note = Cellular tumor antigen p53 (264-272)
LLGRNSFEV

SEQ ID NO: 3829 - protein, 10 aa, synthetic construct
  REGION 1..10: note = Gamma-interferon-inducible lysosomal thiol reductase (23-32)
LLLDVPTAAV

SEQ ID NO: 3830 - protein, 12 aa, synthetic construct
  REGION 1..12: note = Gamma-interferon-inducible lysosomal thiol reductase (15-26)
LLLDVPTAAVQA

SEQ ID NO: 3831 - protein, 10 aa, synthetic construct
  REGION 1..10: note = Stress-70 protein, mitochondrial (436-445)
LLLDVTPLSL

SEQ ID NO: 3832 - protein, 9 aa, synthetic construct
  REGION 1..9: note = Mucin-1 (12-20)
LLLLTVLTV

SEQ ID NO: 3833 - protein, 9 aa, synthetic construct
  REGION 1..9: note = Mammaglobin-A (4-12)
LMVLMLAAL

SEQ ID NO: 3834 - protein, 9 aa, synthetic construct
  REGION 1..9: note = Melanocyte protein PMEL (527-535)
LPKEACMEI

SEQ ID NO: 3835 - protein, 9 aa, synthetic construct
  REGION 1..9: note = Rac GTPase-activating protein 1 (403-411)
LPQANRDTL

SEQ ID NO: 3836 - protein, 9 aa, synthetic construct
  REGION 1..9: note = Catenin beta-1 (370-378)
LTDPSQRLV

SEQ ID NO: 3837 - protein, 9 aa, synthetic construct
  REGION 1..9: note = HLA class I histocompatibility antigen, B-39 alpha chain (2-10)
LVMAPRTVL

SEQ ID NO: 3838 - protein, 9 aa, synthetic construct
  REGION 1..9: note = 40S ribosomal protein S16 (40-48)
MIEPRTLQY

SEQ ID NO: 3839 - protein, 9 aa, synthetic construct
  REGION 1..9: note = Melanocyte protein PMEL (185-193)
MLGTHTMEV

SEQ ID NO: 3840 - protein, 9 aa, synthetic construct
  REGION 1..9: note = Tyrosinase (1-9)
MLLAVLYCL

SEQ ID NO: 3841 - protein, 9 aa, synthetic construct
  REGION 1..9: note = HLA class I histocompatibility antigen, alpha chain E (1-9)
MVDGTLLLL

SEQ ID NO: 3842 - protein, 9 aa, synthetic construct
  REGION 1..9: note = Vimentin (177-185)
NLAEDIMRL

SEQ ID NO: 3843 - protein, 9 aa, synthetic construct
  REGION 1..9: note = Bifunctional purine biosynthesis protein PURH (101-109)
NLYPFVKTV

SEQ ID NO: 3844 - protein, 16 aa, synthetic construct
  REGION 1..16: note = Transferrin receptor protein 1 (215-230)
NPGGYVAYSKAATVTG

SEQ ID NO: 3845 - protein, 18 aa, synthetic construct
  REGION 1..18: note = Transferrin receptor protein 1 (215-232)
NPGGYVAYSKAATVTGKL

SEQ ID NO: 3846 - protein, 10 aa, synthetic construct
  REGION 1..10: note = ELAV-like protein 1 (186-195)
NPNQNKNVAL

SEQ ID NO: 3847 - protein, 9 aa, synthetic construct
  REGION 1..9: note = U1 small nuclear ribonucleoprotein A (229-237)
NQFPGFKEV

SEQ ID NO: 3848 - protein, 15 aa, synthetic construct
  REGION 1..15: note = Heat shock 70 kDa protein 1-like (170-184)
NVLRIINEPTAAAIA

SEQ ID NO: 3849 - protein, 15 aa, synthetic construct
  REGION 1..15: note = HLA class II histocompatibility antigen, DR alpha chain (52-66)
QGALANIAVDKANLE

SEQ ID NO: 3850 - protein, 9 aa, synthetic construct
  REGION 1..9: note = Myosin-9 (478-486)
QLFNHTMFI

SEQ ID NO: 3851 - protein, 9 aa, synthetic construct
  REGION 1..9: note = Myosin-9 (163-171)
QLMAEKLQL

SEQ ID NO: 3852 - protein, 9 aa, synthetic construct
  REGION 1..9: note = T-complex protein 1 subunit alpha (187-195)
QPRYPVNSV

SEQ ID NO: 3853 - protein, 10 aa, synthetic construct
  REGION 1..10: note = Carcinoembryonic antigen-related cell adhesion molecule 5 (268-277)
QYSWFVNGTF

SEQ ID NO: 3854 - protein, 9 aa, synthetic construct
  REGION 1..9: note = Histone H2AX (78-86)
RIIPRHLQL

SEQ ID NO: 3855 - protein, 9 aa, synthetic construct
  REGION 1..9: note = Lamin-B1 (42-50)
RLAVYIDKV

SEQ ID NO: 3856 - protein, 9 aa, synthetic construct
  REGION 1..9: note = Prelamin-A/C (41-49)
RLAVYIDRV

SEQ ID NO: 3857 - protein, 9 aa, synthetic construct
  REGION 1..9: note = Melanocyte protein PMEL (626-634)
RLMKQDFSV

SEQ ID NO: 3858 - protein, 9 aa, synthetic construct
  REGION 1..9: note = 60S acidic ribosomal protein P2 (38-46)
RLNKVISEL

SEQ ID NO: 3859 - protein, 9 aa, synthetic construct
  REGION 1..9: note = Vimentin (69-77)
RLRSSVPGV

SEQ ID NO: 3860 - protein, 9 aa, synthetic construct
  REGION 1..9: note = Wilms tumor protein (126-134)
RMFPNAPYL

SEQ ID NO: 3861 - protein, 9 aa, synthetic construct
  REGION 1..9: note = Histone deacetylase 2 variant (122-130)
RMLPHAPGV

SEQ ID NO: 3862 - protein, 9 aa, synthetic construct
  REGION 1..9: note = Cellular tumor antigen p53 (65-73)
RMPEAAPPV

SEQ ID NO: 3863 - protein, 9 aa, synthetic construct
  REGION 1..9: note = Actin, cytoplasmic 2 (103-111)
RMQKEITAL

SEQ ID NO: 3864 - protein, 23 aa, synthetic construct
  REGION 1..23: note = Melanoma antigen recognized by T-cells 1 (51-73)
RNGYRALMDKSLHVGTQCALTRR

SEQ ID NO: 3865 - protein, 9 aa, synthetic construct
  REGION 1..9: note = B-lymphocyte antigen CD20 (222-230)
RPKSNIVLL

SEQ ID NO: 3866 - protein, 9 aa, synthetic construct
  REGION 1..9: note = Actin, aortic smooth muscle (39-47)
RPRHQGVMV

SEQ ID NO: 3867 - protein, 9 aa, synthetic construct
  REGION 1..9: note = Probable global transcription activator SNF2L2 (261-269)
RPSGPGPEL

SEQ ID NO: 3868 - protein, 9 aa, synthetic construct
  REGION 1..9: note = Myotubularin-related protein 5 (644-652)
RPYSNVSNL

SEQ ID NO: 3869 - protein, 9 aa, synthetic construct
  REGION 1..9: note = Proteasome subunit beta type-1 (127-135)
RRFFPYYVY

SEQ ID NO: 3870 - protein, 9 aa, synthetic construct
  REGION 1..9: note = 60S ribosomal protein L7a (110-118)
RRHWGGNVL

SEQ ID NO: 3871 - protein, 9 aa, synthetic construct
  REGION 1..9: note = Histone H3.3 (53-61)
RRYQKSTEL

SEQ ID NO: 3872 - protein, 9 aa, synthetic construct
  REGION 1..9: note = 60S ribosomal protein L24 (23-31)
RTDGKVFQF

SEQ ID NO: 3873 - protein, 9 aa, synthetic construct
  REGION 1..9: note = 40S ribosomal protein S3 (54-62)
RTQNVLGEK

SEQ ID NO: 3874 - protein, 9 aa, synthetic construct
  REGION 1..9: note = HLA class I histocompatibility antigen, Cw-7 alpha chain (2-10)
RVMAPRALL

SEQ ID NO: 3875 - protein, 10 aa, synthetic construct
  REGION 1..10: note = HLA class I histocompatibility antigen, B-15 alpha chain (194-203)
RYLENGKETL

SEQ ID NO: 3876 - protein, 9 aa, synthetic construct
  REGION 1..9: note = Serine/threonine-protein kinase Sgk1 (208-216)
SALGYLHSL

SEQ ID NO: 3877 - protein, 9 aa, synthetic construct
  REGION 1..9: note = Tyrosinase (192-200)
SEIWRDIDF

SEQ ID NO: 3878 - protein, 9 aa, synthetic construct
  REGION 1..9: note = Serine/threonine-protein phosphatase PP1-alpha catalytic subunit (10-18)
SIIGRLLEV

SEQ ID NO: 3879 - protein, 10 aa, synthetic construct
  REGION 1..10: note = Melanocyte protein PMEL (577-586)
SLADTNSLAV

SEQ ID NO: 3880 - protein, 9 aa, synthetic construct
  REGION 1..9: note = Heterogeneous nuclear ribonucleoprotein K (154-162)
SLAGGIIGV

SEQ ID NO: 3881 - protein, 9 aa, synthetic construct
  REGION 1..9: note = L-dopachrome tautomerase (288-296)
SLDDYNHLV

SEQ ID NO: 3882 - protein, 9 aa, synthetic construct
  REGION 1..9: note = Protein flightless-1 homolog (1009-1017)
SLFPGKLEV

SEQ ID NO: 3883 - protein, 9 aa, synthetic construct
  REGION 1..9: note = Dual specificity protein phosphatase 5 (337-345)
SLIGHLQTL

SEQ ID NO: 3884 - protein, 10 aa, synthetic construct
  REGION 1..10: note = TSC22 domain family protein 3 (27-36)
SLLGGDVVSV

SEQ ID NO: 3885 - protein, 9 aa, synthetic construct
  REGION 1..9: note = Cancer/testis antigen 1 (157-165)
SLLMWITQC

SEQ ID NO: 3886 - protein, 9 aa, synthetic construct
  REGION 1..9: note = Serine/threonine-protein phosphatase 2A 65 kDa regulatory subunit A alpha isoform (403-411)
SLLPAIVEL

SEQ ID NO: 3887 - protein, 11 aa, synthetic construct
  REGION 1..11: note = Protein transport protein Sec23B (138-148)
SLLPPDALVGL

SEQ ID NO: 3888 - protein, 11 aa, synthetic construct
  REGION 1..11: note = Protein transport protein Sec23A (156-166)
SLLPPTALVGL

SEQ ID NO: 3889 - protein, 9 aa, synthetic construct
  REGION 1..9: note = Vimentin (226-234)
SLQEEIAFL

SEQ ID NO: 3890 - protein, 9 aa, synthetic construct
  REGION 1..9: note = CD59oprotein (106-114)
SLSEKTVLL

SEQ ID NO: 3891 - protein, 9 aa, synthetic construct
  REGION 1..9: note = Collagen alpha-5(IV) chain (18-26)
SLWGQPAEA

SEQ ID NO: 3892 - protein, 9 aa, synthetic construct
  REGION 1..9: note = AT-rich interactive domain-containing protein 3A (372-380)
SPKLPVSSL

SEQ ID NO: 3893 - protein, 11 aa, synthetic construct
  REGION 1..11: note = Polypyrimidine tract-binding protein 1 (141-151)
SPNQARAQAAL

SEQ ID NO: 3894 - protein, 9 aa, synthetic construct
  REGION 1..9: note = Spermine synthase (128-136)
SPYQNIKIL

SEQ ID NO: 3895 - protein, 9 aa, synthetic construct
  REGION 1..9: note = Eukaryotic translation initiation factor 3 subunit D (61-69)
SQFGGGSQY

SEQ ID NO: 3896 - protein, 9 aa, synthetic construct
  REGION 1..9: note = Ornithine decarboxylase (180-188)
SSEQTFMYY

SEQ ID NO: 3897 - protein, 9 aa, synthetic construct
  REGION 1..9: note = Glutamine-fructose-6-phosphate aminotransferase (isomerizing) 1 (95-103)
STDHIPILY

SEQ ID NO: 3898 - protein, 10 aa, synthetic construct
  REGION 1..10: note = Cellular tumor antigen p53 (149-157)
STPPPGATRV

SEQ ID NO: 3899 - protein, 9 aa, synthetic construct
  REGION 1..9: note = Eukaryotic translation initiation factor 3 subunit L (226-234)
SVLNVLHSL

SEQ ID NO: 3900 - protein, 9 aa, synthetic construct
  REGION 1..9: note = L-dopachrome tautomerase (180-188)
SVYDFFVWL

SEQ ID NO: 3901 - protein, 9 aa, synthetic construct
  REGION 1..9: note = Mammaglobin-A (32-40)
TINPQVSKT

SEQ ID NO: 3902 - protein, 9 aa, synthetic construct
  REGION 1..9: note = L-dopachrome tautomerase (360-368)
TLDSQVMSL

SEQ ID NO: 3903 - protein, 9 aa, synthetic construct
  REGION 1..9: note = Protein BTG2 (101-109)
TLWVDPYEV

SEQ ID NO: 3904 - protein, 9 aa, synthetic construct
  REGION 1..9: note = DNA-directed RNA polymerase II subunit RPB1 (527-535)
TPQSNRPVM

SEQ ID NO: 3905 - protein, 11 aa, synthetic construct
  REGION 1..11: note = Heat shock cognate 71 kDa protein (22-32)
TVFDAKRLIGR

SEQ ID NO: 3906 - protein, 9 aa, synthetic construct
  REGION 1..9: note = Carcinoembryonic antigen-related cell adhesion molecule 5 (652-660)
TYACFVSNL

SEQ ID NO: 3907 - protein, 9 aa, synthetic construct
  REGION 1..9: note = Receptor tyrosine-protein kinase erbB-2 (63-71)
TYLPTNASL

SEQ ID NO: 3908 - protein, 8 aa, synthetic construct
  REGION 1..8: note = Serine/threonine-protein phosphatase 2A 65 kDa regulatory subunit A alpha isoform (263-270)
VADKFTEL

SEQ ID NO: 3909 - protein, 9 aa, synthetic construct
  REGION 1..9: note = Actin, cytoplasmic 2 (76-84)
VALDFEQEM

SEQ ID NO: 3910 - protein, 17 aa, synthetic construct
  REGION 1..17: note = HLA class I histocompatibility antigen, A-2 alpha chain (27-43)
VDDTQFVRFDSDAASQR

SEQ ID NO: 3911 - protein, 19 aa, synthetic construct
  REGION 1..19: note = HLA class I histocompatibility antigen, A-2 alpha chain (27-45)
VDDTQFVRFDSDAASQRME

SEQ ID NO: 3912 - protein, 20 aa, synthetic construct
  REGION 1..20: note = HLA class I histocompatibility antigen, A-2 alpha chain (27-46)
VDDTQFVRFDSDAASQRMEP

SEQ ID NO: 3913 - protein, 21 aa, synthetic construct
  REGION 1..21: note = HLA class I histocompatibility antigen, A-2 alpha chain (27-47)
VDDTQFVRFDSDAASQRMEPR

SEQ ID NO: 3914 - protein, 9 aa, synthetic construct
  REGION 1..9: note = Myeloblastin (169-177)
VLQELNVTV

SEQ ID NO: 3915 - protein, 10 aa, synthetic construct
  REGION 1..10: note = Melanocyte protein PMEL (483-492)
VLYRYGSFSV

SEQ ID NO: 3916 - protein, 9 aa, synthetic construct
  REGION 1..9: note = HLA class I histocompatibility antigen, Cw-3 alpha chain (3-11)
VMAPRTLIL

SEQ ID NO: 3917 - protein, 9 aa, synthetic construct
  REGION 1..9: note = HLA class I histocompatibility antigen, A-2 alpha chain (3-11)
VMAPRTLVL

SEQ ID NO: 3918 - protein, 9 aa, synthetic construct
  REGION 1..9: note = Importin subunit alpha-5 (434-442)
VMDSKIVQV

SEQ ID NO: 3919 - protein, 9 aa, synthetic construct
  REGION 1..9: note = 60S acidic ribosomal protein P2 (65-73)
VPAGGAVAV

SEQ ID NO: 3920 - protein, 12 aa, synthetic construct
  REGION 1..12: note = rRNA 2'-O-methyltransferase fibrillarin (174-185)
VSDIVGPDGLVY

SEQ ID NO: 3921 - protein, 15 aa, synthetic construct
  REGION 1..15: note = Beta-2-microglobulin (84-98)
VTLSQPKIVKWDRDM

SEQ ID NO: 3922 - protein, 9 aa, synthetic construct
  REGION 1..9: note = L-dopachrome tautomerase (82-90)
VVMGTLVAL

SEQ ID NO: 3923 - protein, 20 aa, synthetic construct
  REGION 1..20: note = Cancer/testis antigen 1 (161-180)
WITQCFLPVFLAQPPSGQRR

SEQ ID NO: 3924 - protein, 16 aa, synthetic construct
  REGION 1..16: note = Melanocyte protein PMEL (44-59)
WNRQLYPEWTEAQRLD

SEQ ID NO: 3925 - protein, 9 aa, synthetic construct
  REGION 1..9: note = Elongation factor 2 (265-273)
YFDPANGKF

SEQ ID NO: 3926 - protein, 9 aa, synthetic construct
  REGION 1..9: note = Cyclin-A2 (178-186)
YHEDIHTYL

SEQ ID NO: 3927 - protein, 9 aa, synthetic construct
  REGION 1..9: note = DNA (cytosine-5)-methyltransferase 1 (254-262)
YLDDPDLKY

SEQ ID NO: 3928 - protein, 9 aa, synthetic construct
  REGION 1..9: note = Melanocyte protein PMEL (280-288)
YLEPGPVTA

SEQ ID NO: 3929 - protein, 9 aa, synthetic construct
  REGION 1..9: note = Myosin-9 (260-268)
YLLEKSRAI

SEQ ID NO: 3930 - protein, 9 aa, synthetic construct
  REGION 1..9: note = Probable ATP-dependent RNA helicase DDX5 (148-156)
YLLPAIVHI

SEQ ID NO: 3931 - protein, 9 aa, synthetic construct
  REGION 1..9: note = Carcinoembryonic antigen-related cell adhesion molecule 5 (605-613)
YLSGANLNL

SEQ ID NO: 3932 - protein, 9 aa, synthetic construct
  REGION 1..9: note = Myosin-9 (9-17)
YLYVDKNFI

SEQ ID NO: 3933 - protein, 9 aa, synthetic construct
  REGION 1..9: note = Tyrosinase (369-377)
YMDGTMSQV

SEQ ID NO: 3934 - protein, 9 aa, synthetic construct
  REGION 1..9: note = Tyrosinase (369-377)
YMNGTMSQV

SEQ ID NO: 3935 - protein, 9 aa, synthetic construct
  REGION 1..9: note = Cellular tumor antigen p53 (103-111)
YQGSYGFRL

SEQ ID NO: 3936 - protein, 12 aa, synthetic construct
  REGION 1..12: note = Cytochrome c oxidase subunit 2 (110-121)
YTDYGGLIFNSY

SEQ ID NO: 3937 - protein, 9 aa, synthetic construct
  REGION 1..9: note = HLA class I histocompatibility antigen, Cw-7 alpha chain (12-20)
FAYDGKDYI

SEQ ID NO: 3938 - protein, 9 aa, synthetic construct
  REGION 1..9: note = HLA class I histocompatibility antigen, alpha chain E (137-145)
FAYDGKDYL

SEQ ID NO: 3939 - protein, 9 aa, synthetic construct
  REGION 1..9: note = IST1 homolog (326-334)
FVLPELPSV

SEQ ID NO: 3940 - protein, 10 aa, synthetic construct
  REGION 1..10: note = 60S ribosomal protein L35 (19-28)
KQLDDLKVEL

SEQ ID NO: 3941 - protein, 15 aa, synthetic construct
  REGION 1..15: note = Triosephosphate isomerase (23-37)
GELIGTLNAAKVPAD

SEQ ID NO: 3942 - protein, 14 aa, synthetic construct
  REGION 1..14: note = HLA class II histocompatibility antigen, DR alpha chain (40-53)
LEEFGRFASFEAQG

SEQ ID NO: 3943 - protein, 9 aa, synthetic construct
  REGION 1..9: note = Sorting nexin-5 (257-265)
EEPTVIKKY

SEQ ID NO: 3944 - protein, 10 aa, synthetic construct
  REGION 1..10: note = Melanoma-associated antigen 4 (230-239)
GVYDGREHTV

SEQ ID NO: 3945 - protein, 9 aa, synthetic construct
  REGION 1..9: note = HLA class I histocompatibility antigen, B-39 alpha chain (3-11)
VMAPRTVLL

SEQ ID NO: 3946 - protein, 9 aa, synthetic construct
  REGION 1..9: note = Ubiquilin-4 (442-450)
NPRAMQALL

SEQ ID NO: 3947 - protein, 9 aa, synthetic construct
  REGION 1..9: note = HLA class I histocompatibility antigen, Cw-7 alpha chain (3-11)
VMAPRALLL

SEQ ID NO: 3948 - protein, 15 aa, synthetic construct
  REGION 1..15: note = Gamma-secretase C-terminal fragment 59 (562-576)
DAEFRHDSGYEVHHQ

SEQ ID NO: 3949 - protein, 10 aa, synthetic construct
  REGION 1..10: note = Gamma-secretase C-terminal fragment 59 (565-574)
FRHDSGYEVH

SEQ ID NO: 3950 - protein, 9 aa, synthetic construct
  REGION 1..9: note = HLA class I histocompatibility antigen, Cw-2 alpha chain (3-11)
VMAPRTLLL

SEQ ID NO: 3951 - protein, 13 aa, synthetic construct
  REGION 1..13: note = Gamma-secretase C-terminal fragment 59 (562-574)
DAEFRHDSGYEVH

SEQ ID NO: 3952 - protein, 8 aa, synthetic construct
  REGION 1..8: note = Beta-2-microglobulin (91-98)
IVKWDRDM

SEQ ID NO: 3953 - protein, 14 aa, synthetic construct
  REGION 1..14: note = HLA class II histocompatibility antigen, DR alpha chain (50-63)
EAQGALANIAVDKA

SEQ ID NO: 3954 - protein, 15 aa, synthetic construct
  REGION 1..15: note = Interferon-induced transmembrane protein 1 (69-83)
VGDVTGAQAYASTAK

SEQ ID NO: 3955 - protein, 15 aa, synthetic construct
  REGION 1..15: note = Gamma-secretase C-terminal fragment 59 (560-574)
FAEDVGSNKGAIIGL

SEQ ID NO: 3956 - protein, 11 aa, synthetic construct
  REGION 1..11: note = Amyloid beta A4 protein (20-30)
FAEDVGSNKGA

SEQ ID NO: 3957 - protein, 9 aa, synthetic construct
  REGION 1..9: note = Heat shock 70 kDa protein 1-like (395-403)
LLDVAPLSL

SEQ ID NO: 3958 - protein, 9 aa, synthetic construct
  REGION 1..9: note = Heat shock 70 kDa protein 1B (391-399)
LLLLDVAPL

SEQ ID NO: 3959 - protein, 16 aa, synthetic construct
  REGION 1..16: note = HLA class I histocompatibility antigen, B-15 alpha chain (53-68)
DDTQFVRFDSDAASPR

SEQ ID NO: 3960 - protein, 16 aa, synthetic construct
  REGION 1..16: note = HLA class I histocompatibility antigen, Cw-7 alpha chain (153-168)
DLRSWTAADTAAQITQ

SEQ ID NO: 3961 - protein, 15 aa, synthetic construct
  REGION 1..15: note = HLA class I histocompatibility antigen, B-15 alpha chain (54-68)
DTQFVRFDSDAASPR

SEQ ID NO: 3962 - protein, 17 aa, synthetic construct
  REGION 1..17: note = HLA class I histocompatibility antigen, A-2 alpha chain (29-45)
DTQFVRFDSDAASQRME

SEQ ID NO: 3963 - protein, 12 aa, synthetic construct
  REGION 1..12: note = HLA class I histocompatibility antigen, B-15 alpha chain (57-68)
FVRFDSDAASPR

SEQ ID NO: 3964 - protein, 11 aa, synthetic construct
  REGION 1..11: note = HLA class I histocompatibility antigen, A-1 alpha chain (32-42)
FVRFDSDAASQ

SEQ ID NO: 3965 - protein, 15 aa, synthetic construct
  REGION 1..15: note = HLA class I histocompatibility antigen, B-15 alpha chain (154-168)
LSSWTAADTAAQITQ

SEQ ID NO: 3966 - protein, 17 aa, synthetic construct
  REGION 1..17: note = HLA class I histocompatibility antigen, B-15 alpha chain (52-68)
VDDTQFVRFDSDAASPR

SEQ ID NO: 3967 - protein, 9 aa, synthetic construct
  REGION 1..9: note = Vimentin (116-124)
NYIDKVRFL

SEQ ID NO: 3968 - protein, 9 aa, synthetic construct
  REGION 1..9: note = G antigen 12H (9-17)
YYWPRPRRY

SEQ ID NO: 3969 - protein, 9 aa, synthetic construct
  REGION 1..9: note = Transaldolase (168-176)
LLFSFAQAV

SEQ ID NO: 3970 - protein, 17 aa, synthetic construct
  REGION 1..17: note = T cell receptor beta chain (42-57)
CKPISGHNSLFQWYRQT

SEQ ID NO: 3971 - protein, 9 aa, synthetic construct
  REGION 1..9: note = Putative pre-mRNA-splicing factor ATP-dependent RNA helicase DHX16 (410-418)
AAIANHQVL

SEQ ID NO: 3972 - protein, 9 aa, synthetic construct
  REGION 1..9: note = 14-3-3 protein gamma (25-33)
AAMKNVTEL

SEQ ID NO: 3973 - protein, 9 aa, synthetic construct
  REGION 1..9: note = Serine/threonine-protein kinase SMG1 (111-119)
ALNNLLHSL

SEQ ID NO: 3974 - protein, 9 aa, synthetic construct
  REGION 1..9: note = Cyclin-L1 (148-156)
DVINVFHHL

SEQ ID NO: 3975 - protein, 9 aa, synthetic construct
  REGION 1..9: note = Fructose-bisphosphate aldolase A (15-23)
ELSDIAHRI

SEQ ID NO: 3976 - protein, 9 aa, synthetic construct
  REGION 1..9: note = Glyceraldehyde-3-phosphate dehydrogenase (173-181)
GLMTTVHAI

SEQ ID NO: 3977 - protein, 9 aa, synthetic construct
  REGION 1..9: note = Elongation of very long chain fatty acids protein 1 (135-143)
GQVTFLHVF

SEQ ID NO: 3978 - protein, 9 aa, synthetic construct
  REGION 1..9: note = Microtubule-associated protein RP/EB family member 2 (234-242)
QLNEQVHSL

SEQ ID NO: 3979 - protein, 9 aa, synthetic construct
  REGION 1..9: note = T-complex protein 1 subunit epsilon (79-87)
SMMDVDHQI

SEQ ID NO: 3980 - protein, 9 aa, synthetic construct
  REGION 1..9: note = Sphingolipid delta(4)-desaturase DES1 (83-91)
SMTLAIHEI

SEQ ID NO: 3981 - protein, 9 aa, synthetic construct
  REGION 1..9: note = Elongation of very long chain fatty acids protein 5 (171-179)
TLNSFIHVL

SEQ ID NO: 3982 - protein, 9 aa, synthetic construct
  REGION 1..9: note = ORM1-like protein 2 (50-58)
TLTNVIHNL

SEQ ID NO: 3983 - protein, 10 aa, synthetic construct
  REGION 1..10: note = Baculoviral IAP repeat-containing protein 7 (280-289)
QLCPICRAPV

SEQ ID NO: 3984 - protein, 10 aa, synthetic construct
  REGION 1..10: note = E3 ubiquitin-protein ligase TRIM68 (55-64)
YTCPLCRAPV

SEQ ID NO: 3985 - protein, 11 aa, synthetic construct
  REGION 1..11: note = Putative HTLV-1-related endogenous sequence (14-24)
PTRAPSGPRPP

SEQ ID NO: 3986 - protein, 11 aa, synthetic construct
  REGION 1..11: note = Putative HTLV-1-related endogenous sequence (117-127)
RRREGPDRSPR

SEQ ID NO: 3987 - protein, 9 aa, synthetic construct
  REGION 1..9: note = Myelin basic protein (175-183)
GTLSKIFKL

SEQ ID NO: 3988 - protein, 9 aa, synthetic construct
  REGION 1..9: note = Myelin proteolipid protein (45-53)
KLIETYFSK

SEQ ID NO: 3989 - protein, 9 aa, synthetic construct
  REGION 1..9: note = Gamma-secretase C-terminal fragment 59 (563-571)
AEFRHDSGY

SEQ ID NO: 3990 - protein, 9 aa, synthetic construct
  REGION 1..9: note = SAM and SH3 domain-containing protein 1 (305-313)
ALYSGVHKK

SEQ ID NO: 3991 - protein, 10 aa, synthetic construct
  REGION 1..10: note = E3 ubiquitin-protein ligase SIAH1 (6-15)
ATALPTGTSK

SEQ ID NO: 3992 - protein, 9 aa, synthetic construct
  REGION 1..9: note = Muscleblind-like protein 2 (359-367)
ATANQIILK

SEQ ID NO: 3993 - protein, 9 aa, synthetic construct
  REGION 1..9: note = Annexin A1 (63-71)
ATIIDILTK

SEQ ID NO: 3994 - protein, 9 aa, synthetic construct
  REGION 1..9: note = Nuclear ubiquitous casein and cyclin-dependent kinase substrate 1 (176-184)
ATVTPSPVK

SEQ ID NO: 3995 - protein, 9 aa, synthetic construct
  REGION 1..9: note = Pleiotropic regulator 1 (118-126)
AVALPLQTK

SEQ ID NO: 3996 - protein, 12 aa, synthetic construct
  REGION 1..12: note = NADH dehydrogenase (ubiquinone) 1 alpha subcomplex subunit 3 (29-40)
AVILPPLSPYFK

SEQ ID NO: 3997 - protein, 9 aa, synthetic construct
  REGION 1..9: note = CD99 antigen (177-185)
AVQRTLLEK

SEQ ID NO: 3998 - protein, 9 aa, synthetic construct
  REGION 1..9: note = Guanine nucleotide-binding protein G(o) subunit alpha (93-101)
AVTDVIIAK

SEQ ID NO: 3999 - protein, 14 aa, synthetic construct
  REGION 1..14: note = Calsyntenin-1 (56-69)
DPPLIALDKDAPLR

SEQ ID NO: 4000 - protein, 9 aa, synthetic construct
  REGION 1..9: note = GPI transamidase component PIG-T (161-169)
DTDHYFLRY

SEQ ID NO: 4001 - protein, 14 aa, synthetic construct
  REGION 1..14: note = Perilipin-3 (222-235)
DVASVQQQRQEQSY

SEQ ID NO: 4002 - protein, 9 aa, synthetic construct
  REGION 1..9: note = WD40 repeat-containing protein SMU1 (9-17)
DVIRLIMQY

SEQ ID NO: 4003 - protein, 10 aa, synthetic construct
  REGION 1..10: note = Protein S100-B (35-44)
ELINNELSHF

SEQ ID NO: 4004 - protein, 11 aa, synthetic construct
  REGION 1..11: note = Annexin A11 (430-440)
ETDLLDIRSEY

SEQ ID NO: 4005 - protein, 9 aa, synthetic construct
  REGION 1..9: note = Histone H2B type 2-F (66-74)
FVNDIFERI

SEQ ID NO: 4006 - protein, 8 aa, synthetic construct
  REGION 1..8: note = Calmodulin (145-152)
FVQMMTAK

SEQ ID NO: 4007 - protein, 14 aa, synthetic construct
  REGION 1..14: note = Phosphoinositide-3-kinase-interacting protein 1 (30-43)
GHLYREDQTSPAPG

SEQ ID NO: 4008 - protein, 9 aa, synthetic construct
  REGION 1..9: note = THO complex subunit 4 (147-155)
GTADVHFER

SEQ ID NO: 4009 - protein, 9 aa, synthetic construct
  REGION 1..9: note = Neuroblast differentiation-associated protein AHNAK (1210-1218)
GTFGGLGSK

SEQ ID NO: 4010 - protein, 9 aa, synthetic construct
  REGION 1..9: note = Phosphoserine aminotransferase (119-127)
GTINIVHPK

SEQ ID NO: 4011 - protein, 9 aa, synthetic construct
  REGION 1..9: note = Histone deacetylase 7 (159-167)
HSERHVLLY

SEQ ID NO: 4012 - protein, 9 aa, synthetic construct
  REGION 1..9: note = Gelsolin (48-56)
IIYKGGTSR

SEQ ID NO: 4013 - protein, 10 aa, synthetic construct
  REGION 1..10: note = Tight junction protein ZO-1 (562-571)
IPNKNRAEQL

SEQ ID NO: 4014 - protein, 13 aa, synthetic construct
  REGION 1..13: note = Calmodulin (126-138)
IREADIDGDGQVN

SEQ ID NO: 4015 - protein, 17 aa, synthetic construct
  REGION 1..17: note = POTE ankyrin domain family member F (1057-1073)
ISKQEYDESGPSIVHRK

SEQ ID NO: 4016 - protein, 9 aa, synthetic construct
  REGION 1..9: note = NADH dehydrogenase (ubiquinone) iron-sulfur protein 7, mitochondrial (66-74)
IVAGTLTNK

SEQ ID NO: 4017 - protein, 9 aa, synthetic construct
  REGION 1..9: note = LIM domain transcription factor LMO4 (29-37)
KIADRFLLY

SEQ ID NO: 4018 - protein, 10 aa, synthetic construct
  REGION 1..10: note = Spectrin beta chain, non-erythrocytic 1 (1939-1948)
KPRDVSSVEL

SEQ ID NO: 4019 - protein, 9 aa, synthetic construct
  REGION 1..9: note = NADH dehydrogenase (ubiquinone) 1 subunit C2 (106-114)
KTYGEIFEK

SEQ ID NO: 4020 - protein, 15 aa, synthetic construct
  REGION 1..15: note = Testican-2 (317-331)
LERIQIQEAAKKKPG

SEQ ID NO: 4021 - protein, 9 aa, synthetic construct
  REGION 1..9: note = Alpha-adducin (37-45)
LTDRELEEY

SEQ ID NO: 4022 - protein, 10 aa, synthetic construct
  REGION 1..10: note = V-type proton ATPase subunit F (46-55)
NEIEDTFRQF

SEQ ID NO: 4023 - protein, 8 aa, synthetic construct
  REGION 1..8: note = 40S ribosomal protein SA (149-156)
NTDSPLRY

SEQ ID NO: 4024 - protein, 9 aa, synthetic construct
  REGION 1..9: note = Bcl-2-associated transcription factor 1 (428-436)
NTEEEGLKY

SEQ ID NO: 4025 - protein, 11 aa, synthetic construct
  REGION 1..11: note = ATP synthase-coupling factor 6, mitochondrial (98-108)
PKFEVIEKPQA

SEQ ID NO: 4026 - protein, 13 aa, synthetic construct
  REGION 1..13: note = Phosphatidylethanolamine-binding protein 1 (2-14)
PVDLSKWSGPLSL

SEQ ID NO: 4027 - protein, 9 aa, synthetic construct
  REGION 1..9: note = 40S ribosomal protein S29 (5-13)
QLYWSHPRK

SEQ ID NO: 4028 - protein, 10 aa, synthetic construct
  REGION 1..10: note = Septin-2 (291-300)
RLYPWGVVEV

SEQ ID NO: 4029 - protein, 9 aa, synthetic construct
  REGION 1..9: note = Methyl-CpG-binding domain protein 3 (74-82)
SIFKQPVTK

SEQ ID NO: 4030 - protein, 9 aa, synthetic construct
  REGION 1..9: note = Transformation/transcription domain-associated protein (1806-1814)
SITSVFITK

SEQ ID NO: 4031 - protein, 10 aa, synthetic construct
  REGION 1..10: note = Transcription factor HES-1 (101-110)
STDPSVLGKY

SEQ ID NO: 4032 - protein, 9 aa, synthetic construct
  REGION 1..9: note = Protein transport protein Sec23B (115-123)
STIEYVIQR

SEQ ID NO: 4033 - protein, 11 aa, synthetic construct
  REGION 1..11: note = Paralemmin-2 (155-165)
STIGPEGVHQK

SEQ ID NO: 4034 - protein, 10 aa, synthetic construct
  REGION 1..10: note = Sodium/potassium-transporting ATPase subunit alpha-3 (946-955)
SVFQQGMKNK

SEQ ID NO: 4035 - protein, 11 aa, synthetic construct
  REGION 1..11: note = Stathmin (31-41)
SVPEFPLSPPK

SEQ ID NO: 4036 - protein, 9 aa, synthetic construct
  REGION 1..9: note = Heterogeneous nuclear ribonucleoprotein L-like (68-76)
SVSPVVHVR

SEQ ID NO: 4037 - protein, 8 aa, synthetic construct
  REGION 1..8: note = Nodal modulator 3 (247-254)
TAIRHHVL

SEQ ID NO: 4038 - protein, 11 aa, synthetic construct
  REGION 1..11: note = Interferon-induced GTP-binding protein Mx2 (194-204)
TIIDLPGITRV

SEQ ID NO: 4039 - protein, 9 aa, synthetic construct
  REGION 1..9: note = Neuronal membraneoprotein M6-b (264-272)
TTYNYAVLK

SEQ ID NO: 4040 - protein, 9 aa, synthetic construct
  REGION 1..9: note = Contactin-1 (759-767)
VTNPDTGRY

SEQ ID NO: 4041 - protein, 8 aa, synthetic construct
  REGION 1..8: note = Cytosolic non-specific dipeptidase (468-475)
YEVSQLKD

SEQ ID NO: 4042 - protein, 9 aa, synthetic construct
  REGION 1..9: note = Septin-2 (121-129)
YIDEQFERY

SEQ ID NO: 4043 - protein, 10 aa, synthetic construct
  REGION 1..10: note = Noelin-2 (405-414)
YTDVPFHNQY

SEQ ID NO: 4044 - protein, 11 aa, synthetic construct
  REGION 1..11: note = Serine/threonine-protein kinase DCLK1 (176-186)
YTERDASGMLY

SEQ ID NO: 4045 - protein, 8 aa, synthetic construct
  REGION 1..8: note = U2 small nuclear ribonucleoprotein B'' (205-212)
DALQGFKI

SEQ ID NO: 4046 - protein, 15 aa, synthetic construct
  REGION 1..15: note = Melanocyte protein PMEL (45-59)
NRQLYPEWTEAQRLD

SEQ ID NO: 4047 - protein, 9 aa, synthetic construct
  REGION 1..9: note = Nuclear autoantigenic sperm protein (281-289)
VLNEQVKEA

SEQ ID NO: 4048 - protein, 9 aa, synthetic construct
  REGION 1..9: note = 60S ribosomal protein L5 (218-226)
AYKKQFSQY

SEQ ID NO: 4049 - protein, 9 aa, synthetic construct
  REGION 1..9: note = Endoplasmic reticulum-Golgi intermediate compartment protein 1 (258-266)
AIIGGTFTV

SEQ ID NO: 4050 - protein, 9 aa, synthetic construct
  REGION 1..9: note = Programmed cell death protein 4 (283-291)
ALDKATVLL

SEQ ID NO: 4051 - protein, 9 aa, synthetic construct
  REGION 1..9: note = Endoplasmin (381-389)
ALKDKIEKA

SEQ ID NO: 4052 - protein, 9 aa, synthetic construct
  REGION 1..9: note = Glyceraldehyde-3-phosphate dehydrogenase (302-310)
ALNDHFVKL

SEQ ID NO: 4053 - protein, 9 aa, synthetic construct
  REGION 1..9: note = Eukaryotic translation initiation factor 3 subunit F (349-357)
ALNEKLVNL

SEQ ID NO: 4054 - protein, 9 aa, synthetic construct
  REGION 1..9: note = Cofilin-1 (6-14)
AVSDGVIKV

SEQ ID NO: 4055 - protein, 9 aa, synthetic construct
  REGION 1..9: note = Actin, cytoplasmic 2 (21-29)
FAGDDAPRA

SEQ ID NO: 4056 - protein, 10 aa, synthetic construct
  REGION 1..10: note = Pyruvate kinase PKM (12-21)
FIQTQQLHAA

SEQ ID NO: 4057 - protein, 10 aa, synthetic construct
  REGION 1..10: note Dolichyl-diphosphooligosaccharide-proteinosyltransferase subunit STT3A (59-68)
FLAEEGFYKF

SEQ ID NO: 4058 - protein, 10 aa, synthetic construct
  REGION 1..10: note = 5'(3')-deoxyribonucleotidase, cytosolic type (71-80)
FLDLEPIPGA

SEQ ID NO: 4059 - protein, 8 aa, synthetic construct
  REGION 1..8: note = CKLF-like MARVEL transmembrane domain-containing protein 6 (79-86)
FLLSLLIL

SEQ ID NO: 4060 - protein, 9 aa, synthetic construct
  REGION 1..9: note = Cleavage and polyadenylation specificity factor subunit 1 (185-193)
FLPSYIIDV

SEQ ID NO: 4061 - protein, 8 aa, synthetic construct
  REGION 1..8: note = Neutral amino acid transporter B(0) (89-96)
FVFPGELL

SEQ ID NO: 4062 - protein, 10 aa, synthetic construct
  REGION 1..10: note = Glyceraldehyde-3-phosphate dehydrogenase (169-178)
GIVEGLMTTV

SEQ ID NO: 4063 - protein, 9 aa, synthetic construct
  REGION 1..9: note = Protein PRRC1 (212-220)
GIWGFIKGV

SEQ ID NO: 4064 - protein, 9 aa, synthetic construct
  REGION 1..9: note = Probable ATP-dependent RNA helicase DDX49 (311-319)
GLDIPTVQV

SEQ ID NO: 4065 - protein, 8 aa, synthetic construct
  REGION 1..8: note = Nuclear pore complex protein Nup160 (1223-1230)
GLFDTAIS

SEQ ID NO: 4066 - protein, 13 aa, synthetic construct
  REGION 1..13: note = ATP synthase subunit beta, mitochondrial (203-215)
GLFGGAGVGKTVL

SEQ ID NO: 4067 - protein, 9 aa, synthetic construct
  REGION 1..9: note = Signal peptidase complex subunit 2 (79-87)
GLIDGRLTI

SEQ ID NO: 4068 - protein, 11 aa, synthetic construct
  REGION 1..11: note = Pyruvate kinase PKM (122-132)
GLIKGSGTAEV

SEQ ID NO: 4069 - protein, 10 aa, synthetic construct
  REGION 1..10: note = Protein kinase C iota type (241-250)
GLQDFDLLRV

SEQ ID NO: 4070 - protein, 9 aa, synthetic construct
  REGION 1..9: note = Histone acetyltransferase p300 (2240-2248)
GQIGQLPQA

SEQ ID NO: 4071 - protein, 9 aa, synthetic construct
  REGION 1..9: note = Histone H2A type 1-A (107-115)
GVLPNIQAV

SEQ ID NO: 4072 - protein, 10 aa, synthetic construct
  REGION 1..10: note = Small nuclear ribonucleoprotein G (67-76)
IIMLEALERV

SEQ ID NO: 4073 - protein, 9 aa, synthetic construct
  REGION 1..9: note = Heat shock 70 kDa protein 1-like (174-182)
IINEPTAAA

SEQ ID NO: 4074 - protein, 9 aa, synthetic construct
  REGION 1..9: note = Glyceraldehyde-3-phosphate dehydrogenase (206-214)
IIPASTGAA

SEQ ID NO: 4075 - protein, 12 aa, synthetic construct
  REGION 1..12: note = Nucleosome assembly protein 1-like 1 (319-330)
ILAADFEIGHFL

SEQ ID NO: 4076 - protein, 9 aa, synthetic construct
  REGION 1..9: note = Glyceraldehyde-3-phosphate dehydrogenase (273-281)
ILGYTEHQV

SEQ ID NO: 4077 - protein, 9 aa, synthetic construct
  REGION 1..9: note = 40S ribosomal protein S11 (72-80)
ILSGVVTKM

SEQ ID NO: 4078 - protein, 9 aa, synthetic construct
  REGION 1..9: note = Structural maintenance of chromosomes protein 3 (436-444)
KLDQDLNEV

SEQ ID NO: 4079 - protein, 13 aa, synthetic construct
  REGION 1..13: note = Centrin-2 (111-123)
KLFDDDETGKISF

SEQ ID NO: 4080 - protein, 11 aa, synthetic construct
  REGION 1..11: note = GTP-binding nuclear protein Ran (167-177)
KLIGDPNLEFV

SEQ ID NO: 4081 - protein, 11 aa, synthetic construct
  REGION 1..11: note = 40S ribosomal protein S3a (227-237)
KLMELHGEGSS

SEQ ID NO: 4082 - protein, 10 aa, synthetic construct
  REGION 1..10: note = ATP-dependent RNA helicase A (696-705)
KVFDPVPVGV

SEQ ID NO: 4083 - protein, 8 aa, synthetic construct
  REGION 1..8: note = Gamma-interferon-inducible lysosomal thiol reductase (27-34)
LLDVPTAA

SEQ ID NO: 4084 - protein, 9 aa, synthetic construct
  REGION 1..9: note = Heat shock cognate 71 kDa protein (393-401)
LLDVTPLSL

SEQ ID NO: 4085 - protein, 8 aa, synthetic construct
  REGION 1..8: note = T-complex protein 1 subunit eta (68-75)
LLDVVHPA

SEQ ID NO: 4086 - protein, 9 aa, synthetic construct
  REGION 1..9: note = T-complex protein 1 subunit eta (68-76)
LLDVVHPAA

SEQ ID NO: 4087 - protein, 9 aa, synthetic construct
  REGION 1..9: note = Transmembrane emp24 domain-containing protein 10 (23-31)
LLGPRLVLA

SEQ ID NO: 4088 - protein, 11 aa, synthetic construct
  REGION 1..11: note = Glyceraldehyde-3-phosphate dehydrogenase (174-184)
LMTTVHAITAT

SEQ ID NO: 4089 - protein, 9 aa, synthetic construct
  REGION 1..9: note = Proteasome-associated protein ECM29 homolog (162-170)
NLAEKPKTV

SEQ ID NO: 4090 - protein, 9 aa, synthetic construct
  REGION 1..9: note = GPN-loop GTPase 1 (42-50)
NLDPAVHEV

SEQ ID NO: 4091 - protein, 9 aa, synthetic construct
  REGION 1..9: note = 60S ribosomal protein L10a (143-151)
NMVAKVDEV

SEQ ID NO: 4092 - protein, 9 aa, synthetic construct
  REGION 1..9: note = Heterogeneous nuclear ribonucleoproteins C1/C2 (142-150)
RVPPPPPIA

SEQ ID NO: 4093 - protein, 8 aa, synthetic construct
  REGION 1..8: note = Hydroxymethylglutaryl-CoA synthase, cytoplasmic (447-454)
SLFEGTWY

SEQ ID NO: 4094 - protein, 9 aa, synthetic construct
  REGION 1..9: note = Hydroxymethylglutaryl-CoA synthase, cytoplasmic (482-490)
SLFEGTWYL

SEQ ID NO: 4095 - protein, 7 aa, synthetic construct
  REGION 1..7: note = Sterol O-acyltransferase 1 (127-133)
SLLDELL

SEQ ID NO: 4096 - protein, 9 aa, synthetic construct
  REGION 1..9: note = Tuberin (526-534)
SLLDIIEKV

SEQ ID NO: 4097 - protein, 9 aa, synthetic construct
  REGION 1..9: note = Eukaryotic translation elongation factor 1 epsilon-1 (8-16)
SLLEKSLGL

SEQ ID NO: 4098 - protein, 9 aa, synthetic construct
  REGION 1..9: note = Neuroblast differentiation-associated protein AHNAK (2580-2588)
SMPDFDLHL

SEQ ID NO: 4099 - protein, 9 aa, synthetic construct
  REGION 1..9: note = Phosphoinositide 3-kinase regulatory subunit 4 (906-914)
SQVPEVTTV

SEQ ID NO: 4100 - protein, 12 aa, synthetic construct
  REGION 1..12: note = Annexin A2 (184-195)
SVIDYELIDQDA

SEQ ID NO: 4101 - protein, 11 aa, synthetic construct
  REGION 1..11: note = U2 small nuclear ribonucleoprotein A' (213-223)
TLAEVERLKGL

SEQ ID NO: 4102 - protein, 9 aa, synthetic construct
  REGION 1..9: note = Serine/threonine-protein kinase SIK1 (473-481)
TLAEVSTRL

SEQ ID NO: 4103 - protein, 9 aa, synthetic construct
  REGION 1..9: note = G2/mitotic-specific cyclin-B1 (321-329)
TLAKYLMEL

SEQ ID NO: 4104 - protein, 11 aa, synthetic construct
  REGION 1..11: note = Nucleolin (501-511)
TLQEVFEKATF

SEQ ID NO: 4105 - protein, 10 aa, synthetic construct
  REGION 1..10: note = L-lactate dehydrogenase B chain (323-332)
TLWDIQKDLK

SEQ ID NO: 4106 - protein, 9 aa, synthetic construct
  REGION 1..9: note = L-lactate dehydrogenase A chain (322-330)
TLWGIQKEL

SEQ ID NO: 4107 - protein, 9 aa, synthetic construct
  REGION 1..9: note = Aladin (17-25)
TLYEHNNEL

SEQ ID NO: 4108 - protein, 11 aa, synthetic construct
  REGION 1..11: note = Microtubule-associated protein 4 (335-345)
VLPTETEVAPA

SEQ ID NO: 4109 - protein, 9 aa, synthetic construct
  REGION 1..9: note = Peroxiredoxin-5, mitochondrial (184-192)
VVQDGIVKA

SEQ ID NO: 4110 - protein, 10 aa, synthetic construct
  REGION 1..10: note = HLA class I histocompatibility antigen, B-7 alpha chain (140-149)
YAYDGKDYIA

SEQ ID NO: 4111 - protein, 7 aa, synthetic construct
  REGION 1..7: note = Carbamoyl-phosphate synthase (ammonia), mitochondrial (389-395)
YLFDSFF

SEQ ID NO: 4112 - protein, 8 aa, synthetic construct
  REGION 1..8: note = Bax inhibitor 1 (140-147)
YLFLGGIL

SEQ ID NO: 4113 - protein, 10 aa, synthetic construct
  REGION 1..10: note = Coiled-coil domain-containing protein 12 (62-71)
YVPEDEDLKK

SEQ ID NO: 4114 - protein, 8 aa, synthetic construct
  REGION 1..8: note = Small nuclear ribonucleoprotein-associated proteins B and B' (18-25)
RIFIGTFK

SEQ ID NO: 4115 - protein, 18 aa, synthetic construct
  REGION 1..18: note = ATP synthase-coupling factor 6, mitochondrial (91-108)
PTFKFEDPKFEVIEKPQA

SEQ ID NO: 4116 - protein, 9 aa, synthetic construct
  REGION 1..9: note = Kinectin (794-802)
SLVEELKKV

SEQ ID NO: 4117 - protein, 9 aa, synthetic construct
  REGION 1..9: note = Kinectin (600-608)
VLAEELHKV

SEQ ID NO: 4118 - protein, 11 aa, synthetic construct
  REGION 1..11: note = HLA class I histocompatibility antigen, B-15 alpha chain (193-203)
RRYLENGKETL

SEQ ID NO: 4119 - protein, 9 aa, synthetic construct
  REGION 1..9: note = Keratin, type I cytoskeletal 18 (307-315)
ALLNIKVKL

SEQ ID NO: 4120 - protein, 10 aa, synthetic construct
  REGION 1..10: note = Heat shock protein HSP 90-beta (346-355)
AEDKENYKKF

SEQ ID NO: 4121 - protein, 9 aa, synthetic construct
  REGION 1..9: note = 40S ribosomal protein S5 (12-20)
AETPDIKLF

SEQ ID NO: 4122 - protein, 12 aa, synthetic construct
  REGION 1..12: note = Ribonucleoside-diphosphate reductase subunit M2 (165-176)
EEVDLSKDIQHW

SEQ ID NO: 4123 - protein, 10 aa, synthetic construct
  REGION 1..10: note = Nucleosome assembly protein 1-like 4 (86-95)
EEVHDLERKY

SEQ ID NO: 4124 - protein, 9 aa, synthetic construct
  REGION 1..9: note = U4/U6 small nuclear ribonucleoprotein Prp31 (105-113)
NELNIIHKF

SEQ ID NO: 4125 - protein, 12 aa, synthetic construct
  REGION 1..12: note = ELAV-like protein 3 (161-172)
FIRFDKRIEAEE

SEQ ID NO: 4126 - protein, 10 aa, synthetic construct
  REGION 1..10: note = ELAV-like protein 3 (29-38)
KTNLIVNYLP

SEQ ID NO: 4127 - protein, 9 aa, synthetic construct
  REGION 1..9: note = Minor histocompatibility protein HA-1 (137-145)
VLHDDLLEA

SEQ ID NO: 4128 - protein, 14 aa, synthetic construct
  REGION 1..14: note = Glyceraldehyde-3-phosphate dehydrogenase (26-39)
GKVDIVAINDPFID

SEQ ID NO: 4129 - protein, 14 aa, synthetic construct
  REGION 1..14: note = Low affinity immunoglobulin epsilon Fc receptor (10-23)
ISQELEELRAEQQR

SEQ ID NO: 4130 - protein, 9 aa, synthetic construct
  REGION 1..9: note = 26S proteasome non-ATPase regulatory subunit 2 (299-307)
GRHGVFLEL

SEQ ID NO: 4131 - protein, 9 aa, synthetic construct
  REGION 1..9: note = ATP-dependent RNA helicase DDX3X (234-242)
FLLPILSQI

SEQ ID NO: 4132 - protein, 9 aa, synthetic construct
  REGION 1..9: note = Putative homeodomain transcription factor 2 (652-660)
AQLLHVHEI

SEQ ID NO: 4133 - protein, 9 aa, synthetic construct
  REGION 1..9: note = Transcription factor BTF3 (47-55)
ETIMNQEKL

SEQ ID NO: 4134 - protein, 9 aa, synthetic construct
  REGION 1..9: note = Ribosome biogenesis protein BRX1 homolog (141-149)
FLVQNIHTL

SEQ ID NO: 4135 - protein, 9 aa, synthetic construct
  REGION 1..9: note = Microtubule-actin cross-linking factor 1, isoforms 1/2/3/5 (2558-2566)
QAIKNGQAL

SEQ ID NO: 4136 - protein, 13 aa, synthetic construct
  REGION 1..13: note = HLA class I histocompatibility antigen, B-8 alpha chain (111-123)
QSEAGSHTLQSMY

SEQ ID NO: 4137 - protein, 9 aa, synthetic construct
  REGION 1..9: note = Dynamin-2 (390-398)
YAIKNIHGV

SEQ ID NO: 4138 - protein, 9 aa, synthetic construct
  REGION 1..9: note = ELAV-like protein 4 (96-104)
DPKDAEKAI

SEQ ID NO: 4139 - protein, 9 aa, synthetic construct
  REGION 1..9: note = ELAV-like protein 4 (318-326)
GPFGAVNNV

SEQ ID NO: 4140 - protein, 9 aa, synthetic construct
  REGION 1..9: note = ELAV-like protein 4 (197-205)
KPSGATEPI

SEQ ID NO: 4141 - protein, 9 aa, synthetic construct
  REGION 1..9: note = ELAV-like protein 4 (265-273)
PPSACSPRF

SEQ ID NO: 4142 - protein, 9 aa, synthetic construct
  REGION 1..9: note = ELAV-like protein 4 (270-278)
SPRFSPITI

SEQ ID NO: 4143 - protein, 12 aa, synthetic construct
  REGION 1..12: note = ATP-dependent RNA helicase DDX3Y (176-187)
HIENFSDIDMGE

SEQ ID NO: 4144 - protein, 9 aa, synthetic construct
  REGION 1..9: note = Histone demethylase UTY (719-727)
LLIADNPQL

SEQ ID NO: 4145 - protein, 9 aa, synthetic construct
  REGION 1..9: note = Pumilio homolog 3 (149-157)
RTLDKVLEV

SEQ ID NO: 4146 - protein, 9 aa, synthetic construct
  REGION 1..9: note = Histone H4 (83-91)
TAMDVVYAL

SEQ ID NO: 4147 - protein, 9 aa, synthetic construct
  REGION 1..9: note = Histone H3.2 (119-127)
TIMPKDIQL

SEQ ID NO: 4148 - protein, 13 aa, synthetic construct
  REGION 1..13: note = Protein S100-A9 (67-79)
DTNADKQLSFEEF

SEQ ID NO: 4149 - protein, 16 aa, synthetic construct
  REGION 1..16: note = Annexin A2 (209-224)
DVPKWISIMTERSVPH

SEQ ID NO: 4150 - protein, 13 aa, synthetic construct
  REGION 1..13: note = Glyceraldehyde-3-phosphate dehydrogenase (269-281)
ISWYDNEFGYSNR

SEQ ID NO: 4151 - protein, 18 aa, synthetic construct
  REGION 1..18: note = Macrophage migration inhibitory factor (3-20)
IVNTNVPRASVPDGFLSE

SEQ ID NO: 4152 - protein, 9 aa, synthetic construct
  REGION 1..9: note = Hemoglobin subunit alpha (41-49)
LRVDPVNFK

SEQ ID NO: 4153 - protein, 18 aa, synthetic construct
  REGION 1..18: note = 40S ribosomal protein S17 (118-135)
QVTQPTVGMNFKTPRGPV

SEQ ID NO: 4154 - protein, 16 aa, synthetic construct
  REGION 1..16: note = Collagen alpha-1(I) chain (857-872)
RLPIIDVAPLDVGAPD

SEQ ID NO: 4155 - protein, 16 aa, synthetic construct
  REGION 1..16: note = Collagen alpha-2(I) chain (949-964)
RPKDYEVDATLKSLNN

SEQ ID NO: 4156 - protein, 11 aa, synthetic construct
  REGION 1..11: note = T-complex protein 1 subunit theta (369-379)
AEAFEAIPRAL

SEQ ID NO: 4157 - protein, 9 aa, synthetic construct
  REGION 1..9: note = Cullin-1 (484-492)
AEASMISKL

SEQ ID NO: 4158 - protein, 9 aa, synthetic construct
  REGION 1..9: note = DNA replication licensing factor MCM7 (328-336)
AEEDFYEKL

SEQ ID NO: 4159 - protein, 10 aa, synthetic construct
  REGION 1..10: note = BolA-like protein 2 (61-70)
AEELPHIHAF

SEQ ID NO: 4160 - protein, 9 aa, synthetic construct
  REGION 1..9: note = DNA topoisomerase 2-beta (526-534)
AEINNIIKI

SEQ ID NO: 4161 - protein, 10 aa, synthetic construct
  REGION 1..10: note = Cofilin-1 (150-159)
AEKLGGSAVI

SEQ ID NO: 4162 - protein, 9 aa, synthetic construct
  REGION 1..9: note = Proteasome subunit alpha type-4 (137-145)
AEKVEIATL

SEQ ID NO: 4163 - protein, 9 aa, synthetic construct
  REGION 1..9: note = Bifunctional glutamate/proline-tRNA ligase (1393-1401)
AENEAETKL

SEQ ID NO: 4164 - protein, 10 aa, synthetic construct
  REGION 1..10: note = Sodium/potassium-transporting ATPase subunit alpha-1 (677-686)
AENGFLPIHL

SEQ ID NO: 4165 - protein, 10 aa, synthetic construct
  REGION 1..10: note = Eukaryotic translation initiation factor 4 gamma 1 (1531-1540)
AEQQGKGVAL

SEQ ID NO: 4166 - protein, 12 aa, synthetic construct
  REGION 1..12: note = T-complex protein 1 subunit eta (76-87)
AEVGDGTTSVTL

SEQ ID NO: 4167 - protein, 9 aa, synthetic construct
  REGION 1..9: note = MICOS complex subunit MIC60 (166-174)
GEGKPTPAL

SEQ ID NO: 4168 - protein, 11 aa, synthetic construct
  REGION 1..11: note = Peptidyl-prolyl cis-trans isomerase A (80-90)
GEKFEDENFIL

SEQ ID NO: 4169 - protein, 9 aa, synthetic construct
  REGION 1..9: note = NADH dehydrogenase (ubiquinone) 1 beta subcomplex subunit 7 (127-135)
GEVDPKVAL

SEQ ID NO: 4170 - protein, 10 aa, synthetic construct
  REGION 1..10: note = G2/mitotic-specific cyclin-B1 (62-71)
GEVDVEQHTL

SEQ ID NO: 4171 - protein, 14 aa, synthetic construct
  REGION 1..14: note = Zinc finger MYM-type protein 2 (207-220)
GEYLPSKGAGNNVL

SEQ ID NO: 4172 - protein, 10 aa, synthetic construct
  REGION 1..10: note = Transforming protein RhoA (46-55)
IEVDGKQVEL

SEQ ID NO: 4173 - protein, 11 aa, synthetic construct
  REGION 1..11: note = 40S ribosomal protein S17 (96-106)
IEVDPDTKEML

SEQ ID NO: 4174 - protein, 10 aa, synthetic construct
  REGION 1..10: note = Putative endoplasmin-like protein (341-350)
KEDEDDKTVL

SEQ ID NO: 4175 - protein, 10 aa, synthetic construct
  REGION 1..10: note = Plasminogen activator inhibitor 1 RNA-binding protein (182-191)
KEEGPKEMTL

SEQ ID NO: 4176 - protein, 9 aa, synthetic construct
  REGION 1..9: note = Uncharacterized protein C20orf24 (7-15)
KEEPPQPQL

SEQ ID NO: 4177 - protein, 10 aa, synthetic construct
  REGION 1..10: note = Importin subunit beta-1 (183-192)
KEEPSNNVKL

SEQ ID NO: 4178 - protein, 11 aa, synthetic construct
  REGION 1..11: note = Heat shock protein HSP 90-beta (452-462)
KEFDGKSLVSV

SEQ ID NO: 4179 - protein, 9 aa, synthetic construct
  REGION 1..9: note = Melanoma-associated antigen D2 (337-345)
KEIDKNDHL

SEQ ID NO: 4180 - protein, 10 aa, synthetic construct
  REGION 1..10: note = Protein Spindly (380-389)
KEIESTKGEL

SEQ ID NO: 4181 - protein, 10 aa, synthetic construct
  REGION 1..10: note = Coatomer subunit epsilon (241-250)
KENDFDRLVL

SEQ ID NO: 4182 - protein, 9 aa, synthetic construct
  REGION 1..9: note = Targeting protein for Xklp2 (238-246)
KEVNFTSEL

SEQ ID NO: 4183 - protein, 9 aa, synthetic construct
  REGION 1..9: note = H/ACA ribonucleoprotein complex subunit 4 (151-159)
KEYVGIVRL

SEQ ID NO: 4184 - protein, 10 aa, synthetic construct
  REGION 1..10: note = H/ACA ribonucleoprotein complex subunit 3 (8-17)
NEQGDRVYTL

SEQ ID NO: 4185 - protein, 10 aa, synthetic construct
  REGION 1..10: note = Cerebellar degeneration-related protein 2 (148-157)
RELEETNQKL

SEQ ID NO: 4186 - protein, 9 aa, synthetic construct
  REGION 1..9: note = Exocyst complex component 2 (640-648)
RLFENYIEL

SEQ ID NO: 4187 - protein, 9 aa, synthetic construct
  REGION 1..9: note = 1-phosphatidylinositol 3-phosphate 5-kinase (1841-1849)
SEEDFIRSL

SEQ ID NO: 4188 - protein, 10 aa, synthetic construct
  REGION 1..10: note = Hydroxymethylglutaryl-CoA synthase, cytoplasmic (246-255)
SEYPIVDGKL

SEQ ID NO: 4189 - protein, 11 aa, synthetic construct
  REGION 1..11: note = Proteasome activator complex subunit 3 (220-230)
TEIDEKEYISL

SEQ ID NO: 4190 - protein, 15 aa, synthetic construct
  REGION 1..15: note = HLA class I histocompatibility antigen, B-15 alpha chain (240-254)
TWQRDGEDQTQDTEL

SEQ ID NO: 4191 - protein, 10 aa, synthetic construct
  REGION 1..10: note = Nuclear pore complex protein Nup205 (350-359)
VEDDRTLQSL

SEQ ID NO: 4192 - protein, 10 aa, synthetic construct
  REGION 1..10: note = Septin-2 (86-95)
VEIEERGVKL

SEQ ID NO: 4193 - protein, 9 aa, synthetic construct
  REGION 1..9: note = Hemoglobin subunit alpha (25-33)
YGAEALERM

SEQ ID NO: 4194 - protein, 14 aa, synthetic construct
  REGION 1..14: note = HLA class I histocompatibility antigen, A-1 alpha chain (29-42)
DTQFVRFDSDAASQ

SEQ ID NO: 4195 - protein, 9 aa, synthetic construct
  REGION 1..9: note = Neutral amino acid transporter B(0) (533-541)
VASEKESVM

SEQ ID NO: 4196 - protein, 9 aa, synthetic construct
  REGION 1..9: note = Lysosomal protective protein (20-28)
IRAAPPPLF

SEQ ID NO: 4197 - protein, 9 aa, synthetic construct
  REGION 1..9: note = Serine/threonine-protein kinase 38-like (444-452)
KRFEGLTQR

SEQ ID NO: 4198 - protein, 16 aa, synthetic construct
  REGION 1..16: note = Alpha-1B-glycoprotein (173-188)
APVELILSDETLPAPE

SEQ ID NO: 4199 - protein, 13 aa, synthetic construct
  REGION 1..13: note = Neuropilin-2 (696-708)
EGQYARLISPPVH

SEQ ID NO: 4200 - protein, 15 aa, synthetic construct
  REGION 1..15: note = Calreticulin (106-120)
GGGYVKLFPNSLDQT

SEQ ID NO: 4201 - protein, 19 aa, synthetic construct
  REGION 1..19: note = Annexin A2 (50-68)
GVDEVTIVNILTNRSNAQR

SEQ ID NO: 4202 - protein, 15 aa, synthetic construct
  REGION 1..15: note = Filamin-A (2114-2128)
NPAEFVVNTSNAGAG

SEQ ID NO: 4203 - protein, 17 aa, synthetic construct
  REGION 1..17: note = Syntenin-1 (25-41)
NPANPAILSEASAPIPH

SEQ ID NO: 4204 - protein, 14 aa, synthetic construct
  REGION 1..14: note = Transferrin receptor protein 1 (680-693)
RVEYHFLSPYVSPK

SEQ ID NO: 4205 - protein, 13 aa, synthetic construct
  REGION 1..13: note = Cathepsin D (230-242)
SFYLSRDPDAQPG

SEQ ID NO: 4206 - protein, 21 aa, synthetic construct
  REGION 1..21: note = HLA class I histocompatibility antigen, B-51 alpha chain (27-47)
VDDTQFVRFDSDAASPRTEPR

SEQ ID NO: 4207 - protein, 17 aa, synthetic construct
  REGION 1..17: note = Profilin-1 (35-51)
VPGKTFVNITPAEVGVL

SEQ ID NO: 4208 - protein, 9 aa, synthetic construct
  REGION 1..9: note = Lymphocyte-specific protein 1 (197-205)
KLIDRTESL

SEQ ID NO: 4209 - protein, 9 aa, synthetic construct
  REGION 1..9: note = Synemin (426-434)
RTFSPTYGL

SEQ ID NO: 4210 - protein, 9 aa, synthetic construct
  REGION 1..9: note = Insulin receptor substrate 2 (1097-1105)
RVASPTSGV

SEQ ID NO: 4211 - protein, 9 aa, synthetic construct
  REGION 1..9: note = ETS translocation variant 5 (45-53)
ELFQDLSQL

SEQ ID NO: 4212 - protein, 9 aa, synthetic construct
  REGION 1..9: note = E3 ubiquitin-protein ligase Mdm2 (53-61)
VLFYLGQYI

SEQ ID NO: 4213 - protein, 9 aa, synthetic construct
  REGION 1..9: note = U1 small nuclear ribonucleoprotein 70 kDa (423-431)
YLAPENGYL

SEQ ID NO: 4214 - protein, 9 aa, synthetic construct
  REGION 1..9: note = Coatomer subunit gamma-1 (147-155)
AIVDKVPSV

SEQ ID NO: 4215 - protein, 9 aa, synthetic construct
  REGION 1..9: note = T-complex protein 1 subunit gamma (129-137)
ALDDMISTL

SEQ ID NO: 4216 - protein, 9 aa, synthetic construct
  REGION 1..9: note = DCN1-like protein 1 (94-102)
ALDPASISV

SEQ ID NO: 4217 - protein, 9 aa, synthetic construct
  REGION 1..9: note = U3 small nucleolar ribonucleoprotein protein IMP3 (78-86)
ALLDKLYAL

SEQ ID NO: 4218 - protein, 9 aa, synthetic construct
  REGION 1..9: note = Nuclear pore complex protein Nup205 (318-326)
ALLDRIVSV

SEQ ID NO: 4219 - protein, 9 aa, synthetic construct
  REGION 1..9: note = Phosphoglycerate kinase 1 (354-362)
ALMDEVVKA

SEQ ID NO: 4220 - protein, 9 aa, synthetic construct
  REGION 1..9: note = Diphthamide biosynthesis protein 1 (138-146)
AQDFRVLYV

SEQ ID NO: 4221 - protein, 9 aa, synthetic construct
  REGION 1..9: note = Methionine aminopeptidase 2 (433-441)
AQFEHTILL

SEQ ID NO: 4222 - protein, 9 aa, synthetic construct
  REGION 1..9: note = GTP-binding nuclear protein Ran (215-223)
AQYEHDLEV

SEQ ID NO: 4223 - protein, 11 aa, synthetic construct
  REGION 1..11: note = 60S acidic ribosomal protein P0 (108-118)
FLADPSAFVAA

SEQ ID NO: 4224 - protein, 11 aa, synthetic construct
  REGION 1..11: note = 60S ribosomal protein L10a (110-120)
FLASESLIKQI

SEQ ID NO: 4225 - protein, 9 aa, synthetic construct
  REGION 1..9: note = Dipeptidyl peptidase 9 (806-814)
FLDENVHFF

SEQ ID NO: 4226 - protein, 9 aa, synthetic construct
  REGION 1..9: note = ATP-binding cassette sub-family F member 2 (539-547)
FLDEPTNHL

SEQ ID NO: 4227 - protein, 9 aa, synthetic construct
  REGION 1..9: note = Chloride intracellular channel protein 4 (178-186)
FLDGNEMTL

SEQ ID NO: 4228 - protein, 9 aa, synthetic construct
  REGION 1..9: note = 3-hydroxy-3-methylglutaryl-coenzyme A reductase (113-121)
FLDKELTGL

SEQ ID NO: 4229 - protein, 9 aa, synthetic construct
  REGION 1..9: note = Acyl-protein thioesterase 2 (218-226)
FLEKLLPPV

SEQ ID NO: 4230 - protein, 9 aa, synthetic construct
  REGION 1..9: note = Macrophage migration inhibitory factor (17-25)
FLSELTQQL

SEQ ID NO: 4231 - protein, 9 aa, synthetic construct
  REGION 1..9: note = 26S proteasome non-ATPase regulatory subunit 14 (61-69)
FVDDYTVRV

SEQ ID NO: 4232 - protein, 10 aa, synthetic construct
  REGION 1..10: note = Golgi-specific brefeldin A-resistance guanine nucleotide exchange factor 1 (1053-1062)
FVDPNGKISL

SEQ ID NO: 4233 - protein, 9 aa, synthetic construct
  REGION 1..9: note = E3 ubiquitin-protein ligase BRE1A (401-409)
HLDEARTLL

SEQ ID NO: 4234 - protein, 9 aa, synthetic construct
  REGION 1..9: note = Abl interactor 2 (89-97)
ILDDIGHGV

SEQ ID NO: 4235 - protein, 9 aa, synthetic construct
  REGION 1..9: note = Nuclear pore complex protein Nup88 (183-191)
ILDPHVVLL

SEQ ID NO: 4236 - protein, 9 aa, synthetic construct
  REGION 1..9: note = Thioredoxin-like protein 4A (40-48)
KMDEVLYSI

SEQ ID NO: 4237 - protein, 9 aa, synthetic construct
  REGION 1..9: note = Protein BTG2 (73-81)
KMDPIISRV

SEQ ID NO: 4238 - protein, 9 aa, synthetic construct
  REGION 1..9: note = Elongation factor 2 (159-167)
KMDRALLEL

SEQ ID NO: 4239 - protein, 8 aa, synthetic construct
  REGION 1..8: note = Transmembrane emp24 domain-containing protein 2 (42-49)
KMGLIFEV

SEQ ID NO: 4240 - protein, 8 aa, synthetic construct
  REGION 1..8: note = 60S ribosomal protein L19 (119-126)
LMEHIHKL

SEQ ID NO: 4241 - protein, 9 aa, synthetic construct
  REGION 1..9: note = Glycogen phosphorylase, muscle form (271-279)
NLAENISRV

SEQ ID NO: 4242 - protein, 9 aa, synthetic construct
  REGION 1..9: note = Junction plakoglobin (5-13)
NLMEQPIKV

SEQ ID NO: 4243 - protein, 10 aa, synthetic construct
  REGION 1..10: note Dolichyl-diphosphooligosaccharide-proteinosyltransferase subunit 2 (51-60)
RLDELGGVYL

SEQ ID NO: 4244 - protein, 9 aa, synthetic construct
  REGION 1..9: note = Putative eukaryotic translation initiation factor 2 subunit 3-like protein (17-25)
RQDLTTLDV

SEQ ID NO: 4245 - protein, 9 aa, synthetic construct
  REGION 1..9: note = Serine/threonine-protein kinase/endoribonuclease IRE1 (37-45)
TLDGSLHAV

SEQ ID NO: 4246 - protein, 11 aa, synthetic construct
  REGION 1..11: note = Interferon-induced GTP-binding protein Mx1 (175-185)
TLIDLPGITRV

SEQ ID NO: 4247 - protein, 9 aa, synthetic construct
  REGION 1..9: note = Mitotic spindle-associated MMXD complex subunit MIP18 (97-105)
TLIGLSIKV

SEQ ID NO: 4248 - protein, 9 aa, synthetic construct
  REGION 1..9: note = Sulfiredoxin-1 (114-122)
TLSDLRVYL

SEQ ID NO: 4249 - protein, 10 aa, synthetic construct
  REGION 1..10: note = Nucleolar GTP-binding protein 1 (322-331)
TLTEEGVIKV

SEQ ID NO: 4250 - protein, 9 aa, synthetic construct
  REGION 1..9: note = 10 kDa heat shock protein, mitochondrial (81-89)
VLDDKDYFL

SEQ ID NO: 4251 - protein, 9 aa, synthetic construct
  REGION 1..9: note = Anoctamin-6 (137-145)
VLDDKLVFV

SEQ ID NO: 4252 - protein, 9 aa, synthetic construct
  REGION 1..9: note = Nucleolar pre-ribosomal-associated protein 1 (1314-1322)
VLDQKILLL

SEQ ID NO: 4253 - protein, 11 aa, synthetic construct
  REGION 1..11: note = RNA-binding protein 34 (333-343)
VLFENTDSVHL

SEQ ID NO: 4254 - protein, 9 aa, synthetic construct
  REGION 1..9: note = Eukaryotic translation initiation factor 4 gamma 1 (680-688)
VLMTEDIKL

SEQ ID NO: 4255 - protein, 11 aa, synthetic construct
  REGION 1..11: note = Phosphoglycerate kinase 1 (407-417)
VLPGVDALSNI

SEQ ID NO: 4256 - protein, 10 aa, synthetic construct
  REGION 1..10: note = S-adenosylmethionine synthase isoform type-2 (235-244)
YLDEDTIYHL

SEQ ID NO: 4257 - protein, 9 aa, synthetic construct
  REGION 1..9: note = Transmembrane protein 209 (409-417)
YLFERIKEL

SEQ ID NO: 4258 - protein, 10 aa, synthetic construct
  REGION 1..10: note = HLA class I histocompatibility antigen, B-13 alpha chain (26-35)
YVDDTQFVRF

SEQ ID NO: 4259 - protein, 12 aa, synthetic construct
  REGION 1..12: note = Melanoma antigen recognized by T-cells 1 (100-111)
APPAYEKLSAEQ

SEQ ID NO: 4260 - protein, 15 aa, synthetic construct
  REGION 1..15: note = Melanoma antigen recognized by T-cells 1 (100-114)
APPAYEKLSAEQSPP

SEQ ID NO: 4261 - protein, 16 aa, synthetic construct
  REGION 1..16: note = Melanoma antigen recognized by T-cells 1 (100-115)
APPAYEKLSAEQSPPP

SEQ ID NO: 4262 - protein, 17 aa, synthetic construct
  REGION 1..17: note = Melanoma antigen recognized by T-cells 1 (100-116)
APPAYEKLSAEQSPPPY

SEQ ID NO: 4263 - protein, 12 aa, synthetic construct
  REGION 1..12: note = Melanoma antigen recognized by T-cells 1 (99-110)
NAPPAYEKLSAE

SEQ ID NO: 4264 - protein, 20 aa, synthetic construct
  REGION 1..20: note = Melanoma antigen recognized by T-cells 1 (97-116)
VPNAPPAYEKLSAEQSPPPY

SEQ ID NO: 4265 - protein, 16 aa, synthetic construct
  REGION 1..16: note = Gamma-secretase C-terminal fragment 59 (581-596)
FAEDVGSNKGAIIGLM

SEQ ID NO: 4266 - protein, 9 aa, synthetic construct
  REGION 1..9: note = Ubiquitin carboxyl-terminal hydrolase 11 (583-591)
FTWEGLYNV

SEQ ID NO: 4267 - protein, 10 aa, synthetic construct
  REGION 1..10: note = Ataxin-10 (324-333)
QVFPGLLERV

SEQ ID NO: 4268 - protein, 9 aa, synthetic construct
  REGION 1..9: note = Vacuolar protein sorting-associated protein 13B (29-37)
SLWGGDVVL

SEQ ID NO: 4269 - protein, 10 aa, synthetic construct
  REGION 1..10: note = Farnesyl pyrophosphate synthase (238-247)
YLDLFGDPSV

SEQ ID NO: 4270 - protein, 9 aa, synthetic construct
  REGION 1..9: note = Suppressor of SWI4 1 homolog (26-34)
AANPHSFVF

SEQ ID NO: 4271 - protein, 11 aa, synthetic construct
  REGION 1..11: note = Golgin subfamily A member 7 (65-75)
AEAEKLGGQSY

SEQ ID NO: 4272 - protein, 9 aa, synthetic construct
  REGION 1..9: note = DNA replication licensing factor MCM4 (741-749)
AEAHAKVRL

SEQ ID NO: 4273 - protein, 9 aa, synthetic construct
  REGION 1..9: note = Stomatin-like protein 2, mitochondrial (255-263)
AEAIRILAA

SEQ ID NO: 4274 - protein, 9 aa, synthetic construct
  REGION 1..9: note = Nuclear pore complex protein Nup107 (415-423)
AEDELFNRY

SEQ ID NO: 4275 - protein, 11 aa, synthetic construct
  REGION 1..11: note = N-alpha-acetyltransferase 10 (45-55)
AEDENGKIVGY

SEQ ID NO: 4276 - protein, 11 aa, synthetic construct
  REGION 1..11: note = Cytochrome c oxidase subunit 6B1 (2-12)
AEDMETKIKNY

SEQ ID NO: 4277 - protein, 9 aa, synthetic construct
  REGION 1..9: note = General transcription factor II-I repeat domain-containing protein 2B (397-405)
AEFIKFTVI

SEQ ID NO: 4278 - protein, 9 aa, synthetic construct
  REGION 1..9: note = Heterogeneous nuclear ribonucleoprotein A0 (110-118)
AEGDLIEHF

SEQ ID NO: 4279 - protein, 11 aa, synthetic construct
  REGION 1..11: note = 60S ribosomal protein L8 (33-43)
AEGIHTGQFVY

SEQ ID NO: 4280 - protein, 9 aa, synthetic construct
  REGION 1..9: note = Condensin complex subunit 3 (712-720)
AEGLAKLMF

SEQ ID NO: 4281 - protein, 9 aa, synthetic construct
  REGION 1..9: note = T-complex protein 1 subunit gamma (109-117)
AEHFLEQQM

SEQ ID NO: 4282 - protein, 10 aa, synthetic construct
  REGION 1..10: note = Spectrin beta chain, non-erythrocytic 1 (1958-1967)
AEIDARNDSF

SEQ ID NO: 4283 - protein, 9 aa, synthetic construct
  REGION 1..9: note = Regulation of nuclear pre-mRNA domain-containing protein 1A (232-240)
AEIDDRKQL

SEQ ID NO: 4284 - protein, 10 aa, synthetic construct
  REGION 1..10: note = 40S ribosomal protein SA (218-227)
AEKAVTKEEF

SEQ ID NO: 4285 - protein, 9 aa, synthetic construct
  REGION 1..9: note = Helicase SRCAP (394-402)
AESLQPKGY

SEQ ID NO: 4286 - protein, 9 aa, synthetic construct
  REGION 1..9: note = Spartin (569-577)
AETVQTVRY

SEQ ID NO: 4287 - protein, 9 aa, synthetic construct
  REGION 1..9: note = Uncharacterized protein ZMYM6NB (44-52)
AEVFPLKVF

SEQ ID NO: 4288 - protein, 10 aa, synthetic construct
  REGION 1..10: note = CLIP-associating protein 1 (357-366)
AEYDNFFQHL

SEQ ID NO: 4289 - protein, 9 aa, synthetic construct
  REGION 1..9: note = Alpha-actinin-4 (306-314)
AIDQLHLEY

SEQ ID NO: 4290 - protein, 9 aa, synthetic construct
  REGION 1..9: note = Nucleolar protein 58 (12-20)
AIFKVLNEK

SEQ ID NO: 4291 - protein, 10 aa, synthetic construct
  REGION 1..10: note = Serine/threonine-protein kinase Kist (151-160)
AIIDHIFASK

SEQ ID NO: 4292 - protein, 10 aa, synthetic construct
  REGION 1..10: note = Transcription factor Sp2 (106-115)
AIQNPTMINK

SEQ ID NO: 4293 - protein, 9 aa, synthetic construct
  REGION 1..9: note = Apolipoprotein L1 (142-150)
ALADGVQKV

SEQ ID NO: 4294 - protein, 9 aa, synthetic construct
  REGION 1..9: note = Tankyrase-2 (1234-1242)
ALAEYVIYR

SEQ ID NO: 4295 - protein, 9 aa, synthetic construct
  REGION 1..9: note = Uncharacterized protein C19orf43 (126-134)
ALKTGIVAK

SEQ ID NO: 4296 - protein, 10 aa, synthetic construct
  REGION 1..10: note = Heat shock protein HSP 90-alpha (740-749)
ALRDNSTMGY

SEQ ID NO: 4297 - protein, 9 aa, synthetic construct
  REGION 1..9: note = X-ray repair cross-complementing protein 5 (376-384)
ALSSLIHAL

SEQ ID NO: 4298 - protein, 10 aa, synthetic construct
  REGION 1..10: note = Nucleolar protein 7 (190-199)
AQAFIHNSLY

SEQ ID NO: 4299 - protein, 9 aa, synthetic construct
  REGION 1..9: note = U5 small nuclear ribonucleoprotein 200 kDa helicase (1246-1254)
AQDEHLITF

SEQ ID NO: 4300 - protein, 9 aa, synthetic construct
  REGION 1..9: note = 15 kDa selenoprotein (78-86)
AQFETKKLY

SEQ ID NO: 4301 - protein, 10 aa, synthetic construct
  REGION 1..10: note = Prelamin-A/C (169-178)
AQHEDQVEQY

SEQ ID NO: 4302 - protein, 9 aa, synthetic construct
  REGION 1..9: note = Ribosomal RNA processing protein 1 homolog B (90-98)
AQHLFIQTF

SEQ ID NO: 4303 - protein, 9 aa, synthetic construct
  REGION 1..9: note = 116 kDa U5 small nuclear ribonucleoprotein component (574-582)
AQIFRPLKF

SEQ ID NO: 4304 - protein, 9 aa, synthetic construct
  REGION 1..9: note = Paraneoplastic antigen Ma1 (246-254)
AQIKFLNTY

SEQ ID NO: 4305 - protein, 10 aa, synthetic construct
  REGION 1..10: note = Retinoic acid-induced protein 1 (1522-1531)
AQKQPGHTNY

SEQ ID NO: 4306 - protein, 9 aa, synthetic construct
  REGION 1..9: note = ADP-ribosylation factor GTPase-activating protein 2 (233-241)
AQKVSSQSF

SEQ ID NO: 4307 - protein, 9 aa, synthetic construct
  REGION 1..9: note = Nucleolar protein 56 (144-152)
AQLGLGHSY

SEQ ID NO: 4308 - protein, 9 aa, synthetic construct
  REGION 1..9: note = Catenin beta-1 (481-489)
AQNAVRLHY

SEQ ID NO: 4309 - protein, 11 aa, synthetic construct
  REGION 1..11: note = nuclear pore complex protein Nup98 isoform 2 proprotein (110-120)
AQNKPTGFGNF

SEQ ID NO: 4310 - protein, 11 aa, synthetic construct
  REGION 1..11: note = RNA-binding protein 14 (530-540)
AQQHPQAAASY

SEQ ID NO: 4311 - protein, 9 aa, synthetic construct
  REGION 1..9: note = Eukaryotic initiation factor 4A-I (113-121)
AQQIQKVVM

SEQ ID NO: 4312 - protein, 9 aa, synthetic construct
  REGION 1..9: note = Septin-7 (21-29)
AQQKNLEGY

SEQ ID NO: 4313 - protein, 9 aa, synthetic construct
  REGION 1..9: note = Protein polybromo-1 (234-242)
AQRIQNGSY

SEQ ID NO: 4314 - protein, 10 aa, synthetic construct
  REGION 1..10: note = Annexin A2 (66-75)
AQRQDIAFAY

SEQ ID NO: 4315 - protein, 10 aa, synthetic construct
  REGION 1..10: note = Annexin A4 (49-58)
AQRQEIRTAY

SEQ ID NO: 4316 - protein, 10 aa, synthetic construct
  REGION 1..10: note = Centromere protein F (348-357)
AQYDQASTKY

SEQ ID NO: 4317 - protein, 11 aa, synthetic construct
  REGION 1..11: note = 60S ribosomal protein L22-like 1 (118-128)
ASDKETYELRY

SEQ ID NO: 4318 - protein, 10 aa, synthetic construct
  REGION 1..10: note = Histone H2B type 1-A (76-85)
ASEASRLAHY

SEQ ID NO: 4319 - protein, 10 aa, synthetic construct
  REGION 1..10: note = ADP-dependent glucokinase (24-33)
ASEFPGAQHY

SEQ ID NO: 4320 - protein, 9 aa, synthetic construct
  REGION 1..9: note = Heterogeneous nuclear ribonucleoprotein U (205-213)
ASYGVSKGK

SEQ ID NO: 4321 - protein, 10 aa, synthetic construct
  REGION 1..10: note = High affinity cAMP-specific 3',5'-cyclic phosphodiesterase 7A (294-303)
ATDISRQNEY

SEQ ID NO: 4322 - protein, 9 aa, synthetic construct
  REGION 1..9: note = E3 ubiquitin-protein ligase UBR2 (31-39)
ATDLTREVY

SEQ ID NO: 4323 - protein, 9 aa, synthetic construct
  REGION 1..9: note = m7GpppX diphosphatase (135-143)
ATEKHLQKY

SEQ ID NO: 4324 - protein, 11 aa, synthetic construct
  REGION 1..11: note = Microtubule-actin cross-linking factor 1, isoforms 1/2/3/5 (326-336)
ATEVDSRWQEY

SEQ ID NO: 4325 - protein, 9 aa, synthetic construct
  REGION 1..9: note = YTH domain-containing protein 1 (92-100)
ATEYKNEEY

SEQ ID NO: 4326 - protein, 9 aa, synthetic construct
  REGION 1..9: note = Eukaryotic translation initiation factor 5A-1 (146-154)
AVAIKAMAK

SEQ ID NO: 4327 - protein, 10 aa, synthetic construct
  REGION 1..10: note = Activating transcription factor 7-interacting protein 1 (621-630)
AVFDKTLAEL

SEQ ID NO: 4328 - protein, 9 aa, synthetic construct
  REGION 1..9: note = Transmembrane protein 258 (16-24)
AVFPHLTVV

SEQ ID NO: 4329 - protein, 11 aa, synthetic construct
  REGION 1..11: note = U3 small nucleolar RNA-associated protein 6 homolog (467-477)
AVIGADSVTLK

SEQ ID NO: 4330 - protein, 9 aa, synthetic construct
  REGION 1..9: note = Nucleolar RNA helicase 2 (357-365)
AVIGDVIRV

SEQ ID NO: 4331 - protein, 10 aa, synthetic construct
  REGION 1..10: note = Nucleosome assembly protein 1-like 1 (107-116)
AVLYQPLFDK

SEQ ID NO: 4332 - protein, 10 aa, synthetic construct
  REGION 1..10: note = MICOS complex subunit MIC60 (247-256)
AVNAHSNILK

SEQ ID NO: 4333 - protein, 9 aa, synthetic construct
  REGION 1..9: note = Elongation of very long chain fatty acids protein 5 (276-284)
AVNGHTNSF

SEQ ID NO: 4334 - protein, 9 aa, synthetic construct
  REGION 1..9: note = DNA-directed RNA polymerase II subunit RPB7 (87-95)
AVVTQVNKV

SEQ ID NO: 4335 - protein, 9 aa, synthetic construct
  REGION 1..9: note = RRP12-like protein (704-712)
DEAAISKLY

SEQ ID NO: 4336 - protein, 11 aa, synthetic construct
  REGION 1..11: note = 26S protease regulatory subunit 6B (265-275)
DEIDAIATKRF

SEQ ID NO: 4337 - protein, 11 aa, synthetic construct
  REGION 1..11: note = 26S protease regulatory subunit 7 (275-285)
DEIDAIGGARF

SEQ ID NO: 4338 - protein, 11 aa, synthetic construct
  REGION 1..11: note = 26S protease regulatory subunit 4 (285-295)
DEIDAIGTKRY

SEQ ID NO: 4339 - protein, 9 aa, synthetic construct
  REGION 1..9: note = Nucleolar protein 11 (17-25)
DENSVIKSF

SEQ ID NO: 4340 - protein, 9 aa, synthetic construct
  REGION 1..9: note = Prothymosin alpha (16-24)
DLKEKKEVV

SEQ ID NO: 4341 - protein, 10 aa, synthetic construct
  REGION 1..10: note = Vezatin (553-562)
DSDFRKDDFY

SEQ ID NO: 4342 - protein, 9 aa, synthetic construct
  REGION 1..9: note = Protein AF-10 (379-387)
DSDLRNDSY

SEQ ID NO: 4343 - protein, 9 aa, synthetic construct
  REGION 1..9: note = Negative elongation factor C/D (348-356)
DTDISLIRY

SEQ ID NO: 4344 - protein, 9 aa, synthetic construct
  REGION 1..9: note = Transcription factor E2F1 (237-245)
DTDSQRLAY

SEQ ID NO: 4345 - protein, 9 aa, synthetic construct
  REGION 1..9: note = RNA-binding protein 6 (398-406)
DTDYRSMEY

SEQ ID NO: 4346 - protein, 10 aa, synthetic construct
  REGION 1..10: note = Eukaryotic translation initiation factor 4 gamma 3 (1509-1518)
DTEKELQALY

SEQ ID NO: 4347 - protein, 11 aa, synthetic construct
  REGION 1..11: note = Next to BRCA1 gene 1 protein (720-730)
DTSRPLGDSMY

SEQ ID NO: 4348 - protein, 9 aa, synthetic construct
  REGION 1..9: note = Mitochondrial import receptor subunit TOM7 homolog (7-15)
EAKQRLQQL

SEQ ID NO: 4349 - protein, 10 aa, synthetic construct
  REGION 1..10: note = Heterogeneous nuclear ribonucleoprotein U-like protein 1 (585-594)
EEADKLVRQY

SEQ ID NO: 4350 - protein, 9 aa, synthetic construct
  REGION 1..9: note = Poly (ADP-ribose) polymerase 1 (809-817)
EEAEIIRKY

SEQ ID NO: 4351 - protein, 10 aa, synthetic construct
  REGION 1..10: note = RB1 protein (1-10)
EEERLSIQNF

SEQ ID NO: 4352 - protein, 10 aa, synthetic construct
  REGION 1..10: note = Eukaryotic translation initiation factor 3 subunit C (81-90)
EEFELLGKAY

SEQ ID NO: 4353 - protein, 9 aa, synthetic construct
  REGION 1..9: note = Condensin-2 complex subunit G2 (490-498)
EEGAVDKSY

SEQ ID NO: 4354 - protein, 10 aa, synthetic construct
  REGION 1..10: note = Prelamin-A/C (53-62)
EELDFQKNIY

SEQ ID NO: 4355 - protein, 9 aa, synthetic construct
  REGION 1..9: note = Signal transducer and activator of transcription 1-alpha/beta (281-289)
EELEQKYTY

SEQ ID NO: 4356 - protein, 9 aa, synthetic construct
  REGION 1..9: note = Poly (ADP-ribose) polymerase 1 (168-176)
EELGFRPEY

SEQ ID NO: 4357 - protein, 9 aa, synthetic construct
  REGION 1..9: note = BolA-like protein 2 (62-70)
EELPHIHAF

SEQ ID NO: 4358 - protein, 9 aa, synthetic construct
  REGION 1..9: note = Signal transducer and activator of transcription 3 (285-293)
EELQQKVSY

SEQ ID NO: 4359 - protein, 10 aa, synthetic construct
  REGION 1..10: note = Ataxin-2-like protein (284-293)
EENYGVKTTY

SEQ ID NO: 4360 - protein, 9 aa, synthetic construct
  REGION 1..9: note = G patch domain-containing protein 4 (16-24)
EEQLLKHGW

SEQ ID NO: 4361 - protein, 10 aa, synthetic construct
  REGION 1..10: note = Golgi resident protein GCP60 (489-498)
EEVYAGSHQY

SEQ ID NO: 4362 - protein, 9 aa, synthetic construct
  REGION 1..9: note = AP-1 complex subunit sigma-3 (146-154)
EEYMNKPTF

SEQ ID NO: 4363 - protein, 9 aa, synthetic construct
  REGION 1..9: note = Transferrin receptor protein 1 (575-583)
ELIERIPEL

SEQ ID NO: 4364 - protein, 9 aa, synthetic construct
  REGION 1..9: note = Cleavage stimulation factor subunit 3 (52-60)
ETALLVDRY

SEQ ID NO: 4365 - protein, 11 aa, synthetic construct
  REGION 1..11: note = ATP-dependent RNA helicase DDX24 (571-581)
ETDEKDFYLYY

SEQ ID NO: 4366 - protein, 10 aa, synthetic construct
  REGION 1..10: note = Mediator of RNA polymerase II transcription subunit 23 (175-184)
ETDHINQIGY

SEQ ID NO: 4367 - protein, 10 aa, synthetic construct
  REGION 1..10: note = Sorting and assembly machinery component 50 homolog (206-215)
ETDRGMSAEY

SEQ ID NO: 4368 - protein, 11 aa, synthetic construct
  REGION 1..11: note = Protein polybromo-1 (1182-1192)
ETEHEPTKMFY

SEQ ID NO: 4369 - protein, 11 aa, synthetic construct
  REGION 1..11: note = Protein LAP2 (803-813)
ETEHLENGNKY

SEQ ID NO: 4370 - protein, 9 aa, synthetic construct
  REGION 1..9: note = Spectrin beta chain, erythrocytic (299-307)
ETEKMIEKY

SEQ ID NO: 4371 - protein, 10 aa, synthetic construct
  REGION 1..10: note = E3 ubiquitin-protein ligase RBBP6 (790-799)
ETEREYFNRY

SEQ ID NO: 4372 - protein, 9 aa, synthetic construct
  REGION 1..9: note = Putative eukaryotic translation initiation factor 2 subunit 3-like protein (322-330)
FAEHNDLQY

SEQ ID NO: 4373 - protein, 9 aa, synthetic construct
  REGION 1..9: note = 40S ribosomal protein S18 (28-36)
FAITAIKGV

SEQ ID NO: 4374 - protein, 9 aa, synthetic construct
  REGION 1..9: note = Keratinocyte-associated protein 2 (110-118)
FASGLIHRV

SEQ ID NO: 4375 - protein, 9 aa, synthetic construct
  REGION 1..9: note Dolichyl-diphosphooligosaccharide-proteinosyltransferase subunit DAD1 (99-107)
FASTILHLV

SEQ ID NO: 4376 - protein, 9 aa, synthetic construct
  REGION 1..9: note = Minor histocompatibility antigen H13 (236-244)
FEAPIKLVF

SEQ ID NO: 4377 - protein, 9 aa, synthetic construct
  REGION 1..9: note = Catenin alpha-2 (609-617)
FIDASRLVY

SEQ ID NO: 4378 - protein, 11 aa, synthetic construct
  REGION 1..11: note = TBC1 domain family member 31 (560-570)
FIDHDITSQLY

SEQ ID NO: 4379 - protein, 9 aa, synthetic construct
  REGION 1..9: note = Poly (ADP-ribose) polymerase 4 (797-805)
FIFSDTHEL

SEQ ID NO: 4380 - protein, 11 aa, synthetic construct
  REGION 1..11: note = Basic leucine zipper and W2 domain-containing protein 1 (53-63)
FLDASGAKLDY

SEQ ID NO: 4381 - protein, 10 aa, synthetic construct
  REGION 1..10: note = Neutral alpha-glucosidase AB (604-613)
FLDDGHTFNY

SEQ ID NO: 4382 - protein, 10 aa, synthetic construct
  REGION 1..10: note = RuvB-like 2 (433-442)
FLDESRSTQY

SEQ ID NO: 4383 - protein, 9 aa, synthetic construct
  REGION 1..9: note = Signal transducer and activator of transcription 1-alpha/beta (14-22)
FLEQVHQLY

SEQ ID NO: 4384 - protein, 9 aa, synthetic construct
  REGION 1..9: note = Protein MCM10 homolog (333-341)
FLFGEVHKA

SEQ ID NO: 4385 - protein, 10 aa, synthetic construct
  REGION 1..10: note = Hemoglobin subunit alpha (5-14)
FLSFPTTKTY

SEQ ID NO: 4386 - protein, 9 aa, synthetic construct
  REGION 1..9: note = Plexin-C1 (1065-1073)
FLVTVIHTL

SEQ ID NO: 4387 - protein, 9 aa, synthetic construct
  REGION 1..9: note = DNA repair protein XRCC1 (161-169)
FQNPFRSEL

SEQ ID NO: 4388 - protein, 9 aa, synthetic construct
  REGION 1..9: note = Protein AATF (298-306)
FQYPDTRYL

SEQ ID NO: 4389 - protein, 9 aa, synthetic construct
  REGION 1..9: note = Short transient receptor potential channel 4-associated protein (457-465)
FSDHHENKY

SEQ ID NO: 4390 - protein, 9 aa, synthetic construct
  REGION 1..9: note = Cell cycle progression protein 1 (186-194)
FSDYLHPQY

SEQ ID NO: 4391 - protein, 9 aa, synthetic construct
  REGION 1..9: note = Dihydrofolate reductase, mitochondrial (149-157)
FSEIDLEKY

SEQ ID NO: 4392 - protein, 10 aa, synthetic construct
  REGION 1..10: note = Splicing factor 3A subunit 3 (130-139)
FTDEEGYGRY

SEQ ID NO: 4393 - protein, 10 aa, synthetic construct
  REGION 1..10: note = Bifunctional glutamate/proline-tRNA ligase (48-57)
FTDVNSILRY

SEQ ID NO: 4394 - protein, 11 aa, synthetic construct
  REGION 1..11: note = RNMT-activating mini protein (19-29)
FTENDKEYQEY

SEQ ID NO: 4395 - protein, 9 aa, synthetic construct
  REGION 1..9: note = ATP-dependent RNA helicase DDX24 (801-809)
FTESQKTKY

SEQ ID NO: 4396 - protein, 9 aa, synthetic construct
  REGION 1..9: note = Eukaryotic translation initiation factor 4 gamma 1 (1377-1385)
FVAEQKVEY

SEQ ID NO: 4397 - protein, 9 aa, synthetic construct
  REGION 1..9: note = Coatomer subunit delta (9-17)
FVETESVRY

SEQ ID NO: 4398 - protein, 9 aa, synthetic construct
  REGION 1..9: note = Coatomer subunit alpha (641-649)
FVKDEKTRF

SEQ ID NO: 4399 - protein, 9 aa, synthetic construct
  REGION 1..9: note = Mothers against decapentaplegic homolog 9 (418-426)
FVKGWGAEY

SEQ ID NO: 4400 - protein, 10 aa, synthetic construct
  REGION 1..10: note = Ubiquitin-like protein FUBI (4-13)
FVRAQELHTF

SEQ ID NO: 4401 - protein, 9 aa, synthetic construct
  REGION 1..9: note = Lysine-tRNA ligase (119-127)
GEDPYPHKF

SEQ ID NO: 4402 - protein, 9 aa, synthetic construct
  REGION 1..9: note = Cytochrome c oxidase subunit 6A1, mitochondrial (7-15)
GEEGSARMW

SEQ ID NO: 4403 - protein, 9 aa, synthetic construct
  REGION 1..9: note = Polycomb protein SUZ12 (549-557)
GEVEQQRTY

SEQ ID NO: 4404 - protein, 10 aa, synthetic construct
  REGION 1..10: note = SNARE-associated protein Snapin (127-136)
GIYPPGSPGK

SEQ ID NO: 4405 - protein, 11 aa, synthetic construct
  REGION 1..11: note = Ataxin-10 (379-389)
GLADASLLKKV

SEQ ID NO: 4406 - protein, 9 aa, synthetic construct
  REGION 1..9: note = Signal recognition particle 54 kDa protein (302-310)
GLIDKVNEL

SEQ ID NO: 4407 - protein, 9 aa, synthetic construct
  REGION 1..9: note = Probable JmjC domain-containing histone demethylation protein 2C (846-854)
GQAHPSASY

SEQ ID NO: 4408 - protein, 9 aa, synthetic construct
  REGION 1..9: note = Putative ATP-dependent RNA helicase DDX11-like protein 8 (825-833)
GQAPPGKAL

SEQ ID NO: 4409 - protein, 9 aa, synthetic construct
  REGION 1..9: note = General transcription factor 3C polypeptide 1 (604-612)
GQDKPHETY

SEQ ID NO: 4410 - protein, 10 aa, synthetic construct
  REGION 1..10: note = Tonsoku-like protein (670-679)
GQDPHSSQAF

SEQ ID NO: 4411 - protein, 9 aa, synthetic construct
  REGION 1..9: note = Nuclear pore complex protein Nup214 (1208-1216)
GQFSKPFSF

SEQ ID NO: 4412 - protein, 11 aa, synthetic construct
  REGION 1..11: note = ATP-dependent 6-phosphofructokinase, platelet type (125-135)
GQIDKEAVQKY

SEQ ID NO: 4413 - protein, 9 aa, synthetic construct
  REGION 1..9: note = Alpha-endosulfine (45-53)
GQKPGGSDF

SEQ ID NO: 4414 - protein, 9 aa, synthetic construct
  REGION 1..9: note = Heterogeneous nuclear ribonucleoprotein U (812-820)
GQKPWSQHY

SEQ ID NO: 4415 - protein, 11 aa, synthetic construct
  REGION 1..11: note = 60S ribosomal protein L26 (64-74)
GQQIGKVVQVY

SEQ ID NO: 4416 - protein, 10 aa, synthetic construct
  REGION 1..10: note = 60S ribosomal protein L8 (3-12)
GQRKGAGSVF

SEQ ID NO: 4417 - protein, 9 aa, synthetic construct
  REGION 1..9: note = 60S ribosomal protein L28 (69-77)
GQRKPATSY

SEQ ID NO: 4418 - protein, 9 aa, synthetic construct
  REGION 1..9: note = DNA mismatch repair protein Msh2 (157-165)
GQRQVGVGY

SEQ ID NO: 4419 - protein, 9 aa, synthetic construct
  REGION 1..9: note = Chromodomain-helicase-DNA-binding protein 8 (210-218)
GQSKAVKVY

SEQ ID NO: 4420 - protein, 9 aa, synthetic construct
  REGION 1..9: note = Cell division cycle protein 27 homolog (325-333)
GQTGTKSVF

SEQ ID NO: 4421 - protein, 9 aa, synthetic construct
  REGION 1..9: note = Transmembrane protein 43 (137-145)
GQVKKETRY

SEQ ID NO: 4422 - protein, 9 aa, synthetic construct
  REGION 1..9: note = Clathrin heavy chain 1 (496-504)
GQVQKIVLY

SEQ ID NO: 4423 - protein, 10 aa, synthetic construct
  REGION 1..10: note = Disintegrin and metalloproteinase domain-containing protein 10 (19-28)
GQYGNPLNKY

SEQ ID NO: 4424 - protein, 11 aa, synthetic construct
  REGION 1..11: note = Protein transport protein Sec23B (560-570)
GQYNKEDPTSF

SEQ ID NO: 4425 - protein, 9 aa, synthetic construct
  REGION 1..9: note = Protein CASP (561-569)
GSDDTELRY

SEQ ID NO: 4426 - protein, 10 aa, synthetic construct
  REGION 1..10: note = Gem-associated protein 5 (444-453)
GTDDGKVGLY

SEQ ID NO: 4427 - protein, 9 aa, synthetic construct
  REGION 1..9: note = Ribosomal biogenesis protein LAS1L (107-115)
GTDELRLLY

SEQ ID NO: 4428 - protein, 9 aa, synthetic construct
  REGION 1..9: note = WD repeat-containing protein 34 (398-406)
GTDGHVHLY

SEQ ID NO: 4429 - protein, 11 aa, synthetic construct
  REGION 1..11: note = DnaJ homolog subfamily B member 4 (38-48)
GTDGQGGTFRY

SEQ ID NO: 4430 - protein, 9 aa, synthetic construct
  REGION 1..9: note = Tyrosine-protein kinase Fyn (31-39)
GTDPTPQHY

SEQ ID NO: 4431 - protein, 9 aa, synthetic construct
  REGION 1..9: note = Activating signal cointegrator 1 (235-243)
GTLNQPLTK

SEQ ID NO: 4432 - protein, 9 aa, synthetic construct
  REGION 1..9: note = Putative mitochondrial import inner membrane translocase subunit Tim23B (113-121)
GTMTGMLYK

SEQ ID NO: 4433 - protein, 10 aa, synthetic construct
  REGION 1..10: note = Peroxisomal acyl-coenzyme A oxidase 1 (263-272)
GTYVKPLSNK

SEQ ID NO: 4434 - protein, 9 aa, synthetic construct
  REGION 1..9: note = HLA class II histocompatibility antigen, DO alpha chain (37-45)
GTYVSSVPR

SEQ ID NO: 4435 - protein, 9 aa, synthetic construct
  REGION 1..9: note = Poly (ADP-ribose) polymerase 14 (924-932)
GVFGFPLGR

SEQ ID NO: 4436 - protein, 10 aa, synthetic construct
  REGION 1..10: note = Cytosolic non-specific dipeptidase (106-115)
GVYGGSVHEA

SEQ ID NO: 4437 - protein, 10 aa, synthetic construct
  REGION 1..10: note = Mediator of RNA polymerase II transcription subunit 18 (127-136)
HEFVAKGHLF

SEQ ID NO: 4438 - protein, 10 aa, synthetic construct
  REGION 1..10: note = 60S ribosomal protein L7 (192-201)
HEIYTVGKRF

SEQ ID NO: 4439 - protein, 9 aa, synthetic construct
  REGION 1..9: note = Coatomer subunit alpha (103-111)
HEYPWILSA

SEQ ID NO: 4440 - protein, 10 aa, synthetic construct
  REGION 1..10: note = Zinc finger protein 548 (24-33)
HLDEAQRLLY

SEQ ID NO: 4441 - protein, 9 aa, synthetic construct
  REGION 1..9: note = Protein FAM32A (95-103)
HLDTLTEHY

SEQ ID NO: 4442 - protein, 9 aa, synthetic construct
  REGION 1..9: note = Heat shock protein HSP 90-alpha A2 (189-197)
HLKEDQTEY

SEQ ID NO: 4443 - protein, 9 aa, synthetic construct
  REGION 1..9: note = Myc-associated zinc finger protein (411-419)
HLNSHVRQV

SEQ ID NO: 4444 - protein, 9 aa, synthetic construct
  REGION 1..9: note = Heterogeneous nuclear ribonucleoproteins A2/B1 (127-135)
HLRDYFEEY

SEQ ID NO: 4445 - protein, 9 aa, synthetic construct
  REGION 1..9: note = V-type proton ATPase 116 kDa subunit a isoform 4 (722-730)
HQAIHTIEY

SEQ ID NO: 4446 - protein, 9 aa, synthetic construct
  REGION 1..9: note = Elongation of very long chain fatty acids protein 5 (137-145)
HQITVLHVY

SEQ ID NO: 4447 - protein, 9 aa, synthetic construct
  REGION 1..9: note = Zinc finger protein 770 (99-107)
HQQLHNETY

SEQ ID NO: 4448 - protein, 9 aa, synthetic construct
  REGION 1..9: note = Protein SSXT (207-215)
HQQPPSQQY

SEQ ID NO: 4449 - protein, 9 aa, synthetic construct
  REGION 1..9: note = Zinc finger and BTB domain-containing protein 43 (140-148)
HQSPSSSSY

SEQ ID NO: 4450 - protein, 9 aa, synthetic construct
  REGION 1..9: note = Signal transducing adapter molecule 2 (410-418)
HQVTVAQSY

SEQ ID NO: 4451 - protein, 9 aa, synthetic construct
  REGION 1..9: note = Cirhin (556-564)
HSDQQVFEY

SEQ ID NO: 4452 - protein, 10 aa, synthetic construct
  REGION 1..10: note = Catenin beta-1 (645-654)
HSRNEGVATY

SEQ ID NO: 4453 - protein, 10 aa, synthetic construct
  REGION 1..10: note = U3 small nucleolar RNA-associated protein 6 homolog (267-276)
HTDDPLTWDY

SEQ ID NO: 4454 - protein, 9 aa, synthetic construct
  REGION 1..9: note = DTW domain-containing protein 1 (175-183)
HTDILKEKY

SEQ ID NO: 4455 - protein, 10 aa, synthetic construct
  REGION 1..10: note = Bone morphogenetic protein receptor type-2 (316-325)
HTELPRGDHY

SEQ ID NO: 4456 - protein, 9 aa, synthetic construct
  REGION 1..9: note = Dedicator of cytokinesis protein 7 (913-921)
IASDIVSRF

SEQ ID NO: 4457 - protein, 9 aa, synthetic construct
  REGION 1..9: note = Filamin-A (898-906)
IIDHHDNTY

SEQ ID NO: 4458 - protein, 9 aa, synthetic construct
  REGION 1..9: note = SUMO-activating enzyme subunit 1 (309-317)
ILAQEIVKA

SEQ ID NO: 4459 - protein, 10 aa, synthetic construct
  REGION 1..10: note = Superkiller viralicidic activity 2-like 2 (470-479)
ILFSEGLIKA

SEQ ID NO: 4460 - protein, 9 aa, synthetic construct
  REGION 1..9: note = 60S ribosomal protein L15 (133-141)
ILIDPFHKA

SEQ ID NO: 4461 - protein, 9 aa, synthetic construct
  REGION 1..9: note = Transcription elongation factor SPT6 (1267-1275)
IMKIDIEKF

SEQ ID NO: 4462 - protein, 9 aa, synthetic construct
  REGION 1..9: note = X-ray repair cross-complementing protein 5 (528-536)
IPLSKIKTL

SEQ ID NO: 4463 - protein, 9 aa, synthetic construct
  REGION 1..9: note = Eukaryotic translation initiation factor 3 subunit C (783-791)
IQEESLRTY

SEQ ID NO: 4464 - protein, 9 aa, synthetic construct
  REGION 1..9: note = 60S ribosomal protein L18a (95-103)
IQIMKVEEI

SEQ ID NO: 4465 - protein, 9 aa, synthetic construct
  REGION 1..9: note = Catalase (398-406)
IQKKAVKNF

SEQ ID NO: 4466 - protein, 9 aa, synthetic construct
  REGION 1..9: note = Tuftelin-interacting protein 11 (336-344)
IQNDRQLQY

SEQ ID NO: 4467 - protein, 9 aa, synthetic construct
  REGION 1..9: note = Hepatoma-derived growth factor-related protein 2 (84-92)
IQNNPHASY

SEQ ID NO: 4468 - protein, 9 aa, synthetic construct
  REGION 1..9: note = Putative annexin A2-like protein (319-327)
IQQDTKGDY

SEQ ID NO: 4469 - protein, 9 aa, synthetic construct
  REGION 1..9: note = Interferon-induced GTP-binding protein Mx1 (206-214)
IQRQETISL

SEQ ID NO: 4470 - protein, 9 aa, synthetic construct
  REGION 1..9: note = Protein transport protein Sec16A (1602-1610)
IQRTEAYEY

SEQ ID NO: 4471 - protein, 9 aa, synthetic construct
  REGION 1..9: note = Transcription elongation factor SPT5 (984-992)
IQVKVRDTY

SEQ ID NO: 4472 - protein, 11 aa, synthetic construct
  REGION 1..11: note = Splicing factor 3B subunit 4 (6-16)
ISERNQDATVY

SEQ ID NO: 4473 - protein, 9 aa, synthetic construct
  REGION 1..9: note = 40S ribosomal protein S16 (87-95)
ISKALVAYY

SEQ ID NO: 4474 - protein, 9 aa, synthetic construct
  REGION 1..9: note = Serine/threonine-protein kinase 17B (51-59)
ISKSTGQEY

SEQ ID NO: 4475 - protein, 9 aa, synthetic construct
  REGION 1..9: note = Pre-mRNA-splicing factor CWC22 homolog (146-154)
ITDKNSLAY

SEQ ID NO: 4476 - protein, 10 aa, synthetic construct
  REGION 1..10: note = Serine/threonine-protein kinase mTOR (664-673)
ITDPDPDIRY

SEQ ID NO: 4477 - protein, 10 aa, synthetic construct
  REGION 1..10: note = AAC42003.1 (85-94)
ITDSAGHILY

SEQ ID NO: 4478 - protein, 9 aa, synthetic construct
  REGION 1..9: note = E3 ubiquitin-protein ligase RNF213 (4163-4171)
ITEDKTELY

SEQ ID NO: 4479 - protein, 9 aa, synthetic construct
  REGION 1..9: note = RNA polymerase I-specific transcription initiation factor RRN3 (516-524)
ITNKYQLVF

SEQ ID NO: 4480 - protein, 9 aa, synthetic construct
  REGION 1..9: note = Nuclear receptor corepressor 2 (1441-1449)
ITQGTPLKY

SEQ ID NO: 4481 - protein, 11 aa, synthetic construct
  REGION 1..11: note = HLA class II histocompatibility antigen, DQ alpha 1 chain (3-13)
IVADHVASYGV

SEQ ID NO: 4482 - protein, 9 aa, synthetic construct
  REGION 1..9: note = Putative eukaryotic translation initiation factor 2 subunit 3-like protein (59-67)
KAISGVHTV

SEQ ID NO: 4483 - protein, 9 aa, synthetic construct
  REGION 1..9: note = Nuclear pore membraneoprotein 210 (219-227)
KARIQEAVY

SEQ ID NO: 4484 - protein, 9 aa, synthetic construct
  REGION 1..9: note = Heat shock protein HSP 90-beta (452-460)
KEFDGKSLV

SEQ ID NO: 4485 - protein, 9 aa, synthetic construct
  REGION 1..9: note = NADH dehydrogenase (ubiquinone) 1 beta subcomplex subunit 10 (121-129)
KEVEQFTQV

SEQ ID NO: 4486 - protein, 9 aa, synthetic construct
  REGION 1..9: note = Lysine-specific histone demethylase 1A (454-462)
KIKELHQQY

SEQ ID NO: 4487 - protein, 9 aa, synthetic construct
  REGION 1..9: note = Thioredoxin-interacting protein (6-14)
KIKSFEVVF

SEQ ID NO: 4488 - protein, 9 aa, synthetic construct
  REGION 1..9: note = 60S ribosomal protein L27 (67-75)
KIKSFVKVY

SEQ ID NO: 4489 - protein, 9 aa, synthetic construct
  REGION 1..9: note = 60S ribosomal protein L5 (117-125)
KIYEGQVEV

SEQ ID NO: 4490 - protein, 10 aa, synthetic construct
  REGION 1..10: note = Putative elongation factor 1-alpha-like 3 (386-395)
KLEDGPKFLK

SEQ ID NO: 4491 - protein, 10 aa, synthetic construct
  REGION 1..10: note = Long-chain-fatty-acid-CoA ligase 4 (40-49)
KLFDHAVSKF

SEQ ID NO: 4492 - protein, 9 aa, synthetic construct
  REGION 1..9: note = Signal recognition particle receptor subunit alpha (81-89)
KLIDDVHRL

SEQ ID NO: 4493 - protein, 11 aa, synthetic construct
  REGION 1..11: note = Embryonic stem cell-specific 5-hydroxymethylcytosine-binding protein (239-249)
KLIHPTENITF

SEQ ID NO: 4494 - protein, 9 aa, synthetic construct
  REGION 1..9: note Dolichyl-diphosphooligosaccharide-proteinosyltransferase subunit DAD1 (25-33)
KLLDAYLLY

SEQ ID NO: 4495 - protein, 10 aa, synthetic construct
  REGION 1..10: note = DNA-directed RNA polymerases I, II, and III subunit RPABC5 (58-67)
KLLNYAPLEK

SEQ ID NO: 4496 - protein, 9 aa, synthetic construct
  REGION 1..9: note = Dystonin (4751-4759)
KLSDLDNKL

SEQ ID NO: 4497 - protein, 10 aa, synthetic construct
  REGION 1..10: note = 60S ribosomal protein L23a (115-124)
KLYDIDVAKV

SEQ ID NO: 4498 - protein, 10 aa, synthetic construct
  REGION 1..10: note = ATP-citrate synthase (650-659)
KLYRPGSVAY

SEQ ID NO: 4499 - protein, 9 aa, synthetic construct
  REGION 1..9: note = Protein quaking (81-89)
KLYVPVKEY

SEQ ID NO: 4500 - protein, 9 aa, synthetic construct
  REGION 1..9: note = Homocysteine-responsive endoplasmic reticulum-resident ubiquitin-like domain member 1 protein (92-100)
KMPEINAKV

SEQ ID NO: 4501 - protein, 9 aa, synthetic construct
  REGION 1..9: note = Transducin-like enhancer protein 2 (76-84)
KQAEIVKRL

SEQ ID NO: 4502 - protein, 9 aa, synthetic construct
  REGION 1..9: note = Gamma-interferon-inducible protein 16 (309-317)
KQASGNIVY

SEQ ID NO: 4503 - protein, 10 aa, synthetic construct
  REGION 1..10: note = Cytoplasmic dynein 1 heavy chain 1 (1181-1190)
KQFEKQVELY

SEQ ID NO: 4504 - protein, 10 aa, synthetic construct
  REGION 1..10: note = Staphylococcal nuclease domain-containing protein 1 (869-878)
KQFQKVITEY

SEQ ID NO: 4505 - protein, 10 aa, synthetic construct
  REGION 1..10: note = Cytoplasmic dynein 1 heavy chain 1 (652-661)
KQIDRQLTAY

SEQ ID NO: 4506 - protein, 9 aa, synthetic construct
  REGION 1..9: note = Thioredoxin (3-11)
KQIESKTAF

SEQ ID NO: 4507 - protein, 9 aa, synthetic construct
  REGION 1..9: note = Ribonucleoside-diphosphate reductase large subunit (529-537)
KQIFETIYY

SEQ ID NO: 4508 - protein, 9 aa, synthetic construct
  REGION 1..9: note = ADP/ATP translocase 2 (43-51)
KQITADKQY

SEQ ID NO: 4509 - protein, 10 aa, synthetic construct
  REGION 1..10: note = Lamin-B receptor (234-243)
KQKDPSLLNF

SEQ ID NO: 4510 - protein, 10 aa, synthetic construct
  REGION 1..10: note = Asparagine synthetase (glutamine-hydrolyzing) (272-281)
KQLKEAQVQY

SEQ ID NO: 4511 - protein, 11 aa, synthetic construct
  REGION 1..11: note = Heterogeneous nuclear ribonucleoprotein L (455-465)
KQPAIMPGQSY

SEQ ID NO: 4512 - protein, 10 aa, synthetic construct
  REGION 1..10: note = Caprin-1 (536-545)
KQQNQYQASY

SEQ ID NO: 4513 - protein, 9 aa, synthetic construct
  REGION 1..9: note = DNA-dependent protein kinase catalytic subunit (2970-2978)
KQYDEALNK

SEQ ID NO: 4514 - protein, 10 aa, synthetic construct
  REGION 1..10: note = Alpha-actinin-4 (691-700)
KQYERSIVDY

SEQ ID NO: 4515 - protein, 9 aa, synthetic construct
  REGION 1..9: note = RAC-beta serine/threonine-protein kinase (30-38)
KSDGSFIGY

SEQ ID NO: 4516 - protein, 9 aa, synthetic construct
  REGION 1..9: note = Replication factor C subunit 1 (870-878)
KSDLFFHDY

SEQ ID NO: 4517 - protein, 10 aa, synthetic construct
  REGION 1..10: note = Pre-mRNA-processing factor 40 homolog A (164-173)
KSDSGKPYYY

SEQ ID NO: 4518 - protein, 9 aa, synthetic construct
  REGION 1..9: note = Helicase-like transcription factor (499-507)
KSDVHLNFY

SEQ ID NO: 4519 - protein, 9 aa, synthetic construct
  REGION 1..9: note = Pre-mRNA-splicing factor RBM22 (109-117)
KSDVNKEYY

SEQ ID NO: 4520 - protein, 9 aa, synthetic construct
  REGION 1..9: note = Kinesin-like protein KIF18A (241-249)
KTASINQNV

SEQ ID NO: 4521 - protein, 10 aa, synthetic construct
  REGION 1..10: note = Vacuolar protein sorting-associated protein 13A (1399-1408)
KTDDLTMVLY

SEQ ID NO: 4522 - protein, 9 aa, synthetic construct
  REGION 1..9: note = Chromodomain-helicase-DNA-binding protein 8 (165-173)
KTDESLTKY

SEQ ID NO: 4523 - protein, 9 aa, synthetic construct
  REGION 1..9: note = Raftlin (114-122)
KTDLHNEGY

SEQ ID NO: 4524 - protein, 9 aa, synthetic construct
  REGION 1..9: note = Coiled-coil domain-containing protein 94 (90-98)
KTDPENTDY

SEQ ID NO: 4525 - protein, 11 aa, synthetic construct
  REGION 1..11: note = Signal-induced proliferation-associated 1-like protein 2 (436-446)
KTDSTGTHSLY

SEQ ID NO: 4526 - protein, 11 aa, synthetic construct
  REGION 1..11: note = Pre-mRNA-processing-splicing factor 8 (341-351)
KTEDPDLPAFY

SEQ ID NO: 4527 - protein, 11 aa, synthetic construct
  REGION 1..11: note = Serine/arginine-rich splicing factor 3 (23-33)
KTELERAFGYY

SEQ ID NO: 4528 - protein, 10 aa, synthetic construct
  REGION 1..10: note = T-complex protein 1 subunit zeta-2 (196-205)
KTEVNSGFFY

SEQ ID NO: 4529 - protein, 9 aa, synthetic construct
  REGION 1..9: note = Periphilin-1 (297-305)
KTKEIEQVY

SEQ ID NO: 4530 - protein, 10 aa, synthetic construct
  REGION 1..10: note = Metastasis-associated protein MTA2 (311-320)
KTTDRYIQQK

SEQ ID NO: 4531 - protein, 9 aa, synthetic construct
  REGION 1..9: note = Spatacsin (1273-1281)
KVANIILSY

SEQ ID NO: 4532 - protein, 9 aa, synthetic construct
  REGION 1..9: note = Heterogeneous nuclear ribonucleoprotein A/B (227-235)
KVAQPKEVY

SEQ ID NO: 4533 - protein, 9 aa, synthetic construct
  REGION 1..9: note = Protein RRP5 homolog (1680-1688)
KVFERAVQY

SEQ ID NO: 4534 - protein, 9 aa, synthetic construct
  REGION 1..9: note = 60 kDa heat shock protein, mitochondrial (344-352)
KVGEVIVTK

SEQ ID NO: 4535 - protein, 9 aa, synthetic construct
  REGION 1..9: note = Protein transport protein Sec61 subunit beta (67-75)
KVGPVPVLV

SEQ ID NO: 4536 - protein, 9 aa, synthetic construct
  REGION 1..9: note = 40S ribosomal protein S19 (29-37)
KVPEWVDTV

SEQ ID NO: 4537 - protein, 9 aa, synthetic construct
  REGION 1..9: note = Protein DEK (315-323)
KVYENYPTY

SEQ ID NO: 4538 - protein, 9 aa, synthetic construct
  REGION 1..9: note = Cyclin-dependent kinases regulatory subunit 2 (11-19)
KYFDEHYEY

SEQ ID NO: 4539 - protein, 9 aa, synthetic construct
  REGION 1..9: note = Protein disulfide-isomerase A3 (16-24)
LAAARLAAA

SEQ ID NO: 4540 - protein, 9 aa, synthetic construct
  REGION 1..9: note = Heterogeneous nuclear ribonucleoprotein R (193-201)
LEYEDHKSA

SEQ ID NO: 4541 - protein, 9 aa, synthetic construct
  REGION 1..9: note = Lamina-associated polypeptide 2, isoform alpha (313-321)
LIKETTTGY

SEQ ID NO: 4542 - protein, 9 aa, synthetic construct
  REGION 1..9: note = 60S ribosomal protein L28 (17-25)
LIKRNKQTY

SEQ ID NO: 4543 - protein, 9 aa, synthetic construct
  REGION 1..9: note = ATP synthase F(0) complex subunit C1, mitochondrial (21-29)
LIRPVSASF

SEQ ID NO: 4544 - protein, 9 aa, synthetic construct
  REGION 1..9: note = Cytospin-A (469-477)
LLDEHHISY

SEQ ID NO: 4545 - protein, 10 aa, synthetic construct
  REGION 1..10: note = Zinc finger protein 557 (59-68)
LLDPAQRTLY

SEQ ID NO: 4546 - protein, 10 aa, synthetic construct
  REGION 1..10: note = Clathrin heavy chain 1 (421-430)
LLDQGQLNKY

SEQ ID NO: 4547 - protein, 10 aa, synthetic construct
  REGION 1..10: note = Zinc finger protein 669 (106-115)
LLDSSQKNLY

SEQ ID NO: 4548 - protein, 10 aa, synthetic construct
  REGION 1..10: note = WD repeat-containing protein 6 (358-367)
LLEDKHFQSY

SEQ ID NO: 4549 - protein, 9 aa, synthetic construct
  REGION 1..9: note = Signal transducer and activator of transcription 6 (56-64)
LLSDTVQHL

SEQ ID NO: 4550 - protein, 9 aa, synthetic construct
  REGION 1..9: note = Antigen peptide transporter 1 (684-692)
LLYESPERY

SEQ ID NO: 4551 - protein, 9 aa, synthetic construct
  REGION 1..9: note = Retinoic acid receptor RXR-gamma (423-431)
LPALRSIGL

SEQ ID NO: 4552 - protein, 9 aa, synthetic construct
  REGION 1..9: note = Eukaryotic translation initiation factor 2-alpha kinase 1 (221-229)
LQHPNIVGY

SEQ ID NO: 4553 - protein, 9 aa, synthetic construct
  REGION 1..9: note = CDK5 regulatory subunit-associated protein 2 (355-363)
LQKAQTQEF

SEQ ID NO: 4554 - protein, 9 aa, synthetic construct
  REGION 1..9: note = Trifunctional purine biosynthetic protein adenosine-3 (429-437)
LQQPRSLTY

SEQ ID NO: 4555 - protein, 9 aa, synthetic construct
  REGION 1..9: note = Farnesyl pyrophosphate synthase (341-349)
LQRATPEQY

SEQ ID NO: 4556 - protein, 9 aa, synthetic construct
  REGION 1..9: note = R3H domain-containing protein 4 (70-78)
LQRLENTQY

SEQ ID NO: 4557 - protein, 9 aa, synthetic construct
  REGION 1..9: note = WD repeat-containing protein 27 (15-23)
LSDIVIEKY

SEQ ID NO: 4558 - protein, 9 aa, synthetic construct
  REGION 1..9: note = UAP56-interacting factor (99-107)
LSDKNIEQY

SEQ ID NO: 4559 - protein, 9 aa, synthetic construct
  REGION 1..9: note = Histone acetyltransferase KAT8 (325-333)
LSDLGKLSY

SEQ ID NO: 4560 - protein, 10 aa, synthetic construct
  REGION 1..10: note = Probable tRNA N6-adenosine threonylcarbamoyltransferase (315-324)
LSDSGVTQRY

SEQ ID NO: 4561 - protein, 10 aa, synthetic construct
  REGION 1..10: note = Deoxynucleotidyltransferase terminal-interacting protein 2 (252-261)
LSEINKPNFY

SEQ ID NO: 4562 - protein, 11 aa, synthetic construct
  REGION 1..11: note = Serpin B8 (74-84)
LSEVNRTGTQY

SEQ ID NO: 4563 - protein, 9 aa, synthetic construct
  REGION 1..9: note = ATP synthase subunit alpha, mitochondrial (160-168)
LTDADAMKY

SEQ ID NO: 4564 - protein, 9 aa, synthetic construct
  REGION 1..9: note = 1,4-alpha-glucan-branching enzyme (569-577)
LTDDDLLRY

SEQ ID NO: 4565 - protein, 10 aa, synthetic construct
  REGION 1..10: note = 26S proteasome non-ATPase regulatory subunit 2 (391-400)
LTDDGNKWLY

SEQ ID NO: 4566 - protein, 9 aa, synthetic construct
  REGION 1..9: note = Phosphatidylinositol 4,5-bisphosphate 3-kinase catalytic subunit alpha isoform (623-631)
LTDDKLSQY

SEQ ID NO: 4567 - protein, 9 aa, synthetic construct
  REGION 1..9: note = Probable threonine-tRNA ligase 2, cytoplasmic (435-443)
LTDFIREEY

SEQ ID NO: 4568 - protein, 10 aa, synthetic construct
  REGION 1..10: note = Coiled-coil domain-containing protein 127 (209-218)
LTDIFQHDTY

SEQ ID NO: 4569 - protein, 10 aa, synthetic construct
  REGION 1..10: note = Elongation factor 2 (162-171)
LTDITKGVQY

SEQ ID NO: 4570 - protein, 10 aa, synthetic construct
  REGION 1..10: note = Tuberin (146-155)
LTDNGRHITY

SEQ ID NO: 4571 - protein, 9 aa, synthetic construct
  REGION 1..9: note = Glucosylceramidase (252-260)
LTDPEAAKY

SEQ ID NO: 4572 - protein, 10 aa, synthetic construct
  REGION 1..10: note = ATPase family AAA domain-containing protein 5 (1663-1672)
LTDVREQNKY

SEQ ID NO: 4573 - protein, 9 aa, synthetic construct
  REGION 1..9: note = Casein kinase II subunit alpha (128-136)
LTDYDIRFY

SEQ ID NO: 4574 - protein, 10 aa, synthetic construct
  REGION 1..10: note = Gamma-tubulin complex component 2 (88-97)
LTEDKETLQY

SEQ ID NO: 4575 - protein, 9 aa, synthetic construct
  REGION 1..9: note = Integrator complex subunit 11 (242-250)
LTEKANHYY

SEQ ID NO: 4576 - protein, 9 aa, synthetic construct
  REGION 1..9: note = Pogo transposable element with KRAB domain (64-72)
LTEQQKALY

SEQ ID NO: 4577 - protein, 10 aa, synthetic construct
  REGION 1..10: note = Nuclear factor erythroid 2-related factor 2 (197-206)
LTEVDNYHFY

SEQ ID NO: 4578 - protein, 11 aa, synthetic construct
  REGION 1..11: note = Serpin B9 (74-84)
LTEVNKAGTQY

SEQ ID NO: 4579 - protein, 9 aa, synthetic construct
  REGION 1..9: note = Folliculin-interacting protein 2 (997-1005)
LVADLVHTV

SEQ ID NO: 4580 - protein, 9 aa, synthetic construct
  REGION 1..9: note = Pogo transposable element with KRAB domain (261-269)
LVDQRVAEY

SEQ ID NO: 4581 - protein, 10 aa, synthetic construct
  REGION 1..10: note = Exportin-5 (20-29)
MMDPNSTQRY

SEQ ID NO: 4582 - protein, 10 aa, synthetic construct
  REGION 1..10: note = Protein transport protein Sec61 subunit gamma (5-14)
MQFVEPSRQF

SEQ ID NO: 4583 - protein, 9 aa, synthetic construct
  REGION 1..9: note = Catenin beta-1 (662-670)
MSEDKPQDY

SEQ ID NO: 4584 - protein, 9 aa, synthetic construct
  REGION 1..9: note = Brefeldin A-inhibited guanine nucleotide-exchange protein 1 (574-582)
NAANIFERL

SEQ ID NO: 4585 - protein, 11 aa, synthetic construct
  REGION 1..11: note = Charged multivesicular body protein 5 (63-73)
NEIQEALSRSY

SEQ ID NO: 4586 - protein, 9 aa, synthetic construct
  REGION 1..9: note = Clathrin heavy chain 1 (935-943)
NENSLFKSL

SEQ ID NO: 4587 - protein, 9 aa, synthetic construct
  REGION 1..9: note = Calpain small subunit 1 (93-101)
NESEEVRQF

SEQ ID NO: 4588 - protein, 9 aa, synthetic construct
  REGION 1..9: note = PR domain zinc finger protein 15 (791-799)
NEVDGEYRY

SEQ ID NO: 4589 - protein, 11 aa, synthetic construct
  REGION 1..11: note = Nucleolar pre-ribosomal-associated protein 1 (127-137)
NEVDPGDWQKF

SEQ ID NO: 4590 - protein, 9 aa, synthetic construct
  REGION 1..9: note = DnaJ homolog subfamily C member 11 (261-269)
NLDKNTVGY

SEQ ID NO: 4591 - protein, 9 aa, synthetic construct
  REGION 1..9: note = Ubiquitin-conjugating enzyme E2 variant 3 (190-198)
NLDSQRLQY

SEQ ID NO: 4592 - protein, 9 aa, synthetic construct
  REGION 1..9: note = Clathrin heavy chain 1 (74-82)
NPASKVIAL

SEQ ID NO: 4593 - protein, 9 aa, synthetic construct
  REGION 1..9: note = Spermatid perinuclear RNA-binding protein (397-405)
NQIRPGLQY

SEQ ID NO: 4594 - protein, 9 aa, synthetic construct
  REGION 1..9: note = Dystonin (3331-3339)
NQKPPSAEF

SEQ ID NO: 4595 - protein, 9 aa, synthetic construct
  REGION 1..9: note = Microtubule-actin cross-linking factor 1, isoforms 1/2/3/5 (5369-5377)
NQKPPSAEY

SEQ ID NO: 4596 - protein, 9 aa, synthetic construct
  REGION 1..9: note = Cytosolic carboxypeptidase 1 (749-757)
NSDINSNHY

SEQ ID NO: 4597 - protein, 10 aa, synthetic construct
  REGION 1..10: note = DNA repair protein RAD51 homolog 1 (99-108)
NTDHQTQLLY

SEQ ID NO: 4598 - protein, 9 aa, synthetic construct
  REGION 1..9: note = Eukaryotic translation initiation factor 3 subunit C-like protein (462-470)
NTDPHSQEY

SEQ ID NO: 4599 - protein, 10 aa, synthetic construct
  REGION 1..10: note = Methionine aminopeptidase 1 (74-83)
NTDPWAGYRY

SEQ ID NO: 4600 - protein, 9 aa, synthetic construct
  REGION 1..9: note = Tyrosine-protein phosphatase non-receptor type 11 (414-422)
NTERTVWQY

SEQ ID NO: 4601 - protein, 9 aa, synthetic construct
  REGION 1..9: note = Protein UXT (66-74)
NVIERLQEA

SEQ ID NO: 4602 - protein, 9 aa, synthetic construct
  REGION 1..9: note = Nardilysin (107-115)
PSDPKQYRY

SEQ ID NO: 4603 - protein, 11 aa, synthetic construct
  REGION 1..11: note = Mediator of RNA polymerase II transcription subunit 13 (1456-1466)
PTDGDSHAVTY

SEQ ID NO: 4604 - protein, 9 aa, synthetic construct
  REGION 1..9: note = Absent in melanoma 1 protein (1215-1223)
PTDPKVVVY

SEQ ID NO: 4605 - protein, 11 aa, synthetic construct
  REGION 1..11: note = Ubiquitin carboxyl-terminal hydrolase 22 (453-463)
PTDSLNNDNKY

SEQ ID NO: 4606 - protein, 11 aa, synthetic construct
  REGION 1..11: note = ADP-sugar pyrophosphatase (6-16)
PTESSQNGKQY

SEQ ID NO: 4607 - protein, 9 aa, synthetic construct
  REGION 1..9: note = Vimentin (311-319)
QAKQESTEY

SEQ ID NO: 4608 - protein, 11 aa, synthetic construct
  REGION 1..11: note = Nuclear autoantigenic sperm protein (67-77)
QEAASLLGKKY

SEQ ID NO: 4609 - protein, 9 aa, synthetic construct
  REGION 1..9: note = Ras GTPase-activating protein-binding protein 1 (243-251)
QEDLRTFSW

SEQ ID NO: 4610 - protein, 10 aa, synthetic construct
  REGION 1..10: note = Nuclear pore complex protein Nup155 (718-727)
QEFLDRNSQF

SEQ ID NO: 4611 - protein, 9 aa, synthetic construct
  REGION 1..9: note = Cytosolic non-specific dipeptidase (28-36)
QEIPVNVRF

SEQ ID NO: 4612 - protein, 9 aa, synthetic construct
  REGION 1..9: note = Putative ATP-dependent RNA helicase DDX11-like protein 8 (240-248)
QLAQFVHEV

SEQ ID NO: 4613 - protein, 10 aa, synthetic construct
  REGION 1..10: note = Zinc finger protein 550 (19-28)
QLDLAQRTLY

SEQ ID NO: 4614 - protein, 10 aa, synthetic construct
  REGION 1..10: note = Zinc finger protein 674 (24-33)
QLDSAQKNLY

SEQ ID NO: 4615 - protein, 9 aa, synthetic construct
  REGION 1..9: note = Proteasome activator complex subunit 3 (33-41)
QLVDIIEKV

SEQ ID NO: 4616 - protein, 9 aa, synthetic construct
  REGION 1..9: note = Nucleoporin NUP188 homolog (1544-1552)
QQALHTVQY

SEQ ID NO: 4617 - protein, 9 aa, synthetic construct
  REGION 1..9: note = Homocysteine-responsive endoplasmic reticulum-resident ubiquitin-like domain member 1 protein (174-182)
QQIYARQYY

SEQ ID NO: 4618 - protein, 9 aa, synthetic construct
  REGION 1..9: note = Signal recognition particle subunit SRP72 (107-115)
QTDKLKELY

SEQ ID NO: 4619 - protein, 9 aa, synthetic construct
  REGION 1..9: note = Oxysterol-binding protein-related protein 8 (674-682)
QTEATQEKY

SEQ ID NO: 4620 - protein, 9 aa, synthetic construct
  REGION 1..9: note = Probable cation-transporting ATPase 13A3 (131-139)
QTESQQIRY

SEQ ID NO: 4621 - protein, 9 aa, synthetic construct
  REGION 1..9: note = Band 4.1-like protein 2 (42-50)
QTETKTITY

SEQ ID NO: 4622 - protein, 9 aa, synthetic construct
  REGION 1..9: note = 26S proteasome non-ATPase regulatory subunit 13 (164-172)
QTIGNHASY

SEQ ID NO: 4623 - protein, 11 aa, synthetic construct
  REGION 1..11: note = 60S ribosomal protein L28 (23-33)
QTYSTEPNNLK

SEQ ID NO: 4624 - protein, 11 aa, synthetic construct
  REGION 1..11: note = Cytochrome b-c1 complex subunit 9 (34-44)
RAFDQGADAIY

SEQ ID NO: 4625 - protein, 9 aa, synthetic construct
  REGION 1..9: note = Mitotic checkpoint protein BUB3 (186-194)
RAFPNKQGY

SEQ ID NO: 4626 - protein, 10 aa, synthetic construct
  REGION 1..10: note = X-ray repair cross-complementing protein 5 (296-305)
RANPQVGVAF

SEQ ID NO: 4627 - protein, 11 aa, synthetic construct
  REGION 1..11: note = Exocyst complex component 4 (551-561)
READLDFARQY

SEQ ID NO: 4628 - protein, 10 aa, synthetic construct
  REGION 1..10: note = Signal peptidase complex subunit 2 (185-194)
REAEFTKSIA

SEQ ID NO: 4629 - protein, 9 aa, synthetic construct
  REGION 1..9: note = Patatin-like phospholipase domain-containing protein 2 (30-38)
REHAPFLVA

SEQ ID NO: 4630 - protein, 8 aa, synthetic construct
  REGION 1..8: note = Tubulin beta-4A chain (2-9)
REIVHLQA

SEQ ID NO: 4631 - protein, 9 aa, synthetic construct
  REGION 1..9: note = ATP-binding cassette sub-family F member 3 (425-433)
REYEAQQQY

SEQ ID NO: 4632 - protein, 9 aa, synthetic construct
  REGION 1..9: note = Pre-mRNA-splicing factor ATP-dependent RNA helicase DHX15 (399-407)
RIFEPPPPK

SEQ ID NO: 4633 - protein, 10 aa, synthetic construct
  REGION 1..10: note = Actin-related protein 2/3 complex subunit 2 (9-18)
RIIEETLALK

SEQ ID NO: 4634 - protein, 9 aa, synthetic construct
  REGION 1..9: note = Protein FAM60A (102-110)
RIKSNQISK

SEQ ID NO: 4635 - protein, 10 aa, synthetic construct
  REGION 1..10: note = Chromobox protein homolog 6 (91-100)
RISDVHFSVK

SEQ ID NO: 4636 - protein, 10 aa, synthetic construct
  REGION 1..10: note = Splicing factor 3B subunit 1 (276-285)
RIYNDDKNTY

SEQ ID NO: 4637 - protein, 9 aa, synthetic construct
  REGION 1..9: note = FAS-associated factor 2 (75-83)
RIYSYVVSR

SEQ ID NO: 4638 - protein, 9 aa, synthetic construct
  REGION 1..9: note = 26S proteasome non-ATPase regulatory subunit 3 (107-115)
RLNHYVLYK

SEQ ID NO: 4639 - protein, 11 aa, synthetic construct
  REGION 1..11: note = Cell division cycle protein 27 homolog (214-224)
RLNLESSNSKY

SEQ ID NO: 4640 - protein, 10 aa, synthetic construct
  REGION 1..10: note = Histone deacetylase 9 (670-679)
RLQETGLLNK

SEQ ID NO: 4641 - protein, 11 aa, synthetic construct
  REGION 1..11: note = F-box only protein 5 (140-150)
RLYEDSGYSSF

SEQ ID NO: 4642 - protein, 10 aa, synthetic construct
  REGION 1..10: note = ATP-binding cassette sub-family D member 1 (172-181)
RLYFSQQTYY

SEQ ID NO: 4643 - protein, 10 aa, synthetic construct
  REGION 1..10: note = V-type proton ATPase subunit d 1 (169-178)
RLYPEGLAQL

SEQ ID NO: 4644 - protein, 9 aa, synthetic construct
  REGION 1..9: note = Vimentin (13-21)
RMFGGPGTA

SEQ ID NO: 4645 - protein, 11 aa, synthetic construct
  REGION 1..11: note = Enhancer of rudimentary homolog (42-52)
RMNPNSPSITY

SEQ ID NO: 4646 - protein, 10 aa, synthetic construct
  REGION 1..10: note = ATP synthase subunit epsilon-like protein, mitochondrial (6-15)
RQAGLSYIRY

SEQ ID NO: 4647 - protein, 9 aa, synthetic construct
  REGION 1..9: note = Polyadenylate-binding protein 1 (374-382)
RQAHLTNQY

SEQ ID NO: 4648 - protein, 10 aa, synthetic construct
  REGION 1..10: note = Vimentin (310-319)
RQAKQESTEY

SEQ ID NO: 4649 - protein, 9 aa, synthetic construct
  REGION 1..9: note = Caprin-1 (297-305)
RQFMAETQF

SEQ ID NO: 4650 - protein, 10 aa, synthetic construct
  REGION 1..10: note = Splicing factor 3B subunit 1 (517-526)
RQITDKAREF

SEQ ID NO: 4651 - protein, 9 aa, synthetic construct
  REGION 1..9: note = Protein OS-9 (639-647)
RQKELESNY

SEQ ID NO: 4652 - protein, 10 aa, synthetic construct
  REGION 1..10: note = Interferon-induced, double-stranded RNA-activated protein kinase (18-27)
RQKQGVVLKY

SEQ ID NO: 4653 - protein, 10 aa, synthetic construct
  REGION 1..10: note = Alpha-taxilin (77-86)
RQLEDILSTY

SEQ ID NO: 4654 - protein, 11 aa, synthetic construct
  REGION 1..11: note = Prelamin-A/C (390-400)
RQNGDDPLLTY

SEQ ID NO: 4655 - protein, 11 aa, synthetic construct
  REGION 1..11: note = Spectrin beta chain, non-erythrocytic 1 (1161-1171)
RQNLLSQSHAY

SEQ ID NO: 4656 - protein, 10 aa, synthetic construct
  REGION 1..10: note = Tetratricopeptide repeat protein 9C (19-28)
RQPDNAKALY

SEQ ID NO: 4657 - protein, 9 aa, synthetic construct
  REGION 1..9: note = Eukaryotic translation initiation factor 3 subunit C (905-913)
RQQQSQTAY

SEQ ID NO: 4658 - protein, 11 aa, synthetic construct
  REGION 1..11: note = ATP-dependent RNA helicase DDX3X (603-613)
RQSSGASSSSF

SEQ ID NO: 4659 - protein, 9 aa, synthetic construct
  REGION 1..9: note = 40S ribosomal protein S29 (44-52)
RQYAKDIGF

SEQ ID NO: 4660 - protein, 11 aa, synthetic construct
  REGION 1..11: note = Transmembrane emp24 domain-containing protein 4 (33-43)
RQYGSEGRFTF

SEQ ID NO: 4661 - protein, 9 aa, synthetic construct
  REGION 1..9: note = Non-receptor tyrosine-protein kinase TYK2 (521-529)
RSFPSVREL

SEQ ID NO: 4662 - protein, 9 aa, synthetic construct
  REGION 1..9: note = E3 ubiquitin-protein ligase AMFR (229-237)
RTAHVILRY

SEQ ID NO: 4663 - protein, 9 aa, synthetic construct
  REGION 1..9: note = Proteasome subunit alpha type-2 (113-121)
RVASVMQEY

SEQ ID NO: 4664 - protein, 10 aa, synthetic construct
  REGION 1..10: note = Calmodulin (91-100)
RVFDKDGNGY

SEQ ID NO: 4665 - protein, 10 aa, synthetic construct
  REGION 1..10: note = Nucleolysin TIA-1 isoform p40 (244-253)
RVFPDKGYSF

SEQ ID NO: 4666 - protein, 10 aa, synthetic construct
  REGION 1..10: note = Nucleolysin TIAR (213-222)
RVFPEKGYSF

SEQ ID NO: 4667 - protein, 10 aa, synthetic construct
  REGION 1..10: note = Kinesin-like protein KIF20A (466-475)
RVFQGFFTGR

SEQ ID NO: 4668 - protein, 11 aa, synthetic construct
  REGION 1..11: note = Fatty acid synthase (1694-1704)
RVFTTVGSAEK

SEQ ID NO: 4669 - protein, 11 aa, synthetic construct
  REGION 1..11: note = Non-specific lipid-transfer protein (13-23)
RVFVVGVGMTK

SEQ ID NO: 4670 - protein, 11 aa, synthetic construct
  REGION 1..11: note = 26S protease regulatory subunit 7 (239-249)
RVIGSELVQKY

SEQ ID NO: 4671 - protein, 10 aa, synthetic construct
  REGION 1..10: note = Ectonucleoside triphosphate diphosphohydrolase 1 (97-106)
RVKGPGISKF

SEQ ID NO: 4672 - protein, 9 aa, synthetic construct
  REGION 1..9: note = FACT complex subunit SSRP1 (316-324)
RVMKALVNR

SEQ ID NO: 4673 - protein, 9 aa, synthetic construct
  REGION 1..9: note = DNA replication licensing factor MCM4 (387-395)
RVNVTGIYR

SEQ ID NO: 4674 - protein, 9 aa, synthetic construct
  REGION 1..9: note = Double-stranded RNA-binding protein Staufen homolog 1 (457-465)
RVQGFQVEY

SEQ ID NO: 4675 - protein, 9 aa, synthetic construct
  REGION 1..9: note = Serine/threonine-protein phosphatase 6 regulatory subunit 3 (45-53)
RVSDINFTL

SEQ ID NO: 4676 - protein, 10 aa, synthetic construct
  REGION 1..10: note = SUMO-specific isopeptidase USPL1 (717-726)
RVTSQVSNLK

SEQ ID NO: 4677 - protein, 9 aa, synthetic construct
  REGION 1..9: note = 5'-nucleotidase domain-containing protein 1 (141-149)
RVVDYLTKL

SEQ ID NO: 4678 - protein, 9 aa, synthetic construct
  REGION 1..9: note = Serine/arginine-rich splicing factor 6 (3-11)
RVYIGRLSY

SEQ ID NO: 4679 - protein, 9 aa, synthetic construct
  REGION 1..9: note = Serine/threonine-protein kinase SMG1 (36-44)
SADPDNLKY

SEQ ID NO: 4680 - protein, 9 aa, synthetic construct
  REGION 1..9: note = Serine/threonine-protein kinase 17A (293-301)
SAVDFIRTL

SEQ ID NO: 4681 - protein, 10 aa, synthetic construct
  REGION 1..10: note = A-kinase anchor protein 2 (685-694)
SEAAELRSTA

SEQ ID NO: 4682 - protein, 9 aa, synthetic construct
  REGION 1..9: note = Zinc finger protein Rlf (1399-1407)
SEAGSAARF

SEQ ID NO: 4683 - protein, 9 aa, synthetic construct
  REGION 1..9: note = Histone-lysine N-methyltransferase SETD2 (461-469)
SEEEYKKTY

SEQ ID NO: 4684 - protein, 9 aa, synthetic construct
  REGION 1..9: note = U5 small nuclear ribonucleoprotein 200 kDa helicase (1010-1018)
SEIELFRVF

SEQ ID NO: 4685 - protein, 10 aa, synthetic construct
  REGION 1..10: note = Nesprin-2 (320-329)
SENDTYFKKY

SEQ ID NO: 4686 - protein, 10 aa, synthetic construct
  REGION 1..10: note = Uncharacterized protein C14orf119 (121-130)
SEPDFVAKFY

SEQ ID NO: 4687 - protein, 11 aa, synthetic construct
  REGION 1..11: note = Fructose-bisphosphate aldolase A (408-418)
SESLFVSNHAY

SEQ ID NO: 4688 - protein, 9 aa, synthetic construct
  REGION 1..9: note = Cyclin-G-associated kinase (305-313)
SIAEVVHQL

SEQ ID NO: 4689 - protein, 9 aa, synthetic construct
  REGION 1..9: note = 26S proteasome non-ATPase regulatory subunit 3 (418-426)
SLADIAQKL

SEQ ID NO: 4690 - protein, 10 aa, synthetic construct
  REGION 1..10: note = Peroxisomal membrane protein 2 (66-75)
SLDVGGPLRY

SEQ ID NO: 4691 - protein, 9 aa, synthetic construct
  REGION 1..9: note = Nucleoporin GLE1 (288-296)
SLISGIIRA

SEQ ID NO: 4692 - protein, 9 aa, synthetic construct
  REGION 1..9: note = Nucleolar protein 7 (197-205)
SLYGPGTNR

SEQ ID NO: 4693 - protein, 9 aa, synthetic construct
  REGION 1..9: note = Nuclear pore complex protein Nup93 (787-795)
SQARTLITF

SEQ ID NO: 4694 - protein, 9 aa, synthetic construct
  REGION 1..9: note = 60S ribosomal export protein NMD3 (228-236)
SQDIHSNTY

SEQ ID NO: 4695 - protein, 9 aa, synthetic construct
  REGION 1..9: note = 14 kDa phosphohistidine phosphatase (83-91)
SQDKKIHVY

SEQ ID NO: 4696 - protein, 9 aa, synthetic construct
  REGION 1..9: note = MKI67 FHA domain-interacting nucleolar phosphoprotein (66-74)
SQFGTVTRF

SEQ ID NO: 4697 - protein, 10 aa, synthetic construct
  REGION 1..10: note = Kinesin-associated protein 3 (208-217)
SQFHGLITHY

SEQ ID NO: 4698 - protein, 9 aa, synthetic construct
  REGION 1..9: note = Heterogeneous nuclear ribonucleoprotein U (697-705)
SQHYHQGYY

SEQ ID NO: 4699 - protein, 11 aa, synthetic construct
  REGION 1..11: note = U4/U6 small nuclear ribonucleoprotein Prp4 (224-234)
SQIGDDRPISY

SEQ ID NO: 4700 - protein, 9 aa, synthetic construct
  REGION 1..9: note = DCN1-like protein 1 (7-15)
SQKDKVRQF

SEQ ID NO: 4701 - protein, 9 aa, synthetic construct
  REGION 1..9: note = General transcription factor 3C polypeptide 1 (1442-1450)
SQMKSYQSF

SEQ ID NO: 4702 - protein, 9 aa, synthetic construct
  REGION 1..9: note = Transmembrane emp24 domain-containing protein 3 (196-204)
SQVLLLKSF

SEQ ID NO: 4703 - protein, 9 aa, synthetic construct
  REGION 1..9: note = E3 ubiquitin-protein ligase MARCH7 (122-130)
SQVPRSSSM

SEQ ID NO: 4704 - protein, 9 aa, synthetic construct
  REGION 1..9: note = Midasin (130-138)
SSDANPVRY

SEQ ID NO: 4705 - protein, 9 aa, synthetic construct
  REGION 1..9: note = Arf-GAP with coiled-coil, ANK repeat and PH domain-containing protein 2 (251-259)
SSDDSKLEY

SEQ ID NO: 4706 - protein, 10 aa, synthetic construct
  REGION 1..10: note = Zinc finger protein 330 (258-267)
SSDKYGDTSY

SEQ ID NO: 4707 - protein, 10 aa, synthetic construct
  REGION 1..10: note = Protein FAM208B (1580-1589)
SSDNATLTHY

SEQ ID NO: 4708 - protein, 9 aa, synthetic construct
  REGION 1..9: note = Heat shock 70 kDa protein 14 (75-83)
SSDPQAQKY

SEQ ID NO: 4709 - protein, 9 aa, synthetic construct
  REGION 1..9: note = Spectrin beta chain, non-erythrocytic 1 (769-777)
SSDVGHDEY

SEQ ID NO: 4710 - protein, 9 aa, synthetic construct
  REGION 1..9: note = Signal transducer and activator of transcription 3 (613-621)
SSKEGGVTF

SEQ ID NO: 4711 - protein, 10 aa, synthetic construct
  REGION 1..10: note = COP9 signalosome complex subunit 6 (241-250)
STDKFKTDFY

SEQ ID NO: 4712 - protein, 9 aa, synthetic construct
  REGION 1..9: note = Axin-1 (71-79)
STDPRPASY

SEQ ID NO: 4713 - protein, 11 aa, synthetic construct
  REGION 1..11: note = Proteasome subunit beta type-8 (261-271)
STDVSDLLHQY

SEQ ID NO: 4714 - protein, 9 aa, synthetic construct
  REGION 1..9: note = Dedicator of cytokinesis protein 11 (109-117)
STDWHVVNY

SEQ ID NO: 4715 - protein, 9 aa, synthetic construct
  REGION 1..9: note = Mitochondrial Rho GTPase 2 (298-306)
STELNHLGY

SEQ ID NO: 4716 - protein, 9 aa, synthetic construct
  REGION 1..9: note = Cirhin (419-427)
STVSRFFLY

SEQ ID NO: 4717 - protein, 9 aa, synthetic construct
  REGION 1..9: note = Cysteine-rich PDZ-binding protein (64-72)
SVHQPGSHY

SEQ ID NO: 4718 - protein, 11 aa, synthetic construct
  REGION 1..11: note = Exosome complex exonuclease RRP44 (580-590)
SVINSKASLTY

SEQ ID NO: 4719 - protein, 9 aa, synthetic construct
  REGION 1..9: note = Collagen type IV alpha-3-binding protein (484-492)
SVIRKIPAL

SEQ ID NO: 4720 - protein, 9 aa, synthetic construct
  REGION 1..9: note = Vigilin (74-82)
SVITQVFHV

SEQ ID NO: 4721 - protein, 9 aa, synthetic construct
  REGION 1..9: note = WD repeat-containing protein 1 (458-466)
SVKEWTITY

SEQ ID NO: 4722 - protein, 9 aa, synthetic construct
  REGION 1..9: note = Cytoplasmic FMR1-interacting protein 1 (214-222)
SVKNDHSAY

SEQ ID NO: 4723 - protein, 9 aa, synthetic construct
  REGION 1..9: note = Ribosomal biogenesis protein LAS1L (538-546)
SVKPASSSF

SEQ ID NO: 4724 - protein, 10 aa, synthetic construct
  REGION 1..10: note = Eukaryotic translation initiation factor 3 subunit I (39-48)
SVNGERLGTY

SEQ ID NO: 4725 - protein, 11 aa, synthetic construct
  REGION 1..11: note = Bone morphogenetic protein receptor type-2 (815-825)
SVNSHAATTQY

SEQ ID NO: 4726 - protein, 9 aa, synthetic construct
  REGION 1..9: note = Epidermal growth factor receptor substrate 15 (746-754)
SVSNVVITK

SEQ ID NO: 4727 - protein, 11 aa, synthetic construct
  REGION 1..11: note = E3 ubiquitin-protein ligase Topors (191-201)
SVYSPSGPVNR

SEQ ID NO: 4728 - protein, 11 aa, synthetic construct
  REGION 1..11: note = Tubulin beta chain (48-58)
SVYYNEATGGK

SEQ ID NO: 4729 - protein, 9 aa, synthetic construct
  REGION 1..9: note = Cohesin subunit SA-2 (881-889)
TAADIFKQY

SEQ ID NO: 4730 - protein, 9 aa, synthetic construct
  REGION 1..9: note = Phosphatidylinositol 3,4,5-trisphosphate-dependent Rac exchanger 1 protein (345-353)
TADYHSNGY

SEQ ID NO: 4731 - protein, 9 aa, synthetic construct
  REGION 1..9: note = Phospholipid-transporting ATPase IG (35-43)
TEAYIAQRF

SEQ ID NO: 4732 - protein, 10 aa, synthetic construct
  REGION 1..10: note = RNMT-activating mini protein (20-29)
TENDKEYQEY

SEQ ID NO: 4733 - protein, 9 aa, synthetic construct
  REGION 1..9: note = Vacuolar protein sorting-associated protein 26A (225-233)
TETETIAKY

SEQ ID NO: 4734 - protein, 9 aa, synthetic construct
  REGION 1..9: note = Ribosomal RNA processing protein 1 homolog B (77-85)
TIAQLVHAV

SEQ ID NO: 4735 - protein, 9 aa, synthetic construct
  REGION 1..9: note = Heterogeneous nuclear ribonucleoproteins A2/B1 (164-172)
TINGHNAEV

SEQ ID NO: 4736 - protein, 9 aa, synthetic construct
  REGION 1..9: note = Transformation/transcription domain-associated protein (378-386)
TLADLVHHV

SEQ ID NO: 4737 - protein, 10 aa, synthetic construct
  REGION 1..10: note = Syntaxin-binding protein 3 (187-196)
TLDENPGVRY

SEQ ID NO: 4738 - protein, 9 aa, synthetic construct
  REGION 1..9: note = Centrosomal protein CEP57L1 (127-135)
TLLEKQLEY

SEQ ID NO: 4739 - protein, 11 aa, synthetic construct
  REGION 1..11: note = Pleckstrin homology domain-containing family B member 2 (103-113)
TLQDSRTNTAY

SEQ ID NO: 4740 - protein, 9 aa, synthetic construct
  REGION 1..9: note = Zinc finger protein 706 (46-54)
TQMPDPKTF

SEQ ID NO: 4741 - protein, 9 aa, synthetic construct
  REGION 1..9: note = SWI/SNF-related matrix-associated actin-dependent regulator of chromatin subfamily D member 2 (452-460)
TQRDFMLSF

SEQ ID NO: 4742 - protein, 9 aa, synthetic construct
  REGION 1..9: note = V-type proton ATPase subunit E 2 (48-56)
TQRLKIMEY

SEQ ID NO: 4743 - protein, 9 aa, synthetic construct
  REGION 1..9: note = DNA replication licensing factor MCM7 (654-662)
TQRPADVIF

SEQ ID NO: 4744 - protein, 10 aa, synthetic construct
  REGION 1..10: note = 40S ribosomal protein S13 (18-27)
TSDDVKEQIY

SEQ ID NO: 4745 - protein, 9 aa, synthetic construct
  REGION 1..9: note = Cation-independent mannose-6-phosphate receptor (877-885)
TSDGRQTTY

SEQ ID NO: 4746 - protein, 11 aa, synthetic construct
  REGION 1..11: note = Bifunctional glutamate/proline-tRNA ligase (269-279)
TSDHFETIMKY

SEQ ID NO: 4747 - protein, 10 aa, synthetic construct
  REGION 1..10: note = Nucleoporin Nup37 (108-117)
TSDLQDKNEY

SEQ ID NO: 4748 - protein, 11 aa, synthetic construct
  REGION 1..11: note = RNA polymerase II elongation factor ELL (458-468)
TSETPDYLLKY

SEQ ID NO: 4749 - protein, 11 aa, synthetic construct
  REGION 1..11: note = Heterogeneous nuclear ribonucleoprotein F (256-266)
TTDLFGRDLSY

SEQ ID NO: 4750 - protein, 9 aa, synthetic construct
  REGION 1..9: note = Tetratricopeptide repeat protein 13 (710-718)
TTEERTQLY

SEQ ID NO: 4751 - protein, 10 aa, synthetic construct
  REGION 1..10: note = Heterogeneous nuclear ribonucleoproteins A2/B1 (20-29)
TTEESLRNYY

SEQ ID NO: 4752 - protein, 9 aa, synthetic construct
  REGION 1..9: note = Tapasin (372-380)
TTEQHGARY

SEQ ID NO: 4753 - protein, 10 aa, synthetic construct
  REGION 1..10: note = Condensin-2 complex subunit D3 (675-684)
TTESQELSRY

SEQ ID NO: 4754 - protein, 9 aa, synthetic construct
  REGION 1..9: note = Endoplasmic reticulum-Golgi intermediate compartment protein 3 (40-48)
TTEVHPELY

SEQ ID NO: 4755 - protein, 9 aa, synthetic construct
  REGION 1..9: note = Coatomer subunit gamma-1 (759-767)
TVADHIQKV

SEQ ID NO: 4756 - protein, 9 aa, synthetic construct
  REGION 1..9: note = Threonine-tRNA ligase, cytoplasmic (150-158)
TVIAKVNNV

SEQ ID NO: 4757 - protein, 9 aa, synthetic construct
  REGION 1..9: note = Transmembrane emp24 domain-containing protein 3 (153-161)
TVIDSQTHY

SEQ ID NO: 4758 - protein, 10 aa, synthetic construct
  REGION 1..10: note = Importin subunit alpha-5 (433-442)
TVMDSKIVQV

SEQ ID NO: 4759 - protein, 9 aa, synthetic construct
  REGION 1..9: note = Sodium/potassium-transporting ATPase subunit alpha-3 (268-276)
TVMGRIATL

SEQ ID NO: 4760 - protein, 9 aa, synthetic construct
  REGION 1..9: note = Band 4.1-like protein 2 (777-785)
VEEEPRPAA

SEQ ID NO: 4761 - protein, 9 aa, synthetic construct
  REGION 1..9: note = 26S protease regulatory subunit 4 (176-184)
VEKAPQETY

SEQ ID NO: 4762 - protein, 9 aa, synthetic construct
  REGION 1..9: note = Choline/ethanolaminephosphotransferase 1 (268-276)
VIFTGGVGK

SEQ ID NO: 4763 - protein, 9 aa, synthetic construct
  REGION 1..9: note = 28S ribosomal protein S17, mitochondrial (34-42)
VLDPYLLKY

SEQ ID NO: 4764 - protein, 10 aa, synthetic construct
  REGION 1..10: note = Protein Niban (367-376)
VLFEKEVNEV

SEQ ID NO: 4765 - protein, 9 aa, synthetic construct
  REGION 1..9: note = Caprin-1 (232-240)
VLKEIVERV

SEQ ID NO: 4766 - protein, 9 aa, synthetic construct
  REGION 1..9: note = Ribonucleoside-diphosphate reductase large subunit (245-253)
VLKEKIAKY

SEQ ID NO: 4767 - protein, 11 aa, synthetic construct
  REGION 1..11: note = Histone H4 (22-32)
VLRDNIQGITK

SEQ ID NO: 4768 - protein, 9 aa, synthetic construct
  REGION 1..9: note = Cytoplasmic dynein 1 heavy chain 1 (3839-3847)
VLYENPNLK

SEQ ID NO: 4769 - protein, 9 aa, synthetic construct
  REGION 1..9: note = Ubiquitin carboxyl-terminal hydrolase 7 (195-203)
VQADAPHGV

SEQ ID NO: 4770 - protein, 10 aa, synthetic construct
  REGION 1..10: note = E3 ubiquitin-protein ligase RNF19A (143-152)
VQADVQKERY

SEQ ID NO: 4771 - protein, 9 aa, synthetic construct
  REGION 1..9: note = Interleukin enhancer-binding factor 2 (97-105)
VQIEEVRQV

SEQ ID NO: 4772 - protein, 11 aa, synthetic construct
  REGION 1..11: note = Proteasome subunit alpha type-2 (102-112)
VQRVASVMQEY

SEQ ID NO: 4773 - protein, 9 aa, synthetic construct
  REGION 1..9: note = Transitional endoplasmic reticulum ATPase (747-755)
VSDNDIRKY

SEQ ID NO: 4774 - protein, 9 aa, synthetic construct
  REGION 1..9: note = Nuclear factor NF-kappa-B p100 subunit (317-325)
VSDSKQFTY

SEQ ID NO: 4775 - protein, 10 aa, synthetic construct
  REGION 1..10: note = Nuclear factor NF-kappa-B p100 subunit (317-326)
VSDSKQFTYY

SEQ ID NO: 4776 - protein, 11 aa, synthetic construct
  REGION 1..11: note = Phospholipase D2 (65-75)
VTAQVVGTERY

SEQ ID NO: 4777 - protein, 9 aa, synthetic construct
  REGION 1..9: note = Acidic fibroblast growth factor intracellular-binding protein (29-37)
VTDAVALRV

SEQ ID NO: 4778 - protein, 10 aa, synthetic construct
  REGION 1..10: note = Alanine-tRNA ligase, cytoplasmic (480-489)
VTDDSPKYNY

SEQ ID NO: 4779 - protein, 11 aa, synthetic construct
  REGION 1..11: note = Histone-lysine N-methyltransferase 2C (1500-1510)
VTDGAILGKLY

SEQ ID NO: 4780 - protein, 10 aa, synthetic construct
  REGION 1..10: note = Attractin (145-154)
VTDGPGNYKY

SEQ ID NO: 4781 - protein, 10 aa, synthetic construct
  REGION 1..10: note = Proteasome-associated protein ECM29 homolog (1150-1159)
VTDKSMVDKY

SEQ ID NO: 4782 - protein, 10 aa, synthetic construct
  REGION 1..10: note = Histone-lysine N-methyltransferase, H3 lysine-79 specific (77-86)
VTDPEKLNNY

SEQ ID NO: 4783 - protein, 9 aa, synthetic construct
  REGION 1..9: note = Dynamin-1-like protein (55-63)
VTDSIRDEY

SEQ ID NO: 4784 - protein, 10 aa, synthetic construct
  REGION 1..10: note = Pyridine nucleotide-disulfide oxidoreductase domain-containing protein 1 (98-107)
VTEDGNQHVY

SEQ ID NO: 4785 - protein, 9 aa, synthetic construct
  REGION 1..9: note = Filamin-A (2353-2361)
VTEIDQDKY

SEQ ID NO: 4786 - protein, 11 aa, synthetic construct
  REGION 1..11: note = Staphylococcal nuclease domain-containing protein 1 (687-697)
VTEITDDLHFY

SEQ ID NO: 4787 - protein, 9 aa, synthetic construct
  REGION 1..9: note = E3 ubiquitin-protein ligase RNF213 (4915-4923)
VTELHVISY

SEQ ID NO: 4788 - protein, 9 aa, synthetic construct
  REGION 1..9: note = Eukaryotic translation initiation factor 3 subunit C-like protein (23-31)
VTKPVGGNY

SEQ ID NO: 4789 - protein, 10 aa, synthetic construct
  REGION 1..10: note = Heterogeneous nuclear ribonucleoprotein U (696-705)
WSQHYHQGYY

SEQ ID NO: 4790 - protein, 10 aa, synthetic construct
  REGION 1..10: note = Chromodomain-helicase-DNA-binding protein 7 (859-868)
WTDILSHGRY

SEQ ID NO: 4791 - protein, 9 aa, synthetic construct
  REGION 1..9: note = Polypyrimidine tract-binding protein 3 (269-277)
YADPVNAHY

SEQ ID NO: 4792 - protein, 9 aa, synthetic construct
  REGION 1..9: note = HLA class I histocompatibility antigen, B-15 alpha chain (140-148)
YAYDGKDYI

SEQ ID NO: 4793 - protein, 11 aa, synthetic construct
  REGION 1..11: note = HLA class I histocompatibility antigen, B-52 alpha chain (140-150)
YAYDGKDYIAL

SEQ ID NO: 4794 - protein, 9 aa, synthetic construct
  REGION 1..9: note = Cell division cycle-associated 7-like protein (433-441)
YGYDNVKEY

SEQ ID NO: 4795 - protein, 11 aa, synthetic construct
  REGION 1..11: note = Mediator of RNA polymerase II transcription subunit 10 (70-80)
YIDQGRNPQLY

SEQ ID NO: 4796 - protein, 9 aa, synthetic construct
  REGION 1..9: note = Septin-7 (132-140)
YIDSKFEDY

SEQ ID NO: 4797 - protein, 9 aa, synthetic construct
  REGION 1..9: note = Hypoxia-inducible factor 1-alpha (111-119)
YISDNVNKY

SEQ ID NO: 4798 - protein, 10 aa, synthetic construct
  REGION 1..10: note = Ubiquitin carboxyl-terminal hydrolase 22 (118-127)
YIYDKDMEII

SEQ ID NO: 4799 - protein, 10 aa, synthetic construct
  REGION 1..10: note = Metastasis-associated protein MTA3 (123-132)
YLDKEDTFFY

SEQ ID NO: 4800 - protein, 9 aa, synthetic construct
  REGION 1..9: note = Oxysterol-binding protein-related protein 3 (75-83)
YLDKGILKY

SEQ ID NO: 4801 - protein, 10 aa, synthetic construct
  REGION 1..10: note = tRNA (adenine(58)-N(1))-methyltransferase non-catalytic subunit TRM6 (53-62)
YLDNVIGHSY

SEQ ID NO: 4802 - protein, 9 aa, synthetic construct
  REGION 1..9: note = Nucleolar complex protein 4 homolog (174-182)
YLDYDDTRY

SEQ ID NO: 4803 - protein, 9 aa, synthetic construct
  REGION 1..9: note = Signal transducer and activator of transcription 3 (14-22)
YLEQLHQLY

SEQ ID NO: 4804 - protein, 9 aa, synthetic construct
  REGION 1..9: note = Dystonin (981-989)
YLINEIDRI

SEQ ID NO: 4805 - protein, 9 aa, synthetic construct
  REGION 1..9: note = Geminin (150-158)
YMAELIERL

SEQ ID NO: 4806 - protein, 9 aa, synthetic construct
  REGION 1..9: note = Thymidylate synthase (235-243)
YMIAHITGL

SEQ ID NO: 4807 - protein, 11 aa, synthetic construct
  REGION 1..11: note = Chromodomain-helicase-DNA-binding protein 1-like (712-722)
YQDPDATSLKY

SEQ ID NO: 4808 - protein, 9 aa, synthetic construct
  REGION 1..9: note = Up-regulated during skeletal muscle growth protein 5 (10-18)
YQFTGIKKY

SEQ ID NO: 4809 - protein, 9 aa, synthetic construct
  REGION 1..9: note = Integrator complex subunit 3 (156-164)
YQKQPKIGY

SEQ ID NO: 4810 - protein, 9 aa, synthetic construct
  REGION 1..9: note = Pre-mRNA-processing-splicing factor 8 (2326-2334)
YSADREDLY

SEQ ID NO: 4811 - protein, 9 aa, synthetic construct
  REGION 1..9: note = Mitogen-activated protein kinase 6 (427-435)
YSDHHENKY

SEQ ID NO: 4812 - protein, 10 aa, synthetic construct
  REGION 1..10: note = RNA binding motif protein, X-linked-like-1 (272-281)
YSDHPSGGSY

SEQ ID NO: 4813 - protein, 10 aa, synthetic construct
  REGION 1..10: note = Cyclin-dependent kinases regulatory subunit 2 (8-17)
YSDKYFDEHY

SEQ ID NO: 4814 - protein, 9 aa, synthetic construct
  REGION 1..9: note = Serine/threonine-protein kinase PLK1 (417-425)
YSDKYGLGY

SEQ ID NO: 4815 - protein, 9 aa, synthetic construct
  REGION 1..9: note = Glycoprotein endo-alpha-1,2-mannosidase-like protein (102-110)
YSDLHAFYY

SEQ ID NO: 4816 - protein, 10 aa, synthetic construct
  REGION 1..10: note = Cold-inducible RNA-binding protein (151-160)
YSDRSSGGSY

SEQ ID NO: 4817 - protein, 10 aa, synthetic construct
  REGION 1..10: note = DNA mismatch repair protein Msh6 (469-478)
YSDSLVQKGY

SEQ ID NO: 4818 - protein, 10 aa, synthetic construct
  REGION 1..10: note = Serine hydroxymethyltransferase, cytosolic (73-82)
YSEGYPGQRY

SEQ ID NO: 4819 - protein, 11 aa, synthetic construct
  REGION 1..11: note = Store-operated calcium entry-associated regulatory factor (204-214)
YSEYPPFSHRY

SEQ ID NO: 4820 - protein, 11 aa, synthetic construct
  REGION 1..11: note = FACT complex subunit SPT16 (18-28)
YSNWRKGEDEY

SEQ ID NO: 4821 - protein, 9 aa, synthetic construct
  REGION 1..9: note = Histone-lysine N-methyltransferase EZH1 (729-737)
YSQADALKY

SEQ ID NO: 4822 - protein, 9 aa, synthetic construct
  REGION 1..9: note = RNA binding motif protein, X-linked-like-1 (327-335)
YSSSRSDLY

SEQ ID NO: 4823 - protein, 11 aa, synthetic construct
  REGION 1..11: note = Eukaryotic translation initiation factor 3 subunit I (38-48)
YSVNGERLGTY

SEQ ID NO: 4824 - protein, 11 aa, synthetic construct
  REGION 1..11: note = Trafficking protein particle complex subunit 4 (75-85)
YTADGKEVLEY

SEQ ID NO: 4825 - protein, 8 aa, synthetic construct
  REGION 1..8: note = DnaJ homolog subfamily C member 3 (284-291)
YTDATSKY

SEQ ID NO: 4826 - protein, 9 aa, synthetic construct
  REGION 1..9: note = Meckelin (401-409)
YTDENQHQY

SEQ ID NO: 4827 - protein, 10 aa, synthetic construct
  REGION 1..10: note = Serine/threonine-protein kinase pim-2 (194-203)
YTDFDGTRVY

SEQ ID NO: 4828 - protein, 10 aa, synthetic construct
  REGION 1..10: note = RNA-binding protein 7 (219-228)
YTDHGSDHHY

SEQ ID NO: 4829 - protein, 11 aa, synthetic construct
  REGION 1..11: note = Glutathione S-transferase Mu 2 (23-33)
YTDSSYEEKKY

SEQ ID NO: 4830 - protein, 10 aa, synthetic construct
  REGION 1..10: note = Protein patched homolog 1 (564-573)
YTDTHDNTRY

SEQ ID NO: 4831 - protein, 11 aa, synthetic construct
  REGION 1..11: note = ARF GTPase-activating protein GIT2 (492-502)
YTDTSNHSSLK

SEQ ID NO: 4832 - protein, 8 aa, synthetic construct
  REGION 1..8: note = Thioredoxin-related transmembrane protein 2 (199-206)
YTDVSTRY

SEQ ID NO: 4833 - protein, 10 aa, synthetic construct
  REGION 1..10: note = Zinc finger CCCH domain-containing protein 18 (65-74)
YTETEPYHNY

SEQ ID NO: 4834 - protein, 9 aa, synthetic construct
  REGION 1..9: note = Probable ATP-dependent RNA helicase DDX47 (236-244)
YYIFIPSKF

SEQ ID NO: 4835 - protein, 9 aa, synthetic construct
  REGION 1..9: note = ORM1-like protein 2 (59-67)
ATYVFLHTV

SEQ ID NO: 4836 - protein, 9 aa, synthetic construct
  REGION 1..9: note = Eukaryotic translation initiation factor 2 subunit 3 (202-210)
EQYEQILAF

SEQ ID NO: 4837 - protein, 9 aa, synthetic construct
  REGION 1..9: note = Tapasin (354-362)
HHSDGSVSL

SEQ ID NO: 4838 - protein, 9 aa, synthetic construct
  REGION 1..9: note = Cyclin-dependent kinases regulatory subunit 2 (59-67)
IHEPEPHIL

SEQ ID NO: 4839 - protein, 9 aa, synthetic construct
  REGION 1..9: note = Prelamin-A/C (341-349)
KAGQVVTIW

SEQ ID NO: 4840 - protein, 9 aa, synthetic construct
  REGION 1..9: note = AP-1 complex subunit beta-1 (249-257)
SHANSAVVL

SEQ ID NO: 4841 - protein, 9 aa, synthetic construct
  REGION 1..9: note = Proliferating cell nuclear antigen (152-160)
SHIGDAVVI

SEQ ID NO: 4842 - protein, 9 aa, synthetic construct
  REGION 1..9: note = Ubiquitin-60S ribosomal protein L40 (70-78)
STLHLVLRL

SEQ ID NO: 4843 - protein, 10 aa, synthetic construct
  REGION 1..10: note = HLA class I histocompatibility antigen, B-15 alpha chain (162-171)
TAAQITQRKW

SEQ ID NO: 4844 - protein, 9 aa, synthetic construct
  REGION 1..9: note = Septin-6 (73-81)
THTQPGVQL

SEQ ID NO: 4845 - protein, 9 aa, synthetic construct
  REGION 1..9: note = DNA topoisomerase 2-alpha (684-692)
YLYGQTTTY

SEQ ID NO: 4846 - protein, 10 aa, synthetic construct
  REGION 1..10: note = Coilin (257-266)
ISDGPSKVTL

SEQ ID NO: 4847 - protein, 9 aa, synthetic construct
  REGION 1..9: note = Cancer/testis antigen 1 (155-163)
QLSLLMWIT

SEQ ID NO: 4848 - protein, 9 aa, synthetic construct
  REGION 1..9: note = ATPase family AAA domain-containing protein 2 (1274-1282)
ASSSQIIHI

SEQ ID NO: 4849 - protein, 9 aa, synthetic construct
  REGION 1..9: note = Guanine nucleotide-binding protein G(I)/G(S)/G(T) subunit beta-2 (91-99)
HAIPLRSSW

SEQ ID NO: 4850 - protein, 9 aa, synthetic construct
  REGION 1..9: note = Acyl-CoA desaturase (115-123)
ITAGAHRLW

SEQ ID NO: 4851 - protein, 9 aa, synthetic construct
  REGION 1..9: note = Choline-phosphate cytidylyltransferase A (201-209)
STSDIITRI

SEQ ID NO: 4852 - protein, 9 aa, synthetic construct
  REGION 1..9: note = Serine/threonine-protein kinase pim-1 (191-199)
ALLKDTVYT

SEQ ID NO: 4853 - protein, 9 aa, synthetic construct
  REGION 1..9: note = Death-associated protein kinase 2 (1-9)
MLLDKNIPI

SEQ ID NO: 4854 - protein, 9 aa, synthetic construct
  REGION 1..9: note = HLA class I histocompatibility antigen, B-15 alpha chain (163-171)
AAQITQRKW

SEQ ID NO: 4855 - protein, 9 aa, synthetic construct
  REGION 1..9: note = Transcription termination factor 2 (113-121)
ETFHHSSNW

SEQ ID NO: 4856 - protein, 9 aa, synthetic construct
  REGION 1..9: note = Filamin-A (352-360)
GTHKVTVLF

SEQ ID NO: 4857 - protein, 9 aa, synthetic construct
  REGION 1..9: note = Filamin-A (452-460)
GVHTVHVTF

SEQ ID NO: 4858 - protein, 19 aa, synthetic construct
  REGION 1..19: note = C-1-tetrahydrofolate synthase, cytoplasmic (72-90)
HGNSSIIADQIALKLVGPE

SEQ ID NO: 4859 - protein, 19 aa, synthetic construct
  REGION 1..19: note = Major histocompatibility complex class I-related gene protein (3-21)
HSLRYFRLGVSDPIRGVPE

SEQ ID NO: 4860 - protein, 10 aa, synthetic construct
  REGION 1..10: note = Delta(24)-sterol reductase (310-319)
HTFQNDIHVY

SEQ ID NO: 4861 - protein, 8 aa, synthetic construct
  REGION 1..8: note = Protein SET (64-71)
IAKIPNFW

SEQ ID NO: 4862 - protein, 9 aa, synthetic construct
  REGION 1..9: note = Eukaryotic translation initiation factor 3 subunit C-like protein (385-393)
ISKQFHHQL

SEQ ID NO: 4863 - protein, 9 aa, synthetic construct
  REGION 1..9: note = Constitutive coactivator of PPAR-gamma-like protein 1 (982-990)
ISTPVIRTF

SEQ ID NO: 4864 - protein, 9 aa, synthetic construct
  REGION 1..9: note = T-complex protein 1 subunit gamma (160-168)
ITTKAISRW

SEQ ID NO: 4865 - protein, 9 aa, synthetic construct
  REGION 1..9: note = DNA replication complex GINS protein PSF1 (5-13)
KAMELIREL

SEQ ID NO: 4866 - protein, 9 aa, synthetic construct
  REGION 1..9: note = 60S ribosomal protein L18a (2-10)
KASGTLREY

SEQ ID NO: 4867 - protein, 9 aa, synthetic construct
  REGION 1..9: note = 14-3-3 protein gamma (152-160)
KAYSEAHEI

SEQ ID NO: 4868 - protein, 9 aa, synthetic construct
  REGION 1..9: note = AP-1 complex subunit mu-2 (348-356)
KSFPGGKEY

SEQ ID NO: 4869 - protein, 10 aa, synthetic construct
  REGION 1..10: note = Dolichol-phosphate mannosyltransferase subunit 1 (42-51)
KSFSESGINY

SEQ ID NO: 4870 - protein, 10 aa, synthetic construct
  REGION 1..10: note = Heterogeneous nuclear ribonucleoprotein M (203-212)
KSRGIGTVTF

SEQ ID NO: 4871 - protein, 9 aa, synthetic construct
  REGION 1..9: note = Plastin-3 (40-48)
KSSDIAKTF

SEQ ID NO: 4872 - protein, 9 aa, synthetic construct
  REGION 1..9: note = THO complex subunit 2 (398-406)
KTFPYQHRY

SEQ ID NO: 4873 - protein, 9 aa, synthetic construct
  REGION 1..9: note = Guanine nucleotide-binding protein subunit beta-2-like 1 (127-135)
KTIKLWNTL

SEQ ID NO: 4874 - protein, 9 aa, synthetic construct
  REGION 1..9: note = 60S ribosomal protein L4 (163-171)
KTKEAVLLL

SEQ ID NO: 4875 - protein, 9 aa, synthetic construct
  REGION 1..9: note = Ribonucleoside-diphosphate reductase large subunit (52-60)
KTLERSYLL

SEQ ID NO: 4876 - protein, 10 aa, synthetic construct
  REGION 1..10: note = Hexokinase-2 (777-786)
KTRGIFETKF

SEQ ID NO: 4877 - protein, 9 aa, synthetic construct
  REGION 1..9: note = Ribosome-binding protein 1 (145-153)
KVAKVEPAV

SEQ ID NO: 4878 - protein, 9 aa, synthetic construct
  REGION 1..9: note = Proteasome subunit beta type-5 (92-100)
KVIEINPYL

SEQ ID NO: 4879 - protein, 9 aa, synthetic construct
  REGION 1..9: note = Anaphase-promoting complex subunit 2 (557-565)
KVRDQQLVY

SEQ ID NO: 4880 - protein, 19 aa, synthetic construct
  REGION 1..19: note = Protein-tyrosine kinase 2-beta (528-546)
QEEKSLDPMVYMNDTSPLT

SEQ ID NO: 4881 - protein, 9 aa, synthetic construct
  REGION 1..9: note = Vigilin (54-62)
RAKPEYHKF

SEQ ID NO: 4882 - protein, 8 aa, synthetic construct
  REGION 1..8: note = NEDD8 ultimate buster 1 (113-120)
RSKIAETF

SEQ ID NO: 4883 - protein, 9 aa, synthetic construct
  REGION 1..9: note = Pleiotropic regulator 1 (309-317)
RTKASVHTL

SEQ ID NO: 4884 - protein, 9 aa, synthetic construct
  REGION 1..9: note = Baculoviral IAP repeat-containing protein 6 (597-605)
RTLPVLLLY

SEQ ID NO: 4885 - protein, 9 aa, synthetic construct
  REGION 1..9: note = E3 ubiquitin-protein ligase CBL-B (66-74)
RTVEKTWKL

SEQ ID NO: 4886 - protein, 10 aa, synthetic construct
  REGION 1..10: note = Basigin (137-146)
RVRSHLAALW

SEQ ID NO: 4887 - protein, 12 aa, synthetic construct
  REGION 1..12: note = Phosphatidylinositol 4-kinase type 2-beta (74-85)
SRSSSAELDRSR

SEQ ID NO: 4888 - protein, 9 aa, synthetic construct
  REGION 1..9: note = Histone-binding protein RBBP7 (376-384)
TAKISDFSW

SEQ ID NO: 4889 - protein, 9 aa, synthetic construct
  REGION 1..9: note = Junction plakoglobin (207-215)
TTSRVLKVL

SEQ ID NO: 4890 - protein, 9 aa, synthetic construct
  REGION 1..9: note = High mobility group protein B3 (123-131)
VAKKLGEMW

SEQ ID NO: 4891 - protein, 11 aa, synthetic construct
  REGION 1..11: note = Heterogeneous nuclear ribonucleoprotein U-like protein 1 (427-437)
VGLPAAGKTTW

SEQ ID NO: 4892 - protein, 9 aa, synthetic construct
  REGION 1..9: note = Phosphoglycerate kinase 1 (328-336)
VTRAKQIVW

SEQ ID NO: 4893 - protein, 9 aa, synthetic construct
  REGION 1..9: note = Transcription elongation factor SPT5 (976-984)
VTTDIQVKV

SEQ ID NO: 4894 - protein, 19 aa, synthetic construct
  REGION 1..19: note = Lymphocyte antigen 75 (1307-1325)
YMASWVMLGITYRNKSLMW

SEQ ID NO: 4895 - protein, 9 aa, synthetic construct
  REGION 1..9: note = Guanine nucleotide-binding protein subunit beta-2-like 1 (302-310)
YTDNLVRVW

SEQ ID NO: 4896 - protein, 9 aa, synthetic construct
  REGION 1..9: note = 40S ribosomal protein S21 (75-83)
ADGIVSKNF

SEQ ID NO: 4897 - protein, 10 aa, synthetic construct
  REGION 1..10: note = Pleiotropic regulator 1 (471-480)
AEADKTIKVY

SEQ ID NO: 4898 - protein, 9 aa, synthetic construct
  REGION 1..9: note = Putative RRN3-like protein RRN3P1 (4-12)
AEAFLEHLW

SEQ ID NO: 4899 - protein, 11 aa, synthetic construct
  REGION 1..11: note = Chloride intracellular channel protein 1 (157-167)
AEDEGVSQRKF

SEQ ID NO: 4900 - protein, 11 aa, synthetic construct
  REGION 1..11: note = Heat shock protein HSP 90-beta (346-356)
AEDKENYKKFY

SEQ ID NO: 4901 - protein, 11 aa, synthetic construct
  REGION 1..11: note = Transmembrane emp24 domain-containing protein 3 (50-60)
AEDLNSRVSYW

SEQ ID NO: 4902 - protein, 11 aa, synthetic construct
  REGION 1..11: note = Transmembrane emp24 domain-containing protein 7 (170-180)
AEDLNTRVAYW

SEQ ID NO: 4903 - protein, 10 aa, synthetic construct
  REGION 1..10: note = Plasminogen activator inhibitor 1 RNA-binding protein (236-245)
AEDSVMDHHF

SEQ ID NO: 4904 - protein, 10 aa, synthetic construct
  REGION 1..10: note = Eukaryotic translation elongation factor 1 epsilon-1 (65-74)
AEEKAIVQQW

SEQ ID NO: 4905 - protein, 9 aa, synthetic construct
  REGION 1..9: note = Transcription elongation factor SPT6 (985-993)
AEELERQGY

SEQ ID NO: 4906 - protein, 10 aa, synthetic construct
  REGION 1..10: note = G patch domain-containing protein 4 (15-24)
AEEQLLKHGW

SEQ ID NO: 4907 - protein, 10 aa, synthetic construct
  REGION 1..10: note = General transcription factor 3C polypeptide 1 (182-191)
AEESDLSRQY

SEQ ID NO: 4908 - protein, 10 aa, synthetic construct
  REGION 1..10: note = Myosin light polypeptide 6 (10-19)
AEFKEAFQLF

SEQ ID NO: 4909 - protein, 10 aa, synthetic construct
  REGION 1..10: note = Signal peptidase complex subunit 2 (187-196)
AEFTKSIAKF

SEQ ID NO: 4910 - protein, 9 aa, synthetic construct
  REGION 1..9: note = 60S ribosomal protein L8 (33-41)
AEGIHTGQF

SEQ ID NO: 4911 - protein, 11 aa, synthetic construct
  REGION 1..11: note = Proteasome inhibitor PI31 subunit (114-124)
AEHLGDFHRTY

SEQ ID NO: 4912 - protein, 9 aa, synthetic construct
  REGION 1..9: note = Kinesin-like protein KIF20B (872-880)
AEIEDIRVL

SEQ ID NO: 4913 - protein, 10 aa, synthetic construct
  REGION 1..10: note = rRNA-processing protein FCF1 homolog (108-117)
AEIEKLGQKY

SEQ ID NO: 4914 - protein, 12 aa, synthetic construct
  REGION 1..12: note = Cyclin-dependent kinase 6 (17-28)
AEIGEGAYGKVF

SEQ ID NO: 4915 - protein, 11 aa, synthetic construct
  REGION 1..11: note = Delta(24)-sterol reductase (227-237)
AEIRIIPAKKY

SEQ ID NO: 4916 - protein, 11 aa, synthetic construct
  REGION 1..11: note = Filamin A (105-115)
AEIVEGENHTY

SEQ ID NO: 4917 - protein, 10 aa, synthetic construct
  REGION 1..10: note = Replication protein A 32 kDa subunit (83-92)
AEKAPTNIVY

SEQ ID NO: 4918 - protein, 10 aa, synthetic construct
  REGION 1..10: note = ATP-dependent RNA helicase DHX8 (57-66)
AEKNTTFDTF

SEQ ID NO: 4919 - protein, 11 aa, synthetic construct
  REGION 1..11: note = Cysteine andine-rich protein 1 (129-139)
AEKVIGAGKSW

SEQ ID NO: 4920 - protein, 10 aa, synthetic construct
  REGION 1..10: note = ER membrane protein complex subunit 2 (162-171)
AELYINEHDY

SEQ ID NO: 4921 - protein, 10 aa, synthetic construct
  REGION 1..10: note = Catenin beta-1 (478-487)
AEMAQNAVRL

SEQ ID NO: 4922 - protein, 9 aa, synthetic construct
  REGION 1..9: note = Cleavage stimulation factor subunit 1 (217-225)
AEMLRSISF

SEQ ID NO: 4923 - protein, 9 aa, synthetic construct
  REGION 1..9: note = DNA-dependent protein kinase catalytic subunit (193-201)
AENLFRAFL

SEQ ID NO: 4924 - protein, 11 aa, synthetic construct
  REGION 1..11: note = Proteasome subunit beta type-1 (211-221)
AERDVYTGDAL

SEQ ID NO: 4925 - protein, 9 aa, synthetic construct
  REGION 1..9: note = Exportin-2 (513-521)
AESIVVHTY

SEQ ID NO: 4926 - protein, 9 aa, synthetic construct
  REGION 1..9: note = Full=Zinc finger CCCH domain-containing protein 16 (227-235)
AEVAAEKSF

SEQ ID NO: 4927 - protein, 11 aa, synthetic construct
  REGION 1..11: note = Targeting protein for Xklp2 (638-648)
AEVEAQKAQQL

SEQ ID NO: 4928 - protein, 9 aa, synthetic construct
  REGION 1..9: note = Transmembrane emp24 domain-containing protein 3 (92-100)
AEVKGVYQF

SEQ ID NO: 4929 - protein, 10 aa, synthetic construct
  REGION 1..10: note = DNA-dependent protein kinase catalytic subunit (2320-2329)
AEVLGLILRY

SEQ ID NO: 4930 - protein, 10 aa, synthetic construct
  REGION 1..10: note = Spectrin beta chain, non-erythrocytic 1 (1304-1313)
DEARNLHSKW

SEQ ID NO: 4931 - protein, 9 aa, synthetic construct
  REGION 1..9: note = Protein KIAA0100 (696-704)
DEAVGVQKW

SEQ ID NO: 4932 - protein, 10 aa, synthetic construct
  REGION 1..10: note = Transcription elongation factor SPT6 (573-582)
DEFSHQVQEW

SEQ ID NO: 4933 - protein, 9 aa, synthetic construct
  REGION 1..9: note = Heat shock protein HSP 90-alpha (288-296)
DEMVSLKDY

SEQ ID NO: 4934 - protein, 10 aa, synthetic construct
  REGION 1..10: note = Cyclin-dependent kinase inhibitor 3 (22-31)
DEQTPIHISW

SEQ ID NO: 4935 - protein, 9 aa, synthetic construct
  REGION 1..9: note = Spectrin beta chain, non-erythrocytic 1 (741-749)
EEASLLHQF

SEQ ID NO: 4936 - protein, 11 aa, synthetic construct
  REGION 1..11: note = Eukaryotic translation initiation factor 3 subunit M (11-21)
EEDQAAELRAY

SEQ ID NO: 4937 - protein, 9 aa, synthetic construct
  REGION 1..9: note = Protein transport protein Sec23B (521-529)
EEGPDVLRW

SEQ ID NO: 4938 - protein, 11 aa, synthetic construct
  REGION 1..11: note = 40S ribosomal protein S17 (36-46)
EEIAIIPSKKL

SEQ ID NO: 4939 - protein, 10 aa, synthetic construct
  REGION 1..10: note = Sigma non-opioid intracellular receptor 1 (40-49)
EEIAQLARQY

SEQ ID NO: 4940 - protein, 11 aa, synthetic construct
  REGION 1..11: note = DNA repair protein RAD50 (1002-1012)
EEINKIIRDLW

SEQ ID NO: 4941 - protein, 9 aa, synthetic construct
  REGION 1..9: note = Targeting protein for Xklp2 (351-359)
EELEKLQQY

SEQ ID NO: 4942 - protein, 9 aa, synthetic construct
  REGION 1..9: note = 26S proteasome non-ATPase regulatory subunit 13 (26-34)
EELYTKKLW

SEQ ID NO: 4943 - protein, 12 aa, synthetic construct
  REGION 1..12: note = Nuclear pore complex protein Nup153 (1104-1115)
EEMPATKGGFSF

SEQ ID NO: 4944 - protein, 11 aa, synthetic construct
  REGION 1..11: note = Eukaryotic initiation factor 4A-I (396-406)
EEMPLNVADLI

SEQ ID NO: 4945 - protein, 9 aa, synthetic construct
  REGION 1..9: note = General transcription factor 3C polypeptide 1 (183-191)
EESDLSRQY

SEQ ID NO: 4946 - protein, 10 aa, synthetic construct
  REGION 1..10: note = Protein SCO1 homolog, mitochondrial (121-130)
EEVDQVARAY

SEQ ID NO: 4947 - protein, 10 aa, synthetic construct
  REGION 1..10: note = F-box/LRR-repeat protein 3 (394-403)
EEVLIPDQKY

SEQ ID NO: 4948 - protein, 9 aa, synthetic construct
  REGION 1..9: note = von Willebrand factor (1339-1347)
ELRRIASQV

SEQ ID NO: 4949 - protein, 5 aa, synthetic construct
  REGION 1..5: note = DNA nucleotidylexotransferase (64-68)
FRRGK

SEQ ID NO: 4950 - protein, 9 aa, synthetic construct
  REGION 1..9: note = Spectrin beta chain, non-erythrocytic 1 (1059-1067)
GEASKLQQF

SEQ ID NO: 4951 - protein, 10 aa, synthetic construct
  REGION 1..10: note = Endothelial differentiation-related factor 1 (35-44)
GEDVETSKKW

SEQ ID NO: 4952 - protein, 9 aa, synthetic construct
  REGION 1..9: note = Serine/arginine-rich splicing factor 9 (175-183)
GETSYIRVY

SEQ ID NO: 4953 - protein, 11 aa, synthetic construct
  REGION 1..11: note = Peroxiredoxin-5, mitochondrial (36-46)
GEWASGGVRSF

SEQ ID NO: 4954 - protein, 9 aa, synthetic construct
  REGION 1..9: note = Probable E3 ubiquitin-protein ligase makorin-2 (170-178)
HEMEKAFAF

SEQ ID NO: 4955 - protein, 10 aa, synthetic construct
  REGION 1..10: note = Antigen KI-67 (54-63)
HEQEAILHNF

SEQ ID NO: 4956 - protein, 10 aa, synthetic construct
  REGION 1..10: note = Mediator of RNA polymerase II transcription subunit 17 (187-196)
IEDPQIQAHW

SEQ ID NO: 4957 - protein, 9 aa, synthetic construct
  REGION 1..9: note = Actin, aortic smooth muscle (73-81)
IEHGIITNW

SEQ ID NO: 4958 - protein, 11 aa, synthetic construct
  REGION 1..11: note = DNA topoisomerase 2-alpha (921-931)
IEISELPVRTW

SEQ ID NO: 4959 - protein, 9 aa, synthetic construct
  REGION 1..9: note = Non-canonical poly(A) RNA polymerase PAPD5 (227-235)
IESVIKELW

SEQ ID NO: 4960 - protein, 15 aa, synthetic construct
  REGION 1..15: note = Interleukin-9 receptor (168-182)
ISPALEPMTTLLSYE

SEQ ID NO: 4961 - protein, 10 aa, synthetic construct
  REGION 1..10: note = T-complex protein 1 subunit gamma (6-15)
LEIKKIGDEY

SEQ ID NO: 4962 - protein, 11 aa, synthetic construct
  REGION 1..11: note = Trafficking protein particle complex subunit 5 (105-115)
LEQANDDARTF

SEQ ID NO: 4963 - protein, 10 aa, synthetic construct
  REGION 1..10: note = Eukaryotic translation initiation factor 3 subunit D (314-323)
MEATYINHNF

SEQ ID NO: 4964 - protein, 10 aa, synthetic construct
  REGION 1..10: note = Magnesium transporter protein 1 (242-251)
MEFLFNKTGW

SEQ ID NO: 4965 - protein, 9 aa, synthetic construct
  REGION 1..9: note = Transforming acidic coiled-coil-containing protein 3 (718-726)
MEKSFSDLF

SEQ ID NO: 4966 - protein, 10 aa, synthetic construct
  REGION 1..10: note = Membrane-associated tyrosine- and threonine-specific cdc2-inhibitory kinase (234-243)
MELPHGGEGW

SEQ ID NO: 4967 - protein, 9 aa, synthetic construct
  REGION 1..9: note = AAC83183.1 (92-100)
MESLTKHLF

SEQ ID NO: 4968 - protein, 10 aa, synthetic construct
  REGION 1..10: note = 60S ribosomal protein L4 (212-221)
NEDNGIIKAF

SEQ ID NO: 4969 - protein, 11 aa, synthetic construct
  REGION 1..11: note = Protein transport protein Sec23B (420-430)
NELGVGGTSQW

SEQ ID NO: 4970 - protein, 10 aa, synthetic construct
  REGION 1..10: note = Long-chain-fatty-acid-CoA ligase 4 (65-74)
NEMQPNGKVF

SEQ ID NO: 4971 - protein, 10 aa, synthetic construct
  REGION 1..10: note = Mortality factor 4-like protein 1 (215-224)
NEVVAGIKEY

SEQ ID NO: 4972 - protein, 8 aa, synthetic construct
  REGION 1..8: note = Ig kappa chain C region (1-8)
NIVMTQSP

SEQ ID NO: 4973 - protein, 9 aa, synthetic construct
  REGION 1..9: note = Multifunctional protein ADE2 (69-77)
QEAGIKTAF

SEQ ID NO: 4974 - protein, 11 aa, synthetic construct
  REGION 1..11: note = Guanine nucleotide-binding protein G(s) subunit alpha isoforms short (257-267)
QEALNLFKSIW

SEQ ID NO: 4975 - protein, 11 aa, synthetic construct
  REGION 1..11: note = Spectrin beta chain, non-erythrocytic 1 (1864-1874)
QEDAARLQAAY

SEQ ID NO: 4976 - protein, 10 aa, synthetic construct
  REGION 1..10: note = Annexin A2 (138-147)
QELQEINRVY

SEQ ID NO: 4977 - protein, 10 aa, synthetic construct
  REGION 1..10: note = TPT1-like protein (84-93)
QETSFTKEAY

SEQ ID NO: 4978 - protein, 11 aa, synthetic construct
  REGION 1..11: note = AP-5 complex subunit zeta-1 (14-24)
REIQDEELKKF

SEQ ID NO: 4979 - protein, 11 aa, synthetic construct
  REGION 1..11: note = Eukaryotic translation initiation factor 3 subunit C-like protein (201-211)
SEAPSGESRKF

SEQ ID NO: 4980 - protein, 9 aa, synthetic construct
  REGION 1..9: note = Histone H2B type 1-A (77-85)
SEASRLAHY

SEQ ID NO: 4981 - protein, 12 aa, synthetic construct
  REGION 1..12: note = Protein transport protein Sec31A (233-244)
SEDDRLPVIQMW

SEQ ID NO: 4982 - protein, 9 aa, synthetic construct
  REGION 1..9: note = DnaJ homolog subfamily C member 7 (393-401)
SEDEIKKAY

SEQ ID NO: 4983 - protein, 9 aa, synthetic construct
  REGION 1..9: note = WD repeat-containing protein 82 (86-94)
SEDGKIHVW

SEQ ID NO: 4984 - protein, 10 aa, synthetic construct
  REGION 1..10: note = Poly (ADP-ribose) polymerase 1 (808-817)
SEEAEIIRKY

SEQ ID NO: 4985 - protein, 9 aa, synthetic construct
  REGION 1..9: note = Polypyrimidine tract-binding protein 1 (485-493)
SEEDLKVLF

SEQ ID NO: 4986 - protein, 12 aa, synthetic construct
  REGION 1..12: note = Eukaryotic translation initiation factor 3 subunit M (10-21)
SEEDQAAELRAY

SEQ ID NO: 4987 - protein, 9 aa, synthetic construct
  REGION 1..9: note = General transcription factor 3C polypeptide 1 (415-423)
SEEGLLRLY

SEQ ID NO: 4988 - protein, 10 aa, synthetic construct
  REGION 1..10: note = Disco-interacting protein 2 homolog A (29-38)
SEGDITQKGY

SEQ ID NO: 4989 - protein, 9 aa, synthetic construct
  REGION 1..9: note = DNA replication licensing factor MCM5 (690-698)
SEHSIIKDF

SEQ ID NO: 4990 - protein, 9 aa, synthetic construct
  REGION 1..9: note = Disks large homolog 1 (143-151)
SEIENVHGF

SEQ ID NO: 4991 - protein, 11 aa, synthetic construct
  REGION 1..11: note = Protein SET (61-71)
SELIAKIPNFW

SEQ ID NO: 4992 - protein, 9 aa, synthetic construct
  REGION 1..9: note = Uncharacterized protein C14orf119 (121-129)
SEPDFVAKF

SEQ ID NO: 4993 - protein, 9 aa, synthetic construct
  REGION 1..9: note = Ubiquitin-conjugating enzyme E2 J1 (204-212)
SESDLNHSF

SEQ ID NO: 4994 - protein, 9 aa, synthetic construct
  REGION 1..9: note = Nucleolar transcription factor 1 (275-283)
SESELTRLL

SEQ ID NO: 4995 - protein, 9 aa, synthetic construct
  REGION 1..9: note = Citrate synthase, mitochondrial (120-128)
SESNFARAY

SEQ ID NO: 4996 - protein, 9 aa, synthetic construct
  REGION 1..9: note = GMP reductase 2 (46-54)
SEVDLTRSF

SEQ ID NO: 4997 - protein, 13 aa, synthetic construct
  REGION 1..13: note = Single Ig IL-1-related receptor (383-395)
SEVDVSDLGSRNY

SEQ ID NO: 4998 - protein, 9 aa, synthetic construct
  REGION 1..9: note = Sulfhydryl oxidase 1 (223-231)
TEANVVRKF

SEQ ID NO: 4999 - protein, 10 aa, synthetic construct
  REGION 1..10: note = Cyclin-D1-binding protein 1 (44-53)
TEEFNREMFW

SEQ ID NO: 5000 - protein, 10 aa, synthetic construct
  REGION 1..10: note = Staphylococcal nuclease domain-containing protein 1 (663-672)
TEITDDLHFY

SEQ ID NO: 5001 - protein, 9 aa, synthetic construct
  REGION 1..9: note = Eukaryotic translation initiation factor 3 subunit M (142-150)
TELDQVRKW

SEQ ID NO: 5002 - protein, 10 aa, synthetic construct
  REGION 1..10: note = Serine/arginine-rich splicing factor 3 (24-33)
TELERAFGYY

SEQ ID NO: 5003 - protein, 11 aa, synthetic construct
  REGION 1..11: note = HLA class II histocompatibility antigen, DRB1-15 beta chain (46-56)
TELGRPDAEYW

SEQ ID NO: 5004 - protein, 9 aa, synthetic construct
  REGION 1..9: note = Pre-mRNA-splicing factor ISY1 homolog (37-45)
TELPKAEKW

SEQ ID NO: 5005 - protein, 11 aa, synthetic construct
  REGION 1..11: note = Coatomer subunit delta (46-56)
TEMDSHEEKVF

SEQ ID NO: 5006 - protein, 9 aa, synthetic construct
  REGION 1..9: note = CUGBP Elav-like family member 1 (120-128)
TENDIRVMF

SEQ ID NO: 5007 - protein, 9 aa, synthetic construct
  REGION 1..9: note = Gamma-secretase subunit PEN-2 (48-56)
TEQSQIKGY

SEQ ID NO: 5008 - protein, 11 aa, synthetic construct
  REGION 1..11: note = Gamma-secretase subunit PEN-2 (48-58)
TEQSQIKGYVW

SEQ ID NO: 5009 - protein, 9 aa, synthetic construct
  REGION 1..9: note = Tyrosine-protein kinase BAZ1B (274-282)
VEDELVKKY

SEQ ID NO: 5010 - protein, 9 aa, synthetic construct
  REGION 1..9: note = Vigilin (405-413)
VEINIDHKF

SEQ ID NO: 5011 - protein, 11 aa, synthetic construct
  REGION 1..11: note = Influenza virus NS1A-binding protein (576-586)
VEMYDPTRNEW

SEQ ID NO: 5012 - protein, 10 aa, synthetic construct
  REGION 1..10: note = Target of rapamycin complex subunit LST8 (298-307)
VETGEIKREY

SEQ ID NO: 5013 - protein, 10 aa, synthetic construct
  REGION 1..10: note = Methionine aminopeptidase 2 (311-320)
YEVEIDGKTY

SEQ ID NO: 5014 - protein, 14 aa, synthetic construct
  REGION 1..14: note = Gamma-secretase C-terminal fragment 59 (565-578)
FRHDSGYEVHHQKL

SEQ ID NO: 5015 - protein, 9 aa, synthetic construct
  REGION 1..9: note = Disintegrin and metalloproteinase domain-containing protein 10 (19-27)
GQYGNPLNK

SEQ ID NO: 5016 - protein, 8 aa, synthetic construct
  REGION 1..8: note = Beta-2-microglobulin (21-28)
IQRTPKIQ

SEQ ID NO: 5017 - protein, 10 aa, synthetic construct
  REGION 1..10: note = Beta-2-microglobulin (21-30)
IQRTPKIQVY

SEQ ID NO: 5018 - protein, 9 aa, synthetic construct
  REGION 1..9: note = Splicing factor 3B subunit 2 (36-44)
RQTGIVLNR

SEQ ID NO: 5019 - protein, 9 aa, synthetic construct
  REGION 1..9: note = Importin subunit alpha-1 (377-385)
GLVPFLVSV

SEQ ID NO: 5020 - protein, 9 aa, synthetic construct
  REGION 1..9: note = Neutral alpha-glucosidase AB (3-11)
AVAAVAARR

SEQ ID NO: 5021 - protein, 10 aa, synthetic construct
  REGION 1..10: note = 60S ribosomal protein L15 (131-140)
EVILIDPFHK

SEQ ID NO: 5022 - protein, 10 aa, synthetic construct
  REGION 1..10: note = Cullin-4A (5-14)
APRKGSFSAL

SEQ ID NO: 5023 - protein, 10 aa, synthetic construct
  REGION 1..10: note = Fatty acid synthase (1169-1178)
IPRDPSQQEL

SEQ ID NO: 5024 - protein, 10 aa, synthetic construct
  REGION 1..10: note = Carbonic anhydrase 9 (397-406)
SPRAAEPVQL

SEQ ID NO: 5025 - protein, 9 aa, synthetic construct
  REGION 1..9: note = BTB/POZ domain-containing adapter for CUL3-mediated RhoA degradation protein 3 (28-36)
SPSSKYVKL

SEQ ID NO: 5026 - protein, 9 aa, synthetic construct
  REGION 1..9: note = Melanoma-associated antigen 10 (254-262)
GLYDGMEHL

SEQ ID NO: 5027 - protein, 9 aa, synthetic construct
  REGION 1..9: note = 26S proteasome non-ATPase regulatory subunit 6 (103-111)
AMMAKAEYL

SEQ ID NO: 5028 - protein, 9 aa, synthetic construct
  REGION 1..9: note = 40S ribosomal protein S26 (107-115)
APRPPPKPM

SEQ ID NO: 5029 - protein, 9 aa, synthetic construct
  REGION 1..9: note = Elongation factor 2 (286-294)
AYLPVNESF

SEQ ID NO: 5030 - protein, 9 aa, synthetic construct
  REGION 1..9: note = Long-chain-fatty-acid-CoA ligase 3 (326-334)
GYLPLAHVL

SEQ ID NO: 5031 - protein, 9 aa, synthetic construct
  REGION 1..9: note = m7GpppX diphosphatase (268-276)
HYLPSYYHL

SEQ ID NO: 5032 - protein, 9 aa, synthetic construct
  REGION 1..9: note = N6-adenosine-methyltransferase subunit METTL14 (99-107)
IYKDSSTFL

SEQ ID NO: 5033 - protein, 9 aa, synthetic construct
  REGION 1..9: note = Ubiquitin-conjugating enzyme E2 H (17-25)
KLIESKHEV

SEQ ID NO: 5034 - protein, 9 aa, synthetic construct
  REGION 1..9: note = Adenylosuccinate synthetase isozyme 2 (347-355)
KYAHMINGF

SEQ ID NO: 5035 - protein, 9 aa, synthetic construct
  REGION 1..9: note = Serine/threonine-protein phosphatase 2A 56 kDa regulatory subunit epsilon isoform (174-182)
KYIDQKFVL

SEQ ID NO: 5036 - protein, 9 aa, synthetic construct
  REGION 1..9: note = Actin-binding protein IPP (238-246)
KYIEGVSDF

SEQ ID NO: 5037 - protein, 9 aa, synthetic construct
  REGION 1..9: note = Mitogen-activated protein kinase 4 (138-146)
KYIHSANVL

SEQ ID NO: 5038 - protein, 9 aa, synthetic construct
  REGION 1..9: note = Tyrosine-protein phosphatase non-receptor type 23 (70-78)
KYLGQLHYL

SEQ ID NO: 5039 - protein, 10 aa, synthetic construct
  REGION 1..10: note = Mitochondrial carrier homolog 1 (280-289)
KYLSVQGQLF

SEQ ID NO: 5040 - protein, 9 aa, synthetic construct
  REGION 1..9: note = Caprin-1 (98-106)
KYQEVTNNL

SEQ ID NO: 5041 - protein, 9 aa, synthetic construct
  REGION 1..9: note = Mitochondrial carrier homolog 1 (168-176)
KYSGVLSSI

SEQ ID NO: 5042 - protein, 9 aa, synthetic construct
  REGION 1..9: note = Microspherule protein 1 (251-259)
LYDPVISKL

SEQ ID NO: 5043 - protein, 9 aa, synthetic construct
  REGION 1..9: note = Splicing factor 3B subunit 3 (988-996)
NYISGIQTI

SEQ ID NO: 5044 - protein, 9 aa, synthetic construct
  REGION 1..9: note = Vimentin (357-365)
NYQDTIGRL

SEQ ID NO: 5045 - protein, 9 aa, synthetic construct
  REGION 1..9: note = Stomatin-like protein 2, mitochondrial (236-244)
QYVSAFSKL

SEQ ID NO: 5046 - protein, 10 aa, synthetic construct
  REGION 1..10: note = Actin, cytoplasmic 2 (85-94)
RVAPEEHPVL

SEQ ID NO: 5047 - protein, 9 aa, synthetic construct
  REGION 1..9: note = Casein kinase I isoform delta (178-186)
RYASINTHL

SEQ ID NO: 5048 - protein, 9 aa, synthetic construct
  REGION 1..9: note Dolichyl-diphosphooligosaccharide-proteinosyltransferase subunit 2 (218-226)
RYIANTVEL

SEQ ID NO: 5049 - protein, 9 aa, synthetic construct
  REGION 1..9: note = Signal transducer and activator of transcription 3 (13-21)
RYLEQLHQL

SEQ ID NO: 5050 - protein, 9 aa, synthetic construct
  REGION 1..9: note = Protein kish-A (2-10)
SAIFNFQSL

SEQ ID NO: 5051 - protein, 9 aa, synthetic construct
  REGION 1..9: note = Seipin (55-63)
SYMPTVSHL

SEQ ID NO: 5052 - protein, 9 aa, synthetic construct
  REGION 1..9: note CMP-N-acetylneuraminate-beta-galactosamide-alpha-2,3-sialyl transf erase 2 (239-247)
TYAPVKSFL

SEQ ID NO: 5053 - protein, 9 aa, synthetic construct
  REGION 1..9: note = Cleft lip and palate transmembrane protein 1 (545-553)
TYKALNTFI

SEQ ID NO: 5054 - protein, 9 aa, synthetic construct
  REGION 1..9: note = Proteasome subunit beta type-6 (94-102)
TYQLGFHSI

SEQ ID NO: 5055 - protein, 9 aa, synthetic construct
  REGION 1..9: note = RNA-binding protein 42 (91-99)
TYQQVQQTL

SEQ ID NO: 5056 - protein, 9 aa, synthetic construct
  REGION 1..9: note = DNA replication licensing factor MCM7 (231-239)
TYTSARTLL

SEQ ID NO: 5057 - protein, 9 aa, synthetic construct
  REGION 1..9: note = Alpha-enolase (18-26)
VYHNLKNVI

SEQ ID NO: 5058 - protein, 9 aa, synthetic construct
  REGION 1..9: note = Unconventional myosin-Ic (350-358)
VYSRTFTWL

SEQ ID NO: 5059 - protein, 11 aa, synthetic construct
  REGION 1..11: note = THO complex subunit 5 homolog (420-430)
YQFDKVGILTL

SEQ ID NO: 5060 - protein, 9 aa, synthetic construct
  REGION 1..9: note = Splicing factor 3B subunit 3 (1166-1174)
YYFPVKNVI

SEQ ID NO: 5061 - protein, 9 aa, synthetic construct
  REGION 1..9: note = Solute carrier family 35 member B1 (27-35)
YYGILQEKI

SEQ ID NO: 5062 - protein, 8 aa, synthetic construct
  REGION 1..8: note = Transformation/transcription domain-associated protein (1974-1981)
YYPVRHHL

SEQ ID NO: 5063 - protein, 16 aa, synthetic construct
  REGION 1..16: note = Gamma-secretase C-terminal fragment 59 (563-578)
AEFRHDSGYEVHHQKL

SEQ ID NO: 5064 - protein, 10 aa, synthetic construct
  REGION 1..10: note = Ribosome-binding protein 1 (168-177)
AILETAPKEV

SEQ ID NO: 5065 - protein, 9 aa, synthetic construct
  REGION 1..9: note = Sarcoplasmic/endoplasmic reticulum calcium ATPase 1 (206-214)
AIVRSLPSV

SEQ ID NO: 5066 - protein, 9 aa, synthetic construct
  REGION 1..9: note = ATP-dependent RNA helicase DDX50 (247-255)
ALAAALAHI

SEQ ID NO: 5067 - protein, 10 aa, synthetic construct
  REGION 1..10: note = Splicing factor, proline- and glutamine-rich (343-352)
ALAEIAKAEL

SEQ ID NO: 5068 - protein, 12 aa, synthetic construct
  REGION 1..12: note = DDB1- and CUL4-associated factor 11 (187-198)
ALAGHQDGITFI

SEQ ID NO: 5069 - protein, 9 aa, synthetic construct
  REGION 1..9: note = EH domain-containing protein 1 (502-510)
ALANHLIKV

SEQ ID NO: 5070 - protein, 9 aa, synthetic construct
  REGION 1..9: note = COP9 signalosome complex subunit 7a (30-38)
ALATLIHQV

SEQ ID NO: 5071 - protein, 9 aa, synthetic construct
  REGION 1..9: note = Cullin-2 (304-312)
ALDKALTSV

SEQ ID NO: 5072 - protein, 9 aa, synthetic construct
  REGION 1..9: note = Glutathione S-transferase A4 (73-81)
ALEEKIPNI

SEQ ID NO: 5073 - protein, 9 aa, synthetic construct
  REGION 1..9: note = WD repeat-containing protein 19 (108-116)
ALFEGKVQL

SEQ ID NO: 5074 - protein, 9 aa, synthetic construct
  REGION 1..9: note = H/ACA ribonucleoprotein complex subunit 4 (179-187)
ALFQRPPLI

SEQ ID NO: 5075 - protein, 9 aa, synthetic construct
  REGION 1..9: note = Serine palmitoyltransferase 2 (292-300)
ALGPTGRGV

SEQ ID NO: 5076 - protein, 11 aa, synthetic construct
  REGION 1..11: note = Syntaxin-binding protein 3 (373-383)
ALGTDAEGQKV

SEQ ID NO: 5077 - protein, 9 aa, synthetic construct
  REGION 1..9: note = Apoptosis-associated speck-like protein containing a CARD (118-126)
ALIARVTNV

SEQ ID NO: 5078 - protein, 9 aa, synthetic construct
  REGION 1..9: note = DNA damage-inducible transcript 3 protein (158-166)
ALIDRMVNL

SEQ ID NO: 5079 - protein, 11 aa, synthetic construct
  REGION 1..11: note = Erlin-2 (214-224)
ALIEAEKVAQV

SEQ ID NO: 5080 - protein, 9 aa, synthetic construct
  REGION 1..9: note = DNA polymerase alpha subunit B (22-30)
ALIEKLVEL

SEQ ID NO: 5081 - protein, 9 aa, synthetic construct
  REGION 1..9: note = Thyroid adenoma-associated protein (142-150)
ALITRIFGV

SEQ ID NO: 5082 - protein, 9 aa, synthetic construct
  REGION 1..9: note = Proliferating cell nuclear antigen (18-26)
ALKDLINEA

SEQ ID NO: 5083 - protein, 11 aa, synthetic construct
  REGION 1..11: note = Eukaryotic translation initiation factor 3 subunit D (439-449)
ALLAGSEYLKL

SEQ ID NO: 5084 - protein, 9 aa, synthetic construct
  REGION 1..9: note = AP-3 complex subunit delta-1 (461-469)
ALLDSAHLL

SEQ ID NO: 5085 - protein, 12 aa, synthetic construct
  REGION 1..12: note = Extended synaptotagmin-2 (137-148)
ALLEDEERVVRL

SEQ ID NO: 5086 - protein, 9 aa, synthetic construct
  REGION 1..9: note = Transportin-1 (689-697)
ALLGDLTKA

SEQ ID NO: 5087 - protein, 9 aa, synthetic construct
  REGION 1..9: note = NudC domain-containing protein 3 (12-20)
ALLGILQHV

SEQ ID NO: 5088 - protein, 9 aa, synthetic construct
  REGION 1..9: note = ATP synthase subunit beta, mitochondrial (320-328)
ALLGRIPSA

SEQ ID NO: 5089 - protein, 9 aa, synthetic construct
  REGION 1..9: note = Ubiquitin carboxyl-terminal hydrolase 35 (288-296)
ALLKGLAAV

SEQ ID NO: 5090 - protein, 9 aa, synthetic construct
  REGION 1..9: note = Proline and serine-rich protein 1 (900-908)
ALLQQVHSA

SEQ ID NO: 5091 - protein, 9 aa, synthetic construct
  REGION 1..9: note = Lysine-specific histone demethylase 1A (418-426)
ALLSGLREA

SEQ ID NO: 5092 - protein, 11 aa, synthetic construct
  REGION 1..11: note = Hsp90 co-chaperone Cdc37 (204-214)
ALMEQVAHQTI

SEQ ID NO: 5093 - protein, 11 aa, synthetic construct
  REGION 1..11: note = Ubiquitin-conjugating enzyme E2 S (128-138)
ALNEEAGRLLL

SEQ ID NO: 5094 - protein, 9 aa, synthetic construct
  REGION 1..9: note = Talin-1 (777-785)
ALNELLQHV

SEQ ID NO: 5095 - protein, 9 aa, synthetic construct
  REGION 1..9: note = Kinetochore protein NDC80 homolog (274-282)
ALNEQIARL

SEQ ID NO: 5096 - protein, 9 aa, synthetic construct
  REGION 1..9: note = Influenza virus NS1A-binding protein (460-468)
ALNGKLYIV

SEQ ID NO: 5097 - protein, 9 aa, synthetic construct
  REGION 1..9: note = Integrator complex subunit 4 (235-243)
ALQEKLWNV

SEQ ID NO: 5098 - protein, 9 aa, synthetic construct
  REGION 1..9: note = BRISC complex subunit Abro1 (215-223)
ALQEKVQAV

SEQ ID NO: 5099 - protein, 9 aa, synthetic construct
  REGION 1..9: note = Enhancer of filamentation 1 (806-814)
ALQEMVHQV

SEQ ID NO: 5100 - protein, 9 aa, synthetic construct
  REGION 1..9: note = Alpha-taxilin (67-75)
ALRDVSEEL

SEQ ID NO: 5101 - protein, 9 aa, synthetic construct
  REGION 1..9: note = SET and MYND domain-containing protein 4 (220-228)
ALREENEQL

SEQ ID NO: 5102 - protein, 9 aa, synthetic construct
  REGION 1..9: note = Leucine-rich PPR motif-containing protein, mitochondrial (676-684)
ALRGEIETV

SEQ ID NO: 5103 - protein, 9 aa, synthetic construct
  REGION 1..9: note = HAUS augmin-like complex subunit 1 (219-227)
ALSEKLARL

SEQ ID NO: 5104 - protein, 10 aa, synthetic construct
  REGION 1..10: note = T-complex protein 1 subunit zeta (162-171)
ALSKEGIVAL

SEQ ID NO: 5105 - protein, 9 aa, synthetic construct
  REGION 1..9: note = Coatomer subunit gamma-1 (159-167)
ALVSSLHLL

SEQ ID NO: 5106 - protein, 10 aa, synthetic construct
  REGION 1..10: note = Guanine nucleotide-binding protein G(s) subunit alpha isoforms short (142-151)
ALWEDEGVRA

SEQ ID NO: 5107 - protein, 9 aa, synthetic construct
  REGION 1..9: note = FERM, RhoGEF and pleckstrin domain-containing protein 2 (602-610)
ALWEGPSKA

SEQ ID NO: 5108 - protein, 9 aa, synthetic construct
  REGION 1..9: note = Mannose-1-phosphate guanyltransferase alpha (254-262)
ALYASRLYL

SEQ ID NO: 5109 - protein, 9 aa, synthetic construct
  REGION 1..9: note = Structural maintenance of chromosomes flexible hinge domain-containing protein 1 (656-664)
ALYDEVRTV

SEQ ID NO: 5110 - protein, 9 aa, synthetic construct
  REGION 1..9: note = Asparagine synthetase (glutamine-hydrolyzing) (131-139)
ALYDNVEKL

SEQ ID NO: 5111 - protein, 9 aa, synthetic construct
  REGION 1..9: note = A-kinase anchor protein 11 (579-587)
ALYHLAIKL

SEQ ID NO: 5112 - protein, 10 aa, synthetic construct
  REGION 1..10: note = tRNA-splicing ligase RtcB homolog (146-155)
AMFDHIPVGV

SEQ ID NO: 5113 - protein, 9 aa, synthetic construct
  REGION 1..9: note = Sister chromatid cohesion protein PDS5 homolog A (534-542)
AMFGKLMTI

SEQ ID NO: 5114 - protein, 9 aa, synthetic construct
  REGION 1..9: note = Autophagy-related protein 101 (20-28)
AMLAVLHTV

SEQ ID NO: 5115 - protein, 11 aa, synthetic construct
  REGION 1..11: note = ATP-binding cassette sub-family F member 1 (296-306)
AMLENASDIKL

SEQ ID NO: 5116 - protein, 9 aa, synthetic construct
  REGION 1..9: note = Ankyrin repeat and KH domain-containing protein 1 (1231-1239)
AMNGHVPAV

SEQ ID NO: 5117 - protein, 9 aa, synthetic construct
  REGION 1..9: note = Phosphopantothenoylcysteine decarboxylase (65-73)
AMWEHPITA

SEQ ID NO: 5118 - protein, 10 aa, synthetic construct
  REGION 1..10: note = Bifunctional methylenetetrahydrofolate dehydrogenase/cyclohydrolase, mitochondrial (270-279)
AVIDVGINRV

SEQ ID NO: 5119 - protein, 9 aa, synthetic construct
  REGION 1..9: note = Leucine-rich repeat flightless-interacting protein 2 (349-357)
DLKDQIQDV

SEQ ID NO: 5120 - protein, 9 aa, synthetic construct
  REGION 1..9: note = ADP-ribosylation factor GTPase-activating protein 3 (152-160)
FASHVSPEV

SEQ ID NO: 5121 - protein, 10 aa, synthetic construct
  REGION 1..10: note = Plexin-B2 (141-150)
FIFDVHVHEV

SEQ ID NO: 5122 - protein, 10 aa, synthetic construct
  REGION 1..10: note = Ankyrin repeat and LEM domain-containing protein 2 (100-109)
FIFEKKLAQA

SEQ ID NO: 5123 - protein, 10 aa, synthetic construct
  REGION 1..10: note = Signal transducer and activator of transcription 5B (332-341)
FIIEKQPPQV

SEQ ID NO: 5124 - protein, 9 aa, synthetic construct
  REGION 1..9: note = DNA-directed RNA polymerase I subunit RPA2 (31-39)
FIINGIEKV

SEQ ID NO: 5125 - protein, 10 aa, synthetic construct
  REGION 1..10: note = Son of sevenless homolog 1 (444-453)
FIMEGTLTRV

SEQ ID NO: 5126 - protein, 9 aa, synthetic construct
  REGION 1..9: note = Formin-like protein 1 (47-55)
FINIVVHSV

SEQ ID NO: 5127 - protein, 9 aa, synthetic construct
  REGION 1..9: note = Exocyst complex component 4 (169-177)
FIQEIEHAL

SEQ ID NO: 5128 - protein, 9 aa, synthetic construct
  REGION 1..9: note = 26S proteasome non-ATPase regulatory subunit 13 (63-71)
FISEFEHRV

SEQ ID NO: 5129 - protein, 9 aa, synthetic construct
  REGION 1..9: note = Dystonin (4051-4059)
FIWENIHTL

SEQ ID NO: 5130 - protein, 10 aa, synthetic construct
  REGION 1..10: note = Cytoskeleton-associated protein 5 (478-487)
FLADVDKLKL

SEQ ID NO: 5131 - protein, 10 aa, synthetic construct
  REGION 1..10: note = DNA dC-dU-editing enzyme APOBEC-3F (106-115)
FLAEHPNVTL

SEQ ID NO: 5132 - protein, 11 aa, synthetic construct
  REGION 1..11: note = General transcription factor 3C polypeptide 2 (609-619)
FLAHDQAVRTL

SEQ ID NO: 5133 - protein, 9 aa, synthetic construct
  REGION 1..9: note = DCC-interacting protein 13-alpha (225-233)
FLANIGTSV

SEQ ID NO: 5134 - protein, 9 aa, synthetic construct
  REGION 1..9: note = Nucleoside diphosphate kinase 3 (25-33)
FLAVKPDGV

SEQ ID NO: 5135 - protein, 9 aa, synthetic construct
  REGION 1..9: note = Basic leucine zipper and W2 domain-containing protein 1 (57-65)
FLDASGAKL

SEQ ID NO: 5136 - protein, 9 aa, synthetic construct
  REGION 1..9: note = Probable JmjC domain-containing histone demethylation protein 2C (60-68)
FLDDVVHSL

SEQ ID NO: 5137 - protein, 9 aa, synthetic construct
  REGION 1..9: note = Dipeptidyl peptidase 8 (72-80)
FLDENVHFA

SEQ ID NO: 5138 - protein, 9 aa, synthetic construct
  REGION 1..9: note = Myotubularin (308-316)
FLDIHNIHV

SEQ ID NO: 5139 - protein, 9 aa, synthetic construct
  REGION 1..9: note = Ubiquitin fusion degradation protein 1 homolog (168-176)
FLDITNPKA

SEQ ID NO: 5140 - protein, 9 aa, synthetic construct
  REGION 1..9: note = RHO/RAC effector protein (1023-1031)
FLDKNDHSL

SEQ ID NO: 5141 - protein, 9 aa, synthetic construct
  REGION 1..9: note = Epidermal growth factor receptor substrate 15-like 1 (67-75)
FLDKQGFYV

SEQ ID NO: 5142 - protein, 9 aa, synthetic construct
  REGION 1..9: note = Serine/threonine-protein kinase N1 (458-466)
FLDNERHEV

SEQ ID NO: 5143 - protein, 11 aa, synthetic construct
  REGION 1..11: note = Sphingomyelin phosphodiesterase 4 (86-96)
FLDPGGPMMKL

SEQ ID NO: 5144 - protein, 10 aa, synthetic construct
  REGION 1..10: note = Probable dolichyl pyrophosphate Glc1Man9GlcNAc2 alpha-1,3-glucosyltransferase (305-314)
FLDPNNIPKA

SEQ ID NO: 5145 - protein, 9 aa, synthetic construct
  REGION 1..9: note = trabeculin-alpha (1734-1742)
FLDQHGHNL

SEQ ID NO: 5146 - protein, 9 aa, synthetic construct
  REGION 1..9: note = Gamma-tubulin complex component 5 (53-61)
FLDVNSHKI

SEQ ID NO: 5147 - protein, 9 aa, synthetic construct
  REGION 1..9: note = Bromodomain adjacent to zinc finger domain protein 2A (750-758)
FLEPVNPRL

SEQ ID NO: 5148 - protein, 9 aa, synthetic construct
  REGION 1..9: note = Serine/threonine-protein phosphatase 4 regulatory subunit 3A (581-589)
FLFEPVVKA

SEQ ID NO: 5149 - protein, 9 aa, synthetic construct
  REGION 1..9: note = Protein yippee-like 5 (43-51)
FLFNKVVNL

SEQ ID NO: 5150 - protein, 9 aa, synthetic construct
  REGION 1..9: note = Protein TASOR (98-106)
FLFQEPRSI

SEQ ID NO: 5151 - protein, 9 aa, synthetic construct
  REGION 1..9: note = Protein FAM177A1 (116-124)
FLGEKIASV

SEQ ID NO: 5152 - protein, 9 aa, synthetic construct
  REGION 1..9: note = Meckelin (880-888)
FLGSFIDHV

SEQ ID NO: 5153 - protein, 10 aa, synthetic construct
  REGION 1..10: note = 60S ribosomal protein L34 (95-104)
FLIEEQKIVV

SEQ ID NO: 5154 - protein, 10 aa, synthetic construct
  REGION 1..10: note = TBCC domain-containing protein 1 (214-223)
FLIEGTISRA

SEQ ID NO: 5155 - protein, 9 aa, synthetic construct
  REGION 1..9: note = T-complex protein 1 subunit beta (218-226)
FLLDKKIGV

SEQ ID NO: 5156 - protein, 11 aa, synthetic construct
  REGION 1..11: note = Plectin (3718-3728)
FLLDPVKGERL

SEQ ID NO: 5157 - protein, 9 aa, synthetic construct
  REGION 1..9: note = GDP-mannose 4,6 dehydratase (9-17)
FLLEKGYEV

SEQ ID NO: 5158 - protein, 9 aa, synthetic construct
  REGION 1..9: note = Protein arginine N-methyltransferase 3 (423-431)
FLLEKPFSV

SEQ ID NO: 5159 - protein, 9 aa, synthetic construct
  REGION 1..9: note = Unconventional myosin-If (148-156)
FLLEKSRVV

SEQ ID NO: 5160 - protein, 9 aa, synthetic construct
  REGION 1..9: note = TBC1 domain family member 9B (187-195)
FLLGKEVSL

SEQ ID NO: 5161 - protein, 11 aa, synthetic construct
  REGION 1..11: note = Poly (ADP-ribose) polymerase 10 (535-545)
FLLGPEGQHLL

SEQ ID NO: 5162 - protein, 10 aa, synthetic construct
  REGION 1..10: note = Transport and Golgi organization protein 6 homolog (990-999)
FLLGSVVHEV

SEQ ID NO: 5163 - protein, 9 aa, synthetic construct
  REGION 1..9: note = Protein transport protein Sec24A (394-402)
FLLHIQQQV

SEQ ID NO: 5164 - protein, 10 aa, synthetic construct
  REGION 1..10: note = GMP synthase (glutamine-hydrolyzing) (510-519)
FLLPIKTVGV

SEQ ID NO: 5165 - protein, 9 aa, synthetic construct
  REGION 1..9: note = Nuclear pore complex protein Nup133 (610-618)
FLMDFIHQV

SEQ ID NO: 5166 - protein, 11 aa, synthetic construct
  REGION 1..11: note = SHC SH2 domain-binding protein 1 (439-449)
FLMKNSDLYGA

SEQ ID NO: 5167 - protein, 9 aa, synthetic construct
  REGION 1..9: note = 3-hydroxyacyl-CoA dehydrogenase type-2 (245-253)
FLNGEVIRL

SEQ ID NO: 5168 - protein, 9 aa, synthetic construct
  REGION 1..9: note = Translation initiation factor eIF-2B subunit delta (300-308)
FLNKEITSV

SEQ ID NO: 5169 - protein, 9 aa, synthetic construct
  REGION 1..9: note = Ubiquitin-associated protein 2-like (434-442)
FLQEKSPAV

SEQ ID NO: 5170 - protein, 10 aa, synthetic construct
  REGION 1..10: note = DNA dC-dU-editing enzyme APOBEC-3B (104-113)
FLQENTHVRL

SEQ ID NO: 5171 - protein, 9 aa, synthetic construct
  REGION 1..9: note = Glutathione S-transferase A4 (87-95)
FLQEYTVKL

SEQ ID NO: 5172 - protein, 9 aa, synthetic construct
  REGION 1..9: note = Proteasome activator complex subunit 4 (673-681)
FLQPELVKL

SEQ ID NO: 5173 - protein, 9 aa, synthetic construct
  REGION 1..9: note = cAMP-dependent protein kinase type I-alpha regulatory subunit (49-57)
FLREYFERL

SEQ ID NO: 5174 - protein, 11 aa, synthetic construct
  REGION 1..11: note = 6-phosphofructo-2-kinase/fructose-2,6-bisphosphatase 4 (83-93)
FLSEEGGHVAV

SEQ ID NO: 5175 - protein, 10 aa, synthetic construct
  REGION 1..10: note = DNA dC-dU-editing enzyme APOBEC-3B (107-116)
FLSEHPNVTL

SEQ ID NO: 5176 - protein, 11 aa, synthetic construct
  REGION 1..11: note = Lysine-tRNA ligase (585-595)
FLTDSNNIKEV

SEQ ID NO: 5177 - protein, 9 aa, synthetic construct
  REGION 1..9: note = Calcium and integrin-binding protein 1 (21-29)
FLTKQEILL

SEQ ID NO: 5178 - protein, 9 aa, synthetic construct
  REGION 1..9: note = Zinc transporter ZIP6 (435-443)
FLVEHVLTL

SEQ ID NO: 5179 - protein, 9 aa, synthetic construct
  REGION 1..9: note = DDB1- and CUL4-associated factor 15 (73-81)
FLYAGHIFL

SEQ ID NO: 5180 - protein, 9 aa, synthetic construct
  REGION 1..9: note = DNA topoisomerase 2-beta (701-709)
FLYDDNQRV

SEQ ID NO: 5181 - protein, 10 aa, synthetic construct
  REGION 1..10: note = Alpha-ketoglutarate-dependent dioxygenase FTO (206-215)
FMDPQKMPYL

SEQ ID NO: 5182 - protein, 10 aa, synthetic construct
  REGION 1..10: note = Serine/threonine-protein phosphatase 6 catalytic subunit (244-253)
FMFDEKLVTV

SEQ ID NO: 5183 - protein, 9 aa, synthetic construct
  REGION 1..9: note = U4/U6 small nuclear ribonucleoprotein Prp3 (195-203)
FMNDAIEKA

SEQ ID NO: 5184 - protein, 9 aa, synthetic construct
  REGION 1..9: note = Putative helicase MOV-10 (35-43)
FVDGLTFKV

SEQ ID NO: 5185 - protein, 10 aa, synthetic construct
  REGION 1..10: note = Ubiquitin carboxyl-terminal hydrolase 10 (604-613)
GIFGGHIRSV

SEQ ID NO: 5186 - protein, 11 aa, synthetic construct
  REGION 1..11: note = D13S824E locus (103-113)
GILTKELLHSV

SEQ ID NO: 5187 - protein, 9 aa, synthetic construct
  REGION 1..9: note = CAD protein (445-453)
GLADKVYFL

SEQ ID NO: 5188 - protein, 11 aa, synthetic construct
  REGION 1..11: note = Threonine-tRNA ligase, cytoplasmic (145-155)
GLADNTVIAKV

SEQ ID NO: 5189 - protein, 9 aa, synthetic construct
  REGION 1..9: note = Importin-4 (306-314)
GLAPHLEQI

SEQ ID NO: 5190 - protein, 9 aa, synthetic construct
  REGION 1..9: note = Filamin-B (1451-1459)
GLAPLEVRV

SEQ ID NO: 5191 - protein, 10 aa, synthetic construct
  REGION 1..10: note = Putative helicase MOV-10 (451-460)
GLDDIKDLKV

SEQ ID NO: 5192 - protein, 9 aa, synthetic construct
  REGION 1..9: note = Probable helicase with zinc finger domain (341-349)
GLDHYVYKV

SEQ ID NO: 5193 - protein, 10 aa, synthetic construct
  REGION 1..10: note = Rho GTPase-activating protein 12 (126-135)
GLDIDGIYRV

SEQ ID NO: 5194 - protein, 10 aa, synthetic construct
  REGION 1..10: note = Proline-rich protein 12 (188-197)
GLDPNKPPEL

SEQ ID NO: 5195 - protein, 10 aa, synthetic construct
  REGION 1..10: note = WD repeat-containing protein 70 (189-198)
GLDPSGARLV

SEQ ID NO: 5196 - protein, 9 aa, synthetic construct
  REGION 1..9: note = Hexokinase-1 (818-826)
GLDRLNVTV

SEQ ID NO: 5197 - protein, 9 aa, synthetic construct
  REGION 1..9: note = Cleavage stimulation factor subunit 3 (220-228)
GLDRNAPSV

SEQ ID NO: 5198 - protein, 9 aa, synthetic construct
  REGION 1..9: note = Nischarin (1238-1246)
GLFDQHFRL

SEQ ID NO: 5199 - protein, 9 aa, synthetic construct
  REGION 1..9: note = Targeting protein for Xklp2 (12-20)
GLFQGKTPL

SEQ ID NO: 5200 - protein, 9 aa, synthetic construct
  REGION 1..9: note = Protein SPT2 homolog (93-101)
GLGPPGRSV

SEQ ID NO: 5201 - protein, 8 aa, synthetic construct
  REGION 1..8: note = Bardet-Biedl syndrome 1 protein (382-389)
GLGPTFKL

SEQ ID NO: 5202 - protein, 9 aa, synthetic construct
  REGION 1..9: note = Microtubule-actin cross-linking factor 1, isoforms 1/2/3/5 (195-203)
GLIDRQVTV

SEQ ID NO: 5203 - protein, 10 aa, synthetic construct
  REGION 1..10: note = Ubiquitin-like domain-containing CTD phosphatase 1 (225-234)
GLIDVKPLGV

SEQ ID NO: 5204 - protein, 9 aa, synthetic construct
  REGION 1..9: note = Programmed cell death protein 5 (91-99)
GLIEILKKV

SEQ ID NO: 5205 - protein, 11 aa, synthetic construct
  REGION 1..11: note = Na(+)/H(+) exchange regulatory cofactor NHE-RF1 (122-132)
GLLAGDRLVEV

SEQ ID NO: 5206 - protein, 9 aa, synthetic construct
  REGION 1..9: note = Trifunctional purine biosynthetic protein adenosine-3 (685-693)
GLLENIPRV

SEQ ID NO: 5207 - protein, 10 aa, synthetic construct
  REGION 1..10: note = Hom s 1 (11-20)
GLLETTVQKV

SEQ ID NO: 5208 - protein, 9 aa, synthetic construct
  REGION 1..9: note = Tumor necrosis factor receptor superfamily member 10B (362-370)
GLMDNEIKV

SEQ ID NO: 5209 - protein, 9 aa, synthetic construct
  REGION 1..9: note = Glucocorticoid modulatory element-binding protein 1 (312-320)
GLMDTVKKV

SEQ ID NO: 5210 - protein, 10 aa, synthetic construct
  REGION 1..10: note = Hydroxyacyl-coenzyme A dehydrogenase, mitochondrial (36-45)
GLMGAGIAQV

SEQ ID NO: 5211 - protein, 9 aa, synthetic construct
  REGION 1..9: note = Myocyte-specific enhancer factor 2A (27-35)
GLMKKAYEL

SEQ ID NO: 5212 - protein, 9 aa, synthetic construct
  REGION 1..9: note = Kinetochore protein NDC80 homolog (330-338)
GLNEEIARV

SEQ ID NO: 5213 - protein, 10 aa, synthetic construct
  REGION 1..10: note = Zinc finger protein 106 (808-817)
GLPRFGIEMV

SEQ ID NO: 5214 - protein, 9 aa, synthetic construct
  REGION 1..9: note = Signal recognition particle subunit SRP72 (170-178)
GLQEGTHEL

SEQ ID NO: 5215 - protein, 10 aa, synthetic construct
  REGION 1..10: note = Rho GTPase-activating protein 35 (1277-1286)
GLSTEGIYRV

SEQ ID NO: 5216 - protein, 10 aa, synthetic construct
  REGION 1..10: note = Probable RNA-binding protein 23 (209-218)
GLTGQRLLGV

SEQ ID NO: 5217 - protein, 9 aa, synthetic construct
  REGION 1..9: note = Anamorsin (27-35)
GLVDKLQAL

SEQ ID NO: 5218 - protein, 9 aa, synthetic construct
  REGION 1..9: note = Anaphase-promoting complex subunit 1 (56-64)
GLVGSLQEV

SEQ ID NO: 5219 - protein, 9 aa, synthetic construct
  REGION 1..9: note = Intraflagellar transport protein 172 homolog (410-418)
GLWEEAYRV

SEQ ID NO: 5220 - protein, 11 aa, synthetic construct
  REGION 1..11: note = Protein PRRC2B (1324-1334)
GLWGPEEEPHL

SEQ ID NO: 5221 - protein, 9 aa, synthetic construct
  REGION 1..9: note = TRPM8 channel-associated factor 1 (327-335)
GLWGPVHEL

SEQ ID NO: 5222 - protein, 10 aa, synthetic construct
  REGION 1..10: note = tRNA (adenine(58)-N(1))-methyltransferase non-catalytic subunit TRM6 (83-92)
GLYEFPLNKV

SEQ ID NO: 5223 - protein, 9 aa, synthetic construct
  REGION 1..9: note = Long-chain-fatty-acid-CoA ligase 3 (310-318)
GMAERIPEL

SEQ ID NO: 5224 - protein, 11 aa, synthetic construct
  REGION 1..11: note = DNA damage-binding protein 1 (56-66)
GMYGKIAVMEL

SEQ ID NO: 5225 - protein, 9 aa, synthetic construct
  REGION 1..9: note = ORM1-like protein 3 (59-67)
GMYIFLHTV

SEQ ID NO: 5226 - protein, 11 aa, synthetic construct
  REGION 1..11: note = WD repeat-containing protein 18 (99-109)
GVAESIHLWEV

SEQ ID NO: 5227 - protein, 11 aa, synthetic construct
  REGION 1..11: note = Putative eukaryotic translation initiation factor 2 subunit 3-like protein (277-287)
GVAGGSILKGV

SEQ ID NO: 5228 - protein, 9 aa, synthetic construct
  REGION 1..9: note = Chitinase domain-containing protein 1 (236-244)
HLAEALHQA

SEQ ID NO: 5229 - protein, 9 aa, synthetic construct
  REGION 1..9: note = E3 ubiquitin-protein ligase BRE1A (291-299)
HLAEVLERV

SEQ ID NO: 5230 - protein, 9 aa, synthetic construct
  REGION 1..9: note = Protein VPRBP (425-433)
HLAIKLEQV

SEQ ID NO: 5231 - protein, 9 aa, synthetic construct
  REGION 1..9: note = E3 ubiquitin-protein ligase TRIM22 (73-81)
HLANIVERV

SEQ ID NO: 5232 - protein, 9 aa, synthetic construct
  REGION 1..9: note = Tetratricopeptide repeat protein 17 (671-679)
HLDATKLLL

SEQ ID NO: 5233 - protein, 9 aa, synthetic construct
  REGION 1..9: note = Ninein (404-412)
HLLERVDQV

SEQ ID NO: 5234 - protein, 9 aa, synthetic construct
  REGION 1..9: note = Golgin subfamily A member 4 (1695-1703)
HLSELNTKL

SEQ ID NO: 5235 - protein, 9 aa, synthetic construct
  REGION 1..9: note = Lysine-tRNA ligase (148-156)
HLTDITLKV

SEQ ID NO: 5236 - protein, 9 aa, synthetic construct
  REGION 1..9: note = Multiple C2 and transmembrane domain-containing protein 1 (245-253)
HLWRGIVSI

SEQ ID NO: 5237 - protein, 9 aa, synthetic construct
  REGION 1..9: note = Nucleoside diphosphate-linked moiety X motif 19 (348-356)
HLYDIHVTV

SEQ ID NO: 5238 - protein, 9 aa, synthetic construct
  REGION 1..9: note = Probable helicase senataxin (435-443)
HLYSEVKEV

SEQ ID NO: 5239 - protein, 10 aa, synthetic construct
  REGION 1..10: note = Folliculin-interacting protein 1 (827-836)
IIADMDKWTV

SEQ ID NO: 5240 - protein, 11 aa, synthetic construct
  REGION 1..11: note = Cofilin-1 (47-57)
IILEEGKEILV

SEQ ID NO: 5241 - protein, 9 aa, synthetic construct
  REGION 1..9: note = Ras GTPase-activating-like protein IQGAP1 (1071-1079)
ILAPVVKEI

SEQ ID NO: 5242 - protein, 9 aa, synthetic construct
  REGION 1..9: note = 26S proteasome non-ATPase regulatory subunit 1 (736-744)
ILDAGGHNV

SEQ ID NO: 5243 - protein, 11 aa, synthetic construct
  REGION 1..11: note = 26S proteasome non-ATPase regulatory subunit 1 (736-746)
ILDAGGHNVTI

SEQ ID NO: 5244 - protein, 9 aa, synthetic construct
  REGION 1..9: note = F-box only protein 8 (162-170)
ILDDSPKEI

SEQ ID NO: 5245 - protein, 11 aa, synthetic construct
  REGION 1..11: note = Melanoma inhibitory activity protein 3 (156-166)
ILDDTAKNLRV

SEQ ID NO: 5246 - protein, 9 aa, synthetic construct
  REGION 1..9: note = IQ domain-containing protein D (55-63)
ILDEAIYKV

SEQ ID NO: 5247 - protein, 9 aa, synthetic construct
  REGION 1..9: note = Axin-1 (508-516)
ILDEHVQRV

SEQ ID NO: 5248 - protein, 11 aa, synthetic construct
  REGION 1..11: note = Dihydroxyacetone phosphate acyltransferase (106-116)
ILDEMSHKLRL

SEQ ID NO: 5249 - protein, 9 aa, synthetic construct
  REGION 1..9: note = Protein DBF4 homolog A (461-469)
ILDISEHTL

SEQ ID NO: 5250 - protein, 9 aa, synthetic construct
  REGION 1..9: note = F-box only protein 25 (65-73)
ILDKIVQKV

SEQ ID NO: 5251 - protein, 9 aa, synthetic construct
  REGION 1..9: note = Hermansky-Pudlak syndrome 5 protein (446-454)
ILDSGIYRI

SEQ ID NO: 5252 - protein, 10 aa, synthetic construct
  REGION 1..10: note = Cofilin-1 (48-57)
ILEEGKEILV

SEQ ID NO: 5253 - protein, 9 aa, synthetic construct
  REGION 1..9: note = Heat shock protein HSP 90-alpha (394-402)
ILEKKVEKV

SEQ ID NO: 5254 - protein, 9 aa, synthetic construct
  REGION 1..9: note = Guanine nucleotide-binding protein subunit beta-5 (320-328)
ILFGHENRV

SEQ ID NO: 5255 - protein, 9 aa, synthetic construct
  REGION 1..9: note = Cytosolic phospholipase A2 (399-407)
ILFNRVLGV

SEQ ID NO: 5256 - protein, 9 aa, synthetic construct
  REGION 1..9: note = 60S acidic ribosomal protein P1 (15-23)
ILHDDEVTV

SEQ ID NO: 5257 - protein, 9 aa, synthetic construct
  REGION 1..9: note = ATP-binding cassette sub-family B member 7, mitochondrial (22-30)
ILIRPLVSV

SEQ ID NO: 5258 - protein, 11 aa, synthetic construct
  REGION 1..11: note = Dual specificity mitogen-activated protein kinase kinase 7 (249-259)
ILLDERGQIKL

SEQ ID NO: 5259 - protein, 10 aa, synthetic construct
  REGION 1..10: note = Lon protease homolog 2, peroxisomal (293-302)
ILLDNDHYAM

SEQ ID NO: 5260 - protein, 9 aa, synthetic construct
  REGION 1..9: note = Protein virilizer homolog (532-540)
ILLDQTVRV

SEQ ID NO: 5261 - protein, 9 aa, synthetic construct
  REGION 1..9: note = Histone-lysine N-methyltransferase SETD1A (58-66)
ILLEHNYAL

SEQ ID NO: 5262 - protein, 11 aa, synthetic construct
  REGION 1..11: note = Beta-adrenergic receptor kinase 1 (32-42)
ILLPEPSIRSV

SEQ ID NO: 5263 - protein, 9 aa, synthetic construct
  REGION 1..9: note = Endosomal/lysomomal potassium channel TMEM175 (218-226)
ILLPYVSKV

SEQ ID NO: 5264 - protein, 11 aa, synthetic construct
  REGION 1..11: note = Serine/threonine-protein kinase TAO2 (157-167)
ILLSEPGLVKL

SEQ ID NO: 5265 - protein, 11 aa, synthetic construct
  REGION 1..11: note = 60S ribosomal protein L19 (118-128)
ILMEHIHKLKA

SEQ ID NO: 5266 - protein, 9 aa, synthetic construct
  REGION 1..9: note = Pre-mRNA-splicing factor ATP-dependent RNA helicase DHX15 (271-279)
ILMGVLKEV

SEQ ID NO: 5267 - protein, 9 aa, synthetic construct
  REGION 1..9: note = Cohesin subunit SA-2 (794-802)
ILMIFSHQI

SEQ ID NO: 5268 - protein, 9 aa, synthetic construct
  REGION 1..9: note = Epidermal growth factor receptor substrate 15 (67-75)
ILNKQEFFV

SEQ ID NO: 5269 - protein, 9 aa, synthetic construct
  REGION 1..9: note = Cell division control protein 6 homolog (354-362)
ILQDRLNQV

SEQ ID NO: 5270 - protein, 9 aa, synthetic construct
  REGION 1..9: note = AT-rich interactive domain-containing protein 4B (796-804)
ILQEKLQEI

SEQ ID NO: 5271 - protein, 9 aa, synthetic construct
  REGION 1..9: note = Transcription activator BRG1 (366-374)
ILQEREYRL

SEQ ID NO: 5272 - protein, 9 aa, synthetic construct
  REGION 1..9: note = Putative eukaryotic translation initiation factor 2 subunit 3-like protein (187-195)
ILQNKIDLV

SEQ ID NO: 5273 - protein, 9 aa, synthetic construct
  REGION 1..9: note = Ankyrin repeat and SOCS box protein 3 (486-494)
ILQQHIATV

SEQ ID NO: 5274 - protein, 9 aa, synthetic construct
  REGION 1..9: note = Poly (ADP-ribose) polymerase 1 (712-720)
ILSEVQQAV

SEQ ID NO: 5275 - protein, 9 aa, synthetic construct
  REGION 1..9: note = Ribonucleases P/MRP protein subunit POP1 (442-450)
ILTEAIKAA

SEQ ID NO: 5276 - protein, 9 aa, synthetic construct
  REGION 1..9: note = Translin-associated protein X (86-94)
ILTESEIKL

SEQ ID NO: 5277 - protein, 9 aa, synthetic construct
  REGION 1..9: note = Phosphotriesterase-related protein (316-324)
ILTNVVPKM

SEQ ID NO: 5278 - protein, 9 aa, synthetic construct
  REGION 1..9: note = T-complex protein 1 subunit eta (186-194)
ILYDKLEKI

SEQ ID NO: 5279 - protein, 9 aa, synthetic construct
  REGION 1..9: note = Methionine adenosyltransferase 2 subunit beta (184-192)
ILYGEVEKL

SEQ ID NO: 5280 - protein, 9 aa, synthetic construct
  REGION 1..9: note = Chromosome transmission fidelity protein 8 homolog (58-66)
ILYGKIIHL

SEQ ID NO: 5281 - protein, 11 aa, synthetic construct
  REGION 1..11: note = Catenin alpha-1 (549-559)
IMAQLPQEQKA

SEQ ID NO: 5282 - protein, 9 aa, synthetic construct
  REGION 1..9: note = Ras GTPase-activating-like protein IQGAP1 (1079-1087)
IMDDKSLNI

SEQ ID NO: 5283 - protein, 9 aa, synthetic construct
  REGION 1..9: note = Staphylococcal nuclease domain-containing protein 1 (665-673)
ITDDLHFYV

SEQ ID NO: 5284 - protein, 9 aa, synthetic construct
  REGION 1..9: note = Splicing factor 3A subunit 1 (52-60)
IVDKTASFV

SEQ ID NO: 5285 - protein, 11 aa, synthetic construct
  REGION 1..11: note = Probable JmjC domain-containing histone demethylation protein 2C (2276-2286)
IVLPAGALHQV

SEQ ID NO: 5286 - protein, 9 aa, synthetic construct
  REGION 1..9: note = Aurora kinase B (242-250)
KIADFGWSV

SEQ ID NO: 5287 - protein, 10 aa, synthetic construct
  REGION 1..10: note = DNA topoisomerase 2-alpha (83-92)
KIFDEILVNA

SEQ ID NO: 5288 - protein, 10 aa, synthetic construct
  REGION 1..10: note = Vam6/Vps39-like protein (471-480)
KIFTEDLPEV

SEQ ID NO: 5289 - protein, 10 aa, synthetic construct
  REGION 1..10: note = B-Raf serine/threonine-protein (638-647)
KIGDFGLATV

SEQ ID NO: 5290 - protein, 9 aa, synthetic construct
  REGION 1..9: note = Kelch-like protein 13 (131-139)
KIIDFIYTA

SEQ ID NO: 5291 - protein, 9 aa, synthetic construct
  REGION 1..9: note = Interleukin-6 receptor subunit beta (362-370)
KILDYEVTL

SEQ ID NO: 5292 - protein, 9 aa, synthetic construct
  REGION 1..9: note = Ankyrin repeat domain-containing protein 17 (748-756)
KILEELQKV

SEQ ID NO: 5293 - protein, 9 aa, synthetic construct
  REGION 1..9: note = Protein IWS1 homolog (639-647)
KILQELPSV

SEQ ID NO: 5294 - protein, 9 aa, synthetic construct
  REGION 1..9: note = G2/M phase-specific E3 ubiquitin-protein ligase (105-113)
KILSELFTV

SEQ ID NO: 5295 - protein, 9 aa, synthetic construct
  REGION 1..9: note = Adenomatous polyposis coli protein (1645-1653)
KIMDQVQQA

SEQ ID NO: 5296 - protein, 11 aa, synthetic construct
  REGION 1..11: note = Flotillin-2 (57-67)
KIMTEKELLAV

SEQ ID NO: 5297 - protein, 9 aa, synthetic construct
  REGION 1..9: note = Calpastatin (416-424)
KLAAAISEV

SEQ ID NO: 5298 - protein, 11 aa, synthetic construct
  REGION 1..11: note = Transitional endoplasmic reticulum ATPase (17-27)
KLADDVDLEQV

SEQ ID NO: 5299 - protein, 10 aa, synthetic construct
  REGION 1..10: note = Cyclin-dependent kinase 9 (164-173)
KLADFGLARA

SEQ ID NO: 5300 - protein, 10 aa, synthetic construct
  REGION 1..10: note = E3 ubiquitin-protein ligase listerin (404-413)
KLADISINYV

SEQ ID NO: 5301 - protein, 9 aa, synthetic construct
  REGION 1..9: note = Guanosine-3',5'-bis(diphosphate) 3'-pyrophosphohydrolase MESH1 (119-127)
KLADKLYNL

SEQ ID NO: 5302 - protein, 9 aa, synthetic construct
  REGION 1..9: note = Protein PRR14L (1063-1071)
KLAEGVLDV

SEQ ID NO: 5303 - protein, 9 aa, synthetic construct
  REGION 1..9: note = MAP kinase-activated protein kinase 5 (452-460)
KLAEIVKQV

SEQ ID NO: 5304 - protein, 9 aa, synthetic construct
  REGION 1..9: note = Nck-associated protein 1 (12-20)
KLAEKLTIL

SEQ ID NO: 5305 - protein, 10 aa, synthetic construct
  REGION 1..10: note = Nuclear poreoprotein p62 (435-444)
KLAENIDAQL

SEQ ID NO: 5306 - protein, 9 aa, synthetic construct
  REGION 1..9: note = FACT complex subunit SPT16 (216-224)
KLAESVEKA

SEQ ID NO: 5307 - protein, 9 aa, synthetic construct
  REGION 1..9: note = Transcription factor BTF3 (54-62)
KLAKLQAQV

SEQ ID NO: 5308 - protein, 9 aa, synthetic construct
  REGION 1..9: note = DNA excision repair protein ERCC-6-like (655-663)
KLDEHIAYL

SEQ ID NO: 5309 - protein, 11 aa, synthetic construct
  REGION 1..11: note = DNA topoisomerase 2-alpha (278-288)
KLDETGNSLKV

SEQ ID NO: 5310 - protein, 11 aa, synthetic construct
  REGION 1..11: note = Kelch repeat and BTB domain-containing protein 4 (508-518)
KLDPATSAVTV

SEQ ID NO: 5311 - protein, 9 aa, synthetic construct
  REGION 1..9: note = N-acetylneuraminate lyase (77-85)
KLDQVIIHV

SEQ ID NO: 5312 - protein, 9 aa, synthetic construct
  REGION 1..9: note = DENN domain-containing protein 4C (705-713)
KLFDRPQEL

SEQ ID NO: 5313 - protein, 11 aa, synthetic construct
  REGION 1..11: note = DENN domain-containing protein 4C (705-715)
KLFDRPQELKL

SEQ ID NO: 5314 - protein, 9 aa, synthetic construct
  REGION 1..9: note = Fatty acyl-CoA reductase 2 (63-71)
KLFEKVKEV

SEQ ID NO: 5315 - protein, 9 aa, synthetic construct
  REGION 1..9: note = Putative homeodomain transcription factor 2 (586-594)
KLFGHLTSA

SEQ ID NO: 5316 - protein, 9 aa, synthetic construct
  REGION 1..9: note = 28S ribosomal protein S33, mitochondrial (35-43)
KLFSELPLA

SEQ ID NO: 5317 - protein, 9 aa, synthetic construct
  REGION 1..9: note = Hom s 1 (129-137)
KLGLKPLEV

SEQ ID NO: 5318 - protein, 9 aa, synthetic construct
  REGION 1..9: note = AP-1 complex subunit beta-1 (147-155)
KLHDINAQL

SEQ ID NO: 5319 - protein, 10 aa, synthetic construct
  REGION 1..10: note = Guanine nucleotide-binding protein subunit beta-5 (32-41)
KLHDVELHQV

SEQ ID NO: 5320 - protein, 9 aa, synthetic construct
  REGION 1..9: note = RNA-binding protein 4B (59-67)
KLHGVNINV

SEQ ID NO: 5321 - protein, 10 aa, synthetic construct
  REGION 1..10: note = Zinc finger protein 143 (59-68)
KLIDGQVIQL

SEQ ID NO: 5322 - protein, 9 aa, synthetic construct
  REGION 1..9: note = cAMP-responsive element modulator (103-111)
KLIEELETL

SEQ ID NO: 5323 - protein, 10 aa, synthetic construct
  REGION 1..10: note = Elongation factor 2 (314-323)
KLIEKLDIKL

SEQ ID NO: 5324 - protein, 9 aa, synthetic construct
  REGION 1..9: note = WD repeat-containing protein 43 (416-424)
KLILLITQV

SEQ ID NO: 5325 - protein, 9 aa, synthetic construct
  REGION 1..9: note = CTD small phosphatase-like protein 2 (434-442)
KLIPFLEKL

SEQ ID NO: 5326 - protein, 9 aa, synthetic construct
  REGION 1..9: note = Ras-related GTP-binding protein C (235-243)
KLIPQLPTL

SEQ ID NO: 5327 - protein, 9 aa, synthetic construct
  REGION 1..9: note = DNA repair and recombination protein RAD54B (649-657)
KLLAVIHEL

SEQ ID NO: 5328 - protein, 13 aa, synthetic construct
  REGION 1..13: note = HIV Tat-specific factor 1 (199-211)
KLLDEDEIRGYKL

SEQ ID NO: 5329 - protein, 11 aa, synthetic construct
  REGION 1..11: note = Negative elongation factor A (255-265)
KLLDISELDMV

SEQ ID NO: 5330 - protein, 9 aa, synthetic construct
  REGION 1..9: note = Integrator complex subunit 4 (341-349)
KLLDLMPRL

SEQ ID NO: 5331 - protein, 11 aa, synthetic construct
  REGION 1..11: note = Rho-associated protein kinase 1 (1093-1103)
KLLDLSDSTSV

SEQ ID NO: 5332 - protein, 9 aa, synthetic construct
  REGION 1..9: note = E3 ISG15-protein ligase HERC5 (795-803)
KLLDQMPSL

SEQ ID NO: 5333 - protein, 9 aa, synthetic construct
  REGION 1..9: note = T-complex protein 1 subunit eta (55-63)
KLLDVVHPA

SEQ ID NO: 5334 - protein, 9 aa, synthetic construct
  REGION 1..9: note = Renal cancer differentiation gene 1 protein (69-77)
KLLEATSAV

SEQ ID NO: 5335 - protein, 10 aa, synthetic construct
  REGION 1..10: note = E3 ubiquitin-protein ligase UBR4 (335-344)
KLLEEQGIFL

SEQ ID NO: 5336 - protein, 12 aa, synthetic construct
  REGION 1..12: note = Prolyl 4-hydroxylase subunit alpha-1 (230-241)
KLLELDPEHQRA

SEQ ID NO: 5337 - protein, 10 aa, synthetic construct
  REGION 1..10: note = Archaemetzincin-2 (125-134)
KLLEPVPVSV

SEQ ID NO: 5338 - protein, 9 aa, synthetic construct
  REGION 1..9: note = EH domain-binding protein 1 (684-692)
KLLEVQPQV

SEQ ID NO: 5339 - protein, 9 aa, synthetic construct
  REGION 1..9: note = Hyaluronan mediated motility receptor (233-241)
KLLEYIEEI

SEQ ID NO: 5340 - protein, 9 aa, synthetic construct
  REGION 1..9: note = Conserved oligomeric Golgi complex subunit 5 (336-344)
KLMDHIYAV

SEQ ID NO: 5341 - protein, 10 aa, synthetic construct
  REGION 1..10: note = Proliferating cell nuclear antigen (117-126)
KLMDLDVEQL

SEQ ID NO: 5342 - protein, 9 aa, synthetic construct
  REGION 1..9: note Dolichyl-diphosphooligosaccharide-proteinosyltransferase subunit STT3A (289-297)
KLNPQQFEV

SEQ ID NO: 5343 - protein, 9 aa, synthetic construct
  REGION 1..9: note = Ribosomal L1 domain-containing protein 1 (242-250)
KLPEKWESV

SEQ ID NO: 5344 - protein, 9 aa, synthetic construct
  REGION 1..9: note = Regulator of G-protein signaling 10 (129-137)
KLQDQIFNL

SEQ ID NO: 5345 - protein, 9 aa, synthetic construct
  REGION 1..9: note = Nesprin-2 (2292-2300)
KLQELENRL

SEQ ID NO: 5346 - protein, 9 aa, synthetic construct
  REGION 1..9: note = Signal transducer and activator of transcription 1-alpha/beta (350-358)
KLQELNYNL

SEQ ID NO: 5347 - protein, 9 aa, synthetic construct
  REGION 1..9: note = Protein Jade-2 (282-290)
KLQEQIFHL

SEQ ID NO: 5348 - protein, 9 aa, synthetic construct
  REGION 1..9: note = DNA-directed RNA polymerase II subunit RPB3 (255-263)
KLSDLQTQL

SEQ ID NO: 5349 - protein, 9 aa, synthetic construct
  REGION 1..9: note = Probable tRNA N6-adenosine threonylcarbamoyltransferase (189-197)
KLVELPYTV

SEQ ID NO: 5350 - protein, 9 aa, synthetic construct
  REGION 1..9: note = Electron transfer flavoprotein subunit beta (147-155)
KLVKEVIAV

SEQ ID NO: 5351 - protein, 9 aa, synthetic construct
  REGION 1..9: note = Protein Mis18-alpha (218-226)
KLWEAESKL

SEQ ID NO: 5352 - protein, 9 aa, synthetic construct
  REGION 1..9: note = Phosphatidylinositol 4-kinase beta (788-796)
KLYDGFQYL

SEQ ID NO: 5353 - protein, 9 aa, synthetic construct
  REGION 1..9: note = Cytochrome P450 20A1 (274-282)
KLYEEINQV

SEQ ID NO: 5354 - protein, 9 aa, synthetic construct
  REGION 1..9: note = Delta(24)-sterol reductase (287-295)
KLYEQHHVV

SEQ ID NO: 5355 - protein, 10 aa, synthetic construct
  REGION 1..10: note = Ectopic P granules protein 5 homolog (225-234)
KLYPQLPAEI

SEQ ID NO: 5356 - protein, 9 aa, synthetic construct
  REGION 1..9: note = CCAAT/enhancer-binding protein zeta (211-219)
KLYQHEINL

SEQ ID NO: 5357 - protein, 13 aa, synthetic construct
  REGION 1..13: note = Stathmin (95-107)
KMAEEKLTHKMEA

SEQ ID NO: 5358 - protein, 9 aa, synthetic construct
  REGION 1..9: note = MORF4 family-associated protein 1-like 1 (109-117)
KMAEMLVEL

SEQ ID NO: 5359 - protein, 9 aa, synthetic construct
  REGION 1..9: note = ATP-binding cassette sub-family F member 3 (459-467)
KMLEKLPEL

SEQ ID NO: 5360 - protein, 9 aa, synthetic construct
  REGION 1..9: note = Nodal modulator 3 (261-269)
KMMDVTVTI

SEQ ID NO: 5361 - protein, 9 aa, synthetic construct
  REGION 1..9: note = Proteasome subunit beta type-2 (37-45)
KMSEKILLL

SEQ ID NO: 5362 - protein, 10 aa, synthetic construct
  REGION 1..10: note = cAMP-dependent protein kinase type I-beta regulatory subunit (244-253)
KMYEEFLSKV

SEQ ID NO: 5363 - protein, 9 aa, synthetic construct
  REGION 1..9: note = Rap1 GTPase-GDP dissociation stimulator 1 (67-75)
KVANIIAEV

SEQ ID NO: 5364 - protein, 9 aa, synthetic construct
  REGION 1..9: note = Myosin light polypeptide 6 (69-77)
KVLDFEHFL

SEQ ID NO: 5365 - protein, 9 aa, synthetic construct
  REGION 1..9: note = Probable E3 ubiquitin-protein ligase HERC4 (595-603)
KVLEILHRV

SEQ ID NO: 5366 - protein, 11 aa, synthetic construct
  REGION 1..11: note = Protein SON (298-308)
KVLEPSETLVV

SEQ ID NO: 5367 - protein, 9 aa, synthetic construct
  REGION 1..9: note = Proteasome activator complex subunit 2 (145-153)
KVLERVNAV

SEQ ID NO: 5368 - protein, 9 aa, synthetic construct
  REGION 1..9: note = CCR4-NOT transcription complex subunit 1 (128-136)
KVLGIVVGV

SEQ ID NO: 5369 - protein, 9 aa, synthetic construct
  REGION 1..9: note = Amyloid beta A4 protein (9-17)
LLAAWTARA

SEQ ID NO: 5370 - protein, 9 aa, synthetic construct
  REGION 1..9: note = DNA fragmentation factor subunit beta (69-77)
LLADLLHNV

SEQ ID NO: 5371 - protein, 9 aa, synthetic construct
  REGION 1..9: note = CREB-binding protein (653-661)
LLAEKIYKI

SEQ ID NO: 5372 - protein, 9 aa, synthetic construct
  REGION 1..9: note = Nuclear autoantigenic sperm protein (243-251)
LLAETHYQL

SEQ ID NO: 5373 - protein, 11 aa, synthetic construct
  REGION 1..11: note = SCAN domain-containing protein 1 (194-204)
LLAILPEAARA

SEQ ID NO: 5374 - protein, 9 aa, synthetic construct
  REGION 1..9: note = Cyclin-dependent kinase inhibitor 1C (103-111)
LLAPRPVAV

SEQ ID NO: 5375 - protein, 9 aa, synthetic construct
  REGION 1..9: note = Protein quaking (40-48)
LLDEEISRV

SEQ ID NO: 5376 - protein, 8 aa, synthetic construct
  REGION 1..8: note = T-complex protein 1 subunit beta (219-226)
LLDKKIGV

SEQ ID NO: 5377 - protein, 11 aa, synthetic construct
  REGION 1..11: note = ERI1 exoribonuclease 3 (155-165)
LLDPNVKSIFV

SEQ ID NO: 5378 - protein, 9 aa, synthetic construct
  REGION 1..9: note = Talin-1 (1761-1769)
LLDQTKTLA

SEQ ID NO: 5379 - protein, 9 aa, synthetic construct
  REGION 1..9: note = Cyclin-I (72-80)
LLDRFLATV

SEQ ID NO: 5380 - protein, 9 aa, synthetic construct
  REGION 1..9: note = Tight junction protein ZO-2 (821-829)
LLDVTPKAV

SEQ ID NO: 5381 - protein, 9 aa, synthetic construct
  REGION 1..9: note = Exocyst complex component 4 (7-15)
LLFDKFNAV

SEQ ID NO: 5382 - protein, 9 aa, synthetic construct
  REGION 1..9: note = Heterogeneous nuclear ribonucleoprotein M (229-237)
LLFDRPMHV

SEQ ID NO: 5383 - protein, 10 aa, synthetic construct
  REGION 1..10: note = DNA-directed RNA polymerase II subunit RPB11-b1 (11-20)
LLFEGEKITI

SEQ ID NO: 5384 - protein, 9 aa, synthetic construct
  REGION 1..9: note = Conserved oligomeric Golgi complex subunit 4 (51-59)
LLFEGIARI

SEQ ID NO: 5385 - protein, 9 aa, synthetic construct
  REGION 1..9: note = Cip1-interacting zinc finger protein (83-91)
LLGPPPVGV

SEQ ID NO: 5386 - protein, 8 aa, synthetic construct
  REGION 1..8: note = Neuferricin (59-66)
LLGRVYDV

SEQ ID NO: 5387 - protein, 11 aa, synthetic construct
  REGION 1..11: note = Cyclin-dependent kinase 1 (134-144)
LLIDDKGTIKL

SEQ ID NO: 5388 - protein, 9 aa, synthetic construct
  REGION 1..9: note = Nuclear pore complex protein Nup205 (248-256)
LLIGHLERV

SEQ ID NO: 5389 - protein, 9 aa, synthetic construct
  REGION 1..9: note = RCC1 and BTB domain-containing protein 1 (125-133)
LLIKQVVEV

SEQ ID NO: 5390 - protein, 12 aa, synthetic construct
  REGION 1..12: note = Histone H2B type 2-F (101-112)
LLLPGELAKHAV

SEQ ID NO: 5391 - protein, 9 aa, synthetic construct
  REGION 1..9: note = Eukaryotic translation initiation factor 3 subunit H (242-250)
LLMDRVDEM

SEQ ID NO: 5392 - protein, 9 aa, synthetic construct
  REGION 1..9: note = CDK5 regulatory subunit-associated protein 2 (1394-1402)
LLMEHIQEI

SEQ ID NO: 5393 - protein, 9 aa, synthetic construct
  REGION 1..9: note = Zinc finger SWIM domain-containing protein 1 (234-242)
LLNDRIWLA

SEQ ID NO: 5394 - protein, 9 aa, synthetic construct
  REGION 1..9: note = DNA-directed RNA polymerase II subunit RPB4 (32-40)
LLNSEVHML

SEQ ID NO: 5395 - protein, 9 aa, synthetic construct
  REGION 1..9: note = Rho guanine nucleotide exchange factor 2 (627-635)
LLQDAIREV

SEQ ID NO: 5396 - protein, 9 aa, synthetic construct
  REGION 1..9: note = Vam6/Vps39-like protein (218-226)
LLQDKQFEL

SEQ ID NO: 5397 - protein, 9 aa, synthetic construct
  REGION 1..9: note = E3 ubiquitin-protein ligase TRIM37 (221-229)
LLQEVEHQL

SEQ ID NO: 5398 - protein, 9 aa, synthetic construct
  REGION 1..9: note = DEP domain-containing protein 1A (20-28)
LLQPHLERV

SEQ ID NO: 5399 - protein, 9 aa, synthetic construct
  REGION 1..9: note = Small nuclear ribonucleoprotein Sm D1 (38-46)
LLVDVEPKV

SEQ ID NO: 5400 - protein, 10 aa, synthetic construct
  REGION 1..10: note = Lipopolysaccharide-responsive and beige-like anchor protein (407-416)
LLYDGKLSSA

SEQ ID NO: 5401 - protein, 11 aa, synthetic construct
  REGION 1..11: note = Electron transfer flavoprotein subunit alpha, mitochondrial (184-194)
LLYDLADQLHA

SEQ ID NO: 5402 - protein, 9 aa, synthetic construct
  REGION 1..9: note = Solute carrier family 43 member 3 (191-199)
LLYEKGISL

SEQ ID NO: 5403 - protein, 10 aa, synthetic construct
  REGION 1..10: note = Integrin alpha-4 (42-51)
LLYQGPHNTL

SEQ ID NO: 5404 - protein, 10 aa, synthetic construct
  REGION 1..10: note = Uridine-cytidine kinase-like 1 (470-479)
LMAEMGVHSV

SEQ ID NO: 5405 - protein, 9 aa, synthetic construct
  REGION 1..9: note = KH domain-containing, RNA-binding, signal transduction-associated protein 1 (243-251)
LMAHAMEEV

SEQ ID NO: 5406 - protein, 9 aa, synthetic construct
  REGION 1..9: note = Rho guanine nucleotide exchange factor 18 (267-275)
LMQTEVHHV

SEQ ID NO: 5407 - protein, 9 aa, synthetic construct
  REGION 1..9: note = Steroid receptor RNA activator 1 (183-191)
LMVDHVTEV

SEQ ID NO: 5408 - protein, 10 aa, synthetic construct
  REGION 1..10: note = Cytochrome c oxidase subunit 7C, mitochondrial (54-63)
LVVRHQLLKT

SEQ ID NO: 5409 - protein, 9 aa, synthetic construct
  REGION 1..9: note = EH domain-containing protein 1 (385-393)
MLANDIARL

SEQ ID NO: 5410 - protein, 9 aa, synthetic construct
  REGION 1..9: note = Ubiquitin carboxyl-terminal hydrolase 11 (568-576)
MLFGHPLLV

SEQ ID NO: 5411 - protein, 9 aa, synthetic construct
  REGION 1..9: note = Flotillin-1 (356-364)
MLLEKLPQV

SEQ ID NO: 5412 - protein, 9 aa, synthetic construct
  REGION 1..9: note = Breast cancer type 1 susceptibility protein (1657-1665)
MLNEHDFEV

SEQ ID NO: 5413 - protein, 9 aa, synthetic construct
  REGION 1..9: note = trim5alpha (75-83)
NIVEKLREV

SEQ ID NO: 5414 - protein, 9 aa, synthetic construct
  REGION 1..9: note = E3 ubiquitin-protein ligase TRIM22 (76-84)
NIVERVKEV

SEQ ID NO: 5415 - protein, 9 aa, synthetic construct
  REGION 1..9: note = Ral GTPase-activating protein subunit beta (190-198)
NLAEKLIGV

SEQ ID NO: 5416 - protein, 9 aa, synthetic construct
  REGION 1..9: note = F-box only protein 22 (24-32)
NLAEVVERV

SEQ ID NO: 5417 - protein, 9 aa, synthetic construct
  REGION 1..9: note = Glycerol-3-phosphate dehydrogenase, mitochondrial (146-154)
NLLEIAPHL

SEQ ID NO: 5418 - protein, 9 aa, synthetic construct
  REGION 1..9: note = Propionyl-CoA carboxylase beta chain, mitochondrial (27-35)
NMVDIIHSV

SEQ ID NO: 5419 - protein, 9 aa, synthetic construct
  REGION 1..9: note = Transcription elongation factor SPT5 (558-566)
NMYGKVVTV

SEQ ID NO: 5420 - protein, 10 aa, synthetic construct
  REGION 1..10: note = Utrophin (2315-2324)
NQWDGTQHGV

SEQ ID NO: 5421 - protein, 13 aa, synthetic construct
  REGION 1..13: note = Melanocyte protein PMEL (45-57)
NRQLYPEWTEAQR

SEQ ID NO: 5422 - protein, 9 aa, synthetic construct
  REGION 1..9: note = 60S ribosomal protein L35 (20-28)
QLDDLKVEL

SEQ ID NO: 5423 - protein, 9 aa, synthetic construct
  REGION 1..9: note = SNARE-associated protein Snapin (39-47)
QLDSHVHAV

SEQ ID NO: 5424 - protein, 9 aa, synthetic construct
  REGION 1..9: note = Testis-expressed sequence 10 protein (575-583)
QLIDIIHTA

SEQ ID NO: 5425 - protein, 9 aa, synthetic construct
  REGION 1..9: note = SEC14-like protein 1 (559-567)
QLIDKVWQL

SEQ ID NO: 5426 - protein, 9 aa, synthetic construct
  REGION 1..9: note = Ethylmalonyl-CoA decarboxylase (79-87)
QLLEKVIEL

SEQ ID NO: 5427 - protein, 9 aa, synthetic construct
  REGION 1..9: note = HEAT repeat-containing protein 2 (843-851)
QLLQHVQAV

SEQ ID NO: 5428 - protein, 9 aa, synthetic construct
  REGION 1..9: note = 60S ribosomal protein L6 (267-275)
QLQGYLRSV

SEQ ID NO: 5429 - protein, 9 aa, synthetic construct
  REGION 1..9: note = Mitochondrial dynamics protein MID51 (384-392)
QLTNVILHL

SEQ ID NO: 5430 - protein, 9 aa, synthetic construct
  REGION 1..9: note = Casein kinase I isoform delta (111-119)
QMISRIEYI

SEQ ID NO: 5431 - protein, 11 aa, synthetic construct
  REGION 1..11: note = Zinc finger protein 131 (113-123)
QMLEAIKALEV

SEQ ID NO: 5432 - protein, 9 aa, synthetic construct
  REGION 1..9: note = 40S ribosomal protein S8 (77-85)
RIIDVVYNA

SEQ ID NO: 5433 - protein, 11 aa, synthetic construct
  REGION 1..11: note = CCR4-NOT transcription complex subunit 1 (459-469)
RLAEVGQYEQV

SEQ ID NO: 5434 - protein, 9 aa, synthetic construct
  REGION 1..9: note = DNA replication licensing factor MCM7 (164-172)
RLAQHITYV

SEQ ID NO: 5435 - protein, 9 aa, synthetic construct
  REGION 1..9: note = Vacuolar protein sorting-associated protein 53 homolog (74-82)
RLDDNIRTV

SEQ ID NO: 5436 - protein, 11 aa, synthetic construct
  REGION 1..11: note = Putative sodium-coupled neutral amino acid transporter 10 (413-423)
RLGEAEGLMKV

SEQ ID NO: 5437 - protein, 10 aa, synthetic construct
  REGION 1..10: note = Protein quaking (39-48)
RLLDEEISRV

SEQ ID NO: 5438 - protein, 9 aa, synthetic construct
  REGION 1..9: note = CLIP-associating protein 1 (367-375)
RLLDGAFKL

SEQ ID NO: 5439 - protein, 9 aa, synthetic construct
  REGION 1..9: note = KN motif and ankyrin repeat domain-containing protein 2 (654-662)
RLLDYVVNI

SEQ ID NO: 5440 - protein, 11 aa, synthetic construct
  REGION 1..11: note = Pyridoxal-dependent decarboxylase domain-containing protein 1 (630-640)
RLLEEGVLRQI

SEQ ID NO: 5441 - protein, 9 aa, synthetic construct
  REGION 1..9: note = Pinin (207-215)
RLLEQKVEL

SEQ ID NO: 5442 - protein, 9 aa, synthetic construct
  REGION 1..9: note = E3 ubiquitin-protein ligase RNF213 (4648-4656)
RLLQEQHQL

SEQ ID NO: 5443 - protein, 9 aa, synthetic construct
  REGION 1..9: note = V-type proton ATPase subunit H (382-390)
RLNEKNYEL

SEQ ID NO: 5444 - protein, 9 aa, synthetic construct
  REGION 1..9: note = Cytospin-A (639-647)
RLQDAIAKV

SEQ ID NO: 5445 - protein, 10 aa, synthetic construct
  REGION 1..10: note = Ubiquitin-conjugating enzyme E2 A (15-24)
RLQEDPPAGV

SEQ ID NO: 5446 - protein, 10 aa, synthetic construct
  REGION 1..10: note = Ubiquitin-conjugating enzyme E2 B (15-24)
RLQEDPPVGV

SEQ ID NO: 5447 - protein, 9 aa, synthetic construct
  REGION 1..9: note = Inhibitor of nuclear factor kappa-B kinase-interacting protein (38-46)
RLQEEINEV

SEQ ID NO: 5448 - protein, 9 aa, synthetic construct
  REGION 1..9: note = Double-strand-break repair protein rad21 homolog (450-458)
RLQESVMEA

SEQ ID NO: 5449 - protein, 10 aa, synthetic construct
  REGION 1..10: note = SHC SH2 domain-binding protein 1 (594-603)
RLSELGITQA

SEQ ID NO: 5450 - protein, 9 aa, synthetic construct
  REGION 1..9: note = PRA1 family protein 3 (178-186)
RLTDYISKV

SEQ ID NO: 5451 - protein, 9 aa, synthetic construct
  REGION 1..9: note = Eukaryotic translation initiation factor 3 subunit H (165-173)
RLTPKLMEV

SEQ ID NO: 5452 - protein, 11 aa, synthetic construct
  REGION 1..11: note = Proliferating cell nuclear antigen (5-15)
RLVQGSILKKV

SEQ ID NO: 5453 - protein, 9 aa, synthetic construct
  REGION 1..9: note = DEP domain-containing protein 1B (15-23)
RLWNETVEL

SEQ ID NO: 5454 - protein, 9 aa, synthetic construct
  REGION 1..9: note = DNA damage-binding protein 1 (134-142)
RLYDGLFKV

SEQ ID NO: 5455 - protein, 12 aa, synthetic construct
  REGION 1..12: note = ATP-binding cassette sub-family B member 10, mitochondrial (542-553)
RLYDPASGTISL

SEQ ID NO: 5456 - protein, 9 aa, synthetic construct
  REGION 1..9: note = Serine/threonine-protein kinase Kist (287-295)
RMFDGKFVV

SEQ ID NO: 5457 - protein, 10 aa, synthetic construct
  REGION 1..10: note = Serine/threonine-protein kinase Kist (287-296)
RMFDGKFVVA

SEQ ID NO: 5458 - protein, 12 aa, synthetic construct
  REGION 1..12: note = Melanocyte protein PMEL (46-57)
RQLYPEWTEAQR

SEQ ID NO: 5459 - protein, 14 aa, synthetic construct
  REGION 1..14: note = Melanocyte protein PMEL (46-59)
RQLYPEWTEAQRLD

SEQ ID NO: 5460 - protein, 18 aa, synthetic construct
  REGION 1..18: note = Melanocyte protein PMEL (40-57)
RTKAWNRQLYPEWTEAQR

SEQ ID NO: 5461 - protein, 11 aa, synthetic construct
  REGION 1..11: note = Aurora kinase B (360-370)
RVLPPSALQSV

SEQ ID NO: 5462 - protein, 9 aa, synthetic construct
  REGION 1..9: note = SHC-transforming protein 1 (255-263)
RVPPPPQSV

SEQ ID NO: 5463 - protein, 9 aa, synthetic construct
  REGION 1..9: note = Serine/threonine-protein phosphatase PP1-gamma catalytic subunit (7-15)
SIIQRLLEV

SEQ ID NO: 5464 - protein, 9 aa, synthetic construct
  REGION 1..9: note = Eukaryotic translation initiation factor 2 subunit 1 (110-118)
SILRHVAEV

SEQ ID NO: 5465 - protein, 9 aa, synthetic construct
  REGION 1..9: note = Anaphase-promoting complex subunit 7 (276-284)
SLADLYFRA

SEQ ID NO: 5466 - protein, 9 aa, synthetic construct
  REGION 1..9: note = TATA-binding protein-associated factor 172 (784-792)
SLADVHIEV

SEQ ID NO: 5467 - protein, 9 aa, synthetic construct
  REGION 1..9: note = 2'-5'-oligoadenylate synthase 3 (247-255)
SLAEGLRTV

SEQ ID NO: 5468 - protein, 9 aa, synthetic construct
  REGION 1..9: note = LisH domain-containing protein ARMC9 (400-408)
SLAEGRLYL

SEQ ID NO: 5469 - protein, 9 aa, synthetic construct
  REGION 1..9: note = Ankyrin repeat and SOCS box protein 6 (353-361)
SLAEKIQAL

SEQ ID NO: 5470 - protein, 10 aa, synthetic construct
  REGION 1..10: note = DNA polymerase epsilon catalytic subunit A (943-952)
SLAELKGFEV

SEQ ID NO: 5471 - protein, 9 aa, synthetic construct
  REGION 1..9: note = Sestrin-1 (129-137)
SLAELVHAV

SEQ ID NO: 5472 - protein, 10 aa, synthetic construct
  REGION 1..10: note = V-type proton ATPase catalytic subunit A (500-509)
SLAETDKITL

SEQ ID NO: 5473 - protein, 9 aa, synthetic construct
  REGION 1..9: note = Trinucleotide repeat-containing gene 6A protein (198-206)
SLAHELWKV

SEQ ID NO: 5474 - protein, 9 aa, synthetic construct
  REGION 1..9: note = TNFAIP3-interacting protein 2 (146-154)
SLANETHQL

SEQ ID NO: 5475 - protein, 9 aa, synthetic construct
  REGION 1..9: note = Phosphatidylinositol 3-kinase regulatory subunit gamma (63-71)
SLAQYNPKL

SEQ ID NO: 5476 - protein, 9 aa, synthetic construct
  REGION 1..9: note = Baculoviral IAP repeat-containing protein 6 (1230-1238)
SLASLLAKV

SEQ ID NO: 5477 - protein, 9 aa, synthetic construct
  REGION 1..9: note = TELO2-interacting protein 1 homolog (380-388)
SLATSLPRL

SEQ ID NO: 5478 - protein, 9 aa, synthetic construct
  REGION 1..9: note = Leucine-rich repeat and coiled-coil domain-containing protein 1 (37-45)
SLDSTLHAV

SEQ ID NO: 5479 - protein, 10 aa, synthetic construct
  REGION 1..10: note = Transmembrane emp24 domain-containing protein 9 (130-139)
SLFAGGMLRV

SEQ ID NO: 5480 - protein, 10 aa, synthetic construct
  REGION 1..10: note = F-box/LRR-repeat protein 5 (73-82)
SLFEKGLKNV

SEQ ID NO: 5481 - protein, 9 aa, synthetic construct
  REGION 1..9: note = Programmed cell death 6-interacting protein (103-111)
SLFGGSVKL

SEQ ID NO: 5482 - protein, 10 aa, synthetic construct
  REGION 1..10: note = Ribosome production factor 1 (265-274)
SLFPHNPQFI

SEQ ID NO: 5483 - protein, 9 aa, synthetic construct
  REGION 1..9: note = Exostosin-2 (478-486)
SLFRVITEV

SEQ ID NO: 5484 - protein, 8 aa, synthetic construct
  REGION 1..8: note = Bloom syndrome protein (853-860)
SLGKVFGV

SEQ ID NO: 5485 - protein, 9 aa, synthetic construct
  REGION 1..9: note = U1 small nuclear ribonucleoprotein C (24-32)
SLIDKTTAA

SEQ ID NO: 5486 - protein, 9 aa, synthetic construct
  REGION 1..9: note = AAC41999.1 (170-178)
SLIEKIPTA

SEQ ID NO: 5487 - protein, 9 aa, synthetic construct
  REGION 1..9: note = Transcription factor RFX3 (374-382)
SLIEKLWQT

SEQ ID NO: 5488 - protein, 9 aa, synthetic construct
  REGION 1..9: note = Importin subunit alpha-1 (490-498)
SLIEKYFSV

SEQ ID NO: 5489 - protein, 9 aa, synthetic construct
  REGION 1..9: note = Ubiquitin carboxyl-terminal hydrolase 34 (1442-1450)
SLIQRLMSV

SEQ ID NO: 5490 - protein, 9 aa, synthetic construct
  REGION 1..9: note = Polymerase I and transcript release factor (56-64)
SLLDKIIGA

SEQ ID NO: 5491 - protein, 10 aa, synthetic construct
  REGION 1..10: note = Rho guanine nucleotide exchange factor 18 (642-651)
SLLEKQQIYL

SEQ ID NO: 5492 - protein, 9 aa, synthetic construct
  REGION 1..9: note = Mediator of RNA polymerase II transcription subunit 12 (1224-1232)
SLLENIAKA

SEQ ID NO: 5493 - protein, 9 aa, synthetic construct
  REGION 1..9: note = Heterogeneous nuclear ribonucleoprotein C-like 1 (196-204)
SLLENLEKI

SEQ ID NO: 5494 - protein, 9 aa, synthetic construct
  REGION 1..9: note = Serine/threonine-protein kinase ATR (549-557)
SLLESVQKL

SEQ ID NO: 5495 - protein, 11 aa, synthetic construct
  REGION 1..11: note = Neurochondrin (337-347)
SLLKEPQKVQL

SEQ ID NO: 5496 - protein, 10 aa, synthetic construct
  REGION 1..10: note = Adrenocortical dysplasia protein homolog (124-133)
SLLPTEQPRL

SEQ ID NO: 5497 - protein, 9 aa, synthetic construct
  REGION 1..9: note = Ran GTPase-activating protein 1 (579-587)
SLLQTLYKV

SEQ ID NO: 5498 - protein, 9 aa, synthetic construct
  REGION 1..9: note = Arfaptin-2 (71-79)
SLLQTQHAL

SEQ ID NO: 5499 - protein, 10 aa, synthetic construct
  REGION 1..10: note = Pericentrin (1754-1763)
SLMGPVVHEV

SEQ ID NO: 5500 - protein, 9 aa, synthetic construct
  REGION 1..9: note = Hermansky-Pudlak syndrome 4 protein (573-581)
SLNGLEVHL

SEQ ID NO: 5501 - protein, 9 aa, synthetic construct
  REGION 1..9: note = Choline/ethanolamine kinase (86-94)
SLPDHLPSV

SEQ ID NO: 5502 - protein, 9 aa, synthetic construct
  REGION 1..9: note = WD repeat-containing protein 3 (348-356)
SLQDEIQRV

SEQ ID NO: 5503 - protein, 9 aa, synthetic construct
  REGION 1..9: note = Peroxisomal membrane protein 4 (59-67)
SLQEKLWAI

SEQ ID NO: 5504 - protein, 9 aa, synthetic construct
  REGION 1..9: note = Dynactin subunit 1 (1169-1177)
SLSDTVEKL

SEQ ID NO: 5505 - protein, 9 aa, synthetic construct
  REGION 1..9: note = AP-3 complex subunit mu-1 (219-227)
SLSFMNPRL

SEQ ID NO: 5506 - protein, 9 aa, synthetic construct
  REGION 1..9: note = Alsin (755-763)
SLSSFLHGV

SEQ ID NO: 5507 - protein, 9 aa, synthetic construct
  REGION 1..9: note = Eukaryotic translation initiation factor 3 subunit F (301-309)
SLVNQVPKI

SEQ ID NO: 5508 - protein, 9 aa, synthetic construct
  REGION 1..9: note = FACT complex subunit SSRP1 (309-317)
SLYEMVSRV

SEQ ID NO: 5509 - protein, 9 aa, synthetic construct
  REGION 1..9: note = Mediator of RNA polymerase II transcription subunit 12 (1349-1357)
SLYSQVHQI

SEQ ID NO: 5510 - protein, 9 aa, synthetic construct
  REGION 1..9: note = RNA-binding protein 28 (53-61)
SMLEDVQRA

SEQ ID NO: 5511 - protein, 9 aa, synthetic construct
  REGION 1..9: note = Zinc finger MYM-type protein 3 (1346-1354)
SMLNRILAV

SEQ ID NO: 5512 - protein, 9 aa, synthetic construct
  REGION 1..9: note = RNA polymerase II-associated protein 1 (1333-1341)
SMLQKTWLL

SEQ ID NO: 5513 - protein, 9 aa, synthetic construct
  REGION 1..9: note = General transcription factor 3C polypeptide 5 (74-82)
SMYDKVLML

SEQ ID NO: 5514 - protein, 9 aa, synthetic construct
  REGION 1..9: note = EH domain-containing protein 4 (482-490)
SVLGKIWKL

SEQ ID NO: 5515 - protein, 9 aa, synthetic construct
  REGION 1..9: note = Huntingtin (111-119)
TLAAAVPKI

SEQ ID NO: 5516 - protein, 9 aa, synthetic construct
  REGION 1..9: note = Set1/Ash2 histone methyltransferase complex subunit ASH2 (512-520)
TLADVLYHV

SEQ ID NO: 5517 - protein, 10 aa, synthetic construct
  REGION 1..10: note = Non-POU domain-containing octamer-binding protein (31-40)
TLAEIAKVEL

SEQ ID NO: 5518 - protein, 9 aa, synthetic construct
  REGION 1..9: note = Ancient ubiquitous protein 1 (365-373)
TLAQRVKEV

SEQ ID NO: 5519 - protein, 9 aa, synthetic construct
  REGION 1..9: note = Pre-mRNA-processing factor 40 homolog A (170-178)
TLDAGNIKL

SEQ ID NO: 5520 - protein, 9 aa, synthetic construct
  REGION 1..9: note = Coiled-coil domain-containing protein 93 (524-532)
TLDDKKVYL

SEQ ID NO: 5521 - protein, 9 aa, synthetic construct
  REGION 1..9: note = Probable ATP-dependent RNA helicase DDX27 (87-95)
TLDEKIEKV

SEQ ID NO: 5522 - protein, 9 aa, synthetic construct
  REGION 1..9: note = Nuclear respiratory factor 1 (118-126)
TLDEYTTRV

SEQ ID NO: 5523 - protein, 9 aa, synthetic construct
  REGION 1..9: note = Fanconi anemia group D2 protein (847-855)
TLDITPHTV

SEQ ID NO: 5524 - protein, 9 aa, synthetic construct
  REGION 1..9: note = E3 ubiquitin-protein ligase UHRF1 (57-65)
TLFDYEVRL

SEQ ID NO: 5525 - protein, 9 aa, synthetic construct
  REGION 1..9: note = Staphylococcal nuclease domain-containing protein 1 (582-590)
TLFTKELVL

SEQ ID NO: 5526 - protein, 11 aa, synthetic construct
  REGION 1..11: note = Dynamin-2 (133-143)
TLIDLPGITKV

SEQ ID NO: 5527 - protein, 9 aa, synthetic construct
  REGION 1..9: note = Cyclic AMP-dependent transcription factor ATF-1 (254-262)
TLIEELKTL

SEQ ID NO: 5528 - protein, 10 aa, synthetic construct
  REGION 1..10: note = Cleavage and polyadenylation specificity factor subunit 1 (348-357)
TLITDGMRSV

SEQ ID NO: 5529 - protein, 9 aa, synthetic construct
  REGION 1..9: note = Negative elongation factor C/D (294-302)
TLLDRMVHL

SEQ ID NO: 5530 - protein, 10 aa, synthetic construct
  REGION 1..10: note = HEAT repeat-containing protein 5B (1620-1629)
TLLDSPYARV

SEQ ID NO: 5531 - protein, 10 aa, synthetic construct
  REGION 1..10: note = NmrA-like family domain-containing protein 1 (23-32)
TLLEDGTFKV

SEQ ID NO: 5532 - protein, 9 aa, synthetic construct
  REGION 1..9: note = Tetratricopeptide repeat protein 21B (311-319)
TLLERAFSL

SEQ ID NO: 5533 - protein, 9 aa, synthetic construct
  REGION 1..9: note = Cell division cycle protein 27 homolog (544-552)
TLLGHEFVL

SEQ ID NO: 5534 - protein, 9 aa, synthetic construct
  REGION 1..9: note = Coatomer subunit alpha (88-96)
TLLGHLDYI

SEQ ID NO: 5535 - protein, 9 aa, synthetic construct
  REGION 1..9: note = Inositol 1,4,5-trisphosphate receptor type 1 (2386-2394)
TLLNVIKSV

SEQ ID NO: 5536 - protein, 9 aa, synthetic construct
  REGION 1..9: note = Perilipin-2 (327-335)
TLLSNIQGV

SEQ ID NO: 5537 - protein, 9 aa, synthetic construct
  REGION 1..9: note = V-type proton ATPase subunit C 1 (184-192)
TLLVVVPKL

SEQ ID NO: 5538 - protein, 9 aa, synthetic construct
  REGION 1..9: note = Protein NOXP20 (254-262)
TLMERTVSL

SEQ ID NO: 5539 - protein, 9 aa, synthetic construct
  REGION 1..9: note = CAD protein (639-647)
TLNDREYQL

SEQ ID NO: 5540 - protein, 9 aa, synthetic construct
  REGION 1..9: note = Short transient receptor potential channel 1 (45-53)
TLNEKLFLL

SEQ ID NO: 5541 - protein, 9 aa, synthetic construct
  REGION 1..9: note = Pinin (7-15)
TLQEQLEKA

SEQ ID NO: 5542 - protein, 9 aa, synthetic construct
  REGION 1..9: note = Mitochondrial import receptor subunit TOM22 homolog (35-43)
TLSERLWGL

SEQ ID NO: 5543 - protein, 9 aa, synthetic construct
  REGION 1..9: note = AP-3 complex subunit mu-2 (219-227)
TLSFMNPRL

SEQ ID NO: 5544 - protein, 9 aa, synthetic construct
  REGION 1..9: note = Splicing factor 3B subunit 3 (165-173)
TLVYHVVGV

SEQ ID NO: 5545 - protein, 11 aa, synthetic construct
  REGION 1..11: note = Malate dehydrogenase, mitochondrial (54-64)
TLYDIAHTPGV

SEQ ID NO: 5546 - protein, 9 aa, synthetic construct
  REGION 1..9: note = 60S ribosomal protein L10a (9-17)
TLYEAVREV

SEQ ID NO: 5547 - protein, 11 aa, synthetic construct
  REGION 1..11: note = Quinone oxidoreductase (225-235)
TMAKESSIIGV

SEQ ID NO: 5548 - protein, 9 aa, synthetic construct
  REGION 1..9: note = Dual specificity protein phosphatase 14 (92-100)
TVADKIHSV

SEQ ID NO: 5549 - protein, 9 aa, synthetic construct
  REGION 1..9: note = EH domain-containing protein 1 (479-487)
TVLGKIWKL

SEQ ID NO: 5550 - protein, 9 aa, synthetic construct
  REGION 1..9: note = Cell division cycle and apoptosis regulator protein 1 (1120-1128)
TVMDEIHTV

SEQ ID NO: 5551 - protein, 9 aa, synthetic construct
  REGION 1..9: note = Protein PAT1 homolog 1 (459-467)
VIIEKTYSL

SEQ ID NO: 5552 - protein, 10 aa, synthetic construct
  REGION 1..10: note = Tropomyosin alpha-4 chain (134-143)
VILEGELERA

SEQ ID NO: 5553 - protein, 9 aa, synthetic construct
  REGION 1..9: note = 40S ribosomal protein S15a (6-14)
VLADALKSI

SEQ ID NO: 5554 - protein, 9 aa, synthetic construct
  REGION 1..9: note = Prefoldin subunit 4 (107-115)
VLADLKVQL

SEQ ID NO: 5555 - protein, 9 aa, synthetic construct
  REGION 1..9: note = Neurobeachin-like protein 2 (65-73)
VLAEQLHQA

SEQ ID NO: 5556 - protein, 10 aa, synthetic construct
  REGION 1..10: note = E3 ubiquitin-protein ligase RNF130 (74-83)
VLAPLPLHGV

SEQ ID NO: 5557 - protein, 9 aa, synthetic construct
  REGION 1..9: note = Calmodulin-regulated spectrin-associated protein 1 (1065-1073)
VLDASVKEV

SEQ ID NO: 5558 - protein, 9 aa, synthetic construct
  REGION 1..9: note = HEAT repeat-containing protein 3 (702-710)
VLDNVKMNL

SEQ ID NO: 5559 - protein, 9 aa, synthetic construct
  REGION 1..9: note = Carbohydrate sulfotransferase 14 (134-142)
VLDSVDVRL

SEQ ID NO: 5560 - protein, 10 aa, synthetic construct
  REGION 1..10: note = Cytosolic carboxypeptidase 1 (592-601)
VLFEGRTVQL

SEQ ID NO: 5561 - protein, 9 aa, synthetic construct
  REGION 1..9: note = Isochorismatase domain-containing protein 1 (143-151)
VLFGVETHV

SEQ ID NO: 5562 - protein, 9 aa, synthetic construct
  REGION 1..9: note = Rab GTPase-activating protein 1-like (129-137)
VLFNKLTYL

SEQ ID NO: 5563 - protein, 9 aa, synthetic construct
  REGION 1..9: note = Sorting nexin-5 (197-205)
VLFTGVKEV

SEQ ID NO: 5564 - protein, 11 aa, synthetic construct
  REGION 1..11: note = Centrosomal protein of 76 kDa (112-122)
VLGGKAFLEHL

SEQ ID NO: 5565 - protein, 9 aa, synthetic construct
  REGION 1..9: note = Exportin-1 (784-792)
VLIDYQRNV

SEQ ID NO: 5566 - protein, 9 aa, synthetic construct
  REGION 1..9: note = ORM1-like protein 3 (134-142)
VLIPKLPQL

SEQ ID NO: 5567 - protein, 9 aa, synthetic construct
  REGION 1..9: note = von Willebrand factor A domain-containing protein 8 (511-519)
VLLDGIHRV

SEQ ID NO: 5568 - protein, 12 aa, synthetic construct
  REGION 1..12: note = Asparagine synthetase (glutamine-hydrolyzing) (41-52)
VLLDTANKKVFL

SEQ ID NO: 5569 - protein, 13 aa, synthetic construct
  REGION 1..13: note = Ras-related protein Rab-5A (24-36)
VLLGESAVGKSSL

SEQ ID NO: 5570 - protein, 9 aa, synthetic construct
  REGION 1..9: note = MAU2 chromatid cohesion factor homolog (356-364)
VLLGHIFYV

SEQ ID NO: 5571 - protein, 9 aa, synthetic construct
  REGION 1..9: note = Kelch-like protein 24 (404-412)
VLLGKVYVV

SEQ ID NO: 5572 - protein, 10 aa, synthetic construct
  REGION 1..10: note = Protein FAM171B (19-28)
VLLKARLVPA

SEQ ID NO: 5573 - protein, 11 aa, synthetic construct
  REGION 1..11: note = Anamorsin (98-108)
VLLSDSNLHDA

SEQ ID NO: 5574 - protein, 9 aa, synthetic construct
  REGION 1..9: note = Protein yippee-like 1 (66-74)
VLLTGLHAV

SEQ ID NO: 5575 - protein, 9 aa, synthetic construct
  REGION 1..9: note = Inhibitor of nuclear factor kappa-B kinase subunit alpha (271-279)
VLMDHILNL

SEQ ID NO: 5576 - protein, 9 aa, synthetic construct
  REGION 1..9: note = Probable ATP-dependent RNA helicase DDX56 (130-138)
VLMEKPDVV

SEQ ID NO: 5577 - protein, 9 aa, synthetic construct
  REGION 1..9: note = Uncharacterized protein C18orf8 (434-442)
VLMEYIRSL

SEQ ID NO: 5578 - protein, 9 aa, synthetic construct
  REGION 1..9: note = Protein LLP homolog (39-47)
VLMKDVQEI

SEQ ID NO: 5579 - protein, 10 aa, synthetic construct
  REGION 1..10: note = Cyclin-dependent kinase 1 (69-78)
VLMQDSRLYL

SEQ ID NO: 5580 - protein, 9 aa, synthetic construct
  REGION 1..9: note = AP-2 complex subunit sigma (90-98)
VLNEYFHNV

SEQ ID NO: 5581 - protein, 9 aa, synthetic construct
  REGION 1..9: note = Maestro heat-like repeat-containing protein family member 1 (1078-1086)
VLQEKVPEI

SEQ ID NO: 5582 - protein, 10 aa, synthetic construct
  REGION 1..10: note = Nucleolar protein 9 (544-553)
VLQNLKGQYV

SEQ ID NO: 5583 - protein, 9 aa, synthetic construct
  REGION 1..9: note = High mobility group protein 20A (167-175)
VLQQHLETL

SEQ ID NO: 5584 - protein, 9 aa, synthetic construct
  REGION 1..9: note = HLA class II histocompatibility antigen, DR beta 3 chain (2-10)
VLSSRLAFA

SEQ ID NO: 5585 - protein, 9 aa, synthetic construct
  REGION 1..9: note = Importin-9 (169-177)
VLTEFTREV

SEQ ID NO: 5586 - protein, 9 aa, synthetic construct
  REGION 1..9: note = Protein asunder homolog (229-237)
VLTSEVHSV

SEQ ID NO: 5587 - protein, 9 aa, synthetic construct
  REGION 1..9: note = ELAV-like protein 1 (137-145)
VLVDQTTGL

SEQ ID NO: 5588 - protein, 9 aa, synthetic construct
  REGION 1..9: note = Ribonuclease UK114 (25-33)
VLVDRTIYI

SEQ ID NO: 5589 - protein, 11 aa, synthetic construct
  REGION 1..11: note = Zinc finger BED domain-containing protein 1 (374-384)
VLVEDSNNHHL

SEQ ID NO: 5590 - protein, 9 aa, synthetic construct
  REGION 1..9: note = Tyrosine-protein kinase JAK1 (997-1005)
VLVESEHQV

SEQ ID NO: 5591 - protein, 9 aa, synthetic construct
  REGION 1..9: note = Signal transducer and activator of transcription 1-alpha/beta (300-308)
VLWDRTFSL

SEQ ID NO: 5592 - protein, 9 aa, synthetic construct
  REGION 1..9: note = Mediator of RNA polymerase II transcription subunit 12 (571-579)
VLYDQPRHV

SEQ ID NO: 5593 - protein, 9 aa, synthetic construct
  REGION 1..9: note = Putative RNA-binding protein 15 (219-227)
VLYDRPLKI

SEQ ID NO: 5594 - protein, 9 aa, synthetic construct
  REGION 1..9: note = AKT-interacting protein (200-208)
VLYEKDIQL

SEQ ID NO: 5595 - protein, 9 aa, synthetic construct
  REGION 1..9: note = Werner syndrome ATP-dependent helicase (1155-1163)
VLYGKLVEA

SEQ ID NO: 5596 - protein, 9 aa, synthetic construct
  REGION 1..9: note = Set1/Ash2 histone methyltransferase complex subunit ASH2 (516-524)
VLYHVETEV

SEQ ID NO: 5597 - protein, 10 aa, synthetic construct
  REGION 1..10: note = Protein downstream neighbor of Son (395-404)
VLYPHEPTAV

SEQ ID NO: 5598 - protein, 9 aa, synthetic construct
  REGION 1..9: note = Protein artemis (131-139)
VLYTGDFRL

SEQ ID NO: 5599 - protein, 9 aa, synthetic construct
  REGION 1..9: note = Anaphase-promoting complex subunit 1 (498-506)
VLYTGVVRV

SEQ ID NO: 5600 - protein, 10 aa, synthetic construct
  REGION 1..10: note = Adenosylhomocysteinase 2 (277-286)
VMFGGKQVVV

SEQ ID NO: 5601 - protein, 9 aa, synthetic construct
  REGION 1..9: note = Ligand-dependent nuclear receptor-interacting factor 1 (358-366)
VMFNGKVYL

SEQ ID NO: 5602 - protein, 8 aa, synthetic construct
  REGION 1..8: note = Kelch-like protein 8 (201-208)
VMGKIFAV

SEQ ID NO: 5603 - protein, 10 aa, synthetic construct
  REGION 1..10: note = Adenosylhomocysteinase (209-218)
VMIAGKVAVV

SEQ ID NO: 5604 - protein, 9 aa, synthetic construct
  REGION 1..9: note = Cullin-2 (25-33)
VMLEYVERA

SEQ ID NO: 5605 - protein, 9 aa, synthetic construct
  REGION 1..9: note = DNA-directed RNA polymerases I, II, and III subunit RPABC3 (55-63)
VMYGKVYRI

SEQ ID NO: 5606 - protein, 9 aa, synthetic construct
  REGION 1..9: note = Cytoskeleton-associated protein 5 (1001-1009)
WLAEKLPTL

SEQ ID NO: 5607 - protein, 9 aa, synthetic construct
  REGION 1..9: note = Transcription factor 25 (392-400)
WLEENVHEV

SEQ ID NO: 5608 - protein, 11 aa, synthetic construct
  REGION 1..11: note = Nuclear migration protein nudC (184-194)
WLIEDGKVVTV

SEQ ID NO: 5609 - protein, 9 aa, synthetic construct
  REGION 1..9: note = Serine/threonine-protein phosphatase 2A 65 kDa regulatory subunit A alpha isoform isoform X1 (271-279)
WLVDHVYAI

SEQ ID NO: 5610 - protein, 14 aa, synthetic construct
  REGION 1..14: note = Melanocyte protein PMEL (44-57)
WNRQLYPEWTEAQR

SEQ ID NO: 5611 - protein, 10 aa, synthetic construct
  REGION 1..10: note = Helicase-like transcription factor (121-130)
YIMDNKLAQI

SEQ ID NO: 5612 - protein, 9 aa, synthetic construct
  REGION 1..9: note = Unconventional myosin-If (18-26)
YIMSYISRV

SEQ ID NO: 5613 - protein, 9 aa, synthetic construct
  REGION 1..9: note = CCR4-NOT transcription complex subunit 1 (237-245)
YLAPFLRNV

SEQ ID NO: 5614 - protein, 9 aa, synthetic construct
  REGION 1..9: note = COP9 signalosome complex subunit 1 (357-365)
YLAPHVRTL

SEQ ID NO: 5615 - protein, 9 aa, synthetic construct
  REGION 1..9: note = Nucleoprotein TPR (422-430)
YLDEIVKEV

SEQ ID NO: 5616 - protein, 9 aa, synthetic construct
  REGION 1..9: note = Tuberin (190-198)
YLDEYIARM

SEQ ID NO: 5617 - protein, 9 aa, synthetic construct
  REGION 1..9: note = Neutral alpha-glucosidase C (478-486)
YLDFTNPKV

SEQ ID NO: 5618 - protein, 9 aa, synthetic construct
  REGION 1..9: note = Protein flightless-1 homolog (154-162)
YLDLSENRL

SEQ ID NO: 5619 - protein, 9 aa, synthetic construct
  REGION 1..9: note = UPF0585 protein C16orf13 (21-29)
YLDPAQRGV

SEQ ID NO: 5620 - protein, 9 aa, synthetic construct
  REGION 1..9: note = BTB/POZ domain-containing protein KCTD3 (224-232)
YLDWTIERV

SEQ ID NO: 5621 - protein, 9 aa, synthetic construct
  REGION 1..9: note = DBF4-type zinc finger-containing protein 2 (1397-1405)
YLEDKSYKL

SEQ ID NO: 5622 - protein, 9 aa, synthetic construct
  REGION 1..9: note = NADH dehydrogenase (ubiquinone) iron-sulfur protein 8, mitochondrial (74-82)
YLFREPATI

SEQ ID NO: 5623 - protein, 9 aa, synthetic construct
  REGION 1..9: note = Protein unc-50 homolog (55-63)
YLFTSPQRV

SEQ ID NO: 5624 - protein, 9 aa, synthetic construct
  REGION 1..9: note = Vacuole membrane protein 1 (137-145)
YLGPHIASV

SEQ ID NO: 5625 - protein, 8 aa, synthetic construct
  REGION 1..8: note = SUMO-activating enzyme subunit 2 (164-171)
YLGQVTTI

SEQ ID NO: 5626 - protein, 9 aa, synthetic construct
  REGION 1..9: note = Mitotic checkpoint serine/threonine-protein kinase BUB1 beta (141-149)
YLHNQGIGV

SEQ ID NO: 5627 - protein, 11 aa, synthetic construct
  REGION 1..11: note = EKC/KEOPS complex subunit TPRKB (121-131)
YLISQVEGHQV

SEQ ID NO: 5628 - protein, 9 aa, synthetic construct
  REGION 1..9: note = Myosin-10 (264-272)
YLLEKSRAV

SEQ ID NO: 5629 - protein, 11 aa, synthetic construct
  REGION 1..11: note = Cyclin-D1-binding protein 1 (104-114)
YLLPKDQGITL

SEQ ID NO: 5630 - protein, 10 aa, synthetic construct
  REGION 1..10: note = PRKC apoptosis WT1 regulator protein (215-224)
YLLQEPPRTV

SEQ ID NO: 5631 - protein, 9 aa, synthetic construct
  REGION 1..9: note = Probable methyltransferase TARBP1 (286-294)
YLLQRAVEV

SEQ ID NO: 5632 - protein, 10 aa, synthetic construct
  REGION 1..10: note = E3 ubiquitin-protein ligase HUWE1 (1351-1360)
YLLTHPPPIM

SEQ ID NO: 5633 - protein, 10 aa, synthetic construct
  REGION 1..10: note = 26S proteasome non-ATPase regulatory subunit 8 (142-151)
YLMEGSYNKV

SEQ ID NO: 5634 - protein, 9 aa, synthetic construct
  REGION 1..9: note = Leucine-tRNA ligase, cytoplasmic (901-909)
YLMEVTHDL

SEQ ID NO: 5635 - protein, 9 aa, synthetic construct
  REGION 1..9: note = Striatin-interacting protein 2 (207-215)
YLMVENIRL

SEQ ID NO: 5636 - protein, 9 aa, synthetic construct
  REGION 1..9: note = Zinc finger protein Pegasus (211-219)
YLNDFTHEI

SEQ ID NO: 5637 - protein, 9 aa, synthetic construct
  REGION 1..9: note = A-kinase anchor protein 10, mitochondrial (504-512)
YLNDLIHSV

SEQ ID NO: 5638 - protein, 9 aa, synthetic construct
  REGION 1..9: note = RNA polymerase II subunit A C-terminal domain phosphatase (611-619)
YLNKEIEEA

SEQ ID NO: 5639 - protein, 9 aa, synthetic construct
  REGION 1..9: note = DNA repair protein complementing XP-G cells (242-250)
YLNQHIEHV

SEQ ID NO: 5640 - protein, 11 aa, synthetic construct
  REGION 1..11: note = Protein phosphatase 1G (74-84)
YLPDIIKDQKA

SEQ ID NO: 5641 - protein, 9 aa, synthetic construct
  REGION 1..9: note = Interleukin-1 receptor-associated kinase-like 2 (381-389)
YLPEDFIRV

SEQ ID NO: 5642 - protein, 9 aa, synthetic construct
  REGION 1..9: note = Dual specificity protein kinase CLK2 (259-267)
YLPYPIHQV

SEQ ID NO: 5643 - protein, 9 aa, synthetic construct
  REGION 1..9: note = Sterol regulatory element-binding protein 2 (379-387)
YLQQVNHKL

SEQ ID NO: 5644 - protein, 9 aa, synthetic construct
  REGION 1..9: note = Actin-related protein 2/3 complex subunit 4 (8-16)
YLSAVRATL

SEQ ID NO: 5645 - protein, 9 aa, synthetic construct
  REGION 1..9: note = Hsp90 co-chaperone Cdc37 (174-182)
YLSDNVHLV

SEQ ID NO: 5646 - protein, 9 aa, synthetic construct
  REGION 1..9: note = Replication factor C subunit 5 (157-165)
YLSKIIPAL

SEQ ID NO: 5647 - protein, 9 aa, synthetic construct
  REGION 1..9: note = SLC45A3-BRAF fusion protein (236-244)
YLSPDLSKV

SEQ ID NO: 5648 - protein, 9 aa, synthetic construct
  REGION 1..9: note = THO complex subunit 5 homolog (225-233)
YLSSLQPRL

SEQ ID NO: 5649 - protein, 9 aa, synthetic construct
  REGION 1..9: note = Histone deacetylase 3 (183-191)
YLTDRVMTV

SEQ ID NO: 5650 - protein, 10 aa, synthetic construct
  REGION 1..10: note = 40S ribosomal protein S10 (70-79)
YLTNEGIQYL

SEQ ID NO: 5651 - protein, 9 aa, synthetic construct
  REGION 1..9: note = Heat shock protein HSP 90-alpha (142-150)
YLVAEKVTV

SEQ ID NO: 5652 - protein, 9 aa, synthetic construct
  REGION 1..9: note = Protein unc-93 homolog B1 (246-254)
YLYDLNHTL

SEQ ID NO: 5653 - protein, 9 aa, synthetic construct
  REGION 1..9: note = Sodium- and chloride-dependent taurine transporter (277-285)
YLYPDITRL

SEQ ID NO: 5654 - protein, 9 aa, synthetic construct
  REGION 1..9: note = Cullin-7 (1355-1363)
YMADRLLGV

SEQ ID NO: 5655 - protein, 9 aa, synthetic construct
  REGION 1..9: note = Kinetochore-associated protein 1 (1575-1583)
YMLEHVITL

SEQ ID NO: 5656 - protein, 9 aa, synthetic construct
  REGION 1..9: note = Elongation of very long chain fatty acids protein 1 (200-208)
YQYPVIIHL

SEQ ID NO: 5657 - protein, 9 aa, synthetic construct
  REGION 1..9: note = Histone deacetylase 1 (188-196)
YTTDRVMTV

SEQ ID NO: 5658 - protein, 10 aa, synthetic construct
  REGION 1..10: note = Syntaxin-binding protein 5 (234-243)
YTYDEAIHSV

SEQ ID NO: 5659 - protein, 9 aa, synthetic construct
  REGION 1..9: note = Speriolin-like protein (56-64)
YVFPGVTRL

SEQ ID NO: 5660 - protein, 11 aa, synthetic construct
  REGION 1..11: note = Plectin (3961-3971)
YVIDPIKGLKL

SEQ ID NO: 5661 - protein, 9 aa, synthetic construct
  REGION 1..9: note = Erythroid differentiation-related factor 1 (607-615)
YVLEGLKSV

SEQ ID NO: 5662 - protein, 9 aa, synthetic construct
  REGION 1..9: note = Translation initiation factor eIF-2B subunit delta (413-421)
YVLPEVSKV

SEQ ID NO: 5663 - protein, 15 aa, synthetic construct
  REGION 1..15: note = Vimentin (452-466)
GQVINETSQHHDDLE

SEQ ID NO: 5664 - protein, 9 aa, synthetic construct
  REGION 1..9: note = Ubiquitin-conjugating enzyme E2 J2 (121-129)
FMVEKGPTL

SEQ ID NO: 5665 - protein, 9 aa, synthetic construct
  REGION 1..9: note = 26S proteasome non-ATPase regulatory subunit 3 (216-224)
RVYEFLDKL

SEQ ID NO: 5666 - protein, 9 aa, synthetic construct
  REGION 1..9: note = E3 ubiquitin-protein ligase Hakai (341-349)
APPPPPPPP

SEQ ID NO: 5667 - protein, 9 aa, synthetic construct
  REGION 1..9: note = Farnesyl pyrophosphate synthase (36-44)
ARLKEVLEY

SEQ ID NO: 5668 - protein, 9 aa, synthetic construct
  REGION 1..9: note = Annexin A5 (92-100)
DAYELKHAL

SEQ ID NO: 5669 - protein, 9 aa, synthetic construct
  REGION 1..9: note = cAMP-dependent protein kinase catalytic subunit alpha (34-42)
DQFERIKTL

SEQ ID NO: 5670 - protein, 9 aa, synthetic construct
  REGION 1..9: note = Cytochrome c (90-98)
EERADLIAY

SEQ ID NO: 5671 - protein, 9 aa, synthetic construct
  REGION 1..9: note = T-complex protein 1 subunit theta (418-426)
ELAKQITSY

SEQ ID NO: 5672 - protein, 9 aa, synthetic construct
  REGION 1..9: note = COMM domain-containing protein 2 (116-124)
ELAPSLPSY

SEQ ID NO: 5673 - protein, 9 aa, synthetic construct
  REGION 1..9: note = Akirin-1 (166-174)
EQYESFVKF

SEQ ID NO: 5674 - protein, 8 aa, synthetic construct
  REGION 1..8: note = U5 small nuclear ribonucleoprotein 200 kDa helicase (1231-1238)
EVILHHEY

SEQ ID NO: 5675 - protein, 9 aa, synthetic construct
  REGION 1..9: note = ORM1-like protein 1 (9-17)
EVNPNTRVM

SEQ ID NO: 5676 - protein, 9 aa, synthetic construct
  REGION 1..9: note = Proteasome subunit alpha type-5 (125-133)
EVYHKSMTL

SEQ ID NO: 5677 - protein, 9 aa, synthetic construct
  REGION 1..9: note = Transcription factor 25 (248-256)
FAFEHSEEY

SEQ ID NO: 5678 - protein, 9 aa, synthetic construct
  REGION 1..9: note = Septin-6 (154-162)
FIAPTGHSL

SEQ ID NO: 5679 - protein, 9 aa, synthetic construct
  REGION 1..9: note = Sodium channel and clathrin linker 1 (55-63)
FLAPLVTEY

SEQ ID NO: 5680 - protein, 9 aa, synthetic construct
  REGION 1..9: note = Tetratricopeptide repeat protein 14 (257-265)
FVNPGVVEF

SEQ ID NO: 5681 - protein, 9 aa, synthetic construct
  REGION 1..9: note = Structural maintenance of chromosomes protein 4 (524-532)
GRIPGIYGR

SEQ ID NO: 5682 - protein, 10 aa, synthetic construct
  REGION 1..10: note = BCL-6 corepressor (860-869)
GRISDFHETY

SEQ ID NO: 5683 - protein, 9 aa, synthetic construct
  REGION 1..9: note = NEDD8-activating enzyme E1 regulatory subunit (434-442)
GRYPGVSNY

SEQ ID NO: 5684 - protein, 9 aa, synthetic construct
  REGION 1..9: note = RANBP2-like and GRIP domain-containing protein 2 (188-196)
HEAERNIAL

SEQ ID NO: 5685 - protein, 9 aa, synthetic construct
  REGION 1..9: note = Heterogeneous nuclear ribonucleoprotein L (348-356)
HPPPPPPPP

SEQ ID NO: 5686 - protein, 10 aa, synthetic construct
  REGION 1..10: note = Nodal modulator 3 (227-236)
HRFEQAFYTY

SEQ ID NO: 5687 - protein, 9 aa, synthetic construct
  REGION 1..9: note = Mediator of RNA polymerase II transcription subunit 19 (27-35)
KPPPPPPPP

SEQ ID NO: 5688 - protein, 9 aa, synthetic construct
  REGION 1..9: note = Afadin (1323-1331)
LPPPPPPPP

SEQ ID NO: 5689 - protein, 9 aa, synthetic construct
  REGION 1..9: note = Tubulin beta-2A chain (233-241)
LRFPGQLNA

SEQ ID NO: 5690 - protein, 9 aa, synthetic construct
  REGION 1..9: note = Keratinocyte-associated protein 2 (1-9)
MVVGTGTSL

SEQ ID NO: 5691 - protein, 9 aa, synthetic construct
  REGION 1..9: note = Heat shock protein HSP 90-beta (28-36)
NPQERTLTL

SEQ ID NO: 5692 - protein, 9 aa, synthetic construct
  REGION 1..9: note = N-alpha-acetyltransferase 50 (23-31)
NQVIFPVSY

SEQ ID NO: 5693 - protein, 9 aa, synthetic construct
  REGION 1..9: note = Origin recognition complex subunit 1 (665-673)
NRVSSRLGL

SEQ ID NO: 5694 - protein, 9 aa, synthetic construct
  REGION 1..9: note = Alanine-tRNA ligase, cytoplasmic (55-63)
NTIDPSHPM

SEQ ID NO: 5695 - protein, 9 aa, synthetic construct
  REGION 1..9: note = Histone H4 (34-42)
NVIRDAVTY

SEQ ID NO: 5696 - protein, 9 aa, synthetic construct
  REGION 1..9: note = Anaphase-promoting complex subunit 7 (184-192)
QERPSVTSY

SEQ ID NO: 5697 - protein, 9 aa, synthetic construct
  REGION 1..9: note = Syntaxin-binding protein 2 (143-151)
SLDAPHSTY

SEQ ID NO: 5698 - protein, 9 aa, synthetic construct
  REGION 1..9: note = Fructose-bisphosphate aldolase A (356-364)
SLFVSNHAY

SEQ ID NO: 5699 - protein, 9 aa, synthetic construct
  REGION 1..9: note = Abl interactor 1 (398-406)
SPPPPPPPP

SEQ ID NO: 5700 - protein, 9 aa, synthetic construct
  REGION 1..9: note = T-complex protein 1 subunit eta (208-216)
SQLVAGVAF

SEQ ID NO: 5701 - protein, 9 aa, synthetic construct
  REGION 1..9: note = FERM domain-containing protein 4A (824-832)
SQSQPSSQY

SEQ ID NO: 5702 - protein, 9 aa, synthetic construct
  REGION 1..9: note = 60S ribosome subunit biogenesis protein NIP7 homolog (126-134)
SQYQGVVVY

SEQ ID NO: 5703 - protein, 8 aa, synthetic construct
  REGION 1..8: note = Dolichol-phosphate mannosyltransferase subunit 3 (78-85)
VGYRVATF

SEQ ID NO: 5704 - protein, 9 aa, synthetic construct
  REGION 1..9: note = Protein enabled homolog (379-387)
VPPPPPPPP

SEQ ID NO: 5705 - protein, 9 aa, synthetic construct
  REGION 1..9: note = Endoplasmin (727-735)
YLLPDTKAY

SEQ ID NO: 5706 - protein, 9 aa, synthetic construct
  REGION 1..9: note = Elongation factor 2 (489-497)
EHAHNMRVM

SEQ ID NO: 5707 - protein, 9 aa, synthetic construct
  REGION 1..9: note = T-complex protein 1 subunit eta (282-290)
HHSGAKVVL

SEQ ID NO: 5708 - protein, 10 aa, synthetic construct
  REGION 1..10: note = 60S ribosomal protein L8 (49-58)
IHDPGRGAPL

SEQ ID NO: 5709 - protein, 11 aa, synthetic construct
  REGION 1..11: note = Heat shock protein HSP 90-beta (441-451)
IHEDSTNRRRL

SEQ ID NO: 5710 - protein, 9 aa, synthetic construct
  REGION 1..9: note = F-actin-capping protein subunit beta (235-243)
KTKDIVNGL

SEQ ID NO: 5711 - protein, 9 aa, synthetic construct
  REGION 1..9: note = Transcription activator BRG1 (899-907)
THYVAPRRL

SEQ ID NO: 5712 - protein, 9 aa, synthetic construct
  REGION 1..9: note = Actin-related protein 2 (378-386)
YQEKGVRVL

SEQ ID NO: 5713 - protein, 9 aa, synthetic construct
  REGION 1..9: note = Centromere protein W (77-85)
AAAKVILKK

SEQ ID NO: 5714 - protein, 9 aa, synthetic construct
  REGION 1..9: note = Histone H1.1 (63-71)
AALKKALAA

SEQ ID NO: 5715 - protein, 9 aa, synthetic construct
  REGION 1..9: note = MICOS complex subunit MIC60 (93-101)
AAYNVPLPK

SEQ ID NO: 5716 - protein, 10 aa, synthetic construct
  REGION 1..10: note = Crooked neck-like protein 1 (493-502)
AEAEAVREVY

SEQ ID NO: 5717 - protein, 9 aa, synthetic construct
  REGION 1..9: note = Dystonin (6939-6947)
AEAEQTLRF

SEQ ID NO: 5718 - protein, 9 aa, synthetic construct
  REGION 1..9: note = Exportin-T (39-47)
AEALAQRTY

SEQ ID NO: 5719 - protein, 9 aa, synthetic construct
  REGION 1..9: note = DNA replication licensing factor MCM5 (620-628)
AEALSKMKL

SEQ ID NO: 5720 - protein, 9 aa, synthetic construct
  REGION 1..9: note = Chondroitin sulfate glucuronyltransferase (568-576)
AEAPSQVRL

SEQ ID NO: 5721 - protein, 9 aa, synthetic construct
  REGION 1..9: note = 78 kDa glucose-regulated protein (157-165)
AEAYLGKKV

SEQ ID NO: 5722 - protein, 10 aa, synthetic construct
  REGION 1..10: note = X-ray repair cross-complementing protein 6 (224-233)
AEDEDLRVHF

SEQ ID NO: 5723 - protein, 9 aa, synthetic construct
  REGION 1..9: note = WD and tetratricopeptide repeats protein 1 (45-53)
AEDGLIRQY

SEQ ID NO: 5724 - protein, 10 aa, synthetic construct
  REGION 1..10: note = DNA replication licensing factor MCM3 (278-287)
AEDIAKIKKF

SEQ ID NO: 5725 - protein, 10 aa, synthetic construct
  REGION 1..10: note = Transmembrane emp24 domain-containing protein 3 (50-59)
AEDLNSRVSY

SEQ ID NO: 5726 - protein, 10 aa, synthetic construct
  REGION 1..10: note = Transmembrane emp24 domain-containing protein 7 (179-188)
AEDLNTRVAY

SEQ ID NO: 5727 - protein, 11 aa, synthetic construct
  REGION 1..11: note = Retinoblastoma-like protein 1 (193-203)
AEEEIGTPRKF

SEQ ID NO: 5728 - protein, 9 aa, synthetic construct
  REGION 1..9: note = Clathrin heavy chain 1 (360-368)
AEELFARKF

SEQ ID NO: 5729 - protein, 9 aa, synthetic construct
  REGION 1..9: note = Alpha-2-macroglobulin receptor-associated protein (250-258)
AEFEEPRVI

SEQ ID NO: 5730 - protein, 9 aa, synthetic construct
  REGION 1..9: note = Immunoglobulin-binding protein 1 (122-130)
AEFELPKTM

SEQ ID NO: 5731 - protein, 9 aa, synthetic construct
  REGION 1..9: note = Myeloid leukemia factor 2 (224-232)
AEGPPRLAI

SEQ ID NO: 5732 - protein, 11 aa, synthetic construct
  REGION 1..11: note = Histone-lysine N-methyltransferase NSD3 (1027-1037)
AEGQTSINKTF

SEQ ID NO: 5733 - protein, 9 aa, synthetic construct
  REGION 1..9: note = Plectin (1687-1695)
AEGTAQQRL

SEQ ID NO: 5734 - protein, 9 aa, synthetic construct
  REGION 1..9: note = RNA-binding protein 34 (222-230)
AEGTLSKKL

SEQ ID NO: 5735 - protein, 9 aa, synthetic construct
  REGION 1..9: note = Perilipin-2 (303-311)
AEHIESRTL

SEQ ID NO: 5736 - protein, 9 aa, synthetic construct
  REGION 1..9: note = Secernin-1 (219-227)
AEHPELRSY

SEQ ID NO: 5737 - protein, 10 aa, synthetic construct
  REGION 1..10: note = DNA dC-dU-editing enzyme APOBEC-3D (121-130)
AEHPNVTLTI

SEQ ID NO: 5738 - protein, 9 aa, synthetic construct
  REGION 1..9: note = Vacuolar protein sorting-associated protein 13A (547-555)
AEHSTVITF

SEQ ID NO: 5739 - protein, 9 aa, synthetic construct
  REGION 1..9: note = Syntaxin-18 (279-287)
AEIDSIHQL

SEQ ID NO: 5740 - protein, 10 aa, synthetic construct
  REGION 1..10: note = Nesprin-2 (1575-1584)
AEIEIVKEEF

SEQ ID NO: 5741 - protein, 11 aa, synthetic construct
  REGION 1..11: note = WD repeat-containing protein 91 (30-40)
AEIKADKEKGF

SEQ ID NO: 5742 - protein, 9 aa, synthetic construct
  REGION 1..9: note = Tubulin-specific chaperone A (54-62)
AEILQESRM

SEQ ID NO: 5743 - protein, 11 aa, synthetic construct
  REGION 1..11: note = MAP3K12-binding inhibitory protein 1 (172-182)
AEINENNVREF

SEQ ID NO: 5744 - protein, 10 aa, synthetic construct
  REGION 1..10: note = Myosin light polypeptide 6 (107-116)
AEIRHVLVTL

SEQ ID NO: 5745 - protein, 9 aa, synthetic construct
  REGION 1..9: note = BAG64702.1 (1-9)
AEITDKLGL

SEQ ID NO: 5746 - protein, 9 aa, synthetic construct
  REGION 1..9: note = Nuclear migration protein nudC (2-10)
AEKLITQTF

SEQ ID NO: 5747 - protein, 10 aa, synthetic construct
  REGION 1..10: note = Spectrin alpha chain, non-erythrocytic 1 (381-390)
AELDRQIKSF

SEQ ID NO: 5748 - protein, 10 aa, synthetic construct
  REGION 1..10: note = Transcriptional regulator ATRX (1293-1302)
AELEENQRSY

SEQ ID NO: 5749 - protein, 9 aa, synthetic construct
  REGION 1..9: note Dolichyl-diphosphooligosaccharide-proteinosyltransferase subunit 2 (288-296)
AELTPHQTF

SEQ ID NO: 5750 - protein, 9 aa, synthetic construct
  REGION 1..9: note = Nuclear receptor corepressor 1 (522-530)
AENDPTRQY

SEQ ID NO: 5751 - protein, 9 aa, synthetic construct
  REGION 1..9: note = General transcription factor 3C polypeptide 1 (42-50)
AENGLTVRL

SEQ ID NO: 5752 - protein, 11 aa, synthetic construct
  REGION 1..11: note = Eukaryotic translation initiation factor 4 gamma 1 (544-554)
AENIQPGEQKY

SEQ ID NO: 5753 - protein, 9 aa, synthetic construct
  REGION 1..9: note = Glycogen phosphorylase, muscle form (273-281)
AENISRVLY

SEQ ID NO: 5754 - protein, 9 aa, synthetic construct
  REGION 1..9: note = X-ray repair cross-complementing protein 5 (48-56)
AENKDEIAL

SEQ ID NO: 5755 - protein, 9 aa, synthetic construct
  REGION 1..9: note = Protein kinase C delta type (405-413)
AENPFLTHL

SEQ ID NO: 5756 - protein, 10 aa, synthetic construct
  REGION 1..10: note = ATP-dependent RNA helicase DDX42 (93-102)
AENSPTRQQF

SEQ ID NO: 5757 - protein, 9 aa, synthetic construct
  REGION 1..9: note = E3 ubiquitin-protein ligase TTC3 (1392-1400)
AENVAGHQI

SEQ ID NO: 5758 - protein, 9 aa, synthetic construct
  REGION 1..9: note = RAB6A-GEF complex partner protein 1 (906-914)
AENVPASKF

SEQ ID NO: 5759 - protein, 11 aa, synthetic construct
  REGION 1..11: note = Vigilin (1010-1020)
AEQEDRALRSF

SEQ ID NO: 5760 - protein, 9 aa, synthetic construct
  REGION 1..9: note = Plectin (2014-2022)
AEQESARQL

SEQ ID NO: 5761 - protein, 11 aa, synthetic construct
  REGION 1..11: note = B-cell receptor-associated protein 31 (21-31)
AESASEAAKKY

SEQ ID NO: 5762 - protein, 9 aa, synthetic construct
  REGION 1..9: note = T-complex protein 1 subunit beta (113-121)
AESLIAKKI

SEQ ID NO: 5763 - protein, 9 aa, synthetic construct
  REGION 1..9: note = Sphingomyelin phosphodiesterase 4 (513-521)
AESPAGHSF

SEQ ID NO: 5764 - protein, 9 aa, synthetic construct
  REGION 1..9: note = Protein THEMIS2 (120-128)
AESPERVLL

SEQ ID NO: 5765 - protein, 11 aa, synthetic construct
  REGION 1..11: note = Chitinase domain-containing protein 1 (57-67)
AESVVLEHRSY

SEQ ID NO: 5766 - protein, 9 aa, synthetic construct
  REGION 1..9: note = Poly(A)-specific ribonuclease PARN (455-463)
AESYRIQTY

SEQ ID NO: 5767 - protein, 10 aa, synthetic construct
  REGION 1..10: note = Translation initiation factor eIF-2B subunit epsilon (406-415)
AEVGAAGKGY

SEQ ID NO: 5768 - protein, 11 aa, synthetic construct
  REGION 1..11: note = RNA-binding protein 8A (78-88)
AEYGEIKNIHL

SEQ ID NO: 5769 - protein, 9 aa, synthetic construct
  REGION 1..9: note = Histone deacetylase 1 (239-247)
AIFKPVMSK

SEQ ID NO: 5770 - protein, 9 aa, synthetic construct
  REGION 1..9: note = Pre-mRNA-processing factor 6 (764-772)
AILEKSRLK

SEQ ID NO: 5771 - protein, 11 aa, synthetic construct
  REGION 1..11: note = Serine/threonine-protein phosphatase 2A 65 kDa regulatory subunit A alpha isoform (457-467)
AIREAATSNLK

SEQ ID NO: 5772 - protein, 9 aa, synthetic construct
  REGION 1..9: note = Cleavage and polyadenylation specificity factor subunit 7 (346-354)
AISSSAISK

SEQ ID NO: 5773 - protein, 9 aa, synthetic construct
  REGION 1..9: note = 39S ribosomal protein L20, mitochondrial (106-114)
AIYEPKTFK

SEQ ID NO: 5774 - protein, 9 aa, synthetic construct
  REGION 1..9: note = Melanoma-associated antigen F1 (61-69)
ALAAKALAR

SEQ ID NO: 5775 - protein, 9 aa, synthetic construct
  REGION 1..9: note = Proteasome subunit alpha type-4 (120-128)
ALAIKVLNK

SEQ ID NO: 5776 - protein, 9 aa, synthetic construct
  REGION 1..9: note = Lysine-specific demethylase 2B (171-179)
ALANKPLRR

SEQ ID NO: 5777 - protein, 9 aa, synthetic construct
  REGION 1..9: note = Eukaryotic translation initiation factor 3 subunit C-like protein (251-259)
ALASRFLKK

SEQ ID NO: 5778 - protein, 9 aa, synthetic construct
  REGION 1..9: note = Translation factor GUF1, mitochondrial (274-282)
ALFDGVVSK

SEQ ID NO: 5779 - protein, 9 aa, synthetic construct
  REGION 1..9: note = V-type proton ATPase subunit E 1 (214-222)
ALFGANANR

SEQ ID NO: 5780 - protein, 10 aa, synthetic construct
  REGION 1..10: note = Sorting nexin-5 (315-324)
ALIDYENSNK

SEQ ID NO: 5781 - protein, 10 aa, synthetic construct
  REGION 1..10: note = T-complex protein 1 subunit zeta (279-288)
ALIKHKPSVK

SEQ ID NO: 5782 - protein, 10 aa, synthetic construct
  REGION 1..10: note = 60S ribosomal protein L9 (159-168)
ALIQQATTVK

SEQ ID NO: 5783 - protein, 10 aa, synthetic construct
  REGION 1..10: note = Actin-related protein 2/3 complex subunit 5 (58-67)
ALKNPPINTK

SEQ ID NO: 5784 - protein, 10 aa, synthetic construct
  REGION 1..10: note = 40S ribosomal protein S15a (10-19)
ALKSINNAEK

SEQ ID NO: 5785 - protein, 9 aa, synthetic construct
  REGION 1..9: note = Eukaryotic translation initiation factor 4 gamma 1 (785-793)
ALKVPTTEK

SEQ ID NO: 5786 - protein, 11 aa, synthetic construct
  REGION 1..11: note = Prefoldin subunit 6 (48-58)
ALLDGSNVVFK

SEQ ID NO: 5787 - protein, 9 aa, synthetic construct
  REGION 1..9: note = Serine hydroxymethyltransferase, mitochondrial (340-348)
ALLERGYSL

SEQ ID NO: 5788 - protein, 9 aa, synthetic construct
  REGION 1..9: note = Interferon alpha-inducible protein 6 (113-121)
ALMGYATHK

SEQ ID NO: 5789 - protein, 9 aa, synthetic construct
  REGION 1..9: note = Engulfment and cell motility protein 2 (573-581)
ALNHKVLHY

SEQ ID NO: 5790 - protein, 9 aa, synthetic construct
  REGION 1..9: note = 60S ribosomal protein L4 (132-140)
ALPALVMSK

SEQ ID NO: 5791 - protein, 9 aa, synthetic construct
  REGION 1..9: note = AT-rich interactive domain-containing protein 4B (407-415)
ALPEKVVNK

SEQ ID NO: 5792 - protein, 10 aa, synthetic construct
  REGION 1..10: note = m7GpppX diphosphatase (320-329)
ALRADDPLLK

SEQ ID NO: 5793 - protein, 9 aa, synthetic construct
  REGION 1..9: note = Probable helicase senataxin (1619-1627)
ALSPSLKNK

SEQ ID NO: 5794 - protein, 9 aa, synthetic construct
  REGION 1..9: note = Transcription initiation factor IIE subunit beta (16-24)
ALSTPVVEK

SEQ ID NO: 5795 - protein, 10 aa, synthetic construct
  REGION 1..10: note = Nuclear receptor corepressor 1 (607-616)
ALVSTPVRTK

SEQ ID NO: 5796 - protein, 9 aa, synthetic construct
  REGION 1..9: note = F-box only protein 21 (373-381)
ALYGVVNVK

SEQ ID NO: 5797 - protein, 11 aa, synthetic construct
  REGION 1..11: note = Cytochrome c oxidase subunit 7A-related protein, mitochondrial (104-114)
ALYMASQPKNK

SEQ ID NO: 5798 - protein, 9 aa, synthetic construct
  REGION 1..9: note = Anaphase-promoting complex subunit 1 (1587-1595)
ALYPHFPAH

SEQ ID NO: 5799 - protein, 9 aa, synthetic construct
  REGION 1..9: note = Nucleosome assembly protein 1-like 4 (97-105)
ALYQPLFDK

SEQ ID NO: 5800 - protein, 9 aa, synthetic construct
  REGION 1..9: note = Mitochondrial ubiquitin ligase activator of NFKB 1 (24-32)
ALYSVYRQK

SEQ ID NO: 5801 - protein, 9 aa, synthetic construct
  REGION 1..9: note = Pyruvate kinase PKM (21-29)
AMADTFLEH

SEQ ID NO: 5802 - protein, 9 aa, synthetic construct
  REGION 1..9: note = Baculoviral IAP repeat-containing protein 6 (2448-2456)
AMKPKPLSV

SEQ ID NO: 5803 - protein, 11 aa, synthetic construct
  REGION 1..11: note = NAD(P)H dehydrogenase (quinone) 1 (128-138)
AMYDKGPFRSK

SEQ ID NO: 5804 - protein, 8 aa, synthetic construct
  REGION 1..8: note = Lysine-specific demethylase 5D (795-802)
ANKVRVAL

SEQ ID NO: 5805 - protein, 9 aa, synthetic construct
  REGION 1..9: note = Major facilitator superfamily domain-containing protein 12 (11-19)
APSPRPLSL

SEQ ID NO: 5806 - protein, 9 aa, synthetic construct
  REGION 1..9: note = THO complex subunit 4 (51-59)
APYSRPKQL

SEQ ID NO: 5807 - protein, 9 aa, synthetic construct
  REGION 1..9: note = 40S ribosomal protein S3 (44-52)
AQAESLRYK

SEQ ID NO: 5808 - protein, 11 aa, synthetic construct
  REGION 1..11: note = Hydroxymethylglutaryl-CoA synthase, cytoplasmic (393-403)
AQYSPQQLAGK

SEQ ID NO: 5809 - protein, 10 aa, synthetic construct
  REGION 1..10: note = Nucleolar protein 58 (344-353)
ASLVGQTSPK

SEQ ID NO: 5810 - protein, 9 aa, synthetic construct
  REGION 1..9: note = Casein kinase II subunit beta (204-212)
ASNFKSPVK

SEQ ID NO: 5811 - protein, 9 aa, synthetic construct
  REGION 1..9: note = Sec1 family domain-containing protein 1 (482-490)
ASYGSTTTK

SEQ ID NO: 5812 - protein, 11 aa, synthetic construct
  REGION 1..11: note = Actin, cytoplasmic 2 (19-29)
ATAASSSSLEK

SEQ ID NO: 5813 - protein, 10 aa, synthetic construct
  REGION 1..10: note = Receptor expression-enhancing protein 3 (130-139)
ATAAVTAAVK

SEQ ID NO: 5814 - protein, 9 aa, synthetic construct
  REGION 1..9: note = Mediator of RNA polymerase II transcription subunit 12 (294-302)
ATAGFTIGR

SEQ ID NO: 5815 - protein, 9 aa, synthetic construct
  REGION 1..9: note = Kinetochore protein Nuf2 (353-361)
ATAQFKINK

SEQ ID NO: 5816 - protein, 9 aa, synthetic construct
  REGION 1..9: note = E3 ubiquitin-protein ligase makorin-1 (117-125)
ATATELTTK

SEQ ID NO: 5817 - protein, 9 aa, synthetic construct
  REGION 1..9: note = Adenomatous polyposis coli protein (1083-1091)
ATDIPSSQK

SEQ ID NO: 5818 - protein, 9 aa, synthetic construct
  REGION 1..9: note = Myosin-9 (540-548)
ATDKSFVEK

SEQ ID NO: 5819 - protein, 9 aa, synthetic construct
  REGION 1..9: note = Probable ATP-dependent RNA helicase DHX37 (603-611)
ATFPVAPRY

SEQ ID NO: 5820 - protein, 11 aa, synthetic construct
  REGION 1..11: note = Protein transport protein Sec31A (61-71)
ATFSSSHRYHK

SEQ ID NO: 5821 - protein, 9 aa, synthetic construct
  REGION 1..9: note = Exosome complex component RRP41 (79-87)
ATFSTGERK

SEQ ID NO: 5822 - protein, 10 aa, synthetic construct
  REGION 1..10: note = Angio-associated migratory cell protein (18-27)
ATGDMSGLLK

SEQ ID NO: 5823 - protein, 9 aa, synthetic construct
  REGION 1..9: note = Trans-3-hydroxy-L-proline dehydratase (302-310)
ATGSVFTGK

SEQ ID NO: 5824 - protein, 9 aa, synthetic construct
  REGION 1..9: note = Lamina-associated polypeptide 2, isoform alpha (583-591)
ATHTAFVAK

SEQ ID NO: 5825 - protein, 9 aa, synthetic construct
  REGION 1..9: note = Helicase with zinc finger domain 2 (1314-1322)
ATITKVLQK

SEQ ID NO: 5826 - protein, 9 aa, synthetic construct
  REGION 1..9: note = Hexokinase-2 (388-396)
ATLAAVLQR

SEQ ID NO: 5827 - protein, 10 aa, synthetic construct
  REGION 1..10: note = Fanconi anemia group I protein (1123-1132)
ATLPNQPVEK

SEQ ID NO: 5828 - protein, 9 aa, synthetic construct
  REGION 1..9: note = Pescadillo homolog (14-22)
ATNYITRNK

SEQ ID NO: 5829 - protein, 9 aa, synthetic construct
  REGION 1..9: note = Nucleolar and spindle-associated protein 1 (346-354)
ATQTPVSNK

SEQ ID NO: 5830 - protein, 9 aa, synthetic construct
  REGION 1..9: note = Retinoblastoma-associated protein (27-35)
ATSAFQTQK

SEQ ID NO: 5831 - protein, 9 aa, synthetic construct
  REGION 1..9: note = DNA repair protein XRCC2 (193-201)
ATTQTIMQK

SEQ ID NO: 5832 - protein, 10 aa, synthetic construct
  REGION 1..10: note = Derlin-1 (21-30)
ATVAVPLVGK

SEQ ID NO: 5833 - protein, 9 aa, synthetic construct
  REGION 1..9: note = Pre-mRNA-processing-splicing factor 8 (765-773)
ATVDKTVCK

SEQ ID NO: 5834 - protein, 10 aa, synthetic construct
  REGION 1..10: note = Importin subunit beta-1 (862-871)
ATWATKELRK

SEQ ID NO: 5835 - protein, 10 aa, synthetic construct
  REGION 1..10: note = 60S ribosomal protein L13 (23-32)
ATWFNQPARK

SEQ ID NO: 5836 - protein, 10 aa, synthetic construct
  REGION 1..10: note = DNA (cytosine-5)-methyltransferase 3A (168-177)
ATYNKQPMYR

SEQ ID NO: 5837 - protein, 9 aa, synthetic construct
  REGION 1..9: note = Putative rhophilin-2-like protein RHPN2P1 (502-510)
ATYSVGMQK

SEQ ID NO: 5838 - protein, 10 aa, synthetic construct
  REGION 1..10: note = TRAF2 and NCK-interacting protein kinase (83-92)
ATYYGAFIKK

SEQ ID NO: 5839 - protein, 9 aa, synthetic construct
  REGION 1..9: note = T-complex protein 1 subunit gamma (73-81)
AVAHALTEK

SEQ ID NO: 5840 - protein, 10 aa, synthetic construct
  REGION 1..10: note = WD repeat-containing protein 3 (14-23)
AVFGVIGSQK

SEQ ID NO: 5841 - protein, 11 aa, synthetic construct
  REGION 1..11: note = Importin subunit alpha-1 (338-348)
AVFPSLLTNPK

SEQ ID NO: 5842 - protein, 10 aa, synthetic construct
  REGION 1..10: note = Nucleoside diphosphate kinase 6 (39-48)
AVHQQILSNK

SEQ ID NO: 5843 - protein, 9 aa, synthetic construct
  REGION 1..9: note = Methylsterol monooxygenase 1 (15-23)
AVIEDTWHY

SEQ ID NO: 5844 - protein, 11 aa, synthetic construct
  REGION 1..11: note = Protein HIRA (394-404)
AVIENPEMLKY

SEQ ID NO: 5845 - protein, 9 aa, synthetic construct
  REGION 1..9: note = Probable phospholipid-transporting ATPase IF (301-309)
AVISTILKY

SEQ ID NO: 5846 - protein, 9 aa, synthetic construct
  REGION 1..9: note = Integrator complex subunit 12 (240-248)
AVKDPLVKK

SEQ ID NO: 5847 - protein, 9 aa, synthetic construct
  REGION 1..9: note = Nuclear pore complex protein Nup160 (1177-1185)
AVLGKGHQY

SEQ ID NO: 5848 - protein, 9 aa, synthetic construct
  REGION 1..9: note = Cyclin-I (179-187)
AVLTKQLLH

SEQ ID NO: 5849 - protein, 10 aa, synthetic construct
  REGION 1..10: note = Signal peptidase complex catalytic subunit SEC11C (180-189)
AVMGAYVLLK

SEQ ID NO: 5850 - protein, 10 aa, synthetic construct
  REGION 1..10: note = Structural maintenance of chromosomes protein 4 (1190-1199)
AVNPKEIASK

SEQ ID NO: 5851 - protein, 9 aa, synthetic construct
  REGION 1..9: note = Sororin (53-61)
AVRKPIVLK

SEQ ID NO: 5852 - protein, 9 aa, synthetic construct
  REGION 1..9: note = Histone H2B type 1-K (118-126)
AVTKYTSAK

SEQ ID NO: 5853 - protein, 11 aa, synthetic construct
  REGION 1..11: note = Nuclear pore complex protein Nup160 (1113-1123)
AVYDRPGASPK

SEQ ID NO: 5854 - protein, 9 aa, synthetic construct
  REGION 1..9: note = Integrator complex subunit 8 (269-277)
AVYENAREK

SEQ ID NO: 5855 - protein, 9 aa, synthetic construct
  REGION 1..9: note = Toll-interacting protein (84-92)
AVYETPTAH

SEQ ID NO: 5856 - protein, 11 aa, synthetic construct
  REGION 1..11: note = Ras GTPase-activating protein-binding protein 1 (54-64)
AVYGQKEIHRK

SEQ ID NO: 5857 - protein, 9 aa, synthetic construct
  REGION 1..9: note = Amyloid protein-binding protein 2 (337-345)
AYSSYVHQY

SEQ ID NO: 5858 - protein, 9 aa, synthetic construct
  REGION 1..9: note = 182 kDa tankyrase-1-binding protein (415-423)
DAHLRPTSL

SEQ ID NO: 5859 - protein, 8 aa, synthetic construct
  REGION 1..8: note = Cytoplasmic FMR1-interacting protein 2 (285-292)
DAKKRINL

SEQ ID NO: 5860 - protein, 9 aa, synthetic construct
  REGION 1..9: note = Heat shock protein 105 kDa (255-263)
DAKSKIRAL

SEQ ID NO: 5861 - protein, 9 aa, synthetic construct
  REGION 1..9: note = Chromodomain-helicase-DNA-binding protein 2 (106-114)
DEALIGKKF

SEQ ID NO: 5862 - protein, 10 aa, synthetic construct
  REGION 1..10: note = Pre-mRNA-processing-splicing factor 8 (1104-1113)
DEARDLIQRY

SEQ ID NO: 5863 - protein, 10 aa, synthetic construct
  REGION 1..10: note = EH domain-containing protein 4 (201-210)
DEFSEAIKAF

SEQ ID NO: 5864 - protein, 11 aa, synthetic construct
  REGION 1..11: note = 26S protease regulatory subunit 10B (247-257)
DEIDAIGGRRF

SEQ ID NO: 5865 - protein, 10 aa, synthetic construct
  REGION 1..10: note = U4/U6 small nuclear ribonucleoprotein Prp31 (322-331)
DEIERKFDKW

SEQ ID NO: 5866 - protein, 9 aa, synthetic construct
  REGION 1..9: note = Zinc finger MYND domain-containing protein 11 (348-356)
DELELHQRF

SEQ ID NO: 5867 - protein, 10 aa, synthetic construct
  REGION 1..10: note = General transcription factor IIH subunit 5 (24-33)
DESNALGKKF

SEQ ID NO: 5868 - protein, 9 aa, synthetic construct
  REGION 1..9: note = Ubiquitin carboxyl-terminal hydrolase 19 (1197-1205)
DESQVVTRY

SEQ ID NO: 5869 - protein, 9 aa, synthetic construct
  REGION 1..9: note = Serrate RNA effector molecule homolog (164-172)
DETEAVKRY

SEQ ID NO: 5870 - protein, 10 aa, synthetic construct
  REGION 1..10: note = 60S ribosomal protein L26 (53-62)
DEVQVVRGHY

SEQ ID NO: 5871 - protein, 9 aa, synthetic construct
  REGION 1..9: note = Ras GTPase-activating protein-binding protein 2 (60-68)
DIHHKVLSL

SEQ ID NO: 5872 - protein, 9 aa, synthetic construct
  REGION 1..9: note = Heat shock 70 kDa protein 4 (255-263)
DIKSKIRAL

SEQ ID NO: 5873 - protein, 9 aa, synthetic construct
  REGION 1..9: note = Heterogeneous nuclear ribonucleoprotein F (196-204)
DPPLKFMSV

SEQ ID NO: 5874 - protein, 9 aa, synthetic construct
  REGION 1..9: note = Cullin-1 (348-356)
DVHKKYNAL

SEQ ID NO: 5875 - protein, 9 aa, synthetic construct
  REGION 1..9: note = Spectrin alpha chain, non-erythrocytic 1 (50-58)
DVKAKLHEL

SEQ ID NO: 5876 - protein, 9 aa, synthetic construct
  REGION 1..9: note = Coatomer subunit beta (34-42)
DVKSKTEAL

SEQ ID NO: 5877 - protein, 8 aa, synthetic construct
  REGION 1..8: note = Pumilio homolog 3 (320-327)
EAVIKHSL

SEQ ID NO: 5878 - protein, 10 aa, synthetic construct
  REGION 1..10: note = NADH dehydrogenase (ubiquinone) 1 alpha subcomplex subunit 13 (122-131)
EEALHASHGF

SEQ ID NO: 5879 - protein, 9 aa, synthetic construct
  REGION 1..9: note = DDB1- and CUL4-associated factor 10 (132-140)
EEANVGRGY

SEQ ID NO: 5880 - protein, 11 aa, synthetic construct
  REGION 1..11: note = 15 kDa selenoprotein (76-86)
EEAQFETKKLY

SEQ ID NO: 5881 - protein, 10 aa, synthetic construct
  REGION 1..10: note = Negative elongation factor E (10-19)
EEEEALQKKF

SEQ ID NO: 5882 - protein, 9 aa, synthetic construct
  REGION 1..9: note = 60S ribosomal protein L13 (171-179)
EEEKNFKAF

SEQ ID NO: 5883 - protein, 10 aa, synthetic construct
  REGION 1..10: note = Coiled-coil domain-containing protein 66 (780-789)
EEEPLNIHSF

SEQ ID NO: 5884 - protein, 9 aa, synthetic construct
  REGION 1..9: note = HLA class II histocompatibility antigen, DR alpha chain (41-49)
EEFGRFASF

SEQ ID NO: 5885 - protein, 10 aa, synthetic construct
  REGION 1..10: note = E3 ubiquitin-protein ligase MGRN1 (140-149)
EEFLNGRAVY

SEQ ID NO: 5886 - protein, 9 aa, synthetic construct
  REGION 1..9: note = Cullin-4A (269-277)
EEGDRVITY

SEQ ID NO: 5887 - protein, 9 aa, synthetic construct
  REGION 1..9: note = WD repeat-containing protein 36 (776-784)
EEGLVNNKY

SEQ ID NO: 5888 - protein, 10 aa, synthetic construct
  REGION 1..10: note = A-kinase anchor protein 2 (256-265)
EEHLESHKKY

SEQ ID NO: 5889 - protein, 9 aa, synthetic construct
  REGION 1..9: note = Unconventional myosin-Ie (749-757)
EEHPELQQF

SEQ ID NO: 5890 - protein, 9 aa, synthetic construct
  REGION 1..9: note = Vimentin (229-237)
EEIAFLKKL

SEQ ID NO: 5891 - protein, 10 aa, synthetic construct
  REGION 1..10: note = PH domain leucine-rich repeat-containing protein phosphatase 1 (287-296)
EEIDLSGNKL

SEQ ID NO: 5892 - protein, 8 aa, synthetic construct
  REGION 1..8: note = Probable ATP-dependent RNA helicase DDX56 (421-428)
EEIEGFRY

SEQ ID NO: 5893 - protein, 9 aa, synthetic construct
  REGION 1..9: note = Paxillin (389-397)
EEIGSRNFF

SEQ ID NO: 5894 - protein, 9 aa, synthetic construct
  REGION 1..9: note = Retinoblastoma-like protein 1 (195-203)
EEIGTPRKF

SEQ ID NO: 5895 - protein, 10 aa, synthetic construct
  REGION 1..10: note = Bloom syndrome protein (942-951)
EEIPVSSHYF

SEQ ID NO: 5896 - protein, 10 aa, synthetic construct
  REGION 1..10: note = Kinesin-like protein KIF21A (473-482)
EEISNMIHSY

SEQ ID NO: 5897 - protein, 11 aa, synthetic construct
  REGION 1..11: note = Thioredoxin-related transmembrane protein 2 (148-158)
EELERDKRVTW

SEQ ID NO: 5898 - protein, 8 aa, synthetic construct
  REGION 1..8: note = Clathrin heavy chain 1 (361-368)
EELFARKF

SEQ ID NO: 5899 - protein, 9 aa, synthetic construct
  REGION 1..9: note = 2',3'-cyclic-nucleotide 3'-phosphodiesterase (191-199)
EELGNHKAF

SEQ ID NO: 5900 - protein, 9 aa, synthetic construct
  REGION 1..9: note = Protein FAM192A (107-115)
EELKELKEY

SEQ ID NO: 5901 - protein, 10 aa, synthetic construct
  REGION 1..10: note = Proteasome subunit beta type-4 (119-128)
EELLGDGHSY

SEQ ID NO: 5902 - protein, 10 aa, synthetic construct
  REGION 1..10: note = Sorting nexin-14 (340-349)
EELQKIYKTY

SEQ ID NO: 5903 - protein, 9 aa, synthetic construct
  REGION 1..9: note = Krueppel-like factor 6 (124-132)
EELSPTAKF

SEQ ID NO: 5904 - protein, 11 aa, synthetic construct
  REGION 1..11: note = Eukaryotic initiation factor 4A-I (239-249)
EELTLEGIRQF

SEQ ID NO: 5905 - protein, 10 aa, synthetic construct
  REGION 1..10: note = Coiled-coil domain-containing protein 93 (132-141)
EEMGDYIRSY

SEQ ID NO: 5906 - protein, 10 aa, synthetic construct
  REGION 1..10: note = Nuclear pore complex protein Nup153 (1104-1113)
EEMPATKGGF

SEQ ID NO: 5907 - protein, 10 aa, synthetic construct
  REGION 1..10: note = Folliculin-interacting protein 1 (434-443)
EENAVDVKQY

SEQ ID NO: 5908 - protein, 9 aa, synthetic construct
  REGION 1..9: note = Tropomodulin-3 (310-318)
EENTNILKF

SEQ ID NO: 5909 - protein, 9 aa, synthetic construct
  REGION 1..9: note = G2/mitotic-specific cyclin-B1 (183-191)
EEQAVRPKY

SEQ ID NO: 5910 - protein, 9 aa, synthetic construct
  REGION 1..9: note = Targeting protein for Xklp2 (170-178)
EEQELEKSM

SEQ ID NO: 5911 - protein, 9 aa, synthetic construct
  REGION 1..9: note = Nuclear receptor-binding protein (235-243)
EEQKNLHFF

SEQ ID NO: 5912 - protein, 10 aa, synthetic construct
  REGION 1..10: note = Cyclin-G-associated kinase (740-749)
EEQQDILSKF

SEQ ID NO: 5913 - protein, 10 aa, synthetic construct
  REGION 1..10: note = Nitrogen permease regulator 2-like protein (336-345)
EEQSHPARLY

SEQ ID NO: 5914 - protein, 9 aa, synthetic construct
  REGION 1..9: note = OTU domain-containing protein 5 (177-185)
EEQVARESY

SEQ ID NO: 5915 - protein, 9 aa, synthetic construct
  REGION 1..9: note = Histone-binding protein RBBP4 (13-21)
EERVINEEY

SEQ ID NO: 5916 - protein, 9 aa, synthetic construct
  REGION 1..9: note = Sorting nexin-24 (11-19)
EESDLERGY

SEQ ID NO: 5917 - protein, 9 aa, synthetic construct
  REGION 1..9: note = Poly(rC)-binding protein 2 (41-49)
EESGARINI

SEQ ID NO: 5918 - protein, 9 aa, synthetic construct
  REGION 1..9: note = Vacuolar fusion protein CCZ1 homolog (215-223)
EESLNIVKY

SEQ ID NO: 5919 - protein, 10 aa, synthetic construct
  REGION 1..10: note = ATP-dependent RNA helicase DDX19B (301-310)
EETLDTIKQY

SEQ ID NO: 5920 - protein, 10 aa, synthetic construct
  REGION 1..10: note = Elongation factor 1-gamma (325-334)
EETQTLVREY

SEQ ID NO: 5921 - protein, 10 aa, synthetic construct
  REGION 1..10: note = Adenylate cyclase type 3 (1088-1097)
EETQVILREY

SEQ ID NO: 5922 - protein, 10 aa, synthetic construct
  REGION 1..10: note = Cleavage and polyadenylation specificity factor subunit 1 (1111-1120)
EETVSGLKGY

SEQ ID NO: 5923 - protein, 10 aa, synthetic construct
  REGION 1..10: note = MICOS complex subunit MIC19 (168-177)
EEVEAKFKRY

SEQ ID NO: 5924 - protein, 8 aa, synthetic construct
  REGION 1..8: note = G patch domain-containing protein 4 (211-218)
EEVESRAY

SEQ ID NO: 5925 - protein, 10 aa, synthetic construct
  REGION 1..10: note = Chromodomain-helicase-DNA-binding protein 1-like (214-223)
EEVGDFIQRY

SEQ ID NO: 5926 - protein, 9 aa, synthetic construct
  REGION 1..9: note = Ferritin light chain (137-145)
EEVKLIKKM

SEQ ID NO: 5927 - protein, 9 aa, synthetic construct
  REGION 1..9: note = Alanine-tRNA ligase, cytoplasmic (378-386)
EEVQFLKTL

SEQ ID NO: 5928 - protein, 10 aa, synthetic construct
  REGION 1..10: note = Glutaredoxin-3 (139-148)
EEVRQGLKAY

SEQ ID NO: 5929 - protein, 8 aa, synthetic construct
  REGION 1..8: note = Pre-B-cell leukemia transcription factor 3 (11-18)
EIKEKTGL

SEQ ID NO: 5930 - protein, 9 aa, synthetic construct
  REGION 1..9: note = AP-2 complex subunit alpha-1 (29-37)
EIKRINKEL

SEQ ID NO: 5931 - protein, 9 aa, synthetic construct
  REGION 1..9: note = 40S ribosomal protein S24 (39-47)
EIREKLAKM

SEQ ID NO: 5932 - protein, 9 aa, synthetic construct
  REGION 1..9: note = Crooked neck-like protein 1 (571-579)
EIRQKNLSL

SEQ ID NO: 5933 - protein, 9 aa, synthetic construct
  REGION 1..9: note = Enhancer of mRNA-decapping protein 3 (285-293)
ELHKKLLSV

SEQ ID NO: 5934 - protein, 9 aa, synthetic construct
  REGION 1..9: note = Alpha-2-macroglobulin receptor-associated protein (20-28)
ELKEKLRSI

SEQ ID NO: 5935 - protein, 8 aa, synthetic construct
  REGION 1..8: note = Neuroblastoma-amplified sequence (1048-1055)
ELLEKHGL

SEQ ID NO: 5936 - protein, 9 aa, synthetic construct
  REGION 1..9: note = Heat shock protein HSP 90-beta (529-537)
ERIMKAQAL

SEQ ID NO: 5937 - protein, 9 aa, synthetic construct
  REGION 1..9: note = Protein phosphatase 1 regulatory subunit 7 (95-103)
EVLKKVKTL

SEQ ID NO: 5938 - protein, 8 aa, synthetic construct
  REGION 1..8: note = Heterogeneous nuclear ribonucleoprotein M (130-137)
EVLNKHSL

SEQ ID NO: 5939 - protein, 9 aa, synthetic construct
  REGION 1..9: note = Exosome component 10 (254-262)
FAHPYQYEL

SEQ ID NO: 5940 - protein, 9 aa, synthetic construct
  REGION 1..9: note = Long-chain-fatty-acid-CoA ligase 3 (551-559)
FEDENGQRW

SEQ ID NO: 5941 - protein, 10 aa, synthetic construct
  REGION 1..10: note = X-ray repair cross-complementing protein 6 (478-487)
FENPVLQQHF

SEQ ID NO: 5942 - protein, 9 aa, synthetic construct
  REGION 1..9: note = Cyclin-dependent kinase 14 (275-283)
FGLARAKSV

SEQ ID NO: 5943 - protein, 9 aa, synthetic construct
  REGION 1..9: note = Translocation protein SEC62 (278-286)
FRPLYTHEY

SEQ ID NO: 5944 - protein, 8 aa, synthetic construct
  REGION 1..8: note = Myosin-9 (831-838)
FTKVKPLL

SEQ ID NO: 5945 - protein, 9 aa, synthetic construct
  REGION 1..9: note = Gamma-interferon-inducible protein 16 (533-541)
FVYEPKEQK

SEQ ID NO: 5946 - protein, 10 aa, synthetic construct
  REGION 1..10: note = Constitutive coactivator of peroxisome proliferator-activated receptor gamma (663-672)
FVYPGNPLRH

SEQ ID NO: 5947 - protein, 9 aa, synthetic construct
  REGION 1..9: note = Serine/threonine-protein phosphatase 2A 65 kDa regulatory subunit A alpha isoform (190-198)
GEFAKVLEL

SEQ ID NO: 5948 - protein, 11 aa, synthetic construct
  REGION 1..11: note = DNA replication licensing factor MCM5 (552-562)
GEIDLAKLKKF

SEQ ID NO: 5949 - protein, 9 aa, synthetic construct
  REGION 1..9: note = Serine/threonine-protein phosphatase PP1-beta catalytic subunit (216-224)
GENDRGVSF

SEQ ID NO: 5950 - protein, 10 aa, synthetic construct
  REGION 1..10: note = HLA class I histocompatibility antigen, B-7 alpha chain (42-51)
GEPRFISVGY

SEQ ID NO: 5951 - protein, 10 aa, synthetic construct
  REGION 1..10: note = Protein SCAF11 (201-210)
GESSFTYRAY

SEQ ID NO: 5952 - protein, 9 aa, synthetic construct
  REGION 1..9: note = Rho GTPase-activating protein 21 (129-137)
GESVIGKTY

SEQ ID NO: 5953 - protein, 11 aa, synthetic construct
  REGION 1..11: note = Arfaptin-1 (19-29)
GEVDDSREHSF

SEQ ID NO: 5954 - protein, 9 aa, synthetic construct
  REGION 1..9: note = AP-2 complex subunit mu (12-20)
GEVLISRVY

SEQ ID NO: 5955 - protein, 9 aa, synthetic construct
  REGION 1..9: note = Endoplasmic reticulum-Golgi intermediate compartment protein 3 (255-263)
GEVLRTNQF

SEQ ID NO: 5956 - protein, 10 aa, synthetic construct
  REGION 1..10: note = Proline and serine-rich protein 1 (157-166)
GIFPGTPLKK

SEQ ID NO: 5957 - protein, 10 aa, synthetic construct
  REGION 1..10: note = Ubiquitin carboxyl-terminal hydrolase 36 (460-469)
GIISSPLTGK

SEQ ID NO: 5958 - protein, 9 aa, synthetic construct
  REGION 1..9: note = Alpha-2-macroglobulin receptor-associated protein (145-153)
GLDDPRLEK

SEQ ID NO: 5959 - protein, 11 aa, synthetic construct
  REGION 1..11: note = Targeting protein for Xklp2 (12-22)
GLFQGKTPLRK

SEQ ID NO: 5960 - protein, 10 aa, synthetic construct
  REGION 1..10: note = Glutathione S-transferase kappa 1 (142-151)
GLLEKIATPK

SEQ ID NO: 5961 - protein, 9 aa, synthetic construct
  REGION 1..9: note = Kelch repeat and BTB domain-containing protein 7 (280-288)
GLLTKPIVK

SEQ ID NO: 5962 - protein, 9 aa, synthetic construct
  REGION 1..9: note = Microtubule-associated protein 4 (735-743)
GLNKKPMSL

SEQ ID NO: 5963 - protein, 9 aa, synthetic construct
  REGION 1..9: note = Epidermal growth factor receptor substrate 15-like 1 (46-54)
GLSDIILGK

SEQ ID NO: 5964 - protein, 9 aa, synthetic construct
  REGION 1..9: note = Calcium homeostasis endoplasmic reticulum protein (680-688)
GLYEFFRAK

SEQ ID NO: 5965 - protein, 9 aa, synthetic construct
  REGION 1..9: note = Cyclin-dependent kinase 9 (136-144)
GLYYIHRNK

SEQ ID NO: 5966 - protein, 10 aa, synthetic construct
  REGION 1..10: note = 26S proteasome non-ATPase regulatory subunit 8 (146-155)
GSYNKVFLAK

SEQ ID NO: 5967 - protein, 9 aa, synthetic construct
  REGION 1..9: note = RNA polymerase II-associated protein 3 (188-196)
GSYSKAFAR

SEQ ID NO: 5968 - protein, 10 aa, synthetic construct
  REGION 1..10: note = Zinc finger E-box-binding homeobox 1 (190-199)
GSYSSHISSK

SEQ ID NO: 5969 - protein, 9 aa, synthetic construct
  REGION 1..9: note = Dynein light chain 1, cytoplasmic (63-71)
GSYVTHETK

SEQ ID NO: 5970 - protein, 10 aa, synthetic construct
  REGION 1..10: note = 39S ribosomal protein L2, mitochondrial (222-231)
GTAIIQLPSK

SEQ ID NO: 5971 - protein, 9 aa, synthetic construct
  REGION 1..9: note = Fidgetin-like protein 1 (444-452)
GTGKTLIGK

SEQ ID NO: 5972 - protein, 9 aa, synthetic construct
  REGION 1..9: note = ATP-binding cassette sub-family F member 3 (103-111)
GTKLPGLLK

SEQ ID NO: 5973 - protein, 9 aa, synthetic construct
  REGION 1..9: note = WD repeat-containing protein 46 (390-398)
GTYQPLSTR

SEQ ID NO: 5974 - protein, 9 aa, synthetic construct
  REGION 1..9: note = Protein quaking (198-206)
GTYRDANIK

SEQ ID NO: 5975 - protein, 9 aa, synthetic construct
  REGION 1..9: note = Rho-associated protein kinase 1 (285-293)
GTYSKIMNH

SEQ ID NO: 5976 - protein, 9 aa, synthetic construct
  REGION 1..9: note = Protein phosphatase 1 regulatory subunit 7 (159-167)
GVDKLTRLK

SEQ ID NO: 5977 - protein, 9 aa, synthetic construct
  REGION 1..9: note = Profilin-1 (118-126)
GVHGGLINK

SEQ ID NO: 5978 - protein, 11 aa, synthetic construct
  REGION 1..11: note = Exosome complex component RRP40 (136-146)
GVIGQDGLLFK

SEQ ID NO: 5979 - protein, 9 aa, synthetic construct
  REGION 1..9: note = Ubiquinol-cytochrome-c reductase complex assembly factor 1 (118-126)
GVNPYILKK

SEQ ID NO: 5980 - protein, 9 aa, synthetic construct
  REGION 1..9: note = Eukaryotic translation initiation factor 3 subunit C-like protein (190-198)
GVSAATFLK

SEQ ID NO: 5981 - protein, 9 aa, synthetic construct
  REGION 1..9: note = Antizyme inhibitor 1 (319-327)
GVYGSFASK

SEQ ID NO: 5982 - protein, 10 aa, synthetic construct
  REGION 1..10: note = Nuclear pore complex protein Nup160 (105-114)
GVYVSETQNR

SEQ ID NO: 5983 - protein, 9 aa, synthetic construct
  REGION 1..9: note = Alanine-tRNA ligase, cytoplasmic (301-309)
HARTITVAL

SEQ ID NO: 5984 - protein, 9 aa, synthetic construct
  REGION 1..9: note = Transketolase (243-251)
HASDRIIAL

SEQ ID NO: 5985 - protein, 9 aa, synthetic construct
  REGION 1..9: note = Stathmin (64-72)
HEAEVLKQL

SEQ ID NO: 5986 - protein, 9 aa, synthetic construct
  REGION 1..9: note = WD repeat-containing protein 6 (315-323)
HEGEILQAF

SEQ ID NO: 5987 - protein, 11 aa, synthetic construct
  REGION 1..11: note = Carbohydrate sulfotransferase 10 (215-225)
HEIAPGIIRKY

SEQ ID NO: 5988 - protein, 9 aa, synthetic construct
  REGION 1..9: note = Nardilysin (1054-1062)
HEIEALKSF

SEQ ID NO: 5989 - protein, 8 aa, synthetic construct
  REGION 1..8: note = LanC-like protein 1 (89-96)
HGYVKQSL

SEQ ID NO: 5990 - protein, 9 aa, synthetic construct
  REGION 1..9: note = Histone H2A.V (87-95)
HIHKSLIGK

SEQ ID NO: 5991 - protein, 9 aa, synthetic construct
  REGION 1..9: note = E3 ubiquitin-protein ligase TRIP12 (1751-1759)
HLEDIVRQK

SEQ ID NO: 5992 - protein, 9 aa, synthetic construct
  REGION 1..9: note = Unconventional myosin-VI (430-438)
HLFDHVVNR

SEQ ID NO: 5993 - protein, 9 aa, synthetic construct
  REGION 1..9: note = Nardilysin (708-716)
HLISPLIQK

SEQ ID NO: 5994 - protein, 11 aa, synthetic construct
  REGION 1..11: note = Hermansky-Pudlak syndrome 5 protein (400-410)
HLKSQLDHGTY

SEQ ID NO: 5995 - protein, 9 aa, synthetic construct
  REGION 1..9: note = Integrin-linked protein kinase (248-256)
HTLEPLIPR

SEQ ID NO: 5996 - protein, 10 aa, synthetic construct
  REGION 1..10: note = Serine/threonine-protein kinase WNK1 (339-348)
HTRTPPIIHR

SEQ ID NO: 5997 - protein, 9 aa, synthetic construct
  REGION 1..9: note = Centromere protein M (122-130)
HTYQSPLLY

SEQ ID NO: 5998 - protein, 10 aa, synthetic construct
  REGION 1..10: note = T-complex protein 1 subunit epsilon (135-144)
HVIETLIGKK

SEQ ID NO: 5999 - protein, 9 aa, synthetic construct
  REGION 1..9: note = Gamma-interferon-inducible protein 16 (241-249)
HVKVLNTSL

SEQ ID NO: 6000 - protein, 9 aa, synthetic construct
  REGION 1..9: note = Ankyrin repeat family A protein 2 (113-121)
HVYTPSTTK

SEQ ID NO: 6001 - protein, 10 aa, synthetic construct
  REGION 1..10: note = Little elongation complex subunit 1 (1936-1945)
HVYVGNISKK

SEQ ID NO: 6002 - protein, 11 aa, synthetic construct
  REGION 1..11: note = Deoxynucleoside triphosphate triphosphohydrolase SAMHD1 (397-407)
IEITGAGGKKY

SEQ ID NO: 6003 - protein, 9 aa, synthetic construct
  REGION 1..9: note = Lanosterol 14-alpha demethylase (175-183)
IEKETKEYF

SEQ ID NO: 6004 - protein, 9 aa, synthetic construct
  REGION 1..9: note = NADH dehydrogenase (ubiquinone) 1 beta subcomplex subunit 4 (60-68)
IENPALLRW

SEQ ID NO: 6005 - protein, 9 aa, synthetic construct
  REGION 1..9: note = Constitutive coactivator of PPAR-gamma-like protein 1 (325-333)
IGYYSATSK

SEQ ID NO: 6006 - protein, 9 aa, synthetic construct
  REGION 1..9: note = T-complex protein 1 subunit gamma (155-163)
IINSSITTK

SEQ ID NO: 6007 - protein, 9 aa, synthetic construct
  REGION 1..9: note = TFIIH basal transcription factor complex helicase XPD subunit (533-541)
ILENIQRNK

SEQ ID NO: 6008 - protein, 9 aa, synthetic construct
  REGION 1..9: note = Thymidine kinase, cytosolic (24-32)
ILGPMFSGK

SEQ ID NO: 6009 - protein, 9 aa, synthetic construct
  REGION 1..9: note = Pre-mRNA-processing-splicing factor 8 (2105-2113)
ILPKNVLKK

SEQ ID NO: 6010 - protein, 10 aa, synthetic construct
  REGION 1..10: note = BAG35700.1 (99-108)
ILRDGITAGK

SEQ ID NO: 6011 - protein, 9 aa, synthetic construct
  REGION 1..9: note = Trifunctional purine biosynthetic protein adenosine-3 (190-198)
ILSGPFVQK

SEQ ID NO: 6012 - protein, 9 aa, synthetic construct
  REGION 1..9: note = Actin, gamma-enteric smooth muscle (150-158)
ILTERGYSF

SEQ ID NO: 6013 - protein, 9 aa, synthetic construct
  REGION 1..9: note = Ornithine decarboxylase (218-226)
ILYDHAHVK

SEQ ID NO: 6014 - protein, 9 aa, synthetic construct
  REGION 1..9: note = Peroxiredoxin-6 (147-155)
ILYPATTGR

SEQ ID NO: 6015 - protein, 9 aa, synthetic construct
  REGION 1..9: note = LYR motif-containing protein 1 (79-87)
IPYPRPIHL

SEQ ID NO: 6016 - protein, 9 aa, synthetic construct
  REGION 1..9: note = SWI/SNF complex subunit SMARCC2 (39-47)
IQAEPPTNK

SEQ ID NO: 6017 - protein, 10 aa, synthetic construct
  REGION 1..10: note = Lysine-specific histone demethylase 1B (637-646)
IQFNPPLSEK

SEQ ID NO: 6018 - protein, 9 aa, synthetic construct
  REGION 1..9: note = Induced myeloid leukemia cell differentiation protein Mcl-1 (115-123)
ISFGAFVAK

SEQ ID NO: 6019 - protein, 9 aa, synthetic construct
  REGION 1..9: note = 3-hydroxy-3-methylglutaryl-coenzyme A reductase (354-362)
ITSPVVTQK

SEQ ID NO: 6020 - protein, 9 aa, synthetic construct
  REGION 1..9: note = Pre-mRNA-processing factor 40 homolog A (229-237)
IVAGSLITK

SEQ ID NO: 6021 - protein, 9 aa, synthetic construct
  REGION 1..9: note = V-type proton ATPase 16 kDa proteolipid subunit (147-155)
IVALILSTK

SEQ ID NO: 6022 - protein, 9 aa, synthetic construct
  REGION 1..9: note = HLA class II histocompatibility antigen, DP alpha 1 chain (238-246)
IVGTVLIIK

SEQ ID NO: 6023 - protein, 11 aa, synthetic construct
  REGION 1..11: note = ATP synthase subunit g, mitochondrial (56-66)
IVNSAQTGSFK

SEQ ID NO: 6024 - protein, 10 aa, synthetic construct
  REGION 1..10: note = Interferon regulatory factor 9 (119-128)
IVSGQPGTQK

SEQ ID NO: 6025 - protein, 10 aa, synthetic construct
  REGION 1..10: note = Cleavage and polyadenylation specificity factor subunit 2 (17-26)
IVYAVDFNHK

SEQ ID NO: 6026 - protein, 9 aa, synthetic construct
  REGION 1..9: note = Serine palmitoyltransferase 2 (237-245)
IVYGQPRTR

SEQ ID NO: 6027 - protein, 9 aa, synthetic construct
  REGION 1..9: note = Sentrin-specific protease 6 (648-656)
IVYPPPPAK

SEQ ID NO: 6028 - protein, 10 aa, synthetic construct
  REGION 1..10: note = Elongation factor 1-gamma (428-437)
KAFNQGKIFK

SEQ ID NO: 6029 - protein, 9 aa, synthetic construct
  REGION 1..9: note = Tyrosine-protein kinase BAZ1B (885-893)
KAFQEGIAK

SEQ ID NO: 6030 - protein, 10 aa, synthetic construct
  REGION 1..10: note = Zinc finger CCCH domain-containing protein 4 (890-899)
KAKEPPFVRK

SEQ ID NO: 6031 - protein, 9 aa, synthetic construct
  REGION 1..9: note = Squalene monooxygenase (318-326)
KANHAELIL

SEQ ID NO: 6032 - protein, 9 aa, synthetic construct
  REGION 1..9: note = RNA cytidine acetyltransferase (367-375)
KASEVFLQR

SEQ ID NO: 6033 - protein, 9 aa, synthetic construct
  REGION 1..9: note = Ribonuclease inhibitor (226-234)
KASLRELAL

SEQ ID NO: 6034 - protein, 9 aa, synthetic construct
  REGION 1..9: note = UDP-glucose:glycoprotein glucosyltransferase 2 (5-13)
KATNVVRLL

SEQ ID NO: 6035 - protein, 9 aa, synthetic construct
  REGION 1..9: note = Bifunctional apoptosis regulator (261-269)
KAVNPGRSL

SEQ ID NO: 6036 - protein, 9 aa, synthetic construct
  REGION 1..9: note = SWI/SNF-related matrix-associated actin-dependent regulator of chromatin subfamily E member 1 (113-121)
KAYHNSPAY

SEQ ID NO: 6037 - protein, 9 aa, synthetic construct
  REGION 1..9: note = Zinc finger protein 302 (72-80)
KAYPFPLSH

SEQ ID NO: 6038 - protein, 9 aa, synthetic construct
  REGION 1..9: note = Phosphatidylinositol 4-phosphate 5-kinase type-1 alpha (187-195)
KEAEFLQKL

SEQ ID NO: 6039 - protein, 11 aa, synthetic construct
  REGION 1..11: note = Transmembrane emp24 domain-containing protein 10 (87-97)
KEDATKGKFAF

SEQ ID NO: 6040 - protein, 9 aa, synthetic construct
  REGION 1..9: note = COP9 signalosome complex subunit 6 (78-86)
KEEQFKQVF

SEQ ID NO: 6041 - protein, 9 aa, synthetic construct
  REGION 1..9: note = Septin-7 (100-108)
KEGGVQLLL

SEQ ID NO: 6042 - protein, 10 aa, synthetic construct
  REGION 1..10: note = Phosphatidylinositol-binding clathrin assembly protein (231-240)
KEGLDIYKKF

SEQ ID NO: 6043 - protein, 11 aa, synthetic construct
  REGION 1..11: note = Adenosylhomocysteinase 2 (20-30)
KEIEDAEKYSF

SEQ ID NO: 6044 - protein, 9 aa, synthetic construct
  REGION 1..9: note = Heat shock protein HSP 90-alpha A2 (41-49)
KEIFLRELI

SEQ ID NO: 6045 - protein, 10 aa, synthetic construct
  REGION 1..10: note = Putative homeodomain transcription factor 2 (737-746)
KELDSPFRLY

SEQ ID NO: 6046 - protein, 10 aa, synthetic construct
  REGION 1..10: note = DnaJ homolog subfamily B member 14 (282-291)
KELERLTSLY

SEQ ID NO: 6047 - protein, 9 aa, synthetic construct
  REGION 1..9: note = Ezrin (61-69)
KENPLQFKF

SEQ ID NO: 6048 - protein, 10 aa, synthetic construct
  REGION 1..10: note = Integrator complex subunit 11 (493-502)
KEQETALRVY

SEQ ID NO: 6049 - protein, 9 aa, synthetic construct
  REGION 1..9: note = Hypoxia-inducible factor 1-alpha (32-40)
KESEVFYEL

SEQ ID NO: 6050 - protein, 9 aa, synthetic construct
  REGION 1..9: note = Moesin (72-80)
KESPLLFKF

SEQ ID NO: 6051 - protein, 9 aa, synthetic construct
  REGION 1..9: note = Transcription elongation factor B polypeptide 2 (19-27)
KESSTVFEL

SEQ ID NO: 6052 - protein, 9 aa, synthetic construct
  REGION 1..9: note = CCAAT/enhancer-binding protein zeta (652-660)
KETEIVKKL

SEQ ID NO: 6053 - protein, 9 aa, synthetic construct
  REGION 1..9: note = Small kinetochore-associated protein (78-86)
KEVDVSKQL

SEQ ID NO: 6054 - protein, 9 aa, synthetic construct
  REGION 1..9: note = RANBP2-like and GRIP domain-containing protein 1 (31-39)
KEYDLAKKY

SEQ ID NO: 6055 - protein, 9 aa, synthetic construct
  REGION 1..9: note = Mitochondrial fission 1 protein (85-93)
KEYEKALKY

SEQ ID NO: 6056 - protein, 9 aa, synthetic construct
  REGION 1..9: note = Spliceosome RNA helicase DDX39B (131-139)
KEYERFSKY

SEQ ID NO: 6057 - protein, 9 aa, synthetic construct
  REGION 1..9: note = Activating signal cointegrator 1 complex subunit 2 (170-178)
KGNSPLLQK

SEQ ID NO: 6058 - protein, 9 aa, synthetic construct
  REGION 1..9: note = Fibroblast growth factor receptor 1 (669-677)
KIADFGLAR

SEQ ID NO: 6059 - protein, 10 aa, synthetic construct
  REGION 1..10: note = Kinetochore protein Nuf2 (447-456)
KIDEKTAELK

SEQ ID NO: 6060 - protein, 9 aa, synthetic construct
  REGION 1..9: note = 60S ribosomal protein L7-like 1 (114-122)
KIFSGVFVK

SEQ ID NO: 6061 - protein, 9 aa, synthetic construct
  REGION 1..9: note = Tyrosine-protein kinase JAK2 (842-850)
KIGDFGLTK

SEQ ID NO: 6062 - protein, 9 aa, synthetic construct
  REGION 1..9: note = Replication factor C subunit 1 (306-314)
KIGEVSSPK

SEQ ID NO: 6063 - protein, 9 aa, synthetic construct
  REGION 1..9: note = Replication factor C subunit 2 (176-184)
KIIEPIQSR

SEQ ID NO: 6064 - protein, 10 aa, synthetic construct
  REGION 1..10: note = T-complex protein 1 subunit eta (48-57)
KIKEIAVTVK

SEQ ID NO: 6065 - protein, 9 aa, synthetic construct
  REGION 1..9: note = 40S ribosomal protein S18 (78-86)
KIPDWFLNR

SEQ ID NO: 6066 - protein, 9 aa, synthetic construct
  REGION 1..9: note = SAGA-associated factor 29 (50-58)
KISPYYRTK

SEQ ID NO: 6067 - protein, 9 aa, synthetic construct
  REGION 1..9: note = B-cell linker protein (6-14)
KITVPASQK

SEQ ID NO: 6068 - protein, 10 aa, synthetic construct
  REGION 1..10: note = COMM domain-containing protein 2 (42-51)
KIYEGAARKL

SEQ ID NO: 6069 - protein, 8 aa, synthetic construct
  REGION 1..8: note = SWI/SNF-related matrix-associated actin-dependent regulator of chromatin subfamily A member 5 (411-418)
KIYVGLSK

SEQ ID NO: 6070 - protein, 9 aa, synthetic construct
  REGION 1..9: note = Cyclin-dependent kinase 4 (81-89)
KLADFGLAR

SEQ ID NO: 6071 - protein, 9 aa, synthetic construct
  REGION 1..9: note = DNA-dependent protein kinase catalytic subunit (1617-1625)
KLATTILQH

SEQ ID NO: 6072 - protein, 9 aa, synthetic construct
  REGION 1..9: note = Myc proto-oncogene protein (341-349)
KLDSVRVLR

SEQ ID NO: 6073 - protein, 11 aa, synthetic construct
  REGION 1..11: note = Translationally-controlled tumor protein (102-112)
KLEEQRPERVK

SEQ ID NO: 6074 - protein, 11 aa, synthetic construct
  REGION 1..11: note = Cleavage stimulation factor subunit 1 (198-208)
KLFDYSKPSAK

SEQ ID NO: 6075 - protein, 9 aa, synthetic construct
  REGION 1..9: note = Baculoviral IAP repeat-containing protein 2 (45-53)
KLGDSPIQK

SEQ ID NO: 6076 - protein, 9 aa, synthetic construct
  REGION 1..9: note = Nucleolar protein 58 (93-101)
KLGGVIKEK

SEQ ID NO: 6077 - protein, 10 aa, synthetic construct
  REGION 1..10: note = Serine/threonine-protein kinase Chk1 (461-470)
KLIDIVSSQK

SEQ ID NO: 6078 - protein, 9 aa, synthetic construct
  REGION 1..9: note = SHC SH2 domain-binding protein 1 (262-270)
KLIENPLLR

SEQ ID NO: 6079 - protein, 11 aa, synthetic construct
  REGION 1..11: note = 40S ribosomal protein S9 (30-40)
KLIGEYGLRNK

SEQ ID NO: 6080 - protein, 11 aa, synthetic construct
  REGION 1..11: note = 60S ribosomal protein L19 (24-34)
KLIKDGLIIRK

SEQ ID NO: 6081 - protein, 11 aa, synthetic construct
  REGION 1..11: note = Myc proto-oncogene protein (413-423)
KLISEEDLLRK

SEQ ID NO: 6082 - protein, 10 aa, synthetic construct
  REGION 1..10: note = 60S ribosomal protein L4 (173-182)
KLKAWNDIKK

SEQ ID NO: 6083 - protein, 9 aa, synthetic construct
  REGION 1..9: note = Galactosylgalactosylxylosylprotein 3-beta-glucuronosyltransferase 3 (4-12)
KLKNVFLAY

SEQ ID NO: 6084 - protein, 9 aa, synthetic construct
  REGION 1..9: note = BRISC and BRCA1-A complex member 1 (297-305)
KLLAHPLQR

SEQ ID NO: 6085 - protein, 10 aa, synthetic construct
  REGION 1..10: note = SWI/SNF-related matrix-associated actin-dependent regulator of chromatin subfamily D member 3 (176-185)
KLLDDPSKQK

SEQ ID NO: 6086 - protein, 9 aa, synthetic construct
  REGION 1..9: note = Tyrosine-tRNA ligase, cytoplasmic (319-327)
KLLDPIREK

SEQ ID NO: 6087 - protein, 11 aa, synthetic construct
  REGION 1..11: note = T-complex protein 1 subunit eta (55-65)
KLLDVVHPAAK

SEQ ID NO: 6088 - protein, 11 aa, synthetic construct
  REGION 1..11: note = 40S ribosomal protein S16 (49-59)
KLLEPVLLLGK

SEQ ID NO: 6089 - protein, 9 aa, synthetic construct
  REGION 1..9: note = Prefoldin subunit 6 (58-66)
KLLGPVLVK

SEQ ID NO: 6090 - protein, 10 aa, synthetic construct
  REGION 1..10: note = Nucleolar protein 7 (112-121)
KLLPDTILEK

SEQ ID NO: 6091 - protein, 9 aa, synthetic construct
  REGION 1..9: note = Target of rapamycin complex 2 subunit MAPKAP1 (222-230)
KLNDNVSAY

SEQ ID NO: 6092 - protein, 9 aa, synthetic construct
  REGION 1..9: note = 116 kDa U5 small nuclear ribonucleoprotein component (409-417)
KLNIRPLLR

SEQ ID NO: 6093 - protein, 10 aa, synthetic construct
  REGION 1..10: note = 60S ribosomal protein L4 (327-336)
KLNPYAKTMR

SEQ ID NO: 6094 - protein, 9 aa, synthetic construct
  REGION 1..9: note = Activator of 90 kDa heat shock protein ATPase homolog 1 (10-18)
KLNWTGTSK

SEQ ID NO: 6095 - protein, 9 aa, synthetic construct
  REGION 1..9: note = U5 small nuclear ribonucleoprotein 200 kDa helicase (885-893)
KLPEEVVKK

SEQ ID NO: 6096 - protein, 9 aa, synthetic construct
  REGION 1..9: note = Class E basic helix-loop-helix protein 40 (51-59)
KLPHRLIEK

SEQ ID NO: 6097 - protein, 10 aa, synthetic construct
  REGION 1..10: note = 60S ribosomal protein L27a (116-125)
KLPKQPVIVK

SEQ ID NO: 6098 - protein, 10 aa, synthetic construct
  REGION 1..10: note = Hematopoietic SH2 domain-containing protein (6-15)
KLPLPLPPRL

SEQ ID NO: 6099 - protein, 9 aa, synthetic construct
  REGION 1..9: note = EH domain-containing protein 1 (475-483)
KLPNTVLGK

SEQ ID NO: 6100 - protein, 9 aa, synthetic construct
  REGION 1..9: note = Protein SET (75-83)
KLRQPFFQK

SEQ ID NO: 6101 - protein, 9 aa, synthetic construct
  REGION 1..9: note = Phosphatidylethanolamine-binding protein 1 (88-96)
KLYEQLSGK

SEQ ID NO: 6102 - protein, 9 aa, synthetic construct
  REGION 1..9: note = Cilia- and flagella-associated protein 20 (182-190)
KLYLPVQNK

SEQ ID NO: 6103 - protein, 9 aa, synthetic construct
  REGION 1..9: note = Polyribonucleotide 5'-hydroxyl-kinase Clp1 (198-206)
KLYNKITSR

SEQ ID NO: 6104 - protein, 9 aa, synthetic construct
  REGION 1..9: note = DnaJ homolog subfamily B member 14 (36-44)
KLYPLPSAR

SEQ ID NO: 6105 - protein, 9 aa, synthetic construct
  REGION 1..9: note = Elongator complex protein 3 (316-324)
KLYPTLVIR

SEQ ID NO: 6106 - protein, 11 aa, synthetic construct
  REGION 1..11: note = Nodal modulator 2 (57-67)
KLYTKHGTLKY

SEQ ID NO: 6107 - protein, 10 aa, synthetic construct
  REGION 1..10: note = Midasin (592-601)
KMAEVIGSKL

SEQ ID NO: 6108 - protein, 9 aa, synthetic construct
  REGION 1..9: note = BCL-6 corepressor (460-468)
KMAPTVLVH

SEQ ID NO: 6109 - protein, 9 aa, synthetic construct
  REGION 1..9: note = Low density lipoprotein receptor adapter protein 1 (123-131)
KMHDKVFAY

SEQ ID NO: 6110 - protein, 11 aa, synthetic construct
  REGION 1..11: note = Protein FAM136A (128-138)
KMKEALLSIGK

SEQ ID NO: 6111 - protein, 9 aa, synthetic construct
  REGION 1..9: note = Protein LAP2 (174-182)
KMLPKTMNR

SEQ ID NO: 6112 - protein, 11 aa, synthetic construct
  REGION 1..11: note = Selenoprotein T (32-42)
KMQYATGPLLK

SEQ ID NO: 6113 - protein, 9 aa, synthetic construct
  REGION 1..9: note = Enhancer of rudimentary homolog (34-42)
KMYEEHLKR

SEQ ID NO: 6114 - protein, 10 aa, synthetic construct
  REGION 1..10: note = cAMP-dependent protein kinase catalytic subunit beta (71-80)
KQIEHTLNEK

SEQ ID NO: 6115 - protein, 10 aa, synthetic construct
  REGION 1..10: note = Pumilio homolog 3 (310-319)
KQILTPMAQK

SEQ ID NO: 6116 - protein, 11 aa, synthetic construct
  REGION 1..11: note = Small EDRK-rich factor 2 (37-47)
KQRDSEIMQQK

SEQ ID NO: 6117 - protein, 11 aa, synthetic construct
  REGION 1..11: note = T-complex protein 1 subunit theta (98-108)
KQYGNEVFLAK

SEQ ID NO: 6118 - protein, 9 aa, synthetic construct
  REGION 1..9: note = 60S ribosomal protein L10a (47-55)
KRFSGTVRL

SEQ ID NO: 6119 - protein, 9 aa, synthetic construct
  REGION 1..9: note = A-kinase anchor protein 13 (266-274)
KRQEVIYEL

SEQ ID NO: 6120 - protein, 9 aa, synthetic construct
  REGION 1..9: note = DNA replication licensing factor MCM4 (216-224)
KSFDKNLYR

SEQ ID NO: 6121 - protein, 10 aa, synthetic construct
  REGION 1..10: note = Renin receptor (255-264)
KSFDTSLIRK

SEQ ID NO: 6122 - protein, 9 aa, synthetic construct
  REGION 1..9: note = Chromosome alignment-maintaining phosphoprotein 1 (334-342)
KSGPPELRK

SEQ ID NO: 6123 - protein, 9 aa, synthetic construct
  REGION 1..9: note = Aurora kinase B (125-133)
KSHFIVALK

SEQ ID NO: 6124 - protein, 10 aa, synthetic construct
  REGION 1..10: note = Cytoplasmic FMR1-interacting protein 2 (777-786)
KSLDQAISRF

SEQ ID NO: 6125 - protein, 10 aa, synthetic construct
  REGION 1..10: note = WD repeat-containing protein 36 (360-369)
KSLGHGLINK

SEQ ID NO: 6126 - protein, 9 aa, synthetic construct
  REGION 1..9: note = Mediator of RNA polymerase II transcription subunit 27 (195-203)
KSNYQVFQK

SEQ ID NO: 6127 - protein, 9 aa, synthetic construct
  REGION 1..9: note = Transport and Golgi organization protein 6 homolog (711-719)
KSSDFAVLK

SEQ ID NO: 6128 - protein, 9 aa, synthetic construct
  REGION 1..9: note = Histone H3.3 (57-65)
KSTELLIRK

SEQ ID NO: 6129 - protein, 9 aa, synthetic construct
  REGION 1..9: note = Nucleolar protein 7 (170-178)
KSYLAVRLK

SEQ ID NO: 6130 - protein, 9 aa, synthetic construct
  REGION 1..9: note = 116 kDa U5 small nuclear ribonucleoprotein component (612-620)
KSYPSLTTK

SEQ ID NO: 6131 - protein, 10 aa, synthetic construct
  REGION 1..10: note = Pre-mRNA-processing-splicing factor 8 (1792-1801)
KTFEGNLTTK

SEQ ID NO: 6132 - protein, 9 aa, synthetic construct
  REGION 1..9: note = Zinc finger and BTB domain-containing protein 40 (1053-1061)
KTFPNTIEH

SEQ ID NO: 6133 - protein, 9 aa, synthetic construct
  REGION 1..9: note = Protein FAM3C (112-120)
KTGEVLDTK

SEQ ID NO: 6134 - protein, 10 aa, synthetic construct
  REGION 1..10: note = Pseudouridylate synthase 7 homolog (77-86)
KTKDPTAALR

SEQ ID NO: 6135 - protein, 10 aa, synthetic construct
  REGION 1..10: note = 60S ribosomal protein L4 (163-172)
KTKEAVLLLK

SEQ ID NO: 6136 - protein, 10 aa, synthetic construct
  REGION 1..10: note = Cyclin-dependent kinase 11A (11-20)
KTLDEILQEK

SEQ ID NO: 6137 - protein, 11 aa, synthetic construct
  REGION 1..11: note = RNA cytidine acetyltransferase (184-194)
KTLDQAKAVLK

SEQ ID NO: 6138 - protein, 9 aa, synthetic construct
  REGION 1..9: note = Huntingtin (1402-1410)
KTNLTSVTK

SEQ ID NO: 6139 - protein, 9 aa, synthetic construct
  REGION 1..9: note = Actin-related protein 2/3 complex subunit 2 (214-222)
KTSDFLKVL

SEQ ID NO: 6140 - protein, 9 aa, synthetic construct
  REGION 1..9: note = Cyclin-dependent kinase 11B (551-559)
KTSNLLLSH

SEQ ID NO: 6141 - protein, 9 aa, synthetic construct
  REGION 1..9: note = 26S proteasome non-ATPase regulatory subunit 1 (302-310)
KTSSAFVGK

SEQ ID NO: 6142 - protein, 9 aa, synthetic construct
  REGION 1..9: note = Zinc finger FYVE domain-containing protein 16 (1328-1336)
KTSSGFLAK

SEQ ID NO: 6143 - protein, 11 aa, synthetic construct
  REGION 1..11: note = Cyclic AMP-dependent transcription factor ATF-6 beta (655-665)
KTSTVPPSLRK

SEQ ID NO: 6144 - protein, 9 aa, synthetic construct
  REGION 1..9: note = Bridging integrator 3 (67-75)
KTVIEPLKK

SEQ ID NO: 6145 - protein, 10 aa, synthetic construct
  REGION 1..10: note = DNA damage-binding protein 1 (191-200)
KTYEVSLREK

SEQ ID NO: 6146 - protein, 11 aa, synthetic construct
  REGION 1..11: note = 26S proteasome non-ATPase regulatory subunit 11 (175-185)
KTYHALSNLPK

SEQ ID NO: 6147 - protein, 11 aa, synthetic construct
  REGION 1..11: note = High mobility group protein B1 (76-86)
KTYIPPKGETK

SEQ ID NO: 6148 - protein, 11 aa, synthetic construct
  REGION 1..11: note = DNA-directed RNA polymerase II subunit RPB1 (697-707)
KTYQDIQNTIK

SEQ ID NO: 6149 - protein, 9 aa, synthetic construct
  REGION 1..9: note = Interferon-induced, double-stranded RNA-activated protein kinase (291-299)
KTYVIKRVK

SEQ ID NO: 6150 - protein, 9 aa, synthetic construct
  REGION 1..9: note = T-complex protein 1 subunit theta (296-304)
KVADMALHY

SEQ ID NO: 6151 - protein, 10 aa, synthetic construct
  REGION 1..10: note = RNA-binding protein 43 (71-80)
KVAENVIRQK

SEQ ID NO: 6152 - protein, 9 aa, synthetic construct
  REGION 1..9: note = Serine/threonine-protein kinase Chk2 (245-253)
KVAIKIISK

SEQ ID NO: 6153 - protein, 10 aa, synthetic construct
  REGION 1..10: note = 60S ribosomal protein L7a (11-20)
KVAPAPAVVK

SEQ ID NO: 6154 - protein, 11 aa, synthetic construct
  REGION 1..11: note = 60S ribosomal protein L7a (11-21)
KVAPAPAVVKK

SEQ ID NO: 6155 - protein, 10 aa, synthetic construct
  REGION 1..10: note = Heat shock cognate 71 kDa protein (601-610)
KVCNPIITKL

SEQ ID NO: 6156 - protein, 10 aa, synthetic construct
  REGION 1..10: note = 60S ribosomal protein L13a (103-112)
KVFDGIPPPY

SEQ ID NO: 6157 - protein, 10 aa, synthetic construct
  REGION 1..10: note = GMP synthase (glutamine-hydrolyzing) (207-216)
KVFGGTVHKK

SEQ ID NO: 6158 - protein, 9 aa, synthetic construct
  REGION 1..9: note = Cytoskeleton-associated protein 5 (96-104)
KVFNQPKAK

SEQ ID NO: 6159 - protein, 10 aa, synthetic construct
  REGION 1..10: note = Thioredoxin (64-73)
KVGEFSGANK

SEQ ID NO: 6160 - protein, 9 aa, synthetic construct
  REGION 1..9: note = 28S ribosomal protein S17, mitochondrial (90-98)
KVIDPVTGK

SEQ ID NO: 6161 - protein, 9 aa, synthetic construct
  REGION 1..9: note = Serine hydroxymethyltransferase, mitochondrial (238-246)
KVIPSPFKH

SEQ ID NO: 6162 - protein, 10 aa, synthetic construct
  REGION 1..10: note = Structural maintenance of chromosomes protein 4 (512-521)
KVLDAIIQEK

SEQ ID NO: 6163 - protein, 10 aa, synthetic construct
  REGION 1..10: note = Eukaryotic translation initiation factor 3 subunit L (292-301)
KVLENIELNK

SEQ ID NO: 6164 - protein, 11 aa, synthetic construct
  REGION 1..11: note = G2/mitotic-specific cyclin-B2 (318-328)
KVLGQGKWNLK

SEQ ID NO: 6165 - protein, 9 aa, synthetic construct
  REGION 1..9: note = Tryptophan-tRNA ligase, mitochondrial (333-341)
KVLQIGSAK

SEQ ID NO: 6166 - protein, 10 aa, synthetic construct
  REGION 1..10: note = Septin-7 (185-194)
KVNIIPLIAK

SEQ ID NO: 6167 - protein, 10 aa, synthetic construct
  REGION 1..10: note = Septin-2 (174-183)
KVNIVPVIAK

SEQ ID NO: 6168 - protein, 9 aa, synthetic construct
  REGION 1..9: note = Transferrin receptor protein 1 (495-503)
KVSASPLLY

SEQ ID NO: 6169 - protein, 9 aa, synthetic construct
  REGION 1..9: note = B-lymphocyte antigen CD19 (291-299)
KVSAVTLAY

SEQ ID NO: 6170 - protein, 9 aa, synthetic construct
  REGION 1..9: note = Astrotactin-2 (149-157)
KVSDYILQH

SEQ ID NO: 6171 - protein, 9 aa, synthetic construct
  REGION 1..9: note = Thioredoxin-related transmembrane protein 2 (207-215)
KVSTSPLTK

SEQ ID NO: 6172 - protein, 10 aa, synthetic construct
  REGION 1..10: note = Rab GDP dissociation inhibitor beta (23-32)
KVTEGSFVYK

SEQ ID NO: 6173 - protein, 9 aa, synthetic construct
  REGION 1..9: note = Unconventional myosin-Id (707-715)
KVWRGTLAR

SEQ ID NO: 6174 - protein, 9 aa, synthetic construct
  REGION 1..9: note = Nipped-B-like protein (52-60)
KVYDKAINR

SEQ ID NO: 6175 - protein, 11 aa, synthetic construct
  REGION 1..11: note = 78 kDa glucose-regulated protein (446-456)
KVYEGERPLTK

SEQ ID NO: 6176 - protein, 9 aa, synthetic construct
  REGION 1..9: note = Eukaryotic translation initiation factor 3 subunit L (70-78)
KVYELQASR

SEQ ID NO: 6177 - protein, 9 aa, synthetic construct
  REGION 1..9: note = E3 ubiquitin-protein ligase RAD18 (115-123)
KVYTPVASR

SEQ ID NO: 6178 - protein, 10 aa, synthetic construct
  REGION 1..10: note = Motile sperm domain-containing protein 2 (172-181)
KVYYPKYLSK

SEQ ID NO: 6179 - protein, 10 aa, synthetic construct
  REGION 1..10: note = Ubiquitin-associated protein 2-like (87-96)
LEGNPDTHSW

SEQ ID NO: 6180 - protein, 9 aa, synthetic construct
  REGION 1..9: note = Microtubule-associated protein RP/EB family member 1 (67-75)
LEHEYIQNF

SEQ ID NO: 6181 - protein, 8 aa, synthetic construct
  REGION 1..8: note = Hyaluronan mediated motility receptor (121-128)
LEKQLIEL

SEQ ID NO: 6182 - protein, 10 aa, synthetic construct
  REGION 1..10: note = DNA replication licensing factor MCM2 (790-799)
LESFIDTQKF

SEQ ID NO: 6183 - protein, 10 aa, synthetic construct
  REGION 1..10: note = Guanine nucleotide-binding protein G(s) subunit alpha isoforms short (286-295)
LLAEKVLAGK

SEQ ID NO: 6184 - protein, 11 aa, synthetic construct
  REGION 1..11: note = Eukaryotic translation initiation factor 3 subunit C-like protein (634-644)
LLDIQSSGRAK

SEQ ID NO: 6185 - protein, 9 aa, synthetic construct
  REGION 1..9: note = Prelamin-A/C (140-148)
LLNSKEAAL

SEQ ID NO: 6186 - protein, 11 aa, synthetic construct
  REGION 1..11: note = T-complex protein 1 subunit beta (109-119)
LLREAESLIAK

SEQ ID NO: 6187 - protein, 11 aa, synthetic construct
  REGION 1..11: note = Methionine synthase reductase (6-16)
LLYATQQGQAK

SEQ ID NO: 6188 - protein, 10 aa, synthetic construct
  REGION 1..10: note = Replication factor C subunit 5 (57-66)
LLYGPPGTGK

SEQ ID NO: 6189 - protein, 9 aa, synthetic construct
  REGION 1..9: note = Leucine-rich repeat-containing protein 58 (83-91)
LPHNRLVSL

SEQ ID NO: 6190 - protein, 9 aa, synthetic construct
  REGION 1..9: note = Ribosomal RNA processing protein 1 homolog B (585-593)
LPSQKTASL

SEQ ID NO: 6191 - protein, 9 aa, synthetic construct
  REGION 1..9: note = Proteasome assembly chaperone 2 (40-48)
LPSRKLVAL

SEQ ID NO: 6192 - protein, 9 aa, synthetic construct
  REGION 1..9: note = Squalene monooxygenase (548-556)
LSSGAVLYK

SEQ ID NO: 6193 - protein, 9 aa, synthetic construct
  REGION 1..9: note = Neuroguidin (201-209)
LSSSVIREL

SEQ ID NO: 6194 - protein, 9 aa, synthetic construct
  REGION 1..9: note = 60S ribosomal protein L34 (11-19)
LSYNTASNK

SEQ ID NO: 6195 - protein, 10 aa, synthetic construct
  REGION 1..10: note = Importin subunit alpha-1 (344-353)
LTNPKTNIQK

SEQ ID NO: 6196 - protein, 10 aa, synthetic construct
  REGION 1..10: note = 40S ribosomal protein S7 (131-140)
LVFPSEIVGK

SEQ ID NO: 6197 - protein, 9 aa, synthetic construct
  REGION 1..9: note = Filamin-A (1766-1774)
LVIPFTIKK

SEQ ID NO: 6198 - protein, 9 aa, synthetic construct
  REGION 1..9: note = PRELI domain containing protein 3B (186-194)
MAAAAFAEK

SEQ ID NO: 6199 - protein, 9 aa, synthetic construct
  REGION 1..9: note = Cyclin-T1 (410-418)
MEANVKSQY

SEQ ID NO: 6200 - protein, 9 aa, synthetic construct
  REGION 1..9: note = Transformation/transcription domain-associated protein (1736-1744)
MEEEIPKNY

SEQ ID NO: 6201 - protein, 9 aa, synthetic construct
  REGION 1..9: note = Nucleolar protein 58 (64-72)
MEGKINKQL

SEQ ID NO: 6202 - protein, 9 aa, synthetic construct
  REGION 1..9: note = Ribonucleoside-diphosphate reductase subunit M2 (228-236)
MENIHSEMY

SEQ ID NO: 6203 - protein, 10 aa, synthetic construct
  REGION 1..10: note Dolichyl-diphosphooligosaccharide-proteinosyltransferase 48 kDa subunit (18-27)
MEPSTAARAW

SEQ ID NO: 6204 - protein, 11 aa, synthetic construct
  REGION 1..11: note = Large proline-rich protein BAG6 (929-939)
MPVGPDAILRY

SEQ ID NO: 6205 - protein, 9 aa, synthetic construct
  REGION 1..9: note = 60S ribosomal protein L26 (30-38)
MSSPLSKEL

SEQ ID NO: 6206 - protein, 9 aa, synthetic construct
  REGION 1..9: note = Histone deacetylase 1 (37-45)
MTHNLLLNY

SEQ ID NO: 6207 - protein, 9 aa, synthetic construct
  REGION 1..9: note = Myosin-7B (138-146)
NEASVLHNL

SEQ ID NO: 6208 - protein, 9 aa, synthetic construct
  REGION 1..9: note = DnaJ homolog subfamily B member 5 (16-24)
NEDEIKKAY

SEQ ID NO: 6209 - protein, 9 aa, synthetic construct
  REGION 1..9: note = Nuclear factor interleukin-3-regulated protein (343-351)
NEFEATQKL

SEQ ID NO: 6210 - protein, 9 aa, synthetic construct
  REGION 1..9: note = Ras-related protein Rab-7a (184-192)
NEFPEPIKL

SEQ ID NO: 6211 - protein, 10 aa, synthetic construct
  REGION 1..10: note = Kinetochore protein NDC80 homolog (555-564)
NELDAVQREY

SEQ ID NO: 6212 - protein, 9 aa, synthetic construct
  REGION 1..9: note = Putative eukaryotic translation initiation factor 2 subunit 3-like protein (71-79)
NELERNITI

SEQ ID NO: 6213 - protein, 9 aa, synthetic construct
  REGION 1..9: note = Fizzy-related protein homolog (412-420)
NELVSTHGY

SEQ ID NO: 6214 - protein, 9 aa, synthetic construct
  REGION 1..9: note = Mediator of RNA polymerase II transcription subunit 23 (148-156)
NENDIITHF

SEQ ID NO: 6215 - protein, 9 aa, synthetic construct
  REGION 1..9: note = CUGBP Elav-like family member 2 (120-128)
NENDIRVMF

SEQ ID NO: 6216 - protein, 9 aa, synthetic construct
  REGION 1..9: note = Serine/threonine-protein kinase PAK 2 (445-453)
NENPLRALY

SEQ ID NO: 6217 - protein, 9 aa, synthetic construct
  REGION 1..9: note = Serine/threonine/tyrosine-interacting-like protein 1 (124-132)
NEQTLQRSW

SEQ ID NO: 6218 - protein, 9 aa, synthetic construct
  REGION 1..9: note = Monocarboxylate transporter 7 (57-65)
NESNSRISW

SEQ ID NO: 6219 - protein, 9 aa, synthetic construct
  REGION 1..9: note = Oxysterol-binding protein-related protein 9 (671-679)
NEYESRSLW

SEQ ID NO: 6220 - protein, 9 aa, synthetic construct
  REGION 1..9: note = DnaJ homolog subfamily A member 1 (120-128)
NGATRKLAL

SEQ ID NO: 6221 - protein, 9 aa, synthetic construct
  REGION 1..9: note = Lysine-specific histone demethylase 1A (474-482)
NLKEKIKEL

SEQ ID NO: 6222 - protein, 9 aa, synthetic construct
  REGION 1..9: note = Histone-binding protein RBBP4 (245-253)
NLKLKLHSF

SEQ ID NO: 6223 - protein, 9 aa, synthetic construct
  REGION 1..9: note = AP-3 complex subunit delta-1 (372-380)
NLMEIVKKL

SEQ ID NO: 6224 - protein, 8 aa, synthetic construct
  REGION 1..8: note = Serine/threonine-protein phosphatase 2A 65 kDa regulatory subunit A beta isoform isoform b (350-357)
NQHVKSAL

SEQ ID NO: 6225 - protein, 9 aa, synthetic construct
  REGION 1..9: note = Copine-8 (263-271)
NVYEVVNPK

SEQ ID NO: 6226 - protein, 10 aa, synthetic construct
  REGION 1..10: note = Polypyrimidine tract-binding protein 1 (440-449)
QEDQGLTKDY

SEQ ID NO: 6227 - protein, 10 aa, synthetic construct
  REGION 1..10: note = Forkhead box protein K2 (318-327)
QEEPGKGSFW

SEQ ID NO: 6228 - protein, 11 aa, synthetic construct
  REGION 1..11: note = RNA polymerase II subunit A C-terminal domain phosphatase SSU72 (177-187)
QEFEEKSGRTF

SEQ ID NO: 6229 - protein, 9 aa, synthetic construct
  REGION 1..9: note = Alpha-galactosidase A (357-365)
QEIGGPRSY

SEQ ID NO: 6230 - protein, 11 aa, synthetic construct
  REGION 1..11: note = Splicing factor 3B subunit 1 (41-51)
QEIYGGSDSRF

SEQ ID NO: 6231 - protein, 10 aa, synthetic construct
  REGION 1..10: note = Translin-associated protein X (44-53)
QELDARHDKY

SEQ ID NO: 6232 - protein, 9 aa, synthetic construct
  REGION 1..9: note = Mis18-binding protein 1 (582-590)
QELIGKKEY

SEQ ID NO: 6233 - protein, 10 aa, synthetic construct
  REGION 1..10: note = Desmin (113-122)
QELNDRFANY

SEQ ID NO: 6234 - protein, 10 aa, synthetic construct
  REGION 1..10: note = DNA-(apurinic or apyrimidinic site) lyase (109-118)
QELPGLSHQY

SEQ ID NO: 6235 - protein, 10 aa, synthetic construct
  REGION 1..10: note = Protein phosphatase 1G (202-211)
QENGPTAKAY

SEQ ID NO: 6236 - protein, 9 aa, synthetic construct
  REGION 1..9: note = tRNA (cytosine(34)-C(5))-methyltransferase (545-553)
QENPFFRKL

SEQ ID NO: 6237 - protein, 9 aa, synthetic construct
  REGION 1..9: note = Condensin-2 complex subunit H2 (444-452)
QETELSQRI

SEQ ID NO: 6238 - protein, 9 aa, synthetic construct
  REGION 1..9: note = Protein C10 (28-36)
QEVIKAYGF

SEQ ID NO: 6239 - protein, 8 aa, synthetic construct
  REGION 1..8: note = 60S ribosomal protein L6 (269-276)
QGYLRSVF

SEQ ID NO: 6240 - protein, 9 aa, synthetic construct
  REGION 1..9: note = Histone deacetylase 2 (240-248)
QIFKPIISK

SEQ ID NO: 6241 - protein, 9 aa, synthetic construct
  REGION 1..9: note = 60S ribosomal protein L7 (116-124)
QIFNGTFVK

SEQ ID NO: 6242 - protein, 10 aa, synthetic construct
  REGION 1..10: note = Ubiquitin-60S ribosomal protein L40 (7-16)
QIFVKTLTGK

SEQ ID NO: 6243 - protein, 11 aa, synthetic construct
  REGION 1..11: note = 40S ribosomal protein S16 (79-89)
QIYAIRQSISK

SEQ ID NO: 6244 - protein, 8 aa, synthetic construct
  REGION 1..8: note = 60S ribosomal protein L15 (91-98)
QLKFARSL

SEQ ID NO: 6245 - protein, 9 aa, synthetic construct
  REGION 1..9: note = Cleft lip and palate transmembrane protein 1 (316-324)
QLYAAQSTK

SEQ ID NO: 6246 - protein, 9 aa, synthetic construct
  REGION 1..9: note = Myosin-9 (648-656)
QLYKEQLAK

SEQ ID NO: 6247 - protein, 9 aa, synthetic construct
  REGION 1..9: note = F-box only protein 5 (293-301)
QLYSKAIQR

SEQ ID NO: 6248 - protein, 8 aa, synthetic construct
  REGION 1..8: note = 40S ribosomal protein S11 (18-25)
QNKKRVLL

SEQ ID NO: 6249 - protein, 9 aa, synthetic construct
  REGION 1..9: note = TRAF3-interacting JNK-activating modulator (38-46)
QSTQRSLAL

SEQ ID NO: 6250 - protein, 9 aa, synthetic construct
  REGION 1..9: note = U5 small nuclear ribonucleoprotein 200 kDa helicase (438-446)
QTYVGITEK

SEQ ID NO: 6251 - protein, 9 aa, synthetic construct
  REGION 1..9: note = 40S ribosomal protein S9 (113-121)
QVFKLGLAK

SEQ ID NO: 6252 - protein, 9 aa, synthetic construct
  REGION 1..9: note = Eukaryotic translation initiation factor 3 subunit E (354-362)
QVIEKTKSL

SEQ ID NO: 6253 - protein, 9 aa, synthetic construct
  REGION 1..9: note = TCF3 fusion partner (94-102)
QVNERVLNR

SEQ ID NO: 6254 - protein, 9 aa, synthetic construct
  REGION 1..9: note = Inorganic pyrophosphatase (9-17)
RAAPFSLEY

SEQ ID NO: 6255 - protein, 9 aa, synthetic construct
  REGION 1..9: note = ATP-dependent RNA helicase DDX19B (56-64)
RAAQSLLNK

SEQ ID NO: 6256 - protein, 9 aa, synthetic construct
  REGION 1..9: note = LBH domain-containing protein 1 (95-103)
RANITLSGK

SEQ ID NO: 6257 - protein, 9 aa, synthetic construct
  REGION 1..9: note = Midasin (1000-1008)
RASHPIVQK

SEQ ID NO: 6258 - protein, 9 aa, synthetic construct
  REGION 1..9: note = Perilipin-2 (230-238)
RAYQQALSR

SEQ ID NO: 6259 - protein, 10 aa, synthetic construct
  REGION 1..10: note = Protein VPRBP (31-40)
READQPLRTY

SEQ ID NO: 6260 - protein, 9 aa, synthetic construct
  REGION 1..9: note = Signal peptidase complex subunit 2 (185-193)
REAEFTKSI

SEQ ID NO: 6261 - protein, 9 aa, synthetic construct
  REGION 1..9: note = NADH dehydrogenase (ubiquinone) 1 beta subcomplex subunit 11, mitochondrial (120-128)
REAERLVKY

SEQ ID NO: 6262 - protein, 9 aa, synthetic construct
  REGION 1..9: note = Ubiquilin-2 (597-605)
REANLQALI

SEQ ID NO: 6263 - protein, 9 aa, synthetic construct
  REGION 1..9: note = Gamma-taxilin (154-162)
REEHIDKVF

SEQ ID NO: 6264 - protein, 10 aa, synthetic construct
  REGION 1..10: note = Nuclear receptor-binding protein (234-243)
REEQKNLHFF

SEQ ID NO: 6265 - protein, 10 aa, synthetic construct
  REGION 1..10: note = Exostosin-2 (567-576)
REFPDRLVGY

SEQ ID NO: 6266 - protein, 10 aa, synthetic construct
  REGION 1..10: note = Di-N-acetylchitobiase (169-178)
REIEGSQVTF

SEQ ID NO: 6267 - protein, 9 aa, synthetic construct
  REGION 1..9: note = Ataxin-2-like protein (324-332)
REIESSPQY

SEQ ID NO: 6268 - protein, 10 aa, synthetic construct
  REGION 1..10: note = Sorting nexin-17 (146-155)
REKEDGAFSF

SEQ ID NO: 6269 - protein, 10 aa, synthetic construct
  REGION 1..10: note = Ras-related GTP-binding protein A (97-106)
RELEKDMHYY

SEQ ID NO: 6270 - protein, 9 aa, synthetic construct
  REGION 1..9: note = Tropomyosin alpha-3 chain (7-15)
REMDEQIRL

SEQ ID NO: 6271 - protein, 10 aa, synthetic construct
  REGION 1..10: note = Tetratricopeptide repeat protein 39C (46-55)
RESDQLFKQY

SEQ ID NO: 6272 - protein, 9 aa, synthetic construct
  REGION 1..9: note = Aurora kinase A (180-188)
REVEIQSHL

SEQ ID NO: 6273 - protein, 11 aa, synthetic construct
  REGION 1..11: note = Histone H2B type 2-E (48-58)
RIAGEASRLAH

SEQ ID NO: 6274 - protein, 11 aa, synthetic construct
  REGION 1..11: note = 40S ribosomal protein S19 (133-143)
RIAGQVAAANK

SEQ ID NO: 6275 - protein, 11 aa, synthetic construct
  REGION 1..11: note = 60S ribosomal protein L18a (31-41)
RIFAPNHVVAK

SEQ ID NO: 6276 - protein, 9 aa, synthetic construct
  REGION 1..9: note = 60S ribosomal protein L10 (32-40)
RIFDLGRKK

SEQ ID NO: 6277 - protein, 11 aa, synthetic construct
  REGION 1..11: note = Nuclear pore complex protein Nup214 (26-36)
RIFDSPEELPK

SEQ ID NO: 6278 - protein, 10 aa, synthetic construct
  REGION 1..10: note = Ribonucleoside-diphosphate reductase subunit M2 (50-59)
RIFQEPTEPK

SEQ ID NO: 6279 - protein, 9 aa, synthetic construct
  REGION 1..9: note = Unconventional myosin-Ie (627-635)
RIFQKFLQR

SEQ ID NO: 6280 - protein, 9 aa, synthetic construct
  REGION 1..9: note = Sorbitol dehydrogenase (56-64)
RIGNFIVKK

SEQ ID NO: 6281 - protein, 10 aa, synthetic construct
  REGION 1..10: note = Serine/threonine-protein kinase Nek6 (243-252)
RIHENGYNFK

SEQ ID NO: 6282 - protein, 9 aa, synthetic construct
  REGION 1..9: note = U3 small nucleolar ribonucleoprotein protein MPP10 (48-56)
RIHGSPLQK

SEQ ID NO: 6283 - protein, 9 aa, synthetic construct
  REGION 1..9: note = 60S ribosomal protein L31 (32-40)
RIHGVGFKK

SEQ ID NO: 6284 - protein, 9 aa, synthetic construct
  REGION 1..9: note = Importin-8 (433-441)
RIIDLVLQK

SEQ ID NO: 6285 - protein, 9 aa, synthetic construct
  REGION 1..9: note = Replication factor C subunit 4 (185-193)
RIIEPLTSR

SEQ ID NO: 6286 - protein, 9 aa, synthetic construct
  REGION 1..9: note = Putative Polycomb group protein ASXL1 (573-581)
RIKPPWVVK

SEQ ID NO: 6287 - protein, 9 aa, synthetic construct
  REGION 1..9: note = 26S proteasome non-ATPase regulatory subunit 8 (196-204)
RILFFNTPK

SEQ ID NO: 6288 - protein, 9 aa, synthetic construct
  REGION 1..9: note = 60S ribosomal protein L10a (122-130)
RILGPGLNK

SEQ ID NO: 6289 - protein, 9 aa, synthetic construct
  REGION 1..9: note = 40S ribosomal protein S7 (97-105)
RILPKPTRK

SEQ ID NO: 6290 - protein, 9 aa, synthetic construct
  REGION 1..9: note = 40S ribosomal protein S11 (71-79)
RILSGVVTK

SEQ ID NO: 6291 - protein, 10 aa, synthetic construct
  REGION 1..10: note = Helicase-like transcription factor (514-523)
RIREPALLSK

SEQ ID NO: 6292 - protein, 11 aa, synthetic construct
  REGION 1..11: note = Heat shock 70 kDa protein 14 (56-66)
RIRNISNTVMK

SEQ ID NO: 6293 - protein, 11 aa, synthetic construct
  REGION 1..11: note = Protein PML (31-41)
RIRTGSALVQR

SEQ ID NO: 6294 - protein, 9 aa, synthetic construct
  REGION 1..9: note = DNA-directed RNA polymerases I, II, and III subunit RPABC2 (51-59)
RITTPYMTK

SEQ ID NO: 6295 - protein, 9 aa, synthetic construct
  REGION 1..9: note = Translational activator GCN1 (122-130)
RIVFPSRAK

SEQ ID NO: 6296 - protein, 9 aa, synthetic construct
  REGION 1..9: note = Zinc finger protein 195 (247-255)
RIYAGGEHY

SEQ ID NO: 6297 - protein, 11 aa, synthetic construct
  REGION 1..11: note = Fragile X mental retardation syndrome-related protein 1 (263-273)
RIYGESADAVK

SEQ ID NO: 6298 - protein, 9 aa, synthetic construct
  REGION 1..9: note = Dual specificity tyrosine-phosphorylation-regulated kinase 1A (317-325)
RIYQYIQSR

SEQ ID NO: 6299 - protein, 10 aa, synthetic construct
  REGION 1..10: note = Integrator complex subunit 1 (219-228)
RLAEAAVAEK

SEQ ID NO: 6300 - protein, 10 aa, synthetic construct
  REGION 1..10: note = RNA pseudouridylate synthase domain-containing protein 4 (45-54)
RLAEKLRAQK

SEQ ID NO: 6301 - protein, 9 aa, synthetic construct
  REGION 1..9: note = Ubiquitin carboxyl-terminal hydrolase 19 (897-905)
RLAEVIKNR

SEQ ID NO: 6302 - protein, 10 aa, synthetic construct
  REGION 1..10: note = Phosducin-like protein 3 (78-87)
RLAEWKATKL

SEQ ID NO: 6303 - protein, 11 aa, synthetic construct
  REGION 1..11: note = 40S ribosomal protein S21 (71-81)
RLAKADGIVSK

SEQ ID NO: 6304 - protein, 9 aa, synthetic construct
  REGION 1..9: note = Golgi phosphoprotein 3 (176-184)
RLAKNLVEK

SEQ ID NO: 6305 - protein, 11 aa, synthetic construct
  REGION 1..11: note = 60S ribosomal protein L19 (9-19)
RLASSVLRCGK

SEQ ID NO: 6306 - protein, 10 aa, synthetic construct
  REGION 1..10: note = Guanine nucleotide-binding protein G(I)/G(S)/G(O) subunit gamma-5 (18-27)
RLEAGLNRVK

SEQ ID NO: 6307 - protein, 10 aa, synthetic construct
  REGION 1..10: note = 40S ribosomal protein S9 (70-79)
RLFEGNALLR

SEQ ID NO: 6308 - protein, 9 aa, synthetic construct
  REGION 1..9: note = Cartilage-associated protein (107-115)
RLFGGLLRR

SEQ ID NO: 6309 - protein, 8 aa, synthetic construct
  REGION 1..8: note = 60S ribosomal protein L13 (190-197)
RLFGIRAK

SEQ ID NO: 6310 - protein, 9 aa, synthetic construct
  REGION 1..9: note = Ubiquitin-associated domain-containing protein 2 (164-172)
RLFPPLRQR

SEQ ID NO: 6311 - protein, 9 aa, synthetic construct
  REGION 1..9: note = Heterogeneous nuclear ribonucleoprotein R (146-154)
RLFVGSIPK

SEQ ID NO: 6312 - protein, 11 aa, synthetic construct
  REGION 1..11: note = Heterogeneous nuclear ribonucleoprotein Q (244-254)
RLFVGSIPKSK

SEQ ID NO: 6313 - protein, 9 aa, synthetic construct
  REGION 1..9: note = DNA damage-binding protein 1 (327-335)
RLGDSQLVK

SEQ ID NO: 6314 - protein, 9 aa, synthetic construct
  REGION 1..9: note = Semaphorin-7A (24-32)
RLGLPLRLR

SEQ ID NO: 6315 - protein, 9 aa, synthetic construct
  REGION 1..9: note = Cleavage and polyadenylation specificity factor subunit 1 (387-395)
RLGNSLLLK

SEQ ID NO: 6316 - protein, 9 aa, synthetic construct
  REGION 1..9: note = Pentatricopeptide repeat domain-containing protein 3, mitochondrial (15-23)
RLGQPLTGR

SEQ ID NO: 6317 - protein, 10 aa, synthetic construct
  REGION 1..10: note = Egl nine homolog 2 (270-279)
RLGSYVINGR

SEQ ID NO: 6318 - protein, 11 aa, synthetic construct
  REGION 1..11: note = Parkinson disease 7 domain-containing protein 1 (68-78)
RLKAYASPAKL

SEQ ID NO: 6319 - protein, 9 aa, synthetic construct
  REGION 1..9: note = Protein RRP5 homolog (385-393)
RLKDGVLAY

SEQ ID NO: 6320 - protein, 11 aa, synthetic construct
  REGION 1..11: note = Nuclear pore complex protein Nup98-Nup96 (515-525)
RLKPTNPAAQK

SEQ ID NO: 6321 - protein, 10 aa, synthetic construct
  REGION 1..10: note = HAUS augmin-like complex subunit 1 (226-235)
RLKQQTIPLK

SEQ ID NO: 6322 - protein, 11 aa, synthetic construct
  REGION 1..11: note = FERM, RhoGEF and pleckstrin domain-containing protein 2 (321-331)
RLLDQPKPKAK

SEQ ID NO: 6323 - protein, 10 aa, synthetic construct
  REGION 1..10: note = Glycogen synthase kinase-3 beta (319-328)
RLLEYTPTAR

SEQ ID NO: 6324 - protein, 11 aa, synthetic construct
  REGION 1..11: note = Nucleolar protein 56 (77-87)
RLLLETHLPSK

SEQ ID NO: 6325 - protein, 10 aa, synthetic construct
  REGION 1..10: note = Histone H2B type 2-F (100-109)
RLLLPGELAK

SEQ ID NO: 6326 - protein, 11 aa, synthetic construct
  REGION 1..11: note = Poly (ADP-ribose) polymerase 14 (858-868)
RLLPGNATISK

SEQ ID NO: 6327 - protein, 9 aa, synthetic construct
  REGION 1..9: note = BTB/POZ domain-containing protein KCTD20 (259-267)
RLNAPLSQM

SEQ ID NO: 6328 - protein, 10 aa, synthetic construct
  REGION 1..10: note = Tubulin gamma-1 chain (156-165)
RLNDRYPKKL

SEQ ID NO: 6329 - protein, 10 aa, synthetic construct
  REGION 1..10: note = LYR motif-containing protein 2 (5-14)
RLPPATLTLK

SEQ ID NO: 6330 - protein, 9 aa, synthetic construct
  REGION 1..9: note = NF-kappa-B inhibitor beta (339-347)
RLPPTPASK

SEQ ID NO: 6331 - protein, 9 aa, synthetic construct
  REGION 1..9: note = Kinesin-like protein KIF18B (390-398)
RLPSSTLKR

SEQ ID NO: 6332 - protein, 10 aa, synthetic construct
  REGION 1..10: note = Histone deacetylase 5 (529-538)
RLQETGLLSK

SEQ ID NO: 6333 - protein, 11 aa, synthetic construct
  REGION 1..11: note = Egl nine homolog 2 (218-228)
RLRDGQLVSQR

SEQ ID NO: 6334 - protein, 9 aa, synthetic construct
  REGION 1..9: note = HCLS1-associated protein X-1 (118-126)
RLREGQTLR

SEQ ID NO: 6335 - protein, 9 aa, synthetic construct
  REGION 1..9: note = AP-5 complex subunit zeta-1 (429-437)
RLSFPNLFK

SEQ ID NO: 6336 - protein, 9 aa, synthetic construct
  REGION 1..9: note = A-kinase anchor protein 11 (941-949)
RLSKSIIKH

SEQ ID NO: 6337 - protein, 10 aa, synthetic construct
  REGION 1..10: note = 40S ribosomal protein S4, X isoform (202-211)
RLSNIFVIGK

SEQ ID NO: 6338 - protein, 10 aa, synthetic construct
  REGION 1..10: note = Prelamin-A/C (307-316)
RLSPSPTSQR

SEQ ID NO: 6339 - protein, 10 aa, synthetic construct
  REGION 1..10: note = 60S ribosomal protein L34 (10-19)
RLSYNTASNK

SEQ ID NO: 6340 - protein, 10 aa, synthetic construct
  REGION 1..10: note = Proliferating cell nuclear antigen (5-14)
RLVQGSILKK

SEQ ID NO: 6341 - protein, 10 aa, synthetic construct
  REGION 1..10: note = E3 ubiquitin-protein ligase MARCH6 (597-606)
RLYEHIKNDK

SEQ ID NO: 6342 - protein, 9 aa, synthetic construct
  REGION 1..9: note = ATP-binding cassette sub-family D member 1 (172-180)
RLYFSQQTY

SEQ ID NO: 6343 - protein, 9 aa, synthetic construct
  REGION 1..9: note = Kelch-like protein 20 (534-542)
RLYGGMNYR

SEQ ID NO: 6344 - protein, 10 aa, synthetic construct
  REGION 1..10: note = Protein KIAA0100 (809-818)
RLYGNTPMRR

SEQ ID NO: 6345 - protein, 10 aa, synthetic construct
  REGION 1..10: note = Terminal uridylyltransferase 4 (269-278)
RLYGSSLTRF

SEQ ID NO: 6346 - protein, 11 aa, synthetic construct
  REGION 1..11: note = TNF receptor-associated factor 1 (308-318)
RLYLNGDGTGK

SEQ ID NO: 6347 - protein, 9 aa, synthetic construct
  REGION 1..9: note = DnaJ homolog subfamily B member 12 (36-44)
RLYPTPRVR

SEQ ID NO: 6348 - protein, 10 aa, synthetic construct
  REGION 1..10: note = E3 ubiquitin-protein ligase UBR5 (2771-2780)
RLYVPLYSSK

SEQ ID NO: 6349 - protein, 10 aa, synthetic construct
  REGION 1..10: note = 60S ribosomal protein L4 (100-109)
RMFAPTKTWR

SEQ ID NO: 6350 - protein, 11 aa, synthetic construct
  REGION 1..11: note = DNA methyltransferase 1-associated protein 1 (326-336)
RMKLPSSVGQK

SEQ ID NO: 6351 - protein, 9 aa, synthetic construct
  REGION 1..9: note Dolichyl-diphosphooligosaccharide-proteinosyltransferase subunit 2 (619-627)
RMLAQQAVK

SEQ ID NO: 6352 - protein, 8 aa, synthetic construct
  REGION 1..8: note = Proteasome subunit beta type-5 (80-87)
RNKERISV

SEQ ID NO: 6353 - protein, 9 aa, synthetic construct
  REGION 1..9: note = Chromosome transmission fidelity protein 8 homolog (109-117)
RPKPIITSV

SEQ ID NO: 6354 - protein, 8 aa, synthetic construct
  REGION 1..8: note = Zinc finger MIZ domain-containing protein 1 (589-596)
RPSVRSVL

SEQ ID NO: 6355 - protein, 9 aa, synthetic construct
  REGION 1..9: note = Apoptosis inhibitor 5 (189-197)
RQAVPLFSK

SEQ ID NO: 6356 - protein, 9 aa, synthetic construct
  REGION 1..9: note = 39S ribosomal protein L55, mitochondrial (47-55)
RQFWTRTKK

SEQ ID NO: 6357 - protein, 9 aa, synthetic construct
  REGION 1..9: note = Phosphate carrier protein, mitochondrial (224-232)
RQIPYTMMK

SEQ ID NO: 6358 - protein, 9 aa, synthetic construct
  REGION 1..9: note = 60S ribosomal protein L7a (89-97)
RQTATQLLK

SEQ ID NO: 6359 - protein, 9 aa, synthetic construct
  REGION 1..9: note = Formin-binding protein 1 (239-247)
RQVIPIIGK

SEQ ID NO: 6360 - protein, 9 aa, synthetic construct
  REGION 1..9: note = F-box only protein 33 (21-29)
RQYDKFLTH

SEQ ID NO: 6361 - protein, 9 aa, synthetic construct
  REGION 1..9: note = Protein-lysine N-methyltransferase EEF2KMT (18-26)
RRFLAARTL

SEQ ID NO: 6362 - protein, 9 aa, synthetic construct
  REGION 1..9: note = Growth factor receptor-bound protein 2 (137-145)
RRGDFIHVM

SEQ ID NO: 6363 - protein, 9 aa, synthetic construct
  REGION 1..9: note = 60S ribosomal protein L23 (89-97)
RRKDGVFLY

SEQ ID NO: 6364 - protein, 9 aa, synthetic construct
  REGION 1..9: note = Neuroepithelial cell-transforming gene 1 protein (32-40)
RRQEAIYEM

SEQ ID NO: 6365 - protein, 9 aa, synthetic construct
  REGION 1..9: note = Isoleucine-tRNA ligase, cytoplasmic (402-410)
RSDTPLIYK

SEQ ID NO: 6366 - protein, 9 aa, synthetic construct
  REGION 1..9: note = Uncharacterized protein KIAA1551 (365-373)
RSLGSSPVK

SEQ ID NO: 6367 - protein, 10 aa, synthetic construct
  REGION 1..10: note = 60S ribosomal protein L30 (106-115)
RSMPEQTGEK

SEQ ID NO: 6368 - protein, 9 aa, synthetic construct
  REGION 1..9: note = Structural maintenance of chromosomes protein 3 (132-140)
RSNPYYIVK

SEQ ID NO: 6369 - protein, 10 aa, synthetic construct
  REGION 1..10: note = Protein BRICK1 (44-53)
RSRLATLNEK

SEQ ID NO: 6370 - protein, 9 aa, synthetic construct
  REGION 1..9: note = Protein PRRC2C (2148-2156)
RSTDPVTTK

SEQ ID NO: 6371 - protein, 11 aa, synthetic construct
  REGION 1..11: note = Cytoskeleton-associated protein 2-like (319-329)
RSYPVTEQRVK

SEQ ID NO: 6372 - protein, 9 aa, synthetic construct
  REGION 1..9: note = Heterogeneous nuclear ribonucleoprotein F (192-200)
RSYSDPPLK

SEQ ID NO: 6373 - protein, 9 aa, synthetic construct
  REGION 1..9: note = Vimentin (28-36)
RSYVTTSTR

SEQ ID NO: 6374 - protein, 9 aa, synthetic construct
  REGION 1..9: note = Sorting and assembly machinery component 50 homolog (240-248)
RTASFAVRK

SEQ ID NO: 6375 - protein, 10 aa, synthetic construct
  REGION 1..10: note = T-complex protein 1 subunit eta (114-123)
RTATQLAVNK

SEQ ID NO: 6376 - protein, 10 aa, synthetic construct
  REGION 1..10: note = UAP56-interacting factor (226-235)
RTAVPSFLTK

SEQ ID NO: 6377 - protein, 9 aa, synthetic construct
  REGION 1..9: note = Plectin (471-479)
RTEYNLRLK

SEQ ID NO: 6378 - protein, 9 aa, synthetic construct
  REGION 1..9: note = Cyclin-dependent kinase 12 (1374-1382)
RTFSGSLSH

SEQ ID NO: 6379 - protein, 10 aa, synthetic construct
  REGION 1..10: note = Cold shock domain-containing protein E1 (78-87)
RTGKPIAVKL

SEQ ID NO: 6380 - protein, 9 aa, synthetic construct
  REGION 1..9: note = Eukaryotic translation initiation factor 4H (221-229)
RTGPPMGSR

SEQ ID NO: 6381 - protein, 10 aa, synthetic construct
  REGION 1..10: note = Eukaryotic translation initiation factor 4H (155-164)
RTGPPMGSRF

SEQ ID NO: 6382 - protein, 9 aa, synthetic construct
  REGION 1..9: note = Cell division cycle 5-like protein (83-91)
RTIAPIIGR

SEQ ID NO: 6383 - protein, 9 aa, synthetic construct
  REGION 1..9: note = Biogenesis of lysosome-related organelles complex 1 subunit 1 (106-114)
RTIATALEY

SEQ ID NO: 6384 - protein, 9 aa, synthetic construct
  REGION 1..9: note = Beta-catenin-like protein 1 (270-278)
RTIFPLFMK

SEQ ID NO: 6385 - protein, 10 aa, synthetic construct
  REGION 1..10: note = 60S ribosomal protein L37a (4-13)
RTKKVGIVGK

SEQ ID NO: 6386 - protein, 10 aa, synthetic construct
  REGION 1..10: note = 39S ribosomal protein L2, mitochondrial (69-78)
RTKYTITPVK

SEQ ID NO: 6387 - protein, 10 aa, synthetic construct
  REGION 1..10: note = Peroxisomal multifunctional enzyme type 2 (251-260)
RTLGAIVRQK

SEQ ID NO: 6388 - protein, 9 aa, synthetic construct
  REGION 1..9: note = Cytosolic carboxypeptidase 1 (1067-1075)
RTLPKILSH

SEQ ID NO: 6389 - protein, 10 aa, synthetic construct
  REGION 1..10: note = Ubiquitin-40S ribosomal protein S27a (74-83)
RTLSDYNIQK

SEQ ID NO: 6390 - protein, 9 aa, synthetic construct
  REGION 1..9: note = RAD50-interacting protein 1 (155-163)
RTNWPNTGK

SEQ ID NO: 6391 - protein, 11 aa, synthetic construct
  REGION 1..11: note = Dynamin-binding protein (144-154)
RTRDYASLPPK

SEQ ID NO: 6392 - protein, 9 aa, synthetic construct
  REGION 1..9: note = ATP-dependent RNA helicase DDX24 (666-674)
RTSEIYVHR

SEQ ID NO: 6393 - protein, 9 aa, synthetic construct
  REGION 1..9: note = Sterol regulatory element-binding protein 2 (332-340)
RTTHNIIEK

SEQ ID NO: 6394 - protein, 10 aa, synthetic construct
  REGION 1..10: note = Cleavage and polyadenylation specificity factor subunit 2 (358-367)
RTTPGTLARF

SEQ ID NO: 6395 - protein, 10 aa, synthetic construct
  REGION 1..10: note = Diphosphoinositol polyphosphate phosphohydrolase 1 (10-19)
RTYDGDGYKK

SEQ ID NO: 6396 - protein, 10 aa, synthetic construct
  REGION 1..10: note = Diphosphoinositol polyphosphate phosphohydrolase 2 (7-16)
RTYDREGFKK

SEQ ID NO: 6397 - protein, 10 aa, synthetic construct
  REGION 1..10: note = Coatomer subunit beta' (759-768)
RTYLPSQVSR

SEQ ID NO: 6398 - protein, 9 aa, synthetic construct
  REGION 1..9: note = Exocyst complex component 4 (74-82)
RTYQSITER

SEQ ID NO: 6399 - protein, 10 aa, synthetic construct
  REGION 1..10: note = Lon protease homolog 2, peroxisomal (371-380)
RTYVGSMPGR

SEQ ID NO: 6400 - protein, 9 aa, synthetic construct
  REGION 1..9: note = Plakophilin-4 (418-426)
RTYYSPVYR

SEQ ID NO: 6401 - protein, 11 aa, synthetic construct
  REGION 1..11: note = tRNA pseudouridine synthase-like 1 (270-280)
RVAPAHGLFLK

SEQ ID NO: 6402 - protein, 10 aa, synthetic construct
  REGION 1..10: note = Protein ERGIC-53 (12-21)
RVAPSLKSQR

SEQ ID NO: 6403 - protein, 11 aa, synthetic construct
  REGION 1..11: note = Chromobox protein homolog 6 (9-19)
RVFAAESIIKR

SEQ ID NO: 6404 - protein, 9 aa, synthetic construct
  REGION 1..9: note = F-box only protein 3 (143-151)
RVFDVPIRR

SEQ ID NO: 6405 - protein, 11 aa, synthetic construct
  REGION 1..11: note = ATP synthase mitochondrial F1 complex assembly factor 1 (45-55)
RVFPVRPGSGR

SEQ ID NO: 6406 - protein, 10 aa, synthetic construct
  REGION 1..10: note = tRNA (guanine(26)-N(2))-dimethyltransferase (327-336)
RVFTGQAKVK

SEQ ID NO: 6407 - protein, 9 aa, synthetic construct
  REGION 1..9: note = Poly (ADP-ribose) polymerase 3 (110-118)
RVGEVGQSK

SEQ ID NO: 6408 - protein, 10 aa, synthetic construct
  REGION 1..10: note = Poly (ADP-ribose) polymerase 1 (591-600)
RVGTVIGSNK

SEQ ID NO: 6409 - protein, 11 aa, synthetic construct
  REGION 1..11: note = Bifunctional methylenetetrahydrofolate dehydrogenase/cyclohydrolase, mitochondrial (278-288)
RVHDPVTAKPK

SEQ ID NO: 6410 - protein, 10 aa, synthetic construct
  REGION 1..10: note = Choline/ethanolaminephosphotransferase 1 (267-276)
RVIFTGGVGK

SEQ ID NO: 6411 - protein, 11 aa, synthetic construct
  REGION 1..11: note = Drebrin-like protein (68-78)
RVKDPNSGLPK

SEQ ID NO: 6412 - protein, 9 aa, synthetic construct
  REGION 1..9: note = YEATS domain-containing protein 4 (11-19)
RVKGVTIVK

SEQ ID NO: 6413 - protein, 10 aa, synthetic construct
  REGION 1..10: note = 60S ribosomal protein L8 (147-156)
RVKLPSGSKK

SEQ ID NO: 6414 - protein, 10 aa, synthetic construct
  REGION 1..10: note = Sorting nexin-3 (52-61)
RVKTNLPIFK

SEQ ID NO: 6415 - protein, 10 aa, synthetic construct
  REGION 1..10: note = Copper transport protein ATOX1 (20-29)
RVLNKLGGVK

SEQ ID NO: 6416 - protein, 9 aa, synthetic construct
  REGION 1..9: note = U3 small nucleolar RNA-associated protein 14 homolog A (631-639)
RVLPYPFTH

SEQ ID NO: 6417 - protein, 9 aa, synthetic construct
  REGION 1..9: note = 60S ribosomal export protein NMD3 (397-405)
RVPDVVLIK

SEQ ID NO: 6418 - protein, 11 aa, synthetic construct
  REGION 1..11: note = Protein FAM136A (8-18)
RVQEAVESMVK

SEQ ID NO: 6419 - protein, 10 aa, synthetic construct
  REGION 1..10: note = Acetolactate synthase-like protein (181-190)
RVRDIVPTLR

SEQ ID NO: 6420 - protein, 9 aa, synthetic construct
  REGION 1..9: note = Inosine-5'-monophosphate dehydrogenase 2 (126-134)
RVRDVFEAK

SEQ ID NO: 6421 - protein, 10 aa, synthetic construct
  REGION 1..10: note = Transmembrane protein 107 (3-12)
RVSGLVPSRF

SEQ ID NO: 6422 - protein, 9 aa, synthetic construct
  REGION 1..9: note = Mitochondrial import receptor subunit TOM5 homolog (39-47)
RVTPFILKK

SEQ ID NO: 6423 - protein, 9 aa, synthetic construct
  REGION 1..9: note Dolichyl-diphosphooligosaccharide-proteinosyltransferase subunit 2 (256-264)
RVTYPAKAK

SEQ ID NO: 6424 - protein, 11 aa, synthetic construct
  REGION 1..11: note = Fanconi anemia group D2 protein (185-195)
RVVDGKDLTTK

SEQ ID NO: 6425 - protein, 11 aa, synthetic construct
  REGION 1..11: note = Ribosome biogenesis protein WDR12 (281-291)
RVWDVESGSLK

SEQ ID NO: 6426 - protein, 9 aa, synthetic construct
  REGION 1..9: note = Splicing factor 3B subunit 3 (968-976)
RVYDLGKKK

SEQ ID NO: 6427 - protein, 11 aa, synthetic construct
  REGION 1..11: note = WD repeat-containing protein 74 (208-218)
RVYDPASPQRR

SEQ ID NO: 6428 - protein, 10 aa, synthetic construct
  REGION 1..10: note = Arf-GAP with coiled-coil, ANK repeat and PH domain-containing protein 2 (477-486)
RVYEANVEKM

SEQ ID NO: 6429 - protein, 11 aa, synthetic construct
  REGION 1..11: note = Centrosomal protein of 104 kDa (621-631)
RVYEVRETAVR

SEQ ID NO: 6430 - protein, 9 aa, synthetic construct
  REGION 1..9: note = Programmed cell death 6-interacting protein (606-614)
RVYGGLTTK

SEQ ID NO: 6431 - protein, 9 aa, synthetic construct
  REGION 1..9: note = Probable E3 ubiquitin-protein ligase TRIM8 (538-546)
RVYGQPSTK

SEQ ID NO: 6432 - protein, 11 aa, synthetic construct
  REGION 1..11: note = Probable E3 ubiquitin-protein ligase TRIM8 (538-548)
RVYGQPSTKHY

SEQ ID NO: 6433 - protein, 11 aa, synthetic construct
  REGION 1..11: note = UPF0769 protein C21orf59 (33-43)
RVYNGRLKVQR

SEQ ID NO: 6434 - protein, 11 aa, synthetic construct
  REGION 1..11: note = Serine/threonine-protein kinase pim-2 (201-211)
RVYSPPEWISR

SEQ ID NO: 6435 - protein, 10 aa, synthetic construct
  REGION 1..10: note = E3 ubiquitin-protein ligase Itchy homolog (177-186)
RVYYVDHVEK

SEQ ID NO: 6436 - protein, 9 aa, synthetic construct
  REGION 1..9: note = Superkiller viralicidic activity 2-like 2 (738-746)
SAISSVRLY

SEQ ID NO: 6437 - protein, 9 aa, synthetic construct
  REGION 1..9: note = Ubiquilin-1 (452-460)
SAMSNPRAM

SEQ ID NO: 6438 - protein, 10 aa, synthetic construct
  REGION 1..10: note = 40S ribosomal protein S21 (18-27)
SASNRIIGAK

SEQ ID NO: 6439 - protein, 9 aa, synthetic construct
  REGION 1..9: note = Condensin-2 complex subunit G2 (606-614)
SEAAAPRAF

SEQ ID NO: 6440 - protein, 9 aa, synthetic construct
  REGION 1..9: note = Ferritin heavy chain (79-87)
SEAAINRQI

SEQ ID NO: 6441 - protein, 9 aa, synthetic construct
  REGION 1..9: note = Microtubule-actin cross-linking factor 1, isoforms 1/2/3/5 (3831-3839)
SEAEQTLRF

SEQ ID NO: 6442 - protein, 9 aa, synthetic construct
  REGION 1..9: note = Single-stranded DNA-binding protein 2 (86-94)
SEAKAFHDY

SEQ ID NO: 6443 - protein, 10 aa, synthetic construct
  REGION 1..10: note = PERQ amino acid-rich with GYF domain-containing protein 2 (1182-1191)
SEAKEFAKQF

SEQ ID NO: 6444 - protein, 11 aa, synthetic construct
  REGION 1..11: note = Transcriptional adapter 1 (16-26)
SEALGDNVKQY

SEQ ID NO: 6445 - protein, 9 aa, synthetic construct
  REGION 1..9: note = Cytoplasmic dynein 1 heavy chain 1 (1405-1413)
SEALKDRHW

SEQ ID NO: 6446 - protein, 9 aa, synthetic construct
  REGION 1..9: note = Zinc finger protein 296 (189-197)
SEAPEAPLL

SEQ ID NO: 6447 - protein, 10 aa, synthetic construct
  REGION 1..10: note = ATP-dependent RNA helicase DDX50 (2-11)
SEDNPQTLLF

SEQ ID NO: 6448 - protein, 9 aa, synthetic construct
  REGION 1..9: note = UV-stimulated scaffold protein A (35-43)
SEEQLSRAY

SEQ ID NO: 6449 - protein, 9 aa, synthetic construct
  REGION 1..9: note = X-ray repair cross-complementing protein 5 (650-658)
SEEQRFNNF

SEQ ID NO: 6450 - protein, 9 aa, synthetic construct
  REGION 1..9: note = WD repeat-containing protein 63 (190-198)
SEFGAPIKF

SEQ ID NO: 6451 - protein, 10 aa, synthetic construct
  REGION 1..10: note = Pre-mRNA-processing-splicing factor 8 (1377-1386)
SEFIDSQRVW

SEQ ID NO: 6452 - protein, 9 aa, synthetic construct
  REGION 1..9: note = Programmed cell death protein 6 (83-91)
SEFTGVWKY

SEQ ID NO: 6453 - protein, 11 aa, synthetic construct
  REGION 1..11: note = Proteasome subunit beta type-5 (72-82)
SEGNRISGATF

SEQ ID NO: 6454 - protein, 11 aa, synthetic construct
  REGION 1..11: note = WD repeat-containing protein 62 (1273-1283)
SEGQEPALRSW

SEQ ID NO: 6455 - protein, 10 aa, synthetic construct
  REGION 1..10: note = E3 ubiquitin-protein ligase MARCH6 (14-23)
SEGTPEKPLY

SEQ ID NO: 6456 - protein, 10 aa, synthetic construct
  REGION 1..10: note = Serine hydroxymethyltransferase, mitochondrial (67-76)
SEGYPGKRYY

SEQ ID NO: 6457 - protein, 9 aa, synthetic construct
  REGION 1..9: note = Serine hydroxymethyltransferase, cytosolic (74-82)
SEGYPGQRY

SEQ ID NO: 6458 - protein, 9 aa, synthetic construct
  REGION 1..9: note = Pre-mRNA-splicing factor CWC22 homolog (326-334)
SEIDKRVQY

SEQ ID NO: 6459 - protein, 9 aa, synthetic construct
  REGION 1..9: note = Talin-1 (290-298)
SEIEAKVRY

SEQ ID NO: 6460 - protein, 9 aa, synthetic construct
  REGION 1..9: note = Beta-parvin (141-149)
SEIGQKQKL

SEQ ID NO: 6461 - protein, 11 aa, synthetic construct
  REGION 1..11: note = Ribosome-binding protein 1 (242-252)
SEKAGIIQDTW

SEQ ID NO: 6462 - protein, 9 aa, synthetic construct
  REGION 1..9: note = Nuclear pore complex protein Nup155 (295-303)
SEKGVIQVY

SEQ ID NO: 6463 - protein, 9 aa, synthetic construct
  REGION 1..9: note = Plectin (3212-3220)
SELQARETF

SEQ ID NO: 6464 - protein, 9 aa, synthetic construct
  REGION 1..9: note = Inositol 1,4,5-trisphosphate receptor type 1 (2099-2107)
SENAERILY

SEQ ID NO: 6465 - protein, 9 aa, synthetic construct
  REGION 1..9: note = AP-2 complex subunit mu (347-355)
SENAIVWKI

SEQ ID NO: 6466 - protein, 9 aa, synthetic construct
  REGION 1..9: note = DnaJ homolog subfamily A member 2 (20-28)
SENELKKAY

SEQ ID NO: 6467 - protein, 11 aa, synthetic construct
  REGION 1..11: note = DNA-dependent protein kinase catalytic subunit (2174-2184)
SENNGGEGIHY

SEQ ID NO: 6468 - protein, 10 aa, synthetic construct
  REGION 1..10: note = Mediator of RNA polymerase II transcription subunit 12 (891-900)
SENPANRYSF

SEQ ID NO: 6469 - protein, 9 aa, synthetic construct
  REGION 1..9: note = F-box/LRR-repeat protein 3 (261-269)
SENPGQTHF

SEQ ID NO: 6470 - protein, 11 aa, synthetic construct
  REGION 1..11: note = Protein sel-1 homolog 1 (20-30)
SEQQHSAQAMF

SEQ ID NO: 6471 - protein, 9 aa, synthetic construct
  REGION 1..9: note = HLA class II histocompatibility antigen, DRB1-11 beta chain (221-229)
SESAQSKML

SEQ ID NO: 6472 - protein, 11 aa, synthetic construct
  REGION 1..11: note = Eukaryotic initiation factor 4A-I (40-50)
SESLLRGIYAY

SEQ ID NO: 6473 - protein, 9 aa, synthetic construct
  REGION 1..9: note = Retinoic acid receptor alpha (17-25)
SESRMVVTF

SEQ ID NO: 6474 - protein, 9 aa, synthetic construct
  REGION 1..9: note = Vacuolar protein sorting-associated protein 51 homolog (16-24)
SETDMVRQI

SEQ ID NO: 6475 - protein, 9 aa, synthetic construct
  REGION 1..9: note = 26S proteasome non-ATPase regulatory subunit 2 (546-554)
SETELKDTY

SEQ ID NO: 6476 - protein, 9 aa, synthetic construct
  REGION 1..9: note = Misshapen-like kinase 1 (969-977)
SETPEIRKY

SEQ ID NO: 6477 - protein, 9 aa, synthetic construct
  REGION 1..9: note = Serine/threonine-protein kinase Nek6 (224-232)
SETTAAHSL

SEQ ID NO: 6478 - protein, 9 aa, synthetic construct
  REGION 1..9: note = U5 small nuclear ribonucleoprotein 200 kDa helicase (1230-1238)
SEVILHHEY

SEQ ID NO: 6479 - protein, 9 aa, synthetic construct
  REGION 1..9: note = Arginine-glutamic acid dipeptide repeats protein (1257-1265)
SEYARPHVM

SEQ ID NO: 6480 - protein, 10 aa, synthetic construct
  REGION 1..10: note = Proteasome subunit alpha type-5 (6-15)
SEYDRGVNTF

SEQ ID NO: 6481 - protein, 10 aa, synthetic construct
  REGION 1..10: note = Nucleolar protein 56 (275-284)
SEYRQSLHTY

SEQ ID NO: 6482 - protein, 8 aa, synthetic construct
  REGION 1..8: note = Pleiotropic regulator 1 (226-233)
SGKLKLSL

SEQ ID NO: 6483 - protein, 9 aa, synthetic construct
  REGION 1..9: note = Manganese-transporting ATPase 13A1 (75-83)
SIAAPFTSK

SEQ ID NO: 6484 - protein, 9 aa, synthetic construct
  REGION 1..9: note = Myotubularin-related protein 10 (210-218)
SILGTPLSK

SEQ ID NO: 6485 - protein, 10 aa, synthetic construct
  REGION 1..10: note = U2 small nuclear ribonucleoprotein A' (119-128)
SILRNPVTNK

SEQ ID NO: 6486 - protein, 10 aa, synthetic construct
  REGION 1..10: note = Cytospin-A (887-896)
SISGPISTSK

SEQ ID NO: 6487 - protein, 11 aa, synthetic construct
  REGION 1..11: note = Double-stranded RNA-specific adenosine deaminase (1110-1120)
SIYDSKRQSGK

SEQ ID NO: 6488 - protein, 9 aa, synthetic construct
  REGION 1..9: note = Importin-8 (234-242)
SLAEILLKK

SEQ ID NO: 6489 - protein, 10 aa, synthetic construct
  REGION 1..10: note = Heterogeneous nuclear ribonucleoprotein K (154-163)
SLAGGIIGVK

SEQ ID NO: 6490 - protein, 9 aa, synthetic construct
  REGION 1..9: note = G2/M phase-specific E3 ubiquitin-protein ligase (424-432)
SLFEGSLSK

SEQ ID NO: 6491 - protein, 9 aa, synthetic construct
  REGION 1..9: note = Serine/threonine-protein phosphatase 2A 56 kDa regulatory subunit epsilon isoform (278-286)
SLFHAQLAY

SEQ ID NO: 6492 - protein, 9 aa, synthetic construct
  REGION 1..9: note = Adenylate cyclase type 6 (161-169)
SLFPKALQR

SEQ ID NO: 6493 - protein, 9 aa, synthetic construct
  REGION 1..9: note = Cytochrome c oxidase subunit 6C (30-38)
SLGVAALYK

SEQ ID NO: 6494 - protein, 10 aa, synthetic construct
  REGION 1..10: note = Histone H2A.V (91-100)
SLIGKKGQQK

SEQ ID NO: 6495 - protein, 9 aa, synthetic construct
  REGION 1..9: note = N-alpha-acetyltransferase 30 (63-71)
SLKSKVLSV

SEQ ID NO: 6496 - protein, 9 aa, synthetic construct
  REGION 1..9: note = COP9 signalosome complex subunit 2 (433-441)
SLNQAVVSK

SEQ ID NO: 6497 - protein, 10 aa, synthetic construct
  REGION 1..10: note = Cell division cycle-associated protein 2 (247-256)
SLPANTPLRK

SEQ ID NO: 6498 - protein, 9 aa, synthetic construct
  REGION 1..9: note = Zinc finger protein 697 (327-335)
SLSSHLLSH

SEQ ID NO: 6499 - protein, 11 aa, synthetic construct
  REGION 1..11: note = Protection of telomeres protein 1 (417-427)
SLYDSKIWTTK

SEQ ID NO: 6500 - protein, 11 aa, synthetic construct
  REGION 1..11: note = MICOS complex subunit MIC26 (41-51)
SLYSVPEGQSK

SEQ ID NO: 6501 - protein, 9 aa, synthetic construct
  REGION 1..9: note = A-kinase anchor protein 13 (930-938)
SPLTKSISL

SEQ ID NO: 6502 - protein, 8 aa, synthetic construct
  REGION 1..8: note = Elongation factor 2 (95-102)
SPNKHNRL

SEQ ID NO: 6503 - protein, 9 aa, synthetic construct
  REGION 1..9: note = WD repeat-containing protein 3 (558-566)
SPNQKLLAV

SEQ ID NO: 6504 - protein, 8 aa, synthetic construct
  REGION 1..8: note = Gamma-interferon-inducible protein 16 (166-173)
SPSPKTSL

SEQ ID NO: 6505 - protein, 8 aa, synthetic construct
  REGION 1..8: note = Elongation factor 2 (2-9)
SPVVRVAV

SEQ ID NO: 6506 - protein, 9 aa, synthetic construct
  REGION 1..9: note = Uridine diphosphate glucose pyrophosphatase (83-91)
SPYLRPLTL

SEQ ID NO: 6507 - protein, 9 aa, synthetic construct
  REGION 1..9: note = Ubiquitin carboxyl-terminal hydrolase 48 (410-418)
SRNAYMLVY

SEQ ID NO: 6508 - protein, 9 aa, synthetic construct
  REGION 1..9: note = RNA-binding protein EWS (328-336)
SSAPPLTGK

SEQ ID NO: 6509 - protein, 9 aa, synthetic construct
  REGION 1..9: note = Immediate early response gene 5 protein (275-283)
SSFSGLLRK

SEQ ID NO: 6510 - protein, 9 aa, synthetic construct
  REGION 1..9: note = 40S ribosomal protein S5 (184-192)
SSNSYAIKK

SEQ ID NO: 6511 - protein, 9 aa, synthetic construct
  REGION 1..9: note = Proteasome activator complex subunit 4 (977-985)
SSYSQVRNK

SEQ ID NO: 6512 - protein, 9 aa, synthetic construct
  REGION 1..9: note = PCI domain-containing protein 2 (203-211)
STAQRVTYK

SEQ ID NO: 6513 - protein, 9 aa, synthetic construct
  REGION 1..9: note = MAP7 domain-containing protein 1 (454-462)
STASELSPK

SEQ ID NO: 6514 - protein, 9 aa, synthetic construct
  REGION 1..9: note = 60S ribosomal protein L18 (41-49)
STFNQVVLK

SEQ ID NO: 6515 - protein, 9 aa, synthetic construct
  REGION 1..9: note = WD repeat and coiled-coil-containing protein C2orf44 (449-457)
STFSAPLNK

SEQ ID NO: 6516 - protein, 9 aa, synthetic construct
  REGION 1..9: note = Kanadaptin (238-246)
STHGTFLNK

SEQ ID NO: 6517 - protein, 9 aa, synthetic construct
  REGION 1..9: note = Double-stranded RNA-binding protein Staufen homolog 2 (41-49)
STLPKPVQK

SEQ ID NO: 6518 - protein, 9 aa, synthetic construct
  REGION 1..9: note = F-box only protein 11 (143-151)
STNSHPILR

SEQ ID NO: 6519 - protein, 9 aa, synthetic construct
  REGION 1..9: note = LisH domain-containing protein ARMC9 (382-390)
STSDVVRQY

SEQ ID NO: 6520 - protein, 9 aa, synthetic construct
  REGION 1..9: note = E3 ubiquitin-protein ligase CHFR (78-86)
STSGTVINK

SEQ ID NO: 6521 - protein, 9 aa, synthetic construct
  REGION 1..9: note = Lysine-specific histone demethylase 1A (633-641)
STSQTFIYK

SEQ ID NO: 6522 - protein, 9 aa, synthetic construct
  REGION 1..9: note = Heterogeneous nuclear ribonucleoprotein U-like protein 2 (165-173)
STYGVTKGK

SEQ ID NO: 6523 - protein, 9 aa, synthetic construct
  REGION 1..9: note = Cathepsin Z (38-46)
STYPRPHEY

SEQ ID NO: 6524 - protein, 9 aa, synthetic construct
  REGION 1..9: note = Nucleolar pre-ribosomal-associated protein 1 (2084-2092)
SVAEHPLSR

SEQ ID NO: 6525 - protein, 9 aa, synthetic construct
  REGION 1..9: note = MOB kinase activator 1A (188-196)
SVAKTILKR

SEQ ID NO: 6526 - protein, 10 aa, synthetic construct
  REGION 1..10: note = Lysine-specific demethylase 5C (959-968)
SVAPSPAVDK

SEQ ID NO: 6527 - protein, 9 aa, synthetic construct
  REGION 1..9: note = Lysine-specific demethylase 5A (796-804)
SVAQLLLSK

SEQ ID NO: 6528 - protein, 9 aa, synthetic construct
  REGION 1..9: note = Probable cation-transporting ATPase 13A4 (871-879)
SVASPFTSK

SEQ ID NO: 6529 - protein, 9 aa, synthetic construct
  REGION 1..9: note = Sentrin-specific protease 5 (115-123)
SVDGPVSQK

SEQ ID NO: 6530 - protein, 9 aa, synthetic construct
  REGION 1..9: note = Exostosin-2 (692-700)
SVFGTMPLK

SEQ ID NO: 6531 - protein, 9 aa, synthetic construct
  REGION 1..9: note = SRR1-like protein (301-309)
SVHWFPVQK

SEQ ID NO: 6532 - protein, 9 aa, synthetic construct
  REGION 1..9: note = Epidermal growth factor receptor kinase substrate 8 (380-388)
SVLSPLLNK

SEQ ID NO: 6533 - protein, 9 aa, synthetic construct
  REGION 1..9: note = Nodal modulator 2 (130-138)
SVNGKVLSK

SEQ ID NO: 6534 - protein, 9 aa, synthetic construct
  REGION 1..9: note = Ubiquitin carboxyl-terminal hydrolase 11 (442-450)
SVPLPISHK

SEQ ID NO: 6535 - protein, 10 aa, synthetic construct
  REGION 1..10: note = Cytoplasmic dynein 1 light intermediate chain 1 (419-428)
SVSPIPAGSK

SEQ ID NO: 6536 - protein, 10 aa, synthetic construct
  REGION 1..10: note = Zinc finger protein 697 (10-19)
SVSSHLFTHK

SEQ ID NO: 6537 - protein, 9 aa, synthetic construct
  REGION 1..9: note = Zinc finger protein 619 (226-234)
SVSTHLITK

SEQ ID NO: 6538 - protein, 9 aa, synthetic construct
  REGION 1..9: note = Fatty acyl-CoA reductase 1 (39-47)
SVYVLVRQK

SEQ ID NO: 6539 - protein, 9 aa, synthetic construct
  REGION 1..9: note = Histone H2B type 2-F (39-47)
SVYVYKVLK

SEQ ID NO: 6540 - protein, 9 aa, synthetic construct
  REGION 1..9: note = Nucleolar RNA helicase 2 (15-23)
TAMKKGETL

SEQ ID NO: 6541 - protein, 10 aa, synthetic construct
  REGION 1..10: note = Pre-mRNA-processing-splicing factor 8 (1079-1088)
TEAAHPIRLF

SEQ ID NO: 6542 - protein, 10 aa, synthetic construct
  REGION 1..10: note = NHP2-like protein 1 (2-11)
TEADVNPKAY

SEQ ID NO: 6543 - protein, 9 aa, synthetic construct
  REGION 1..9: note = Splicing factor, proline- and glutamine-rich (309-317)
TEDEFKRLF

SEQ ID NO: 6544 - protein, 10 aa, synthetic construct
  REGION 1..10: note = 60S ribosomal protein L13 (170-179)
TEEEKNFKAF

SEQ ID NO: 6545 - protein, 10 aa, synthetic construct
  REGION 1..10: note = Protein SET (136-145)
TEFEDIKSGY

SEQ ID NO: 6546 - protein, 10 aa, synthetic construct
  REGION 1..10: note = Neutral alpha-glucosidase AB (174-183)
TEGGEPYRLY

SEQ ID NO: 6547 - protein, 9 aa, synthetic construct
  REGION 1..9: note = T-complex protein 1 subunit theta (342-350)
TEIELAKQI

SEQ ID NO: 6548 - protein, 9 aa, synthetic construct
  REGION 1..9: note = RNA-binding protein 27 (734-742)
TELDLHKRL

SEQ ID NO: 6549 - protein, 9 aa, synthetic construct
  REGION 1..9: note = RNA-binding protein 26 (793-801)
TELDLYKKM

SEQ ID NO: 6550 - protein, 9 aa, synthetic construct
  REGION 1..9: note = Cell cycle progression protein 1 (432-440)
TELERKLTF

SEQ ID NO: 6551 - protein, 10 aa, synthetic construct
  REGION 1..10: note = Exocyst complex component 4 (67-76)
TELTTAIRTY

SEQ ID NO: 6552 - protein, 9 aa, synthetic construct
  REGION 1..9: note = Geranylgeranyl pyrophosphate synthase (238-246)
TENIDIKKY

SEQ ID NO: 6553 - protein, 11 aa, synthetic construct
  REGION 1..11: note = Fructose-bisphosphate aldolase A (103-113)
TENTEENRRFY

SEQ ID NO: 6554 - protein, 9 aa, synthetic construct
  REGION 1..9: note = Probable cation-transporting ATPase 13A3 (132-140)
TESQQIRYF

SEQ ID NO: 6555 - protein, 9 aa, synthetic construct
  REGION 1..9: note = Nuclear factor erythroid 2-related factor 2 (198-206)
TEVDNYHFY

SEQ ID NO: 6556 - protein, 8 aa, synthetic construct
  REGION 1..8: note = Basigin (48-55)
TEVTGHRW

SEQ ID NO: 6557 - protein, 9 aa, synthetic construct
  REGION 1..9: note = Myosin phosphatase Rho-interacting protein (441-449)
TEYPVQRNY

SEQ ID NO: 6558 - protein, 11 aa, synthetic construct
  REGION 1..11: note = GPI transamidase component PIG-T (450-460)
TEYTPDPNHGF

SEQ ID NO: 6559 - protein, 9 aa, synthetic construct
  REGION 1..9: note = Protein kinase C delta-binding protein (181-189)
TGLQKVQSL

SEQ ID NO: 6560 - protein, 9 aa, synthetic construct
  REGION 1..9: note = Alpha-enolase (72-80)
TIAPALVSK

SEQ ID NO: 6561 - protein, 9 aa, synthetic construct
  REGION 1..9: note = Histidine triad nucleotide-binding protein 1 (17-25)
TIFGKIIRK

SEQ ID NO: 6562 - protein, 9 aa, synthetic construct
  REGION 1..9: note = NHP2-like protein 1 (105-113)
TIKEGSQLK

SEQ ID NO: 6563 - protein, 9 aa, synthetic construct
  REGION 1..9: note = H/ACA ribonucleoprotein complex subunit 3 (47-55)
TIKKRFKVL

SEQ ID NO: 6564 - protein, 9 aa, synthetic construct
  REGION 1..9: note = Signal peptidase complex subunit 2 (129-137)
TIYTSYKEK

SEQ ID NO: 6565 - protein, 8 aa, synthetic construct
  REGION 1..8: note = Retinoblastoma-like protein 1 (803-810)
TIYVGRVK

SEQ ID NO: 6566 - protein, 8 aa, synthetic construct
  REGION 1..8: note = Interferon-related developmental regulator 1 (118-125)
TLGPILKK

SEQ ID NO: 6567 - protein, 9 aa, synthetic construct
  REGION 1..9: note = Protein BRICK1 (49-57)
TLNEKLTAL

SEQ ID NO: 6568 - protein, 9 aa, synthetic construct
  REGION 1..9: note = GPI mannosyltransferase 3 (40-48)
TLYFNTQEK

SEQ ID NO: 6569 - protein, 9 aa, synthetic construct
  REGION 1..9: note = Splicing factor 3B subunit 3 (759-767)
TNTLRILAL

SEQ ID NO: 6570 - protein, 9 aa, synthetic construct
  REGION 1..9: note = Ubiquitin-like protein 7 (248-256)
TPSSRPASL

SEQ ID NO: 6571 - protein, 9 aa, synthetic construct
  REGION 1..9: note = Exportin-6 (55-63)
TRNDYVMMY

SEQ ID NO: 6572 - protein, 9 aa, synthetic construct
  REGION 1..9: note = Perilipin-2 (63-71)
TSALPIIQK

SEQ ID NO: 6573 - protein, 9 aa, synthetic construct
  REGION 1..9: note = Huntingtin (1215-1223)
TSGPVTTSK

SEQ ID NO: 6574 - protein, 8 aa, synthetic construct
  REGION 1..8: note = YTH domain-containing protein 1 (327-334)
TSKLKYVL

SEQ ID NO: 6575 - protein, 9 aa, synthetic construct
  REGION 1..9: note = Male-specific lethal 3 homolog (328-336)
TTGEPATPK

SEQ ID NO: 6576 - protein, 10 aa, synthetic construct
  REGION 1..10: note = Flap endonuclease 1 (60-69)
TTSHLMGMFY

SEQ ID NO: 6577 - protein, 9 aa, synthetic construct
  REGION 1..9: note = Elongation factor 1-alpha 1 (22-30)
TTTGHLIYK

SEQ ID NO: 6578 - protein, 9 aa, synthetic construct
  REGION 1..9: note = Derlin-1 (22-30)
TVAVPLVGK

SEQ ID NO: 6579 - protein, 9 aa, synthetic construct
  REGION 1..9: note = COP9 signalosome complex subunit 3 (378-386)
TVNPQFVQK

SEQ ID NO: 6580 - protein, 10 aa, synthetic construct
  REGION 1..10: note = HIG1 domain family member 2A, mitochondrial (27-36)
TVYRNPESFK

SEQ ID NO: 6581 - protein, 9 aa, synthetic construct
  REGION 1..9: note = Talin-1 (1188-1196)
VAKAVTQAL

SEQ ID NO: 6582 - protein, 9 aa, synthetic construct
  REGION 1..9: note = DNA damage-binding protein 1 (510-518)
VAVGRALYY

SEQ ID NO: 6583 - protein, 9 aa, synthetic construct
  REGION 1..9: note = Translin-associated protein X (128-136)
VEAVSFQHF

SEQ ID NO: 6584 - protein, 11 aa, synthetic construct
  REGION 1..11: note = Nodal modulator 3 (448-458)
VEGTIGDFKAY

SEQ ID NO: 6585 - protein, 9 aa, synthetic construct
  REGION 1..9: note = 3-phosphoinositide-dependent protein kinase 1 (325-333)
VENNLILKM

SEQ ID NO: 6586 - protein, 9 aa, synthetic construct
  REGION 1..9: note = Sodium-coupled neutral amino acid transporter 2 (354-362)
VESELLHTY

SEQ ID NO: 6587 - protein, 9 aa, synthetic construct
  REGION 1..9: note = Intraflagellar transport protein 81 homolog (196-204)
VETAQNHQW

SEQ ID NO: 6588 - protein, 10 aa, synthetic construct
  REGION 1..10: note = Cleavage and polyadenylation specificity factor subunit 3 (444-453)
VILEVQSNPK

SEQ ID NO: 6589 - protein, 9 aa, synthetic construct
  REGION 1..9: note = Centrosomal protein of 57 kDa (326-334)
VINSIPLAK

SEQ ID NO: 6590 - protein, 9 aa, synthetic construct
  REGION 1..9: note = DNA-directed RNA polymerase I subunit RPA2 (81-89)
VISPPTVPK

SEQ ID NO: 6591 - protein, 11 aa, synthetic construct
  REGION 1..11: note = Ras GTPase-activating protein-binding protein 1 (113-123)
VLAPEGSVANK

SEQ ID NO: 6592 - protein, 11 aa, synthetic construct
  REGION 1..11: note = Ras GTPase-activating protein-binding protein 2 (113-123)
VLAPEGSVPNK

SEQ ID NO: 6593 - protein, 9 aa, synthetic construct
  REGION 1..9: note = Interferon-stimulated gene 20 kDa protein (132-140)
VLSERLLHK

SEQ ID NO: 6594 - protein, 9 aa, synthetic construct
  REGION 1..9: note = DNA-directed RNA polymerase II subunit RPB2 (1020-1028)
VLYNGFTGR

SEQ ID NO: 6595 - protein, 9 aa, synthetic construct
  REGION 1..9: note = Long-chain-fatty-acid-CoA ligase 4 (576-584)
VPNQKRLTL

SEQ ID NO: 6596 - protein, 9 aa, synthetic construct
  REGION 1..9: note = Protein kintoun (155-163)
VPRIQPQSL

SEQ ID NO: 6597 - protein, 9 aa, synthetic construct
  REGION 1..9: note = Leucine-rich repeat-containing protein 20 (35-43)
VSFPIGIYK

SEQ ID NO: 6598 - protein, 8 aa, synthetic construct
  REGION 1..8: note = Vimentin (31-38)
VTTSTRTY

SEQ ID NO: 6599 - protein, 9 aa, synthetic construct
  REGION 1..9: note = Nucleolar and spindle-associated protein 1 (308-316)
VTVSGGTPK

SEQ ID NO: 6600 - protein, 10 aa, synthetic construct
  REGION 1..10: note = Septin-7 (317-326)
VTYNGVDNNK

SEQ ID NO: 6601 - protein, 9 aa, synthetic construct
  REGION 1..9: note = Histone deacetylase 9 (78-86)
VVDPVVREK

SEQ ID NO: 6602 - protein, 9 aa, synthetic construct
  REGION 1..9: note = Probable 18S rRNA (guanine-N(7))-methyltransferase (188-196)
VVDYPNSAK

SEQ ID NO: 6603 - protein, 9 aa, synthetic construct
  REGION 1..9: note = Heterogeneous nuclear ribonucleoproteins A2/B1 (39-47)
VVMRDPASK

SEQ ID NO: 6604 - protein, 9 aa, synthetic construct
  REGION 1..9: note = Heterogeneous nuclear ribonucleoprotein A3 (65-73)
VVMRDPQTK

SEQ ID NO: 6605 - protein, 10 aa, synthetic construct
  REGION 1..10: note = Transmembrane protein 263 (101-110)
VVNKVPLTGK

SEQ ID NO: 6606 - protein, 11 aa, synthetic construct
  REGION 1..11: note = X-ray repair cross-complementing protein 5 (574-584)
VVQDGITLITK

SEQ ID NO: 6607 - protein, 9 aa, synthetic construct
  REGION 1..9: note = 60S ribosomal protein L22-like 1 (65-73)
VVSEKQFSK

SEQ ID NO: 6608 - protein, 9 aa, synthetic construct
  REGION 1..9: note = Glutathione S-transferase P (6-14)
VVYFPVRGR

SEQ ID NO: 6609 - protein, 9 aa, synthetic construct
  REGION 1..9: note = Adenylosuccinate lyase (363-371)
VVYPKVIER

SEQ ID NO: 6610 - protein, 9 aa, synthetic construct
  REGION 1..9: note = ER membrane protein complex subunit 1 (790-798)
VVYQYWNTK

SEQ ID NO: 6611 - protein, 11 aa, synthetic construct
  REGION 1..11: note = NmrA-like family domain-containing protein 1 (109-119)
VVYSGLENIKK

SEQ ID NO: 6612 - protein, 9 aa, synthetic construct
  REGION 1..9: note = JmjC domain-containing protein 8 (81-89)
YAFVRPVIL

SEQ ID NO: 6613 - protein, 9 aa, synthetic construct
  REGION 1..9: note = CCR4-NOT transcription complex subunit 1 (93-101)
YAIDNPLHY

SEQ ID NO: 6614 - protein, 9 aa, synthetic construct
  REGION 1..9: note = WD repeat-containing protein 82 (63-71)
YANSKAVTL

SEQ ID NO: 6615 - protein, 9 aa, synthetic construct
  REGION 1..9: note = Splicing factor 3B subunit 1 (761-769)
YANYYTREV

SEQ ID NO: 6616 - protein, 9 aa, synthetic construct
  REGION 1..9: note = WD repeat-containing protein 3 (84-92)
YEDGSIRIF

SEQ ID NO: 6617 - protein, 10 aa, synthetic construct
  REGION 1..10: note = NADH dehydrogenase (ubiquinone) 1 beta subcomplex subunit 11, mitochondrial (67-76)
YEKNPDSHGY

SEQ ID NO: 6618 - protein, 9 aa, synthetic construct
  REGION 1..9: note = Lon protease homolog 2, peroxisomal (599-607)
YEMEVSQRL

SEQ ID NO: 6619 - protein, 9 aa, synthetic construct
  REGION 1..9: note = AN1-type zinc finger protein 5 (21-29)
YGNPRTNGM

SEQ ID NO: 6620 - protein, 9 aa, synthetic construct
  REGION 1..9: note = Cullin-3 (34-42)
YRNAYTMVL

SEQ ID NO: 6621 - protein, 9 aa, synthetic construct
  REGION 1..9: note = MICOS complex subunit MIC27 (44-52)
YTAPPLQSK

SEQ ID NO: 6622 - protein, 9 aa, synthetic construct
  REGION 1..9: note = ATP-dependent RNA helicase DDX3X (200-208)
YTRPTPVQK

SEQ ID NO: 6623 - protein, 9 aa, synthetic construct
  REGION 1..9: note = Vimentin (30-38)
YVTTSTRTY

SEQ ID NO: 6624 - protein, 9 aa, synthetic construct
  REGION 1..9: note = Serine/threonine-protein kinase mTOR (853-861)
YVVEPYRKY

SEQ ID NO: 6625 - protein, 9 aa, synthetic construct
  REGION 1..9: note = Enhancer of filamentation 1 (164-172)
YVYEYPSRY

SEQ ID NO: 6626 - protein, 10 aa, synthetic construct
  REGION 1..10: note = Nucleolar pre-ribosomal-associated protein 1 (1468-1477)
YYSHLEGARF

SEQ ID NO: 6627 - protein, 9 aa, synthetic construct
  REGION 1..9: note = Selenoprotein H (10-18)
AEAAVVAVA

SEQ ID NO: 6628 - protein, 9 aa, synthetic construct
  REGION 1..9: note = Transcription factor BTF3 (128-136)
AEALPKQSV

SEQ ID NO: 6629 - protein, 9 aa, synthetic construct
  REGION 1..9: note = E3 ubiquitin-protein ligase HUWE1 (1156-1164)
AEDKDTPAL

SEQ ID NO: 6630 - protein, 11 aa, synthetic construct
  REGION 1..11: note = Centromere protein H (228-238)
AEDPALKEIVL

SEQ ID NO: 6631 - protein, 11 aa, synthetic construct
  REGION 1..11: note = Probable ATP-dependent RNA helicase DDX56 (121-131)
AEDSVSQRAVL

SEQ ID NO: 6632 - protein, 9 aa, synthetic construct
  REGION 1..9: note = Transforming acidic coiled-coil-containing protein 3 (469-477)
AEDTPVVQL

SEQ ID NO: 6633 - protein, 10 aa, synthetic construct
  REGION 1..10: note = Beta-hexosaminidase subunit alpha (266-275)
AEFDTPGHTL

SEQ ID NO: 6634 - protein, 10 aa, synthetic construct
  REGION 1..10: note = 26S proteasome non-ATPase regulatory subunit 8 (113-122)
AEFHTELERL

SEQ ID NO: 6635 - protein, 9 aa, synthetic construct
  REGION 1..9: note = Zinc phosphodiesterase ELAC protein 2 (677-685)
AEFIMLNHF

SEQ ID NO: 6636 - protein, 10 aa, synthetic construct
  REGION 1..10: note = Calmodulin (11-20)
AEFKEAFSLF

SEQ ID NO: 6637 - protein, 10 aa, synthetic construct
  REGION 1..10: note = BRCA1-A complex subunit BRE (90-99)
AEFLPDPSAL

SEQ ID NO: 6638 - protein, 12 aa, synthetic construct
  REGION 1..12: note = DNA dC-dU-editing enzyme APOBEC-3B (105-116)
AEFLSEHPNVTL

SEQ ID NO: 6639 - protein, 9 aa, synthetic construct
  REGION 1..9: note = ATP-dependent RNA helicase DHX8 (979-987)
AEFPLEPML

SEQ ID NO: 6640 - protein, 9 aa, synthetic construct
  REGION 1..9: note = Cytochrome c oxidase subunit 6B1 (9-17)
AEGTFPGKI

SEQ ID NO: 6641 - protein, 9 aa, synthetic construct
  REGION 1..9: note = SRSF protein kinase 1 (114-122)
AEHYTETAL

SEQ ID NO: 6642 - protein, 11 aa, synthetic construct
  REGION 1..11: note = DNA repair protein RAD50 (134-144)
AEIDREMISSL

SEQ ID NO: 6643 - protein, 9 aa, synthetic construct
  REGION 1..9: note = Insulin-like growth factor 2 mRNA-binding protein 2 (201-209)
AEIEIMKKL

SEQ ID NO: 6644 - protein, 12 aa, synthetic construct
  REGION 1..12: note = Sodium/potassium-transporting ATPase subunit alpha-1 (69-80)
AEILARDGPNAL

SEQ ID NO: 6645 - protein, 11 aa, synthetic construct
  REGION 1..11: note = Lamin-B1 (347-357)
AEIRDQMQQQL

SEQ ID NO: 6646 - protein, 9 aa, synthetic construct
  REGION 1..9: note = Transcription factor 25 (361-369)
AEISQPPAL

SEQ ID NO: 6647 - protein, 12 aa, synthetic construct
  REGION 1..12: note = BAG64702.1 (100-111)
AEITDKLGLHSL

SEQ ID NO: 6648 - protein, 10 aa, synthetic construct
  REGION 1..10: note = Importin subunit alpha-1 (451-460)
AEKLGETEKL

SEQ ID NO: 6649 - protein, 9 aa, synthetic construct
  REGION 1..9: note = T-complex protein 1 subunit epsilon (350-358)
AEKLGFAGL

SEQ ID NO: 6650 - protein, 10 aa, synthetic construct
  REGION 1..10: note = Coiled-coil domain-containing protein 85B (121-130)
AELEGRQEEL

SEQ ID NO: 6651 - protein, 10 aa, synthetic construct
  REGION 1..10: note = Centrosomal protein of 55 kDa (140-149)
AELESKTNTL

SEQ ID NO: 6652 - protein, 12 aa, synthetic construct
  REGION 1..12: note = Tropomodulin-3 (286-297)
AELKIDNQRQQL

SEQ ID NO: 6653 - protein, 9 aa, synthetic construct
  REGION 1..9: note = COMM domain-containing protein 4 (192-200)
AELKQAQTL

SEQ ID NO: 6654 - protein, 9 aa, synthetic construct
  REGION 1..9: note = trabeculin-alpha (1770-1778)
AELKQVQTL

SEQ ID NO: 6655 - protein, 10 aa, synthetic construct
  REGION 1..10: note = Microtubule-associated protein RP/EB family member 1 (194-203)
AELMQQVNVL

SEQ ID NO: 6656 - protein, 11 aa, synthetic construct
  REGION 1..11: note = 14-3-3 protein theta (34-44)
AELSNEERNLL

SEQ ID NO: 6657 - protein, 11 aa, synthetic construct
  REGION 1..11: note = Sodium/potassium-transporting ATPase subunit alpha-1 (677-687)
AENGFLPIHLL

SEQ ID NO: 6658 - protein, 11 aa, synthetic construct
  REGION 1..11: note = Armadillo repeat-containing X-linked protein 3 (271-281)
AENPAMTRELL

SEQ ID NO: 6659 - protein, 9 aa, synthetic construct
  REGION 1..9: note = Eukaryotic translation initiation factor 4 gamma 1 (1379-1387)
AEQKVEYTL

SEQ ID NO: 6660 - protein, 9 aa, synthetic construct
  REGION 1..9: note = Double-strand-break repair protein rad21 homolog (576-584)
AESISLLEL

SEQ ID NO: 6661 - protein, 9 aa, synthetic construct
  REGION 1..9: note = Uncharacterized protein C6orf226 (67-75)
AESLPPPTL

SEQ ID NO: 6662 - protein, 11 aa, synthetic construct
  REGION 1..11: note = Endoplasmin (528-538)
AESSPFVERLL

SEQ ID NO: 6663 - protein, 9 aa, synthetic construct
  REGION 1..9: note = Magnesium transporter protein 1 (299-307)
AETHIVLLF

SEQ ID NO: 6664 - protein, 9 aa, synthetic construct
  REGION 1..9: note = DNA-directed RNA polymerase I subunit RPA1 (1590-1598)
AEVLDLRRL

SEQ ID NO: 6665 - protein, 11 aa, synthetic construct
  REGION 1..11: note = Syntaxin-binding protein 1 (297-307)
AEVSQEVTRSL

SEQ ID NO: 6666 - protein, 10 aa, synthetic construct
  REGION 1..10: note = Cytochrome b-c1 complex subunit 9 (42-51)
AIYDHINEGV

SEQ ID NO: 6667 - protein, 10 aa, synthetic construct
  REGION 1..10: note = Rab GDP dissociation inhibitor beta (137-146)
ARYGKSPYLY

SEQ ID NO: 6668 - protein, 9 aa, synthetic construct
  REGION 1..9: note = Replication factor C subunit 4 (343-351)
DEHLQLISL

SEQ ID NO: 6669 - protein, 11 aa, synthetic construct
  REGION 1..11: note = Small nuclear ribonucleoprotein Sm D2 (22-32)
EEFNTGPLSVL

SEQ ID NO: 6670 - protein, 9 aa, synthetic construct
  REGION 1..9: note = Transmembrane emp24 domain-containing protein 10 (136-144)
EEIAKVEKL

SEQ ID NO: 6671 - protein, 9 aa, synthetic construct
  REGION 1..9: note = Protein RRP5 homolog (820-828)
EELQGVRSL

SEQ ID NO: 6672 - protein, 11 aa, synthetic construct
  REGION 1..11: note = T-complex protein 1 subunit delta (363-373)
EEVNLNGSGKL

SEQ ID NO: 6673 - protein, 9 aa, synthetic construct
  REGION 1..9: note = Nucleophosmin (92-100)
FEITPPVVL

SEQ ID NO: 6674 - protein, 9 aa, synthetic construct
  REGION 1..9: note = Actin, cytoplasmic 1 (223-231)
FEQEMATAA

SEQ ID NO: 6675 - protein, 9 aa, synthetic construct
  REGION 1..9: note = Serine/arginine repetitive matrix protein 2 (873-881)
FESSPDPEL

SEQ ID NO: 6676 - protein, 10 aa, synthetic construct
  REGION 1..10: note = Mitochondrial Rho GTPase 2 (11-20)
GEAQVGKTSL

SEQ ID NO: 6677 - protein, 12 aa, synthetic construct
  REGION 1..12: note = Heterogeneous nuclear ribonucleoprotein C-like 1 (69-80)
GEDGRMIAGQVL

SEQ ID NO: 6678 - protein, 10 aa, synthetic construct
  REGION 1..10: note = Cytoplasmic dynein 1 heavy chain 1 (1073-1082)
GEDLNKWQAL

SEQ ID NO: 6679 - protein, 10 aa, synthetic construct
  REGION 1..10: note = HDAC2 protein (482-491)
GEDPDKRISI

SEQ ID NO: 6680 - protein, 9 aa, synthetic construct
  REGION 1..9: note = Histone-binding protein RBBP7 (146-154)
GEFGGFGSV

SEQ ID NO: 6681 - protein, 11 aa, synthetic construct
  REGION 1..11: note = PC4 and SFRS1-interacting protein (251-261)
GEGDSVITQVL

SEQ ID NO: 6682 - protein, 9 aa, synthetic construct
  REGION 1..9: note = Nardilysin-arginine dibasic convertase), isoform CRA_d (823-831)
GEHGLIIRV

SEQ ID NO: 6683 - protein, 11 aa, synthetic construct
  REGION 1..11: note = Elongation factor 2 (42-52)
GEHIIAGAGEL

SEQ ID NO: 6684 - protein, 9 aa, synthetic construct
  REGION 1..9: note = Ragulator complex protein LAMTOR4 (44-52)
GEHTLLVTV

SEQ ID NO: 6685 - protein, 11 aa, synthetic construct
  REGION 1..11: note = 26S protease regulatory subunit 10B (338-348)
GEIDYEAIVKL

SEQ ID NO: 6686 - protein, 11 aa, synthetic construct
  REGION 1..11: note = Golgin subfamily B member 1 (2640-2650)
GEIEDKLKKEL

SEQ ID NO: 6687 - protein, 11 aa, synthetic construct
  REGION 1..11: note = Coatomer subunit beta' (518-528)
GEIQEIVKTGL

SEQ ID NO: 6688 - protein, 9 aa, synthetic construct
  REGION 1..9: note = Prolyl 4-hydroxylase subunit alpha-1 (197-205)
GEISTIDKV

SEQ ID NO: 6689 - protein, 9 aa, synthetic construct
  REGION 1..9: note = Filamin-A (1802-1810)
GEITGEVRM

SEQ ID NO: 6690 - protein, 9 aa, synthetic construct
  REGION 1..9: note = Coatomer subunit beta' (549-557)
GEIVTIAHL

SEQ ID NO: 6691 - protein, 10 aa, synthetic construct
  REGION 1..10: note = Proliferating cell nuclear antigen (173-182)
GELGNGNIKL

SEQ ID NO: 6692 - protein, 9 aa, synthetic construct
  REGION 1..9: note = E3 SUMO-protein ligase PIAS3 (130-138)
GELIRPTTL

SEQ ID NO: 6693 - protein, 9 aa, synthetic construct
  REGION 1..9: note = Prohibitin (137-145)
GELITQREL

SEQ ID NO: 6694 - protein, 10 aa, synthetic construct
  REGION 1..10: note = 40S ribosomal protein S21 (63-72)
GESDDSILRL

SEQ ID NO: 6695 - protein, 11 aa, synthetic construct
  REGION 1..11: note = Ubiquitin carboxyl-terminal hydrolase 22 (352-362)
GESHVSGTTTL

SEQ ID NO: 6696 - protein, 11 aa, synthetic construct
  REGION 1..11: note = Maspardin (165-175)
GQSELASRLTL

SEQ ID NO: 6697 - protein, 10 aa, synthetic construct
  REGION 1..10: note = RNA-binding protein EWS (382-391)
HEAQHGVTSL

SEQ ID NO: 6698 - protein, 9 aa, synthetic construct
  REGION 1..9: note = Kinesin-associated protein 3 (357-365)
HEDLLNITL

SEQ ID NO: 6699 - protein, 9 aa, synthetic construct
  REGION 1..9: note = Chromodomain-helicase-DNA-binding protein 6 (1642-1650)
HEDPGQATL

SEQ ID NO: 6700 - protein, 9 aa, synthetic construct
  REGION 1..9: note = V-type proton ATPase subunit D (113-121)
HEGTDSYEL

SEQ ID NO: 6701 - protein, 10 aa, synthetic construct
  REGION 1..10: note = Taperin (362-371)
HEIEVIGGYL

SEQ ID NO: 6702 - protein, 9 aa, synthetic construct
  REGION 1..9: note = Transcription elongation factor SPT6 (746-754)
HELDQGQQL

SEQ ID NO: 6703 - protein, 11 aa, synthetic construct
  REGION 1..11: note = Coronin-1C (313-323)
HEMDTSNGVLL

SEQ ID NO: 6704 - protein, 9 aa, synthetic construct
  REGION 1..9: note = Importin subunit alpha-4 (468-476)
HENEDIYKL

SEQ ID NO: 6705 - protein, 10 aa, synthetic construct
  REGION 1..10: note = Pre-mRNA-processing factor 19 (305-314)
HESAVTGLSL

SEQ ID NO: 6706 - protein, 9 aa, synthetic construct
  REGION 1..9: note = Single-stranded DNA-binding protein, mitochondrial (16-24)
HESETTTSL

SEQ ID NO: 6707 - protein, 9 aa, synthetic construct
  REGION 1..9: note = Vacuolar protein sorting-associated protein 33A (58-66)
HEVEKMFTL

SEQ ID NO: 6708 - protein, 9 aa, synthetic construct
  REGION 1..9: note = STAGA complex 65 subunit gamma (219-227)
HEVGIGSVL

SEQ ID NO: 6709 - protein, 9 aa, synthetic construct
  REGION 1..9: note = DNA replication licensing factor MCM4 (588-596)
HEVMEQQTL

SEQ ID NO: 6710 - protein, 9 aa, synthetic construct
  REGION 1..9: note = F-box only protein 38 (323-331)
HEVRIQPSL

SEQ ID NO: 6711 - protein, 10 aa, synthetic construct
  REGION 1..10: note = 3-hydroxy-3-methylglutaryl-coenzyme A reductase (619-628)
HEYFPEMQIL

SEQ ID NO: 6712 - protein, 9 aa, synthetic construct
  REGION 1..9: note = Protein C-ets-1 (189-197)
HPISSEELL

SEQ ID NO: 6713 - protein, 11 aa, synthetic construct
  REGION 1..11: note = DNA repair endonuclease XPF (748-758)
IEFDPSKPFSL

SEQ ID NO: 6714 - protein, 9 aa, synthetic construct
  REGION 1..9: note = Proliferating cell nuclear antigen (197-205)
IEMNEPVQL

SEQ ID NO: 6715 - protein, 10 aa, synthetic construct
  REGION 1..10: note = Nuclear poreoprotein p62 (366-375)
IENGEKITSL

SEQ ID NO: 6716 - protein, 10 aa, synthetic construct
  REGION 1..10: note = Melanoma-associated antigen F1 (112-121)
ILFPDIIARA

SEQ ID NO: 6717 - protein, 10 aa, synthetic construct
  REGION 1..10: note = Clathrin light chain A (227-236)
ISLKQAPLVH

SEQ ID NO: 6718 - protein, 9 aa, synthetic construct
  REGION 1..9: note = NAD(P)H dehydrogenase (quinone) 1 (143-151)
IWDETPLYF

SEQ ID NO: 6719 - protein, 8 aa, synthetic construct
  REGION 1..8: note = Guanine nucleotide-binding protein subunit beta-2-like 1 (106-113)
KDVLSVAF

SEQ ID NO: 6720 - protein, 11 aa, synthetic construct
  REGION 1..11: note = T-complex protein 1 subunit theta (367-377)
KEDGAISTIVL

SEQ ID NO: 6721 - protein, 9 aa, synthetic construct
  REGION 1..9: note = Ubiquitin carboxyl-terminal hydrolase 48 (790-798)
KEDSKLIAL

SEQ ID NO: 6722 - protein, 9 aa, synthetic construct
  REGION 1..9: note = Myosin-9 (1084-1092)
KEEELQAAL

SEQ ID NO: 6723 - protein, 10 aa, synthetic construct
  REGION 1..10: note = Plasminogen activator inhibitor 1 RNA-binding protein (8-17)
KEETQPPVAL

SEQ ID NO: 6724 - protein, 10 aa, synthetic construct
  REGION 1..10: note = Chitinase domain-containing protein 1 (269-278)
KEFEQLAPVL

SEQ ID NO: 6725 - protein, 10 aa, synthetic construct
  REGION 1..10: note = ATP-dependent RNA helicase DDX24 (116-125)
KEFEVKDPEL

SEQ ID NO: 6726 - protein, 11 aa, synthetic construct
  REGION 1..11: note = E3 ubiquitin-protein ligase listerin (1308-1318)
KEFFSQGIHSL

SEQ ID NO: 6727 - protein, 10 aa, synthetic construct
  REGION 1..10: note = Inhibitor of growth protein 4 (52-61)
KEFGDDKVQL

SEQ ID NO: 6728 - protein, 10 aa, synthetic construct
  REGION 1..10: note = Eukaryotic translation initiation factor 4 gamma 1 (1365-1374)
KEFLPEGQDI

SEQ ID NO: 6729 - protein, 11 aa, synthetic construct
  REGION 1..11: note = Serine-tRNA ligase, cytoplasmic (457-467)
KEFMPPGLQEL

SEQ ID NO: 6730 - protein, 12 aa, synthetic construct
  REGION 1..12: note = Heterogeneous nuclear ribonucleoprotein Q (66-77)
KEFNEDGALAVL

SEQ ID NO: 6731 - protein, 9 aa, synthetic construct
  REGION 1..9: note = Protein zer-1 homolog (579-587)
KEFPEKQEL

SEQ ID NO: 6732 - protein, 9 aa, synthetic construct
  REGION 1..9: note = Regulator of G-protein signaling 10 (61-69)
KEFSEENVL

SEQ ID NO: 6733 - protein, 12 aa, synthetic construct
  REGION 1..12: note = Apolipoprotein L2 (196-207)
KEFVGGNTPNVL

SEQ ID NO: 6734 - protein, 9 aa, synthetic construct
  REGION 1..9: note = Cyclin-dependent kinase 9 (56-64)
KEGFPITAL

SEQ ID NO: 6735 - protein, 11 aa, synthetic construct
  REGION 1..11: note = Vacuolar protein sorting-associated protein 33A (56-66)
KEHEVEKMFTL

SEQ ID NO: 6736 - protein, 12 aa, synthetic construct
  REGION 1..12: note = Serine/Arginine-related protein 53 (223-234)
KEIDPTSIPTAI

SEQ ID NO: 6737 - protein, 9 aa, synthetic construct
  REGION 1..9: note = Ran GTPase-activating protein 1 (43-51)
KEIEDFDSL

SEQ ID NO: 6738 - protein, 10 aa, synthetic construct
  REGION 1..10: note = RNA cytidine acetyltransferase (729-738)
KEIELPSGQL

SEQ ID NO: 6739 - protein, 9 aa, synthetic construct
  REGION 1..9: note = Transcription initiation factor IIB (272-280)
KEIGDIAGV

SEQ ID NO: 6740 - protein, 9 aa, synthetic construct
  REGION 1..9: note = Ras suppressor protein 1 (177-185)
KEIGELTQL

SEQ ID NO: 6741 - protein, 10 aa, synthetic construct
  REGION 1..10: note = V-type proton ATPase 116 kDa subunit a isoform 1 (109-118)
KEINTNQEAL

SEQ ID NO: 6742 - protein, 9 aa, synthetic construct
  REGION 1..9: note = Scavenger receptor class B member 1 (57-65)
KEIPIPFYL

SEQ ID NO: 6743 - protein, 10 aa, synthetic construct
  REGION 1..10: note = Centromere protein F (1675-1684)
KEIQELEQLL

SEQ ID NO: 6744 - protein, 10 aa, synthetic construct
  REGION 1..10: note = Spatacsin (1706-1715)
KEITQEMQTL

SEQ ID NO: 6745 - protein, 12 aa, synthetic construct
  REGION 1..12: note = Importin-11 (778-789)
KEITTEGQVQVL

SEQ ID NO: 6746 - protein, 10 aa, synthetic construct
  REGION 1..10: note = Eukaryotic translation initiation factor 3 subunit E (29-38)
KEIYNEKELL

SEQ ID NO: 6747 - protein, 10 aa, synthetic construct
  REGION 1..10: note = Double-stranded RNA-binding protein Staufen homolog 2 (288-297)
KEKEPDYVLL

SEQ ID NO: 6748 - protein, 10 aa, synthetic construct
  REGION 1..10: note = Double-stranded RNA-binding protein Staufen homolog 1 (258-267)
KEKEPEYTLL

SEQ ID NO: 6749 - protein, 9 aa, synthetic construct
  REGION 1..9: note = Protein transport protein Sec16A (1490-1498)
KEKPEEESL

SEQ ID NO: 6750 - protein, 10 aa, synthetic construct
  REGION 1..10: note = Heat shock protein HSP 90-alpha A2 (280-289)
KEKYIDQEEL

SEQ ID NO: 6751 - protein, 10 aa, synthetic construct
  REGION 1..10: note = Alpha-2-macroglobulin receptor-associated protein (272-281)
KELEAFREEL

SEQ ID NO: 6752 - protein, 10 aa, synthetic construct
  REGION 1..10: note = Ribosome-binding protein 1 (235-244)
KELESQVSGL

SEQ ID NO: 6753 - protein, 11 aa, synthetic construct
  REGION 1..11: note = Probable ATP-dependent RNA helicase DDX56 (208-218)
KELILHNPVTL

SEQ ID NO: 6754 - protein, 10 aa, synthetic construct
  REGION 1..10: note = CDK5 regulatory subunit-associated protein 2 (665-674)
KELYTDNQHL

SEQ ID NO: 6755 - protein, 9 aa, synthetic construct
  REGION 1..9: note = Aurora kinase B (57-65)
KEPVTPSAL

SEQ ID NO: 6756 - protein, 9 aa, synthetic construct
  REGION 1..9: note = CDK5 regulatory subunit-associated protein 2 (559-567)
KEQDIYTHL

SEQ ID NO: 6757 - protein, 9 aa, synthetic construct
  REGION 1..9: note = Plectin (2047-2055)
KEQELQQTL

SEQ ID NO: 6758 - protein, 10 aa, synthetic construct
  REGION 1..10: note = Nucleoprotein TPR (995-1004)
KESAEFQTQL

SEQ ID NO: 6759 - protein, 10 aa, synthetic construct
  REGION 1..10: note = Antizyme inhibitor 1 (203-212)
KESQVYVHAL

SEQ ID NO: 6760 - protein, 9 aa, synthetic construct
  REGION 1..9: note = Gamma-interferon-inducible protein 16 (299-307)
KETLKIDIL

SEQ ID NO: 6761 - protein, 9 aa, synthetic construct
  REGION 1..9: note = Periodic tryptophan protein 1 homolog (19-27)
KETPDKVEL

SEQ ID NO: 6762 - protein, 13 aa, synthetic construct
  REGION 1..13: note = Sequestosome-1 (324-336)
KEVDPSTGELQSL

SEQ ID NO: 6763 - protein, 9 aa, synthetic construct
  REGION 1..9: note = DNA replication licensing factor MCM6 (332-340)
KEWEKVFEM

SEQ ID NO: 6764 - protein, 11 aa, synthetic construct
  REGION 1..11: note = Lupus La protein (75-85)
KEWLEDKGQVL

SEQ ID NO: 6765 - protein, 9 aa, synthetic construct
  REGION 1..9: note = 40S ribosomal protein S2 (58-66)
KEWMPVTKL

SEQ ID NO: 6766 - protein, 9 aa, synthetic construct
  REGION 1..9: note = DNA-directed RNA polymerases I, II, and III subunit RPABC4 (50-58)
KRLVVFDAR

SEQ ID NO: 6767 - protein, 11 aa, synthetic construct
  REGION 1..11: note = Dual specificity protein kinase CLK3 (601-611)
LEFDPAQRITL

SEQ ID NO: 6768 - protein, 9 aa, synthetic construct
  REGION 1..9: note = Microtubule-associated protein RP/EB family member 2 (98-106)
LEHEYIHNF

SEQ ID NO: 6769 - protein, 9 aa, synthetic construct
  REGION 1..9: note = Mitochondrial import inner membrane translocase subunit TIM50 (324-332)
LEQEEQQRL

SEQ ID NO: 6770 - protein, 10 aa, synthetic construct
  REGION 1..10: note = Cyclin-dependent kinase 7 (5-14)
LEVIIKDNSL

SEQ ID NO: 6771 - protein, 11 aa, synthetic construct
  REGION 1..11: note = POTE ankyrin domain family member F (794-804)
LRVAPEEHPVL

SEQ ID NO: 6772 - protein, 10 aa, synthetic construct
  REGION 1..10: note = Eukaryotic translation initiation factor 4 gamma 1 (1290-1299)
MEIDIPHVWL

SEQ ID NO: 6773 - protein, 9 aa, synthetic construct
  REGION 1..9: note = MICOS complex subunit MIC60 (474-482)
MENEMRTQL

SEQ ID NO: 6774 - protein, 10 aa, synthetic construct
  REGION 1..10: note = Interleukin enhancer-binding factor 3 (561-570)
MEVEVDGQKF

SEQ ID NO: 6775 - protein, 9 aa, synthetic construct
  REGION 1..9: note = Pre-mRNA-processing-splicing factor 8 (1868-1876)
MLDPLEVHL

SEQ ID NO: 6776 - protein, 9 aa, synthetic construct
  REGION 1..9: note = Elongation factor 2 (673-681)
NEIKDSVVA

SEQ ID NO: 6777 - protein, 8 aa, synthetic construct
  REGION 1..8: note = Heterogeneous nuclear ribonucleoprotein K (38-45)
NTDEMVEL

SEQ ID NO: 6778 - protein, 10 aa, synthetic construct
  REGION 1..10: note = Poly(U)-binding-splicing factor PUF60 (318-327)
QEAVAGAAVL

SEQ ID NO: 6779 - protein, 11 aa, synthetic construct
  REGION 1..11: note = Tyrosine-protein kinase BAZ1B (891-901)
QEFLTDMKQVF

SEQ ID NO: 6780 - protein, 9 aa, synthetic construct
  REGION 1..9: note = Pumilio homolog 3 (495-503)
QEHAQEVVL

SEQ ID NO: 6781 - protein, 9 aa, synthetic construct
  REGION 1..9: note = Nuclear pore complex protein Nup205 (13-21)
QEIPEPLQL

SEQ ID NO: 6782 - protein, 9 aa, synthetic construct
  REGION 1..9: note = Fc receptor-like A (166-174)
QELFPAPIL

SEQ ID NO: 6783 - protein, 11 aa, synthetic construct
  REGION 1..11: note = 40S ribosomal protein S9 (27-37)
QELKLIGEYGL

SEQ ID NO: 6784 - protein, 12 aa, synthetic construct
  REGION 1..12: note = Heterogeneous nuclear ribonucleoprotein H (438-449)
QENSSDFQSNIA

SEQ ID NO: 6785 - protein, 11 aa, synthetic construct
  REGION 1..11: note = T-complex protein 1 subunit theta (95-105)
QEVGDGTNFVL

SEQ ID NO: 6786 - protein, 8 aa, synthetic construct
  REGION 1..8: note = Coatomer subunit epsilon (97-104)
RDSIVAEL

SEQ ID NO: 6787 - protein, 10 aa, synthetic construct
  REGION 1..10: note = Ribosome-binding protein 1 (360-369)
REAEETQSTL

SEQ ID NO: 6788 - protein, 11 aa, synthetic construct
  REGION 1..11: note = Nodal modulator 2 (274-284)
REDGSFSFYSL

SEQ ID NO: 6789 - protein, 9 aa, synthetic construct
  REGION 1..9: note = Guanine nucleotide-binding protein G(s) subunit alpha isoforms short (244-252)
REDNQTNRL

SEQ ID NO: 6790 - protein, 9 aa, synthetic construct
  REGION 1..9: note = Nucleolar complex protein 2 homolog (609-617)
REEGTPLTL

SEQ ID NO: 6791 - protein, 9 aa, synthetic construct
  REGION 1..9: note = DNA topoisomerase 1 (708-716)
REENKQIAL

SEQ ID NO: 6792 - protein, 9 aa, synthetic construct
  REGION 1..9: note = Eukaryotic initiation factor 4A-II (256-264)
REEWKLDTL

SEQ ID NO: 6793 - protein, 10 aa, synthetic construct
  REGION 1..10: note = Spermine synthase (251-260)
REFDYVINDL

SEQ ID NO: 6794 - protein, 10 aa, synthetic construct
  REGION 1..10: note = DNA mismatch repair protein Msh6 (1321-1330)
REFEKMNQSL

SEQ ID NO: 6795 - protein, 12 aa, synthetic construct
  REGION 1..12: note = Heterogeneous nuclear ribonucleoprotein R (69-80)
REFNEEGALSVL

SEQ ID NO: 6796 - protein, 9 aa, synthetic construct
  REGION 1..9: note = Inner centromere protein (47-55)
REFSKEPEL

SEQ ID NO: 6797 - protein, 9 aa, synthetic construct
  REGION 1..9: note = Eukaryotic translation initiation factor 3 subunit I (20-28)
REGDLLFTV

SEQ ID NO: 6798 - protein, 9 aa, synthetic construct
  REGION 1..9: note = ZW10 interactor (104-112)
REHVEAIKI

SEQ ID NO: 6799 - protein, 11 aa, synthetic construct
  REGION 1..11: note = ZW10 interactor (104-114)
REHVEAIKIGL

SEQ ID NO: 6800 - protein, 11 aa, synthetic construct
  REGION 1..11: note = Histone H3.3 (73-83)
REIAQDFKTDL

SEQ ID NO: 6801 - protein, 11 aa, synthetic construct
  REGION 1..11: note = Serine/threonine-protein phosphatase PP1-alpha catalytic subunit (21-31)
REIFLSQPILL

SEQ ID NO: 6802 - protein, 10 aa, synthetic construct
  REGION 1..10: note = Structural maintenance of chromosomes flexible hinge domain-containing protein 1 (393-402)
REIQDDMQTL

SEQ ID NO: 6803 - protein, 9 aa, synthetic construct
  REGION 1..9: note = DNA-dependent protein kinase catalytic subunit (2753-2761)
REKEIKSEL

SEQ ID NO: 6804 - protein, 9 aa, synthetic construct
  REGION 1..9: note = Actin-related protein 2 (125-133)
REKIVEVMF

SEQ ID NO: 6805 - protein, 9 aa, synthetic construct
  REGION 1..9: note = Aurora kinase A (151-159)
REKQSKFIL

SEQ ID NO: 6806 - protein, 10 aa, synthetic construct
  REGION 1..10: note = Myosin-9 (1110-1119)
RELESQISEL

SEQ ID NO: 6807 - protein, 10 aa, synthetic construct
  REGION 1..10: note = TRAF3-interacting JNK-activating modulator (73-82)
RELESQLHVL

SEQ ID NO: 6808 - protein, 11 aa, synthetic construct
  REGION 1..11: note = NADH dehydrogenase (ubiquinone) 1 alpha subcomplex subunit 13 (79-89)
RENLEEEAIIM

SEQ ID NO: 6809 - protein, 12 aa, synthetic construct
  REGION 1..12: note = T-complex protein 1 subunit delta (160-171)
RETLLNSATTSL

SEQ ID NO: 6810 - protein, 11 aa, synthetic construct
  REGION 1..11: note = Elongation factor 2 (80-90)
RETVSEESNVL

SEQ ID NO: 6811 - protein, 10 aa, synthetic construct
  REGION 1..10: note = Epsilon-sarcoglycan (213-222)
REVENPQNQL

SEQ ID NO: 6812 - protein, 9 aa, synthetic construct
  REGION 1..9: note = Protein disulfide-isomerase A6 (18-26)
REVIQSDSL

SEQ ID NO: 6813 - protein, 10 aa, synthetic construct
  REGION 1..10: note = Proteasome subunit beta type-4 (165-174)
REVLEKQPVL

SEQ ID NO: 6814 - protein, 9 aa, synthetic construct
  REGION 1..9: note = SWI/SNF complex subunit SMARCC2 (599-607)
REWTEQETL

SEQ ID NO: 6815 - protein, 10 aa, synthetic construct
  REGION 1..10: note = Transcription factor E2F7 (615-624)
REYEDGPLSL

SEQ ID NO: 6816 - protein, 11 aa, synthetic construct
  REGION 1..11: note = GDP-L-fucose synthase (38-48)
REYNEVEPIIL

SEQ ID NO: 6817 - protein, 11 aa, synthetic construct
  REGION 1..11: note = Vimentin (381-391)
REYQDLLNVKM

SEQ ID NO: 6818 - protein, 9 aa, synthetic construct
  REGION 1..9: note = Metastasis-associated protein MTA2 (188-196)
RQIDQFLVV

SEQ ID NO: 6819 - protein, 9 aa, synthetic construct
  REGION 1..9: note = Runt-related transcription factor 3 (264-272)
RSFPTLPTL

SEQ ID NO: 6820 - protein, 11 aa, synthetic construct
  REGION 1..11: note = HLA class I histocompatibility antigen, B-15 alpha chain (352-362)
SAQGSDVSLTA

SEQ ID NO: 6821 - protein, 9 aa, synthetic construct
  REGION 1..9: note = Asparagine synthetase (glutamine-hydrolyzing) (159-167)
SEAKGLVTL

SEQ ID NO: 6822 - protein, 9 aa, synthetic construct
  REGION 1..9: note = Chromodomain-helicase-DNA-binding protein 4 (1833-1841)
SEDPSHPSM

SEQ ID NO: 6823 - protein, 9 aa, synthetic construct
  REGION 1..9: note = SRA stem-loop-interacting RNA-binding protein, mitochondrial (69-77)
SEEGLRNAL

SEQ ID NO: 6824 - protein, 10 aa, synthetic construct
  REGION 1..10: note = Poly (ADP-ribose) polymerase 9 (292-301)
SEFILGKSEL

SEQ ID NO: 6825 - protein, 10 aa, synthetic construct
  REGION 1..10: note = Cold shock domain-containing protein E1 (183-192)
SEFKGDLETL

SEQ ID NO: 6826 - protein, 10 aa, synthetic construct
  REGION 1..10: note = Cold shock domain-containing protein E1 (519-528)
SEFSGDVDSL

SEQ ID NO: 6827 - protein, 9 aa, synthetic construct
  REGION 1..9: note = Zinc finger protein 451 (35-43)
SEGPLRPVL

SEQ ID NO: 6828 - protein, 9 aa, synthetic construct
  REGION 1..9: note = Protein SON (1526-1534)
SEHGINIDL

SEQ ID NO: 6829 - protein, 11 aa, synthetic construct
  REGION 1..11: note = Spectrin beta chain, non-erythrocytic 1 (1024-1034)
SEHPDQAQAIL

SEQ ID NO: 6830 - protein, 12 aa, synthetic construct
  REGION 1..12: note = Copper transport protein ATOX1 (44-55)
SEHSMDTLLATL

SEQ ID NO: 6831 - protein, 9 aa, synthetic construct
  REGION 1..9: note = Coatomer subunit zeta-1 (34-42)
SEIALLEGL

SEQ ID NO: 6832 - protein, 10 aa, synthetic construct
  REGION 1..10: note = Cyclin-dependent kinase 1 (208-217)
SEIDQLFRIF

SEQ ID NO: 6833 - protein, 9 aa, synthetic construct
  REGION 1..9: note = Rho guanine nucleotide exchange factor 18 (689-697)
SEIEGIQSL

SEQ ID NO: 6834 - protein, 10 aa, synthetic construct
  REGION 1..10: note = Neuroblast differentiation-associated protein AHNAK (845-854)
SEIKVPDVEL

SEQ ID NO: 6835 - protein, 10 aa, synthetic construct
  REGION 1..10: note = Eukaryotic translation initiation factor 4B (442-451)
SEKSLENETL

SEQ ID NO: 6836 - protein, 9 aa, synthetic construct
  REGION 1..9: note = 116 kDa U5 small nuclear ribonucleoprotein component (91-99)
SELIRNVTL

SEQ ID NO: 6837 - protein, 11 aa, synthetic construct
  REGION 1..11: note = E3 ubiquitin-protein ligase UBR5 (466-476)
SELQGERIVSL

SEQ ID NO: 6838 - protein, 9 aa, synthetic construct
  REGION 1..9: note = Death-associated protein kinase 3 (429-437)
SEMRFVQDL

SEQ ID NO: 6839 - protein, 9 aa, synthetic construct
  REGION 1..9: note = Leucine-rich repeat-containing protein 47 (315-323)
SENPVPLTV

SEQ ID NO: 6840 - protein, 9 aa, synthetic construct
  REGION 1..9: note = Protein SON (197-205)
SEPHILETL

SEQ ID NO: 6841 - protein, 9 aa, synthetic construct
  REGION 1..9: note = Programmed cell death protein 5 (88-96)
SEQGLIEIL

SEQ ID NO: 6842 - protein, 9 aa, synthetic construct
  REGION 1..9: note = DNA replication licensing factor MCM4 (142-150)
SEQSLGQKL

SEQ ID NO: 6843 - protein, 9 aa, synthetic construct
  REGION 1..9: note = Guanylate-binding protein 1 (360-368)
SEREAIEVF

SEQ ID NO: 6844 - protein, 9 aa, synthetic construct
  REGION 1..9: note = Signal peptidase complex catalytic subunit SEC11C (57-65)
SESPIVVVL

SEQ ID NO: 6845 - protein, 9 aa, synthetic construct
  REGION 1..9: note = Actin-related protein 2/3 complex subunit 1B (242-250)
SETLPLLAL

SEQ ID NO: 6846 - protein, 12 aa, synthetic construct
  REGION 1..12: note = Annexin A2 (296-307)
SEVDMLKIRSEF

SEQ ID NO: 6847 - protein, 9 aa, synthetic construct
  REGION 1..9: note = Proteasome maturation protein (124-132)
SEVMGEPHL

SEQ ID NO: 6848 - protein, 9 aa, synthetic construct
  REGION 1..9: note = AP-1 complex subunit beta-1 (347-355)
SQANIAQVL

SEQ ID NO: 6849 - protein, 9 aa, synthetic construct
  REGION 1..9: note = Rab GTPase-activating protein 1-like (162-170)
SQYPFPVTL

SEQ ID NO: 6850 - protein, 11 aa, synthetic construct
  REGION 1..11: note = Probable ATP-dependent RNA helicase DDX41 (118-128)
SVAEGRALMSV

SEQ ID NO: 6851 - protein, 9 aa, synthetic construct
  REGION 1..9: note = General vesicular transport factor p115 (18-26)
TEAETIQKL

SEQ ID NO: 6852 - protein, 9 aa, synthetic construct
  REGION 1..9: note = SH2 domain-containing protein 3C (769-777)
TEHGVEVVL

SEQ ID NO: 6853 - protein, 10 aa, synthetic construct
  REGION 1..10: note = Nucleolin (452-461)
TEIDGRSISL

SEQ ID NO: 6854 - protein, 9 aa, synthetic construct
  REGION 1..9: note = Adenosylhomocysteinase (244-252)
TEIDPINAL

SEQ ID NO: 6855 - protein, 10 aa, synthetic construct
  REGION 1..10: note = Polyadenylate-binding protein-interacting protein 1 (66-75)
TEIEQFAETL

SEQ ID NO: 6856 - protein, 9 aa, synthetic construct
  REGION 1..9: note = Suppressor of SWI4 1 homolog (72-80)
TEIGPRMTL

SEQ ID NO: 6857 - protein, 11 aa, synthetic construct
  REGION 1..11: note = Microtubule-associated protein 4 (428-438)
TEISSAEKVAL

SEQ ID NO: 6858 - protein, 8 aa, synthetic construct
  REGION 1..8: note = Histone H3.1 (59-66)
TELLIRKL

SEQ ID NO: 6859 - protein, 10 aa, synthetic construct
  REGION 1..10: note = Chromodomain-helicase-DNA-binding protein 4 (1265-1274)
TELQGMNEYL

SEQ ID NO: 6860 - protein, 11 aa, synthetic construct
  REGION 1..11: note = Transcription factor BTF3 (106-116)
TEMLPSILNQL

SEQ ID NO: 6861 - protein, 9 aa, synthetic construct
  REGION 1..9: note = Probable ATP-dependent RNA helicase DDX6 (6-14)
TENPVIMGL

SEQ ID NO: 6862 - protein, 9 aa, synthetic construct
  REGION 1..9: note = Poly(rC)-binding protein 1 (6-14)
TESGLNVTL

SEQ ID NO: 6863 - protein, 9 aa, synthetic construct
  REGION 1..9: note = Steroid hormone receptor ERR1 (88-96)
TETEPPVAL

SEQ ID NO: 6864 - protein, 8 aa, synthetic construct
  REGION 1..8: note = Elongation factor 1-alpha 1 (287-294)
TEVKSVEM

SEQ ID NO: 6865 - protein, 9 aa, synthetic construct
  REGION 1..9: note = Pinin (538-546)
TEVPVEPVL

SEQ ID NO: 6866 - protein, 9 aa, synthetic construct
  REGION 1..9: note = Cytoskeleton-associated protein 4 (55-63)
TEVRELVSL

SEQ ID NO: 6867 - protein, 9 aa, synthetic construct
  REGION 1..9: note = Asparagine synthetase (glutamine-hydrolyzing) (269-277)
TLLKQLKEA

SEQ ID NO: 6868 - protein, 11 aa, synthetic construct
  REGION 1..11: note = Integrin beta-7 (702-712)
VEDDARGTVVL

SEQ ID NO: 6869 - protein, 10 aa, synthetic construct
  REGION 1..10: note = Eukaryotic translation initiation factor 3 subunit A (253-262)
VEDIHGLFSL

SEQ ID NO: 6870 - protein, 11 aa, synthetic construct
  REGION 1..11: note = Serine/threonine-protein phosphatase 2A 65 kDa regulatory subunit A alpha isoform (436-446)
VEFFDEKLNSL

SEQ ID NO: 6871 - protein, 9 aa, synthetic construct
  REGION 1..9: note = F-box only protein 7 (135-143)
VEGQVPHSL

SEQ ID NO: 6872 - protein, 9 aa, synthetic construct
  REGION 1..9: note = GPN-loop GTPase 2 (169-177)
VELPHINLL

SEQ ID NO: 6873 - protein, 9 aa, synthetic construct
  REGION 1..9: note = Melanoma-associated antigen 12 (279-287)
VETSYVKVL

SEQ ID NO: 6874 - protein, 9 aa, synthetic construct
  REGION 1..9: note = Melanoma-associated antigen D2 (37-45)
VEVPETPKA

SEQ ID NO: 6875 - protein, 9 aa, synthetic construct
  REGION 1..9: note = Vigilin (656-664)
VEVSIPAKL

SEQ ID NO: 6876 - protein, 9 aa, synthetic construct
  REGION 1..9: note = Basic leucine zipper and W2 domain-containing protein 2 (305-313)
VEWNKKEEL

SEQ ID NO: 6877 - protein, 10 aa, synthetic construct
  REGION 1..10: note = Stomatin-like protein 3 (151-160)
VLGTQTLSQI

SEQ ID NO: 6878 - protein, 9 aa, synthetic construct
  REGION 1..9: note = Condensin complex subunit 1 (162-170)
WEEERQPIL

SEQ ID NO: 6879 - protein, 9 aa, synthetic construct
  REGION 1..9: note = Catenin beta-1 (66-74)
WEQGFSQSF

SEQ ID NO: 6880 - protein, 9 aa, synthetic construct
  REGION 1..9: note = Myosin light polypeptide 6 (141-149)
YEELVRMVL

SEQ ID NO: 6881 - protein, 10 aa, synthetic construct
  REGION 1..10: note = Nucleophosmin (67-76)
YEGSPIKVTL

SEQ ID NO: 6882 - protein, 9 aa, synthetic construct
  REGION 1..9: note = 60S ribosomal protein L6 (240-248)
YEITEQRKI

SEQ ID NO: 6883 - protein, 10 aa, synthetic construct
  REGION 1..10: note = Septin-11 (95-104)
YELQESNVRL

SEQ ID NO: 6884 - protein, 10 aa, synthetic construct
  REGION 1..10: note = Glutamine-dependent NAD(+) synthetase (58-67)
YESDTLLHSF

SEQ ID NO: 6885 - protein, 12 aa, synthetic construct
  REGION 1..12: note = Mitogen-activated protein kinase kinase kinase 5 (675-686)
YEYDENGDRVVL

SEQ ID NO: 6886 - protein, 9 aa, synthetic construct
  REGION 1..9: note = 60S ribosomal protein L7a (158-166)
AHDVDPIEL

SEQ ID NO: 6887 - protein, 10 aa, synthetic construct
  REGION 1..10: note = 40S ribosomal protein S29 (47-56)
AKDIGFIKLD

SEQ ID NO: 6888 - protein, 8 aa, synthetic construct
  REGION 1..8: note = Long-chain-fatty-acid-CoA ligase 4 (42-49)
FDHAVSKF

SEQ ID NO: 6889 - protein, 9 aa, synthetic construct
  REGION 1..9: note = Eukaryotic translation initiation factor 3 subunit L (478-486)
FLDLTEQEF

SEQ ID NO: 6890 - protein, 9 aa, synthetic construct
  REGION 1..9: note = Ubiquitin-like modifier-activating enzyme 1 (637-645)
FPNAIEHTL

SEQ ID NO: 6891 - protein, 9 aa, synthetic construct
  REGION 1..9: note = Bcl-2-associated transcription factor 1 (338-346)
FTDEESRVF

SEQ ID NO: 6892 - protein, 10 aa, synthetic construct
  REGION 1..10: note = Bcl-2-associated transcription factor 1 (338-347)
FTDEESRVFL

SEQ ID NO: 6893 - protein, 9 aa, synthetic construct
  REGION 1..9: note = Disco-interacting protein 2 homolog B (444-452)
FYDERIVVV

SEQ ID NO: 6894 - protein, 9 aa, synthetic construct
  REGION 1..9: note = WD repeat-containing protein 46 (188-196)
HFDLNLRQF

SEQ ID NO: 6895 - protein, 10 aa, synthetic construct
  REGION 1..10: note = HLA class I histocompatibility antigen, A-24 alpha chain (216-225)
HPISDHEATL

SEQ ID NO: 6896 - protein, 9 aa, synthetic construct
  REGION 1..9: note = Integrator complex subunit 2 (1006-1014)
IADPNIAKL

SEQ ID NO: 6897 - protein, 9 aa, synthetic construct
  REGION 1..9: note = Heterogeneous nuclear ribonucleoprotein M (188-196)
IPNEIIHAL

SEQ ID NO: 6898 - protein, 9 aa, synthetic construct
  REGION 1..9: note = UPF0428 protein CXorf56 (100-108)
IVDGAVVKF

SEQ ID NO: 6899 - protein, 9 aa, synthetic construct
  REGION 1..9: note = Long-chain-fatty-acid-CoA ligase 4 (41-49)
LFDHAVSKF

SEQ ID NO: 6900 - protein, 9 aa, synthetic construct
  REGION 1..9: note = Cleavage stimulation factor subunit 1 (370-378)
LPDERTISL

SEQ ID NO: 6901 - protein, 10 aa, synthetic construct
  REGION 1..10: note = Nucleolar transcription factor 1 (365-374)
LPEEEQQRVL

SEQ ID NO: 6902 - protein, 9 aa, synthetic construct
  REGION 1..9: note = Microtubule-associated protein 4 (308-316)
LPTEKEVAL

SEQ ID NO: 6903 - protein, 8 aa, synthetic construct
  REGION 1..8: note = Fructose-bisphosphate aldolase A (271-278)
LSDHHIYL

SEQ ID NO: 6904 - protein, 9 aa, synthetic construct
  REGION 1..9: note = MMS19 nucleotide excision repair protein homolog (636-644)
MPEKEPSVL

SEQ ID NO: 6905 - protein, 9 aa, synthetic construct
  REGION 1..9: note = AF4/FMR2 family member 4 (1053-1061)
MPSPVSPKL

SEQ ID NO: 6906 - protein, 9 aa, synthetic construct
  REGION 1..9: note = Ras-related C3 botulinum toxin substrate 1 (45-53)
MVDGKPVNL

SEQ ID NO: 6907 - protein, 9 aa, synthetic construct
  REGION 1..9: note = Bone morphogenetic protein receptor type-1B (507-515)
NPASRLTAL

SEQ ID NO: 6908 - protein, 9 aa, synthetic construct
  REGION 1..9: note = Multiple epidermal growth factor-like domains protein 8 (2530-2538)
PAPPPPPPP

SEQ ID NO: 6909 - protein, 10 aa, synthetic construct
  REGION 1..10: note = Keratin, type II cytoskeletal 1 (338-347)
SMDNNRSLDL

SEQ ID NO: 6910 - protein, 9 aa, synthetic construct
  REGION 1..9: note = Nuclear pore complex protein Nup155 (220-228)
STDNGRIFL

SEQ ID NO: 6911 - protein, 9 aa, synthetic construct
  REGION 1..9: note = Coatomer subunit epsilon (111-119)
SVDVTNTTF

SEQ ID NO: 6912 - protein, 9 aa, synthetic construct
  REGION 1..9: note = Fatty acid synthase (545-553)
TFDDIVHSF

SEQ ID NO: 6913 - protein, 9 aa, synthetic construct
  REGION 1..9: note = Tumor suppressor candidate 3 (165-173)
TFDLQRIGF

SEQ ID NO: 6914 - protein, 9 aa, synthetic construct
  REGION 1..9: note = Rho GTPase-activating protein 24 (436-444)
TYDNVHQQF

SEQ ID NO: 6915 - protein, 9 aa, synthetic construct
  REGION 1..9: note = ATP-dependent RNA helicase A (697-705)
VFDPVPVGV

SEQ ID NO: 6916 - protein, 10 aa, synthetic construct
  REGION 1..10: note = 10 kDa heat shock protein, mitochondrial (81-90)
VLDDKDYFLF

SEQ ID NO: 6917 - protein, 10 aa, synthetic construct
  REGION 1..10: note = Metastasis-associated protein MTA3 (135-144)
VYDPSLKTLL

SEQ ID NO: 6918 - protein, 8 aa, synthetic construct
  REGION 1..8: note = ADP-ribosylation factor GTPase-activating protein 3 (312-319)
YFDEPVEL

SEQ ID NO: 6919 - protein, 9 aa, synthetic construct
  REGION 1..9: note = Transcription factor HES-1 (155-163)
YPGQPHPAL

SEQ ID NO: 6920 - protein, 9 aa, synthetic construct
  REGION 1..9: note = Nuclear nucleic acid-binding protein C1D (10-18)
YPVEIHEYL

SEQ ID NO: 6921 - protein, 9 aa, synthetic construct
  REGION 1..9: note = Pecanex-like protein 1 (22-30)
YYDPHQATF

SEQ ID NO: 6922 - protein, 9 aa, synthetic construct
  REGION 1..9: note = ATP-binding cassette sub-family F member 3 (500-508)
YYDPKHVIF

SEQ ID NO: 6923 - protein, 10 aa, synthetic construct
  REGION 1..10: note = Melanoma antigen preferentially expressed in tumors (300-309)
ALYVDSLFFL

SEQ ID NO: 6924 - protein, 9 aa, synthetic construct
  REGION 1..9: note = Fatty acid synthase (986-994)
AQAEVYKEL

SEQ ID NO: 6925 - protein, 10 aa, synthetic construct
  REGION 1..10: note = 2',3'-cyclic-nucleotide 3'-phosphodiesterase (249-258)
AQQDVLKKSY

SEQ ID NO: 6926 - protein, 8 aa, synthetic construct
  REGION 1..8: note = Cytochrome c oxidase subunit 2 (156-163)
SQDVLHSW

SEQ ID NO: 6927 - protein, 9 aa, synthetic construct
  REGION 1..9: note = RNA exonuclease 4 (126-134)
ARVSIVNQY

SEQ ID NO: 6928 - protein, 10 aa, synthetic construct
  REGION 1..10: note = RNA-binding protein 14 (646-655)
ARYSGSYNDY

SEQ ID NO: 6929 - protein, 10 aa, synthetic construct
  REGION 1..10: note = Talin-1 (1272-1281)
GRFGQDFSTF

SEQ ID NO: 6930 - protein, 9 aa, synthetic construct
  REGION 1..9: note = YTH domain-containing family protein 2 (30-38)
GRVFIIKSY

SEQ ID NO: 6931 - protein, 9 aa, synthetic construct
  REGION 1..9: note = ATP-dependent RNA helicase DDX42 (228-236)
KRFGKAYNL

SEQ ID NO: 6932 - protein, 9 aa, synthetic construct
  REGION 1..9: note = Eukaryotic translation initiation factor 3 subunit E (73-81)
KRTTVVAQL

SEQ ID NO: 6933 - protein, 9 aa, synthetic construct
  REGION 1..9: note = Proteasome subunit beta type-5 (113-121)
RRAIYQATY

SEQ ID NO: 6934 - protein, 9 aa, synthetic construct
  REGION 1..9: note = DNA replication licensing factor MCM5 (602-610)
RRSSIPITV

SEQ ID NO: 6935 - protein, 13 aa, synthetic construct
  REGION 1..13: note = HLA class I histocompatibility antigen, B-15 alpha chain (193-205)
RRYLENGKETLQR

SEQ ID NO: 6936 - protein, 10 aa, synthetic construct
  REGION 1..10: note = Probable bifunctional methylenetetrahydrofolate dehydrogenase/cyclohydrolase 2 (246-255)
HRYTPKEQLK

SEQ ID NO: 6937 - protein, 9 aa, synthetic construct
  REGION 1..9: note = 60S ribosomal protein L7 (199-207)
KRFKEANNF

SEQ ID NO: 6938 - protein, 15 aa, synthetic construct
  REGION 1..15: note = Heat shock 70 kDa protein 1-like (171-185)
VLRIINEPTAAAIAY

SEQ ID NO: 6939 - protein, 9 aa, synthetic construct
  REGION 1..9: note = Polypyrimidine tract-binding protein 1 (169-177)
AAVDAGMAM

SEQ ID NO: 6940 - protein, 11 aa, synthetic construct
  REGION 1..11: note = HLA class I histocompatibility antigen, alpha chain E (137-147)
FAYDGKDYLTL

SEQ ID NO: 6941 - protein, 14 aa, synthetic construct
  REGION 1..14: note = HLA class I histocompatibility antigen, A-29 alpha chain (21-34)
FIAVGYVDDTQFVR

SEQ ID NO: 6942 - protein, 10 aa, synthetic construct
  REGION 1..10: note = Ubiquitin-like protein ISG15 (45-54)
LAVHPSGVAL

SEQ ID NO: 6943 - protein, 9 aa, synthetic construct
  REGION 1..9: note = N-acetyltransferase 8 (174-182)
ILDTGTIQL

SEQ ID NO: 6944 - protein, 9 aa, synthetic construct
  REGION 1..9: note = Protein prune homolog 2 (1910-1918)
ALFDGDPHL

SEQ ID NO: 6945 - protein, 9 aa, synthetic construct
  REGION 1..9: note = Phosphatidylinositol 4,5-bisphosphate 3-kinase catalytic subunit delta isoform (477-485)
EVAPHPVYY

SEQ ID NO: 6946 - protein, 9 aa, synthetic construct
  REGION 1..9: note = Chloride intracellular channel protein 1 (167-175)
FLDGNELTL

SEQ ID NO: 6947 - protein, 9 aa, synthetic construct
  REGION 1..9: note = Carbonic anhydrase 9 (254-262)
HLSTAFARV

SEQ ID NO: 6948 - protein, 9 aa, synthetic construct
  REGION 1..9: note = 40S ribosomal protein S16 (49-57)
KLLEPVLLL

SEQ ID NO: 6949 - protein, 9 aa, synthetic construct
  REGION 1..9: note = Glutathione peroxidase 1 (40-48)
LLIENVASL

SEQ ID NO: 6950 - protein, 9 aa, synthetic construct
  REGION 1..9: note = Proliferating cell nuclear antigen (228-236)
SMSADVPLV

SEQ ID NO: 6951 - protein, 13 aa, synthetic construct
  REGION 1..13: note = Dermokine (410-422)
AIIEGADASSLQK

SEQ ID NO: 6952 - protein, 11 aa, synthetic construct
  REGION 1..11: note = PRELI domain-containing protein 1, mitochondrial (142-152)
AVQEFGLARFK

SEQ ID NO: 6953 - protein, 9 aa, synthetic construct
  REGION 1..9: note = Putative WAS protein family homolog 3 (42-50)
KVSGDIFSR

SEQ ID NO: 6954 - protein, 13 aa, synthetic construct
  REGION 1..13: note = Mitochondrial import inner membrane translocase subunit Tim23 (156-168)
TVAAGTMTGMLYK

SEQ ID NO: 6955 - protein, 11 aa, synthetic construct
  REGION 1..11: note = Tryptophan-tRNA ligase, mitochondrial (162-172)
VLQAADILLYK

SEQ ID NO: 6956 - protein, 9 aa, synthetic construct
  REGION 1..9: note = Cytochrome c oxidase subunit 6A1, mitochondrial (29-37)
VSMLNVYLK

SEQ ID NO: 6957 - protein, 9 aa, synthetic construct
  REGION 1..9: note = 40S ribosomal protein S4, X isoform (171-179)
GRIGVITNR

SEQ ID NO: 6958 - protein, 17 aa, synthetic construct
  REGION 1..17: note = SLAM family member 6 (103-119)
DTGSYRAQISTKTSAKL

SEQ ID NO: 6959 - protein, 15 aa, synthetic construct
  REGION 1..15: note = Transferrin receptor protein 1 (680-694)
RVEYHFLSPYVSPKE

SEQ ID NO: 6960 - protein, 18 aa, synthetic construct
  REGION 1..18: note = Transferrin receptor protein 1 (680-697)
RVEYHFLSPYVSPKESPF

SEQ ID NO: 6961 - protein, 15 aa, synthetic construct
  REGION 1..15: note = HLA class I histocompatibility antigen, A-1 alpha chain (28-42)
DDTQFVRFDSDAASQ

SEQ ID NO: 6962 - protein, 16 aa, synthetic construct
  REGION 1..16: note = HLA class I histocompatibility antigen, A-2 alpha chain (28-43)
DDTQFVRFDSDAASQR

SEQ ID NO: 6963 - protein, 17 aa, synthetic construct
  REGION 1..17: note = HLA class I histocompatibility antigen, A-2 alpha chain (28-44)
DDTQFVRFDSDAASQRM

SEQ ID NO: 6964 - protein, 18 aa, synthetic construct
  REGION 1..18: note = HLA class I histocompatibility antigen, A-2 alpha chain (28-45)
DDTQFVRFDSDAASQRME

SEQ ID NO: 6965 - protein, 17 aa, synthetic construct
  REGION 1..17: note = HLA class I histocompatibility antigen, Cw-7 alpha chain (153-169)
DLRSWTAADTAAQITQR

SEQ ID NO: 6966 - protein, 13 aa, synthetic construct
  REGION 1..13: note = HLA class I histocompatibility antigen, alpha chain E (140-152)
DLRSWTAVDTAAQ

SEQ ID NO: 6967 - protein, 16 aa, synthetic construct
  REGION 1..16: note = HLA class I histocompatibility antigen, A-2 alpha chain (29-44)
DTQFVRFDSDAASQRM

SEQ ID NO: 6968 - protein, 18 aa, synthetic construct
  REGION 1..18: note = HLA class I histocompatibility antigen, Cw-7 alpha chain (152-169)
EDLRSWTAADTAAQITQR

SEQ ID NO: 6969 - protein, 18 aa, synthetic construct
  REGION 1..18: note = HLA class I histocompatibility antigen, B-15 alpha chain (152-169)
EDLSSWTAADTAAQITQR

SEQ ID NO: 6970 - protein, 12 aa, synthetic construct
  REGION 1..12: note = HLA class I histocompatibility antigen, A-2 alpha chain (32-43)
FVRFDSDAASQR

SEQ ID NO: 6971 - protein, 15 aa, synthetic construct
  REGION 1..15: note = Heat shock cognate 71 kDa protein (484-498)
GILNVSAVDKSTGKE

SEQ ID NO: 6972 - protein, 14 aa, synthetic construct
  REGION 1..14: note = HLA class I histocompatibility antigen, B-15 alpha chain (154-167)
LSSWTAADTAAQIT

SEQ ID NO: 6973 - protein, 16 aa, synthetic construct
  REGION 1..16: note = HLA class I histocompatibility antigen, B-15 alpha chain (154-169)
LSSWTAADTAAQITQR

SEQ ID NO: 6974 - protein, 18 aa, synthetic construct
  REGION 1..18: note = HLA class I histocompatibility antigen, Cw-7 alpha chain (151-168)
NEDLRSWTAADTAAQITQ

SEQ ID NO: 6975 - protein, 14 aa, synthetic construct
  REGION 1..14: note = HLA class I histocompatibility antigen, B-15 alpha chain (155-168)
SSWTAADTAAQITQ

SEQ ID NO: 6976 - protein, 14 aa, synthetic construct
  REGION 1..14: note = HLA class I histocompatibility antigen, B-15 alpha chain (55-68)
TQFVRFDSDAASPR

SEQ ID NO: 6977 - protein, 14 aa, synthetic construct
  REGION 1..14: note = HLA class I histocompatibility antigen, A-2 alpha chain (30-43)
TQFVRFDSDAASQR

SEQ ID NO: 6978 - protein, 16 aa, synthetic construct
  REGION 1..16: note = HLA class I histocompatibility antigen, A-1 alpha chain (27-42)
VDDTQFVRFDSDAASQ

SEQ ID NO: 6979 - protein, 18 aa, synthetic construct
  REGION 1..18: note = HLA class I histocompatibility antigen, A-2 alpha chain (27-44)
VDDTQFVRFDSDAASQRM

SEQ ID NO: 6980 - protein, 9 aa, synthetic construct
  REGION 1..9: note = Ankyrin repeat domain-containing protein 17 (744-752)
APRVPVQAL

SEQ ID NO: 6981 - protein, 9 aa, synthetic construct
  REGION 1..9: note = Probable ubiquitin carboxyl-terminal hydrolase FAF-Y (2050-2058)
ARFLFTTGF

SEQ ID NO: 6982 - protein, 14 aa, synthetic construct
  REGION 1..14: note = Transferrin receptor protein 1 (15-28)
GEPLSYTRFSLARQ

SEQ ID NO: 6983 - protein, 16 aa, synthetic construct
  REGION 1..16: note = Transferrin receptor protein 1 (15-30)
GEPLSYTRFSLARQVD

SEQ ID NO: 6984 - protein, 17 aa, synthetic construct
  REGION 1..17: note = Transferrin receptor protein 1 (14-30)
GGEPLSYTRFSLARQVD

SEQ ID NO: 6985 - protein, 18 aa, synthetic construct
  REGION 1..18: note = Transferrin receptor protein 1 (14-31)
GGEPLSYTRFSLARQVDG

SEQ ID NO: 6986 - protein, 9 aa, synthetic construct
  REGION 1..9: note = Annexin A3 (33-41)
GIGTDEKML

SEQ ID NO: 6987 - protein, 9 aa, synthetic construct
  REGION 1..9: note = Microtubule-associated protein 1B (225-233)
GLSEFTEYL

SEQ ID NO: 6988 - protein, 9 aa, synthetic construct
  REGION 1..9: note = SCAN domain-containing protein 1 (121-129)
GPREAFRQL

SEQ ID NO: 6989 - protein, 9 aa, synthetic construct
  REGION 1..9: note = Splicing factor 3B subunit 3 (430-438)
GPRSSLRVL

SEQ ID NO: 6990 - protein, 9 aa, synthetic construct
  REGION 1..9: note = Glyoxylate reductase/hydroxypyruvate reductase (162-170)
GRIGQAIAR

SEQ ID NO: 6991 - protein, 10 aa, synthetic construct
  REGION 1..10: note = 40S ribosomal protein S11 (70-79)
GRILSGVVTK

SEQ ID NO: 6992 - protein, 9 aa, synthetic construct
  REGION 1..9: note = Eukaryotic initiation factor 4A-II (368-376)
GRKGVAINF

SEQ ID NO: 6993 - protein, 9 aa, synthetic construct
  REGION 1..9: note = 40S ribosomal protein S4, Y isoform 1 (190-198)
GRVGVITNR

SEQ ID NO: 6994 - protein, 9 aa, synthetic construct
  REGION 1..9: note = Splicing factor 3B subunit 3 (957-965)
GRVLIGVGK

SEQ ID NO: 6995 - protein, 10 aa, synthetic construct
  REGION 1..10: note = Nucleolar RNA helicase 2 (403-412)
IPQKQREITL

SEQ ID NO: 6996 - protein, 9 aa, synthetic construct
  REGION 1..9: note = Probable ATP-dependent RNA helicase DDX4 (355-363)
ITASRFKEL

SEQ ID NO: 6997 - protein, 9 aa, synthetic construct
  REGION 1..9: note = EH domain-containing protein 2 (480-488)
KLPNSVLGR

SEQ ID NO: 6998 - protein, 9 aa, synthetic construct
  REGION 1..9: note = Speriolin-like protein (246-254)
KLRELTQRY

SEQ ID NO: 6999 - protein, 9 aa, synthetic construct
  REGION 1..9: note = Ubiquitin carboxyl-terminal hydrolase 45 (297-305)
LLHYLLDAV

SEQ ID NO: 7000 - protein, 9 aa, synthetic construct
  REGION 1..9: note = 40S ribosomal protein S4, X isoform (238-246)
LPRGKGIRL

SEQ ID NO: 7001 - protein, 10 aa, synthetic construct
  REGION 1..10: note = DNA replication licensing factor MCM6 (215-224)
LPRGSIPRSL

SEQ ID NO: 7002 - protein, 11 aa, synthetic construct
  REGION 1..11: note = 2',3'-cyclic-nucleotide 3'-phosphodiesterase (303-313)
LPRGSRAHITL

SEQ ID NO: 7003 - protein, 9 aa, synthetic construct
  REGION 1..9: note = 39S ribosomal protein L20, mitochondrial (89-97)
NLVKCQVEL

SEQ ID NO: 7004 - protein, 11 aa, synthetic construct
  REGION 1..11: note = Trinucleotide repeat-containing gene 18 protein (554-564)
NRKALAKGLGL

SEQ ID NO: 7005 - protein, 11 aa, synthetic construct
  REGION 1..11: note = Transmembrane emp24 domain-containing protein 4 (23-33)
NYPEIAAKDKL

SEQ ID NO: 7006 - protein, 9 aa, synthetic construct
  REGION 1..9: note = Lymphocyte antigen 75 (791-799)
QIPKGRTPK

SEQ ID NO: 7007 - protein, 9 aa, synthetic construct
  REGION 1..9: note = Ribonucleoside-diphosphate reductase large subunit (742-750)
RPAANPIQF

SEQ ID NO: 7008 - protein, 9 aa, synthetic construct
  REGION 1..9: note = Aldo-keto reductase family 1 member C1 (91-99)
RPELVRPAL

SEQ ID NO: 7009 - protein, 10 aa, synthetic construct
  REGION 1..10: note = Protein phosphatase 1 regulatory subunit 35 (234-243)
RPRPSEDTFL

SEQ ID NO: 7010 - protein, 9 aa, synthetic construct
  REGION 1..9: note = Frizzled-2 (2-10)
RPRSALPRL

SEQ ID NO: 7011 - protein, 9 aa, synthetic construct
  REGION 1..9: note = HLA class I histocompatibility antigen, alpha chain E (25-33)
SLKYFHTSV

SEQ ID NO: 7012 - protein, 9 aa, synthetic construct
  REGION 1..9: note = Histone H2B type 2-F (79-87)
SRLAHYNKR

SEQ ID NO: 7013 - protein, 9 aa, synthetic construct
  REGION 1..9: note = EH domain-containing protein 2 (484-492)
SVLGRIWKL

SEQ ID NO: 7014 - protein, 11 aa, synthetic construct
  REGION 1..11: note = Heterogeneous nuclear ribonucleoprotein K (78-88)
VPDSSGPERIL

SEQ ID NO: 7015 - protein, 9 aa, synthetic construct
  REGION 1..9: note = Vimentin (216-224)
ARLDLERKV

SEQ ID NO: 7016 - protein, 9 aa, synthetic construct
  REGION 1..9: note = E3 ubiquitin-protein ligase HECTD1 (174-182)
ARLGVISKV

SEQ ID NO: 7017 - protein, 10 aa, synthetic construct
  REGION 1..10: note = V-type proton ATPase subunit S1 (217-226)
ARLSLTYERL

SEQ ID NO: 7018 - protein, 9 aa, synthetic construct
  REGION 1..9: note = Peroxisomal membrane protein PEX16 (38-46)
GRFADSHEL

SEQ ID NO: 7019 - protein, 10 aa, synthetic construct
  REGION 1..10: note = 40S ribosomal protein S21 (44-53)
GRFNGQFKTY

SEQ ID NO: 7020 - protein, 9 aa, synthetic construct
  REGION 1..9: note = Pro-interleukin-16 (881-889)
GRFSGLLGR

SEQ ID NO: 7021 - protein, 9 aa, synthetic construct
  REGION 1..9: note = 60S ribosomal protein L13a (17-25)
GRLAAIVAK

SEQ ID NO: 7022 - protein, 9 aa, synthetic construct
  REGION 1..9: note = Leucine-tRNA ligase, cytoplasmic (57-65)
GRLHLGHTF

SEQ ID NO: 7023 - protein, 9 aa, synthetic construct
  REGION 1..9: note = Amidophosphoribosyltransferase (354-362)
GRTFIQPNM

SEQ ID NO: 7024 - protein, 9 aa, synthetic construct
  REGION 1..9: note = Ubiquitin-60S ribosomal protein L40 (58-66)
GRTLSDYNI

SEQ ID NO: 7025 - protein, 10 aa, synthetic construct
  REGION 1..10: note = Lamin-B receptor (14-23)
GRWPGSSLYY

SEQ ID NO: 7026 - protein, 9 aa, synthetic construct
  REGION 1..9: note = 40S ribosomal protein S25 (103-111)
HRAQVIYTR

SEQ ID NO: 7027 - protein, 9 aa, synthetic construct
  REGION 1..9: note = Transcription activator BRG1 (1255-1263)
HRIGQQNEV

SEQ ID NO: 7028 - protein, 9 aa, synthetic construct
  REGION 1..9: note = H/ACA ribonucleoprotein complex subunit 3 (44-52)
HRITIKKRF

SEQ ID NO: 7029 - protein, 10 aa, synthetic construct
  REGION 1..10: note = Heterogeneous nuclear ribonucleoprotein H (274-283)
HRYGDGGSTF

SEQ ID NO: 7030 - protein, 9 aa, synthetic construct
  REGION 1..9: note = Histone H2A type 1-A (88-96)
IRNDEELNK

SEQ ID NO: 7031 - protein, 9 aa, synthetic construct
  REGION 1..9: note = Hsc70-interacting protein (153-161)
KRASVFVKL

SEQ ID NO: 7032 - protein, 9 aa, synthetic construct
  REGION 1..9: note = Signal peptidase complex subunit 2 (164-172)
KRFDDKYTL

SEQ ID NO: 7033 - protein, 9 aa, synthetic construct
  REGION 1..9: note = YEATS domain-containing protein 2 (299-307)
KRIDIIHNL

SEQ ID NO: 7034 - protein, 9 aa, synthetic construct
  REGION 1..9: note = Protein arginine N-methyltransferase 1 (266-274)
KRNDYVHAL

SEQ ID NO: 7035 - protein, 9 aa, synthetic construct
  REGION 1..9: note = Cyclic AMP-responsive element-binding protein 3-like protein 2 (270-278)
KRTLIAEGY

SEQ ID NO: 7036 - protein, 10 aa, synthetic construct
  REGION 1..10: note = DNA-dependent protein kinase catalytic subunit (263-272)
KRYAVPSAGL

SEQ ID NO: 7037 - protein, 9 aa, synthetic construct
  REGION 1..9: note = Small nuclear ribonucleoprotein Sm D2 (110-118)
LRNPLIAGK

SEQ ID NO: 7038 - protein, 10 aa, synthetic construct
  REGION 1..10: note = Solute carrier family 25 member 46 (98-107)
NRFAGFGIGL

SEQ ID NO: 7039 - protein, 9 aa, synthetic construct
  REGION 1..9: note = General transcription factor II-I (491-499)
NRIKFVIKR

SEQ ID NO: 7040 - protein, 9 aa, synthetic construct
  REGION 1..9: note = L-lactate dehydrogenase A chain (111-119)
QRNVNIFKF

SEQ ID NO: 7041 - protein, 9 aa, synthetic construct
  REGION 1..9: note = Annexin A2 (67-75)
QRQDIAFAY

SEQ ID NO: 7042 - protein, 12 aa, synthetic construct
  REGION 1..12: note = 40S ribosomal protein S30 (114-125)
RRFVNVVPTFGK

SEQ ID NO: 7043 - protein, 9 aa, synthetic construct
  REGION 1..9: note = 2'-5'-oligoadenylate synthase 1 (94-102)
RRGEFIQEI

SEQ ID NO: 7044 - protein, 10 aa, synthetic construct
  REGION 1..10: note = NADH dehydrogenase (ubiquinone) 1 alpha subcomplex subunit 1 (52-61)
RRISGVDRYY

SEQ ID NO: 7045 - protein, 10 aa, synthetic construct
  REGION 1..10: note = Protein disulfide-isomerase A3 (4-13)
RRLALFPGVA

SEQ ID NO: 7046 - protein, 9 aa, synthetic construct
  REGION 1..9: note = Reticulocalbin-1 (8-16)
RRLGLALGL

SEQ ID NO: 7047 - protein, 9 aa, synthetic construct
  REGION 1..9: note = S-adenosylmethionine synthase isoform type-1 (312-320)
RRVLVQVSY

SEQ ID NO: 7048 - protein, 11 aa, synthetic construct
  REGION 1..11: note = Probable ATP-dependent RNA helicase DDX5 (24-34)
SRAGPLSGKKF

SEQ ID NO: 7049 - protein, 9 aa, synthetic construct
  REGION 1..9: note = Membralin (120-128)
SRAPVFLQF

SEQ ID NO: 7050 - protein, 10 aa, synthetic construct
  REGION 1..10: note = Dynamin-like 120 kDa protein, mitochondrial (499-508)
SRIQQIIEGK

SEQ ID NO: 7051 - protein, 9 aa, synthetic construct
  REGION 1..9: note = Growth hormone-inducible transmembrane protein (146-154)
SRTPVLMNF

SEQ ID NO: 7052 - protein, 10 aa, synthetic construct
  REGION 1..10: note = Clathrin heavy chain 1 (1341-1350)
SRVNIPKVLR

SEQ ID NO: 7053 - protein, 9 aa, synthetic construct
  REGION 1..9: note = Heat shock-related 70 kDa protein 2 (344-352)
TRIPKIQKL

SEQ ID NO: 7054 - protein, 9 aa, synthetic construct
  REGION 1..9: note = Polyadenylate-binding protein 1 (289-297)
TRYQGVNLY

SEQ ID NO: 7055 - protein, 11 aa, synthetic construct
  REGION 1..11: note = Histone H2B type 2-F (99-109)
VRLLLPGELAK

SEQ ID NO: 7056 - protein, 10 aa, synthetic construct
  REGION 1..10: note = Eukaryotic translation initiation factor 3 subunit B (340-349)
VRWSPKGTYL

SEQ ID NO: 7057 - protein, 9 aa, synthetic construct
  REGION 1..9: note = Ras-specific guanine nucleotide-releasing factor 1 (983-991)
AAANIIRTL

SEQ ID NO: 7058 - protein, 9 aa, synthetic construct
  REGION 1..9: note = Cytoskeleton-associated protein 4 (73-81)
AADTERLAL

SEQ ID NO: 7059 - protein, 14 aa, synthetic construct
  REGION 1..14: note = Voltage-dependent anion-selective channel protein 2 (222-235)
AAKYQLDPTASISA

SEQ ID NO: 7060 - protein, 9 aa, synthetic construct
  REGION 1..9: note = RNA polymerase II subunit A C-terminal domain phosphatase (41-49)
AAVRIGSVL

SEQ ID NO: 7061 - protein, 12 aa, synthetic construct
  REGION 1..12: note = Protein unc-13 homolog D (1011-1022)
ADDLEGEAFLPL

SEQ ID NO: 7062 - protein, 13 aa, synthetic construct
  REGION 1..13: note = Protein unc-13 homolog D (1011-1023)
ADDLEGEAFLPLR

SEQ ID NO: 7063 - protein, 14 aa, synthetic construct
  REGION 1..14: note = Protein unc-13 homolog D (1011-1024)
ADDLEGEAFLPLRE

SEQ ID NO: 7064 - protein, 15 aa, synthetic construct
  REGION 1..15: note = SLAM family member 6 (47-61)
ADDNVSFRWEALGNT

SEQ ID NO: 7065 - protein, 16 aa, synthetic construct
  REGION 1..16: note = SLAM family member 6 (47-62)
ADDNVSFRWEALGNTL

SEQ ID NO: 7066 - protein, 12 aa, synthetic construct
  REGION 1..12: note = Golgi apparatus protein 1 (724-735)
ADIFVDPVLHTA

SEQ ID NO: 7067 - protein, 14 aa, synthetic construct
  REGION 1..14: note = Golgi apparatus protein 1 (1059-1072)
ADIFVDPVLHTACA

SEQ ID NO: 7068 - protein, 12 aa, synthetic construct
  REGION 1..12: note = Low affinity immunoglobulin epsilon Fc receptor (40-51)
ADLSSFKSQELN

SEQ ID NO: 7069 - protein, 14 aa, synthetic construct
  REGION 1..14: note = Low affinity immunoglobulin epsilon Fc receptor (40-53)
ADLSSFKSQELNER

SEQ ID NO: 7070 - protein, 15 aa, synthetic construct
  REGION 1..15: note = Low affinity immunoglobulin epsilon Fc receptor (40-54)
ADLSSFKSQELNERN

SEQ ID NO: 7071 - protein, 16 aa, synthetic construct
  REGION 1..16: note = Low affinity immunoglobulin epsilon Fc receptor (40-55)
ADLSSFKSQELNERNE

SEQ ID NO: 7072 - protein, 17 aa, synthetic construct
  REGION 1..17: note = Low affinity immunoglobulin epsilon Fc receptor (40-56)
ADLSSFKSQELNERNEA

SEQ ID NO: 7073 - protein, 16 aa, synthetic construct
  REGION 1..16: note = T-complex protein 1 subunit beta (163-178)
ADSYLDEGFLLDKKIG

SEQ ID NO: 7074 - protein, 9 aa, synthetic construct
  REGION 1..9: note = Eukaryotic translation initiation factor 6 (130-138)
ADVLKVEVF

SEQ ID NO: 7075 - protein, 9 aa, synthetic construct
  REGION 1..9: note = Proline-rich protein 12 (390-398)
AEEAGGTRL

SEQ ID NO: 7076 - protein, 9 aa, synthetic construct
  REGION 1..9: note = Probable ribonuclease ZC3H12D (154-162)
AELERQAVL

SEQ ID NO: 7077 - protein, 10 aa, synthetic construct
  REGION 1..10: note = A-kinase anchor protein 2 (688-697)
AELRSTASLL

SEQ ID NO: 7078 - protein, 16 aa, synthetic construct
  REGION 1..16: note = Ragulator complex protein LAMTOR1 (36-51)
AEPNYHSLPSARTDEQ

SEQ ID NO: 7079 - protein, 19 aa, synthetic construct
  REGION 1..19: note = Low affinity immunoglobulin epsilon Fc receptor (19-37)
AEQQRLKSQDLELSWNLNG

SEQ ID NO: 7080 - protein, 10 aa, synthetic construct
  REGION 1..10: note = Ribonucleoside-diphosphate reductase subunit M2 B (284-293)
AETTDNVFTL

SEQ ID NO: 7081 - protein, 9 aa, synthetic construct
  REGION 1..9: note = Zinc finger protein 638 (1263-1271)
AEVEKNETV

SEQ ID NO: 7082 - protein, 15 aa, synthetic construct
  REGION 1..15: note = Peroxisomal multifunctional enzyme type 2 (19-33)
AGLGRAYALAFAERG

SEQ ID NO: 7083 - protein, 15 aa, synthetic construct
  REGION 1..15: note = B- and T-lymphocyte attenuator (191-205)
AGREINLVDAHLKSE

SEQ ID NO: 7084 - protein, 17 aa, synthetic construct
  REGION 1..17: note = B- and T-lymphocyte attenuator (191-207)
AGREINLVDAHLKSEQT

SEQ ID NO: 7085 - protein, 12 aa, synthetic construct
  REGION 1..12: note = CD44 antigen (8-19)
AGVFHVEKNGRY

SEQ ID NO: 7086 - protein, 10 aa, synthetic construct
  REGION 1..10: note = Cordon-bleu protein-like 1 (1088-1097)
AIRSGEAAAK

SEQ ID NO: 7087 - protein, 12 aa, synthetic construct
  REGION 1..12: note = C-C chemokine receptor type 7 (94-105)
AIVQAVSAHRHR

SEQ ID NO: 7088 - protein, 14 aa, synthetic construct
  REGION 1..14: note = Ragulator complex protein LAMTOR3 (21-34)
AIVVSDRDGVPVIK

SEQ ID NO: 7089 - protein, 15 aa, synthetic construct
  REGION 1..15: note = IgG receptor FcRn large subunit p51 (131-145)
AKFALNGEEFMNFDL

SEQ ID NO: 7090 - protein, 16 aa, synthetic construct
  REGION 1..16: note = IgG receptor FcRn large subunit p51 (131-146)
AKFALNGEEFMNFDLK

SEQ ID NO: 7091 - protein, 14 aa, synthetic construct
  REGION 1..14: note = Glutathione peroxidase 1 (84-97)
ALMTDPKLITWSPV

SEQ ID NO: 7092 - protein, 13 aa, synthetic construct
  REGION 1..13: note = IgG receptor FcRn large subunit p51 (134-146)
ALNGEEFMNFDLK

SEQ ID NO: 7093 - protein, 9 aa, synthetic construct
  REGION 1..9: note = Serine/threonine-protein kinase LATS1 (729-737)
ALYATKTLR

SEQ ID NO: 7094 - protein, 14 aa, synthetic construct
  REGION 1..14: note = E3 ubiquitin-protein ligase CHIP (43-56)
ANLQRAYSLAKEQR

SEQ ID NO: 7095 - protein, 11 aa, synthetic construct
  REGION 1..11: note = A-kinase anchor protein 2 (298-308)
APASSHERASM

SEQ ID NO: 7096 - protein, 10 aa, synthetic construct
  REGION 1..10: note = Interferon regulatory factor 9 (199-208)
APFQGDQRSL

SEQ ID NO: 7097 - protein, 10 aa, synthetic construct
  REGION 1..10: note = T-cell activation Rho GTPase-activating protein (268-277)
APGSVLPRAL

SEQ ID NO: 7098 - protein, 15 aa, synthetic construct
  REGION 1..15: note = Platelet endothelial cell adhesion molecule (159-173)
APIHFTIEKLELNEK

SEQ ID NO: 7099 - protein, 14 aa, synthetic construct
  REGION 1..14: note = Alpha-1B-glycoprotein (205-218)
APLEGARFALVRED

SEQ ID NO: 7100 - protein, 9 aa, synthetic construct
  REGION 1..9: note = TBC1 domain family member 22A (113-121)
APLQRSQSL

SEQ ID NO: 7101 - protein, 9 aa, synthetic construct
  REGION 1..9: note = Cordon-bleu protein-like 1 (891-899)
APNPAPKEL

SEQ ID NO: 7102 - protein, 8 aa, synthetic construct
  REGION 1..8: note = Negative elongation factor E (257-264)
APRKGNTL

SEQ ID NO: 7103 - protein, 9 aa, synthetic construct
  REGION 1..9: note = Cyclin-dependent kinase inhibitor 1C (105-113)
APRPVAVAV

SEQ ID NO: 7104 - protein, 9 aa, synthetic construct
  REGION 1..9: note = Endoplasmic reticulum resident protein 44 (391-399)
APSEYRYTL

SEQ ID NO: 7105 - protein, 10 aa, synthetic construct
  REGION 1..10: note = Endoplasmic reticulum resident protein 44 (391-400)
APSEYRYTLL

SEQ ID NO: 7106 - protein, 16 aa, synthetic construct
  REGION 1..16: note = Lipolysis-stimulated lipoprotein receptor (216-231)
APSTYAHLSPAKTPPP

SEQ ID NO: 7107 - protein, 17 aa, synthetic construct
  REGION 1..17: note = Lipolysis-stimulated lipoprotein receptor (216-232)
APSTYAHLSPAKTPPPP

SEQ ID NO: 7108 - protein, 18 aa, synthetic construct
  REGION 1..18: note = Lipolysis-stimulated lipoprotein receptor (216-233)
APSTYAHLSPAKTPPPPA

SEQ ID NO: 7109 - protein, 13 aa, synthetic construct
  REGION 1..13: note = C-C chemokine receptor type 7 (190-202)
ARNFERNKAIKVI

SEQ ID NO: 7110 - protein, 15 aa, synthetic construct
  REGION 1..15: note = C-C chemokine receptor type 7 (190-204)
ARNFERNKAIKVIIA

SEQ ID NO: 7111 - protein, 16 aa, synthetic construct
  REGION 1..16: note = Glucose-6-phosphate isomerase (181-196)
ASKTFTTQETITNAET

SEQ ID NO: 7112 - protein, 15 aa, synthetic construct
  REGION 1..15: note = Cystatin-C (63-77)
ASNDMYHSRALQVVR

SEQ ID NO: 7113 - protein, 16 aa, synthetic construct
  REGION 1..16: note = Cystatin-C (63-78)
ASNDMYHSRALQVVRA

SEQ ID NO: 7114 - protein, 9 aa, synthetic construct
  REGION 1..9: note = A-kinase anchor protein 2 (107-115)
ASRQAPPHI

SEQ ID NO: 7115 - protein, 10 aa, synthetic construct
  REGION 1..10: note = Exostosin-2 (691-700)
ASVFGTMPLK

SEQ ID NO: 7116 - protein, 10 aa, synthetic construct
  REGION 1..10: note = Fatty acyl-CoA reductase 2 (227-236)
ATFEKIPFER

SEQ ID NO: 7117 - protein, 15 aa, synthetic construct
  REGION 1..15: note = Ras-related protein Rab-11A (49-63)
ATRSIQVDGKTIKAQ

SEQ ID NO: 7118 - protein, 16 aa, synthetic construct
  REGION 1..16: note = Ras-related protein Rab-11A (49-64)
ATRSIQVDGKTIKAQI

SEQ ID NO: 7119 - protein, 9 aa, synthetic construct
  REGION 1..9: note = Cadherin EGF LAG seven-pass G-type receptor 1 (1076-1084)
ATSAPLVSR

SEQ ID NO: 7120 - protein, 11 aa, synthetic construct
  REGION 1..11: note = Tumor protein p53-inducible protein 11 (90-100)
AVFDGAQVTSK

SEQ ID NO: 7121 - protein, 9 aa, synthetic construct
  REGION 1..9: note = Short-chain dehydrogenase/reductase 3 (9-17)
AVGLVLPAK

SEQ ID NO: 7122 - protein, 10 aa, synthetic construct
  REGION 1..10: note = A-kinase anchor protein 2 (230-239)
AVKKNPGIAA

SEQ ID NO: 7123 - protein, 17 aa, synthetic construct
  REGION 1..17: note = SLAM family member 6 (46-62)
DADDNVSFRWEALGNTL

SEQ ID NO: 7124 - protein, 14 aa, synthetic construct
  REGION 1..14: note = Peroxisomal multifunctional enzyme type 2 (88-101)
DAFGRIDVVVNNAG

SEQ ID NO: 7125 - protein, 15 aa, synthetic construct
  REGION 1..15: note = Lymphocyte antigen 9 (125-139)
DAGSYKAQINQRNFE

SEQ ID NO: 7126 - protein, 17 aa, synthetic construct
  REGION 1..17: note = Lymphocyte antigen 9 (125-141)
DAGSYKAQINQRNFEVT

SEQ ID NO: 7127 - protein, 8 aa, synthetic construct
  REGION 1..8: note = Cell division cycle-associated 7-like protein (200-207)
DALLKRTM

SEQ ID NO: 7128 - protein, 9 aa, synthetic construct
  REGION 1..9: note = Probable ribosome biogenesis protein RLP24 (91-99)
DAMKRVEEI

SEQ ID NO: 7129 - protein, 13 aa, synthetic construct
  REGION 1..13: note = Platelet endothelial cell adhesion molecule (416-428)
DAQFEVIKGQTIE

SEQ ID NO: 7130 - protein, 15 aa, synthetic construct
  REGION 1..15: note = Platelet endothelial cell adhesion molecule (416-430)
DAQFEVIKGQTIEVR

SEQ ID NO: 7131 - protein, 12 aa, synthetic construct
  REGION 1..12: note = Ceruloplasmin (715-726)
DDNIKTYSDHPE

SEQ ID NO: 7132 - protein, 13 aa, synthetic construct
  REGION 1..13: note = Ceruloplasmin (715-727)
DDNIKTYSDHPEK

SEQ ID NO: 7133 - protein, 14 aa, synthetic construct
  REGION 1..14: note = SLAM family member 6 (48-61)
DDNVSFRWEALGNT

SEQ ID NO: 7134 - protein, 15 aa, synthetic construct
  REGION 1..15: note = SLAM family member 6 (48-62)
DDNVSFRWEALGNTL

SEQ ID NO: 7135 - protein, 17 aa, synthetic construct
  REGION 1..17: note = Ceramide glucosyltransferase (91-107)
DDPAIDVCKKLLGKYPN

SEQ ID NO: 7136 - protein, 9 aa, synthetic construct
  REGION 1..9: note = Dystrophin (386-394)
DEHLLIQHY

SEQ ID NO: 7137 - protein, 9 aa, synthetic construct
  REGION 1..9: note = E3 ubiquitin-protein ligase Mdm2 (68-76)
DEKQQHIVY

SEQ ID NO: 7138 - protein, 9 aa, synthetic construct
  REGION 1..9: note = Dynamin-binding protein (858-866)
DELPKFHQY

SEQ ID NO: 7139 - protein, 9 aa, synthetic construct
  REGION 1..9: note = Transmembrane emp24 domain-containing protein 4 (48-56)
DETMVIGNY

SEQ ID NO: 7140 - protein, 9 aa, synthetic construct
  REGION 1..9: note = Uncharacterized protein CXorf21 (47-55)
DETQVRSLY

SEQ ID NO: 7141 - protein, 8 aa, synthetic construct
  REGION 1..8: note = TBC1 domain family member 22A (223-230)
DEVHQDTY

SEQ ID NO: 7142 - protein, 9 aa, synthetic construct
  REGION 1..9: note = E3 ubiquitin-protein ligase Mdm2 (273-281)
DEVYQVTVY

SEQ ID NO: 7143 - protein, 14 aa, synthetic construct
  REGION 1..14: note = MyoD family inhibitor domain-containing protein (67-80)
DGELIRTQPQRLPQ

SEQ ID NO: 7144 - protein, 8 aa, synthetic construct
  REGION 1..8: note = Obscurin-like protein 1 (299-306)
DGGFVLKV

SEQ ID NO: 7145 - protein, 18 aa, synthetic construct
  REGION 1..18: note = Beta-1,4-galactosyltransferase 1 (110-127)
DGLNSLTYQVLDVQRYPL

SEQ ID NO: 7146 - protein, 13 aa, synthetic construct
  REGION 1..13: note = Plasma membrane calcium-transporting ATPase 1 (257-269)
DGSYRIFSKGASE

SEQ ID NO: 7147 - protein, 8 aa, synthetic construct
  REGION 1..8: note = T-cell activation Rho GTPase-activating protein (29-36)
DIKEHPLL

SEQ ID NO: 7148 - protein, 9 aa, synthetic construct
  REGION 1..9: note = Probable ribosome biogenesis protein RLP24 (123-131)
DIKEVKQNI

SEQ ID NO: 7149 - protein, 16 aa, synthetic construct
  REGION 1..16: note = Vesicle-associated membrane protein 3 (27-42)
DIMRVNVDKVLERDQK

SEQ ID NO: 7150 - protein, 17 aa, synthetic construct
  REGION 1..17: note = Vesicle-associated membrane protein 3 (27-43)
DIMRVNVDKVLERDQKL

SEQ ID NO: 7151 - protein, 13 aa, synthetic construct
  REGION 1..13: note = Endoplasmin (536-548)
DKIYFMAGSSRKE

SEQ ID NO: 7152 - protein, 16 aa, synthetic construct
  REGION 1..16: note = Ceramide glucosyltransferase (43-58)
DKQPYSKLPGVSLLKP

SEQ ID NO: 7153 - protein, 17 aa, synthetic construct
  REGION 1..17: note = Ceramide glucosyltransferase (43-59)
DKQPYSKLPGVSLLKPL

SEQ ID NO: 7154 - protein, 9 aa, synthetic construct
  REGION 1..9: note = Poly (ADP-ribose) polymerase 3 (217-225)
DLDVKKMPL

SEQ ID NO: 7155 - protein, 15 aa, synthetic construct
  REGION 1..15: note = Perilipin-3 (369-383)
DLSSSILAQSRERVA

SEQ ID NO: 7156 - protein, 9 aa, synthetic construct
  REGION 1..9: note = Cytoskeleton-associated protein 4 (188-196)
DMKAKVASL

SEQ ID NO: 7157 - protein, 16 aa, synthetic construct
  REGION 1..16: note = Phosphoinositide-3-kinase-interacting protein 1 (28-43)
DNGHLYREDQTSPAPG

SEQ ID NO: 7158 - protein, 18 aa, synthetic construct
  REGION 1..18: note = Phosphoinositide-3-kinase-interacting protein 1 (28-45)
DNGHLYREDQTSPAPGLR

SEQ ID NO: 7159 - protein, 14 aa, synthetic construct
  REGION 1..14: note = Protein CDV3 homolog (139-152)
DNQYAVLENQKSSH

SEQ ID NO: 7160 - protein, 13 aa, synthetic construct
  REGION 1..13: note = SLAM family member 6 (49-61)
DNVSFRWEALGNT

SEQ ID NO: 7161 - protein, 14 aa, synthetic construct
  REGION 1..14: note = SLAM family member 6 (49-62)
DNVSFRWEALGNTL

SEQ ID NO: 7162 - protein, 15 aa, synthetic construct
  REGION 1..15: note = SLAM family member 6 (49-63)
DNVSFRWEALGNTLS

SEQ ID NO: 7163 - protein, 15 aa, synthetic construct
  REGION 1..15: note = Golgi apparatus protein 1 (492-506)
DPGADYRIDRALNEA

SEQ ID NO: 7164 - protein, 17 aa, synthetic construct
  REGION 1..17: note = Peroxiredoxin-1 (107-123)
DPKRTIAQDYGVLKADE

SEQ ID NO: 7165 - protein, 18 aa, synthetic construct
  REGION 1..18: note = Peroxiredoxin-1 (107-124)
DPKRTIAQDYGVLKADEG

SEQ ID NO: 7166 - protein, 9 aa, synthetic construct
  REGION 1..9: note = Methyltransferase-like protein 7A (98-106)
DPNPNFEKF

SEQ ID NO: 7167 - protein, 15 aa, synthetic construct
  REGION 1..15: note = Glucose-6-phosphate isomerase (276-290)
DQHFRTTPLEKNAPV

SEQ ID NO: 7168 - protein, 9 aa, synthetic construct
  REGION 1..9: note = Perilipin-2 (38-46)
DQYPYLKSV

SEQ ID NO: 7169 - protein, 9 aa, synthetic construct
  REGION 1..9: note = T-cell activation Rho GTPase-activating protein (165-173)
DSAGPQDAR

SEQ ID NO: 7170 - protein, 14 aa, synthetic construct
  REGION 1..14: note = Ceruloplasmin (187-200)
DSAVFFEQGTTRIG

SEQ ID NO: 7171 - protein, 13 aa, synthetic construct
  REGION 1..13: note = T-complex protein 1 subunit beta (164-176)
DSYLDEGFLLDKK

SEQ ID NO: 7172 - protein, 15 aa, synthetic construct
  REGION 1..15: note = T-complex protein 1 subunit beta (164-178)
DSYLDEGFLLDKKIG

SEQ ID NO: 7173 - protein, 16 aa, synthetic construct
  REGION 1..16: note = SLAM family member 6 (103-118)
DTGSYRAQISTKTSAK

SEQ ID NO: 7174 - protein, 13 aa, synthetic construct
  REGION 1..13: note = SLAM family member 6 (193-205)
DTITIYSTINHSK

SEQ ID NO: 7175 - protein, 9 aa, synthetic construct
  REGION 1..9: note = Interferon regulatory factor 9 (104-112)
DVAEPYKVY

SEQ ID NO: 7176 - protein, 15 aa, synthetic construct
  REGION 1..15: note = HLA class II histocompatibility antigen, DO beta chain (69-83)
DVGMFVALTKLGQPD

SEQ ID NO: 7177 - protein, 20 aa, synthetic construct
  REGION 1..20: note = Endoplasmin (783-802)
DVGTDEEEETAKESTAEKDE

SEQ ID NO: 7178 - protein, 10 aa, synthetic construct
  REGION 1..10: note = Dynamin-binding protein (46-55)
DVTGQFPSSF

SEQ ID NO: 7179 - protein, 16 aa, synthetic construct
  REGION 1..16: note = Testican-2 (66-81)
EDDYIKSWEDNQQGDE

SEQ ID NO: 7180 - protein, 9 aa, synthetic construct
  REGION 1..9: note = Elongator complex protein 3 (321-329)
EDPDQDILI

SEQ ID NO: 7181 - protein, 17 aa, synthetic construct
  REGION 1..17: note = SLAM family member 6 (102-118)
EDTGSYRAQISTKTSAK

SEQ ID NO: 7182 - protein, 15 aa, synthetic construct
  REGION 1..15: note = Receptor-type tyrosine-protein phosphatase alpha (384-398)
EEFKKLTSIKIQNDK

SEQ ID NO: 7183 - protein, 9 aa, synthetic construct
  REGION 1..9: note = ATP-binding cassette sub-family A member 6 (1600-1608)
EEIDTTMRW

SEQ ID NO: 7184 - protein, 17 aa, synthetic construct
  REGION 1..17: note = 14-3-3 protein beta/alpha (41-57)
EERNLLSVAYKNVVGAR

SEQ ID NO: 7185 - protein, 14 aa, synthetic construct
  REGION 1..14: note = Ras GTPase-activating-like protein IQGAP1 (61-74)
EEVITLIRSNQQLE

SEQ ID NO: 7186 - protein, 15 aa, synthetic construct
  REGION 1..15: note = Ras GTPase-activating-like protein IQGAP1 (61-75)
EEVITLIRSNQQLEN

SEQ ID NO: 7187 - protein, 13 aa, synthetic construct
  REGION 1..13: note = Glycosyltransferase 8 domain-containing protein 1 (272-284)
EGLYSRTLAGSIT

SEQ ID NO: 7188 - protein, 16 aa, synthetic construct
  REGION 1..16: note = Glycosyltransferase 8 domain-containing protein 1 (272-287)
EGLYSRTLAGSITTPP

SEQ ID NO: 7189 - protein, 13 aa, synthetic construct
  REGION 1..13: note = Serine incorporator 3 (399-411)
EGVQYSYSLFHLM

SEQ ID NO: 7190 - protein, 14 aa, synthetic construct
  REGION 1..14: note = Serine incorporator 3 (399-412)
EGVQYSYSLFHLML

SEQ ID NO: 7191 - protein, 15 aa, synthetic construct
  REGION 1..15: note = Cystatin-C (47-61)
EGVRRALDFAVGEYN

SEQ ID NO: 7192 - protein, 16 aa, synthetic construct
  REGION 1..16: note = Cystatin-C (47-62)
EGVRRALDFAVGEYNK

SEQ ID NO: 7193 - protein, 9 aa, synthetic construct
  REGION 1..9: note = Lysine-specific demethylase 2B (554-562)
EHADDDPSL

SEQ ID NO: 7194 - protein, 9 aa, synthetic construct
  REGION 1..9: note = Dynamin-binding protein (916-924)
EHSRVLQQL

SEQ ID NO: 7195 - protein, 9 aa, synthetic construct
  REGION 1..9: note = Endoplasmic reticulum resident protein 44 (277-285)
EIFQNEVAR

SEQ ID NO: 7196 - protein, 15 aa, synthetic construct
  REGION 1..15: note = Calsyntenin-1 (203-217)
EIITPDVPFTVDKDG

SEQ ID NO: 7197 - protein, 16 aa, synthetic construct
  REGION 1..16: note = Perilipin-3 (64-79)
EKGVRTLTAAAVSGAQ

SEQ ID NO: 7198 - protein, 17 aa, synthetic construct
  REGION 1..17: note = Perilipin-3 (64-80)
EKGVRTLTAAAVSGAQP

SEQ ID NO: 7199 - protein, 18 aa, synthetic construct
  REGION 1..18: note = Perilipin-3 (64-81)
EKGVRTLTAAAVSGAQPI

SEQ ID NO: 7200 - protein, 13 aa, synthetic construct
  REGION 1..13: note = Glycosyltransferase 8 domain-containing protein 1 (347-359)
EKWYIPDPTGKFN

SEQ ID NO: 7201 - protein, 16 aa, synthetic construct
  REGION 1..16: note = Testican-2 (316-331)
ELERIQIQEAAKKKPG

SEQ ID NO: 7202 - protein, 14 aa, synthetic construct
  REGION 1..14: note = ATP synthase subunit alpha, mitochondrial (295-308)
ELFYKGIRPAINVG

SEQ ID NO: 7203 - protein, 13 aa, synthetic construct
  REGION 1..13: note = Alpha-1B-glycoprotein (176-188)
ELILSDETLPAPE

SEQ ID NO: 7204 - protein, 9 aa, synthetic construct
  REGION 1..9: note = NACHT, LRR and PYD domains-containing protein 2 (1026-1034)
ELNKLLEEI

SEQ ID NO: 7205 - protein, 9 aa, synthetic construct
  REGION 1..9: note = Baculoviral IAP repeat-containing protein 5 (95-103)
ELTLGEFLK

SEQ ID NO: 7206 - protein, 15 aa, synthetic construct
  REGION 1..15: note = SLAM family member 6 (191-205)
ENDTITIYSTINHSK

SEQ ID NO: 7207 - protein, 20 aa, synthetic construct
  REGION 1..20: note = SLAM family member 6 (191-210)
ENDTITIYSTINHSKESKPT

SEQ ID NO: 7208 - protein, 15 aa, synthetic construct
  REGION 1..15: note = Alpha-mannosidase 2 (64-78)
ENNEIISNIRDSVIN

SEQ ID NO: 7209 - protein, 8 aa, synthetic construct
  REGION 1..8: note = Proline-rich protein 12 (830-837)
ENVNKKDY

SEQ ID NO: 7210 - protein, 15 aa, synthetic construct
  REGION 1..15: note = Low affinity immunoglobulin epsilon Fc receptor (20-34)
EQQRLKSQDLELSWN

SEQ ID NO: 7211 - protein, 9 aa, synthetic construct
  REGION 1..9: note = RNA polymerase II subunit A C-terminal domain phosphatase (86-94)
ERAGVVREL

SEQ ID NO: 7212 - protein, 13 aa, synthetic construct
  REGION 1..13: note = Testican-2 (318-330)
ERIQIQEAAKKKP

SEQ ID NO: 7213 - protein, 14 aa, synthetic construct
  REGION 1..14: note = Testican-2 (318-331)
ERIQIQEAAKKKPG

SEQ ID NO: 7214 - protein, 15 aa, synthetic construct
  REGION 1..15: note = Testican-2 (318-332)
ERIQIQEAAKKKPGI

SEQ ID NO: 7215 - protein, 16 aa, synthetic construct
  REGION 1..16: note = 14-3-3 protein beta/alpha (42-57)
ERNLLSVAYKNVVGAR

SEQ ID NO: 7216 - protein, 15 aa, synthetic construct
  REGION 1..15: note = Platelet endothelial cell adhesion molecule (92-106)
ESYFIPEVRIYDSGT

SEQ ID NO: 7217 - protein, 17 aa, synthetic construct
  REGION 1..17: note = DnaJ homolog subfamily C member 5 (180-196)
ETTQLTADSHPSYHTDG

SEQ ID NO: 7218 - protein, 9 aa, synthetic construct
  REGION 1..9: note = DNA dC-dU-editing enzyme APOBEC-3D (299-307)
EVAEFLARH

SEQ ID NO: 7219 - protein, 9 aa, synthetic construct
  REGION 1..9: note = Zinc finger protein 638 (1173-1181)
EVKEEIPLV

SEQ ID NO: 7220 - protein, 16 aa, synthetic construct
  REGION 1..16: note = Phosphoinositide-3-kinase-interacting protein 1 (127-142)
EVQVFAPANALPARSE

SEQ ID NO: 7221 - protein, 15 aa, synthetic construct
  REGION 1..15: note = Endoplasmin (359-373)
EVTFKSILFVPTSAP

SEQ ID NO: 7222 - protein, 12 aa, synthetic construct
  REGION 1..12: note = Fas apoptotic inhibitory molecule 3 (253-264)
EYVSLYHQPAAM

SEQ ID NO: 7223 - protein, 14 aa, synthetic construct
  REGION 1..14: note = CD44 antigen (7-20)
FAGVFHVEKNGRYS

SEQ ID NO: 7224 - protein, 14 aa, synthetic construct
  REGION 1..14: note = HLA class II histocompatibility antigen, DM alpha chain (67-80)
FDFSQNTRVPRLPE

SEQ ID NO: 7225 - protein, 23 aa, synthetic construct
  REGION 1..23: note = Heterogeneous nuclear ribonucleoprotein A1-like 2 (110-132)
FGNYNNQSSNFGPMKGGNFGGRS

SEQ ID NO: 7226 - protein, 23 aa, synthetic construct
  REGION 1..23: note = Heterogeneous nuclear ribonucleoprotein A1-like 2 (120-142)
FGPMKGGNFGGRSSGPYGGGGQY

SEQ ID NO: 7227 - protein, 9 aa, synthetic construct
  REGION 1..9: note = T-cell activation Rho GTPase-activating protein (545-553)
FQYAKESYI

SEQ ID NO: 7228 - protein, 9 aa, synthetic construct
  REGION 1..9: note = Transcription regulator protein BACH2 (345-353)
FSITKSVEL

SEQ ID NO: 7229 - protein, 9 aa, synthetic construct
  REGION 1..9: note = Poly (ADP-ribose) polymerase 3 (264-272)
FYTVIPHNF

SEQ ID NO: 7230 - protein, 10 aa, synthetic construct
  REGION 1..10: note = RNA polymerase II subunit A C-terminal domain phosphatase (40-49)
GAAVRIGSVL

SEQ ID NO: 7231 - protein, 14 aa, synthetic construct
  REGION 1..14: note = Protein unc-13 homolog D (1010-1023)
GADDLEGEAFLPLR

SEQ ID NO: 7232 - protein, 14 aa, synthetic construct
  REGION 1..14: note = Glycosyltransferase 8 domain-containing protein 1 (79-92)
GAIAAINSIQHNTR

SEQ ID NO: 7233 - protein, 12 aa, synthetic construct
  REGION 1..12: note = HLA class II histocompatibility antigen, DM alpha chain (89-100)
GDAPAILFDKEF

SEQ ID NO: 7234 - protein, 16 aa, synthetic construct
  REGION 1..16: note = Ceruloplasmin (102-117)
GDKVYVHLKNLASRPY

SEQ ID NO: 7235 - protein, 17 aa, synthetic construct
  REGION 1..17: note = Ceruloplasmin (102-118)
GDKVYVHLKNLASRPYT

SEQ ID NO: 7236 - protein, 9 aa, synthetic construct
  REGION 1..9: note = Zinc finger protein 107 (751-759)
GDYGRAFNL

SEQ ID NO: 7237 - protein, 9 aa, synthetic construct
  REGION 1..9: note = Cell division cycle-associated 7-like protein (377-385)
GEDVRSALL

SEQ ID NO: 7238 - protein, 9 aa, synthetic construct
  REGION 1..9: note = A-kinase anchor protein 2 (435-443)
GEFTSARAV

SEQ ID NO: 7239 - protein, 9 aa, synthetic construct
  REGION 1..9: note = E3 ubiquitin-protein ligase Mdm2 (339-347)
GEISEKAKL

SEQ ID NO: 7240 - protein, 13 aa, synthetic construct
  REGION 1..13: note = MyoD family inhibitor domain-containing protein (68-80)
GELIRTQPQRLPQ

SEQ ID NO: 7241 - protein, 17 aa, synthetic construct
  REGION 1..17: note = Transferrin receptor protein 1 (15-31)
GEPLSYTRFSLARQVDG

SEQ ID NO: 7242 - protein, 18 aa, synthetic construct
  REGION 1..18: note = Heterogeneous nuclear ribonucleoprotein A3 (172-189)
GGGYGSGGGSGGYGSRRF

SEQ ID NO: 7243 - protein, 12 aa, synthetic construct
  REGION 1..12: note = Heterogeneous nuclear ribonucleoprotein A3 (159-170)
GGSFGGRSSGSP

SEQ ID NO: 7244 - protein, 9 aa, synthetic construct
  REGION 1..9: note = Probable ATP-dependent RNA helicase DDX46 (366-374)
GIAKTGSGK

SEQ ID NO: 7245 - protein, 12 aa, synthetic construct
  REGION 1..12: note = Kynureninase (432-443)
GIRVAPVPLYNS

SEQ ID NO: 7246 - protein, 14 aa, synthetic construct
  REGION 1..14: note = Kynureninase (432-445)
GIRVAPVPLYNSFH

SEQ ID NO: 7247 - protein, 13 aa, synthetic construct
  REGION 1..13: note = Peroxiredoxin-1 (129-141)
GLFIIDDKGILRQ

SEQ ID NO: 7248 - protein, 15 aa, synthetic construct
  REGION 1..15: note = Peroxiredoxin-1 (129-143)
GLFIIDDKGILRQIT

SEQ ID NO: 7249 - protein, 13 aa, synthetic construct
  REGION 1..13: note = Peroxisomal multifunctional enzyme type 2 (20-32)
GLGRAYALAFAER

SEQ ID NO: 7250 - protein, 14 aa, synthetic construct
  REGION 1..14: note = Peroxisomal multifunctional enzyme type 2 (20-33)
GLGRAYALAFAERG

SEQ ID NO: 7251 - protein, 15 aa, synthetic construct
  REGION 1..15: note = Ragulator complex protein LAMTOR3 (18-32)
GLHAIVVSDRDGVPV

SEQ ID NO: 7252 - protein, 17 aa, synthetic construct
  REGION 1..17: note = Ragulator complex protein LAMTOR3 (18-34)
GLHAIVVSDRDGVPVIK

SEQ ID NO: 7253 - protein, 14 aa, synthetic construct
  REGION 1..14: note = Interleukin-4 receptor subunit alpha (192-205)
GNPAYRSFSNSLSQ

SEQ ID NO: 7254 - protein, 17 aa, synthetic construct
  REGION 1..17: note = Polypeptide N-acetylgalactosaminyltransferase 1 (404-420)
GNQVFSYTANKEIRTDD

SEQ ID NO: 7255 - protein, 12 aa, synthetic construct
  REGION 1..12: note = Fibromodulin (4-15)
GNRINEFSISSF

SEQ ID NO: 7256 - protein, 15 aa, synthetic construct
  REGION 1..15: note = Pericentriolar material 1 protein (1456-1470)
GNTVIHLDQALARMR

SEQ ID NO: 7257 - protein, 14 aa, synthetic construct
  REGION 1..14: note = CD44 antigen (141-154)
GPITITIVNRDGTR

SEQ ID NO: 7258 - protein, 9 aa, synthetic construct
  REGION 1..9: note = Probable ribosome biogenesis protein RLP24 (11-19)
GPIYPGHGM

SEQ ID NO: 7259 - protein, 15 aa, synthetic construct
  REGION 1..15: note = Cation-independent mannose-6-phosphate receptor (972-986)
GPLKFLHQDIDSGQG

SEQ ID NO: 7260 - protein, 17 aa, synthetic construct
  REGION 1..17: note = Cation-independent mannose-6-phosphate receptor (972-988)
GPLKFLHQDIDSGQGIR

SEQ ID NO: 7261 - protein, 15 aa, synthetic construct
  REGION 1..15: note = Heterogeneous nuclear ribonucleoprotein A1-like 2 (121-135)
GPMKGGNFGGRSSGP

SEQ ID NO: 7262 - protein, 13 aa, synthetic construct
  REGION 1..13: note = Protein CDV3 homolog (83-95)
GPPEIYSDTQFPS

SEQ ID NO: 7263 - protein, 15 aa, synthetic construct
  REGION 1..15: note = Protein CDV3 homolog (83-97)
GPPEIYSDTQFPSLQ

SEQ ID NO: 7264 - protein, 16 aa, synthetic construct
  REGION 1..16: note = Interleukin-4 receptor subunit alpha (295-310)
GPPGEAGYKAFSSLLA

SEQ ID NO: 7265 - protein, 18 aa, synthetic construct
  REGION 1..18: note = Interleukin-4 receptor subunit alpha (295-312)
GPPGEAGYKAFSSLLASS

SEQ ID NO: 7266 - protein, 19 aa, synthetic construct
  REGION 1..19: note = Interleukin-4 receptor subunit alpha (295-313)
GPPGEAGYKAFSSLLASSA

SEQ ID NO: 7267 - protein, 23 aa, synthetic construct
  REGION 1..23: note = Interleukin-4 receptor subunit alpha (295-317)
GPPGEAGYKAFSSLLASSAVSPE

SEQ ID NO: 7268 - protein, 24 aa, synthetic construct
  REGION 1..24: note = Interleukin-4 receptor subunit alpha (295-318)
GPPGEAGYKAFSSLLASSAVSPEK

SEQ ID NO: 7269 - protein, 10 aa, synthetic construct
  REGION 1..10: note = Ubiquitin-like protein 7 (263-272)
GPRPITQSEL

SEQ ID NO: 7270 - protein, 13 aa, synthetic construct
  REGION 1..13: note = Heterogeneous nuclear ribonucleoprotein A1-like 2 (134-146)
GPYGGGGQYFAKP

SEQ ID NO: 7271 - protein, 16 aa, synthetic construct
  REGION 1..16: note = 60S ribosomal protein L3 (136-151)
GQGYLIKDGKLIKNNA

SEQ ID NO: 7272 - protein, 9 aa, synthetic construct
  REGION 1..9: note = Glycosylphosphatidylinositol anchor attachment 1 protein (448-456)
GQHVATQHF

SEQ ID NO: 7273 - protein, 9 aa, synthetic construct
  REGION 1..9: note = AT-rich interactive domain-containing protein 5B (138-146)
GQKEALLKY

SEQ ID NO: 7274 - protein, 13 aa, synthetic construct
  REGION 1..13: note = ATP synthase subunit alpha, mitochondrial (147-159)
GQKRSTVAQLVKR

SEQ ID NO: 7275 - protein, 10 aa, synthetic construct
  REGION 1..10: note = A-kinase anchor protein 2 (343-352)
GQSTPRLFSI

SEQ ID NO: 7276 - protein, 9 aa, synthetic construct
  REGION 1..9: note = Transcription regulator protein BACH2 (68-76)
GQTKNDLVV

SEQ ID NO: 7277 - protein, 14 aa, synthetic construct
  REGION 1..14: note = B- and T-lymphocyte attenuator (193-206)
GREINLVDAHLKSE

SEQ ID NO: 7278 - protein, 10 aa, synthetic construct
  REGION 1..10: note = Ras-specific guanine nucleotide-releasing factor 1 (386-395)
GRFKNLREAL

SEQ ID NO: 7279 - protein, 9 aa, synthetic construct
  REGION 1..9: note = Protein asunder homolog (674-682)
GRLNSVNNR

SEQ ID NO: 7280 - protein, 9 aa, synthetic construct
  REGION 1..9: note = Probable ribonuclease ZC3H12D (383-391)
GRVPGPLSL

SEQ ID NO: 7281 - protein, 14 aa, synthetic construct
  REGION 1..14: note = Carbohydrate sulfotransferase 2 (176-189)
GSSFFGELFNQNPE

SEQ ID NO: 7282 - protein, 14 aa, synthetic construct
  REGION 1..14: note = SLAM family member 6 (105-118)
GSYRAQISTKTSAK

SEQ ID NO: 7283 - protein, 12 aa, synthetic construct
  REGION 1..12: note = Plasma membrane calcium-transporting ATPase 1 (258-269)
GSYRIFSKGASE

SEQ ID NO: 7284 - protein, 10 aa, synthetic construct
  REGION 1..10: note = Kelch-like ECH-associated protein 1 (419-428)
GVIDGHIYAV

SEQ ID NO: 7285 - protein, 12 aa, synthetic construct
  REGION 1..12: note = Serine incorporator 3 (400-411)
GVQYSYSLFHLM

SEQ ID NO: 7286 - protein, 13 aa, synthetic construct
  REGION 1..13: note = Serine incorporator 3 (400-412)
GVQYSYSLFHLML

SEQ ID NO: 7287 - protein, 16 aa, synthetic construct
  REGION 1..16: note = Interleukin-4 receptor subunit alpha (301-316)
GYKAFSSLLASSAVSP

SEQ ID NO: 7288 - protein, 17 aa, synthetic construct
  REGION 1..17: note = Interleukin-4 receptor subunit alpha (301-317)
GYKAFSSLLASSAVSPE

SEQ ID NO: 7289 - protein, 9 aa, synthetic construct
  REGION 1..9: note = Dystrophin (325-333)
GYLPVQTVL

SEQ ID NO: 7290 - protein, 13 aa, synthetic construct
  REGION 1..13: note = Ragulator complex protein LAMTOR3 (20-32)
HAIVVSDRDGVPV

SEQ ID NO: 7291 - protein, 9 aa, synthetic construct
  REGION 1..9: note = HLA class II histocompatibility antigen, DM alpha chain (87-95)
HEIDRYTAI

SEQ ID NO: 7292 - protein, 9 aa, synthetic construct
  REGION 1..9: note = Elongator complex protein 3 (261-269)
HGNLRELAL

SEQ ID NO: 7293 - protein, 14 aa, synthetic construct
  REGION 1..14: note = Fibromodulin (137-150)
HGNQITSDKVGRKV

SEQ ID NO: 7294 - protein, 10 aa, synthetic construct
  REGION 1..10: note = Poly (ADP-ribose) polymerase 3 (457-466)
HHINTDNPSL

SEQ ID NO: 7295 - protein, 9 aa, synthetic construct
  REGION 1..9: note = DmX-like protein 1 (888-896)
HLKSIPVSL

SEQ ID NO: 7296 - protein, 9 aa, synthetic construct
  REGION 1..9: note = Cyclin-dependent kinase 14 (229-237)
HPDNVKLFL

SEQ ID NO: 7297 - protein, 14 aa, synthetic construct
  REGION 1..14: note = Ceramide glucosyltransferase (193-206)
HPRYYISANVTGFK

SEQ ID NO: 7298 - protein, 14 aa, synthetic construct
  REGION 1..14: note = Beta-1,4-galactosyltransferase 1 (199-212)
HPVLQRQQLDYGIY

SEQ ID NO: 7299 - protein, 9 aa, synthetic construct
  REGION 1..9: note = Hematopoietic SH2 domain-containing protein (64-72)
HVGYTLSYK

SEQ ID NO: 7300 - protein, 9 aa, synthetic construct
  REGION 1..9: note = Cytoskeleton-associated protein 4 (129-137)
HVLEEVQQV

SEQ ID NO: 7301 - protein, 15 aa, synthetic construct
  REGION 1..15: note = Voltage-dependent anion-selective channel protein 2 (221-235)
IAAKYQLDPTASISA

SEQ ID NO: 7302 - protein, 16 aa, synthetic construct
  REGION 1..16: note = Voltage-dependent anion-selective channel protein 2 (221-236)
IAAKYQLDPTASISAK

SEQ ID NO: 7303 - protein, 14 aa, synthetic construct
  REGION 1..14: note = 14-3-3 protein zeta/delta (61-74)
IAELDTLSEESYKD

SEQ ID NO: 7304 - protein, 15 aa, synthetic construct
  REGION 1..15: note = 14-3-3 protein zeta/delta (61-75)
IAELDTLSEESYKDS

SEQ ID NO: 7305 - protein, 12 aa, synthetic construct
  REGION 1..12: note = Golgi apparatus protein 1 (362-373)
IAQDYKVSYSLA

SEQ ID NO: 7306 - protein, 13 aa, synthetic construct
  REGION 1..13: note = Golgi apparatus protein 1 (362-374)
IAQDYKVSYSLAK

SEQ ID NO: 7307 - protein, 9 aa, synthetic construct
  REGION 1..9: note = Perilipin-2 (313-321)
IARNLTQQL

SEQ ID NO: 7308 - protein, 15 aa, synthetic construct
  REGION 1..15: note = 60S ribosomal protein L3 (216-230)
IDTTSKFGHGRFQTM

SEQ ID NO: 7309 - protein, 19 aa, synthetic construct
  REGION 1..19: note = 60S ribosomal protein L3 (65-83)
IDVIGVTKGKGYKGVTSRW

SEQ ID NO: 7310 - protein, 10 aa, synthetic construct
  REGION 1..10: note = Plexin-B3 (1741-1750)
IEDPGTLHIW

SEQ ID NO: 7311 - protein, 14 aa, synthetic construct
  REGION 1..14: note = Polypeptide N-acetylgalactosaminyltransferase 1 (88-101)
IEEIVLVDDASERD

SEQ ID NO: 7312 - protein, 15 aa, synthetic construct
  REGION 1..15: note = Polypeptide N-acetylgalactosaminyltransferase 1 (88-102)
IEEIVLVDDASERDF

SEQ ID NO: 7313 - protein, 9 aa, synthetic construct
  REGION 1..9: note = Perilipin-2 (306-314)
IESRTLAIA

SEQ ID NO: 7314 - protein, 15 aa, synthetic construct
  REGION 1..15: note = Ras-related protein Rab-11A (44-58)
IGVEFATRSIQVDGK

SEQ ID NO: 7315 - protein, 9 aa, synthetic construct
  REGION 1..9: note = Elongation factor Tu, mitochondrial (171-179)
IGVEHVVVY

SEQ ID NO: 7316 - protein, 14 aa, synthetic construct
  REGION 1..14: note = Calsyntenin-1 (204-217)
IITPDVPFTVDKDG

SEQ ID NO: 7317 - protein, 16 aa, synthetic construct
  REGION 1..16: note = Fas apoptotic inhibitory molecule 3 (68-83)
IKAEYKGRVTLKQYPR

SEQ ID NO: 7318 - protein, 8 aa, synthetic construct
  REGION 1..8: note = Dynamin-binding protein (527-534)
IKVSKQLL

SEQ ID NO: 7319 - protein, 9 aa, synthetic construct
  REGION 1..9: note = ATP-binding cassette sub-family A member 6 (1270-1278)
ILDEKPVII

SEQ ID NO: 7320 - protein, 9 aa, synthetic construct
  REGION 1..9: note = DNA dC-dU-editing enzyme APOBEC-3D (26-34)
ILYGRSYTW

SEQ ID NO: 7321 - protein, 15 aa, synthetic construct
  REGION 1..15: note = Vesicle-associated membrane protein 3 (28-42)
IMRVNVDKVLERDQK

SEQ ID NO: 7322 - protein, 13 aa, synthetic construct
  REGION 1..13: note = Receptor-type tyrosine-protein phosphatase alpha (79-91)
INRRMADDNKLFR

SEQ ID NO: 7323 - protein, 14 aa, synthetic construct
  REGION 1..14: note = Protocadherin-9 (157-170)
INSRFPIPSATDPD

SEQ ID NO: 7324 - protein, 16 aa, synthetic construct
  REGION 1..16: note = Ras GTPase-activating-like protein IQGAP1 (232-247)
IPADTFAALKNPNAML

SEQ ID NO: 7325 - protein, 12 aa, synthetic construct
  REGION 1..12: note = Platelet endothelial cell adhesion molecule (96-107)
IPEVRIYDSGTY

SEQ ID NO: 7326 - protein, 9 aa, synthetic construct
  REGION 1..9: note = NACHT, LRR and PYD domains-containing protein 2 (193-201)
IPFSNPRVL

SEQ ID NO: 7327 - protein, 14 aa, synthetic construct
  REGION 1..14: note = Fibromodulin (308-321)
IPPVNTNLENLYLQ

SEQ ID NO: 7328 - protein, 8 aa, synthetic construct
  REGION 1..8: note = Eukaryotic translation initiation factor 6 (46-53)
IPVVHASI

SEQ ID NO: 7329 - protein, 9 aa, synthetic construct
  REGION 1..9: note = Monoglyceride lipase (24-32)
IPYQDLPHL

SEQ ID NO: 7330 - protein, 9 aa, synthetic construct
  REGION 1..9: note = Methyltransferase-like protein 7A (225-233)
IQAPLSWEL

SEQ ID NO: 7331 - protein, 9 aa, synthetic construct
  REGION 1..9: note = Cyclin-dependent kinase 14 (264-272)
ISDTGELKL

SEQ ID NO: 7332 - protein, 9 aa, synthetic construct
  REGION 1..9: note = Probable ATP-dependent RNA helicase DDX46 (331-339)
ISMKILNSL

SEQ ID NO: 7333 - protein, 16 aa, synthetic construct
  REGION 1..16: note = Low affinity immunoglobulin epsilon Fc receptor (10-25)
ISQELEELRAEQQRLK

SEQ ID NO: 7334 - protein, 14 aa, synthetic construct
  REGION 1..14: note = Golgi apparatus protein 1 (553-566)
ISRDWKLDPVLYRK

SEQ ID NO: 7335 - protein, 8 aa, synthetic construct
  REGION 1..8: note = B-lymphocyte antigen CD19 (274-281)
ITARPVLW

SEQ ID NO: 7336 - protein, 9 aa, synthetic construct
  REGION 1..9: note = Zinc finger protein 107 (139-147)
KAFNWFSTL

SEQ ID NO: 7337 - protein, 15 aa, synthetic construct
  REGION 1..15: note = Interleukin-4 receptor subunit alpha (303-317)
KAFSSLLASSAVSPE

SEQ ID NO: 7338 - protein, 14 aa, synthetic construct
  REGION 1..14: note = Platelet endothelial cell adhesion molecule (274-287)
KDKAIVAHNRHGNK

SEQ ID NO: 7339 - protein, 15 aa, synthetic construct
  REGION 1..15: note = Platelet endothelial cell adhesion molecule (274-288)
KDKAIVAHNRHGNKA

SEQ ID NO: 7340 - protein, 9 aa, synthetic construct
  REGION 1..9: note = Endoplasmic reticulum resident protein 44 (336-344)
KDVLIPGKL

SEQ ID NO: 7341 - protein, 9 aa, synthetic construct
  REGION 1..9: note = Cytoskeleton-associated protein 4 (71-79)
KEAADTERL

SEQ ID NO: 7342 - protein, 11 aa, synthetic construct
  REGION 1..11: note = Uncharacterized protein CXorf21 (31-41)
KEEETNSVATL

SEQ ID NO: 7343 - protein, 8 aa, synthetic construct
  REGION 1..8: note = Negative elongation factor E (373-380)
KENLVDGF

SEQ ID NO: 7344 - protein, 9 aa, synthetic construct
  REGION 1..9: note = Cell division cycle-associated 7-like protein (280-288)
KFAEEFYSF

SEQ ID NO: 7345 - protein, 14 aa, synthetic construct
  REGION 1..14: note = IgG receptor FcRn large subunit p51 (132-145)
KFALNGEEFMNFDL

SEQ ID NO: 7346 - protein, 12 aa, synthetic construct
  REGION 1..12: note = Heterogeneous nuclear ribonucleoprotein A1-like 2 (124-135)
KGGNFGGRSSGP

SEQ ID NO: 7347 - protein, 13 aa, synthetic construct
  REGION 1..13: note = Heterogeneous nuclear ribonucleoprotein A3 (158-170)
KGGSFGGRSSGSP

SEQ ID NO: 7348 - protein, 12 aa, synthetic construct
  REGION 1..12: note = Low affinity immunoglobulin epsilon Fc receptor (101-112)
KGTKQWVHARYA

SEQ ID NO: 7349 - protein, 14 aa, synthetic construct
  REGION 1..14: note = Perilipin-3 (65-78)
KGVRTLTAAAVSGA

SEQ ID NO: 7350 - protein, 15 aa, synthetic construct
  REGION 1..15: note = Perilipin-3 (65-79)
KGVRTLTAAAVSGAQ

SEQ ID NO: 7351 - protein, 10 aa, synthetic construct
  REGION 1..10: note = B-cell linker protein (6-15)
KITVPASQKL

SEQ ID NO: 7352 - protein, 9 aa, synthetic construct
  REGION 1..9: note = Afadin- and alpha-actinin-binding protein (328-336)
KLDNQVSKV

SEQ ID NO: 7353 - protein, 10 aa, synthetic construct
  REGION 1..10: note = B-lymphocyte antigen CD19 (150-159)
KLMSPKLYVW

SEQ ID NO: 7354 - protein, 18 aa, synthetic construct
  REGION 1..18: note = Ragulator complex protein LAMTOR3 (12-29)
KLPSVEGLHAIVVSDRDG

SEQ ID NO: 7355 - protein, 10 aa, synthetic construct
  REGION 1..10: note = RNA polymerase II subunit A C-terminal domain phosphatase (238-247)
KLYELHVFTF

SEQ ID NO: 7356 - protein, 9 aa, synthetic construct
  REGION 1..9: note = Ubiquitin-like protein 7 (100-108)
KPEPVDKVA

SEQ ID NO: 7357 - protein, 15 aa, synthetic construct
  REGION 1..15: note = B- and T-lymphocyte attenuator (252-266)
KPGIVYASLNHSVIG

SEQ ID NO: 7358 - protein, 9 aa, synthetic construct
  REGION 1..9: note = hematopoietic SH2 domain-containing protein isoform X7 (112-120)
KPIEPRREL

SEQ ID NO: 7359 - protein, 9 aa, synthetic construct
  REGION 1..9: note = Dynamin-binding protein (183-191)
KPRQSSPQL

SEQ ID NO: 7360 - protein, 9 aa, synthetic construct
  REGION 1..9: note = AT-rich interactive domain-containing protein 5B (518-526)
KPSEERKTI

SEQ ID NO: 7361 - protein, 9 aa, synthetic construct
  REGION 1..9: note = Plateletoprotein 4 (394-402)
KPSEKIQVL

SEQ ID NO: 7362 - protein, 9 aa, synthetic construct
  REGION 1..9: note = Zinc finger protein 638 (538-546)
KPTSARSGL

SEQ ID NO: 7363 - protein, 9 aa, synthetic construct
  REGION 1..9: note = Dynamin-binding protein (531-539)
KQLLAALEI

SEQ ID NO: 7364 - protein, 9 aa, synthetic construct
  REGION 1..9: note = AT-rich interactive domain-containing protein 5B (171-179)
KQTPKVLVV

SEQ ID NO: 7365 - protein, 9 aa, synthetic construct
  REGION 1..9: note = Dystrophin (152-160)
KQVASSTGF

SEQ ID NO: 7366 - protein, 13 aa, synthetic construct
  REGION 1..13: note = Endoplasmin (72-84)
KSEKFAFQAEVNR

SEQ ID NO: 7367 - protein, 10 aa, synthetic construct
  REGION 1..10: note = Probable ATP-dependent RNA helicase DDX46 (374-383)
KTIAFLLPMF

SEQ ID NO: 7368 - protein, 9 aa, synthetic construct
  REGION 1..9: note = T-cell activation Rho GTPase-activating protein (56-64)
KVLSWPFLM

SEQ ID NO: 7369 - protein, 10 aa, synthetic construct
  REGION 1..10: note = Cyclin-dependent kinase 14 (155-164)
KVNGKLVALK

SEQ ID NO: 7370 - protein, 9 aa, synthetic construct
  REGION 1..9: note = DmX-like protein 1 (194-202)
KVWYNVENW

SEQ ID NO: 7371 - protein, 10 aa, synthetic construct
  REGION 1..10: note = Zinc finger protein 638 (730-739)
KYIETTPLTI

SEQ ID NO: 7372 - protein, 14 aa, synthetic construct
  REGION 1..14: note = Alpha-1B-glycoprotein (204-217)
LAPLEGARFALVRE

SEQ ID NO: 7373 - protein, 15 aa, synthetic construct
  REGION 1..15: note = Alpha-1B-glycoprotein (204-218)
LAPLEGARFALVRED

SEQ ID NO: 7374 - protein, 15 aa, synthetic construct
  REGION 1..15: note = Transmembrane protein C16orf54 (117-131)
LEARATAPPAPSAPN

SEQ ID NO: 7375 - protein, 9 aa, synthetic construct
  REGION 1..9: note = T-cell activation Rho GTPase-activating protein (66-74)
LENDQSLSF

SEQ ID NO: 7376 - protein, 13 aa, synthetic construct
  REGION 1..13: note = Polypeptide N-acetylgalactosaminyltransferase 1 (355-367)
LENIYPDSQIPRH

SEQ ID NO: 7377 - protein, 14 aa, synthetic construct
  REGION 1..14: note = Polypeptide N-acetylgalactosaminyltransferase 1 (355-368)
LENIYPDSQIPRHY

SEQ ID NO: 7378 - protein, 9 aa, synthetic construct
  REGION 1..9: note = Uncharacterized protein CXorf21 (214-222)
LEQKVVELY

SEQ ID NO: 7379 - protein, 10 aa, synthetic construct
  REGION 1..10: note = Cadherin EGF LAG seven-pass G-type receptor 1 (2401-2410)
LEVEERTKPV

SEQ ID NO: 7380 - protein, 13 aa, synthetic construct
  REGION 1..13: note = Cation-independent mannose-6-phosphate receptor (2073-2085)
LGDIYFKLFRASG

SEQ ID NO: 7381 - protein, 14 aa, synthetic construct
  REGION 1..14: note = Ragulator complex protein LAMTOR3 (19-32)
LHAIVVSDRDGVPV

SEQ ID NO: 7382 - protein, 15 aa, synthetic construct
  REGION 1..15: note = Ragulator complex protein LAMTOR3 (19-33)
LHAIVVSDRDGVPVI

SEQ ID NO: 7383 - protein, 16 aa, synthetic construct
  REGION 1..16: note = Ragulator complex protein LAMTOR3 (19-34)
LHAIVVSDRDGVPVIK

SEQ ID NO: 7384 - protein, 13 aa, synthetic construct
  REGION 1..13: note = Golgi apparatus protein 1 (361-373)
LIAQDYKVSYSLA

SEQ ID NO: 7385 - protein, 15 aa, synthetic construct
  REGION 1..15: note = Ras GTPase-activating-like protein IQGAP1 (347-361)
LKQLLSDKQQKRQSG

SEQ ID NO: 7386 - protein, 16 aa, synthetic construct
  REGION 1..16: note = Ras GTPase-activating-like protein IQGAP1 (347-362)
LKQLLSDKQQKRQSGQ

SEQ ID NO: 7387 - protein, 10 aa, synthetic construct
  REGION 1..10: note = NACHT, LRR and PYD domains-containing protein 2 (823-832)
LLDEGAKLLY

SEQ ID NO: 7388 - protein, 13 aa, synthetic construct
  REGION 1..13: note = Beta-1,4-galactosyltransferase 1 (112-124)
LNSLTYQVLDVQR

SEQ ID NO: 7389 - protein, 15 aa, synthetic construct
  REGION 1..15: note = Beta-1,4-galactosyltransferase 1 (112-126)
LNSLTYQVLDVQRYP

SEQ ID NO: 7390 - protein, 16 aa, synthetic construct
  REGION 1..16: note = Beta-1,4-galactosyltransferase 1 (112-127)
LNSLTYQVLDVQRYPL

SEQ ID NO: 7391 - protein, 15 aa, synthetic construct
  REGION 1..15: note = Fas apoptotic inhibitory molecule 3 (120-134)
LNVHSEYEPSWEEQP

SEQ ID NO: 7392 - protein, 15 aa, synthetic construct
  REGION 1..15: note = Phosphoinositide-3-kinase-interacting protein 1 (137-151)
LPARSEAAAVQPVIG

SEQ ID NO: 7393 - protein, 9 aa, synthetic construct
  REGION 1..9: note = DmX-like protein 1 (1557-1565)
LPAYRAQLL

SEQ ID NO: 7394 - protein, 14 aa, synthetic construct
  REGION 1..14: note = Putative endoplasmin-like protein (219-232)
LPEFDGKRFQNVAK

SEQ ID NO: 7395 - protein, 12 aa, synthetic construct
  REGION 1..12: note = Cullin-associated NEDD8-dissociated protein 1 (297-308)
LPEFYKTVSPAL

SEQ ID NO: 7396 - protein, 9 aa, synthetic construct
  REGION 1..9: note = TBC1 domain family member 22A (121-129)
LPHSATVTL

SEQ ID NO: 7397 - protein, 12 aa, synthetic construct
  REGION 1..12: note = Glycosyltransferase 8 domain-containing protein 1 (157-168)
LPILVPSAKKAI

SEQ ID NO: 7398 - protein, 13 aa, synthetic construct
  REGION 1..13: note = Glycosyltransferase 8 domain-containing protein 1 (157-169)
LPILVPSAKKAIY

SEQ ID NO: 7399 - protein, 14 aa, synthetic construct
  REGION 1..14: note = Glycosyltransferase 8 domain-containing protein 1 (157-170)
LPILVPSAKKAIYM

SEQ ID NO: 7400 - protein, 15 aa, synthetic construct
  REGION 1..15: note = Glycosyltransferase 8 domain-containing protein 1 (157-171)
LPILVPSAKKAIYMD

SEQ ID NO: 7401 - protein, 16 aa, synthetic construct
  REGION 1..16: note = Glycosyltransferase 8 domain-containing protein 1 (157-172)
LPILVPSAKKAIYMDD

SEQ ID NO: 7402 - protein, 9 aa, synthetic construct
  REGION 1..9: note = ATP-binding cassette sub-family A member 6 (899-907)
LPQEPRTSL

SEQ ID NO: 7403 - protein, 13 aa, synthetic construct
  REGION 1..13: note = Beta-1,4-galactosyltransferase 1 (50-62)
LPQLVGVSTPLQG

SEQ ID NO: 7404 - protein, 14 aa, synthetic construct
  REGION 1..14: note = Beta-1,4-galactosyltransferase 1 (50-63)
LPQLVGVSTPLQGG

SEQ ID NO: 7405 - protein, 15 aa, synthetic construct
  REGION 1..15: note = Beta-1,4-galactosyltransferase 1 (50-64)
LPQLVGVSTPLQGGS

SEQ ID NO: 7406 - protein, 9 aa, synthetic construct
  REGION 1..9: note = Proline and serine-rich protein 2 (219-227)
LPRPQGITV

SEQ ID NO: 7407 - protein, 14 aa, synthetic construct
  REGION 1..14: note = Pro-cathepsin H (48-61)
LPSQAFEYILYNKG

SEQ ID NO: 7408 - protein, 15 aa, synthetic construct
  REGION 1..15: note = Pro-cathepsin H (48-62)
LPSQAFEYILYNKGI

SEQ ID NO: 7409 - protein, 16 aa, synthetic construct
  REGION 1..16: note = Pro-cathepsin H (48-63)
LPSQAFEYILYNKGIM

SEQ ID NO: 7410 - protein, 17 aa, synthetic construct
  REGION 1..17: note = Pro-cathepsin H (48-64)
LPSQAFEYILYNKGIMG

SEQ ID NO: 7411 - protein, 15 aa, synthetic construct
  REGION 1..15: note = Ragulator complex protein LAMTOR3 (13-27)
LPSVEGLHAIVVSDR

SEQ ID NO: 7412 - protein, 14 aa, synthetic construct
  REGION 1..14: note = Fas apoptotic inhibitory molecule 3 (32-45)
LPYLFQMPAYASSS

SEQ ID NO: 7413 - protein, 15 aa, synthetic construct
  REGION 1..15: note = Fas apoptotic inhibitory molecule 3 (32-46)
LPYLFQMPAYASSSK

SEQ ID NO: 7414 - protein, 13 aa, synthetic construct
  REGION 1..13: note = Fibromodulin (27-39)
LQVLRLDGNEIKR

SEQ ID NO: 7415 - protein, 14 aa, synthetic construct
  REGION 1..14: note = Fibromodulin (27-40)
LQVLRLDGNEIKRS

SEQ ID NO: 7416 - protein, 15 aa, synthetic construct
  REGION 1..15: note = Fibromodulin (27-41)
LQVLRLDGNEIKRSA

SEQ ID NO: 7417 - protein, 16 aa, synthetic construct
  REGION 1..16: note = Fibromodulin (178-193)
LRELHLDHNQISRVPN

SEQ ID NO: 7418 - protein, 9 aa, synthetic construct
  REGION 1..9: note = DmX-like protein 1 (2001-2009)
LSEQTSVPL

SEQ ID NO: 7419 - protein, 8 aa, synthetic construct
  REGION 1..8: note = Transcription regulator protein BACH2 (709-716)
LSQEVCRD

SEQ ID NO: 7420 - protein, 12 aa, synthetic construct
  REGION 1..12: note = Testican-2 (45-56)
LSSISQYSGKIK

SEQ ID NO: 7421 - protein, 8 aa, synthetic construct
  REGION 1..8: note = Baculoviral IAP repeat-containing protein 5 (96-103)
LTLGEFLK

SEQ ID NO: 7422 - protein, 9 aa, synthetic construct
  REGION 1..9: note = Baculoviral IAP repeat-containing protein 5 (96-104)
LTLGEFLKL

SEQ ID NO: 7423 - protein, 8 aa, synthetic construct
  REGION 1..8: note = ATP-binding cassette sub-family A member 6 (1544-1551)
LTYKLPVA

SEQ ID NO: 7424 - protein, 8 aa, synthetic construct
  REGION 1..8: note = A-kinase anchor protein 2 (561-568)
LVDDPLEY

SEQ ID NO: 7425 - protein, 9 aa, synthetic construct
  REGION 1..9: note = RNA polymerase II subunit A C-terminal domain phosphatase (239-247)
LYELHVFTF

SEQ ID NO: 7426 - protein, 14 aa, synthetic construct
  REGION 1..14: note = Fibromodulin (271-284)
LYVRLSHNSLTNNG

SEQ ID NO: 7427 - protein, 15 aa, synthetic construct
  REGION 1..15: note = 60S ribosomal protein L3 (237-251)
MGPLKKDRIAKEEGA

SEQ ID NO: 7428 - protein, 13 aa, synthetic construct
  REGION 1..13: note = Pro-cathepsin H (222-234)
MNGYFLIERGKNM

SEQ ID NO: 7429 - protein, 9 aa, synthetic construct
  REGION 1..9: note = Ras-specific guanine nucleotide-releasing factor 1 (773-781)
MSPFSKATL

SEQ ID NO: 7430 - protein, 10 aa, synthetic construct
  REGION 1..10: note = Perilipin-2 (62-71)
MTSALPIIQK

SEQ ID NO: 7431 - protein, 9 aa, synthetic construct
  REGION 1..9: note = RUN and FYVE domain-containing protein 1 (291-299)
MYSDVWKQL

SEQ ID NO: 7432 - protein, 15 aa, synthetic construct
  REGION 1..15: note = Heterogeneous nuclear ribonucleoprotein A1-like 2 (108-122)
NDFGNYNNQSSNFGP

SEQ ID NO: 7433 - protein, 12 aa, synthetic construct
  REGION 1..12: note = SLAM family member 6 (192-203)
NDTITIYSTINH

SEQ ID NO: 7434 - protein, 13 aa, synthetic construct
  REGION 1..13: note = SLAM family member 6 (192-204)
NDTITIYSTINHS

SEQ ID NO: 7435 - protein, 14 aa, synthetic construct
  REGION 1..14: note = SLAM family member 6 (192-205)
NDTITIYSTINHSK

SEQ ID NO: 7436 - protein, 16 aa, synthetic construct
  REGION 1..16: note = Glutathione peroxidase 1 (100-115)
NDVAWNFEKFLVGPDG

SEQ ID NO: 7437 - protein, 10 aa, synthetic construct
  REGION 1..10: note = ATP-binding cassette sub-family A member 6 (811-820)
NEMELAHSSF

SEQ ID NO: 7438 - protein, 8 aa, synthetic construct
  REGION 1..8: note = Ribonucleoside-diphosphate reductase subunit M2 B (50-57)
NENLVERF

SEQ ID NO: 7439 - protein, 12 aa, synthetic construct
  REGION 1..12: note = C-C chemokine receptor type 7 (192-203)
NFERNKAIKVII

SEQ ID NO: 7440 - protein, 13 aa, synthetic construct
  REGION 1..13: note = C-C chemokine receptor type 7 (192-204)
NFERNKAIKVIIA

SEQ ID NO: 7441 - protein, 12 aa, synthetic construct
  REGION 1..12: note = Fas apoptotic inhibitory molecule 3 (66-77)
NFIKAEYKGRVT

SEQ ID NO: 7442 - protein, 14 aa, synthetic construct
  REGION 1..14: note = Platelet endothelial cell adhesion molecule (187-200)
NFVILEFPVEEQDR

SEQ ID NO: 7443 - protein, 15 aa, synthetic construct
  REGION 1..15: note = Phosphoinositide-3-kinase-interacting protein 1 (29-43)
NGHLYREDQTSPAPG

SEQ ID NO: 7444 - protein, 16 aa, synthetic construct
  REGION 1..16: note = Phosphoinositide-3-kinase-interacting protein 1 (29-44)
NGHLYREDQTSPAPGL

SEQ ID NO: 7445 - protein, 17 aa, synthetic construct
  REGION 1..17: note = Phosphoinositide-3-kinase-interacting protein 1 (29-45)
NGHLYREDQTSPAPGLR

SEQ ID NO: 7446 - protein, 14 aa, synthetic construct
  REGION 1..14: note = CD44 antigen (16-29)
NGRYSISRTEAADL

SEQ ID NO: 7447 - protein, 12 aa, synthetic construct
  REGION 1..12: note = Pro-cathepsin H (223-234)
NGYFLIERGKNM

SEQ ID NO: 7448 - protein, 10 aa, synthetic construct
  REGION 1..10: note = Thymidylate synthase (260-269)
NHIEPLKIQL

SEQ ID NO: 7449 - protein, 16 aa, synthetic construct
  REGION 1..16: note = B- and T-lymphocyte attenuator (251-266)
NKPGIVYASLNHSVIG

SEQ ID NO: 7450 - protein, 13 aa, synthetic construct
  REGION 1..13: note = E3 ubiquitin-protein ligase CHIP (44-56)
NLQRAYSLAKEQR

SEQ ID NO: 7451 - protein, 14 aa, synthetic construct
  REGION 1..14: note = Alpha-mannosidase 2 (65-78)
NNEIISNIRDSVIN

SEQ ID NO: 7452 - protein, 13 aa, synthetic construct
  REGION 1..13: note = Neurofibromin (66-78)
NNMRIFGEAAEKN

SEQ ID NO: 7453 - protein, 13 aa, synthetic construct
  REGION 1..13: note = Interleukin-4 receptor subunit alpha (193-205)
NPAYRSFSNSLSQ

SEQ ID NO: 7454 - protein, 17 aa, synthetic construct
  REGION 1..17: note = Transferrin receptor protein 1 (215-231)
NPGGYVAYSKAATVTGK

SEQ ID NO: 7455 - protein, 11 aa, synthetic construct
  REGION 1..11: note = Uncharacterized protein CXorf21 (203-213)
NPISNAVLNEY

SEQ ID NO: 7456 - protein, 17 aa, synthetic construct
  REGION 1..17: note = Kynureninase (429-445)
NPNGIRVAPVPLYNSFH

SEQ ID NO: 7457 - protein, 16 aa, synthetic construct
  REGION 1..16: note = MyoD family inhibitor domain-containing protein (64-79)
NPSDGELIRTQPQRLP

SEQ ID NO: 7458 - protein, 17 aa, synthetic construct
  REGION 1..17: note = MyoD family inhibitor domain-containing protein (64-80)
NPSDGELIRTQPQRLPQ

SEQ ID NO: 7459 - protein, 18 aa, synthetic construct
  REGION 1..18: note = MyoD family inhibitor domain-containing protein (64-81)
NPSDGELIRTQPQRLPQL

SEQ ID NO: 7460 - protein, 13 aa, synthetic construct
  REGION 1..13: note = Polypeptide N-acetylgalactosaminyltransferase 1 (405-417)
NQVFSYTANKEIR

SEQ ID NO: 7461 - protein, 14 aa, synthetic construct
  REGION 1..14: note = Polypeptide N-acetylgalactosaminyltransferase 1 (405-418)
NQVFSYTANKEIRT

SEQ ID NO: 7462 - protein, 16 aa, synthetic construct
  REGION 1..16: note = Polypeptide N-acetylgalactosaminyltransferase 1 (405-420)
NQVFSYTANKEIRTDD

SEQ ID NO: 7463 - protein, 9 aa, synthetic construct
  REGION 1..9: note = Cyclin-dependent kinase 14 (406-414)
NRLSAQAAL

SEQ ID NO: 7464 - protein, 12 aa, synthetic construct
  REGION 1..12: note = Transferrin receptor protein 1 (198-209)
NSVIIVDKNGRL

SEQ ID NO: 7465 - protein, 13 aa, synthetic construct
  REGION 1..13: note = Transferrin receptor protein 1 (198-210)
NSVIIVDKNGRLV

SEQ ID NO: 7466 - protein, 14 aa, synthetic construct
  REGION 1..14: note = Transferrin receptor protein 1 (198-211)
NSVIIVDKNGRLVY

SEQ ID NO: 7467 - protein, 14 aa, synthetic construct
  REGION 1..14: note = Glucose-6-phosphate isomerase (108-121)
NTPILVDGKDVMPE

SEQ ID NO: 7468 - protein, 15 aa, synthetic construct
  REGION 1..15: note = Glucose-6-phosphate isomerase (108-122)
NTPILVDGKDVMPEV

SEQ ID NO: 7469 - protein, 16 aa, synthetic construct
  REGION 1..16: note = Glucose-6-phosphate isomerase (108-123)
NTPILVDGKDVMPEVN

SEQ ID NO: 7470 - protein, 14 aa, synthetic construct
  REGION 1..14: note = Pericentriolar material 1 protein (1457-1470)
NTVIHLDQALARMR

SEQ ID NO: 7471 - protein, 15 aa, synthetic construct
  REGION 1..15: note = Pericentriolar material 1 protein (1457-1471)
NTVIHLDQALARMRE

SEQ ID NO: 7472 - protein, 13 aa, synthetic construct
  REGION 1..13: note = SLAM family member 6 (50-62)
NVSFRWEALGNTL

SEQ ID NO: 7473 - protein, 17 aa, synthetic construct
  REGION 1..17: note = Peroxiredoxin-1 (108-124)
PKRTIAQDYGVLKADEG

SEQ ID NO: 7474 - protein, 13 aa, synthetic construct
  REGION 1..13: note = Calsyntenin-1 (57-69)
PPLIALDKDAPLR

SEQ ID NO: 7475 - protein, 13 aa, synthetic construct
  REGION 1..13: note = Pro-cathepsin H (49-61)
PSQAFEYILYNKG

SEQ ID NO: 7476 - protein, 14 aa, synthetic construct
  REGION 1..14: note = Pro-cathepsin H (49-62)
PSQAFEYILYNKGI

SEQ ID NO: 7477 - protein, 15 aa, synthetic construct
  REGION 1..15: note = Pro-cathepsin H (49-63)
PSQAFEYILYNKGIM

SEQ ID NO: 7478 - protein, 15 aa, synthetic construct
  REGION 1..15: note = Low affinity immunoglobulin epsilon Fc receptor (39-53)
QADLSSFKSQELNER

SEQ ID NO: 7479 - protein, 11 aa, synthetic construct
  REGION 1..11: note = Ras-specific guanine nucleotide-releasing factor 1 (993-1003)
QEDPGDNQITL

SEQ ID NO: 7480 - protein, 10 aa, synthetic construct
  REGION 1..10: note = ATP synthase F(0) complex subunit C1, mitochondrial (106-115)
QLFSYAILGF

SEQ ID NO: 7481 - protein, 9 aa, synthetic construct
  REGION 1..9: note = Transmembrane emp24 domain-containing protein 4 (162-170)
QLLDQVEQI

SEQ ID NO: 7482 - protein, 13 aa, synthetic construct
  REGION 1..13: note = Glutathione peroxidase 1 (12-24)
QSVYAFSARPLAG

SEQ ID NO: 7483 - protein, 17 aa, synthetic construct
  REGION 1..17: note = Glutathione peroxidase 1 (12-28)
QSVYAFSARPLAGGEPV

SEQ ID NO: 7484 - protein, 15 aa, synthetic construct
  REGION 1..15: note = Lipolysis-stimulated lipoprotein receptor (423-437)
RDDLYDQDDSRDFPR

SEQ ID NO: 7485 - protein, 11 aa, synthetic construct
  REGION 1..11: note = Dystrophin (314-324)
RDFGPASQHFL

SEQ ID NO: 7486 - protein, 9 aa, synthetic construct
  REGION 1..9: note = Transcription regulator protein BACH2 (715-723)
RDIQSPEQI

SEQ ID NO: 7487 - protein, 8 aa, synthetic construct
  REGION 1..8: note = Elongation factor Tu, mitochondrial (53-60)
RDKPHVNV

SEQ ID NO: 7488 - protein, 11 aa, synthetic construct
  REGION 1..11: note = TRAF3-interacting JNK-activating modulator (92-102)
RDLQMNQALRF

SEQ ID NO: 7489 - protein, 8 aa, synthetic construct
  REGION 1..8: note = Probable ATP-dependent RNA helicase DDX46 (658-665)
RDSIINDF

SEQ ID NO: 7490 - protein, 9 aa, synthetic construct
  REGION 1..9: note = Eukaryotic translation initiation factor 6 (237-245)
RDSLIDSLT

SEQ ID NO: 7491 - protein, 11 aa, synthetic construct
  REGION 1..11: note = Cadherin EGF LAG seven-pass G-type receptor 1 (380-390)
RDSPINANLRY

SEQ ID NO: 7492 - protein, 9 aa, synthetic construct
  REGION 1..9: note = Transcription regulator protein BACH2 (258-266)
REDNSSNSL

SEQ ID NO: 7493 - protein, 10 aa, synthetic construct
  REGION 1..10: note = ATP-binding cassette sub-family A member 6 (1183-1192)
REFPEANFEL

SEQ ID NO: 7494 - protein, 16 aa, synthetic construct
  REGION 1..16: note = Alpha-1B-glycoprotein (123-138)
RGEKELLVPRSSTSPD

SEQ ID NO: 7495 - protein, 13 aa, synthetic construct
  REGION 1..13: note = Peroxiredoxin-1 (128-140)
RGLFIIDDKGILR

SEQ ID NO: 7496 - protein, 14 aa, synthetic construct
  REGION 1..14: note = Peroxiredoxin-1 (128-141)
RGLFIIDDKGILRQ

SEQ ID NO: 7497 - protein, 16 aa, synthetic construct
  REGION 1..16: note = Peroxiredoxin-1 (128-143)
RGLFIIDDKGILRQIT

SEQ ID NO: 7498 - protein, 9 aa, synthetic construct
  REGION 1..9: note = DNA dC-dU-editing enzyme APOBEC-3D (306-314)
RHSNVNLTI

SEQ ID NO: 7499 - protein, 10 aa, synthetic construct
  REGION 1..10: note = Zinc finger protein 107 (152-161)
RIHTGEKPYK

SEQ ID NO: 7500 - protein, 10 aa, synthetic construct
  REGION 1..10: note = Fibromodulin (324-333)
RINEFSISSF

SEQ ID NO: 7501 - protein, 9 aa, synthetic construct
  REGION 1..9: note = Cytoskeleton-associated protein 4 (199-207)
RISEVLQKL

SEQ ID NO: 7502 - protein, 14 aa, synthetic construct
  REGION 1..14: note = Leukosialin (349-362)
RKSRQGSLAMEELK

SEQ ID NO: 7503 - protein, 16 aa, synthetic construct
  REGION 1..16: note = Beta-1,4-galactosyltransferase 1 (49-64)
RLPQLVGVSTPLQGGS

SEQ ID NO: 7504 - protein, 12 aa, synthetic construct
  REGION 1..12: note = Proline-rich protein 12 (1113-1124)
RPAGEPYNRKTL

SEQ ID NO: 7505 - protein, 8 aa, synthetic construct
  REGION 1..8: note = Cadherin EGF LAG seven-pass G-type receptor 1 (2237-2244)
RPFVIVTA

SEQ ID NO: 7506 - protein, 9 aa, synthetic construct
  REGION 1..9: note = Cadherin EGF LAG seven-pass G-type receptor 1 (2367-2375)
RPIINTPMV

SEQ ID NO: 7507 - protein, 9 aa, synthetic construct
  REGION 1..9: note = A-kinase anchor protein 2 (800-808)
RPKNLMQTL

SEQ ID NO: 7508 - protein, 8 aa, synthetic construct
  REGION 1..8: note = B-lymphocyte antigen CD20 (222-229)
RPKSNIVL

SEQ ID NO: 7509 - protein, 9 aa, synthetic construct
  REGION 1..9: note = Arrestin domain-containing protein 4 (148-156)
RPKVPDQSV

SEQ ID NO: 7510 - protein, 9 aa, synthetic construct
  REGION 1..9: note = A-kinase anchor protein 2 (109-117)
RQAPPHIEL

SEQ ID NO: 7511 - protein, 14 aa, synthetic construct
  REGION 1..14: note = Golgi apparatus protein 1 (358-371)
RQKLIAQDYKVSYS

SEQ ID NO: 7512 - protein, 15 aa, synthetic construct
  REGION 1..15: note = Golgi apparatus protein 1 (358-372)
RQKLIAQDYKVSYSL

SEQ ID NO: 7513 - protein, 16 aa, synthetic construct
  REGION 1..16: note = Golgi apparatus protein 1 (358-373)
RQKLIAQDYKVSYSLA

SEQ ID NO: 7514 - protein, 17 aa, synthetic construct
  REGION 1..17: note = Golgi apparatus protein 1 (358-374)
RQKLIAQDYKVSYSLAK

SEQ ID NO: 7515 - protein, 9 aa, synthetic construct
  REGION 1..9: note = Dystrophin (178-186)
RQLGEVASF

SEQ ID NO: 7516 - protein, 8 aa, synthetic construct
  REGION 1..8: note = Cordon-bleu protein-like 1 (1082-1089)
RQSLLTAI

SEQ ID NO: 7517 - protein, 9 aa, synthetic construct
  REGION 1..9: note = Dynamin-binding protein (661-669)
RRKDLVLKY

SEQ ID NO: 7518 - protein, 15 aa, synthetic construct
  REGION 1..15: note = Leukosialin (348-362)
RRKSRQGSLAMEELK

SEQ ID NO: 7519 - protein, 12 aa, synthetic construct
  REGION 1..12: note = Ras-related protein Rab-11A (51-62)
RSIQVDGKTIKA

SEQ ID NO: 7520 - protein, 13 aa, synthetic construct
  REGION 1..13: note = Ras-related protein Rab-11A (51-63)
RSIQVDGKTIKAQ

SEQ ID NO: 7521 - protein, 14 aa, synthetic construct
  REGION 1..14: note = Ras-related protein Rab-11A (51-64)
RSIQVDGKTIKAQI

SEQ ID NO: 7522 - protein, 11 aa, synthetic construct
  REGION 1..11: note = TP53-target gene 5 protein (40-50)
RTVLKNLSLLK

SEQ ID NO: 7523 - protein, 14 aa, synthetic construct
  REGION 1..14: note = Golgi apparatus protein 1 (995-1008)
SALDYRLDPQLQLH

SEQ ID NO: 7524 - protein, 11 aa, synthetic construct
  REGION 1..11: note = AN1-type zinc finger protein 5 (63-73)
SASVQRADTSL

SEQ ID NO: 7525 - protein, 14 aa, synthetic construct
  REGION 1..14: note = IgG receptor FcRn large subunit p51 (253-266)
SDGSFHASSSLTVK

SEQ ID NO: 7526 - protein, 14 aa, synthetic construct
  REGION 1..14: note = Plasma membrane calcium-transporting ATPase 1 (256-269)
SDGSYRIFSKGASE

SEQ ID NO: 7527 - protein, 9 aa, synthetic construct
  REGION 1..9: note = Probable ribonuclease ZC3H12D (505-513)
SDLARLILL

SEQ ID NO: 7528 - protein, 15 aa, synthetic construct
  REGION 1..15: note = ATP synthase subunit alpha, mitochondrial (348-362)
SDLDAATQQLLSRGV

SEQ ID NO: 7529 - protein, 9 aa, synthetic construct
  REGION 1..9: note = TRAF3-interacting JNK-activating modulator (138-146)
SEAEKLTLV

SEQ ID NO: 7530 - protein, 10 aa, synthetic construct
  REGION 1..10: note = Lysine-specific demethylase 2B (477-486)
SEESVKSTTL

SEQ ID NO: 7531 - protein, 9 aa, synthetic construct
  REGION 1..9: note = Elongator complex protein 3 (338-346)
SEETFRFEL

SEQ ID NO: 7532 - protein, 9 aa, synthetic construct
  REGION 1..9: note = Zinc finger protein 638 (865-873)
SEIKTSIEV

SEQ ID NO: 7533 - protein, 9 aa, synthetic construct
  REGION 1..9: note = Ribonucleoside-diphosphate reductase subunit M2 B (275-283)
SEYQRFAVM

SEQ ID NO: 7534 - protein, 19 aa, synthetic construct
  REGION 1..19: note = DnaJ homolog subfamily C member 5 (12-30)
SGESLYHVLGLDKNATSDD

SEQ ID NO: 7535 - protein, 14 aa, synthetic construct
  REGION 1..14: note = Heterogeneous nuclear ribonucleoprotein A1-like 2 (133-146)
SGPYGGGGQYFAKP

SEQ ID NO: 7536 - protein, 25 aa, synthetic construct
  REGION 1..25: note = Heterogeneous nuclear ribonucleoprotein A3 (147-171)
SGQQQSNYGPMKGGSFGGRSSGSPY

SEQ ID NO: 7537 - protein, 23 aa, synthetic construct
  REGION 1..23: note = Heterogeneous nuclear ribonucleoprotein A3 (167-189)
SGSPYGGGYGSGGGSGGYGSRRF

SEQ ID NO: 7538 - protein, 15 aa, synthetic construct
  REGION 1..15: note = Carbohydrate sulfotransferase 2 (175-189)
SGSSFFGELFNQNPE

SEQ ID NO: 7539 - protein, 13 aa, synthetic construct
  REGION 1..13: note = Ceramide glucosyltransferase (192-204)
SHPRYYISANVTG

SEQ ID NO: 7540 - protein, 15 aa, synthetic construct
  REGION 1..15: note = Ceramide glucosyltransferase (192-206)
SHPRYYISANVTGFK

SEQ ID NO: 7541 - protein, 9 aa, synthetic construct
  REGION 1..9: note = Hematopoietic SH2 domain-containing protein (61-69)
SHSHVGYTL

SEQ ID NO: 7542 - protein, 15 aa, synthetic construct
  REGION 1..15: note = Serine incorporator 3 (252-266)
SIISIHPKIQEHQPR

SEQ ID NO: 7543 - protein, 8 aa, synthetic construct
  REGION 1..8: note = Uncharacterized protein CXorf21 (192-199)
SIKEKSSL

SEQ ID NO: 7544 - protein, 9 aa, synthetic construct
  REGION 1..9: note = Protein asunder homolog (394-402)
SILEDPPSI

SEQ ID NO: 7545 - protein, 14 aa, synthetic construct
  REGION 1..14: note = Golgi apparatus protein 1 (1057-1070)
SKADIFVDPVLHTA

SEQ ID NO: 7546 - protein, 12 aa, synthetic construct
  REGION 1..12: note = Perilipin-2 (369-380)
SLLTSSKGQLQK

SEQ ID NO: 7547 - protein, 9 aa, synthetic construct
  REGION 1..9: note = DmX-like protein 1 (607-615)
SLNQWLVSF

SEQ ID NO: 7548 - protein, 9 aa, synthetic construct
  REGION 1..9: note = DmX-like protein 1 (1285-1293)
SMTSLAQKI

SEQ ID NO: 7549 - protein, 14 aa, synthetic construct
  REGION 1..14: note = Cystatin-C (64-77)
SNDMYHSRALQVVR

SEQ ID NO: 7550 - protein, 14 aa, synthetic construct
  REGION 1..14: note = Vitamin D-binding protein (234-247)
SNLIKLAQKVPTAD

SEQ ID NO: 7551 - protein, 15 aa, synthetic construct
  REGION 1..15: note = Glucose-6-phosphate isomerase (107-121)
SNTPILVDGKDVMPE

SEQ ID NO: 7552 - protein, 17 aa, synthetic construct
  REGION 1..17: note = Glucose-6-phosphate isomerase (107-123)
SNTPILVDGKDVMPEVN

SEQ ID NO: 7553 - protein, 9 aa, synthetic construct
  REGION 1..9: note = NACHT, LRR and PYD domains-containing protein 2 (739-747)
SPADAHRNL

SEQ ID NO: 7554 - protein, 12 aa, synthetic construct
  REGION 1..12: note = Calcium and integrin-binding protein 1 (80-91)
SPAKDSLSFEDF

SEQ ID NO: 7555 - protein, 15 aa, synthetic construct
  REGION 1..15: note = Calcium and integrin-binding protein 1 (80-94)
SPAKDSLSFEDFLDL

SEQ ID NO: 7556 - protein, 8 aa, synthetic construct
  REGION 1..8: note = Tumor necrosis factor receptor superfamily member 13C (50-57)
SPAPRTAL

SEQ ID NO: 7557 - protein, 9 aa, synthetic construct
  REGION 1..9: note = Cordon-bleu protein-like 1 (911-919)
SPEQTLSPL

SEQ ID NO: 7558 - protein, 15 aa, synthetic construct
  REGION 1..15: note = Transferrin receptor protein 1 (695-709)
SPFRHVFWGSGSHTL

SEQ ID NO: 7559 - protein, 8 aa, synthetic construct
  REGION 1..8: note = Ras-specific guanine nucleotide-releasing factor 1 (774-781)
SPFSKATL

SEQ ID NO: 7560 - protein, 14 aa, synthetic construct
  REGION 1..14: note = Beta-1,4-galactosyltransferase 1 (174-187)
SPHKVAIIIPFRNR

SEQ ID NO: 7561 - protein, 16 aa, synthetic construct
  REGION 1..16: note = Beta-1,4-galactosyltransferase 1 (174-189)
SPHKVAIIIPFRNRQE

SEQ ID NO: 7562 - protein, 17 aa, synthetic construct
  REGION 1..17: note = Beta-1,4-galactosyltransferase 1 (174-190)
SPHKVAIIIPFRNRQEH

SEQ ID NO: 7563 - protein, 13 aa, synthetic construct
  REGION 1..13: note = Phosphate-regulating neutral endopeptidase (424-436)
SPPQFRVNGAISN

SEQ ID NO: 7564 - protein, 15 aa, synthetic construct
  REGION 1..15: note = Phosphate-regulating neutral endopeptidase (424-438)
SPPQFRVNGAISNFE

SEQ ID NO: 7565 - protein, 16 aa, synthetic construct
  REGION 1..16: note = Phosphate-regulating neutral endopeptidase (424-439)
SPPQFRVNGAISNFEE

SEQ ID NO: 7566 - protein, 17 aa, synthetic construct
  REGION 1..17: note = Phosphate-regulating neutral endopeptidase (424-440)
SPPQFRVNGAISNFEEF

SEQ ID NO: 7567 - protein, 9 aa, synthetic construct
  REGION 1..9: note = Zinc finger protein 296 (218-226)
SPRASGSGL

SEQ ID NO: 7568 - protein, 10 aa, synthetic construct
  REGION 1..10: note = Lysine-specific demethylase 2B (832-841)
SPRPPLGSSL

SEQ ID NO: 7569 - protein, 15 aa, synthetic construct
  REGION 1..15: note = Golgi apparatus protein 1 (1141-1155)
SPSKNYILSVISGSI

SEQ ID NO: 7570 - protein, 8 aa, synthetic construct
  REGION 1..8: note = T-cell activation Rho GTPase-activating protein (149-156)
SPSRQPQV

SEQ ID NO: 7571 - protein, 18 aa, synthetic construct
  REGION 1..18: note = SLAM family member 6 (167-184)
SPTNNTVYASVTHSNRET

SEQ ID NO: 7572 - protein, 10 aa, synthetic construct
  REGION 1..10: note = Cadherin EGF LAG seven-pass G-type receptor 1 (2960-2969)
SPTSSRTSSL

SEQ ID NO: 7573 - protein, 14 aa, synthetic construct
  REGION 1..14: note = Alpha-mannosidase 2 (670-683)
SPTVQVFSASGKPV

SEQ ID NO: 7574 - protein, 11 aa, synthetic construct
  REGION 1..11: note = ATP synthase F(0) complex subunit C1, mitochondrial (32-42)
SPVNSSKQPSY

SEQ ID NO: 7575 - protein, 8 aa, synthetic construct
  REGION 1..8: note = Lysine-specific demethylase 2B (842-849)
SPWWRSSL

SEQ ID NO: 7576 - protein, 21 aa, synthetic construct
  REGION 1..21: note = Heterogeneous nuclear ribonucleoprotein A3 (169-189)
SPYGGGYGSGGGSGGYGSRRF

SEQ ID NO: 7577 - protein, 9 aa, synthetic construct
  REGION 1..9: note = Melanoma antigen preferentially expressed in tumors (406-414)
SQLTTLSFY

SEQ ID NO: 7578 - protein, 15 aa, synthetic construct
  REGION 1..15: note = Platelet endothelial cell adhesion molecule (409-423)
SQPRISYDAQFEVIK

SEQ ID NO: 7579 - protein, 16 aa, synthetic construct
  REGION 1..16: note = Platelet endothelial cell adhesion molecule (409-424)
SQPRISYDAQFEVIKG

SEQ ID NO: 7580 - protein, 9 aa, synthetic construct
  REGION 1..9: note = Tumor protein p53-inducible protein 11 (14-22)
SQTDLVSRL

SEQ ID NO: 7581 - protein, 15 aa, synthetic construct
  REGION 1..15: note = Interleukin-4 receptor subunit alpha (90-104)
SRDDFQEGREGIVAR

SEQ ID NO: 7582 - protein, 9 aa, synthetic construct
  REGION 1..9: note = T-cell activation Rho GTPase-activating protein (308-316)
SRHQSFTTK

SEQ ID NO: 7583 - protein, 9 aa, synthetic construct
  REGION 1..9: note = T-cell activation Rho GTPase-activating protein (5-13)
SSHNASKTL

SEQ ID NO: 7584 - protein, 15 aa, synthetic construct
  REGION 1..15: note = Ragulator complex protein LAMTOR1 (55-69)
SSILAKTASNIIDVS

SEQ ID NO: 7585 - protein, 13 aa, synthetic construct
  REGION 1..13: note = Serine incorporator 3 (351-363)
SSIRTSTNSQVDK

SEQ ID NO: 7586 - protein, 16 aa, synthetic construct
  REGION 1..16: note = Alpha-mannosidase 2 (669-684)
SSPTVQVFSASGKPVE

SEQ ID NO: 7587 - protein, 9 aa, synthetic construct
  REGION 1..9: note = DmX-like protein 1 (1271-1279)
SSSGLHPPK

SEQ ID NO: 7588 - protein, 13 aa, synthetic construct
  REGION 1..13: note = Interleukin-4 receptor subunit alpha (490-502)
SSSSFHPAPGNAQ

SEQ ID NO: 7589 - protein, 9 aa, synthetic construct
  REGION 1..9: note = Interleukin-1 beta (84-92)
SVDPKNYPK

SEQ ID NO: 7590 - protein, 13 aa, synthetic construct
  REGION 1..13: note = 15 kDa selenoprotein (150-162)
SVEEFLSEKLERI

SEQ ID NO: 7591 - protein, 12 aa, synthetic construct
  REGION 1..12: note = Transferrin receptor protein 1 (199-210)
SVIIVDKNGRLV

SEQ ID NO: 7592 - protein, 9 aa, synthetic construct
  REGION 1..9: note = AT-rich interactive domain-containing protein 5B (278-286)
SVIQHVQSF

SEQ ID NO: 7593 - protein, 10 aa, synthetic construct
  REGION 1..10: note = Probable ATP-dependent RNA helicase DDX46 (198-207)
SVKGGGGNEK

SEQ ID NO: 7594 - protein, 14 aa, synthetic construct
  REGION 1..14: note = Plasma membrane calcium-transporting ATPase 1 (110-123)
SVKKMMKDNNLVRH

SEQ ID NO: 7595 - protein, 9 aa, synthetic construct
  REGION 1..9: note = Zinc finger protein 638 (619-627)
SVKPTSATK

SEQ ID NO: 7596 - protein, 11 aa, synthetic construct
  REGION 1..11: note = Interleukin-17 receptor A (789-799)
SVQSDQGYISR

SEQ ID NO: 7597 - protein, 15 aa, synthetic construct
  REGION 1..15: note = Low affinity immunoglobulin epsilon Fc receptor (32-46)
SWNLNGLQADLSSFK

SEQ ID NO: 7598 - protein, 15 aa, synthetic construct
  REGION 1..15: note = Receptor-type tyrosine-protein phosphatase alpha (182-196)
TATIVMVTNLKERKE

SEQ ID NO: 7599 - protein, 10 aa, synthetic construct
  REGION 1..10: note = Dystrophin (30-39)
TEAETTANVL

SEQ ID NO: 7600 - protein, 8 aa, synthetic construct
  REGION 1..8: note = Transcription regulator protein BACH2 (559-566)
TEHQEPGL

SEQ ID NO: 7601 - protein, 9 aa, synthetic construct
  REGION 1..9: note = Cordon-bleu protein-like 1 (804-812)
TEHQVPSSV

SEQ ID NO: 7602 - protein, 11 aa, synthetic construct
  REGION 1..11: note = Uncharacterized protein CXorf21 (281-291)
TEITEISTPSL

SEQ ID NO: 7603 - protein, 9 aa, synthetic construct
  REGION 1..9: note = Ribonucleoside-diphosphate reductase subunit M2 B (128-136)
TFGERVVAF

SEQ ID NO: 7604 - protein, 15 aa, synthetic construct
  REGION 1..15: note = Cation-independent mannose-6-phosphate receptor (1446-1460)
TGHLFDLSSLSGRAG

SEQ ID NO: 7605 - protein, 14 aa, synthetic construct
  REGION 1..14: note = Low affinity immunoglobulin epsilon Fc receptor (139-152)
TGSWIGLRNLDLKG

SEQ ID NO: 7606 - protein, 15 aa, synthetic construct
  REGION 1..15: note = SLAM family member 6 (104-118)
TGSYRAQISTKTSAK

SEQ ID NO: 7607 - protein, 9 aa, synthetic construct
  REGION 1..9: note = ATP-binding cassette sub-family A member 6 (728-736)
THHIPDAKL

SEQ ID NO: 7608 - protein, 9 aa, synthetic construct
  REGION 1..9: note = Transcription regulator protein BACH2 (70-78)
TKNDLVVSL

SEQ ID NO: 7609 - protein, 8 aa, synthetic construct
  REGION 1..8: note = Baculoviral IAP repeat-containing protein 5 (97-104)
TLGEFLKL

SEQ ID NO: 7610 - protein, 13 aa, synthetic construct
  REGION 1..13: note = Fas apoptotic inhibitory molecule 3 (65-77)
TNFIKAEYKGRVT

SEQ ID NO: 7611 - protein, 14 aa, synthetic construct
  REGION 1..14: note = Calsyntenin-1 (140-153)
TNVKKSHKATVHIQ

SEQ ID NO: 7612 - protein, 9 aa, synthetic construct
  REGION 1..9: note = Interferon regulatory factor 9 (382-390)
TPEQQAAIL

SEQ ID NO: 7613 - protein, 9 aa, synthetic construct
  REGION 1..9: note = Cyclin-dependent kinase 14 (174-182)
TPFTAIREA

SEQ ID NO: 7614 - protein, 9 aa, synthetic construct
  REGION 1..9: note = AT-rich interactive domain-containing protein 5B (36-44)
TPIERIPYL

SEQ ID NO: 7615 - protein, 12 aa, synthetic construct
  REGION 1..12: note = Glucose-6-phosphate isomerase (109-120)
TPILVDGKDVMP

SEQ ID NO: 7616 - protein, 13 aa, synthetic construct
  REGION 1..13: note = Glucose-6-phosphate isomerase (109-121)
TPILVDGKDVMPE

SEQ ID NO: 7617 - protein, 14 aa, synthetic construct
  REGION 1..14: note = Glucose-6-phosphate isomerase (109-122)
TPILVDGKDVMPEV

SEQ ID NO: 7618 - protein, 15 aa, synthetic construct
  REGION 1..15: note = Glucose-6-phosphate isomerase (109-123)
TPILVDGKDVMPEVN

SEQ ID NO: 7619 - protein, 9 aa, synthetic construct
  REGION 1..9: note = Probable ribonuclease ZC3H12D (145-153)
TPIREQHVL

SEQ ID NO: 7620 - protein, 16 aa, synthetic construct
  REGION 1..16: note = Protein CDV3 homolog (80-95)
TPQGPPEIYSDTQFPS

SEQ ID NO: 7621 - protein, 18 aa, synthetic construct
  REGION 1..18: note = Protein CDV3 homolog (80-97)
TPQGPPEIYSDTQFPSLQ

SEQ ID NO: 7622 - protein, 20 aa, synthetic construct
  REGION 1..20: note = Protein CDV3 homolog (80-99)
TPQGPPEIYSDTQFPSLQST

SEQ ID NO: 7623 - protein, 18 aa, synthetic construct
  REGION 1..18: note = SLAM family member 6 (188-205)
TPRENDTITIYSTINHSK

SEQ ID NO: 7624 - protein, 23 aa, synthetic construct
  REGION 1..23: note = SLAM family member 6 (188-210)
TPRENDTITIYSTINHSKESKPT

SEQ ID NO: 7625 - protein, 9 aa, synthetic construct
  REGION 1..9: note = Protein asunder homolog (320-328)
TPRTNNIEL

SEQ ID NO: 7626 - protein, 15 aa, synthetic construct
  REGION 1..15: note = E3 ubiquitin-protein ligase CHIP (246-260)
TPSGITYDRKDIEEH

SEQ ID NO: 7627 - protein, 12 aa, synthetic construct
  REGION 1..12: note = Putative heat shock 70 kDa protein 7 (40-51)
TPSYVAFTDTER

SEQ ID NO: 7628 - protein, 13 aa, synthetic construct
  REGION 1..13: note = Putative heat shock 70 kDa protein 7 (40-52)
TPSYVAFTDTERL

SEQ ID NO: 7629 - protein, 9 aa, synthetic construct
  REGION 1..9: note = Zinc finger protein 107 (512-520)
TRHKIVHTK

SEQ ID NO: 7630 - protein, 14 aa, synthetic construct
  REGION 1..14: note = Cytochrome b ascorbate-dependent protein 3 (187-200)
TRPYHSLPSEAVFA

SEQ ID NO: 7631 - protein, 15 aa, synthetic construct
  REGION 1..15: note = Cytochrome b ascorbate-dependent protein 3 (187-201)
TRPYHSLPSEAVFAN

SEQ ID NO: 7632 - protein, 14 aa, synthetic construct
  REGION 1..14: note = Ras-related protein Rab-11A (50-63)
TRSIQVDGKTIKAQ

SEQ ID NO: 7633 - protein, 14 aa, synthetic construct
  REGION 1..14: note = Ceramide glucosyltransferase (191-204)
TSHPRYYISANVTG

SEQ ID NO: 7634 - protein, 16 aa, synthetic construct
  REGION 1..16: note = Ceramide glucosyltransferase (191-206)
TSHPRYYISANVTGFK

SEQ ID NO: 7635 - protein, 16 aa, synthetic construct
  REGION 1..16: note = B- and T-lymphocyte attenuator (128-143)
TTLYVTDVKSASERPS

SEQ ID NO: 7636 - protein, 14 aa, synthetic construct
  REGION 1..14: note = Fas apoptotic inhibitory molecule 3 (64-77)
TTNFIKAEYKGRVT

SEQ ID NO: 7637 - protein, 14 aa, synthetic construct
  REGION 1..14: note = DnaJ homolog subfamily C member 5 (181-194)
TTQLTADSHPSYHT

SEQ ID NO: 7638 - protein, 15 aa, synthetic construct
  REGION 1..15: note = DnaJ homolog subfamily C member 5 (181-195)
TTQLTADSHPSYHTD

SEQ ID NO: 7639 - protein, 16 aa, synthetic construct
  REGION 1..16: note = DnaJ homolog subfamily C member 5 (181-196)
TTQLTADSHPSYHTDG

SEQ ID NO: 7640 - protein, 9 aa, synthetic construct
  REGION 1..9: note = Cordon-bleu protein-like 1 (732-740)
TTYKIVPPK

SEQ ID NO: 7641 - protein, 11 aa, synthetic construct
  REGION 1..11: note = Eukaryotic translation initiation factor 6 (141-151)
TVADQVLVGSY

SEQ ID NO: 7642 - protein, 9 aa, synthetic construct
  REGION 1..9: note = ATP-binding cassette sub-family A member 6 (572-580)
TVKENLSLF

SEQ ID NO: 7643 - protein, 12 aa, synthetic construct
  REGION 1..12: note = C-C chemokine receptor type 7 (93-104)
VAIVQAVSAHRH

SEQ ID NO: 7644 - protein, 13 aa, synthetic construct
  REGION 1..13: note = C-C chemokine receptor type 7 (93-105)
VAIVQAVSAHRHR

SEQ ID NO: 7645 - protein, 14 aa, synthetic construct
  REGION 1..14: note = C-C chemokine receptor type 7 (93-106)
VAIVQAVSAHRHRA

SEQ ID NO: 7646 - protein, 15 aa, synthetic construct
  REGION 1..15: note = C-C chemokine receptor type 7 (93-107)
VAIVQAVSAHRHRAR

SEQ ID NO: 7647 - protein, 12 aa, synthetic construct
  REGION 1..12: note = Interleukin-4 receptor subunit alpha (102-113)
VARLTESLFLDL

SEQ ID NO: 7648 - protein, 14 aa, synthetic construct
  REGION 1..14: note = Interleukin-4 receptor subunit alpha (102-115)
VARLTESLFLDLLG

SEQ ID NO: 7649 - protein, 12 aa, synthetic construct
  REGION 1..12: note = Cytochrome b ascorbate-dependent protein 3 (99-110)
VAVFTFHNHGRT

SEQ ID NO: 7650 - protein, 13 aa, synthetic construct
  REGION 1..13: note = Cytochrome b ascorbate-dependent protein 3 (99-111)
VAVFTFHNHGRTA

SEQ ID NO: 7651 - protein, 15 aa, synthetic construct
  REGION 1..15: note = Cytochrome b ascorbate-dependent protein 3 (99-113)
VAVFTFHNHGRTANL

SEQ ID NO: 7652 - protein, 13 aa, synthetic construct
  REGION 1..13: note = Vesicle-associated membrane protein 1 (52-64)
VDKVLERDQKLSE

SEQ ID NO: 7653 - protein, 15 aa, synthetic construct
  REGION 1..15: note = Vesicle-associated membrane protein 3 (33-47)
VDKVLERDQKLSELD

SEQ ID NO: 7654 - protein, 16 aa, synthetic construct
  REGION 1..16: note = Vesicle-associated membrane protein 3 (33-48)
VDKVLERDQKLSELDD

SEQ ID NO: 7655 - protein, 17 aa, synthetic construct
  REGION 1..17: note = Vesicle-associated membrane protein 1 (52-68)
VDKVLERDQKLSELDDR

SEQ ID NO: 7656 - protein, 15 aa, synthetic construct
  REGION 1..15: note = T-complex protein 1 subunit beta (408-422)
VDNIIKAAPRKRVPD

SEQ ID NO: 7657 - protein, 12 aa, synthetic construct
  REGION 1..12: note = 15 kDa selenoprotein (151-162)
VEEFLSEKLERI

SEQ ID NO: 7658 - protein, 15 aa, synthetic construct
  REGION 1..15: note = Glycosyltransferase 8 domain-containing protein 1 (270-284)
VEEGLYSRTLAGSIT

SEQ ID NO: 7659 - protein, 10 aa, synthetic construct
  REGION 1..10: note = B-lymphocyte antigen CD19 (115-124)
VEGSGELFRW

SEQ ID NO: 7660 - protein, 9 aa, synthetic construct
  REGION 1..9: note = Interferon regulatory factor 9 (320-328)
VELFRTAYF

SEQ ID NO: 7661 - protein, 13 aa, synthetic construct
  REGION 1..13: note = Transferrin receptor protein 1 (681-693)
VEYHFLSPYVSPK

SEQ ID NO: 7662 - protein, 14 aa, synthetic construct
  REGION 1..14: note = Transferrin receptor protein 1 (681-694)
VEYHFLSPYVSPKE

SEQ ID NO: 7663 - protein, 15 aa, synthetic construct
  REGION 1..15: note = Phosphoinositide-3-kinase-interacting protein 1 (130-144)
VFAPANALPARSEAA

SEQ ID NO: 7664 - protein, 9 aa, synthetic construct
  REGION 1..9: note = HLA class II histocompatibility antigen, DM alpha chain (12-20)
VFTLKPLEF

SEQ ID NO: 7665 - protein, 13 aa, synthetic construct
  REGION 1..13: note = Cystatin-C (57-69)
VGEYNKASNDMYH

SEQ ID NO: 7666 - protein, 15 aa, synthetic construct
  REGION 1..15: note = Phosphate-regulating neutral endopeptidase (131-145)
VGKMFVDVYFQEDKK

SEQ ID NO: 7667 - protein, 16 aa, synthetic construct
  REGION 1..16: note = Phosphate-regulating neutral endopeptidase (131-146)
VGKMFVDVYFQEDKKE

SEQ ID NO: 7668 - protein, 14 aa, synthetic construct
  REGION 1..14: note = HLA class II histocompatibility antigen, DO beta chain (70-83)
VGMFVALTKLGQPD

SEQ ID NO: 7669 - protein, 17 aa, synthetic construct
  REGION 1..17: note = Perilipin-3 (406-422)
VGPFAPGITEKAPEEKK

SEQ ID NO: 7670 - protein, 14 aa, synthetic construct
  REGION 1..14: note = Cullin-associated NEDD8-dissociated protein 1 (747-760)
VGQFIQDVKNSRST

SEQ ID NO: 7671 - protein, 15 aa, synthetic construct
  REGION 1..15: note = Cullin-associated NEDD8-dissociated protein 1 (747-761)
VGQFIQDVKNSRSTD

SEQ ID NO: 7672 - protein, 12 aa, synthetic construct
  REGION 1..12: note = Ceruloplasmin (107-118)
VHLKNLASRPYT

SEQ ID NO: 7673 - protein, 15 aa, synthetic construct
  REGION 1..15: note = Polypeptide N-acetylgalactosaminyltransferase 1 (76-90)
VHSVINRSPRHMIEE

SEQ ID NO: 7674 - protein, 13 aa, synthetic construct
  REGION 1..13: note = Interleukin-4 receptor subunit alpha (189-201)
VIAGNPAYRSFSN

SEQ ID NO: 7675 - protein, 10 aa, synthetic construct
  REGION 1..10: note = Methyltransferase-like protein 7A (45-54)
VIYNEQMASK

SEQ ID NO: 7676 - protein, 13 aa, synthetic construct
  REGION 1..13: note = Plasma membrane calcium-transporting ATPase 1 (111-123)
VKKMMKDNNLVRH

SEQ ID NO: 7677 - protein, 14 aa, synthetic construct
  REGION 1..14: note = Vesicle-associated membrane protein 1 (55-68)
VLERDQKLSELDDR

SEQ ID NO: 7678 - protein, 8 aa, synthetic construct
  REGION 1..8: note = ATP-binding cassette sub-family A member 6 (320-327)
VLLKKAVL

SEQ ID NO: 7679 - protein, 9 aa, synthetic construct
  REGION 1..9: note = Methyltransferase-like protein 7A (163-171)
VLRPGGAFY

SEQ ID NO: 7680 - protein, 12 aa, synthetic construct
  REGION 1..12: note = Serine incorporator 3 (91-102)
VLVGYKAVYRIS

SEQ ID NO: 7681 - protein, 9 aa, synthetic construct
  REGION 1..9: note = Ras GTPase-activating protein nGAP (848-856)
VMLDVPIRL

SEQ ID NO: 7682 - protein, 10 aa, synthetic construct
  REGION 1..10: note = B-cell linker protein (9-18)
VPASQKLRQL

SEQ ID NO: 7683 - protein, 9 aa, synthetic construct
  REGION 1..9: note = Endoplasmic reticulum resident protein 44 (242-250)
VPLVREITF

SEQ ID NO: 7684 - protein, 9 aa, synthetic construct
  REGION 1..9: note = BRCA2 and CDKN1A-interacting protein (285-293)
VPMTPLRTV

SEQ ID NO: 7685 - protein, 19 aa, synthetic construct
  REGION 1..19: note = Interleukin-4 receptor subunit alpha (241-259)
VPQPEPETWEQILRRNVLQ

SEQ ID NO: 7686 - protein, 16 aa, synthetic construct
  REGION 1..16: note = Cation-independent mannose-6-phosphate receptor (1001-1016)
VPSPVDCQVTDLAGNE

SEQ ID NO: 7687 - protein, 14 aa, synthetic construct
  REGION 1..14: note = Fibromodulin (103-116)
VPSRMKYVYFQNNQ

SEQ ID NO: 7688 - protein, 16 aa, synthetic construct
  REGION 1..16: note = Fibromodulin (103-118)
VPSRMKYVYFQNNQIT

SEQ ID NO: 7689 - protein, 17 aa, synthetic construct
  REGION 1..17: note = Fibromodulin (103-119)
VPSRMKYVYFQNNQITS

SEQ ID NO: 7690 - protein, 13 aa, synthetic construct
  REGION 1..13: note = Ragulator complex protein LAMTOR3 (30-42)
VPVIKVANDNAPE

SEQ ID NO: 7691 - protein, 9 aa, synthetic construct
  REGION 1..9: note = Beta-1,4-galactosyltransferase 1 (117-125)
VPVPHTTAL

SEQ ID NO: 7692 - protein, 9 aa, synthetic construct
  REGION 1..9: note = Plateletoprotein 4 (96-104)
VPYPVTTTV

SEQ ID NO: 7693 - protein, 14 aa, synthetic construct
  REGION 1..14: note = Protocadherin-9 (176-189)
VQHYELLNGQSVFG

SEQ ID NO: 7694 - protein, 15 aa, synthetic construct
  REGION 1..15: note = Phosphoinositide-3-kinase-interacting protein 1 (128-142)
VQVFAPANALPARSE

SEQ ID NO: 7695 - protein, 13 aa, synthetic construct
  REGION 1..13: note = Cystatin-C (76-88)
VRARKQIVAGVNY

SEQ ID NO: 7696 - protein, 9 aa, synthetic construct
  REGION 1..9: note = Perilipin-2 (218-226)
VRLGSLSTK

SEQ ID NO: 7697 - protein, 18 aa, synthetic construct
  REGION 1..18: note = Cystatin-C (49-66)
VRRALDFAVGEYNKASND

SEQ ID NO: 7698 - protein, 12 aa, synthetic construct
  REGION 1..12: note = SLAM family member 6 (51-62)
VSFRWEALGNTL

SEQ ID NO: 7699 - protein, 14 aa, synthetic construct
  REGION 1..14: note = Rab GTPase-activating protein 1 (17-30)
VSTLNSEDFVLVSR

SEQ ID NO: 7700 - protein, 15 aa, synthetic construct
  REGION 1..15: note = Rab GTPase-activating protein 1 (17-31)
VSTLNSEDFVLVSRQ

SEQ ID NO: 7701 - protein, 16 aa, synthetic construct
  REGION 1..16: note = Rab GTPase-activating protein 1 (17-32)
VSTLNSEDFVLVSRQG

SEQ ID NO: 7702 - protein, 13 aa, synthetic construct
  REGION 1..13: note = HLA class II histocompatibility antigen, DM alpha chain (200-212)
VTHEIDRYTAIAY

SEQ ID NO: 7703 - protein, 17 aa, synthetic construct
  REGION 1..17: note = Fas apoptotic inhibitory molecule 3 (118-134)
VTLNVHSEYEPSWEEQP

SEQ ID NO: 7704 - protein, 9 aa, synthetic construct
  REGION 1..9: note = Zinc finger protein 296 (209-217)
VVGPAAEAK

SEQ ID NO: 7705 - protein, 14 aa, synthetic construct
  REGION 1..14: note = Cullin-associated NEDD8-dissociated protein 1 (746-759)
VVGQFIQDVKNSRS

SEQ ID NO: 7706 - protein, 15 aa, synthetic construct
  REGION 1..15: note = Cullin-associated NEDD8-dissociated protein 1 (746-760)
VVGQFIQDVKNSRST

SEQ ID NO: 7707 - protein, 16 aa, synthetic construct
  REGION 1..16: note = Cullin-associated NEDD8-dissociated protein 1 (746-761)
VVGQFIQDVKNSRSTD

SEQ ID NO: 7708 - protein, 17 aa, synthetic construct
  REGION 1..17: note = Cullin-associated NEDD8-dissociated protein 1 (746-762)
VVGQFIQDVKNSRSTDS

SEQ ID NO: 7709 - protein, 13 aa, synthetic construct
  REGION 1..13: note = Cystatin-C (75-87)
VVRARKQIVAGVN

SEQ ID NO: 7710 - protein, 14 aa, synthetic construct
  REGION 1..14: note = Cystatin-C (75-88)
VVRARKQIVAGVNY

SEQ ID NO: 7711 - protein, 10 aa, synthetic construct
  REGION 1..10: note = Negative elongation factor E (371-380)
VYKENLVDGF

SEQ ID NO: 7712 - protein, 10 aa, synthetic construct
  REGION 1..10: note = Lysine-specific demethylase 2B (316-325)
VYTPVDSLVF

SEQ ID NO: 7713 - protein, 13 aa, synthetic construct
  REGION 1..13: note = Ceruloplasmin (105-117)
VYVHLKNLASRPY

SEQ ID NO: 7714 - protein, 14 aa, synthetic construct
  REGION 1..14: note = Ceruloplasmin (105-118)
VYVHLKNLASRPYT

SEQ ID NO: 7715 - protein, 16 aa, synthetic construct
  REGION 1..16: note = Ceruloplasmin (105-120)
VYVHLKNLASRPYTFH

SEQ ID NO: 7716 - protein, 14 aa, synthetic construct
  REGION 1..14: note = Glycosyltransferase 8 domain-containing protein 1 (346-359)
WEKWYIPDPTGKFN

SEQ ID NO: 7717 - protein, 12 aa, synthetic construct
  REGION 1..12: note = Fibromodulin (133-144)
WIALHGNQITSD

SEQ ID NO: 7718 - protein, 13 aa, synthetic construct
  REGION 1..13: note = Fibromodulin (133-145)
WIALHGNQITSDK

SEQ ID NO: 7719 - protein, 12 aa, synthetic construct
  REGION 1..12: note = Glutathione peroxidase 1 (104-115)
WNFEKFLVGPDG

SEQ ID NO: 7720 - protein, 14 aa, synthetic construct
  REGION 1..14: note = Platelet endothelial cell adhesion molecule (415-428)
YDAQFEVIKGQTIE

SEQ ID NO: 7721 - protein, 12 aa, synthetic construct
  REGION 1..12: note = Vitamin D-binding protein (84-95)
YDTRTSALSAKS

SEQ ID NO: 7722 - protein, 19 aa, synthetic construct
  REGION 1..19: note = Heterogeneous nuclear ribonucleoprotein A3 (171-189)
YGGGYGSGGGSGGYGSRRF

SEQ ID NO: 7723 - protein, 14 aa, synthetic construct
  REGION 1..14: note = Interleukin-4 receptor subunit alpha (302-315)
YKAFSSLLASSAVS

SEQ ID NO: 7724 - protein, 15 aa, synthetic construct
  REGION 1..15: note = Interleukin-4 receptor subunit alpha (302-316)
YKAFSSLLASSAVSP

SEQ ID NO: 7725 - protein, 16 aa, synthetic construct
  REGION 1..16: note = Interleukin-4 receptor subunit alpha (302-317)
YKAFSSLLASSAVSPE

SEQ ID NO: 7726 - protein, 12 aa, synthetic construct
  REGION 1..12: note = Glycosyltransferase 8 domain-containing protein 1 (123-134)
YKIVNFDPKLLE

SEQ ID NO: 7727 - protein, 13 aa, synthetic construct
  REGION 1..13: note = Glycosyltransferase 8 domain-containing protein 1 (123-135)
YKIVNFDPKLLEG

SEQ ID NO: 7728 - protein, 15 aa, synthetic construct
  REGION 1..15: note = Glycosyltransferase 8 domain-containing protein 1 (123-137)
YKIVNFDPKLLEGKV

SEQ ID NO: 7729 - protein, 13 aa, synthetic construct
  REGION 1..13: note = Ragulator complex protein LAMTOR3 (68-80)
YNTYQVVQFNRLP

SEQ ID NO: 7730 - protein, 14 aa, synthetic construct
  REGION 1..14: note = Ragulator complex protein LAMTOR3 (68-81)
YNTYQVVQFNRLPL

SEQ ID NO: 7731 - protein, 15 aa, synthetic construct
  REGION 1..15: note = Ragulator complex protein LAMTOR3 (68-82)
YNTYQVVQFNRLPLV

SEQ ID NO: 7732 - protein, 16 aa, synthetic construct
  REGION 1..16: note = Ragulator complex protein LAMTOR3 (68-83)
YNTYQVVQFNRLPLVV

SEQ ID NO: 7733 - protein, 9 aa, synthetic construct
  REGION 1..9: note = Zinc finger protein 638 (459-467)
YPNKGVGQA

SEQ ID NO: 7734 - protein, 19 aa, synthetic construct
  REGION 1..19: note = Fas apoptotic inhibitory molecule 3 (81-99)
YPRKNLFLVEVTQLTESDS

SEQ ID NO: 7735 - protein, 20 aa, synthetic construct
  REGION 1..20: note = Fas apoptotic inhibitory molecule 3 (81-100)
YPRKNLFLVEVTQLTESDSG

SEQ ID NO: 7736 - protein, 9 aa, synthetic construct
  REGION 1..9: note = Beta-1,4-galactosyltransferase 1 (117-125)
YQVLDVQRY

SEQ ID NO: 7737 - protein, 14 aa, synthetic construct
  REGION 1..14: note = Serine incorporator 3 (350-363)
YSSIRTSTNSQVDK

SEQ ID NO: 7738 - protein, 9 aa, synthetic construct
  REGION 1..9: note = E3 ubiquitin-protein ligase Mdm2 (48-56)
YTMKEVLFY

SEQ ID NO: 7739 - protein, 12 aa, synthetic construct
  REGION 1..12: note = Ceruloplasmin (106-117)
YVHLKNLASRPY

SEQ ID NO: 7740 - protein, 13 aa, synthetic construct
  REGION 1..13: note = Ceruloplasmin (106-118)
YVHLKNLASRPYT

SEQ ID NO: 7741 - protein, 15 aa, synthetic construct
  REGION 1..15: note = Ceruloplasmin (106-120)
YVHLKNLASRPYTFH

SEQ ID NO: 7742 - protein, 8 aa, synthetic construct
  REGION 1..8: note = HLA class II histocompatibility antigen, DM alpha chain (116-123)
YWVPRNAL

SEQ ID NO: 7743 - protein, 14 aa, synthetic construct
  REGION 1..14: note = Ragulator complex protein LAMTOR3 (67-80)
YYNTYQVVQFNRLP

SEQ ID NO: 7744 - protein, 15 aa, synthetic construct
  REGION 1..15: note = Ragulator complex protein LAMTOR3 (67-81)
YYNTYQVVQFNRLPL

SEQ ID NO: 7745 - protein, 16 aa, synthetic construct
  REGION 1..16: note = Ragulator complex protein LAMTOR3 (67-82)
YYNTYQVVQFNRLPLV

SEQ ID NO: 7746 - protein, 10 aa, synthetic construct
  REGION 1..10: note = Melanoma-associated antigen C2 (191-200)
LLFGLALIEV

SEQ ID NO: 7747 - protein, 14 aa, synthetic construct
  REGION 1..14: note = C-C motif chemokine 3 (59-72)
KPGVIFLTKRSRQV

SEQ ID NO: 7748 - protein, 5 aa, synthetic construct
  REGION 1..5: note = Ig gamma-1 chain C region (91-95)
SAVYY

SEQ ID NO: 7749 - protein, 9 aa, synthetic construct
  REGION 1..9: note = Serum albumin (444-452)
TPTLVEVSR

SEQ ID NO: 7750 - protein, 12 aa, synthetic construct
  REGION 1..12: note = DNA topoisomerase 2-alpha (978-989)
AEAERVGLHKVF

SEQ ID NO: 7751 - protein, 12 aa, synthetic construct
  REGION 1..12: note = Basement membrane-specific heparan sulfate proteoglycan core protein (1484-1495)
ALADLDELLIRA

SEQ ID NO: 7752 - protein, 12 aa, synthetic construct
  REGION 1..12: note = Protein phosphatase 1M (122-133)
ALFDGHGGPAAA

SEQ ID NO: 7753 - protein, 13 aa, synthetic construct
  REGION 1..13: note = Sequestosome-1 (53-65)
ALFPALRPGGFQA

SEQ ID NO: 7754 - protein, 12 aa, synthetic construct
  REGION 1..12: note = UPF0585 protein C16orf13 (153-164)
ALLEDLGKASGL

SEQ ID NO: 7755 - protein, 13 aa, synthetic construct
  REGION 1..13: note = Signal transducer and activator of transcription 1-alpha/beta (589-601)
ALLKDQQPGTFLL

SEQ ID NO: 7756 - protein, 17 aa, synthetic construct
  REGION 1..17: note = Glyceraldehyde-3-phosphate dehydrogenase (202-218)
ALQNIIPASTGAAKAVG

SEQ ID NO: 7757 - protein, 12 aa, synthetic construct
  REGION 1..12: note = Guanine nucleotide-binding protein G(I)/G(S)/G(T) subunit beta-1 (74-85)
ALWDIETGQQTT

SEQ ID NO: 7758 - protein, 12 aa, synthetic construct
  REGION 1..12: note = 26S protease regulatory subunit 7 (76-87)
ALWDLAADKQTL

SEQ ID NO: 7759 - protein, 12 aa, synthetic construct
  REGION 1..12: note = Peroxisomal multifunctional enzyme type 2 (193-204)
APNAGSRMTQTV

SEQ ID NO: 7760 - protein, 13 aa, synthetic construct
  REGION 1..13: note = 60S ribosomal protein L13 (47-59)
APRPASGPIRPIV

SEQ ID NO: 7761 - protein, 13 aa, synthetic construct
  REGION 1..13: note = HLA class I histocompatibility antigen, A-23 alpha chain (5-17)
APRTLVLLLSGAL

SEQ ID NO: 7762 - protein, 16 aa, synthetic construct
  REGION 1..16: note = HLA class II histocompatibility antigen, DR alpha chain (51-66)
AQGALANIAVDKANLE

SEQ ID NO: 7763 - protein, 12 aa, synthetic construct
  REGION 1..12: note = Actin, cytoplasmic 2 (19-30)
ATAASSSSLEKS

SEQ ID NO: 7764 - protein, 16 aa, synthetic construct
  REGION 1..16: note = Annexin A2 (52-67)
DEVTIVNILTNRSNAQ

SEQ ID NO: 7765 - protein, 13 aa, synthetic construct
  REGION 1..13: note = Interferon-induced transmembrane protein 1 (71-83)
DVTGAQAYASTAK

SEQ ID NO: 7766 - protein, 13 aa, synthetic construct
  REGION 1..13: note = HLA class II histocompatibility antigen, DR alpha chain (50-62)
EAQGALANIAVDK

SEQ ID NO: 7767 - protein, 17 aa, synthetic construct
  REGION 1..17: note = HLA class I histocompatibility antigen, Cw-7 alpha chain (152-168)
EDLRSWTAADTAAQITQ

SEQ ID NO: 7768 - protein, 16 aa, synthetic construct
  REGION 1..16: note = Myosin-9 (1232-1247)
EEVDGKADGAEAKPAE

SEQ ID NO: 7769 - protein, 17 aa, synthetic construct
  REGION 1..17: note = Heat shock cognate 71 kDa protein (444-460)
EGERAMTKDNNLLGKFE

SEQ ID NO: 7770 - protein, 16 aa, synthetic construct
  REGION 1..16: note = Actin, cytoplasmic 2 (15-30)
EQEMATAASSSSLEKS

SEQ ID NO: 7771 - protein, 12 aa, synthetic construct
  REGION 1..12: note = Zinc finger protein ZPR1 (349-360)
FIMDDPAGNSYL

SEQ ID NO: 7772 - protein, 12 aa, synthetic construct
  REGION 1..12: note = Sorting nexin-14 (234-245)
FLADPDTVNHLL

SEQ ID NO: 7773 - protein, 12 aa, synthetic construct
  REGION 1..12: note = Cytochrome c oxidase assembly factor 3 homolog, mitochondrial (84-95)
FLDELEDEAKAA

SEQ ID NO: 7774 - protein, 12 aa, synthetic construct
  REGION 1..12: note = Heterogeneous nuclear ribonucleoprotein U (198-209)
FLWAGGRASYGV

SEQ ID NO: 7775 - protein, 12 aa, synthetic construct
  REGION 1..12: note = Arf-GAP with Rho-GAP domain, ANK repeat and PH domain-containing protein 1 (1183-1194)
FTADPLSLLRNV

SEQ ID NO: 7776 - protein, 12 aa, synthetic construct
  REGION 1..12: note = Nucleolin (630-641)
GEIDGNKVTLDW

SEQ ID NO: 7777 - protein, 16 aa, synthetic construct
  REGION 1..16: note = Heat shock cognate 71 kDa protein (445-460)
GERAMTKDNNLLGKFE

SEQ ID NO: 7778 - protein, 17 aa, synthetic construct
  REGION 1..17: note = Keratin, type I cytoskeletal 9 (15-31)
GGGGGGGLGSGGSIRSS

SEQ ID NO: 7779 - protein, 12 aa, synthetic construct
  REGION 1..12: note = Putative RNA-binding protein 15 (1399-1410)
GLAPAEVVVATV

SEQ ID NO: 7780 - protein, 12 aa, synthetic construct
  REGION 1..12: note = ERI1 exoribonuclease 3 (154-165)
GLLDPNVKSIFV

SEQ ID NO: 7781 - protein, 13 aa, synthetic construct
  REGION 1..13: note = Anion exchange protein 2 (714-726)
GLLGEKTQDLIGV

SEQ ID NO: 7782 - protein, 16 aa, synthetic construct
  REGION 1..16: note = Phosphoglycerate kinase 1 (338-353)
GPVGVFEWEAFARGTK

SEQ ID NO: 7783 - protein, 17 aa, synthetic construct
  REGION 1..17: note = Phosphoglycerate kinase 1 (338-354)
GPVGVFEWEAFARGTKA

SEQ ID NO: 7784 - protein, 15 aa, synthetic construct
  REGION 1..15: note = Calmodulin (135-149)
GQVNYEEFVQMMTAK

SEQ ID NO: 7785 - protein, 19 aa, synthetic construct
  REGION 1..19: note = Keratin, type II cytoskeletal 1 (560-578)
GSGGGSYGSGGGGGGHGSY

SEQ ID NO: 7786 - protein, 16 aa, synthetic construct
  REGION 1..16: note = HLA class I histocompatibility antigen, B-39 alpha chain (25-40)
GSHSMRYFYTSVSRPG

SEQ ID NO: 7787 - protein, 13 aa, synthetic construct
  REGION 1..13: note = Tumor susceptibility gene 101 protein (219-231)
GTISEDTIRASLI

SEQ ID NO: 7788 - protein, 12 aa, synthetic construct
  REGION 1..12: note = A-kinase anchor protein 1, mitochondrial (608-619)
IIWEIEVPKHLV

SEQ ID NO: 7789 - protein, 12 aa, synthetic construct
  REGION 1..12: note = Cirhin (454-465)
ILFSEDSTKLFV

SEQ ID NO: 7790 - protein, 12 aa, synthetic construct
  REGION 1..12: note = 4-hydroxyphenylpyruvate dioxygenase-like protein (312-323)
ILLDGDKGKFLL

SEQ ID NO: 7791 - protein, 13 aa, synthetic construct
  REGION 1..13: note = Nucleosome-remodeling factor subunit BPTF (1571-1583)
KIIPENDIKSLTV

SEQ ID NO: 7792 - protein, 13 aa, synthetic construct
  REGION 1..13: note = Centrin-3 (108-120)
KLFDDDDSGKISL

SEQ ID NO: 7793 - protein, 12 aa, synthetic construct
  REGION 1..12: note = Uridine-cytidine kinase 2 (2-13)
KLFVDTDADTRL

SEQ ID NO: 7794 - protein, 12 aa, synthetic construct
  REGION 1..12: note = Retinoic acid receptor RXR-gamma (441-452)
KLIGDTPIDTFL

SEQ ID NO: 7795 - protein, 13 aa, synthetic construct
  REGION 1..13: note = 40S ribosomal protein S17 (107-119)
KLLDFGSLSNLQV

SEQ ID NO: 7796 - protein, 12 aa, synthetic construct
  REGION 1..12: note = Golgin subfamily A member 4 (849-860)
KLLDLETERILL

SEQ ID NO: 7797 - protein, 12 aa, synthetic construct
  REGION 1..12: note = Utrophin (226-237)
KLLDPEDVAVQL

SEQ ID NO: 7798 - protein, 12 aa, synthetic construct
  REGION 1..12: note = Prelamin-A/C (297-308)
KLLEGEEERLRL

SEQ ID NO: 7799 - protein, 12 aa, synthetic construct
  REGION 1..12: note = Vimentin (236-247)
KLLEGEESRISL

SEQ ID NO: 7800 - protein, 14 aa, synthetic construct
  REGION 1..14: note = V-type proton ATPase subunit H (396-409)
KLLEVSDDPQVLAV

SEQ ID NO: 7801 - protein, 13 aa, synthetic construct
  REGION 1..13: note = Methionine aminopeptidase 1 (15-27)
KLLSSEDIEGMRL

SEQ ID NO: 7802 - protein, 12 aa, synthetic construct
  REGION 1..12: note = Isovaleryl-CoA dehydrogenase, mitochondrial (398-409)
KLYEIGAGTSEV

SEQ ID NO: 7803 - protein, 12 aa, synthetic construct
  REGION 1..12: note = Eukaryotic translation initiation factor 3 subunit C-like protein (765-776)
KVWDLFPEADKV

SEQ ID NO: 7804 - protein, 15 aa, synthetic construct
  REGION 1..15: note = HLA class I histocompatibility antigen, Cw-7 alpha chain (154-168)
LRSWTAADTAAQITQ

SEQ ID NO: 7805 - protein, 14 aa, synthetic construct
  REGION 1..14: note = Mitochondrial import receptor subunit TOM5 homolog (38-51)
LRVTPFILKKLDSI

SEQ ID NO: 7806 - protein, 13 aa, synthetic construct
  REGION 1..13: note = Beta-2-microglobulin (89-101)
LSQPKIVKWDRDM

SEQ ID NO: 7807 - protein, 13 aa, synthetic construct
  REGION 1..13: note = Actin, cytoplasmic 2 (18-30)
MATAASSSSLEKS

SEQ ID NO: 7808 - protein, 19 aa, synthetic construct
  REGION 1..19: note = HLA class I histocompatibility antigen, Cw-7 alpha chain (151-169)
NEDLRSWTAADTAAQITQR

SEQ ID NO: 7809 - protein, 12 aa, synthetic construct
  REGION 1..12: note = Alkyldihydroxyacetonephosphate synthase, peroxisomal (324-335)
NIYGNIEDLVVH

SEQ ID NO: 7810 - protein, 12 aa, synthetic construct
  REGION 1..12: note = Poly(U)-binding-splicing factor PUF60 (270-281)
NLFDLGGQYLRV

SEQ ID NO: 7811 - protein, 12 aa, synthetic construct
  REGION 1..12: note = Inosine-5'-monophosphate dehydrogenase 2 (312-323)
NLIDAGVDALRV

SEQ ID NO: 7812 - protein, 12 aa, synthetic construct
  REGION 1..12: note = Cyclin-dependent kinase 1 (133-144)
NLLIDDKGTIKL

SEQ ID NO: 7813 - protein, 14 aa, synthetic construct
  REGION 1..14: note = Protein ERGIC-53 (162-175)
NPAIVIIGNNGQIH

SEQ ID NO: 7814 - protein, 17 aa, synthetic construct
  REGION 1..17: note = Heat shock 70 kDa protein 1-like (170-186)
NVLRIINEPTAAAIAYG

SEQ ID NO: 7815 - protein, 17 aa, synthetic construct
  REGION 1..17: note = Hsp90 co-chaperone Cdc37 (362-378)
PLLEAVPKTGDEKDVSV

SEQ ID NO: 7816 - protein, 12 aa, synthetic construct
  REGION 1..12: note = Nucleolar RNA helicase 2 (109-120)
QEIPVEQKEGAF

SEQ ID NO: 7817 - protein, 12 aa, synthetic construct
  REGION 1..12: note = Signal recognition particle 54 kDa protein (385-396)
QELDSTDGAKVF

SEQ ID NO: 7818 - protein, 16 aa, synthetic construct
  REGION 1..16: note = Septin-2 (381-396)
QMQGGDGDGGALGHHV

SEQ ID NO: 7819 - protein, 12 aa, synthetic construct
  REGION 1..12: note = Polyadenylate-binding protein 4 (179-190)
REAELGAKAKEF

SEQ ID NO: 7820 - protein, 12 aa, synthetic construct
  REGION 1..12: note = Polyadenylate-binding protein 3 (179-190)
REAELGARAKEF

SEQ ID NO: 7821 - protein, 12 aa, synthetic construct
  REGION 1..12: note = Bromodomain adjacent to zinc finger domain protein 2B (1684-1695)
RIIDPEDLKALL

SEQ ID NO: 7822 - protein, 12 aa, synthetic construct
  REGION 1..12: note = Nucleolar complex protein 2 homolog (10-21)
RLAELTVDEFLA

SEQ ID NO: 7823 - protein, 12 aa, synthetic construct
  REGION 1..12: note = Protein unc-45 homolog A (202-213)
RLLDMGETDLML

SEQ ID NO: 7824 - protein, 12 aa, synthetic construct
  REGION 1..12: note = Iron-sulfur cluster assembly 2 homolog, mitochondrial (59-70)
RLLEITEGSEFL

SEQ ID NO: 7825 - protein, 12 aa, synthetic construct
  REGION 1..12: note = Cytoskeleton-associated protein 5 (1718-1729)
RLLPDTINSINL

SEQ ID NO: 7826 - protein, 13 aa, synthetic construct
  REGION 1..13: note = ATP-dependent RNA helicase DHX36 (643-655)
RLMDPPSNEAVLL

SEQ ID NO: 7827 - protein, 12 aa, synthetic construct
  REGION 1..12: note = Multidrug resistance protein 1 (378-389)
RLYDPTEGMVSV

SEQ ID NO: 7828 - protein, 14 aa, synthetic construct
  REGION 1..14: note = WD repeat-containing protein 11 (918-931)
RLYGDESELHFWTV

SEQ ID NO: 7829 - protein, 12 aa, synthetic construct
  REGION 1..12: note = Transmembrane emp24 domain-containing protein 9 (11-22)
RPRPGTGLGRVM

SEQ ID NO: 7830 - protein, 12 aa, synthetic construct
  REGION 1..12: note = Serine-rich coiled-coil domain-containing protein 2 (24-35)
RPYAAGGKKLAL

SEQ ID NO: 7831 - protein, 12 aa, synthetic construct
  REGION 1..12: note = Anaphase-promoting complex subunit 2 (163-174)
RVLDPSMVILEV

SEQ ID NO: 7832 - protein, 14 aa, synthetic construct
  REGION 1..14: note = HLA class I histocompatibility antigen, A-23 alpha chain (352-365)
SAQGSDVSLTACKV

SEQ ID NO: 7833 - protein, 12 aa, synthetic construct
  REGION 1..12: note = Protein KRI1 homolog (456-467)
SEQEELRDKRAY

SEQ ID NO: 7834 - protein, 16 aa, synthetic construct
  REGION 1..16: note = Keratin, type I cytoskeletal 9 (13-28)
SGGGGGGGLGSGGSIR

SEQ ID NO: 7835 - protein, 12 aa, synthetic construct
  REGION 1..12: note = Stress-70 protein, mitochondrial (253-264)
SILEIQKGVFEV

SEQ ID NO: 7836 - protein, 12 aa, synthetic construct
  REGION 1..12: note = Centrosomal protein of 192 kDa (19-30)
SLFGNSGILENV

SEQ ID NO: 7837 - protein, 12 aa, synthetic construct
  REGION 1..12: note = DNA-dependent protein kinase catalytic subunit (3305-3316)
SLLDENNVSSYL

SEQ ID NO: 7838 - protein, 12 aa, synthetic construct
  REGION 1..12: note = Zinc finger protein 829 (85-96)
SLLEQGKEPWMV

SEQ ID NO: 7839 - protein, 14 aa, synthetic construct
  REGION 1..14: note = Renin receptor (241-254)
SLYGGNAVVELVTV

SEQ ID NO: 7840 - protein, 13 aa, synthetic construct
  REGION 1..13: note = Protein kinase C-binding protein 1 (470-482)
SPASTKTGQAGSL

SEQ ID NO: 7841 - protein, 14 aa, synthetic construct
  REGION 1..14: note = AT-rich interactive domain-containing protein 1A (233-246)
SPRGGTPGSGAAAA

SEQ ID NO: 7842 - protein, 12 aa, synthetic construct
  REGION 1..12: note = E3 ubiquitin-protein ligase TRIP12 (1954-1965)
SPRLPVGGFRSL

SEQ ID NO: 7843 - protein, 12 aa, synthetic construct
  REGION 1..12: note = Msx2-interacting protein (1024-1035)
SPRPSGPGPSSF

SEQ ID NO: 7844 - protein, 12 aa, synthetic construct
  REGION 1..12: note = Long-chain-fatty-acid-CoA ligase 1 (687-698)
SQIDDLYSTIKV

SEQ ID NO: 7845 - protein, 18 aa, synthetic construct
  REGION 1..18: note = Keratin, type I cytoskeletal 9 (12-29)
SRSGGGGGGGLGSGGSIR

SEQ ID NO: 7846 - protein, 20 aa, synthetic construct
  REGION 1..20: note = Keratin, type I cytoskeletal 9 (12-31)
SRSGGGGGGGLGSGGSIRSS

SEQ ID NO: 7847 - protein, 21 aa, synthetic construct
  REGION 1..21: note = Keratin, type I cytoskeletal 9 (12-32)
SRSGGGGGGGLGSGGSIRSSY

SEQ ID NO: 7848 - protein, 20 aa, synthetic construct
  REGION 1..20: note = Cytochrome c oxidase subunit 6A1, mitochondrial (2-21)
SSGAHGEEGSARMWKTLTFF

SEQ ID NO: 7849 - protein, 14 aa, synthetic construct
  REGION 1..14: note = Glyceraldehyde-3-phosphate dehydrogenase (2-15)
STFDAGAGIALNDH

SEQ ID NO: 7850 - protein, 12 aa, synthetic construct
  REGION 1..12: note = HLA class I histocompatibility antigen, B-15 alpha chain (158-169)
TAADTAAQITQR

SEQ ID NO: 7851 - protein, 12 aa, synthetic construct
  REGION 1..12: note = Intercellular adhesion molecule 3 (536-547)
TEAMGEEPSRAE

SEQ ID NO: 7852 - protein, 12 aa, synthetic construct
  REGION 1..12: note = Ragulator complex protein LAMTOR5 (36-47)
TLSDEHAGVISV

SEQ ID NO: 7853 - protein, 12 aa, synthetic construct
  REGION 1..12: note = Treacle protein (102-113)
TPRLASTNSSVL

SEQ ID NO: 7854 - protein, 12 aa, synthetic construct
  REGION 1..12: note = Neuropilin-2 (234-245)
TPSELRSSTGIL

SEQ ID NO: 7855 - protein, 22 aa, synthetic construct
  REGION 1..22: note = Cytochrome c oxidase subunit 7A2, mitochondrial (62-83)
TVGGTAYAIYELAVASFPKKQE

SEQ ID NO: 7856 - protein, 17 aa, synthetic construct
  REGION 1..17: note = HLA class I histocompatibility antigen, Cw-5 alpha chain (52-68)
VDDTQFVQFDSDAASPR

SEQ ID NO: 7857 - protein, 17 aa, synthetic construct
  REGION 1..17: note = HLA class I histocompatibility antigen, alpha chain E (49-65)
VDDTQFVRFDNDAASPR

SEQ ID NO: 7858 - protein, 19 aa, synthetic construct
  REGION 1..19: note = HLA class I histocompatibility antigen, B-55 alpha chain (52-70)
VDDTQFVRFDSDAASPREE

SEQ ID NO: 7859 - protein, 20 aa, synthetic construct
  REGION 1..20: note = HLA class I histocompatibility antigen, B-55 alpha chain (52-71)
VDDTQFVRFDSDAASPREEP

SEQ ID NO: 7860 - protein, 13 aa, synthetic construct
  REGION 1..13: note = butyrophilin subfamily 3 member A3 secreted isoform (174-186)
VILDPDTANAILL

SEQ ID NO: 7861 - protein, 13 aa, synthetic construct
  REGION 1..13: note = Dihydropyrimidinase-related protein 2 (374-386)
VIWDPDSVKTISA

SEQ ID NO: 7862 - protein, 12 aa, synthetic construct
  REGION 1..12: note = Exocyst complex component 4 (203-214)
VLAEINKEIEGV

SEQ ID NO: 7863 - protein, 12 aa, synthetic construct
  REGION 1..12: note = Deoxyuridine 5'-triphosphate nucleotidohydrolase, mitochondrial (112-123)
VLFNFGKEKFEV

SEQ ID NO: 7864 - protein, 14 aa, synthetic construct
  REGION 1..14: note = Translocon-associated protein subunit alpha (19-32)
VLFRGGPRGLLAVA

SEQ ID NO: 7865 - protein, 16 aa, synthetic construct
  REGION 1..16: note = Heat shock 70 kDa protein 1-like (171-186)
VLRIINEPTAAAIAYG

SEQ ID NO: 7866 - protein, 13 aa, synthetic construct
  REGION 1..13: note = G2/mitotic-specific cyclin-B1 (388-400)
VMVNQGLTKHMTV

SEQ ID NO: 7867 - protein, 13 aa, synthetic construct
  REGION 1..13: note = Endoplasmic reticulum resident protein 29 (5-17)
VPRAAFLSPLLPL

SEQ ID NO: 7868 - protein, 12 aa, synthetic construct
  REGION 1..12: note = Lysosomal alpha-glucosidase (38-49)
VPRELSGSSPVL

SEQ ID NO: 7869 - protein, 14 aa, synthetic construct
  REGION 1..14: note = HLA class I histocompatibility antigen, B-15 alpha chain (241-254)
WQRDGEDQTQDTEL

SEQ ID NO: 7870 - protein, 13 aa, synthetic construct
  REGION 1..13: note = V-type proton ATPase subunit S1 (77-89)
YLDPALELGPRNV

SEQ ID NO: 7871 - protein, 12 aa, synthetic construct
  REGION 1..12: note = Armadillo repeat-containing protein 8 (306-317)
YLIEPDVELQRI

SEQ ID NO: 7872 - protein, 12 aa, synthetic construct
  REGION 1..12: note = F-actin-capping protein subunit beta (120-131)
YLWDLDHGFAGV

SEQ ID NO: 7873 - protein, 12 aa, synthetic construct
  REGION 1..12: note = 40S ribosomal protein S8 (188-199)
YVLEGKELEFYL

SEQ ID NO: 7874 - protein, 15 aa, synthetic construct
  REGION 1..15: note = DnaJ homolog subfamily C member 3 (3-17)
APGSVTSRLGSVFPF

SEQ ID NO: 7875 - protein, 9 aa, synthetic construct
  REGION 1..9: note = Pre-rRNA-processing protein TSR1 homolog (480-488)
ARIFQFQNF

SEQ ID NO: 7876 - protein, 9 aa, synthetic construct
  REGION 1..9: note = Protein FAM98B (250-258)
ARIYQPKRY

SEQ ID NO: 7877 - protein, 9 aa, synthetic construct
  REGION 1..9: note = Acyl-CoA desaturase (130-138)
ARLPLRLFL

SEQ ID NO: 7878 - protein, 9 aa, synthetic construct
  REGION 1..9: note = Serine/arginine-rich splicing factor 3 (42-50)
ARNPPGFAF

SEQ ID NO: 7879 - protein, 11 aa, synthetic construct
  REGION 1..11: note = ATP synthase F(0) complex subunit C1, mitochondrial (62-72)
ARNPSLKQQLF

SEQ ID NO: 7880 - protein, 9 aa, synthetic construct
  REGION 1..9: note = 40S ribosomal protein S28 (12-20)
ARVTKVLGR

SEQ ID NO: 7881 - protein, 9 aa, synthetic construct
  REGION 1..9: note = Rab GDP dissociation inhibitor alpha (217-225)
ARYGKSPYL

SEQ ID NO: 7882 - protein, 9 aa, synthetic construct
  REGION 1..9: note = Vacuolar fusion protein CCZ1 homolog (167-175)
ERLEKFFHR

SEQ ID NO: 7883 - protein, 9 aa, synthetic construct
  REGION 1..9: note = Mitochondrial import receptor subunit TOM5 homolog (2-10)
FRIEGLAPK

SEQ ID NO: 7884 - protein, 11 aa, synthetic construct
  REGION 1..11: note = Lysosome-associated membraneoprotein 2 (4-14)
FRLFPVPGSGL

SEQ ID NO: 7885 - protein, 10 aa, synthetic construct
  REGION 1..10: note = 60S ribosomal protein L28 (38-47)
FRYNGLIHRK

SEQ ID NO: 7886 - protein, 10 aa, synthetic construct
  REGION 1..10: note = Menin (410-419)
GRFEGQVRQK

SEQ ID NO: 7887 - protein, 12 aa, synthetic construct
  REGION 1..12: note = Myelin basic protein (43-54)
GRFFGGDRGAPK

SEQ ID NO: 7888 - protein, 9 aa, synthetic construct
  REGION 1..9: note = Rho guanine nucleotide exchange factor 2 (459-467)
GRFKDVLVL

SEQ ID NO: 7889 - protein, 9 aa, synthetic construct
  REGION 1..9: note = Protein OS-9 (125-133)
GRHIQQYHM

SEQ ID NO: 7890 - protein, 9 aa, synthetic construct
  REGION 1..9: note = 26S protease regulatory subunit 4 (345-353)
GRIDRKIEF

SEQ ID NO: 7891 - protein, 9 aa, synthetic construct
  REGION 1..9: note = Uncharacterized protein C1orf131 (262-270)
GRIGQVGKF

SEQ ID NO: 7892 - protein, 9 aa, synthetic construct
  REGION 1..9: note = Glyceraldehyde-3-phosphate dehydrogenase (12-20)
GRIGRLVTR

SEQ ID NO: 7893 - protein, 9 aa, synthetic construct
  REGION 1..9: note = Induced myeloid leukemia cell differentiation protein Mcl-1 (109-117)
GRIVTLISF

SEQ ID NO: 7894 - protein, 11 aa, synthetic construct
  REGION 1..11: note = 60S ribosomal protein L13a (139-149)
GRLAHEVGWKY

SEQ ID NO: 7895 - protein, 9 aa, synthetic construct
  REGION 1..9: note = Protein MON2 homolog (593-601)
GRLGLVTSR

SEQ ID NO: 7896 - protein, 9 aa, synthetic construct
  REGION 1..9: note = Protein transport protein Sec23B (152-160)
GRMVQVHEL

SEQ ID NO: 7897 - protein, 9 aa, synthetic construct
  REGION 1..9: note = Major facilitator superfamily domain-containing protein 10 (356-364)
GRSLPVLGL

SEQ ID NO: 7898 - protein, 9 aa, synthetic construct
  REGION 1..9: note = Unconventional myosin-Ic (676-684)
GRTKIFIRF

SEQ ID NO: 7899 - protein, 9 aa, synthetic construct
  REGION 1..9: note = Protein CNPPD1 (197-205)
GRWRGWYTY

SEQ ID NO: 7900 - protein, 9 aa, synthetic construct
  REGION 1..9: note = E3 ubiquitin-protein ligase MYCBP2 (3264-3272)
GRYAGGQGY

SEQ ID NO: 7901 - protein, 9 aa, synthetic construct
  REGION 1..9: note = NEDD4 family-interacting protein 1 (145-153)
GRYGAISGF

SEQ ID NO: 7902 - protein, 11 aa, synthetic construct
  REGION 1..11: note = NEDD4 family-interacting protein 1 (145-155)
GRYGAISGFGL

SEQ ID NO: 7903 - protein, 9 aa, synthetic construct
  REGION 1..9: note = Inositol hexakisphosphate kinase 2 (296-304)
GRYLRRELL

SEQ ID NO: 7904 - protein, 9 aa, synthetic construct
  REGION 1..9: note = Translocon-associated protein subunit delta (84-92)
GRYQVSWSL

SEQ ID NO: 7905 - protein, 9 aa, synthetic construct
  REGION 1..9: note = Cleavage and polyadenylation specificity factor subunit 5 (89-97)
HRLPHVLLL

SEQ ID NO: 7906 - protein, 9 aa, synthetic construct
  REGION 1..9: note = Zinc finger protein 281 (55-63)
HRLPPVTSF

SEQ ID NO: 7907 - protein, 10 aa, synthetic construct
  REGION 1..10: note = Calpain-1 catalytic subunit (132-141)
HRVVPHGQSF

SEQ ID NO: 7908 - protein, 10 aa, synthetic construct
  REGION 1..10: note = X-ray repair cross-complementing protein 6 (338-347)
KRFDDPGLML

SEQ ID NO: 7909 - protein, 10 aa, synthetic construct
  REGION 1..10: note = Copine-1 (190-199)
KRFSVPVQHF

SEQ ID NO: 7910 - protein, 9 aa, synthetic construct
  REGION 1..9: note = Ornithine decarboxylase antizyme 1 (58-66)
KRINWRTVL

SEQ ID NO: 7911 - protein, 9 aa, synthetic construct
  REGION 1..9: note = Bax inhibitor 1 (129-137)
KRLGLLAGF

SEQ ID NO: 7912 - protein, 9 aa, synthetic construct
  REGION 1..9: note = Pre-rRNA-processing protein TSR1 homolog (726-734)
KRVFPKWTY

SEQ ID NO: 7913 - protein, 10 aa, synthetic construct
  REGION 1..10: note = Pre-mRNA-processing-splicing factor 8 (85-94)
KRVYLGALKY

SEQ ID NO: 7914 - protein, 10 aa, synthetic construct
  REGION 1..10: note = ER degradation-enhancing alpha-mannosidase-like protein 1 (467-476)
KRYGALPERY

SEQ ID NO: 7915 - protein, 9 aa, synthetic construct
  REGION 1..9: note = Mitochondrial import receptor subunit TOM5 homolog (38-46)
LRVTPFILK

SEQ ID NO: 7916 - protein, 9 aa, synthetic construct
  REGION 1..9: note = Interferon alpha-inducible protein 6 (1-9)
MRQKAVSLF

SEQ ID NO: 7917 - protein, 10 aa, synthetic construct
  REGION 1..10: note = Interferon alpha-inducible protein 6 (1-10)
MRQKAVSLFL

SEQ ID NO: 7918 - protein, 9 aa, synthetic construct
  REGION 1..9: note = Double-strand-break repair protein rad21 homolog (383-391)
NRLLKLFTR

SEQ ID NO: 7919 - protein, 9 aa, synthetic construct
  REGION 1..9: note = ER degradation-enhancing alpha-mannosidase-like protein 1 (35-43)
QRFPLSFGF

SEQ ID NO: 7920 - protein, 9 aa, synthetic construct
  REGION 1..9: note = B-cell receptor-associated protein 31 (100-108)
QRNLYIAGF

SEQ ID NO: 7921 - protein, 11 aa, synthetic construct
  REGION 1..11: note = Chondroitin sulfate glucuronyltransferase (434-444)
RRFDPARGMEY

SEQ ID NO: 7922 - protein, 9 aa, synthetic construct
  REGION 1..9: note = Nuclear envelope integral membrane protein 1 (157-165)
RRFDPKLFL

SEQ ID NO: 7923 - protein, 9 aa, synthetic construct
  REGION 1..9: note = ER membrane protein complex subunit 4 (13-21)
RRFKWAIEL

SEQ ID NO: 7924 - protein, 9 aa, synthetic construct
  REGION 1..9: note = Ras GTPase-activating protein-binding protein 1 (106-114)
RRFMQTFVL

SEQ ID NO: 7925 - protein, 9 aa, synthetic construct
  REGION 1..9: note = Cullin-7 (439-447)
RRFRPRSEF

SEQ ID NO: 7926 - protein, 9 aa, synthetic construct
  REGION 1..9: note = Ubiquitin carboxyl-terminal hydrolase 22 (367-375)
RRFTRPEHL

SEQ ID NO: 7927 - protein, 9 aa, synthetic construct
  REGION 1..9: note = Cytochrome c oxidase subunit 7C, mitochondrial (7-15)
RRFTTSVVR

SEQ ID NO: 7928 - protein, 11 aa, synthetic construct
  REGION 1..11: note = 40S ribosomal protein S30 (114-124)
RRFVNVVPTFG

SEQ ID NO: 7929 - protein, 9 aa, synthetic construct
  REGION 1..9: note = Acyl-CoA desaturase (174-182)
RRGFFFSHV

SEQ ID NO: 7930 - protein, 9 aa, synthetic construct
  REGION 1..9: note = Store-operated calcium entry-associated regulatory factor (56-64)
RRLDPIPQL

SEQ ID NO: 7931 - protein, 10 aa, synthetic construct
  REGION 1..10: note = Melanoma-associated antigen F1 (195-204)
RRLGVQPSKY

SEQ ID NO: 7932 - protein, 9 aa, synthetic construct
  REGION 1..9: note = Transformation/transcription domain-associated protein (2920-2928)
RRLPHVVSH

SEQ ID NO: 7933 - protein, 9 aa, synthetic construct
  REGION 1..9: note = Heat shock protein HSP 90-beta (375-383)
RRLSELLRY

SEQ ID NO: 7934 - protein, 9 aa, synthetic construct
  REGION 1..9: note = DNA-directed RNA polymerase II subunit RPB1 (1052-1060)
RRMAEEFRL

SEQ ID NO: 7935 - protein, 10 aa, synthetic construct
  REGION 1..10: note = Signal-induced proliferation-associated 1-like protein 2 (954-963)
RRNGLGQLGF

SEQ ID NO: 7936 - protein, 9 aa, synthetic construct
  REGION 1..9: note = NADH dehydrogenase (ubiquinone) 1 subunit C2 (4-12)
RRNPEPLRF

SEQ ID NO: 7937 - protein, 10 aa, synthetic construct
  REGION 1..10: note = Elongation factor 2 (341-350)
RRWLPAGDAL

SEQ ID NO: 7938 - protein, 9 aa, synthetic construct
  REGION 1..9: note = Eukaryotic initiation factor 4A-I (168-176)
RRYLSPKYI

SEQ ID NO: 7939 - protein, 9 aa, synthetic construct
  REGION 1..9: note = 60S ribosomal protein L17 (61-69)
RRYNGGVGR

SEQ ID NO: 7940 - protein, 10 aa, synthetic construct
  REGION 1..10: note = Eukaryotic translation initiation factor 3 subunit L (327-336)
RRYQDAIRVF

SEQ ID NO: 7941 - protein, 9 aa, synthetic construct
  REGION 1..9: note = Charged multivesicular body protein 2a (70-78)
RRYVRKFVL

SEQ ID NO: 7942 - protein, 9 aa, synthetic construct
  REGION 1..9: note = Histone H2A type 1-A (20-28)
SRAGLQFPV

SEQ ID NO: 7943 - protein, 9 aa, synthetic construct
  REGION 1..9: note = Pre-mRNA cleavage complex 2 protein Pcf11 (1103-1111)
SRFDIPLGL

SEQ ID NO: 7944 - protein, 9 aa, synthetic construct
  REGION 1..9: note = Pericentrin (1289-1297)
SRFEKEFSF

SEQ ID NO: 7945 - protein, 9 aa, synthetic construct
  REGION 1..9: note = Myosin-7 (242-250)
SRFGKFIRI

SEQ ID NO: 7946 - protein, 9 aa, synthetic construct
  REGION 1..9: note = Pre-mRNA-processing-splicing factor 8 (538-546)
SRFGNAFHL

SEQ ID NO: 7947 - protein, 11 aa, synthetic construct
  REGION 1..11: note = EH domain-containing protein 4 (129-139)
SRFGNAFLNRF

SEQ ID NO: 7948 - protein, 9 aa, synthetic construct
  REGION 1..9: note = DNA replication licensing factor MCM7 (227-235)
SRFIKFQEM

SEQ ID NO: 7949 - protein, 9 aa, synthetic construct
  REGION 1..9: note = ATP-dependent RNA helicase DDX3X (591-599)
SRFSGGFGA

SEQ ID NO: 7950 - protein, 10 aa, synthetic construct
  REGION 1..10: note = NADH dehydrogenase (ubiquinone) 1 beta subcomplex subunit 5, mitochondrial (60-69)
SRFYDRRFLK

SEQ ID NO: 7951 - protein, 9 aa, synthetic construct
  REGION 1..9: note = Hypoxia-inducible factor 1-alpha (268-276)
SRHSLDMKF

SEQ ID NO: 7952 - protein, 11 aa, synthetic construct
  REGION 1..11: note = Ubiquitin fusion degradation protein 1 homolog (57-67)
SRLNITYPMLF

SEQ ID NO: 7953 - protein, 9 aa, synthetic construct
  REGION 1..9: note = Protein diaphanous homolog 3 (854-862)
SRNAQTFGF

SEQ ID NO: 7954 - protein, 9 aa, synthetic construct
  REGION 1..9: note = Cytochrome b-c1 complex subunit 8 (9-17)
TRMRHVISY

SEQ ID NO: 7955 - protein, 9 aa, synthetic construct
  REGION 1..9: note = WD repeat-containing protein 36 (383-391)
VRLPPITKF

SEQ ID NO: 7956 - protein, 14 aa, synthetic construct
  REGION 1..14: note = POTE ankyrin domain family member F (791-804)
YNELRVAPEEHPVL

SEQ ID NO: 7957 - protein, 9 aa, synthetic construct
  REGION 1..9: note = Dystonin (7305-7313)
YRFFLGNQF

SEQ ID NO: 7958 - protein, 9 aa, synthetic construct
  REGION 1..9: note = BTB/POZ domain-containing protein KCTD20 (192-200)
GRSEVIYNY

SEQ ID NO: 7959 - protein, 9 aa, synthetic construct
  REGION 1..9: note = Filamin-B (2069-2077)
GRVKESITR

SEQ ID NO: 7960 - protein, 9 aa, synthetic construct
  REGION 1..9: note = Intron-binding protein aquarius (896-904)
GRVNYVLAR

SEQ ID NO: 7961 - protein, 11 aa, synthetic construct
  REGION 1..11: note = Integrin-linked protein kinase (149-159)
GRWQGNDIVVK

SEQ ID NO: 7962 - protein, 9 aa, synthetic construct
  REGION 1..9: note = Serine/threonine-protein kinase 38 (446-454)
KRFEGLTAR

SEQ ID NO: 7963 - protein, 9 aa, synthetic construct
  REGION 1..9: note = 39S ribosomal protein L43, mitochondrial (27-35)
QRLSFSVSR

SEQ ID NO: 7964 - protein, 9 aa, synthetic construct
  REGION 1..9: note = Protein diaphanous homolog 1 (967-975)
SRNAGAFGF

SEQ ID NO: 7965 - protein, 10 aa, synthetic construct
  REGION 1..10: note = WD repeat-containing protein 1 (55-64)
VRFSPDGNRF

SEQ ID NO: 7966 - protein, 13 aa, synthetic construct
  REGION 1..13: note = Elongation factor 1-beta (213-225)
YVQSMDVAAFNKI

SEQ ID NO: 7967 - protein, 9 aa, synthetic construct
  REGION 1..9: note = T-complex protein 1 subunit zeta (2-10)
AAVKTLNPK

SEQ ID NO: 7968 - protein, 11 aa, synthetic construct
  REGION 1..11: note = 40S ribosomal protein S21 (73-83)
AKADGIVSKNF

SEQ ID NO: 7969 - protein, 11 aa, synthetic construct
  REGION 1..11: note = Alpha-enolase (13-23)
DSRGNPTVEVD

SEQ ID NO: 7970 - protein, 9 aa, synthetic construct
  REGION 1..9: note = Triosephosphate isomerase (159-167)
FVDIINAKQ

SEQ ID NO: 7971 - protein, 9 aa, synthetic construct
  REGION 1..9: note = 60S ribosomal protein L37 (76-84)
HGFREGTTP

SEQ ID NO: 7972 - protein, 9 aa, synthetic construct
  REGION 1..9: note = Store-operated calcium entry-associated regulatory factor (103-111)
IAYKFGKTV

SEQ ID NO: 7973 - protein, 9 aa, synthetic construct
  REGION 1..9: note = Ubiquitin-60S ribosomal protein L40 (48-56)
IIEPSLRQL

SEQ ID NO: 7974 - protein, 9 aa, synthetic construct
  REGION 1..9: note = Eukaryotic translation initiation factor 4 gamma 1 (1452-1460)
IIFETPLRV

SEQ ID NO: 7975 - protein, 9 aa, synthetic construct
  REGION 1..9: note = Vacuolar protein sorting-associated protein 4A (144-152)
ILPIKFPHL

SEQ ID NO: 7976 - protein, 10 aa, synthetic construct
  REGION 1..10: note = 40S ribosomal protein S21 (74-83)
KADGIVSKNF

SEQ ID NO: 7977 - protein, 9 aa, synthetic construct
  REGION 1..9: note = COMM domain-containing protein 3 (187-195)
KSLERATQL

SEQ ID NO: 7978 - protein, 9 aa, synthetic construct
  REGION 1..9: note = POTE ankyrin domain family member E (805-813)
LTEAPLNPK

SEQ ID NO: 7979 - protein, 9 aa, synthetic construct
  REGION 1..9: note = DNA-dependent protein kinase catalytic subunit (1340-1348)
RIMEFTTTL

SEQ ID NO: 7980 - protein, 11 aa, synthetic construct
  REGION 1..11: note = TAR DNA-binding protein 43 (248-258)
SMDSKSSGWGM

SEQ ID NO: 7981 - protein, 11 aa, synthetic construct
  REGION 1..11: note = Vimentin (2-12)
STRSVSSSSYR

SEQ ID NO: 7982 - protein, 14 aa, synthetic construct
  REGION 1..14: note = Vimentin (446-459)
TVETRDGQVINETS

SEQ ID NO: 7983 - protein, 10 aa, synthetic construct
  REGION 1..10: note = 60S ribosomal protein L31 (106-115)
VTYVPVTTFK

SEQ ID NO: 7984 - protein, 9 aa, synthetic construct
  REGION 1..9: note = Hemoglobin subunit delta (34-42)
VVYPWTQRF

SEQ ID NO: 7985 - protein, 9 aa, synthetic construct
  REGION 1..9: note = Guanine nucleotide-binding protein subunit beta-2-like 1 (192-200)
TGYLNTVTV

SEQ ID NO: 7986 - protein, 8 aa, synthetic construct
  REGION 1..8: note = Ubiquitin-conjugating enzyme E2 D2 (59-66)
YPFKPPKV

SEQ ID NO: 7987 - protein, 19 aa, synthetic construct
  REGION 1..19: note = Histone H2B type 2-E (83-101)
AKHAVSEGTKAVTKYTSSK

SEQ ID NO: 7988 - protein, 10 aa, synthetic construct
  REGION 1..10: note = HLA class II histocompatibility antigen, DP beta 1 chain (9-18)
APRTVALTAL

SEQ ID NO: 7989 - protein, 9 aa, synthetic construct
  REGION 1..9: note = SWI/SNF-related matrix-associated actin-dependent regulator of chromatin subfamily E member 1 (114-122)
AYHNSPAYL

SEQ ID NO: 7990 - protein, 9 aa, synthetic construct
  REGION 1..9: note = Chloride intracellular channel protein 4 (243-251)
AYSDVAKRL

SEQ ID NO: 7991 - protein, 9 aa, synthetic construct
  REGION 1..9: note = CDK5 regulatory subunit-associated protein 1 (381-389)
AYVELVHHI

SEQ ID NO: 7992 - protein, 10 aa, synthetic construct
  REGION 1..10: note = Exocyst complex component 2 (85-94)
AYVKGGLSTF

SEQ ID NO: 7993 - protein, 9 aa, synthetic construct
  REGION 1..9: note = 60S ribosomal protein L23a (148-156)
DVANKIGII

SEQ ID NO: 7994 - protein, 9 aa, synthetic construct
  REGION 1..9: note = Spectrin beta chain, non-erythrocytic 1 (1643-1651)
DYAETVHQL

SEQ ID NO: 7995 - protein, 9 aa, synthetic construct
  REGION 1..9: note = Nuclear export mediator factor NEMF (234-242)
DYMKTTSNF

SEQ ID NO: 7996 - protein, 9 aa, synthetic construct
  REGION 1..9: note = Formin-binding protein 1 (189-197)
DYSSILQKF

SEQ ID NO: 7997 - protein, 9 aa, synthetic construct
  REGION 1..9: note = Myosin light polypeptide 6 (94-102)
DYVEGLRVF

SEQ ID NO: 7998 - protein, 9 aa, synthetic construct
  REGION 1..9: note = Sterol regulatory element-binding protein 2 (839-847)
EYLKLLHSF

SEQ ID NO: 7999 - protein, 9 aa, synthetic construct
  REGION 1..9: note = Clathrin heavy chain 1 (1605-1613)
EYLTKVDKL

SEQ ID NO: 8000 - protein, 10 aa, synthetic construct
  REGION 1..10: note = Tubulin beta chain (158-167)
EYPDRIMNTF

SEQ ID NO: 8001 - protein, 9 aa, synthetic construct
  REGION 1..9: note = Histone deacetylase 1 (86-94)
EYSKQMQRF

SEQ ID NO: 8002 - protein, 9 aa, synthetic construct
  REGION 1..9: note = DNA repair protein RAD50 (1281-1289)
EYVEKFYRI

SEQ ID NO: 8003 - protein, 10 aa, synthetic construct
  REGION 1..10: note = V-type proton ATPase catalytic subunit A (463-472)
EYYDKHFTEF

SEQ ID NO: 8004 - protein, 9 aa, synthetic construct
  REGION 1..9: note = Exostosin-2 (609-617)
FYHKYFNYL

SEQ ID NO: 8005 - protein, 9 aa, synthetic construct
  REGION 1..9: note = Late secretory pathway protein AVL9 homolog (280-288)
FYISPVNKL

SEQ ID NO: 8006 - protein, 11 aa, synthetic construct
  REGION 1..11: note = 60S ribosomal protein L7 (81-91)
FYVPAEPKLAF

SEQ ID NO: 8007 - protein, 16 aa, synthetic construct
  REGION 1..16: note = Elongation factor 1-beta (2-17)
GFGDLKSPAGLQVLND

SEQ ID NO: 8008 - protein, 12 aa, synthetic construct
  REGION 1..12: note = 60S ribosomal protein L5 (2-13)
GFVKVVKNKAYF

SEQ ID NO: 8009 - protein, 9 aa, synthetic construct
  REGION 1..9: note = Poly(A) RNA polymerase GLD2 (252-260)
GYIERPQLI

SEQ ID NO: 8010 - protein, 9 aa, synthetic construct
  REGION 1..9: note = Mannose-1-phosphate guanyltransferase alpha (166-174)
HYVEKPSTF

SEQ ID NO: 8011 - protein, 9 aa, synthetic construct
  REGION 1..9: note = Little elongation complex subunit 2 (341-349)
IFHEVPLKF

SEQ ID NO: 8012 - protein, 11 aa, synthetic construct
  REGION 1..11: note = Modulator of apoptosis 1 (92-102)
IFKPPDPDNTF

SEQ ID NO: 8013 - protein, 10 aa, synthetic construct
  REGION 1..10: note = DNA replication licensing factor MCM7 (276-285)
IFLPILRTGF

SEQ ID NO: 8014 - protein, 9 aa, synthetic construct
  REGION 1..9: note = Putative eukaryotic translation initiation factor 2 subunit 3-like protein (314-322)
IFSKIVSLF

SEQ ID NO: 8015 - protein, 9 aa, synthetic construct
  REGION 1..9: note = X-ray repair cross-complementing protein 5 (134-142)
IFTDLSSRF

SEQ ID NO: 8016 - protein, 9 aa, synthetic construct
  REGION 1..9: note = A-kinase anchor protein 11 (638-646)
IFTNTVARF

SEQ ID NO: 8017 - protein, 9 aa, synthetic construct
  REGION 1..9: note = Zinc finger protein 24 (103-111)
ILPKELQTW

SEQ ID NO: 8018 - protein, 10 aa, synthetic construct
  REGION 1..10: note = DNA polymerase epsilon catalytic subunit A (1791-1800)
IYADNQVMHF

SEQ ID NO: 8019 - protein, 9 aa, synthetic construct
  REGION 1..9: note = G1/S-specific cyclin-E2 (202-210)
IYAPKLQEF

SEQ ID NO: 8020 - protein, 9 aa, synthetic construct
  REGION 1..9: note = A-kinase anchor protein 1, mitochondrial (683-691)
IYAPPLPSL

SEQ ID NO: 8021 - protein, 9 aa, synthetic construct
  REGION 1..9: note = Signal peptidase complex subunit 1 (37-45)
IYGYVAEQF

SEQ ID NO: 8022 - protein, 10 aa, synthetic construct
  REGION 1..10: note = Lon protease homolog, mitochondrial (188-197)
IYHTGTFAQI

SEQ ID NO: 8023 - protein, 9 aa, synthetic construct
  REGION 1..9: note = Heterogeneous nuclear ribonucleoprotein L (145-153)
IYIAGHPAF

SEQ ID NO: 8024 - protein, 9 aa, synthetic construct
  REGION 1..9: note = Tuftelin-interacting protein 11 (168-176)
IYIDRGVVF

SEQ ID NO: 8025 - protein, 12 aa, synthetic construct
  REGION 1..12: note = Clathrin heavy chain 1 (882-893)
IYIDSNNNPERF

SEQ ID NO: 8026 - protein, 9 aa, synthetic construct
  REGION 1..9: note = Deoxynucleotidyltransferase terminal-interacting protein 1 (232-240)
IYIKHPHLF

SEQ ID NO: 8027 - protein, 9 aa, synthetic construct
  REGION 1..9: note = Retinoblastoma-like protein 2 (1012-1020)
IYIKQIKTF

SEQ ID NO: 8028 - protein, 10 aa, synthetic construct
  REGION 1..10: note = Activator of 90 kDa heat shock protein ATPase homolog 1 (74-83)
IYISTLKTEF

SEQ ID NO: 8029 - protein, 11 aa, synthetic construct
  REGION 1..11: note = Ras-related GTP-binding protein C (99-109)
IYKDDISNSSF

SEQ ID NO: 8030 - protein, 9 aa, synthetic construct
  REGION 1..9: note = Leucine-rich PPR motif-containing protein, mitochondrial (1129-1137)
IYKPVTDFF

SEQ ID NO: 8031 - protein, 10 aa, synthetic construct
  REGION 1..10: note = DNA-directed RNA polymerases I, II, and III subunit RPABC3 (11-20)
IYPVDLGDKF

SEQ ID NO: 8032 - protein, 10 aa, synthetic construct
  REGION 1..10: note = Cullin-4B (362-371)
IYQDSFEQRF

SEQ ID NO: 8033 - protein, 9 aa, synthetic construct
  REGION 1..9: note = Transmembrane protein 209 (509-517)
IYQRHVYNL

SEQ ID NO: 8034 - protein, 9 aa, synthetic construct
  REGION 1..9: note = Coatomer subunit beta' (535-543)
IYTSSVNRL

SEQ ID NO: 8035 - protein, 9 aa, synthetic construct
  REGION 1..9: note = Retinoblastoma-like protein 1 (804-812)
IYVGRVKSF

SEQ ID NO: 8036 - protein, 9 aa, synthetic construct
  REGION 1..9: note = Vam6/Vps39-like protein (97-105)
IYVHDLLTF

SEQ ID NO: 8037 - protein, 11 aa, synthetic construct
  REGION 1..11: note = DDB1- and CUL4-associated factor 8 (337-347)
IYVNPANTHQF

SEQ ID NO: 8038 - protein, 9 aa, synthetic construct
  REGION 1..9: note = 60S ribosomal protein L3 (361-369)
KFIDTTSKF

SEQ ID NO: 8039 - protein, 9 aa, synthetic construct
  REGION 1..9: note = Zyxin (193-201)
KFTPVASKF

SEQ ID NO: 8040 - protein, 9 aa, synthetic construct
  REGION 1..9: note = Protein SDA1 homolog (8-16)
KLPSNLPQL

SEQ ID NO: 8041 - protein, 9 aa, synthetic construct
  REGION 1..9: note = Protein sel-1 homolog 1 (504-512)
KQALKYFNL

SEQ ID NO: 8042 - protein, 9 aa, synthetic construct
  REGION 1..9: note = Muscleblind-like protein 3 (180-188)
KYFHPPAHL

SEQ ID NO: 8043 - protein, 9 aa, synthetic construct
  REGION 1..9: note = Nardilysin (660-668)
KYIATDFTL

SEQ ID NO: 8044 - protein, 9 aa, synthetic construct
  REGION 1..9: note = U6 snRNA-associated Sm-like protein LSm7 (17-25)
KYIDKTIRV

SEQ ID NO: 8045 - protein, 10 aa, synthetic construct
  REGION 1..10: note = RuvB-like 1 (285-294)
KYIDQGIAEL

SEQ ID NO: 8046 - protein, 9 aa, synthetic construct
  REGION 1..9: note = Short transient receptor potential channel 4-associated protein (594-602)
KYINTDAKF

SEQ ID NO: 8047 - protein, 9 aa, synthetic construct
  REGION 1..9: note = Interferon-induced GTP-binding protein Mx2 (223-231)
KYIQRQQTI

SEQ ID NO: 8048 - protein, 9 aa, synthetic construct
  REGION 1..9: note = Centromere protein F (1270-1278)
KYISGPHEL

SEQ ID NO: 8049 - protein, 9 aa, synthetic construct
  REGION 1..9: note = Calcium-binding protein 39-like (247-255)
KYISKPENL

SEQ ID NO: 8050 - protein, 9 aa, synthetic construct
  REGION 1..9: note = Small subunit processome component 20 homolog (1425-1433)
KYITDVVKL

SEQ ID NO: 8051 - protein, 10 aa, synthetic construct
  REGION 1..10: note = Poly(A)-specific ribonuclease PARN (21-30)
KYITKSFNFY

SEQ ID NO: 8052 - protein, 11 aa, synthetic construct
  REGION 1..11: note = Elongation of very long chain fatty acids protein 5 (200-210)
KYITQGQLLQF

SEQ ID NO: 8053 - protein, 9 aa, synthetic construct
  REGION 1..9: note = Phosphate carrier protein, mitochondrial (97-105)
KYKGIFNGF

SEQ ID NO: 8054 - protein, 11 aa, synthetic construct
  REGION 1..11: note = S-adenosylmethionine synthase isoform type-2 (234-244)
KYLDEDTIYHL

SEQ ID NO: 8055 - protein, 9 aa, synthetic construct
  REGION 1..9: note = Mitochondrial-processing peptidase subunit alpha (106-114)
KYLSGIAHF

SEQ ID NO: 8056 - protein, 9 aa, synthetic construct
  REGION 1..9: note = DNA ligase 1 (566-574)
KYPDIISRI

SEQ ID NO: 8057 - protein, 9 aa, synthetic construct
  REGION 1..9: note = Gamma-aminobutyric acid receptor-associated protein-like 1 (24-32)
KYPDRVPVI

SEQ ID NO: 8058 - protein, 9 aa, synthetic construct
  REGION 1..9: note = Rho guanine nucleotide exchange factor 2 (366-374)
KYPLLISRI

SEQ ID NO: 8059 - protein, 8 aa, synthetic construct
  REGION 1..8: note = ATP-dependent RNA helicase A (169-176)
KYPSPFFV

SEQ ID NO: 8060 - protein, 9 aa, synthetic construct
  REGION 1..9: note = Translocating chain-associated membrane protein 1 (245-253)
KYQKGFSLW

SEQ ID NO: 8061 - protein, 9 aa, synthetic construct
  REGION 1..9: note = NADH dehydrogenase (ubiquinone) iron-sulfur protein 5 (91-99)
KYTPPPHHI

SEQ ID NO: 8062 - protein, 9 aa, synthetic construct
  REGION 1..9: note = Heme oxygenase 2 (124-132)
KYVERIHYI

SEQ ID NO: 8063 - protein, 9 aa, synthetic construct
  REGION 1..9: note = WD repeat-containing protein 35 (371-379)
KYVKGLISI

SEQ ID NO: 8064 - protein, 9 aa, synthetic construct
  REGION 1..9: note = Zinc finger protein 195 (148-156)
KYVKIFDNF

SEQ ID NO: 8065 - protein, 10 aa, synthetic construct
  REGION 1..10: note = NADH dehydrogenase (ubiquinone) 1 alpha subcomplex subunit 12 (47-56)
KYYEDNKQFF

SEQ ID NO: 8066 - protein, 15 aa, synthetic construct
  REGION 1..15: note = Phosphoglycerate kinase 1 (403-417)
LEGKVLPGVDALSNI

SEQ ID NO: 8067 - protein, 8 aa, synthetic construct
  REGION 1..8: note = Superkiller viralicidic activity 2-like 2 (586-593)
LEKSFYQF

SEQ ID NO: 8068 - protein, 11 aa, synthetic construct
  REGION 1..11: note = Gamma-interferon-inducible lysosomal thiol reductase (15-25)
LLLDVPTAAVQ

SEQ ID NO: 8069 - protein, 15 aa, synthetic construct
  REGION 1..15: note = Polypyrimidine tract-binding protein 1 (359-373)
LVSNLNPERVTPQSL

SEQ ID NO: 8070 - protein, 10 aa, synthetic construct
  REGION 1..10: note = Translocon-associated protein subunit delta (66-75)
LYADVGGKQF

SEQ ID NO: 8071 - protein, 9 aa, synthetic construct
  REGION 1..9: note = Nuclear factor erythroid 2-related factor 3 (413-421)
LYHDIFSRL

SEQ ID NO: 8072 - protein, 9 aa, synthetic construct
  REGION 1..9: note = Rho GTPase-activating protein 1 (181-189)
LYIVHPTMF

SEQ ID NO: 8073 - protein, 10 aa, synthetic construct
  REGION 1..10: note = 60S ribosomal protein L19 (104-113)
LYLKVKGNVF

SEQ ID NO: 8074 - protein, 11 aa, synthetic construct
  REGION 1..11: note = Signal transducer and activator of transcription 1-alpha/beta (667-677)
LYPNIDKDHAF

SEQ ID NO: 8075 - protein, 9 aa, synthetic construct
  REGION 1..9: note = BTB/POZ domain-containing protein KCTD20 (142-150)
LYSSKLYRF

SEQ ID NO: 8076 - protein, 9 aa, synthetic construct
  REGION 1..9: note = Alpha-taxilin (389-397)
LYTEKFEEF

SEQ ID NO: 8077 - protein, 9 aa, synthetic construct
  REGION 1..9: note = 40S ribosomal protein S29 (6-14)
LYWSHPRKF

SEQ ID NO: 8078 - protein, 14 aa, synthetic construct
  REGION 1..14: note = Calmodulin (125-138)
MIREADIDGDGQVN

SEQ ID NO: 8079 - protein, 9 aa, synthetic construct
  REGION 1..9: note = Tubulin alpha-1C chain (172-180)
NYARGHYTI

SEQ ID NO: 8080 - protein, 9 aa, synthetic construct
  REGION 1..9: note = Sorting nexin-4 (257-265)
NYGRVFSEW

SEQ ID NO: 8081 - protein, 9 aa, synthetic construct
  REGION 1..9: note = Abl interactor 1 (434-442)
NYIEKVVAI

SEQ ID NO: 8082 - protein, 9 aa, synthetic construct
  REGION 1..9: note = Unconventional myosin-Id (229-237)
NYIHVGAQL

SEQ ID NO: 8083 - protein, 9 aa, synthetic construct
  REGION 1..9: note = CTD small phosphatase-like protein 2 (385-393)
NYIKDLNIL

SEQ ID NO: 8084 - protein, 9 aa, synthetic construct
  REGION 1..9: note = CWF19-like protein 1 (409-417)
NYKSHHLQL

SEQ ID NO: 8085 - protein, 9 aa, synthetic construct
  REGION 1..9: note = Polyadenylate-binding protein-interacting protein 1 (111-119)
NYLSHHLTI

SEQ ID NO: 8086 - protein, 9 aa, synthetic construct
  REGION 1..9: note = Methionine-tRNA ligase, cytoplasmic (152-160)
NYTLVSHLI

SEQ ID NO: 8087 - protein, 9 aa, synthetic construct
  REGION 1..9: note = Ribosomal RNA processing protein 1 homolog B (648-656)
PFLPKPLFF

SEQ ID NO: 8088 - protein, 9 aa, synthetic construct
  REGION 1..9: note = Ribosome biogenesis protein BRX1 homolog (200-208)
PFVDHVFTF

SEQ ID NO: 8089 - protein, 12 aa, synthetic construct
  REGION 1..12: note = 40S ribosomal protein S19 (2-13)
PGVTVKDVNQQE

SEQ ID NO: 8090 - protein, 17 aa, synthetic construct
  REGION 1..17: note = Nuclease-sensitive element-binding protein 1 (304-320)
PPAENSSAPEAEQGGAE

SEQ ID NO: 8091 - protein, 9 aa, synthetic construct
  REGION 1..9: note = Protein AATF (255-263)
PQPDVFPLF

SEQ ID NO: 8092 - protein, 10 aa, synthetic construct
  REGION 1..10: note = pre-mRNA 3' end processing protein WDR33 (495-504)
PYAKPIPAQF

SEQ ID NO: 8093 - protein, 9 aa, synthetic construct
  REGION 1..9: note = Fatty acid desaturase 2 (227-235)
PYNHQHEYF

SEQ ID NO: 8094 - protein, 9 aa, synthetic construct
  REGION 1..9: note = Methionine-tRNA ligase, cytoplasmic (273-281)
PYVNNVPHL

SEQ ID NO: 8095 - protein, 9 aa, synthetic construct
  REGION 1..9: note = Surfeit locus protein 4 (23-31)
QYLPHVARL

SEQ ID NO: 8096 - protein, 11 aa, synthetic construct
  REGION 1..11: note = Moesin (48-58)
QYQDTKGFSTW

SEQ ID NO: 8097 - protein, 9 aa, synthetic construct
  REGION 1..9: note = Protein BIVM-ERCC5 (1290-1298)
QYVDFHNQL

SEQ ID NO: 8098 - protein, 10 aa, synthetic construct
  REGION 1..10: note = Elongation factor 1-gamma (245-254)
RFPEELTQTF

SEQ ID NO: 8099 - protein, 9 aa, synthetic construct
  REGION 1..9: note = 60S ribosomal protein L17 (82-90)
RWPKKSAEF

SEQ ID NO: 8100 - protein, 10 aa, synthetic construct
  REGION 1..10: note = Elongation factor 2 (264-273)
RYFDPANGKF

SEQ ID NO: 8101 - protein, 9 aa, synthetic construct
  REGION 1..9: note = Casein kinase II subunit alpha (195-203)
RYFKGPELL

SEQ ID NO: 8102 - protein, 9 aa, synthetic construct
  REGION 1..9: note = Interferon-induced helicase C domain-containing protein 1 (806-814)
RYGLVTNEI

SEQ ID NO: 8103 - protein, 9 aa, synthetic construct
  REGION 1..9: note = Pre-mRNA-processing-splicing factor 8 (1090-1098)
RYIDRIHIF

SEQ ID NO: 8104 - protein, 11 aa, synthetic construct
  REGION 1..11: note = Alpha-enolase (99-109)
RYISPDQLADL

SEQ ID NO: 8105 - protein, 10 aa, synthetic construct
  REGION 1..10: note = E3 ubiquitin-protein ligase MGRN1 (24-33)
RYPPKSGNYF

SEQ ID NO: 8106 - protein, 9 aa, synthetic construct
  REGION 1..9: note = Mitotic checkpoint protein BUB3 (274-282)
RYPTSIASL

SEQ ID NO: 8107 - protein, 11 aa, synthetic construct
  REGION 1..11: note = Mitotic checkpoint protein BUB3 (274-284)
RYPTSIASLAF

SEQ ID NO: 8108 - protein, 9 aa, synthetic construct
  REGION 1..9: note = Tyrosine-protein kinase BAZ1B (609-617)
RYQDIIHSI

SEQ ID NO: 8109 - protein, 9 aa, synthetic construct
  REGION 1..9: note = Histone H3.1 (54-62)
RYQKSTELL

SEQ ID NO: 8110 - protein, 9 aa, synthetic construct
  REGION 1..9: note = Thioredoxin-related transmembrane protein 2 (198-206)
RYTDVSTRY

SEQ ID NO: 8111 - protein, 10 aa, synthetic construct
  REGION 1..10: note = Suppressor of fused homolog (146-155)
RYVFQSENTF

SEQ ID NO: 8112 - protein, 9 aa, synthetic construct
  REGION 1..9: note = WD repeat-containing protein 36 (350-358)
SFSTVHEKF

SEQ ID NO: 8113 - protein, 9 aa, synthetic construct
  REGION 1..9: note = Astrocytic phosphoprotein PEA-15 (61-69)
SYIEHIFEI

SEQ ID NO: 8114 - protein, 9 aa, synthetic construct
  REGION 1..9: note = Protein ELYS (236-244)
SYISRTNQL

SEQ ID NO: 8115 - protein, 9 aa, synthetic construct
  REGION 1..9: note = Solute carrier family 23 member 2 (617-625)
SYLPISPTF

SEQ ID NO: 8116 - protein, 9 aa, synthetic construct
  REGION 1..9: note = Splicing factor 3B subunit 5 (42-50)
SYMGHFDLL

SEQ ID NO: 8117 - protein, 9 aa, synthetic construct
  REGION 1..9: note = Lymphokine-activated killer T-cell-originated protein kinase (300-308)
SYQKVIELF

SEQ ID NO: 8118 - protein, 9 aa, synthetic construct
  REGION 1..9: note = Heterogeneous nuclear ribonucleoprotein F (193-201)
SYSDPPLKF

SEQ ID NO: 8119 - protein, 8 aa, synthetic construct
  REGION 1..8: note = Signal transducer and activator of transcription 2 (259-266)
TAGAKLLF

SEQ ID NO: 8120 - protein, 9 aa, synthetic construct
  REGION 1..9: note = Zinc finger protein 280C (189-197)
TFSDVEAHF

SEQ ID NO: 8121 - protein, 9 aa, synthetic construct
  REGION 1..9: note = NADH dehydrogenase (ubiquinone) 1 subunit C2 (107-115)
TYGEIFEKF

SEQ ID NO: 8122 - protein, 9 aa, synthetic construct
  REGION 1..9: note = Peroxisomal acyl-coenzyme A oxidase 3 (142-150)
TYIQKIFRM

SEQ ID NO: 8123 - protein, 9 aa, synthetic construct
  REGION 1..9: note = Oxidative stress-induced growth inhibitor 2 (326-334)
TYITSVSRL

SEQ ID NO: 8124 - protein, 9 aa, synthetic construct
  REGION 1..9: note = Ubiquitin carboxyl-terminal hydrolase 7 (1092-1100)
TYLEKAIKI

SEQ ID NO: 8125 - protein, 9 aa, synthetic construct
  REGION 1..9: note = Iron-responsive element-binding protein 2 (410-418)
TYLKAVKLF

SEQ ID NO: 8126 - protein, 10 aa, synthetic construct
  REGION 1..10: note = Cellular tumor antigen p53 (125-134)
TYSPALNKMF

SEQ ID NO: 8127 - protein, 10 aa, synthetic construct
  REGION 1..10: note = StAR-related lipid transfer protein 7, mitochondrial (95-104)
TYTDVTPRQF

SEQ ID NO: 8128 - protein, 11 aa, synthetic construct
  REGION 1..11: note = StAR-related lipid transfer protein 7, mitochondrial (95-105)
TYTDVTPRQFF

SEQ ID NO: 8129 - protein, 9 aa, synthetic construct
  REGION 1..9: note = Nesprin-2 (590-598)
TYVENLRLL

SEQ ID NO: 8130 - protein, 9 aa, synthetic construct
  REGION 1..9: note = Choline/ethanolaminephosphotransferase 1 (200-208)
TYVSGTLRF

SEQ ID NO: 8131 - protein, 11 aa, synthetic construct
  REGION 1..11: note = Bifunctional glutamate/proline-tRNA ligase (557-567)
VFIEGADAETF

SEQ ID NO: 8132 - protein, 9 aa, synthetic construct
  REGION 1..9: note = F-actin-capping protein subunit alpha-2 (30-38)
VFNDVRLLL

SEQ ID NO: 8133 - protein, 9 aa, synthetic construct
  REGION 1..9: note = Nucleolysin TIAR (236-244)
VFPEKGYSF

SEQ ID NO: 8134 - protein, 9 aa, synthetic construct
  REGION 1..9: note = 3-hydroxy-3-methylglutaryl-coenzyme A reductase (105-113)
VFSTVVIHF

SEQ ID NO: 8135 - protein, 11 aa, synthetic construct
  REGION 1..11: note = H/ACA ribonucleoprotein complex subunit 3 (54-64)
VLMTQQPRPVL

SEQ ID NO: 8136 - protein, 9 aa, synthetic construct
  REGION 1..9: note = 40S ribosomal protein S26 (63-71)
VLPKLYVKL

SEQ ID NO: 8137 - protein, 12 aa, synthetic construct
  REGION 1..12: note = 60S ribosomal protein L31 (106-117)
VTYVPVTTFKNL

SEQ ID NO: 8138 - protein, 9 aa, synthetic construct
  REGION 1..9: note = Mitochondrial folate transporter/carrier (299-307)
VYENVSHFL

SEQ ID NO: 8139 - protein, 9 aa, synthetic construct
  REGION 1..9: note = Protein-lysine N-methyltransferase METTL10 (41-49)
VYERELQTF

SEQ ID NO: 8140 - protein, 13 aa, synthetic construct
  REGION 1..13: note = Nuclear pore complex protein Nup153 (381-393)
VYFKPSLTPSGEF

SEQ ID NO: 8141 - protein, 9 aa, synthetic construct
  REGION 1..9: note = Cytochrome c oxidase subunit 4 isoform 1, mitochondrial (125-133)
VYGPLPQSF

SEQ ID NO: 8142 - protein, 9 aa, synthetic construct
  REGION 1..9: note = 26S proteasome non-ATPase regulatory subunit 8 (131-139)
VYIKHPVSL

SEQ ID NO: 8143 - protein, 10 aa, synthetic construct
  REGION 1..10: note = DNA replication licensing factor MCM3 (192-201)
VYKDHQTITI

SEQ ID NO: 8144 - protein, 10 aa, synthetic construct
  REGION 1..10: note = Afadin (161-170)
VYKDMPETSF

SEQ ID NO: 8145 - protein, 9 aa, synthetic construct
  REGION 1..9: note = Guanine nucleotide-binding protein-like 3-like protein (293-301)
VYLDKFIRL

SEQ ID NO: 8146 - protein, 9 aa, synthetic construct
  REGION 1..9: note = Rho-related BTB domain-containing protein 1 (526-534)
VYLPNINKI

SEQ ID NO: 8147 - protein, 10 aa, synthetic construct
  REGION 1..10: note = Pre-mRNA-splicing factor SPF27 (137-146)
VYNENLVHMI

SEQ ID NO: 8148 - protein, 9 aa, synthetic construct
  REGION 1..9: note = Splicing factor 3B subunit 3 (519-527)
VYPDGIRHI

SEQ ID NO: 8149 - protein, 10 aa, synthetic construct
  REGION 1..10: note = Proteasome-associated protein ECM29 homolog (682-691)
VYPEKLATKF

SEQ ID NO: 8150 - protein, 9 aa, synthetic construct
  REGION 1..9: note = AP-5 complex subunit zeta-1 (388-396)
VYQHLFTRI

SEQ ID NO: 8151 - protein, 11 aa, synthetic construct
  REGION 1..11: note = Serine/arginine-rich splicing factor 1 (152-162)
VYRDGTGVVEF

SEQ ID NO: 8152 - protein, 9 aa, synthetic construct
  REGION 1..9: note = Dynamin-2 (124-132)
VYSPHVLNL

SEQ ID NO: 8153 - protein, 11 aa, synthetic construct
  REGION 1..11: note = Dynamin-2 (124-134)
VYSPHVLNLTL

SEQ ID NO: 8154 - protein, 11 aa, synthetic construct
  REGION 1..11: note = E3 ubiquitin-protein ligase UBR5 (1809-1819)
VYSQIPAAVKL

SEQ ID NO: 8155 - protein, 11 aa, synthetic construct
  REGION 1..11: note = Ribosome biogenesis protein BMS1 homolog (352-362)
VYVDLGGSHVF

SEQ ID NO: 8156 - protein, 9 aa, synthetic construct
  REGION 1..9: note = BRCA1-associated protein (237-245)
VYVERAEVL

SEQ ID NO: 8157 - protein, 9 aa, synthetic construct
  REGION 1..9: note = AP-3 complex subunit mu-1 (274-282)
VYVKHSISF

SEQ ID NO: 8158 - protein, 9 aa, synthetic construct
  REGION 1..9: note = Lipopolysaccharide-induced tumor necrosis factor-alpha factor (79-87)
VYVQHPITF

SEQ ID NO: 8159 - protein, 9 aa, synthetic construct
  REGION 1..9: note = AP-3 complex subunit delta-1 (521-529)
VYVQNVVKL

SEQ ID NO: 8160 - protein, 9 aa, synthetic construct
  REGION 1..9: note = Signal transducer and activator of transcription 2 (828-836)
VYVSRPSHF

SEQ ID NO: 8161 - protein, 9 aa, synthetic construct
  REGION 1..9: note = TraB domain-containing protein (75-83)
VYVVGTAHF

SEQ ID NO: 8162 - protein, 8 aa, synthetic construct
  REGION 1..8: note = Dystonin (673-680)
YAEKLHRL

SEQ ID NO: 8163 - protein, 8 aa, synthetic construct
  REGION 1..8: note = Histone deacetylase 1 (87-94)
YSKQMQRF

SEQ ID NO: 8164 - protein, 10 aa, synthetic construct
  REGION 1..10: note = Activator of 90 kDa heat shock protein ATPase homolog 1 (246-255)
YYFEGIKQTF

SEQ ID NO: 8165 - protein, 10 aa, synthetic construct
  REGION 1..10: note = Phosphatidylinositol 4-kinase alpha (328-337)
YYMKDLPTSF

SEQ ID NO: 8166 - protein, 9 aa, synthetic construct
  REGION 1..9: note = Eukaryotic translation initiation factor 3 subunit A (275-283)
YYNKVSTVF

SEQ ID NO: 8167 - protein, 10 aa, synthetic construct
  REGION 1..10: note = Eukaryotic translation initiation factor 4 gamma 1 (169-178)
YYPAQGVQQF

SEQ ID NO: 8168 - protein, 9 aa, synthetic construct
  REGION 1..9: note = 40S ribosomal protein S17 (20-28)
YYTRLGNDF

SEQ ID NO: 8169 - protein, 9 aa, synthetic construct
  REGION 1..9: note = Transmembrane protein 43 (102-110)
GRFFLSSGL

SEQ ID NO: 8170 - protein, 10 aa, synthetic construct
  REGION 1..10: note = Microsomal glutathione S-transferase 3 (82-91)
HPRIASGLGL

SEQ ID NO: 8171 - protein, 9 aa, synthetic construct
  REGION 1..9: note = Non-specific lipid-transfer protein (373-381)
KIGGIFAFK

SEQ ID NO: 8172 - protein, 8 aa, synthetic construct
  REGION 1..8: note = Cyclin-dependent kinase 11B (590-597)
YRAPELLL

SEQ ID NO: 8173 - protein, 9 aa, synthetic construct
  REGION 1..9: note = Spectrin beta chain, non-erythrocytic 1 (1663-1671)
HPESERISM

SEQ ID NO: 8174 - protein, 9 aa, synthetic construct
  REGION 1..9: note = Mitochondrial import receptor subunit TOM7 homolog (44-52)
MPEPTVLSL

SEQ ID NO: 8175 - protein, 9 aa, synthetic construct
  REGION 1..9: note = Histidine triad nucleotide-binding protein 1 (8-16)
SPQAPTHFL

SEQ ID NO: 8176 - protein, 9 aa, synthetic construct
  REGION 1..9: note = Prolyl endopeptidase (534-542)
AEYLIKEGY

SEQ ID NO: 8177 - protein, 10 aa, synthetic construct
  REGION 1..10: note = Tuftelin-interacting protein 11 (216-225)
EEFQKELSQW

SEQ ID NO: 8178 - protein, 10 aa, synthetic construct
  REGION 1..10: note = Protein unc-93 homolog B1 (315-324)
EEIDLRSVGW

SEQ ID NO: 8179 - protein, 9 aa, synthetic construct
  REGION 1..9: note = Spatacsin (901-909)
GEFQTQHSY

SEQ ID NO: 8180 - protein, 10 aa, synthetic construct
  REGION 1..10: note = HLA class I histocompatibility antigen, alpha chain E (109-118)
SEAGSHTLQW

SEQ ID NO: 8181 - protein, 9 aa, synthetic construct
  REGION 1..9: note = Vacuolar protein sorting-associated protein 41 homolog (103-111)
SEDGKVQVF

SEQ ID NO: 8182 - protein, 12 aa, synthetic construct
  REGION 1..12: note = Plastin-3 (65-76)
SELSSEGTQHSY

SEQ ID NO: 8183 - protein, 7 aa, synthetic construct
  REGION 1..7: note = GTPase-activating protein and VPS9 domain-containing protein 1 (36-42)
AFSILFK

SEQ ID NO: 8184 - protein, 11 aa, synthetic construct
  REGION 1..11: note = 40S ribosomal protein S3 (42-52)
AIAQAESLRYK

SEQ ID NO: 8185 - protein, 9 aa, synthetic construct
  REGION 1..9: note = 26S proteasome non-ATPase regulatory subunit 4 (282-290)
AIRNAMGSL

SEQ ID NO: 8186 - protein, 11 aa, synthetic construct
  REGION 1..11: note = Exportin-2 (374-384)
AIYLVTSLASK

SEQ ID NO: 8187 - protein, 9 aa, synthetic construct
  REGION 1..9: note = DNA-dependent protein kinase catalytic subunit (28-36)
ALAGHQLIR

SEQ ID NO: 8188 - protein, 9 aa, synthetic construct
  REGION 1..9: note = Coatomer subunit beta (905-913)
ALANVSIEK

SEQ ID NO: 8189 - protein, 10 aa, synthetic construct
  REGION 1..10: note = Protein SDE2 homolog (346-355)
ALFAKPLKGK

SEQ ID NO: 8190 - protein, 9 aa, synthetic construct
  REGION 1..9: note = Cytochrome c oxidase subunit 2 (41-49)
ALFLTLTTK

SEQ ID NO: 8191 - protein, 9 aa, synthetic construct
  REGION 1..9: note = ADP-ribosylation factor 5 (7-15)
ALFSRIFGK

SEQ ID NO: 8192 - protein, 9 aa, synthetic construct
  REGION 1..9: note = Similar to 60S ribosomal protein L7 (172-180)
ALIARSLGK

SEQ ID NO: 8193 - protein, 10 aa, synthetic construct
  REGION 1..10: note = Regulation of nuclear pre-mRNA domain-containing protein 2 (166-175)
ALIEELLLYK

SEQ ID NO: 8194 - protein, 11 aa, synthetic construct
  REGION 1..11: note = Mitochondrial import receptor subunit TOM5 homolog (36-46)
ALLRVTPFILK

SEQ ID NO: 8195 - protein, 9 aa, synthetic construct
  REGION 1..9: note = ADP/ATP translocase 3 (38-46)
ALNFAFKDK

SEQ ID NO: 8196 - protein, 14 aa, synthetic construct
  REGION 1..14: note = Heat shock protein HSP 90-beta (536-549)
ALRDNSTMGYMMAK

SEQ ID NO: 8197 - protein, 11 aa, synthetic construct
  REGION 1..11: note = Vimentin (43-53)
ALRPSTSRSLY

SEQ ID NO: 8198 - protein, 12 aa, synthetic construct
  REGION 1..12: note = 60S ribosomal protein L36 (2-13)
ALRYPMAVGLNK

SEQ ID NO: 8199 - protein, 9 aa, synthetic construct
  REGION 1..9: note = Heterogeneous nuclear ribonucleoprotein U-like protein 1 (367-375)
ALYPHVLVK

SEQ ID NO: 8200 - protein, 10 aa, synthetic construct
  REGION 1..10: note = 60S ribosomal protein L6 (61-70)
AMYSRKAMYK

SEQ ID NO: 8201 - protein, 9 aa, synthetic construct
  REGION 1..9: note = HCG15392, isoform CRA_b (43-51)
APAPPKAEA

SEQ ID NO: 8202 - protein, 11 aa, synthetic construct
  REGION 1..11: note = Myotrophin (63-73)
APDKHHITPLL

SEQ ID NO: 8203 - protein, 8 aa, synthetic construct
  REGION 1..8: note = Actin, cytoplasmic 1 (14-21)
APEEHPVL

SEQ ID NO: 8204 - protein, 9 aa, synthetic construct
  REGION 1..9: note = CCR4-NOT transcription complex subunit 1 (239-247)
APFLRNVEL

SEQ ID NO: 8205 - protein, 10 aa, synthetic construct
  REGION 1..10: note = Protein PRRC2A (692-701)
APQAPPPPPK

SEQ ID NO: 8206 - protein, 11 aa, synthetic construct
  REGION 1..11: note = 60S ribosomal protein L13 (47-57)
APRPASGPIRP

SEQ ID NO: 8207 - protein, 10 aa, synthetic construct
  REGION 1..10: note = NSFL1 cofactor p47 (66-75)
APSDNRVTSF

SEQ ID NO: 8208 - protein, 9 aa, synthetic construct
  REGION 1..9: note = 60S ribosomal protein L13 (2-10)
APSRNGMVL

SEQ ID NO: 8209 - protein, 16 aa, synthetic construct
  REGION 1..16: note = Heat shock protein HSP 90-beta (534-549)
AQALRDNSTMGYMMAK

SEQ ID NO: 8210 - protein, 8 aa, synthetic construct
  REGION 1..8: note = DNA-directed RNA polymerase II subunit RPB2 (365-372)
ARGPIQIL

SEQ ID NO: 8211 - protein, 8 aa, synthetic construct
  REGION 1..8: note = Interferon regulatory factor 2-binding protein 1 (263-270)
ARPPGYEF

SEQ ID NO: 8212 - protein, 9 aa, synthetic construct
  REGION 1..9: note = Serine/threonine-protein kinase 4 (270-278)
ATATQLLQH

SEQ ID NO: 8213 - protein, 9 aa, synthetic construct
  REGION 1..9: note = DNA-dependent protein kinase catalytic subunit (4080-4088)
ATDPNILGR

SEQ ID NO: 8214 - protein, 10 aa, synthetic construct
  REGION 1..10: note = S-formylglutathione hydrolase (124-133)
ATEDPWKTNY

SEQ ID NO: 8215 - protein, 9 aa, synthetic construct
  REGION 1..9: note = Probable ATP-dependent RNA helicase DDX6 (267-275)
ATFPLSVQK

SEQ ID NO: 8216 - protein, 10 aa, synthetic construct
  REGION 1..10: note = General transcription factor II-I repeat domain-containing protein 2B (163-172)
ATLKWILENK

SEQ ID NO: 8217 - protein, 10 aa, synthetic construct
  REGION 1..10: note = Phosphatidylinositol-binding clathrin assembly protein (29-38)
ATTHEIMGPK

SEQ ID NO: 8218 - protein, 11 aa, synthetic construct
  REGION 1..11: note = Tubulin alpha-1C chain (340-350)
ATYAPVISAEK

SEQ ID NO: 8219 - protein, 11 aa, synthetic construct
  REGION 1..11: note = E3 ubiquitin/ISG15 ligase TRIM25 (592-602)
AVADKVHLMYK

SEQ ID NO: 8220 - protein, 12 aa, synthetic construct
  REGION 1..12: note = Omega-amidase NIT2 (98-109)
AVFGPDGTLLAK

SEQ ID NO: 8221 - protein, 9 aa, synthetic construct
  REGION 1..9: note = Farnesyl pyrophosphate synthase (332-340)
AVFLGLARK

SEQ ID NO: 8222 - protein, 11 aa, synthetic construct
  REGION 1..11: note = COP9 signalosome complex subunit 8 (4-14)
AVMAESAFSFK

SEQ ID NO: 8223 - protein, 11 aa, synthetic construct
  REGION 1..11: note = Asparagine-tRNA ligase, cytoplasmic (180-190)
AVYGMLNLTPK

SEQ ID NO: 8224 - protein, 11 aa, synthetic construct
  REGION 1..11: note = Ras GTPase-activating protein-binding protein 2 (54-64)
AVYGQNDIHHK

SEQ ID NO: 8225 - protein, 10 aa, synthetic construct
  REGION 1..10: note = ATP-dependent RNA helicase DHX8 (1045-1054)
AVYNSWKNNK

SEQ ID NO: 8226 - protein, 11 aa, synthetic construct
  REGION 1..11: note = E3 ubiquitin/ISG15 ligase TRIM25 (55-65)
AVYQARPQLHK

SEQ ID NO: 8227 - protein, 11 aa, synthetic construct
  REGION 1..11: note = DNA damage-binding protein 1 (869-879)
AVYSMVEFNGK

SEQ ID NO: 8228 - protein, 9 aa, synthetic construct
  REGION 1..9: note = Glucose-6-phosphate 1-dehydrogenase (246-254)
AVYTKMMTK

SEQ ID NO: 8229 - protein, 10 aa, synthetic construct
  REGION 1..10: note = Glucose-6-phosphate 1-dehydrogenase (246-255)
AVYTKMMTKK

SEQ ID NO: 8230 - protein, 9 aa, synthetic construct
  REGION 1..9: note = COP9 signalosome complex subunit 3 (239-247)
AYHELAQVY

SEQ ID NO: 8231 - protein, 30 aa, synthetic construct
  REGION 1..30: note = 60 kDa heat shock protein, mitochondrial (315-344)
DMAIATGGAVFGEEGLTLNLEDVQPHDLGK

SEQ ID NO: 8232 - protein, 8 aa, synthetic construct
  REGION 1..8: note = Protein FAM136A (11-18)
EAVESMVK

SEQ ID NO: 8233 - protein, 9 aa, synthetic construct
  REGION 1..9: note = 60S ribosomal protein L4 (213-221)
EDNGIIKAF

SEQ ID NO: 8234 - protein, 11 aa, synthetic construct
  REGION 1..11: note = Basic leucine zipper and W2 domain-containing protein 2 (51-61)
FLDSTGSRLDY

SEQ ID NO: 8235 - protein, 10 aa, synthetic construct
  REGION 1..10: note = Rab GDP dissociation inhibitor beta (29-38)
FVYKGGKIYK

SEQ ID NO: 8236 - protein, 9 aa, synthetic construct
  REGION 1..9: note = Protein PRRC2C (2390-2398)
FYMDTSHLF

SEQ ID NO: 8237 - protein, 8 aa, synthetic construct
  REGION 1..8: note = Probable ATP-dependent RNA helicase DDX5 (58-65)
FYQEHPDL

SEQ ID NO: 8238 - protein, 12 aa, synthetic construct
  REGION 1..12: note = Peroxisomal multifunctional enzyme type 2 (235-246)
GLFEVGAGWIGK

SEQ ID NO: 8239 - protein, 9 aa, synthetic construct
  REGION 1..9: note = RNA cytidine acetyltransferase (821-829)
GLFNRIIRK

SEQ ID NO: 8240 - protein, 12 aa, synthetic construct
  REGION 1..12: note = Transgelin-2 (142-153)
GLFSGDPNWFPK

SEQ ID NO: 8241 - protein, 9 aa, synthetic construct
  REGION 1..9: note = Heterogeneous nuclear ribonucleoprotein Q (269-277)
GLTDVILYH

SEQ ID NO: 8242 - protein, 9 aa, synthetic construct
  REGION 1..9: note = Malignant T-cell-amplified sequence 1 (174-182)
GLWHMKTYK

SEQ ID NO: 8243 - protein, 10 aa, synthetic construct
  REGION 1..10: note = Synaptic vesicle membrane protein VAT-1 homolog (282-291)
GMANLLTGPK

SEQ ID NO: 8244 - protein, 9 aa, synthetic construct
  REGION 1..9: note = Reticulocalbin-2 (4-12)
GPRTAALGL

SEQ ID NO: 8245 - protein, 10 aa, synthetic construct
  REGION 1..10: note = Superkiller viralicidic activity 2-like 2 (368-377)
GTKGPSNVFK

SEQ ID NO: 8246 - protein, 10 aa, synthetic construct
  REGION 1..10: note = Calnexin (78-87)
GTLSGWILSK

SEQ ID NO: 8247 - protein, 9 aa, synthetic construct
  REGION 1..9: note = Parafibromin (313-321)
GTYHGMTLK

SEQ ID NO: 8248 - protein, 9 aa, synthetic construct
  REGION 1..9: note = Transcription factor 12 (417-425)
HAVGPSTSL

SEQ ID NO: 8249 - protein, 10 aa, synthetic construct
  REGION 1..10: note = GMP synthase (glutamine-hydrolyzing) (436-445)
HPFPGPGLAI

SEQ ID NO: 8250 - protein, 9 aa, synthetic construct
  REGION 1..9: note = Superkiller viralicidic activity 2-like 2 (807-815)
HPLHNDPNL

SEQ ID NO: 8251 - protein, 9 aa, synthetic construct
  REGION 1..9: note = Staphylococcal nuclease domain-containing protein 1 (254-262)
HPNGNITEL

SEQ ID NO: 8252 - protein, 11 aa, synthetic construct
  REGION 1..11: note = Extended synaptotagmin-1 (652-662)
HVLEAQDLIAK

SEQ ID NO: 8253 - protein, 9 aa, synthetic construct
  REGION 1..9: note = Pre-mRNA-processing factor 19 (442-450)
IFDQSGTYL

SEQ ID NO: 8254 - protein, 10 aa, synthetic construct
  REGION 1..10: note = Heterogeneous nuclear ribonucleoprotein C-like 1 (20-29)
IGNLNTLVVK

SEQ ID NO: 8255 - protein, 9 aa, synthetic construct
  REGION 1..9: note = Catenin alpha-1 (90-98)
ILQKNVPIL

SEQ ID NO: 8256 - protein, 9 aa, synthetic construct
  REGION 1..9: note = 60S ribosomal protein L10a (82-90)
IPHMDIEAL

SEQ ID NO: 8257 - protein, 11 aa, synthetic construct
  REGION 1..11: note = Spectrin beta chain, non-erythrocytic 1 (2247-2257)
IPYHSEVPVSL

SEQ ID NO: 8258 - protein, 9 aa, synthetic construct
  REGION 1..9: note = Bifunctional glutamate/proline-tRNA ligase (415-423)
IRKPYIWEY

SEQ ID NO: 8259 - protein, 9 aa, synthetic construct
  REGION 1..9: note = Histone deacetylase 1 (79-87)
IRPDNMSEY

SEQ ID NO: 8260 - protein, 9 aa, synthetic construct
  REGION 1..9: note = DNA replication licensing factor MCM5 (289-297)
IRSSYIRVL

SEQ ID NO: 8261 - protein, 10 aa, synthetic construct
  REGION 1..10: note = Spectrin beta chain, non-erythrocytic 4 (145-154)
IVDGNHRLTL

SEQ ID NO: 8262 - protein, 9 aa, synthetic construct
  REGION 1..9: note = Cytochrome c oxidase subunit 2 (209-217)
IVLELIPLK

SEQ ID NO: 8263 - protein, 9 aa, synthetic construct
  REGION 1..9: note = Mitotic checkpoint protein BUB3 (234-242)
IYPVNAISF

SEQ ID NO: 8264 - protein, 9 aa, synthetic construct
  REGION 1..9: note = Non-POU domain-containing octamer-binding protein (10-18)
KAGEVFIHK

SEQ ID NO: 8265 - protein, 15 aa, synthetic construct
  REGION 1..15: note = ATP synthase-coupling factor 6, mitochondrial (94-108)
KFEDPKFEVIEKPQA

SEQ ID NO: 8266 - protein, 9 aa, synthetic construct
  REGION 1..9: note = 60S ribosomal protein L10 (156-164)
KFKFPGRQK

SEQ ID NO: 8267 - protein, 9 aa, synthetic construct
  REGION 1..9: note = Coatomer subunit beta' (413-421)
KIFKNFKEK

SEQ ID NO: 8268 - protein, 9 aa, synthetic construct
  REGION 1..9: note = Elongation factor 2 (571-579)
KKSDPVVSY

SEQ ID NO: 8269 - protein, 9 aa, synthetic construct
  REGION 1..9: note = Apoptosis inhibitor 5 (238-246)
KLFDKLLEY

SEQ ID NO: 8270 - protein, 11 aa, synthetic construct
  REGION 1..11: note = COX assembly mitochondrial protein 2 homolog (69-79)
KLFNPPEESEK

SEQ ID NO: 8271 - protein, 9 aa, synthetic construct
  REGION 1..9: note = 116 kDa U5 small nuclear ribonucleoprotein component (713-721)
KLGEFFQTK

SEQ ID NO: 8272 - protein, 9 aa, synthetic construct
  REGION 1..9: note = 40S ribosomal protein S5 (86-94)
KLMTVRIVK

SEQ ID NO: 8273 - protein, 9 aa, synthetic construct
  REGION 1..9: note = 60S ribosomal protein L23a (115-123)
KLYDIDVAK

SEQ ID NO: 8274 - protein, 13 aa, synthetic construct
  REGION 1..13: note = ATP-citrate synthase (650-662)
KLYRPGSVAYVSR

SEQ ID NO: 8275 - protein, 10 aa, synthetic construct
  REGION 1..10: note = Signal recognition particle 54 kDa protein (433-442)
KMGGIKGLFK

SEQ ID NO: 8276 - protein, 9 aa, synthetic construct
  REGION 1..9: note = Charged multivesicular body protein 5 (9-17)
KPKAPPPSL

SEQ ID NO: 8277 - protein, 22 aa, synthetic construct
  REGION 1..22: note = 60 kDa heat shock protein, mitochondrial (153-174)
KPLVIIAEDVDGEALSTLVLNR

SEQ ID NO: 8278 - protein, 9 aa, synthetic construct
  REGION 1..9: note = Lysine-specific histone demethylase 1A (200-208)
KPVSLGQAL

SEQ ID NO: 8279 - protein, 13 aa, synthetic construct
  REGION 1..13: note = Histone H4 (80-92)
KTVTAMDVVYALK

SEQ ID NO: 8280 - protein, 12 aa, synthetic construct
  REGION 1..12: note = High mobility group protein B1 (76-87)
KTYIPPKGETKK

SEQ ID NO: 8281 - protein, 9 aa, synthetic construct
  REGION 1..9: note = GMP synthase (glutamine-hydrolyzing) (112-120)
KVFGGTVHK

SEQ ID NO: 8282 - protein, 9 aa, synthetic construct
  REGION 1..9: note = Splicing factor 3B subunit 1 (554-562)
KVIDRILYK

SEQ ID NO: 8283 - protein, 9 aa, synthetic construct
  REGION 1..9: note = SRSF protein kinase 1 (4-12)
KVLALQARK

SEQ ID NO: 8284 - protein, 11 aa, synthetic construct
  REGION 1..11: note = RANBP2-like and GRIP domain-containing protein 2 (608-618)
KVLPLLKIIKK

SEQ ID NO: 8285 - protein, 11 aa, synthetic construct
  REGION 1..11: note = Cytochrome c oxidase subunit 4 isoform 1, mitochondrial (149-159)
KVNPIQGLASK

SEQ ID NO: 8286 - protein, 9 aa, synthetic construct
  REGION 1..9: note = PC4 and SFRS1-interacting protein (228-236)
KVSQVIMEK

SEQ ID NO: 8287 - protein, 10 aa, synthetic construct
  REGION 1..10: note = Rab GDP dissociation inhibitor alpha (103-112)
KVVEGSFVYK

SEQ ID NO: 8288 - protein, 9 aa, synthetic construct
  REGION 1..9: note = Lymphocyte cytosolic protein 2 (468-476)
KVYNIQIRY

SEQ ID NO: 8289 - protein, 9 aa, synthetic construct
  REGION 1..9: note = ATP-dependent RNA helicase A (169-177)
KYPSPFFVF

SEQ ID NO: 8290 - protein, 19 aa, synthetic construct
  REGION 1..19: note = Vimentin (79-97)
LLQDSVDFSLADAINTEFK

SEQ ID NO: 8291 - protein, 9 aa, synthetic construct
  REGION 1..9: note = Actin, gamma-enteric smooth muscle (200-208)
LPDGQVITI

SEQ ID NO: 8292 - protein, 9 aa, synthetic construct
  REGION 1..9: note = Polypyrimidine tract-binding protein 3 (123-131)
LPFGKVTNL

SEQ ID NO: 8293 - protein, 9 aa, synthetic construct
  REGION 1..9: note = Histone deacetylase 1 (373-381)
LPHAPGVQM

SEQ ID NO: 8294 - protein, 10 aa, synthetic construct
  REGION 1..10: note = Eukaryotic translation initiation factor 4B (90-99)
LPKSPPYTAF

SEQ ID NO: 8295 - protein, 9 aa, synthetic construct
  REGION 1..9: note = DNA polymerase epsilon subunit 3 (10-18)
LPNAVITRI

SEQ ID NO: 8296 - protein, 10 aa, synthetic construct
  REGION 1..10: note = Sorting nexin-1 (270-279)
LPRAVGTQTL

SEQ ID NO: 8297 - protein, 9 aa, synthetic construct
  REGION 1..9: note = T-complex protein 1 subunit theta (260-268)
LPRLTPPVL

SEQ ID NO: 8298 - protein, 9 aa, synthetic construct
  REGION 1..9: note = Phosphate carrier protein, mitochondrial (340-348)
LPRPPPPEM

SEQ ID NO: 8299 - protein, 9 aa, synthetic construct
  REGION 1..9: note = Protein flightless-1 homolog (881-889)
LPRQPPMSL

SEQ ID NO: 8300 - protein, 9 aa, synthetic construct
  REGION 1..9: note = Cytochrome c oxidase subunit 2 (78-86)
LPSLRILYM

SEQ ID NO: 8301 - protein, 9 aa, synthetic construct
  REGION 1..9: note = BAG family molecular chaperone regulator 3 (188-196)
LPSSGRSSL

SEQ ID NO: 8302 - protein, 9 aa, synthetic construct
  REGION 1..9: note = Staphylococcal nuclease domain-containing protein 1 (747-755)
LPSTRLGTL

SEQ ID NO: 8303 - protein, 9 aa, synthetic construct
  REGION 1..9: note = Beta-enolase (102-110)
LPVPAFNVI

SEQ ID NO: 8304 - protein, 9 aa, synthetic construct
  REGION 1..9: note = RNA-binding protein 4 (186-194)
LTEQYNEQY

SEQ ID NO: 8305 - protein, 9 aa, synthetic construct
  REGION 1..9: note = 60S ribosomal protein L13 (150-158)
LTGPVMPVR

SEQ ID NO: 8306 - protein, 9 aa, synthetic construct
  REGION 1..9: note = Proteasome activator complex subunit 3 (29-37)
LVANFFPKK

SEQ ID NO: 8307 - protein, 9 aa, synthetic construct
  REGION 1..9: note = CD99 antigen (1-9)
MARGAALAL

SEQ ID NO: 8308 - protein, 11 aa, synthetic construct
  REGION 1..11: note = Destrin (115-125)
MIYASSKDAIK

SEQ ID NO: 8309 - protein, 12 aa, synthetic construct
  REGION 1..12: note = Destrin (115-126)
MIYASSKDAIKK

SEQ ID NO: 8310 - protein, 11 aa, synthetic construct
  REGION 1..11: note = Peroxiredoxin-1 (21-31)
MPDGQFKDISL

SEQ ID NO: 8311 - protein, 9 aa, synthetic construct
  REGION 1..9: note = E3 ubiquitin-protein ligase HECTD1 (409-417)
MPRGVVVTL

SEQ ID NO: 8312 - protein, 11 aa, synthetic construct
  REGION 1..11: note = Double-stranded RNA-binding protein Staufen homolog 1 (482-492)
MPRTGNGPMSV

SEQ ID NO: 8313 - protein, 9 aa, synthetic construct
  REGION 1..9: note = 60S acidic ribosomal protein P2 (1-9)
MRYVASYLL

SEQ ID NO: 8314 - protein, 9 aa, synthetic construct
  REGION 1..9: note = Eukaryotic translation initiation factor 1A, Y-chromosomal (87-95)
NKADVILKY

SEQ ID NO: 8315 - protein, 9 aa, synthetic construct
  REGION 1..9: note = ATP-dependent RNA helicase DDX24 (498-506)
NPKRQTLVF

SEQ ID NO: 8316 - protein, 10 aa, synthetic construct
  REGION 1..10: note = Transgelin-2 (158-167)
NPRNFSDNQL

SEQ ID NO: 8317 - protein, 9 aa, synthetic construct
  REGION 1..9: note = 5'-3' exoribonuclease 2 (456-464)
NPRQAAYEM

SEQ ID NO: 8318 - protein, 9 aa, synthetic construct
  REGION 1..9: note = Lysine-specific histone demethylase 1A (407-415)
NRLLEATSY

SEQ ID NO: 8319 - protein, 9 aa, synthetic construct
  REGION 1..9: note = Nesprin-2 (5548-5556)
NRPEFITEF

SEQ ID NO: 8320 - protein, 9 aa, synthetic construct
  REGION 1..9: note = Protein DEK (115-123)
NRPGTVSSL

SEQ ID NO: 8321 - protein, 9 aa, synthetic construct
  REGION 1..9: note = ATP-dependent RNA helicase DDX3X (644-652)
NSDGYGGNY

SEQ ID NO: 8322 - protein, 8 aa, synthetic construct
  REGION 1..8: note = 40S ribosomal protein S26 (108-115)
PRPPPKPM

SEQ ID NO: 8323 - protein, 9 aa, synthetic construct
  REGION 1..9: note = Tubulin beta chain (43-51)
QLDRISVYY

SEQ ID NO: 8324 - protein, 9 aa, synthetic construct
  REGION 1..9: note = Isoleucine-tRNA ligase, cytoplasmic (165-173)
QLYDKGLVY

SEQ ID NO: 8325 - protein, 9 aa, synthetic construct
  REGION 1..9: note = Filamin-A (2017-2025)
QPASFAVSL

SEQ ID NO: 8326 - protein, 9 aa, synthetic construct
  REGION 1..9: note = Lysine-specific histone demethylase 1A (574-582)
QPITPGPSI

SEQ ID NO: 8327 - protein, 9 aa, synthetic construct
  REGION 1..9: note = Pericentriolar material 1 protein (1892-1900)
QPNPLPLRL

SEQ ID NO: 8328 - protein, 10 aa, synthetic construct
  REGION 1..10: note = Cytochrome c oxidase subunit 4 isoform 1, mitochondrial (93-102)
QSFDKEWVAK

SEQ ID NO: 8329 - protein, 10 aa, synthetic construct
  REGION 1..10: note = Nucleoporin SEH1 (246-255)
RIFTLKPVRK

SEQ ID NO: 8330 - protein, 10 aa, synthetic construct
  REGION 1..10: note = L-lactate dehydrogenase B chain (270-279)
RIHPVSTMVK

SEQ ID NO: 8331 - protein, 9 aa, synthetic construct
  REGION 1..9: note = DNA replication licensing factor MCM6 (131-139)
RIIEKVIHR

SEQ ID NO: 8332 - protein, 12 aa, synthetic construct
  REGION 1..12: note = Reticulon-4 (62-73)
RIYKGVIQAIQK

SEQ ID NO: 8333 - protein, 9 aa, synthetic construct
  REGION 1..9: note = DNA (cytosine-5)-methyltransferase 1 (1459-1467)
RLFGNILDK

SEQ ID NO: 8334 - protein, 10 aa, synthetic construct
  REGION 1..10: note = 26S protease regulatory subunit 6B (342-351)
RLIFSTITSK

SEQ ID NO: 8335 - protein, 11 aa, synthetic construct
  REGION 1..11: note = 26S protease regulatory subunit 6A (11-21)
RLLDSEIKIMK

SEQ ID NO: 8336 - protein, 13 aa, synthetic construct
  REGION 1..13: note = Heat shock 70 kDa protein 4L (128-140)
RLMNETTAVALAY

SEQ ID NO: 8337 - protein, 10 aa, synthetic construct
  REGION 1..10: note = DNA-dependent protein kinase catalytic subunit (659-668)
RLPLISGFYK

SEQ ID NO: 8338 - protein, 10 aa, synthetic construct
  REGION 1..10: note = Vimentin (69-78)
RLRSSVPGVR

SEQ ID NO: 8339 - protein, 9 aa, synthetic construct
  REGION 1..9: note = Cytoskeleton-associated protein 2 (369-377)
RLSEWKAGK

SEQ ID NO: 8340 - protein, 10 aa, synthetic construct
  REGION 1..10: note = Coiled-coil domain-containing protein 124 (192-201)
RLSQLKQLLK

SEQ ID NO: 8341 - protein, 9 aa, synthetic construct
  REGION 1..9: note = E3 ubiquitin-protein ligase HECTD1 (170-178)
RLVDLPISK

SEQ ID NO: 8342 - protein, 9 aa, synthetic construct
  REGION 1..9: note = Serine-threonine kinase receptor-associated protein (290-298)
RLWQTVVGK

SEQ ID NO: 8343 - protein, 13 aa, synthetic construct
  REGION 1..13: note = Mitotic checkpoint protein BUB3 (40-52)
RLYDVPANSMRLK

SEQ ID NO: 8344 - protein, 9 aa, synthetic construct
  REGION 1..9: note = DNA damage-binding protein 1 (889-897)
RLYEWTTEK

SEQ ID NO: 8345 - protein, 12 aa, synthetic construct
  REGION 1..12: note = 60S ribosomal protein L23a (129-140)
RPDGEKKAYVRL

SEQ ID NO: 8346 - protein, 9 aa, synthetic construct
  REGION 1..9: note = 26S proteasome non-ATPase regulatory subunit 12 (417-425)
RPKDPNNLL

SEQ ID NO: 8347 - protein, 9 aa, synthetic construct
  REGION 1..9: note = Ataxin-3 (188-196)
RPKLIGEEL

SEQ ID NO: 8348 - protein, 11 aa, synthetic construct
  REGION 1..11: note = Poly(rC)-binding protein 2 (183-193)
RPKPSSSPVIF

SEQ ID NO: 8349 - protein, 9 aa, synthetic construct
  REGION 1..9: note = 40S ribosomal protein S11 (132-140)
RPLSKTVRF

SEQ ID NO: 8350 - protein, 9 aa, synthetic construct
  REGION 1..9: note = Splicing factor 3B subunit 2 (222-230)
RPRGPPPPP

SEQ ID NO: 8351 - protein, 11 aa, synthetic construct
  REGION 1..11: note = Vimentin (23-33)
RPSSSRSYVTT

SEQ ID NO: 8352 - protein, 9 aa, synthetic construct
  REGION 1..9: note = Elongation factor 1-alpha 1 (240-248)
RPTDKPLRL

SEQ ID NO: 8353 - protein, 10 aa, synthetic construct
  REGION 1..10: note = Translation initiation factor eIF-2B subunit delta (385-394)
RPWLEGRHTL

SEQ ID NO: 8354 - protein, 10 aa, synthetic construct
  REGION 1..10: note = Polyglutamine-binding protein 1 (242-251)
RPYPSPGAVL

SEQ ID NO: 8355 - protein, 10 aa, synthetic construct
  REGION 1..10: note = Transcriptional repressor p66-alpha (257-266)
RSIPQSATWK

SEQ ID NO: 8356 - protein, 10 aa, synthetic construct
  REGION 1..10: note = Constitutive coactivator of PPAR-gamma-like protein 1 (313-322)
RTDDKVIRFK

SEQ ID NO: 8357 - protein, 11 aa, synthetic construct
  REGION 1..11: note = Ras GTPase-activating protein-binding protein 1 (247-257)
RTFSWASVTSK

SEQ ID NO: 8358 - protein, 9 aa, synthetic construct
  REGION 1..9: note = 42 kda non-muscle cytoplasmic actin (2-10)
RVAPEEHPV

SEQ ID NO: 8359 - protein, 13 aa, synthetic construct
  REGION 1..13: note = Heterogeneous nuclear ribonucleoprotein C-like 1 (17-29)
RVFIGNLNTLVVK

SEQ ID NO: 8360 - protein, 12 aa, synthetic construct
  REGION 1..12: note = Elongation factor 2 (415-426)
RVFSGLVSTGLK

SEQ ID NO: 8361 - protein, 9 aa, synthetic construct
  REGION 1..9: note = Paired amphipathic helix protein Sin3a (1263-1271)
RVKYGTVFK

SEQ ID NO: 8362 - protein, 12 aa, synthetic construct
  REGION 1..12: note = Prohibitin (117-128)
RVLPSITTEILK

SEQ ID NO: 8363 - protein, 13 aa, synthetic construct
  REGION 1..13: note = Coatomer subunit beta (327-339)
RVLSTPDLEVRKK

SEQ ID NO: 8364 - protein, 9 aa, synthetic construct
  REGION 1..9: note = Filamin-A (2022-2030)
RVRVSGQGL

SEQ ID NO: 8365 - protein, 9 aa, synthetic construct
  REGION 1..9: note = Pre-mRNA-processing-splicing factor 8 (444-452)
RVSYQKLLK

SEQ ID NO: 8366 - protein, 16 aa, synthetic construct
  REGION 1..16: note = Ribose-5-phosphate isomerase (219-234)
RVYFGMQDGSVNMREK

SEQ ID NO: 8367 - protein, 9 aa, synthetic construct
  REGION 1..9: note = Antigen KI-67 (420-428)
SENLLGKQF

SEQ ID NO: 8368 - protein, 10 aa, synthetic construct
  REGION 1..10: note = Heterogeneous nuclear ribonucleoproteins A2/B1 (73-82)
SIDGRVVEPK

SEQ ID NO: 8369 - protein, 10 aa, synthetic construct
  REGION 1..10: note = Transmembrane and coiled-coil domain-containing protein 1 (107-116)
SIFDGRVVAK

SEQ ID NO: 8370 - protein, 11 aa, synthetic construct
  REGION 1..11: note = Phosphoglycerate kinase 1 (87-97)
SLLGKDVLFLK

SEQ ID NO: 8371 - protein, 9 aa, synthetic construct
  REGION 1..9: note = Dynein light chain roadblock-type 1 (51-59)
SLMHSFILK

SEQ ID NO: 8372 - protein, 10 aa, synthetic construct
  REGION 1..10: note = Vimentin (430-439)
SLPLVDTHSK

SEQ ID NO: 8373 - protein, 14 aa, synthetic construct
  REGION 1..14: note = Vimentin (51-64)
SLYASSPGGVYATR

SEQ ID NO: 8374 - protein, 9 aa, synthetic construct
  REGION 1..9: note = Fatty acid synthase (2326-2334)
SPAPTHNSL

SEQ ID NO: 8375 - protein, 9 aa, synthetic construct
  REGION 1..9: note = Ataxin-2-like protein (516-524)
SPASPKISL

SEQ ID NO: 8376 - protein, 9 aa, synthetic construct
  REGION 1..9: note = Chromosome alignment-maintaining phosphoprotein 1 (618-626)
SPEQSRNVL

SEQ ID NO: 8377 - protein, 9 aa, synthetic construct
  REGION 1..9: note = Rho guanine nucleotide exchange factor 1 (10-18)
SPGPSRPGL

SEQ ID NO: 8378 - protein, 10 aa, synthetic construct
  REGION 1..10: note = Isocitrate dehydrogenase (NADP) cytoplasmic (28-37)
SPNGTIRNIL

SEQ ID NO: 8379 - protein, 9 aa, synthetic construct
  REGION 1..9: note = Trifunctional enzyme subunit alpha, mitochondrial (56-64)
SPNSKVNTL

SEQ ID NO: 8380 - protein, 9 aa, synthetic construct
  REGION 1..9: note = Cleavage stimulation factor subunit 2 (153-161)
SPQEARNML

SEQ ID NO: 8381 - protein, 9 aa, synthetic construct
  REGION 1..9: note = Poly(rC)-binding protein 1 (173-181)
SPQGRVMTI

SEQ ID NO: 8382 - protein, 9 aa, synthetic construct
  REGION 1..9: note = E3 ubiquitin-protein ligase TRIP12 (1954-1962)
SPRLPVGGF

SEQ ID NO: 8383 - protein, 9 aa, synthetic construct
  REGION 1..9: note = Cytoplasmic dynein 1 light intermediate chain 1 (398-406)
SPRVPGGSP

SEQ ID NO: 8384 - protein, 10 aa, synthetic construct
  REGION 1..10: note = Telomeric repeat-binding factor 2-interacting protein 1 (154-163)
SPSSVTGNAL

SEQ ID NO: 8385 - protein, 9 aa, synthetic construct
  REGION 1..9: note = Transketolase (386-394)
SRPENAIIY

SEQ ID NO: 8386 - protein, 8 aa, synthetic construct
  REGION 1..8: note = Heterogeneous nuclear ribonucleoprotein K (81-88)
SSGPERIL

SEQ ID NO: 8387 - protein, 12 aa, synthetic construct
  REGION 1..12: note = RNA-binding protein FUS (44-55)
STDTSGYGQSSY

SEQ ID NO: 8388 - protein, 9 aa, synthetic construct
  REGION 1..9: note = DNA-dependent protein kinase catalytic subunit (1861-1869)
STFDTQITK

SEQ ID NO: 8389 - protein, 9 aa, synthetic construct
  REGION 1..9: note = 60S ribosomal protein L10a (153-161)
STIKFQMKK

SEQ ID NO: 8390 - protein, 9 aa, synthetic construct
  REGION 1..9: note = Cytoskeleton-associated protein 5 (430-438)
STLPKSLLK

SEQ ID NO: 8391 - protein, 11 aa, synthetic construct
  REGION 1..11: note Dolichyl-diphosphooligosaccharide-proteinosyltransferase subunit 2 (254-264)
SVASAAAVLSH

SEQ ID NO: 8392 - protein, 9 aa, synthetic construct
  REGION 1..9: note = Cytoplasmic FMR1-interacting protein 1 (504-512)
SVFNHAIRH

SEQ ID NO: 8393 - protein, 9 aa, synthetic construct
  REGION 1..9: note = Far upstream element-binding protein 3 (77-85)
SVYGYGVQK

SEQ ID NO: 8394 - protein, 9 aa, synthetic construct
  REGION 1..9: note = YTH domain-containing protein 1 (570-578)
SYNDYVREF

SEQ ID NO: 8395 - protein, 9 aa, synthetic construct
  REGION 1..9: note = RNA binding motif protein, X-linked-like-1 (280-288)
SYRDSYESY

SEQ ID NO: 8396 - protein, 9 aa, synthetic construct
  REGION 1..9: note = Nuclear pore complex protein Nup98-Nup96 (1516-1524)
TADPLDYRL

SEQ ID NO: 8397 - protein, 9 aa, synthetic construct
  REGION 1..9: note = Fatty acid synthase (1230-1238)
TAVENMPSL

SEQ ID NO: 8398 - protein, 10 aa, synthetic construct
  REGION 1..10: note = T-complex protein 1 subunit theta (13-22)
TAYGPNGMNK

SEQ ID NO: 8399 - protein, 9 aa, synthetic construct
  REGION 1..9: note = Eukaryotic translation elongation factor 1 epsilon-1 (114-122)
TLADILLYY

SEQ ID NO: 8400 - protein, 9 aa, synthetic construct
  REGION 1..9: note = Coatomer subunit beta' (828-836)
TPNEERNVM

SEQ ID NO: 8401 - protein, 9 aa, synthetic construct
  REGION 1..9: note = Extended synaptotagmin-1 (769-777)
TPRPTAAEL

SEQ ID NO: 8402 - protein, 9 aa, synthetic construct
  REGION 1..9: note = Serine/arginine repetitive matrix protein 2 (2049-2057)
TPVAGSQSL

SEQ ID NO: 8403 - protein, 9 aa, synthetic construct
  REGION 1..9: note = Exportin-1 (61-69)
TRVDTILEF

SEQ ID NO: 8404 - protein, 10 aa, synthetic construct
  REGION 1..10: note = TATA-binding protein-associated factor 2N (41-50)
TTDSSYGQNY

SEQ ID NO: 8405 - protein, 10 aa, synthetic construct
  REGION 1..10: note = Retinoblastoma-associated protein (408-417)
TVNPKESILK

SEQ ID NO: 8406 - protein, 9 aa, synthetic construct
  REGION 1..9: note = Prosaposin (51-59)
TVWNKPTVK

SEQ ID NO: 8407 - protein, 8 aa, synthetic construct
  REGION 1..8: note = Zinc phosphodiesterase ELAC protein 2 (581-588)
VERLISSL

SEQ ID NO: 8408 - protein, 8 aa, synthetic construct
  REGION 1..8: note = Antigen KI-67 (75-82)
VIDEPVRL

SEQ ID NO: 8409 - protein, 13 aa, synthetic construct
  REGION 1..13: note = Myb-binding protein 1A (543-555)
VIRSPSLLQSGAK

SEQ ID NO: 8410 - protein, 10 aa, synthetic construct
  REGION 1..10: note = Filamin-A (331-340)
VLFAGQHIAK

SEQ ID NO: 8411 - protein, 9 aa, synthetic construct
  REGION 1..9: note = Barrier-to-autointegration factor (45-53)
VLGQFLVLK

SEQ ID NO: 8412 - protein, 9 aa, synthetic construct
  REGION 1..9: note = Protein flightless-1 homolog (179-187)
VLNGNPLLH

SEQ ID NO: 8413 - protein, 9 aa, synthetic construct
  REGION 1..9: note = Signal recognition particle subunit SRP68 (453-461)
VLYDRVLKY

SEQ ID NO: 8414 - protein, 9 aa, synthetic construct
  REGION 1..9: note = 60S ribosomal protein L7 (83-91)
VPAEPKLAF

SEQ ID NO: 8415 - protein, 9 aa, synthetic construct
  REGION 1..9: note = Protein FAM219A (74-82)
VPNKGYSSL

SEQ ID NO: 8416 - protein, 10 aa, synthetic construct
  REGION 1..10: note = Long-chain-fatty-acid-CoA ligase 4 (576-585)
VPNQKRLTLL

SEQ ID NO: 8417 - protein, 9 aa, synthetic construct
  REGION 1..9: note = ATP-dependent RNA helicase DDX24 (199-207)
VPRPVLRAL

SEQ ID NO: 8418 - protein, 9 aa, synthetic construct
  REGION 1..9: note = Ankyrin repeat and KH domain-containing protein 1 (748-756)
VPRVPTHTL

SEQ ID NO: 8419 - protein, 9 aa, synthetic construct
  REGION 1..9: note = Nuclear pore complex protein Nup153 (582-590)
VPVAKTAEL

SEQ ID NO: 8420 - protein, 9 aa, synthetic construct
  REGION 1..9: note = 60S ribosomal protein L27a (104-112)
VRSGYYKVL

SEQ ID NO: 8421 - protein, 9 aa, synthetic construct
  REGION 1..9: note = RNA-binding protein 4 (197-205)
VRTPYTMSY

SEQ ID NO: 8422 - protein, 11 aa, synthetic construct
  REGION 1..11: note = Tripeptidyl-peptidase 1 (68-78)
VSDPSSPQYGK

SEQ ID NO: 8423 - protein, 11 aa, synthetic construct
  REGION 1..11: note = Vimentin (31-41)
VTTSTRTYSLG

SEQ ID NO: 8424 - protein, 10 aa, synthetic construct
  REGION 1..10: note = 60S ribosomal protein L8 (15-24)
VVFRDPYRFK

SEQ ID NO: 8425 - protein, 8 aa, synthetic construct
  REGION 1..8: note = Non-specific lipid-transfer protein (16-23)
VVGVGMTK

SEQ ID NO: 8426 - protein, 10 aa, synthetic construct
  REGION 1..10: note = Filamin-A (391-400)
VVIQDPMGQK

SEQ ID NO: 8427 - protein, 10 aa, synthetic construct
  REGION 1..10: note = Barrier-to-autointegration factor (44-53)
VVLGQFLVLK

SEQ ID NO: 8428 - protein, 21 aa, synthetic construct
  REGION 1..21: note = Glyceraldehyde-3-phosphate dehydrogenase (87-107)
WGDAGAEYVVESTGVFTTMEK

SEQ ID NO: 8429 - protein, 9 aa, synthetic construct
  REGION 1..9: note = Tubulin beta chain (179-187)
YPDRIMNTF

SEQ ID NO: 8430 - protein, 9 aa, synthetic construct
  REGION 1..9: note = RNA-binding protein 14 (249-257)
YRAQPSASL

SEQ ID NO: 8431 - protein, 9 aa, synthetic construct
  REGION 1..9: note = RNA-binding protein 14 (237-245)
YRAQPSVSL

SEQ ID NO: 8432 - protein, 9 aa, synthetic construct
  REGION 1..9: note = RNA-binding protein 14 (540-548)
YRGQPGNAY

SEQ ID NO: 8433 - protein, 8 aa, synthetic construct
  REGION 1..8: note = Cyclin-dependent kinase 9 (194-201)
YRPPELLL

SEQ ID NO: 8434 - protein, 9 aa, synthetic construct
  REGION 1..9: note = Pre-mRNA-processing-splicing factor 8 (1470-1478)
YRTDMIQAL

SEQ ID NO: 8435 - protein, 12 aa, synthetic construct
  REGION 1..12: note = Plectin (3167-3178)
YSDPSTGEPATY

SEQ ID NO: 8436 - protein, 9 aa, synthetic construct
  REGION 1..9: note = Protein SON (1132-1140)
YTDSYTDTY

SEQ ID NO: 8437 - protein, 11 aa, synthetic construct
  REGION 1..11: note = HLA class I histocompatibility antigen, B-38 alpha chain (140-150)
FAYDGKDYIAL

SEQ ID NO: 8438 - protein, 9 aa, synthetic construct
  REGION 1..9: note = Proteasome subunit beta type-7 (202-210)
IAAGIFNDL

SEQ ID NO: 8439 - protein, 9 aa, synthetic construct
  REGION 1..9: note = 40S ribosomal protein S17 (38-46)
IAIIPSKKL

SEQ ID NO: 8440 - protein, 9 aa, synthetic construct
  REGION 1..9: note = Neudesin (21-29)
ALAPGLPTA

SEQ ID NO: 8441 - protein, 10 aa, synthetic construct
  REGION 1..10: note = TRAF2 and NCK-interacting protein kinase (1170-1179)
AWAPKPYHKF

SEQ ID NO: 8442 - protein, 9 aa, synthetic construct
  REGION 1..9: note = Neuroblast differentiation-associated protein AHNAK (739-747)
DVHGPDWHL

SEQ ID NO: 8443 - protein, 9 aa, synthetic construct
  REGION 1..9: note = Prelamin-A/C (53-61)
EELDFQKNI

SEQ ID NO: 8444 - protein, 9 aa, synthetic construct
  REGION 1..9: note = Protein flightless-1 homolog (1158-1166)
EYMKHTRLF

SEQ ID NO: 8445 - protein, 9 aa, synthetic construct
  REGION 1..9: note = Non-POU domain-containing octamer-binding protein (374-382)
FPDAREQEI

SEQ ID NO: 8446 - protein, 8 aa, synthetic construct
  REGION 1..8: note = Probable RNA-binding protein 23 (351-358)
FPDGDQEL

SEQ ID NO: 8447 - protein, 9 aa, synthetic construct
  REGION 1..9: note = Tubulin beta-6 chain (159-167)
FPDRIMNTF

SEQ ID NO: 8448 - protein, 9 aa, synthetic construct
  REGION 1..9: note = Actin-related protein 2/3 complex subunit 3 (103-111)
FPIPGEPGF

SEQ ID NO: 8449 - protein, 9 aa, synthetic construct
  REGION 1..9: note = Solute carrier family 35 member F5 (288-296)
FPSNSGDRF

SEQ ID NO: 8450 - protein, 10 aa, synthetic construct
  REGION 1..10: note = Myoferlin (286-295)
FVYDEPGHAV

SEQ ID NO: 8451 - protein, 10 aa, synthetic construct
  REGION 1..10: note = HLA class I histocompatibility antigen, B-44 alpha chain (216-225)
HPISDHEVTL

SEQ ID NO: 8452 - protein, 8 aa, synthetic construct
  REGION 1..8: note = Fructose-bisphosphate aldolase B (192-199)
IPDGDHDL

SEQ ID NO: 8453 - protein, 9 aa, synthetic construct
  REGION 1..9: note = Neutral cholesterol ester hydrolase 1 (34-42)
KYFLKPEVL

SEQ ID NO: 8454 - protein, 9 aa, synthetic construct
  REGION 1..9: note = Vacuolar protein sorting-associated protein 13B (2853-2861)
LPDPIIIHL

SEQ ID NO: 8455 - protein, 9 aa, synthetic construct
  REGION 1..9: note = FERM domain-containing protein 6 (550-558)
LYQKDFLRI

SEQ ID NO: 8456 - protein, 9 aa, synthetic construct
  REGION 1..9: note = Microtubule-associated protein RP/EB family member 1 (50-58)
MLFPGSIAL

SEQ ID NO: 8457 - protein, 9 aa, synthetic construct
  REGION 1..9: note = Cyclic AMP-dependent transcription factor ATF-4 (108-116)
MPDDLLTTL

SEQ ID NO: 8458 - protein, 8 aa, synthetic construct
  REGION 1..8: note = Neuroblast differentiation-associated protein AHNAK (820-827)
MPDVDLHL

SEQ ID NO: 8459 - protein, 9 aa, synthetic construct
  REGION 1..9: note = Transcription factor AP-1 (42-50)
MVAPAVASV

SEQ ID NO: 8460 - protein, 9 aa, synthetic construct
  REGION 1..9: note = Chloride intracellular channel protein 4 (190-198)
NLLPKLHIV

SEQ ID NO: 8461 - protein, 9 aa, synthetic construct
  REGION 1..9: note = Growth arrest and DNA damage-inducible protein GADD45 alpha (48-56)
NVDPDNVVL

SEQ ID NO: 8462 - protein, 9 aa, synthetic construct
  REGION 1..9: note = Probable C-mannosyltransferase DPY19L4 (693-701)
NYSPYVNYF

SEQ ID NO: 8463 - protein, 11 aa, synthetic construct
  REGION 1..11: note = Integrin alpha-3 (412-422)
QPQQVIHGEKL

SEQ ID NO: 8464 - protein, 9 aa, synthetic construct
  REGION 1..9: note = Protein transport protein Sec61 subunit alpha isoform 2 (393-401)
RYIPTAAAF

SEQ ID NO: 8465 - protein, 10 aa, synthetic construct
  REGION 1..10: note = Tumor suppressor candidate 3 (18-27)
RYLPTGSFPF

SEQ ID NO: 8466 - protein, 9 aa, synthetic construct
  REGION 1..9: note = Rho GTPase-activating protein 7 (915-923)
SEGPPLRLW

SEQ ID NO: 8467 - protein, 9 aa, synthetic construct
  REGION 1..9: note = Exosome complex component RRP42 (222-230)
SLASLLVSV

SEQ ID NO: 8468 - protein, 9 aa, synthetic construct
  REGION 1..9: note = AAC83183.1 (1386-1394)
SLLDPVPEV

SEQ ID NO: 8469 - protein, 9 aa, synthetic construct
  REGION 1..9: note = E3 ubiquitin-protein ligase BRE1A (312-320)
SLYGGTITI

SEQ ID NO: 8470 - protein, 9 aa, synthetic construct
  REGION 1..9: note = WD repeat-containing protein 48 (452-460)
SPDGSDPKL

SEQ ID NO: 8471 - protein, 9 aa, synthetic construct
  REGION 1..9: note = Pericentriolar material 1 protein (1935-1943)
SPDTESPVL

SEQ ID NO: 8472 - protein, 10 aa, synthetic construct
  REGION 1..10: note = Protein LDOC1 (73-82)
SYMLVNENRF

SEQ ID NO: 8473 - protein, 9 aa, synthetic construct
  REGION 1..9: note = Nardilysin (1115-1123)
TYLPTSPLL

SEQ ID NO: 8474 - protein, 9 aa, synthetic construct
  REGION 1..9: note = Calnexin (12-20)
VLGTAIVEA

SEQ ID NO: 8475 - protein, 9 aa, synthetic construct
  REGION 1..9: note = Cleft lip and palate transmembrane protein 1 (107-115)
VYISEHEHF

SEQ ID NO: 8476 - protein, 9 aa, synthetic construct
  REGION 1..9: note = U5 small nuclear ribonucleoprotein 200 kDa helicase (1389-1397)
VYMDWYEKF

SEQ ID NO: 8477 - protein, 10 aa, synthetic construct
  REGION 1..10: note = BTB/POZ domain-containing protein KCTD4 (77-86)
YFIDRDGLLF

SEQ ID NO: 8478 - protein, 10 aa, synthetic construct
  REGION 1..10: note = DNA-binding protein SATB2 (639-648)
YPDQEAIHTL

SEQ ID NO: 8479 - protein, 10 aa, synthetic construct
  REGION 1..10: note = Long-chain-fatty-acid-CoA ligase 4 (238-247)
YPEGFEIHSM

SEQ ID NO: 8480 - protein, 10 aa, synthetic construct
  REGION 1..10: note = Tribbles homolog 3 (259-268)
YPFQDSEPVL

SEQ ID NO: 8481 - protein, 9 aa, synthetic construct
  REGION 1..9: note = Protein LAP2 (483-491)
YPTPYPDEL

SEQ ID NO: 8482 - protein, 9 aa, synthetic construct
  REGION 1..9: note = V-type proton ATPase catalytic subunit A (464-472)
YYDKHFTEF

SEQ ID NO: 8483 - protein, 11 aa, synthetic construct
  REGION 1..11: note = Filamin-B (515-525)
YYPSTPGRYSI

SEQ ID NO: 8484 - protein, 9 aa, synthetic construct
  REGION 1..9: note = Polypyrimidine tract-binding protein 3 (113-121)
YYTPITPHL

SEQ ID NO: 8485 - protein, 9 aa, synthetic construct
  REGION 1..9: note = Small nuclear ribonucleoprotein E (28-36)
RSRIQVWLY

SEQ ID NO: 8486 - protein, 21 aa, synthetic construct
  REGION 1..21: note = 60S ribosomal protein L30 (95-115)
AIIDPGDSDIIRSMPEQTGEK

SEQ ID NO: 8487 - protein, 10 aa, synthetic construct
  REGION 1..10: note = Catenin beta-1 (115-124)
DAAHPTNVQR

SEQ ID NO: 8488 - protein, 9 aa, synthetic construct
  REGION 1..9: note = HLA class I histocompatibility antigen, B-51 alpha chain (161-169)
DTAAQITQR

SEQ ID NO: 8489 - protein, 9 aa, synthetic construct
  REGION 1..9: note = Heterogeneous nuclear ribonucleoproteins A2/B1 (139-147)
DTIEIITDR

SEQ ID NO: 8490 - protein, 9 aa, synthetic construct
  REGION 1..9: note = Translocon-associated protein subunit beta isoform X1 (107-115)
DVSHTVVLR

SEQ ID NO: 8491 - protein, 9 aa, synthetic construct
  REGION 1..9: note = Actin, aortic smooth muscle (366-374)
EAGPSIVHR

SEQ ID NO: 8492 - protein, 9 aa, synthetic construct
  REGION 1..9: note = Fructose-bisphosphate aldolase A (35-43)
ESTGSIAKR

SEQ ID NO: 8493 - protein, 9 aa, synthetic construct
  REGION 1..9: note = SH3 domain-binding glutamic acid-rich-like protein 3 (23-31)
EVTRILDGK

SEQ ID NO: 8494 - protein, 16 aa, synthetic construct
  REGION 1..16: note = HLA class II histocompatibility antigen, DRB1-4 beta chain (62-77)
HQEEYVRFDSDVGEYR

SEQ ID NO: 8495 - protein, 15 aa, synthetic construct
  REGION 1..15: note = Sodium/potassium-transporting ATPase subunit alpha-1 (60-74)
IVVYTGDRTVMGRIA

SEQ ID NO: 8496 - protein, 16 aa, synthetic construct
  REGION 1..16: note = NEDD4 family-interacting protein 1 (63-78)
KPPSYNVATTLPSYDE

SEQ ID NO: 8497 - protein, 9 aa, synthetic construct
  REGION 1..9: note = Keratin, type I cytoskeletal 18 (32-40)
RLASYLDRV

SEQ ID NO: 8498 - protein, 9 aa, synthetic construct
  REGION 1..9: note = 60S ribosomal protein L24 (86-94)
SLADIMAKR

SEQ ID NO: 8499 - protein, 11 aa, synthetic construct
  REGION 1..11: note = HLA class I histocompatibility antigen, Cw-4 alpha chain (133-143)
TAADTAAQITR

SEQ ID NO: 8500 - protein, 10 aa, synthetic construct
  REGION 1..10: note = WD repeat-containing protein 6 (462-471)
TLFPGKVHSL

SEQ ID NO: 8501 - protein, 9 aa, synthetic construct
  REGION 1..9: note = Fatty acid-binding protein, liver (114-122)
TLGDIVFKR

SEQ ID NO: 8502 - protein, 9 aa, synthetic construct
  REGION 1..9: note = Actin, aortic smooth muscle (204-212)
TTAEREIVR

SEQ ID NO: 8503 - protein, 9 aa, synthetic construct
  REGION 1..9: note = Polymeric immunoglobulin receptor (656-664)
VAVGVARAR

SEQ ID NO: 8504 - protein, 9 aa, synthetic construct
  REGION 1..9: note = DAZ-associated protein 2 (63-71)
AAFPGASLY

SEQ ID NO: 8505 - protein, 9 aa, synthetic construct
  REGION 1..9: note = Kelch-like protein 24 (576-584)
AAMPRPVSY

SEQ ID NO: 8506 - protein, 9 aa, synthetic construct
  REGION 1..9: note = Lck-interacting transmembrane adapter 1 (159-167)
AASPVVAEY

SEQ ID NO: 8507 - protein, 9 aa, synthetic construct
  REGION 1..9: note = Cysteine-rich protein 2-binding protein (154-162)
AFIEKHWTF

SEQ ID NO: 8508 - protein, 9 aa, synthetic construct
  REGION 1..9: note = Bifunctional 3'-phosphoadenosine 5'-phosphosulfate synthase 2 (479-487)
AIFPSPMLY

SEQ ID NO: 8509 - protein, 9 aa, synthetic construct
  REGION 1..9: note = Bifunctional 3'-phosphoadenosine 5'-phosphosulfate synthase 1 (488-496)
AIFPSPMMY

SEQ ID NO: 8510 - protein, 9 aa, synthetic construct
  REGION 1..9: note = Phosphatidylinositol 5-phosphate 4-kinase type-2 alpha (356-364)
AIIDILTHY

SEQ ID NO: 8511 - protein, 10 aa, synthetic construct
  REGION 1..10: note = Calsyntenin-3 (69-78)
ALDKDAPLRY

SEQ ID NO: 8512 - protein, 9 aa, synthetic construct
  REGION 1..9: note = Ras-related protein Rab-20 (156-164)
ALYKKILKY

SEQ ID NO: 8513 - protein, 9 aa, synthetic construct
  REGION 1..9: note = Structure-specific endonuclease subunit SLX4 (1765-1773)
ALYQKVLLY

SEQ ID NO: 8514 - protein, 11 aa, synthetic construct
  REGION 1..11: note = Myosin regulatory light polypeptide 9 (24-34)
AMFDQSQIQEF

SEQ ID NO: 8515 - protein, 9 aa, synthetic construct
  REGION 1..9: note = 60S ribosomal protein L6 (61-69)
AMYSRKAMY

SEQ ID NO: 8516 - protein, 9 aa, synthetic construct
  REGION 1..9: note = Junction plakoglobin (472-480)
AQNSVRLNY

SEQ ID NO: 8517 - protein, 9 aa, synthetic construct
  REGION 1..9: note = Protein transport protein Sec23B (125-133)
AQSPLIFLY

SEQ ID NO: 8518 - protein, 9 aa, synthetic construct
  REGION 1..9: note = Centrosome-associated protein 350 (330-338)
ATAPPAPAY

SEQ ID NO: 8519 - protein, 9 aa, synthetic construct
  REGION 1..9: note = Protein transport protein Sec31A (61-69)
ATFSSSHRY

SEQ ID NO: 8520 - protein, 10 aa, synthetic construct
  REGION 1..10: note = E3 ubiquitin/ISG15 ligase TRIM25 (592-601)
AVADKVHLMY

SEQ ID NO: 8521 - protein, 9 aa, synthetic construct
  REGION 1..9: note = StAR-related lipid transfer protein 5 (12-20)
AVAEKMLQY

SEQ ID NO: 8522 - protein, 9 aa, synthetic construct
  REGION 1..9: note = WASH complex subunit 7 (624-632)
AVDAARLHY

SEQ ID NO: 8523 - protein, 10 aa, synthetic construct
  REGION 1..10: note = Nuclear pore membraneoprotein 210 (497-506)
AVDPTSGQLY

SEQ ID NO: 8524 - protein, 9 aa, synthetic construct
  REGION 1..9: note = Lysocardiolipin acyltransferase 1 (91-99)
AVHDITVAY

SEQ ID NO: 8525 - protein, 10 aa, synthetic construct
  REGION 1..10: note = Methylsterol monooxygenase 1 (15-24)
AVIEDTWHYF

SEQ ID NO: 8526 - protein, 9 aa, synthetic construct
  REGION 1..9: note = V-type proton ATPase subunit d 1 (111-119)
AYLESFYKF

SEQ ID NO: 8527 - protein, 9 aa, synthetic construct
  REGION 1..9: note = Protein S100-A9 (67-75)
DTNADKQLS

SEQ ID NO: 8528 - protein, 9 aa, synthetic construct
  REGION 1..9: note = Transcription elongation factor SPT6 (339-347)
DVYNHFLLY

SEQ ID NO: 8529 - protein, 9 aa, synthetic construct
  REGION 1..9: note = MOB kinase activator 1A (175-183)
EEAHLNTSF

SEQ ID NO: 8530 - protein, 9 aa, synthetic construct
  REGION 1..9: note = HLA class II histocompatibility antigen, DP alpha 1 chain (43-51)
EEFGQAFSF

SEQ ID NO: 8531 - protein, 9 aa, synthetic construct
  REGION 1..9: note = Protein arginine N-methyltransferase 1 (319-327)
EEIFGTIGM

SEQ ID NO: 8532 - protein, 10 aa, synthetic construct
  REGION 1..10: note = Puromycin-sensitive aminopeptidase-like protein (113-122)
EEIHATGFNY

SEQ ID NO: 8533 - protein, 10 aa, synthetic construct
  REGION 1..10: note = Myocyte-specific enhancer factor 2D (127-136)
EELDGLFRRY

SEQ ID NO: 8534 - protein, 9 aa, synthetic construct
  REGION 1..9: note = Ribosomal RNA processing protein 36 homolog (132-140)
EVFDKTYQF

SEQ ID NO: 8535 - protein, 9 aa, synthetic construct
  REGION 1..9: note = G1/S-specific cyclin-D3 (26-34)
EVFPLAMNY

SEQ ID NO: 8536 - protein, 9 aa, synthetic construct
  REGION 1..9: note = Golgi resident protein GCP60 (490-498)
EVYAGSHQY

SEQ ID NO: 8537 - protein, 9 aa, synthetic construct
  REGION 1..9: note = Dipeptidyl peptidase 1 (375-383)
EVYDDFLHY

SEQ ID NO: 8538 - protein, 9 aa, synthetic construct
  REGION 1..9: note = Sphingolipid delta(4)-desaturase DES1 (176-184)
FINPKPITY

SEQ ID NO: 8539 - protein, 9 aa, synthetic construct
  REGION 1..9: note = Histone acetyltransferase KAT6A (600-608)
FLDHKTLYY

SEQ ID NO: 8540 - protein, 9 aa, synthetic construct
  REGION 1..9: note = Putative ATP-dependent RNA helicase DHX57 (392-400)
FLYDKALTF

SEQ ID NO: 8541 - protein, 9 aa, synthetic construct
  REGION 1..9: note = Calnexin (230-238)
FTDKKTHLY

SEQ ID NO: 8542 - protein, 10 aa, synthetic construct
  REGION 1..10: note = Histone-arginine methyltransferase CARM1 (584-593)
FTMGGPAISM

SEQ ID NO: 8543 - protein, 14 aa, synthetic construct
  REGION 1..14: note = Myosin regulatory light chain 12A (164-177)
FTRILKHGAKDKDD

SEQ ID NO: 8544 - protein, 9 aa, synthetic construct
  REGION 1..9: note = Plastin-3 (324-332)
FVANLFNKY

SEQ ID NO: 8545 - protein, 11 aa, synthetic construct
  REGION 1..11: note = U5 small nuclear ribonucleoprotein 200 kDa helicase (1845-1855)
FVAPATGAHNY

SEQ ID NO: 8546 - protein, 14 aa, synthetic construct
  REGION 1..14: note = Cytochrome c oxidase subunit NDUFA4 (19-32)
FVFIGTGATGATLY

SEQ ID NO: 8547 - protein, 9 aa, synthetic construct
  REGION 1..9: note = Ras-related protein Rab-5B (92-100)
FVKGQFHEY

SEQ ID NO: 8548 - protein, 9 aa, synthetic construct
  REGION 1..9: note = COP9 signalosome complex subunit 6 (275-283)
FVNKFNVLY

SEQ ID NO: 8549 - protein, 10 aa, synthetic construct
  REGION 1..10: note = Probable ATP-dependent RNA helicase DDX5 (549-558)
FVSAGIQTSF

SEQ ID NO: 8550 - protein, 10 aa, synthetic construct
  REGION 1..10: note = Transmembrane protein 258 (37-46)
FVYEVTSTKY

SEQ ID NO: 8551 - protein, 12 aa, synthetic construct
  REGION 1..12: note = Dermcidin (97-108)
GAVHDVKDVLDS

SEQ ID NO: 8552 - protein, 9 aa, synthetic construct
  REGION 1..9: note = Vacuolar protein sorting-associated protein 51 homolog (121-129)
GAYGQAVRY

SEQ ID NO: 8553 - protein, 9 aa, synthetic construct
  REGION 1..9: note = Histone H2B type 2-F (76-84)
GEASRLAHY

SEQ ID NO: 8554 - protein, 9 aa, synthetic construct
  REGION 1..9: note = RING finger and transmembrane domain-containing protein 2 (264-272)
GIADFVLKY

SEQ ID NO: 8555 - protein, 12 aa, synthetic construct
  REGION 1..12: note = Myosin-9 (1952-1963)
GKADGAEAKPAE

SEQ ID NO: 8556 - protein, 9 aa, synthetic construct
  REGION 1..9: note = Inositol 1,4,5-trisphosphate receptor type 3 (2333-2341)
GLFAHELFY

SEQ ID NO: 8557 - protein, 9 aa, synthetic construct
  REGION 1..9: note = E3 ubiquitin-protein ligase TRIM56 (486-494)
GLLPRPIFY

SEQ ID NO: 8558 - protein, 9 aa, synthetic construct
  REGION 1..9: note = Protein transport protein Sec16A (1463-1471)
GLWGHALLL

SEQ ID NO: 8559 - protein, 9 aa, synthetic construct
  REGION 1..9: note = DNA repair protein complementing XP-C cells (639-647)
GLYKNHPLY

SEQ ID NO: 8560 - protein, 14 aa, synthetic construct
  REGION 1..14: note = Heterogeneous nuclear ribonucleoproteins A2/B1 (241-254)
GNYGSGNYNDFGNY

SEQ ID NO: 8561 - protein, 8 aa, synthetic construct
  REGION 1..8: note = HLA class I histocompatibility antigen, B-15 alpha chain (25-32)
GSHSMRYF

SEQ ID NO: 8562 - protein, 9 aa, synthetic construct
  REGION 1..9: note = HLA class I histocompatibility antigen, B-35 alpha chain (25-33)
GSHSMRYFY

SEQ ID NO: 8563 - protein, 9 aa, synthetic construct
  REGION 1..9: note = Heterogeneous nuclear ribonucleoprotein A1 (310-318)
GSYNDFGNY

SEQ ID NO: 8564 - protein, 9 aa, synthetic construct
  REGION 1..9: note = E3 ubiquitin-protein ligase MARCH6 (620-628)
GTAKIHELY

SEQ ID NO: 8565 - protein, 9 aa, synthetic construct
  REGION 1..9: note = DNA topoisomerase 2-beta (560-568)
GTATKHLTY

SEQ ID NO: 8566 - protein, 9 aa, synthetic construct
  REGION 1..9: note = Filamin-A (2181-2189)
GTHTVSVKY

SEQ ID NO: 8567 - protein, 9 aa, synthetic construct
  REGION 1..9: note = Ubiquitin-conjugating enzyme E2 C (71-79)
GTVYEDLRY

SEQ ID NO: 8568 - protein, 10 aa, synthetic construct
  REGION 1..10: note = Cold shock domain-containing protein E1 (28-37)
GVIEKLLTSY

SEQ ID NO: 8569 - protein, 13 aa, synthetic construct
  REGION 1..13: note = ADP-ribosylation factor GTPase-activating protein 2 (469-481)
GVMNSLQDRYGSY

SEQ ID NO: 8570 - protein, 9 aa, synthetic construct
  REGION 1..9: note = Bardet-Biedl syndrome 2 protein (227-235)
GVYDKTSRY

SEQ ID NO: 8571 - protein, 9 aa, synthetic construct
  REGION 1..9: note = Coatomer subunit alpha (633-641)
GYPEVALHF

SEQ ID NO: 8572 - protein, 11 aa, synthetic construct
  REGION 1..11: note = Protein S100-A8 (27-37)
HAVYRDDLKKL

SEQ ID NO: 8573 - protein, 9 aa, synthetic construct
  REGION 1..9: note = Zinc finger protein 608 (1347-1355)
HAYPYPQMY

SEQ ID NO: 8574 - protein, 9 aa, synthetic construct
  REGION 1..9: note = Sphingolipid delta(4)-desaturase DES1 (228-236)
HFIAEHYMF

SEQ ID NO: 8575 - protein, 9 aa, synthetic construct
  REGION 1..9: note = BTB/POZ domain-containing protein KCTD1 (41-49)
HIDVGGHMY

SEQ ID NO: 8576 - protein, 9 aa, synthetic construct
  REGION 1..9: note = RNA-binding protein with serine-rich domain 1 (176-184)
HIMEIFSTY

SEQ ID NO: 8577 - protein, 9 aa, synthetic construct
  REGION 1..9: note = Laminin subunit beta-3 (1158-1166)
HINGRVLYY

SEQ ID NO: 8578 - protein, 9 aa, synthetic construct
  REGION 1..9: note = UDP-N-acetylglucosamine-dolichyl-phosphate N-acetylglucosaminephosphotransferase (55-63)
HLDLGILYY

SEQ ID NO: 8579 - protein, 9 aa, synthetic construct
  REGION 1..9: note = Nuclear pore complex protein Nup205 (240-248)
HLYGSLLYY

SEQ ID NO: 8580 - protein, 9 aa, synthetic construct
  REGION 1..9: note = DAZ-associated protein 1 (397-405)
HNVQGFHPY

SEQ ID NO: 8581 - protein, 9 aa, synthetic construct
  REGION 1..9: note = pre-mRNA 3' end processing protein WDR33 (19-27)
HQAPRQLFY

SEQ ID NO: 8582 - protein, 9 aa, synthetic construct
  REGION 1..9: note = Nuclear receptor corepressor 2 (34-42)
HTDVGLLEY

SEQ ID NO: 8583 - protein, 9 aa, synthetic construct
  REGION 1..9: note = Ribosomal protein S6 kinase alpha-1 (517-525)
HTIGKTVEY

SEQ ID NO: 8584 - protein, 9 aa, synthetic construct
  REGION 1..9: note = Type II inositol 3,4-bisphosphate 4-phosphatase (657-665)
HTVGLIVQY

SEQ ID NO: 8585 - protein, 10 aa, synthetic construct
  REGION 1..10: note = Zinc finger CCHC domain-containing protein 14 (172-181)
HVDLDSGLRY

SEQ ID NO: 8586 - protein, 11 aa, synthetic construct
  REGION 1..11: note = Prefoldin subunit 5 (94-104)
HVLIDVGTGYY

SEQ ID NO: 8587 - protein, 9 aa, synthetic construct
  REGION 1..9: note = Erythroid differentiation-related factor 1 (370-378)
HVNGIVQKY

SEQ ID NO: 8588 - protein, 10 aa, synthetic construct
  REGION 1..10: note = Protein prenyltransferase alpha subunit repeat-containing protein 1 (213-222)
HVSDHSGFHY

SEQ ID NO: 8589 - protein, 9 aa, synthetic construct
  REGION 1..9: note = Peroxisomal membrane protein PEX14 (119-127)
IAFGFHQLY

SEQ ID NO: 8590 - protein, 9 aa, synthetic construct
  REGION 1..9: note = Protein FAM134C (153-161)
IFIRNVLLF

SEQ ID NO: 8591 - protein, 9 aa, synthetic construct
  REGION 1..9: note = Probable ATP-dependent RNA helicase DDX5 (604-612)
IGYPMPTGY

SEQ ID NO: 8592 - protein, 9 aa, synthetic construct
  REGION 1..9: note = Dolichol kinase (352-360)
IIFDRPLLY

SEQ ID NO: 8593 - protein, 9 aa, synthetic construct
  REGION 1..9: note Dolichyl-diphosphooligosaccharide-proteinosyltransferase subunit 2 (410-418)
ILSPLLLLF

SEQ ID NO: 8594 - protein, 11 aa, synthetic construct
  REGION 1..11: note = Beta-2-microglobulin (21-31)
IQRTPKIQVYS

SEQ ID NO: 8595 - protein, 13 aa, synthetic construct
  REGION 1..13: note = Beta-2-microglobulin (21-33)
IQRTPKIQVYSRH

SEQ ID NO: 8596 - protein, 9 aa, synthetic construct
  REGION 1..9: note = HLA class I histocompatibility antigen, B-52 alpha chain (90-98)
ISKTNTQTY

SEQ ID NO: 8597 - protein, 11 aa, synthetic construct
  REGION 1..11: note = Eukaryotic peptide chain release factor subunit 1 (307-317)
IVYENLDIMRY

SEQ ID NO: 8598 - protein, 9 aa, synthetic construct
  REGION 1..9: note = Cyclin-H (138-146)
KALEQILEY

SEQ ID NO: 8599 - protein, 10 aa, synthetic construct
  REGION 1..10: note = Proliferating cell nuclear antigen (240-249)
KIADMGHLKY

SEQ ID NO: 8600 - protein, 9 aa, synthetic construct
  REGION 1..9: note = Protein LAP2 (282-290)
KIDENQLMY

SEQ ID NO: 8601 - protein, 9 aa, synthetic construct
  REGION 1..9: note = Beta-2-microglobulin (90-98)
KIVKWDRDM

SEQ ID NO: 8602 - protein, 10 aa, synthetic construct
  REGION 1..10: note = Ras GTPase-activating-like protein IQGAP1 (94-103)
KIYDREQTRY

SEQ ID NO: 8603 - protein, 9 aa, synthetic construct
  REGION 1..9: note = Phosphorylated CTD-interacting factor 1 (363-371)
KIYHISLEY

SEQ ID NO: 8604 - protein, 9 aa, synthetic construct
  REGION 1..9: note = Cytoplasmic FMR1-interacting protein 1 (739-747)
KLADQIFAY

SEQ ID NO: 8605 - protein, 10 aa, synthetic construct
  REGION 1..10: note = Cytoplasmic FMR1-interacting protein 1 (739-748)
KLADQIFAYY

SEQ ID NO: 8606 - protein, 9 aa, synthetic construct
  REGION 1..9: note = Golgi-associated PDZ and coiled-coil motif-containing protein (394-402)
KLDDLHTLY

SEQ ID NO: 8607 - protein, 14 aa, synthetic construct
  REGION 1..14: note = Oxysterol-binding protein-related protein 8 (705-718)
KLFELDPLTGEWHY

SEQ ID NO: 8608 - protein, 10 aa, synthetic construct
  REGION 1..10: note = SHC SH2 domain-binding protein 1 (262-271)
KLIENPLLRY

SEQ ID NO: 8609 - protein, 9 aa, synthetic construct
  REGION 1..9: note = Proteasome subunit alpha type (67-75)
KLNEYLLQY

SEQ ID NO: 8610 - protein, 9 aa, synthetic construct
  REGION 1..9: note = Protein farnesyltransferase/geranylgeranyltransferase type-1 subunit alpha (211-219)
KLWDNELQY

SEQ ID NO: 8611 - protein, 9 aa, synthetic construct
  REGION 1..9: note = Crooked neck-like protein 1 (615-623)
KLYEKFLEF

SEQ ID NO: 8612 - protein, 9 aa, synthetic construct
  REGION 1..9: note = Tetratricopeptide repeat protein 21B (693-701)
KMADIYLKH

SEQ ID NO: 8613 - protein, 9 aa, synthetic construct
  REGION 1..9: note = SPRY domain-containing protein 3 (14-22)
KMDDLNLHY

SEQ ID NO: 8614 - protein, 9 aa, synthetic construct
  REGION 1..9: note = Phosphatidylinositol 4-kinase alpha (321-329)
KMLRDTLYY

SEQ ID NO: 8615 - protein, 9 aa, synthetic construct
  REGION 1..9: note = Platelet-activating factor acetylhydrolase IB subunit alpha (95-103)
KMWEVQTGY

SEQ ID NO: 8616 - protein, 10 aa, synthetic construct
  REGION 1..10: note = Clathrin heavy chain 1 (1209-1218)
KMYDAAKLLY

SEQ ID NO: 8617 - protein, 9 aa, synthetic construct
  REGION 1..9: note = Elongation factor Tu GTP-binding domain-containing protein 1 (71-79)
KSSAISLHY

SEQ ID NO: 8618 - protein, 9 aa, synthetic construct
  REGION 1..9: note = Elongation factor 2 (71-79)
KSTAISLFY

SEQ ID NO: 8619 - protein, 9 aa, synthetic construct
  REGION 1..9: note = Flotillin-2 (214-222)
KTAEAQLAY

SEQ ID NO: 8620 - protein, 9 aa, synthetic construct
  REGION 1..9: note = Cytoplasmic dynein 1 heavy chain 1 (2633-2641)
KTFDHYCEY

SEQ ID NO: 8621 - protein, 9 aa, synthetic construct
  REGION 1..9: note = Protein RMD5 homolog B (13-21)
KVLQKFLTY

SEQ ID NO: 8622 - protein, 9 aa, synthetic construct
  REGION 1..9: note = Probable E3 ubiquitin-protein ligase HECTD4 (700-708)
KVLSRALMY

SEQ ID NO: 8623 - protein, 9 aa, synthetic construct
  REGION 1..9: note = Cartilage-associated protein (329-337)
KVMQQNLVY

SEQ ID NO: 8624 - protein, 9 aa, synthetic construct
  REGION 1..9: note = KIF1-binding protein (205-213)
KVYTHNLYY

SEQ ID NO: 8625 - protein, 10 aa, synthetic construct
  REGION 1..10: note = Protein S100-A9 (66-75)
LDTNADKQLS

SEQ ID NO: 8626 - protein, 8 aa, synthetic construct
  REGION 1..8: note = Engulfment and cell motility protein 2 (574-581)
LNHKVLHY

SEQ ID NO: 8627 - protein, 9 aa, synthetic construct
  REGION 1..9: note = CDNA FLJ25829 fis, clone TST08126 (128-136)
MTAKLQTPY

SEQ ID NO: 8628 - protein, 9 aa, synthetic construct
  REGION 1..9: note = HLA class II histocompatibility antigen, DQ alpha 1 chain (247-255)
NAAERRGPL

SEQ ID NO: 8629 - protein, 9 aa, synthetic construct
  REGION 1..9: note = Heat shock protein beta-1 (177-185)
NEITIPVTF

SEQ ID NO: 8630 - protein, 9 aa, synthetic construct
  REGION 1..9: note = Serpin B12 (169-177)
NKTQTILFY

SEQ ID NO: 8631 - protein, 9 aa, synthetic construct
  REGION 1..9: note = S1 RNA-binding domain-containing protein 1 (240-248)
NTIPFIIRY

SEQ ID NO: 8632 - protein, 14 aa, synthetic construct
  REGION 1..14: note = Mediator of RNA polymerase II transcription subunit 12 (2010-2023)
NTQPQPSTNIFGRY

SEQ ID NO: 8633 - protein, 9 aa, synthetic construct
  REGION 1..9: note = Agrin (56-64)
NVDPVQHTY

SEQ ID NO: 8634 - protein, 9 aa, synthetic construct
  REGION 1..9: note = Abhydrolase domain-containing protein 2 (306-314)
NVMRKFHGY

SEQ ID NO: 8635 - protein, 10 aa, synthetic construct
  REGION 1..10: note = Tubulin beta chain (103-112)
QIFRPDNFVF

SEQ ID NO: 8636 - protein, 9 aa, synthetic construct
  REGION 1..9: note = WD repeat-containing protein 19 (527-535)
QLYEKGLYY

SEQ ID NO: 8637 - protein, 9 aa, synthetic construct
  REGION 1..9: note = Serine/threonine-protein phosphatase 2A 56 kDa regulatory subunit epsilon isoform (358-366)
QVAERALYY

SEQ ID NO: 8638 - protein, 10 aa, synthetic construct
  REGION 1..10: note = Muskelin (626-635)
QVDPLSALKY

SEQ ID NO: 8639 - protein, 9 aa, synthetic construct
  REGION 1..9: note = Coatomer subunit beta' (136-144)
QVFEGHTHY

SEQ ID NO: 8640 - protein, 9 aa, synthetic construct
  REGION 1..9: note = DNA polymerase epsilon subunit 3 (39-47)
RAASVFVLY

SEQ ID NO: 8641 - protein, 9 aa, synthetic construct
  REGION 1..9: note = Histone H2B type 1-A (94-102)
REIQTAVRL

SEQ ID NO: 8642 - protein, 9 aa, synthetic construct
  REGION 1..9: note = 26S proteasome non-ATPase regulatory subunit 3 (294-302)
RIKAIQLEY

SEQ ID NO: 8643 - protein, 11 aa, synthetic construct
  REGION 1..11: note = DNA polymerase delta catalytic subunit (386-396)
RIMDPDVITGY

SEQ ID NO: 8644 - protein, 9 aa, synthetic construct
  REGION 1..9: note = Protein TASOR (185-193)
RLDDKKFLY

SEQ ID NO: 8645 - protein, 9 aa, synthetic construct
  REGION 1..9: note = F-box only protein 7 (266-274)
RLFKDQLVY

SEQ ID NO: 8646 - protein, 11 aa, synthetic construct
  REGION 1..11: note = Zinc finger protein 419 (43-53)
RLLDDAQRLLY

SEQ ID NO: 8647 - protein, 9 aa, synthetic construct
  REGION 1..9: note = Angiomotin (17-25)
RLLQEQLRY

SEQ ID NO: 8648 - protein, 9 aa, synthetic construct
  REGION 1..9: note = Protein Smaug homolog 2 (103-111)
RLLQKVLAY

SEQ ID NO: 8649 - protein, 9 aa, synthetic construct
  REGION 1..9: note = N-acetylgalactosamine-6-sulfatase (376-384)
RLMDRPIFY

SEQ ID NO: 8650 - protein, 9 aa, synthetic construct
  REGION 1..9: note = Beta-catenin-like protein 1 (330-338)
RLMELHFKY

SEQ ID NO: 8651 - protein, 9 aa, synthetic construct
  REGION 1..9: note = Mitochondrial folate transporter/carrier (251-259)
RLQDQHMFY

SEQ ID NO: 8652 - protein, 9 aa, synthetic construct
  REGION 1..9: note = Probable C-mannosyltransferase DPY19L3 (411-419)
RLSDTLLFY

SEQ ID NO: 8653 - protein, 9 aa, synthetic construct
  REGION 1..9: note = Vacuolar protein sorting-associated protein 4A (30-38)
RLYQHAVEY

SEQ ID NO: 8654 - protein, 11 aa, synthetic construct
  REGION 1..11: note = Src substrate cortactin (94-104)
RMDKSAVGHEY

SEQ ID NO: 8655 - protein, 9 aa, synthetic construct
  REGION 1..9: note = ATP-dependent RNA helicase DDX42 (292-300)
RMFDMGFEY

SEQ ID NO: 8656 - protein, 9 aa, synthetic construct
  REGION 1..9: note = Signal peptidase complex catalytic subunit SEC11A (12-20)
RMNKRQLYY

SEQ ID NO: 8657 - protein, 9 aa, synthetic construct
  REGION 1..9: note = 60S ribosomal protein L24 (47-55)
RQINWTVLY

SEQ ID NO: 8658 - protein, 13 aa, synthetic construct
  REGION 1..13: note = Annexin A5 (245-257)
RSIPAYLAETLYY

SEQ ID NO: 8659 - protein, 9 aa, synthetic construct
  REGION 1..9: note = Nuclear pore complex protein Nup160 (729-737)
RTAPLLLSY

SEQ ID NO: 8660 - protein, 10 aa, synthetic construct
  REGION 1..10: note = Matrin-3 (149-158)
RTEEGPTLSY

SEQ ID NO: 8661 - protein, 9 aa, synthetic construct
  REGION 1..9: note = 26S proteasome non-ATPase regulatory subunit 2 (673-681)
RTFGHLLRY

SEQ ID NO: 8662 - protein, 9 aa, synthetic construct
  REGION 1..9: note = Tyrosine-protein phosphatase non-receptor type 23 (1272-1280)
RTGAFALLY

SEQ ID NO: 8663 - protein, 9 aa, synthetic construct
  REGION 1..9: note = Msx2-interacting protein (176-184)
RTLQHGLYY

SEQ ID NO: 8664 - protein, 9 aa, synthetic construct
  REGION 1..9: note = NFX1-type zinc finger-containing protein 1 (334-342)
RTMPIYPTY

SEQ ID NO: 8665 - protein, 9 aa, synthetic construct
  REGION 1..9: note = UPF0505 protein C16orf62 (929-937)
RTMVKTLEY

SEQ ID NO: 8666 - protein, 12 aa, synthetic construct
  REGION 1..12: note = DNA damage-regulated autophagy modulator protein 2 (236-247)
RVEANLHGLTLY

SEQ ID NO: 8667 - protein, 13 aa, synthetic construct
  REGION 1..13: note = Eukaryotic translation initiation factor 3 subunit C-like protein (873-885)
RVFDHKQGTYGGY

SEQ ID NO: 8668 - protein, 10 aa, synthetic construct
  REGION 1..10: note = Semaphorin-4C (339-348)
RVFEGPYKEY

SEQ ID NO: 8669 - protein, 9 aa, synthetic construct
  REGION 1..9: note = Niemann-Pick C1 protein (1077-1085)
RVFPYSVFY

SEQ ID NO: 8670 - protein, 11 aa, synthetic construct
  REGION 1..11: note = 26S protease regulatory subunit 4 (249-259)
RVVGSELIQKY

SEQ ID NO: 8671 - protein, 9 aa, synthetic construct
  REGION 1..9: note = HLA class II histocompatibility antigen, DRB1-4 beta chain (123-131)
RVYPEVTVY

SEQ ID NO: 8672 - protein, 9 aa, synthetic construct
  REGION 1..9: note = Sorting nexin-17 (432-440)
SASDVHGNF

SEQ ID NO: 8673 - protein, 9 aa, synthetic construct
  REGION 1..9: note = Splicing factor 3B subunit 3 (351-359)
SEFGNHYLY

SEQ ID NO: 8674 - protein, 9 aa, synthetic construct
  REGION 1..9: note = Mitotic checkpoint protein BUB3 (241-249)
SFHNIHNTF

SEQ ID NO: 8675 - protein, 9 aa, synthetic construct
  REGION 1..9: note = Transmembrane 9 superfamily member 2 (545-553)
SIWSHQMYY

SEQ ID NO: 8676 - protein, 10 aa, synthetic construct
  REGION 1..10: note = Vimentin (87-96)
SLADAINTEF

SEQ ID NO: 8677 - protein, 10 aa, synthetic construct
  REGION 1..10: note = Protein PRRC1 (47-56)
SMESFPPLAY

SEQ ID NO: 8678 - protein, 9 aa, synthetic construct
  REGION 1..9: note = Heterogeneous nuclear ribonucleoprotein A1 (304-312)
SNFGGGGSY

SEQ ID NO: 8679 - protein, 12 aa, synthetic construct
  REGION 1..12: note = Cyclin-dependent kinase 19 (490-501)
SQYHPSHQAHRY

SEQ ID NO: 8680 - protein, 9 aa, synthetic construct
  REGION 1..9: note = Pre-mRNA-splicing factor ATP-dependent RNA helicase DHX15 (227-235)
SSAKTILKY

SEQ ID NO: 8681 - protein, 9 aa, synthetic construct
  REGION 1..9: note = Probable glutamate-tRNA ligase, mitochondrial (249-257)
STAKHLLLY

SEQ ID NO: 8682 - protein, 9 aa, synthetic construct
  REGION 1..9: note = Chondroitin sulfate proteoglycan 4 (745-753)
STDPQHHAY

SEQ ID NO: 8683 - protein, 9 aa, synthetic construct
  REGION 1..9: note = Peroxisomal carnitine O-octanoyltransferase (8-16)
STEERTFQY

SEQ ID NO: 8684 - protein, 11 aa, synthetic construct
  REGION 1..11: note = WD repeat-containing protein 44 (34-44)
STFKETENTAY

SEQ ID NO: 8685 - protein, 9 aa, synthetic construct
  REGION 1..9: note = Serine/threonine-protein kinase mTOR (1766-1774)
STIPKVLQY

SEQ ID NO: 8686 - protein, 9 aa, synthetic construct
  REGION 1..9: note = ADP-ribosylation factor GTPase-activating protein 3 (97-105)
STNDTNAKY

SEQ ID NO: 8687 - protein, 11 aa, synthetic construct
  REGION 1..11: note = Cytochrome c oxidase subunit 1 (9-19)
STNHKDIGTLY

SEQ ID NO: 8688 - protein, 9 aa, synthetic construct
  REGION 1..9: note = Syntaxin-binding protein 1 (511-519)
STTAVSARY

SEQ ID NO: 8689 - protein, 9 aa, synthetic construct
  REGION 1..9: note = Regulator of microtubule dynamics protein 1 (209-217)
STYEKALGY

SEQ ID NO: 8690 - protein, 9 aa, synthetic construct
  REGION 1..9: note = GPI transamidase component PIG-S (261-269)
SVDSQILYY

SEQ ID NO: 8691 - protein, 9 aa, synthetic construct
  REGION 1..9: note = Ubiquitin-protein ligase E3C (150-158)
SVIEQILHY

SEQ ID NO: 8692 - protein, 9 aa, synthetic construct
  REGION 1..9: note = Transcription elongation regulator 1 (419-427)
TADGKTYYY

SEQ ID NO: 8693 - protein, 9 aa, synthetic construct
  REGION 1..9: note = Sorting nexin-9 (146-154)
TAFGHPQAY

SEQ ID NO: 8694 - protein, 9 aa, synthetic construct
  REGION 1..9: note = Heterogeneous nuclear ribonucleoprotein F (301-309)
TENDIYNFF

SEQ ID NO: 8695 - protein, 12 aa, synthetic construct
  REGION 1..12: note = N-acetylglucosamine-6-sulfatase (192-203)
TIDPELLGKMNY

SEQ ID NO: 8696 - protein, 11 aa, synthetic construct
  REGION 1..11: note = Thymosin beta-4 (34-44)
TIEQEKQAGES

SEQ ID NO: 8697 - protein, 9 aa, synthetic construct
  REGION 1..9: note = Integral membrane protein GPR155 (369-377)
TMDPKPLAY

SEQ ID NO: 8698 - protein, 9 aa, synthetic construct
  REGION 1..9: note = Intraflagellar transport protein 122 homolog (937-945)
TMLGKFYHF

SEQ ID NO: 8699 - protein, 11 aa, synthetic construct
  REGION 1..11: note = Cytochrome c oxidase subunit 2 (182-192)
TTFTATRPGVY

SEQ ID NO: 8700 - protein, 12 aa, synthetic construct
  REGION 1..12: note = Cytochrome c oxidase subunit 2 (182-193)
TTFTATRPGVYY

SEQ ID NO: 8701 - protein, 9 aa, synthetic construct
  REGION 1..9: note = Calponin-3 (136-144)
TTIDIGVKY

SEQ ID NO: 8702 - protein, 9 aa, synthetic construct
  REGION 1..9: note = E3 ubiquitin/ISG15 ligase TRIM25 (593-601)
VADKVHLMY

SEQ ID NO: 8703 - protein, 9 aa, synthetic construct
  REGION 1..9: note = T-complex protein 1 subunit eta (127-135)
VAFKKTFSY

SEQ ID NO: 8704 - protein, 9 aa, synthetic construct
  REGION 1..9: note = General transcription factor II-I (324-332)
VEELFERKY

SEQ ID NO: 8705 - protein, 9 aa, synthetic construct
  REGION 1..9: note = Inactive hydroxysteroid dehydrogenase-like protein 1 (133-141)
VFYPYPQYF

SEQ ID NO: 8706 - protein, 9 aa, synthetic construct
  REGION 1..9: note = NADH dehydrogenase (ubiquinone) 1 alpha subcomplex subunit 3 (30-38)
VILPPLSPY

SEQ ID NO: 8707 - protein, 9 aa, synthetic construct
  REGION 1..9: note = Tribbles homolog 3 (126-134)
VLAGTQLLY

SEQ ID NO: 8708 - protein, 9 aa, synthetic construct
  REGION 1..9: note = Transketolase (50-58)
VLFFHTMRY

SEQ ID NO: 8709 - protein, 9 aa, synthetic construct
  REGION 1..9: note = Unconventional myosin-Id (415-423)
VLKQEQEEY

SEQ ID NO: 8710 - protein, 9 aa, synthetic construct
  REGION 1..9: note = Calcyclin-binding protein (63-71)
VVAPITTGY

SEQ ID NO: 8711 - protein, 9 aa, synthetic construct
  REGION 1..9: note = Nischarin (324-332)
VVDNLQHLY

SEQ ID NO: 8712 - protein, 9 aa, synthetic construct
  REGION 1..9: note = F-box only protein 31 (26-34)
VYAKLLHRY

SEQ ID NO: 8713 - protein, 9 aa, synthetic construct
  REGION 1..9: note = DNA replication licensing factor MCM7 (101-109)
VYIEHRLMM

SEQ ID NO: 8714 - protein, 9 aa, synthetic construct
  REGION 1..9: note = MORN repeat-containing protein 1 (31-39)
VYPNSFFRY

SEQ ID NO: 8715 - protein, 10 aa, synthetic construct
  REGION 1..10: note = Glycoprotein endo-alpha-1,2-mannosidase-like protein (101-110)
VYSDLHAFYY

SEQ ID NO: 8716 - protein, 10 aa, synthetic construct
  REGION 1..10: note = Prolyl endopeptidase (178-187)
WTHDGKGMFY

SEQ ID NO: 8717 - protein, 9 aa, synthetic construct
  REGION 1..9: note = Vimentin (53-61)
YASSPGGVY

SEQ ID NO: 8718 - protein, 9 aa, synthetic construct
  REGION 1..9: note = NmrA-like family domain-containing protein 1 (73-81)
YATFIVTNY

SEQ ID NO: 8719 - protein, 9 aa, synthetic construct
  REGION 1..9: note = Leukocyte receptor cluster member 8 (111-119)
YAYPYSYYY

SEQ ID NO: 8720 - protein, 12 aa, synthetic construct
  REGION 1..12: note = RNMT-activating mini protein (107-118)
YGYNQRPPYGYY

SEQ ID NO: 8721 - protein, 9 aa, synthetic construct
  REGION 1..9: note = Serine/threonine-protein kinase NLK (415-423)
YLDEGRLRY

SEQ ID NO: 8722 - protein, 9 aa, synthetic construct
  REGION 1..9: note = chromosome 1 open reading frame 9, isoform CRA_e (1086-1094)
YLEELSQRY

SEQ ID NO: 8723 - protein, 9 aa, synthetic construct
  REGION 1..9: note = Chromodomain-helicase-DNA-binding protein 1-like (385-393)
YMDYRGYSY

SEQ ID NO: 8724 - protein, 10 aa, synthetic construct
  REGION 1..10: note = RNMT-activating mini protein (109-118)
YNQRPPYGYY

SEQ ID NO: 8725 - protein, 10 aa, synthetic construct
  REGION 1..10: note = ATP-dependent RNA helicase DDX3X (643-652)
YNSDGYGGNY

SEQ ID NO: 8726 - protein, 9 aa, synthetic construct
  REGION 1..9: note = Histone acetyltransferase KAT6B (551-559)
YSSPYPQEY

SEQ ID NO: 8727 - protein, 9 aa, synthetic construct
  REGION 1..9: note = RNA-binding protein EWS (21-29)
YTAQPTQGY

SEQ ID NO: 8728 - protein, 10 aa, synthetic construct
  REGION 1..10: note = Protein FAM26F (92-101)
YTFNPKGQYY

SEQ ID NO: 8729 - protein, 9 aa, synthetic construct
  REGION 1..9: note = MORN repeat-containing protein 2 (30-38)
YTFPNGAKY

SEQ ID NO: 8730 - protein, 9 aa, synthetic construct
  REGION 1..9: note = Probable ATP-dependent RNA helicase YTHDC2 (389-397)
YTNKEMLKY

SEQ ID NO: 8731 - protein, 9 aa, synthetic construct
  REGION 1..9: note = Probable dolichyl pyrophosphate Glc1Man9GlcNAc2 alpha-1,3-glucosyltransferase (204-212)
YVAPAYGVY

SEQ ID NO: 8732 - protein, 9 aa, synthetic construct
  REGION 1..9: note = Filamin-A (1581-1589)
YVPDVTGRY

SEQ ID NO: 8733 - protein, 9 aa, synthetic construct
  REGION 1..9: note = Leucine-rich repeat-containing protein 1 (26-34)
YVPEEIYRY

SEQ ID NO: 8734 - protein, 9 aa, synthetic construct
  REGION 1..9: note = Ectopic P granules protein 5 homolog (664-672)
YVSDHWAQY

SEQ ID NO: 8735 - protein, 9 aa, synthetic construct
  REGION 1..9: note = Sphingomyelin phosphodiesterase 2 (133-141)
YVTHLHAEY

SEQ ID NO: 8736 - protein, 10 aa, synthetic construct
  REGION 1..10: note = MORN repeat-containing protein 1 (30-39)
YVYPNSFFRY

SEQ ID NO: 8737 - protein, 9 aa, synthetic construct
  REGION 1..9: note = Protein polybromo-1 (132-140)
YYKPDSPEY

SEQ ID NO: 8738 - protein, 9 aa, synthetic construct
  REGION 1..9: note = V-type proton ATPase subunit d 1 (7-15)
YYPEYKLLF

SEQ ID NO: 8739 - protein, 17 aa, synthetic construct
  REGION 1..17: note = Calmodulin (133-149)
GDGQVNYEEFVQMMTAK

SEQ ID NO: 8740 - protein, 23 aa, synthetic construct
  REGION 1..23: note = Myosin regulatory light chain 12B (150-172)
KKGNFNYIEFTRILKHGAKDKDD

SEQ ID NO: 8741 - protein, 21 aa, synthetic construct
  REGION 1..21: note = HLA class I histocompatibility antigen, B-55 alpha chain (52-72)
VDDTQFVRFDSDAASPREEPR

SEQ ID NO: 8742 - protein, 13 aa, synthetic construct
  REGION 1..13: note = Sorting nexin-6 (245-257)
AADDYNRIGSSLY

SEQ ID NO: 8743 - protein, 9 aa, synthetic construct
  REGION 1..9: note = Peptidyl-prolyl cis-trans isomerase-like 2 (27-35)
AIDEDVLRY

SEQ ID NO: 8744 - protein, 9 aa, synthetic construct
  REGION 1..9: note = Nucleolar GTP-binding protein 2 (416-424)
ALDEKIAKY

SEQ ID NO: 8745 - protein, 10 aa, synthetic construct
  REGION 1..10: note = Serine/threonine-protein kinase MRCK alpha (1203-1212)
ALDGRETDFY

SEQ ID NO: 8746 - protein, 12 aa, synthetic construct
  REGION 1..12: note = Cleavage stimulation factor subunit 3 (120-131)
ALDKIGMEIMSY

SEQ ID NO: 8747 - protein, 12 aa, synthetic construct
  REGION 1..12: note = 2-oxoisovalerate dehydrogenase subunit alpha, mitochondrial (80-91)
ALDNTDLVFGQY

SEQ ID NO: 8748 - protein, 13 aa, synthetic construct
  REGION 1..13: note = Structural maintenance of chromosomes protein 1A (1161-1173)
ALDNTNIGKVANY

SEQ ID NO: 8749 - protein, 9 aa, synthetic construct
  REGION 1..9: note = Ubiquitin-like modifier-activating enzyme 6 (331-339)
ALDQFQEKY

SEQ ID NO: 8750 - protein, 9 aa, synthetic construct
  REGION 1..9: note = SWI/SNF-related matrix-associated actin-dependent regulator of chromatin subfamily A member 5 (920-928)
ALDTKIGRY

SEQ ID NO: 8751 - protein, 9 aa, synthetic construct
  REGION 1..9: note = Eukaryotic translation initiation factor 3 subunit E (54-62)
AMDVYKNLY

SEQ ID NO: 8752 - protein, 9 aa, synthetic construct
  REGION 1..9: note = SAFB-like transcription modulator (735-743)
ARFGHGSDY

SEQ ID NO: 8753 - protein, 10 aa, synthetic construct
  REGION 1..10: note = Putative heat shock protein HSP 90-beta 2 (88-97)
ASDALDKIRY

SEQ ID NO: 8754 - protein, 10 aa, synthetic construct
  REGION 1..10: note = Gelsolin (362-371)
ASDFITKMDY

SEQ ID NO: 8755 - protein, 9 aa, synthetic construct
  REGION 1..9: note = Ubiquitin-like protein 3 (32-40)
ASDIAKHVY

SEQ ID NO: 8756 - protein, 11 aa, synthetic construct
  REGION 1..11: note = Proteasome-associated protein ECM29 homolog (1073-1083)
ASDLSQPDLVY

SEQ ID NO: 8757 - protein, 9 aa, synthetic construct
  REGION 1..9: note = Kelch repeat and BTB domain-containing protein 6 (147-155)
ASDMLQLEY

SEQ ID NO: 8758 - protein, 9 aa, synthetic construct
  REGION 1..9: note = GPN-loop GTPase 2 (210-218)
ASDPFFRHY

SEQ ID NO: 8759 - protein, 11 aa, synthetic construct
  REGION 1..11: note = WD repeat-containing protein 81 (817-827)
ASDPIHTFDLY

SEQ ID NO: 8760 - protein, 9 aa, synthetic construct
  REGION 1..9: note = DNA-directed RNA polymerase II subunit RPB2 (1103-1111)
ASDPYQVHV

SEQ ID NO: 8761 - protein, 9 aa, synthetic construct
  REGION 1..9: note = DDB1- and CUL4-associated factor 13 (368-376)
ASDRNIVLY

SEQ ID NO: 8762 - protein, 10 aa, synthetic construct
  REGION 1..10: note = Probable ATP-dependent RNA helicase DHX37 (105-114)
ASEAEMRLFY

SEQ ID NO: 8763 - protein, 12 aa, synthetic construct
  REGION 1..12: note = Platelet-activating factor acetylhydrolase IB subunit alpha (4-15)
ASEDATIKVWDY

SEQ ID NO: 8764 - protein, 10 aa, synthetic construct
  REGION 1..10: note = T-complex protein 11-like protein 1 (271-280)
ASEDLMTQKY

SEQ ID NO: 8765 - protein, 10 aa, synthetic construct
  REGION 1..10: note = Splicing factor 3B subunit 3 (350-359)
ASEFGNHYLY

SEQ ID NO: 8766 - protein, 13 aa, synthetic construct
  REGION 1..13: note = Aspartate-tRNA ligase, cytoplasmic (226-238)
ASEGGANVFTVSY

SEQ ID NO: 8767 - protein, 14 aa, synthetic construct
  REGION 1..14: note = MAP kinase-activated protein kinase 2 (163-176)
ASEIMKSIGEAIQY

SEQ ID NO: 8768 - protein, 13 aa, synthetic construct
  REGION 1..13: note = Thyroid receptor-interacting protein 11 (84-96)
ASEIQIKQQSTSY

SEQ ID NO: 8769 - protein, 12 aa, synthetic construct
  REGION 1..12: note = Clusterin-associated protein 1 (160-171)
ASEITSKGASLY

SEQ ID NO: 8770 - protein, 9 aa, synthetic construct
  REGION 1..9: note = Cleavage stimulation factor subunit 3 (70-78)
ASELKALGY

SEQ ID NO: 8771 - protein, 12 aa, synthetic construct
  REGION 1..12: note = DNA-dependent protein kinase catalytic subunit (2173-2184)
ASENNGGEGIHY

SEQ ID NO: 8772 - protein, 10 aa, synthetic construct
  REGION 1..10: note = Exocyst complex component 4 (72-81)
ASEPSAQLSY

SEQ ID NO: 8773 - protein, 12 aa, synthetic construct
  REGION 1..12: note = Nucleoporin NUP188 homolog (766-777)
ASEQQALHTVQY

SEQ ID NO: 8774 - protein, 11 aa, synthetic construct
  REGION 1..11: note = Ubiquitin carboxyl-terminal hydrolase 32 (141-151)
ASETAGSGFLY

SEQ ID NO: 8775 - protein, 10 aa, synthetic construct
  REGION 1..10: note = Low-density lipoprotein receptor class A domain-containing protein 3 (250-259)
ASEVGSPPSY

SEQ ID NO: 8776 - protein, 9 aa, synthetic construct
  REGION 1..9: note = Homeodomain-interacting protein kinase 2 (404-412)
ASEYDQIRY

SEQ ID NO: 8777 - protein, 12 aa, synthetic construct
  REGION 1..12: note = Amyloid protein-binding protein 2 (330-341)
ATAHEDLAYSSY

SEQ ID NO: 8778 - protein, 13 aa, synthetic construct
  REGION 1..13: note = Zinc finger protein 318 (1381-1393)
ATANAKDLYDIFY

SEQ ID NO: 8779 - protein, 13 aa, synthetic construct
  REGION 1..13: note = E3 ubiquitin-protein ligase BRE1B (85-97)
ATDDATLLIVNRY

SEQ ID NO: 8780 - protein, 9 aa, synthetic construct
  REGION 1..9: note = O-acetyl-ADP-ribose deacetylase 1 (142-150)
ATDIKITVY

SEQ ID NO: 8781 - protein, 9 aa, synthetic construct
  REGION 1..9: note = Coiled-coil domain-containing protein 141 (498-506)
ATDLAQHLY

SEQ ID NO: 8782 - protein, 10 aa, synthetic construct
  REGION 1..10: note = Endoribonuclease Dicer (239-248)
ATDLVVLDRY

SEQ ID NO: 8783 - protein, 10 aa, synthetic construct
  REGION 1..10: note = EVI5-like protein (131-140)
ATDMPVKNQY

SEQ ID NO: 8784 - protein, 9 aa, synthetic construct
  REGION 1..9: note = Dystonin (4021-4029)
ATDRFRSLY

SEQ ID NO: 8785 - protein, 13 aa, synthetic construct
  REGION 1..13: note = MAP kinase-interacting serine/threonine-protein kinase 2 (71-83)
ATDSFSGRFEDVY

SEQ ID NO: 8786 - protein, 10 aa, synthetic construct
  REGION 1..10: note = Nicotinamide phosphoribosyltransferase (14-23)
ATDSYKVTHY

SEQ ID NO: 8787 - protein, 13 aa, synthetic construct
  REGION 1..13: note = Spectrin beta chain, non-erythrocytic 1 (6-18)
ATDYDNIEIQQQY

SEQ ID NO: 8788 - protein, 9 aa, synthetic construct
  REGION 1..9: note = Fibronectin type III domain-containing protein 3B (348-356)
ATDYHVRVY

SEQ ID NO: 8789 - protein, 11 aa, synthetic construct
  REGION 1..11: note = Coatomer subunit beta' (480-490)
ATEESFFILKY

SEQ ID NO: 8790 - protein, 9 aa, synthetic construct
  REGION 1..9: note = Cytoplasmic dynein 1 heavy chain 1 (3596-3604)
ATEFIMNEY

SEQ ID NO: 8791 - protein, 13 aa, synthetic construct
  REGION 1..13: note = T-complex protein 1 subunit theta (414-426)
ATEIELAKQITSY

SEQ ID NO: 8792 - protein, 14 aa, synthetic construct
  REGION 1..14: note = Protein PRRC2A (1894-1907)
ATELGKLPAGGVLY

SEQ ID NO: 8793 - protein, 9 aa, synthetic construct
  REGION 1..9: note = Eukaryotic translation initiation factor 3 subunit D (422-430)
ATELKNNSY

SEQ ID NO: 8794 - protein, 9 aa, synthetic construct
  REGION 1..9: note = Serine/threonine-protein kinase SMG1 (2701-2709)
ATEMTLQRY

SEQ ID NO: 8795 - protein, 12 aa, synthetic construct
  REGION 1..12: note = Protein phosphatase 1G (149-160)
ATMTIEELLTRY

SEQ ID NO: 8796 - protein, 11 aa, synthetic construct
  REGION 1..11: note = Alpha-catulin (401-411)
ATQLAADLLKY

SEQ ID NO: 8797 - protein, 10 aa, synthetic construct
  REGION 1..10: note = 60S ribosomal protein L8 (27-36)
AVDFAERHGY

SEQ ID NO: 8798 - protein, 10 aa, synthetic construct
  REGION 1..10: note = Nuclear pore complex protein Nup160 (1036-1045)
AVDLMTHNYY

SEQ ID NO: 8799 - protein, 9 aa, synthetic construct
  REGION 1..9: note = Chromodomain-helicase-DNA-binding protein 8 (2348-2356)
AVDPRFLAY

SEQ ID NO: 8800 - protein, 12 aa, synthetic construct
  REGION 1..12: note = Short transient receptor potential channel 4-associated protein (530-541)
AVESFLRGTTSY

SEQ ID NO: 8801 - protein, 10 aa, synthetic construct
  REGION 1..10: note = TOX high mobility group box family member 4 (107-116)
DLDHSIGTQY

SEQ ID NO: 8802 - protein, 11 aa, synthetic construct
  REGION 1..11: note = Nuclear factor of activated T-cells 5 (12-22)
DLDLESPKSLY

SEQ ID NO: 8803 - protein, 9 aa, synthetic construct
  REGION 1..9: note = Myocyte-specific enhancer factor 2A (61-69)
DMDKVLLKY

SEQ ID NO: 8804 - protein, 10 aa, synthetic construct
  REGION 1..10: note = Elongator complex protein 5 (57-66)
DSDINNRLVY

SEQ ID NO: 8805 - protein, 12 aa, synthetic construct
  REGION 1..12: note = Tubulin beta chain (39-50)
DSDLQLDRISVY

SEQ ID NO: 8806 - protein, 13 aa, synthetic construct
  REGION 1..13: note = Tubulin beta chain (39-51)
DSDLQLDRISVYY

SEQ ID NO: 8807 - protein, 13 aa, synthetic construct
  REGION 1..13: note = Protein FAM13A (271-283)
DSDPMLSPRFYAY

SEQ ID NO: 8808 - protein, 13 aa, synthetic construct
  REGION 1..13: note = Eukaryotic translation initiation factor 4B (229-241)
DSDRYRDGYRDGY

SEQ ID NO: 8809 - protein, 12 aa, synthetic construct
  REGION 1..12: note = Eukaryotic translation initiation factor 4 gamma 3 (1501-1512)
DSDTEKELQALY

SEQ ID NO: 8810 - protein, 12 aa, synthetic construct
  REGION 1..12: note = GPI transamidase component PIG-T (51-62)
DSELQREGVSHY

SEQ ID NO: 8811 - protein, 10 aa, synthetic construct
  REGION 1..10: note = Inositol 1,4,5-trisphosphate receptor type 1 (2098-2107)
DSENAERILY

SEQ ID NO: 8812 - protein, 9 aa, synthetic construct
  REGION 1..9: note = Transcription factor E2F3 (290-298)
DSENQRLAY

SEQ ID NO: 8813 - protein, 12 aa, synthetic construct
  REGION 1..12: note = Zinc finger MYND domain-containing protein 11 (140-151)
DSEQADIARMLY

SEQ ID NO: 8814 - protein, 9 aa, synthetic construct
  REGION 1..9: note = Tubulin-specific chaperone cofactor E-like protein (299-307)
DSERFFIRY

SEQ ID NO: 8815 - protein, 11 aa, synthetic construct
  REGION 1..11: note = Matrin-3 (233-243)
DSFFGETSHNY

SEQ ID NO: 8816 - protein, 11 aa, synthetic construct
  REGION 1..11: note = Calcium and integrin-binding protein 1 (100-110)
DTATPDIKSHY

SEQ ID NO: 8817 - protein, 12 aa, synthetic construct
  REGION 1..12: note = SAFB-like transcription modulator (732-743)
DTDARFGHGSDY

SEQ ID NO: 8818 - protein, 9 aa, synthetic construct
  REGION 1..9: note = Calnexin (92-100)
DTDDEIAKY

SEQ ID NO: 8819 - protein, 10 aa, synthetic construct
  REGION 1..10: note = Phospholipid scramblase 4 (159-168)
DTDDFTRNAY

SEQ ID NO: 8820 - protein, 12 aa, synthetic construct
  REGION 1..12: note = Complex I intermediate-associated protein 30, mitochondrial (226-237)
DTDFFQRTNQMY

SEQ ID NO: 8821 - protein, 10 aa, synthetic construct
  REGION 1..10: note = Aspartate-tRNA ligase, cytoplasmic (384-393)
DTDFYILDKY

SEQ ID NO: 8822 - protein, 9 aa, synthetic construct
  REGION 1..9: note = Replication protein A 70 kDa DNA-binding subunit (504-512)
DTEFPNFKY

SEQ ID NO: 8823 - protein, 9 aa, synthetic construct
  REGION 1..9: note = Adenylyl cyclase-associated protein 1 (344-352)
DTELKQVAY

SEQ ID NO: 8824 - protein, 9 aa, synthetic construct
  REGION 1..9: note = Actin, cytoplasmic 2 (77-85)
DVDIRKDLY

SEQ ID NO: 8825 - protein, 9 aa, synthetic construct
  REGION 1..9: note = Heterogeneous nuclear ribonucleoprotein C-like 1 (32-40)
DVEAIFSKY

SEQ ID NO: 8826 - protein, 10 aa, synthetic construct
  REGION 1..10: note = Protein arginine N-methyltransferase 7 (368-377)
EAEPHPLWEY

SEQ ID NO: 8827 - protein, 9 aa, synthetic construct
  REGION 1..9: note = Melanoma-associated antigen D2 (338-346)
EIDKNDHLY

SEQ ID NO: 8828 - protein, 11 aa, synthetic construct
  REGION 1..11: note = Annexin A1 (305-315)
EIDMNDIKAFY

SEQ ID NO: 8829 - protein, 10 aa, synthetic construct
  REGION 1..10: note = LIM domain kinase 2 (716-725)
ELDHTVSMQY

SEQ ID NO: 8830 - protein, 11 aa, synthetic construct
  REGION 1..11: note = NADPH-cytochrome P450 reductase (304-314)
ELDISDSKIRY

SEQ ID NO: 8831 - protein, 11 aa, synthetic construct
  REGION 1..11: note = Splicing factor 3B subunit 2 (811-821)
ELDPMAMTQKY

SEQ ID NO: 8832 - protein, 11 aa, synthetic construct
  REGION 1..11: note = Peptidyl-prolyl cis-trans isomerase D (301-311)
ELDPSNTKALY

SEQ ID NO: 8833 - protein, 9 aa, synthetic construct
  REGION 1..9: note = Ankyrin repeat and IBR domain-containing protein 1 (229-237)
ELDRFMHYY

SEQ ID NO: 8834 - protein, 9 aa, synthetic construct
  REGION 1..9: note = Plectin (502-510)
ELEDSTLRY

SEQ ID NO: 8835 - protein, 10 aa, synthetic construct
  REGION 1..10: note = Small G protein signaling modulator 2 (307-316)
ELEKSVYWDY

SEQ ID NO: 8836 - protein, 10 aa, synthetic construct
  REGION 1..10: note = GPI transamidase component PIG-T (53-62)
ELQREGVSHY

SEQ ID NO: 8837 - protein, 11 aa, synthetic construct
  REGION 1..11: note = 60S ribosomal protein L4 (254-264)
ESAFRKLDELY

SEQ ID NO: 8838 - protein, 10 aa, synthetic construct
  REGION 1..10: note = Protein-glutamate O-methyltransferase (101-110)
ESDGKSRWFY

SEQ ID NO: 8839 - protein, 9 aa, synthetic construct
  REGION 1..9: note = Guanine nucleotide-binding protein subunit beta-5 (239-247)
ESDINSVRY

SEQ ID NO: 8840 - protein, 9 aa, synthetic construct
  REGION 1..9: note = Zinc transporter 5 (26-34)
ESDSRQIFY

SEQ ID NO: 8841 - protein, 14 aa, synthetic construct
  REGION 1..14: note = Proteasome activator complex subunit 3 (182-195)
ESEAASYLDQISRY

SEQ ID NO: 8842 - protein, 12 aa, synthetic construct
  REGION 1..12: note = Myotubularin-related protein 5 (821-832)
ESENRSYEGTLY

SEQ ID NO: 8843 - protein, 10 aa, synthetic construct
  REGION 1..10: note = Asparagine synthetase (glutamine-hydrolyzing) (389-398)
ESERLLRELY

SEQ ID NO: 8844 - protein, 11 aa, synthetic construct
  REGION 1..11: note = Peptidyl-prolyl cis-trans isomerase FKBP8 (167-177)
ETAMVTADSKY

SEQ ID NO: 8845 - protein, 10 aa, synthetic construct
  REGION 1..10: note = Eyes absent homolog 3 (87-96)
ETAYPGQTQY

SEQ ID NO: 8846 - protein, 10 aa, synthetic construct
  REGION 1..10: note = ATP-dependent RNA helicase DDX24 (571-580)
ETDEKDFYLY

SEQ ID NO: 8847 - protein, 11 aa, synthetic construct
  REGION 1..11: note = TFIIH basal transcription factor complex helicase XPD subunit (251-261)
ETDEQRLRDEY

SEQ ID NO: 8848 - protein, 10 aa, synthetic construct
  REGION 1..10: note = Nicotinamide riboside kinase 1 (46-55)
ETDKNGFLQY

SEQ ID NO: 8849 - protein, 9 aa, synthetic construct
  REGION 1..9: note = RNA binding motif protein 22 (245-253)
ETDLRNHFY

SEQ ID NO: 8850 - protein, 14 aa, synthetic construct
  REGION 1..14: note = PCNA-interacting partner (146-159)
ETDLSIPTSPTSKY

SEQ ID NO: 8851 - protein, 9 aa, synthetic construct
  REGION 1..9: note = Beta-mannosidase (118-126)
ETDNMFNRY

SEQ ID NO: 8852 - protein, 13 aa, synthetic construct
  REGION 1..13: note = Probable ATP-dependent RNA helicase DDX17 (61-73)
ETDRAGYANGSGY

SEQ ID NO: 8853 - protein, 9 aa, synthetic construct
  REGION 1..9: note = Synergin gamma (1198-1206)
ETDSFKLAY

SEQ ID NO: 8854 - protein, 11 aa, synthetic construct
  REGION 1..11: note = Probable ATP-dependent RNA helicase DDX56 (239-249)
ETEEDKFLLLY

SEQ ID NO: 8855 - protein, 10 aa, synthetic construct
  REGION 1..10: note = Kremen protein 2 (104-113)
ETEEGIYWRY

SEQ ID NO: 8856 - protein, 9 aa, synthetic construct
  REGION 1..9: note = Intron-binding protein aquarius (887-895)
ETEKDFSRY

SEQ ID NO: 8857 - protein, 12 aa, synthetic construct
  REGION 1..12: note = Guanine nucleotide exchange factor VAV3 (683-694)
ETELINRVNSTY

SEQ ID NO: 8858 - protein, 13 aa, synthetic construct
  REGION 1..13: note = DNA polymerase zeta catalytic subunit (827-839)
ETEQSFGLYGNKY

SEQ ID NO: 8859 - protein, 11 aa, synthetic construct
  REGION 1..11: note = Protein transport protein Sec16A (1244-1254)
ETERFRELLLY

SEQ ID NO: 8860 - protein, 9 aa, synthetic construct
  REGION 1..9: note = Dynamin-2 (455-463)
ETERIVTTY

SEQ ID NO: 8861 - protein, 9 aa, synthetic construct
  REGION 1..9: note = Integrin alpha-3 (1043-1051)
ETERLTDDY

SEQ ID NO: 8862 - protein, 11 aa, synthetic construct
  REGION 1..11: note = DnaJ homolog subfamily C member 7 (29-39)
ETFKEQGNAYY

SEQ ID NO: 8863 - protein, 11 aa, synthetic construct
  REGION 1..11: note = HLA class I histocompatibility antigen, B-8 alpha chain (21-31)
ETWAGSHSMRY

SEQ ID NO: 8864 - protein, 10 aa, synthetic construct
  REGION 1..10: note = Lamin-B1 (229-238)
EVDSGRQIEY

SEQ ID NO: 8865 - protein, 10 aa, synthetic construct
  REGION 1..10: note = Fatty acid synthase (1244-1253)
EVLAGHGHLY

SEQ ID NO: 8866 - protein, 11 aa, synthetic construct
  REGION 1..11: note = Histone acetyltransferase type B catalytic subunit (191-201)
FIDVDDERWHY

SEQ ID NO: 8867 - protein, 11 aa, synthetic construct
  REGION 1..11: note = Protein Smaug homolog 2 (118-128)
FIEESRQLLSY

SEQ ID NO: 8868 - protein, 12 aa, synthetic construct
  REGION 1..12: note = Interferon regulatory factor 2-binding protein-like (420-431)
FIEYPTGSGNVY

SEQ ID NO: 8869 - protein, 13 aa, synthetic construct
  REGION 1..13: note = Protein YIF1B (69-81)
FLADPVSNMAMAY

SEQ ID NO: 8870 - protein, 9 aa, synthetic construct
  REGION 1..9: note = Asparagine synthetase (glutamine-hydrolyzing) (337-345)
FLDHRFSSY

SEQ ID NO: 8871 - protein, 10 aa, synthetic construct
  REGION 1..10: note = Phosphatidylinositol-binding clathrin assembly protein (109-118)
FLDKSGLQGY

SEQ ID NO: 8872 - protein, 11 aa, synthetic construct
  REGION 1..11: note = Rho GTPase-activating protein 35 (733-743)
FLDPASAGIGY

SEQ ID NO: 8873 - protein, 11 aa, synthetic construct
  REGION 1..11: note = Ubiquitin carboxyl-terminal hydrolase 8 (552-562)
FLDPITGTFRY

SEQ ID NO: 8874 - protein, 12 aa, synthetic construct
  REGION 1..12: note = Group XV phospholipase A2 (126-137)
FLDPSKSSVGSY

SEQ ID NO: 8875 - protein, 11 aa, synthetic construct
  REGION 1..11: note = Microtubule-associated protein 4 (103-113)
FLEEKMAYQEY

SEQ ID NO: 8876 - protein, 12 aa, synthetic construct
  REGION 1..12: note = Histone H4 (31-42)
FLENVIRDAVTY

SEQ ID NO: 8877 - protein, 10 aa, synthetic construct
  REGION 1..10: note = Adenylate cyclase type 3 (615-624)
FMDPEMETRY

SEQ ID NO: 8878 - protein, 10 aa, synthetic construct
  REGION 1..10: note = Probable C-mannosyltransferase DPY19L1 (397-406)
FMEKETPLRY

SEQ ID NO: 8879 - protein, 12 aa, synthetic construct
  REGION 1..12: note = Probable E3 ubiquitin-protein ligase HERC1 (402-413)
FSDAQTIEAGQY

SEQ ID NO: 8880 - protein, 10 aa, synthetic construct
  REGION 1..10: note = Iduronate 2-sulfatase (424-433)
FSDIHAGELY

SEQ ID NO: 8881 - protein, 11 aa, synthetic construct
  REGION 1..11: note = Iduronate 2-sulfatase (424-434)
FSDIHAGELYF

SEQ ID NO: 8882 - protein, 10 aa, synthetic construct
  REGION 1..10: note = Type 2 lactosamine alpha-2,3-sialyltransferase (283-292)
FSDLKSPLHY

SEQ ID NO: 8883 - protein, 11 aa, synthetic construct
  REGION 1..11: note = Type 2 lactosamine alpha-2,3-sialyltransferase (175-185)
FSDLKSPLHYY

SEQ ID NO: 8884 - protein, 11 aa, synthetic construct
  REGION 1..11: note = Rab GTPase-activating protein 1-like (338-348)
FSDLNLEAHMY

SEQ ID NO: 8885 - protein, 11 aa, synthetic construct
  REGION 1..11: note = DAZ-associated protein 1 (363-373)
FSDPSQQPPSY

SEQ ID NO: 8886 - protein, 9 aa, synthetic construct
  REGION 1..9: note = Nipped-B-like protein (37-45)
FSDSKIQKY

SEQ ID NO: 8887 - protein, 11 aa, synthetic construct
  REGION 1..11: note = Protein FAM65B (671-681)
FSDTETEKHSY

SEQ ID NO: 8888 - protein, 11 aa, synthetic construct
  REGION 1..11: note = Probable E3 ubiquitin-protein ligase HERC1 (3591-3601)
FSEDRPFAVGY

SEQ ID NO: 8889 - protein, 10 aa, synthetic construct
  REGION 1..10: note = Programmed cell death protein 6 (82-91)
FSEFTGVWKY

SEQ ID NO: 8890 - protein, 9 aa, synthetic construct
  REGION 1..9: note = Ubiquitin carboxyl-terminal hydrolase 32 (135-143)
FSEGEKVNY

SEQ ID NO: 8891 - protein, 11 aa, synthetic construct
  REGION 1..11: note = Heat shock protein HSP 90-beta (342-352)
FSELAEDKENY

SEQ ID NO: 8892 - protein, 11 aa, synthetic construct
  REGION 1..11: note = Uncharacterized protein C14orf119 (120-130)
FSEPDFVAKFY

SEQ ID NO: 8893 - protein, 11 aa, synthetic construct
  REGION 1..11: note = Fc receptor-like A (67-77)
FSEPFHLIVSY

SEQ ID NO: 8894 - protein, 9 aa, synthetic construct
  REGION 1..9: note = cAMP-dependent protein kinase catalytic subunit alpha (131-139)
FSEPHARFY

SEQ ID NO: 8895 - protein, 9 aa, synthetic construct
  REGION 1..9: note = Serine/threonine-protein kinase N1 (718-726)
FSEPRAIFY

SEQ ID NO: 8896 - protein, 11 aa, synthetic construct
  REGION 1..11: note = Protein C-ets-1 (175-185)
FSEPSFITESY

SEQ ID NO: 8897 - protein, 9 aa, synthetic construct
  REGION 1..9: note = Protein RCC2 (314-322)
FSEQVAMGY

SEQ ID NO: 8898 - protein, 12 aa, synthetic construct
  REGION 1..12: note = DNA ligase 3 (127-138)
FSESGGDMKEWY

SEQ ID NO: 8899 - protein, 10 aa, synthetic construct
  REGION 1..10: note = ETS translocation variant 5 (318-327)
FSSSHEGFSY

SEQ ID NO: 8900 - protein, 9 aa, synthetic construct
  REGION 1..9: note = FAS-associated factor 1 (337-345)
FTAEFSSRY

SEQ ID NO: 8901 - protein, 9 aa, synthetic construct
  REGION 1..9: note = Staphylococcal nuclease domain-containing protein 1 (607-615)
FTAERSSYY

SEQ ID NO: 8902 - protein, 9 aa, synthetic construct
  REGION 1..9: note = LanC-like protein 1 (199-207)
FTAKSPLMY

SEQ ID NO: 8903 - protein, 9 aa, synthetic construct
  REGION 1..9: note = Cytochrome c oxidase subunit 2 (184-192)
FTATRPGVY

SEQ ID NO: 8904 - protein, 11 aa, synthetic construct
  REGION 1..11: note = Splicing factor 3A subunit 3 (130-140)
FTDEEGYGRYL

SEQ ID NO: 8905 - protein, 8 aa, synthetic construct
  REGION 1..8: note = Gem-associated protein 5 (895-902)
FTDRATLY

SEQ ID NO: 8906 - protein, 13 aa, synthetic construct
  REGION 1..13: note = Geranylgeranyl transferase type-2 subunit alpha (166-178)
FTDSLITRNFSNY

SEQ ID NO: 8907 - protein, 10 aa, synthetic construct
  REGION 1..10: note = CLIP-associating protein 2 (80-89)
FTDVPSIQIY

SEQ ID NO: 8908 - protein, 12 aa, synthetic construct
  REGION 1..12: note = Basic leucine zipper and W2 domain-containing protein 1 (149-160)
FTEAGLKELSEY

SEQ ID NO: 8909 - protein, 11 aa, synthetic construct
  REGION 1..11: note = Heat shock protein HSP 90-alpha (546-556)
FTELAEDKENY

SEQ ID NO: 8910 - protein, 11 aa, synthetic construct
  REGION 1..11: note = Zinc finger protein 746 (547-557)
FTERSKLIDHY

SEQ ID NO: 8911 - protein, 12 aa, synthetic construct
  REGION 1..12: note = Coatomer subunit gamma-1 (402-413)
FTMLREEGGFEY

SEQ ID NO: 8912 - protein, 9 aa, synthetic construct
  REGION 1..9: note = Cytoplasmic dynein 1 heavy chain 1 (2784-2792)
FTQDTQPHY

SEQ ID NO: 8913 - protein, 11 aa, synthetic construct
  REGION 1..11: note Dolichyl-diphosphooligosaccharide-proteinosyltransferase subunit 2 (449-459)
FVAEPDNKNVY

SEQ ID NO: 8914 - protein, 12 aa, synthetic construct
  REGION 1..12: note = G patch domain and KOW motifs-containing protein (365-376)
FVDNMYKGGQYY

SEQ ID NO: 8915 - protein, 12 aa, synthetic construct
  REGION 1..12: note = Retinoid-inducible serine carboxypeptidase (63-74)
FVDNPVGTGFSY

SEQ ID NO: 8916 - protein, 10 aa, synthetic construct
  REGION 1..10: note = Kelch-like protein 15 (325-334)
FVDPYPVNKY

SEQ ID NO: 8917 - protein, 10 aa, synthetic construct
  REGION 1..10: note = Abhydrolase domain-containing protein 2 (146-155)
FVDYAQKNGY

SEQ ID NO: 8918 - protein, 13 aa, synthetic construct
  REGION 1..13: note = Trafficking protein particle complex subunit 3 (115-127)
FVELPDNHSSLIY

SEQ ID NO: 8919 - protein, 12 aa, synthetic construct
  REGION 1..12: note = ADP-ribosylation factor 5 (24-35)
GLDAAGKTTILY

SEQ ID NO: 8920 - protein, 9 aa, synthetic construct
  REGION 1..9: note = Exosome complex exonuclease RRP44 (757-765)
GMDNDFHHY

SEQ ID NO: 8921 - protein, 9 aa, synthetic construct
  REGION 1..9: note = Archaemetzincin-2 (148-156)
GSDFYSMHY

SEQ ID NO: 8922 - protein, 13 aa, synthetic construct
  REGION 1..13: note = Xaa-Pro aminopeptidase 1 (256-268)
GSDVEHNPVFFSY

SEQ ID NO: 8923 - protein, 9 aa, synthetic construct
  REGION 1..9: note = Sorbitol dehydrogenase (46-54)
GSDVHYWEY

SEQ ID NO: 8924 - protein, 9 aa, synthetic construct
  REGION 1..9: note = Eukaryotic translation initiation factor 3 subunit D (443-451)
GSEYLKLGY

SEQ ID NO: 8925 - protein, 13 aa, synthetic construct
  REGION 1..13: note = PMS1 protein homolog 1 (39-51)
GTAVMNNMESFQY

SEQ ID NO: 8926 - protein, 10 aa, synthetic construct
  REGION 1..10: note = SEC23-interacting protein (313-322)
GTDGGRYDVY

SEQ ID NO: 8927 - protein, 9 aa, synthetic construct
  REGION 1..9: note = Syndetin (394-402)
GTDLSIFKY

SEQ ID NO: 8928 - protein, 12 aa, synthetic construct
  REGION 1..12: note = X-ray repair cross-complementing protein 5 (63-74)
GTDNPLSGGDQY

SEQ ID NO: 8929 - protein, 11 aa, synthetic construct
  REGION 1..11: note = DNA replication licensing factor MCM5 (45-55)
GTDRTGFTFKY

SEQ ID NO: 8930 - protein, 9 aa, synthetic construct
  REGION 1..9: note = WD repeat-containing protein 19 (157-165)
GTDTGVVQY

SEQ ID NO: 8931 - protein, 14 aa, synthetic construct
  REGION 1..14: note = E3 ubiquitin-protein ligase MYCBP2 (1371-1384)
GTDVNAGQIPQLLY

SEQ ID NO: 8932 - protein, 13 aa, synthetic construct
  REGION 1..13: note = CDK5 regulatory subunit-associated protein 3 (77-89)
GTEASTKNIFGRY

SEQ ID NO: 8933 - protein, 10 aa, synthetic construct
  REGION 1..10: note = Endophilin-B1 (5-14)
GTEFGPGTAY

SEQ ID NO: 8934 - protein, 12 aa, synthetic construct
  REGION 1..12: note = GON-4-like protein (39-50)
GTEFPNPLISKY

SEQ ID NO: 8935 - protein, 12 aa, synthetic construct
  REGION 1..12: note = Nucleolin (451-462)
GTEIDGRSISLY

SEQ ID NO: 8936 - protein, 13 aa, synthetic construct
  REGION 1..13: note = Nucleolin (451-463)
GTEIDGRSISLYY

SEQ ID NO: 8937 - protein, 10 aa, synthetic construct
  REGION 1..10: note = MHC class I polypeptide-related sequence A (50-59)
HLDGQPFLRY

SEQ ID NO: 8938 - protein, 10 aa, synthetic construct
  REGION 1..10: note = Zinc finger protein with KRAB and SCAN domains 5 (234-243)
HLDQSQKSLY

SEQ ID NO: 8939 - protein, 9 aa, synthetic construct
  REGION 1..9: note = Zinc finger CW-type PWWP domain protein 1 (230-238)
HLDSLPSKY

SEQ ID NO: 8940 - protein, 12 aa, synthetic construct
  REGION 1..12: note = Conserved oligomeric Golgi complex subunit 6 (528-539)
HLDTLINEQASY

SEQ ID NO: 8941 - protein, 10 aa, synthetic construct
  REGION 1..10: note = Unconventional myosin-Va (41-50)
HLEEGKDLEY

SEQ ID NO: 8942 - protein, 10 aa, synthetic construct
  REGION 1..10: note = N6-adenosine-methyltransferase 70 kDa subunit (322-331)
HMDTCKYVHY

SEQ ID NO: 8943 - protein, 10 aa, synthetic construct
  REGION 1..10: note = 5'-nucleotidase domain-containing protein 1 (266-275)
HSDIFPARHY

SEQ ID NO: 8944 - protein, 9 aa, synthetic construct
  REGION 1..9: note = Endoribonuclease Dicer (118-126)
HSDLKVGEY

SEQ ID NO: 8945 - protein, 10 aa, synthetic construct
  REGION 1..10: note = Arylamine N-acetyltransferase 1 (177-186)
HSDLLEDSKY

SEQ ID NO: 8946 - protein, 12 aa, synthetic construct
  REGION 1..12: note = Protein virilizer homolog (783-794)
HSDLLGTLHNLY

SEQ ID NO: 8947 - protein, 11 aa, synthetic construct
  REGION 1..11: note = CD82 antigen (257-267)
HSEDYSKVPKY

SEQ ID NO: 8948 - protein, 12 aa, synthetic construct
  REGION 1..12: note = Ribonucleoside-diphosphate reductase subunit M2 B (68-79)
HSEMYSLLIDTY

SEQ ID NO: 8949 - protein, 9 aa, synthetic construct
  REGION 1..9: note = Histone deacetylase 5 (338-346)
HSEYHTLLY

SEQ ID NO: 8950 - protein, 12 aa, synthetic construct
  REGION 1..12: note = Acyl-CoA desaturase (302-313)
HSFPYDYSASEY

SEQ ID NO: 8951 - protein, 10 aa, synthetic construct
  REGION 1..10: note = Elongation factor Tu, mitochondrial (124-133)
HTDCPGHADY

SEQ ID NO: 8952 - protein, 10 aa, synthetic construct
  REGION 1..10: note = Lathosterol oxidase (229-238)
HTDHHMFFDY

SEQ ID NO: 8953 - protein, 10 aa, synthetic construct
  REGION 1..10: note = NADPH-cytochrome P450 reductase (250-259)
HTDIDAAKVY

SEQ ID NO: 8954 - protein, 10 aa, synthetic construct
  REGION 1..10: note = Synembryn-B (153-162)
HTDIRSQLRY

SEQ ID NO: 8955 - protein, 10 aa, synthetic construct
  REGION 1..10: note = Mitochondrial enolase superfamily member 1 (29-38)
HTDPDYSAAY

SEQ ID NO: 8956 - protein, 13 aa, synthetic construct
  REGION 1..13: note = Serine/threonine-protein kinase N2 (593-605)
HTDVFSEPRAVFY

SEQ ID NO: 8957 - protein, 11 aa, synthetic construct
  REGION 1..11: note = RNA polymerase II subunit A C-terminal domain phosphatase (601-611)
HTDYYAKYDRY

SEQ ID NO: 8958 - protein, 13 aa, synthetic construct
  REGION 1..13: note = Hermansky-Pudlak syndrome 1 protein (98-110)
HTESEGDLRRKLY

SEQ ID NO: 8959 - protein, 9 aa, synthetic construct
  REGION 1..9: note = Protein 4.1 (461-469)
HTETKTITY

SEQ ID NO: 8960 - protein, 11 aa, synthetic construct
  REGION 1..11: note = Histone-lysine N-methyltransferase, H3 lysine-79 specific (273-283)
HTIDRTILENY

SEQ ID NO: 8961 - protein, 11 aa, synthetic construct
  REGION 1..11: note = Lysine-specific demethylase 2A (212-222)
HVDFGGTSVWY

SEQ ID NO: 8962 - protein, 12 aa, synthetic construct
  REGION 1..12: note = MICOS complex subunit MIC27 (90-101)
IMDTVQFGKDAY

SEQ ID NO: 8963 - protein, 13 aa, synthetic construct
  REGION 1..13: note = TP53-regulating kinase (188-200)
ISALPEDKGVDLY

SEQ ID NO: 8964 - protein, 13 aa, synthetic construct
  REGION 1..13: note = Tubulin beta-4B chain (24-36)
ISDEHGIDPTGTY

SEQ ID NO: 8965 - protein, 12 aa, synthetic construct
  REGION 1..12: note = Integrin alpha-V (214-225)
ISDQVAEIVSKY

SEQ ID NO: 8966 - protein, 9 aa, synthetic construct
  REGION 1..9: note = Reticulon-4 (90-98)
ISEELVQKY

SEQ ID NO: 8967 - protein, 13 aa, synthetic construct
  REGION 1..13: note = Adenosylhomocysteinase (155-167)
ISEETTTGVHNLY

SEQ ID NO: 8968 - protein, 9 aa, synthetic construct
  REGION 1..9: note = Protein disulfide-isomerase A5 (349-357)
ISEFPTLKY

SEQ ID NO: 8969 - protein, 11 aa, synthetic construct
  REGION 1..11: note = ATP-citrate synthase (6-16)
ISEQTGKELLY

SEQ ID NO: 8970 - protein, 11 aa, synthetic construct
  REGION 1..11: note = Oligoribonuclease, mitochondrial (168-178)
ISESIKELQFY

SEQ ID NO: 8971 - protein, 11 aa, synthetic construct
  REGION 1..11: note = Protein furry homolog-like (546-556)
ISETPIIGNKY

SEQ ID NO: 8972 - protein, 9 aa, synthetic construct
  REGION 1..9: note = Bone morphogenetic protein receptor type-2 (374-382)
ISEVGTIRY

SEQ ID NO: 8973 - protein, 11 aa, synthetic construct
  REGION 1..11: note = Beta-hexosaminidase subunit alpha (436-446)
ISYGPDWKDFY

SEQ ID NO: 8974 - protein, 11 aa, synthetic construct
  REGION 1..11: note = N-alpha-acetyltransferase 16, NatA auxiliary subunit (155-165)
ITDDQFDFHTY

SEQ ID NO: 8975 - protein, 10 aa, synthetic construct
  REGION 1..10: note = Trophinin (580-589)
ITDEFVKQKY

SEQ ID NO: 8976 - protein, 8 aa, synthetic construct
  REGION 1..8: note = Vacuolar protein sorting-associated protein 13C (155-162)
ITDIHIKY

SEQ ID NO: 8977 - protein, 13 aa, synthetic construct
  REGION 1..13: note = Filamin-A (1793-1805)
ITDNKDGTVTVRY

SEQ ID NO: 8978 - protein, 14 aa, synthetic construct
  REGION 1..14: note = Sorting nexin-1 (149-162)
ITDPEKIGDGMNAY

SEQ ID NO: 8979 - protein, 12 aa, synthetic construct
  REGION 1..12: note = F-box/LRR-repeat protein 14 (130-141)
ITDSSLGRIAQY

SEQ ID NO: 8980 - protein, 13 aa, synthetic construct
  REGION 1..13: note = Coatomer subunit gamma-1 (131-143)
ITDSTMLQAIERY

SEQ ID NO: 8981 - protein, 12 aa, synthetic construct
  REGION 1..12: note = F-box/LRR-repeat protein 17 (206-217)
ITDYALIAIGRY

SEQ ID NO: 8982 - protein, 13 aa, synthetic construct
  REGION 1..13: note = T-complex protein 1 subunit gamma (291-303)
ITEKGISDLAQHY

SEQ ID NO: 8983 - protein, 11 aa, synthetic construct
  REGION 1..11: note = Tubulin alpha-1C chain (58-68)
ITGKEDAANNY

SEQ ID NO: 8984 - protein, 10 aa, synthetic construct
  REGION 1..10: note = Transmembrane protein 218 (3-12)
IVDDFFIGRY

SEQ ID NO: 8985 - protein, 9 aa, synthetic construct
  REGION 1..9: note = Protein unc-13 homolog B (372-380)
IVDEFAMRY

SEQ ID NO: 8986 - protein, 12 aa, synthetic construct
  REGION 1..12: note = 116 kDa U5 small nuclear ribonucleoprotein component (281-292)
IVDEVNGLISMY

SEQ ID NO: 8987 - protein, 9 aa, synthetic construct
  REGION 1..9: note = Putative eukaryotic translation initiation factor 2 subunit 3-like protein (421-429)
KADLGKIVL

SEQ ID NO: 8988 - protein, 14 aa, synthetic construct
  REGION 1..14: note = Heterogeneous nuclear ribonucleoprotein L (552-565)
KSDALETLGFLNHY

SEQ ID NO: 8989 - protein, 11 aa, synthetic construct
  REGION 1..11: note = Heterogeneous nuclear ribonucleoprotein C-like 1 (30-40)
KSDVEAIFSKY

SEQ ID NO: 8990 - protein, 11 aa, synthetic construct
  REGION 1..11: note = RNA-binding protein Raly (35-45)
KSDVETIFSKY

SEQ ID NO: 8991 - protein, 10 aa, synthetic construct
  REGION 1..10: note = Interferon-induced protein with tetratricopeptide repeats 1 (393-402)
KSDVNAIIHY

SEQ ID NO: 8992 - protein, 11 aa, synthetic construct
  REGION 1..11: note = Ras GTPase-activating protein-binding protein 1 (353-363)
KSELKDFFQSY

SEQ ID NO: 8993 - protein, 10 aa, synthetic construct
  REGION 1..10: note = Mitochondrial import receptor subunit TOM70 (576-585)
KSEMEMAHLY

SEQ ID NO: 8994 - protein, 9 aa, synthetic construct
  REGION 1..9: note = Epidermal growth factor receptor substrate 15-like 1 (284-292)
KTDLDLDGY

SEQ ID NO: 8995 - protein, 12 aa, synthetic construct
  REGION 1..12: note = Myosin-9 (289-300)
KTDLLLEPYNKY

SEQ ID NO: 8996 - protein, 11 aa, synthetic construct
  REGION 1..11: note = Unconventional myosin-Id (307-317)
KTDMVEKALLY

SEQ ID NO: 8997 - protein, 12 aa, synthetic construct
  REGION 1..12: note = RNA polymerase II-associated factor 1 homolog (123-134)
KTEYISTEFNRY

SEQ ID NO: 8998 - protein, 11 aa, synthetic construct
  REGION 1..11: note = Cytokine receptor-like factor 3 (197-207)
KVDDDFTAQDY

SEQ ID NO: 8999 - protein, 9 aa, synthetic construct
  REGION 1..9: note = X-ray repair cross-complementing protein 5 (221-229)
KVDEEQMKY

SEQ ID NO: 9000 - protein, 9 aa, synthetic construct
  REGION 1..9: note Dolichyl-diphosphooligosaccharide-proteinosyltransferase 48 kDa subunit (391-399)
KVDYNRLGY

SEQ ID NO: 9001 - protein, 10 aa, synthetic construct
  REGION 1..10: note = Cytosol aminopeptidase (431-440)
LADVNNIGKY

SEQ ID NO: 9002 - protein, 11 aa, synthetic construct
  REGION 1..11: note = Double-stranded RNA-specific adenosine deaminase (334-344)
LIDMERQGDVY

SEQ ID NO: 9003 - protein, 10 aa, synthetic construct
  REGION 1..10: note = Annexin A2 (190-199)
LIDQDARDLY

SEQ ID NO: 9004 - protein, 11 aa, synthetic construct
  REGION 1..11: note = Protein zyg-11 homolog B (425-435)
LIEEGGLQHLY

SEQ ID NO: 9005 - protein, 14 aa, synthetic construct
  REGION 1..14: note = N-acetylglucosamine-1-phosphotransferase subunits alpha/beta (903-916)
LLDEEESLKTQLAY

SEQ ID NO: 9006 - protein, 10 aa, synthetic construct
  REGION 1..10: note = Protein transport protein Sec61 subunit alpha isoform 1 (164-173)
LLDELLQKGY

SEQ ID NO: 9007 - protein, 12 aa, synthetic construct
  REGION 1..12: note = Mitogen-activated protein kinase kinase kinase 7 (547-558)
LLDENKSLSTYY

SEQ ID NO: 9008 - protein, 11 aa, synthetic construct
  REGION 1..11: note = Syntaxin-binding protein 2 (253-263)
LLDIEQDTYRY

SEQ ID NO: 9009 - protein, 10 aa, synthetic construct
  REGION 1..10: note = Intraflagellar transport protein 43 homolog (4-13)
LLDLDEELRY

SEQ ID NO: 9010 - protein, 10 aa, synthetic construct
  REGION 1..10: note = Zinc finger protein 627 (79-88)
LLDPSQKNLY

SEQ ID NO: 9011 - protein, 10 aa, synthetic construct
  REGION 1..10: note = Zinc finger protein 614 (24-33)
LLDTAQKNLY

SEQ ID NO: 9012 - protein, 10 aa, synthetic construct
  REGION 1..10: note = Zinc finger protein 324B (17-26)
LLDTAQRALY

SEQ ID NO: 9013 - protein, 12 aa, synthetic construct
  REGION 1..12: note = S100P-binding protein (91-102)
LLDTPREKNSSY

SEQ ID NO: 9014 - protein, 13 aa, synthetic construct
  REGION 1..13: note = Chromodomain-helicase-DNA-binding protein 4 (1078-1090)
LLEDFLEHEGYKY

SEQ ID NO: 9015 - protein, 9 aa, synthetic construct
  REGION 1..9: note = SWI/SNF-related matrix-associated actin-dependent regulator of chromatin subfamily A member 5 (784-792)
LLEKEILFY

SEQ ID NO: 9016 - protein, 10 aa, synthetic construct
  REGION 1..10: note = Early endosome antigen 1 (541-550)
LLEKEREDLY

SEQ ID NO: 9017 - protein, 11 aa, synthetic construct
  REGION 1..11: note = E3 ubiquitin-protein ligase HUWE1 (982-992)
LLENDVSTLGY

SEQ ID NO: 9018 - protein, 12 aa, synthetic construct
  REGION 1..12: note = Ankyrin repeat and LEM domain-containing protein 2 (110-121)
LLEQGGRLSSFY

SEQ ID NO: 9019 - protein, 14 aa, synthetic construct
  REGION 1..14: note = Phospholipid scramblase 1 (116-129)
LLEVLTGFETNNKY

SEQ ID NO: 9020 - protein, 10 aa, synthetic construct
  REGION 1..10: note = Signal recognition particle subunit SRP68 (128-137)
LMDAERAWSY

SEQ ID NO: 9021 - protein, 11 aa, synthetic construct
  REGION 1..11: note = Sialidase-1 (232-242)
LSDDHGASWRY

SEQ ID NO: 9022 - protein, 8 aa, synthetic construct
  REGION 1..8: note = Melanoma inhibitory activity protein 3 (136-143)
LSDEAIKY

SEQ ID NO: 9023 - protein, 9 aa, synthetic construct
  REGION 1..9: note = FACT complex subunit SSRP1 (85-93)
LSDFFKTHY

SEQ ID NO: 9024 - protein, 10 aa, synthetic construct
  REGION 1..10: note = Inhibitor of nuclear factor kappa-B kinase subunit beta (67-76)
LSDIASALRY

SEQ ID NO: 9025 - protein, 9 aa, synthetic construct
  REGION 1..9: note = Deoxyribose-phosphate aldolase (312-320)
LSDIERQIY

SEQ ID NO: 9026 - protein, 10 aa, synthetic construct
  REGION 1..10: note = Inhibitor of nuclear factor kappa-B kinase subunit alpha (94-103)
LSDIGSGIRY

SEQ ID NO: 9027 - protein, 9 aa, synthetic construct
  REGION 1..9: note = Rho-related BTB domain-containing protein 3 (340-348)
LSDILRFIY

SEQ ID NO: 9028 - protein, 13 aa, synthetic construct
  REGION 1..13: note = DnaJ homolog subfamily C member 11 (69-81)
LSDPQTRAIYDIY

SEQ ID NO: 9029 - protein, 10 aa, synthetic construct
  REGION 1..10: note = Ribosomal protein S6 kinase delta-1 (155-164)
LSDPSGPKSY

SEQ ID NO: 9030 - protein, 12 aa, synthetic construct
  REGION 1..12: note = Nucleoporin NDC1 (58-69)
LSDSFSDLYSSY

SEQ ID NO: 9031 - protein, 11 aa, synthetic construct
  REGION 1..11: note = Importin-7 (681-691)
LSDTKYLEMIY

SEQ ID NO: 9032 - protein, 12 aa, synthetic construct
  REGION 1..12: note = DNA polymerase zeta catalytic subunit (2423-2434)
LSDWFDNKTDLY

SEQ ID NO: 9033 - protein, 11 aa, synthetic construct
  REGION 1..11: note = Cyclin-dependent kinase 2-associated protein 1 (39-49)
LSDYGPPSLGY

SEQ ID NO: 9034 - protein, 9 aa, synthetic construct
  REGION 1..9: note = PAS domain-containing serine/threonine-protein kinase (64-72)
LSEDRWSSY

SEQ ID NO: 9035 - protein, 9 aa, synthetic construct
  REGION 1..9: note = Vacuolar protein sorting-associated protein 18 homolog (306-314)
LSEERVWEY

SEQ ID NO: 9036 - protein, 9 aa, synthetic construct
  REGION 1..9: note = Transmembrane and TPR repeat-containing protein 3 (84-92)
LSELKPMSY

SEQ ID NO: 9037 - protein, 12 aa, synthetic construct
  REGION 1..12: note = DmX-like protein 1 (783-794)
LSELSNPEISKY

SEQ ID NO: 9038 - protein, 9 aa, synthetic construct
  REGION 1..9: note = Alpha/beta hydrolase domain-containing protein 17B (50-58)
LSERADWQY

SEQ ID NO: 9039 - protein, 9 aa, synthetic construct
  REGION 1..9: note = Immediate early response gene 5-like protein (48-56)
LSERYAELY

SEQ ID NO: 9040 - protein, 10 aa, synthetic construct
  REGION 1..10: note = Signal peptidase complex subunit 1 (5-14)
LSSLPTQMDY

SEQ ID NO: 9041 - protein, 15 aa, synthetic construct
  REGION 1..15: note = Coatomer subunit epsilon (43-57)
LSSPERDVERDVFLY

SEQ ID NO: 9042 - protein, 11 aa, synthetic construct
  REGION 1..11: note = 26S proteasome non-ATPase regulatory subunit 2 (391-401)
LTDDGNKWLYK

SEQ ID NO: 9043 - protein, 9 aa, synthetic construct
  REGION 1..9: note = Casein kinase II subunit alpha' (129-137)
LTDFDIRFY

SEQ ID NO: 9044 - protein, 8 aa, synthetic construct
  REGION 1..8: note = Lysine-tRNA ligase (133-140)
LTDFIQKY

SEQ ID NO: 9045 - protein, 9 aa, synthetic construct
  REGION 1..9: note = DNA excision repair protein ERCC-6-like 2 (214-222)
LTDFQKAVY

SEQ ID NO: 9046 - protein, 10 aa, synthetic construct
  REGION 1..10: note = Thyroid adenoma-associated protein (45-54)
LTDGVSQIHY

SEQ ID NO: 9047 - protein, 11 aa, synthetic construct
  REGION 1..11: note = 3'(2'),5'-bisphosphate nucleotidase 1 (262-272)
LTDIHGNVLQY

SEQ ID NO: 9048 - protein, 10 aa, synthetic construct
  REGION 1..10: note = Myotubularin-related protein 5 (70-79)
LTDINSERHY

SEQ ID NO: 9049 - protein, 12 aa, synthetic construct
  REGION 1..12: note = E3 ubiquitin-protein ligase UBR4 (278-289)
LTDKAVKDYSAY

SEQ ID NO: 9050 - protein, 11 aa, synthetic construct
  REGION 1..11: note = MAP kinase-activating death domain protein (81-91)
LTDKDTGVTRY

SEQ ID NO: 9051 - protein, 10 aa, synthetic construct
  REGION 1..10: note = Dynactin subunit 2 (168-177)
LTDPDGALAK

SEQ ID NO: 9052 - protein, 10 aa, synthetic construct
  REGION 1..10: note = Mucosa-associated lymphoid tissue lymphoma translocation protein 1 (876-885)
LTDPIQGTEY

SEQ ID NO: 9053 - protein, 10 aa, synthetic construct
  REGION 1..10: note = Putative deoxyribonuclease TATDN1 (13-22)
LTDPMFRGIY

SEQ ID NO: 9054 - protein, 9 aa, synthetic construct
  REGION 1..9: note = Interferon regulatory factor 3 (252-260)
LTDRGVMSY

SEQ ID NO: 9055 - protein, 10 aa, synthetic construct
  REGION 1..10: note = Tubulin polyglutamylase complex subunit 2 (125-134)
LTDTFTAYYR

SEQ ID NO: 9056 - protein, 13 aa, synthetic construct
  REGION 1..13: note = Peroxisomal multifunctional enzyme type 2 (493-505)
LTDTTSLNQAALY

SEQ ID NO: 9057 - protein, 9 aa, synthetic construct
  REGION 1..9: note = DNA polymerase zeta catalytic subunit (928-936)
LTEEKMELY

SEQ ID NO: 9058 - protein, 11 aa, synthetic construct
  REGION 1..11: note = Regulator of microtubule dynamics protein 3 (316-326)
LTEEVSEKKSY

SEQ ID NO: 9059 - protein, 11 aa, synthetic construct
  REGION 1..11: note = Protein FAM65B (122-132)
LTEINRSFKEY

SEQ ID NO: 9060 - protein, 13 aa, synthetic construct
  REGION 1..13: note = Probable histidine-tRNA ligase, mitochondrial (104-116)
LTEKYGEDSGLMY

SEQ ID NO: 9061 - protein, 10 aa, synthetic construct
  REGION 1..10: note = ATP synthase subunit alpha, mitochondrial (467-476)
LTELLKQGQY

SEQ ID NO: 9062 - protein, 9 aa, synthetic construct
  REGION 1..9: note = 39S ribosomal protein L52, mitochondrial (43-51)
LTELPDWSY

SEQ ID NO: 9063 - protein, 9 aa, synthetic construct
  REGION 1..9: note = Tectonin beta-propeller repeat-containing protein 2 (950-958)
LTEQRALLY

SEQ ID NO: 9064 - protein, 10 aa, synthetic construct
  REGION 1..10: note = 7SK snRNA methylphosphate capping enzyme (629-638)
LTETIYKNYY

SEQ ID NO: 9065 - protein, 13 aa, synthetic construct
  REGION 1..13: note = HLA class I histocompatibility antigen, B-8 alpha chain (19-31)
LTETWAGSHSMRY

SEQ ID NO: 9066 - protein, 10 aa, synthetic construct
  REGION 1..10: note = Proline-rich nuclear receptor coactivator 1 (270-279)
LTEVSQKENY

SEQ ID NO: 9067 - protein, 13 aa, synthetic construct
  REGION 1..13: note = TOX high mobility group box family member 4 (104-116)
LTMDLDHSIGTQY

SEQ ID NO: 9068 - protein, 11 aa, synthetic construct
  REGION 1..11: note = Ubiquinone biosynthesis protein COQ9, mitochondrial (105-115)
LTSMVDDMWHY

SEQ ID NO: 9069 - protein, 10 aa, synthetic construct
  REGION 1..10: note = Clustered mitochondria protein homolog (608-617)
LVDAFVEHRY

SEQ ID NO: 9070 - protein, 12 aa, synthetic construct
  REGION 1..12: note = Poly (ADP-ribose) polymerase 1 (559-570)
LVDIVKGTNSYY

SEQ ID NO: 9071 - protein, 9 aa, synthetic construct
  REGION 1..9: note = Alsin (683-691)
LVDKNIMGY

SEQ ID NO: 9072 - protein, 13 aa, synthetic construct
  REGION 1..13: note = Dexamethasone-induced protein (67-79)
LVDLGVLSDPGSG

SEQ ID NO: 9073 - protein, 15 aa, synthetic construct
  REGION 1..15: note = Dexamethasone-induced protein (67-81)
LVDLGVLSDPGSGLY

SEQ ID NO: 9074 - protein, 9 aa, synthetic construct
  REGION 1..9: note = Zinc finger FYVE domain-containing protein 16 (1229-1237)
LVDLRNYQY

SEQ ID NO: 9075 - protein, 10 aa, synthetic construct
  REGION 1..10: note = Semaphorin-4F (69-78)
LVDPASHTLY

SEQ ID NO: 9076 - protein, 10 aa, synthetic construct
  REGION 1..10: note = Fatty acid-binding protein, epidermal (13-22)
LVDSKGFDEY

SEQ ID NO: 9077 - protein, 9 aa, synthetic construct
  REGION 1..9: note = Probable C-mannosyltransferase DPY19L1 (398-406)
MEKETPLRY

SEQ ID NO: 9078 - protein, 10 aa, synthetic construct
  REGION 1..10: note = MICOS complex subunit MIC60 (261-270)
MIDETRNSLY

SEQ ID NO: 9079 - protein, 9 aa, synthetic construct
  REGION 1..9: note = SWI/SNF-related matrix-associated actin-dependent regulator of chromatin subfamily D member 2 (247-255)
MLDHQPPQY

SEQ ID NO: 9080 - protein, 9 aa, synthetic construct
  REGION 1..9: note = Acylamino-acid-releasing enzyme (544-552)
MLDKSPIRY

SEQ ID NO: 9081 - protein, 9 aa, synthetic construct
  REGION 1..9: note = Cytoplasmic dynein 1 heavy chain 1 (3043-3051)
MLDSHEELY

SEQ ID NO: 9082 - protein, 12 aa, synthetic construct
  REGION 1..12: note = Zinc finger MYM-type protein 4 (480-491)
MSDGSIRNFCSY

SEQ ID NO: 9083 - protein, 10 aa, synthetic construct
  REGION 1..10: note = YTH domain-containing family protein 3 (52-61)
MSDPYMPSYY

SEQ ID NO: 9084 - protein, 8 aa, synthetic construct
  REGION 1..8: note = trabeculin-alpha (2316-2323)
MSDVNLKY

SEQ ID NO: 9085 - protein, 10 aa, synthetic construct
  REGION 1..10: note = A-kinase anchor protein 6 (990-999)
MSEEQQQHLY

SEQ ID NO: 9086 - protein, 9 aa, synthetic construct
  REGION 1..9: note = Lambda-crystallin homolog (224-232)
MSEGLGMRY

SEQ ID NO: 9087 - protein, 10 aa, synthetic construct
  REGION 1..10: note = Talin-1 (289-298)
MSEIEAKVRY

SEQ ID NO: 9088 - protein, 13 aa, synthetic construct
  REGION 1..13: note = Kelch-like protein 13 (423-435)
MSEPHYGHAGTVY

SEQ ID NO: 9089 - protein, 9 aa, synthetic construct
  REGION 1..9: note = Antigen KI-67 (1611-1619)
MTDDKITEV

SEQ ID NO: 9090 - protein, 11 aa, synthetic construct
  REGION 1..11: note = Telomerase protein component 1 (365-375)
MTDKFAQFDEY

SEQ ID NO: 9091 - protein, 12 aa, synthetic construct
  REGION 1..12: note = DNA helicase B (287-298)
MTDLEKNALIMY

SEQ ID NO: 9092 - protein, 13 aa, synthetic construct
  REGION 1..13: note = TAR DNA-binding protein 43 (202-214)
MTEDELREFFSQY

SEQ ID NO: 9093 - protein, 13 aa, synthetic construct
  REGION 1..13: note = Muskelin (98-110)
MTELLSSGLKNDY

SEQ ID NO: 9094 - protein, 10 aa, synthetic construct
  REGION 1..10: note = Presenilin-1 (1-10)
MTELPAPLSY

SEQ ID NO: 9095 - protein, 10 aa, synthetic construct
  REGION 1..10: note = Prolyl endopeptidase (67-76)
MTELYDYPKY

SEQ ID NO: 9096 - protein, 9 aa, synthetic construct
  REGION 1..9: note = E3 ubiquitin-protein ligase UBR5 (2723-2731)
MTERQDLVY

SEQ ID NO: 9097 - protein, 10 aa, synthetic construct
  REGION 1..10: note = Protein Spindly (51-60)
MTESYEQEKY

SEQ ID NO: 9098 - protein, 13 aa, synthetic construct
  REGION 1..13: note = Zinc finger protein 428 (44-56)
MTETREPAETGGY

SEQ ID NO: 9099 - protein, 12 aa, synthetic construct
  REGION 1..12: note = NF-kappa-B-repressing factor (190-201)
MTSGSDKINYTY

SEQ ID NO: 9100 - protein, 9 aa, synthetic construct
  REGION 1..9: note = Probable ATP-dependent RNA helicase DHX35 (162-170)
MVDPLLTKY

SEQ ID NO: 9101 - protein, 11 aa, synthetic construct
  REGION 1..11: note = Cytochrome c oxidase subunit 1 (484-494)
MVEEPSMNLEW

SEQ ID NO: 9102 - protein, 12 aa, synthetic construct
  REGION 1..12: note = Lysocardiolipin acyltransferase 1 (88-99)
NLDAVHDITVAY

SEQ ID NO: 9103 - protein, 12 aa, synthetic construct
  REGION 1..12: note = Prolyl 3-hydroxylase OGFOD1 (84-95)
NLDFHEKYNDLY

SEQ ID NO: 9104 - protein, 9 aa, synthetic construct
  REGION 1..9: note = Tubulin alpha-1C chain (181-189)
NLDIERPTY

SEQ ID NO: 9105 - protein, 12 aa, synthetic construct
  REGION 1..12: note = Splicing factor 3B subunit 4 (106-117)
NLDPEIDEKLLY

SEQ ID NO: 9106 - protein, 9 aa, synthetic construct
  REGION 1..9: note = N-alpha-acetyltransferase 20 (7-15)
NLDPLTETY

SEQ ID NO: 9107 - protein, 10 aa, synthetic construct
  REGION 1..10: note = E3 ubiquitin-protein ligase RNF135 (381-390)
NLEEGKLAFY

SEQ ID NO: 9108 - protein, 9 aa, synthetic construct
  REGION 1..9: note = Basigin (111-119)
NMEADPGQY

SEQ ID NO: 9109 - protein, 14 aa, synthetic construct
  REGION 1..14: note = Ribonucleoside-diphosphate reductase large subunit (35-48)
NSAIIYDRDFSYNY

SEQ ID NO: 9110 - protein, 10 aa, synthetic construct
  REGION 1..10: note = Thrombospondin-3 (640-649)
NSDPGLAVGY

SEQ ID NO: 9111 - protein, 12 aa, synthetic construct
  REGION 1..12: note = NADH-ubiquinone oxidoreductase chain 5 (109-120)
NSDPNINQFFKY

SEQ ID NO: 9112 - protein, 11 aa, synthetic construct
  REGION 1..11: note = 52 kDa repressor of the inhibitor of the protein kinase (452-462)
NSDTNIRWNNY

SEQ ID NO: 9113 - protein, 9 aa, synthetic construct
  REGION 1..9: note = Homeodomain-interacting protein kinase 1 (604-612)
NSDVSLLNY

SEQ ID NO: 9114 - protein, 10 aa, synthetic construct
  REGION 1..10: note = Serine/threonine-protein kinase RIO3 (378-387)
NSEEMKEAYY

SEQ ID NO: 9115 - protein, 14 aa, synthetic construct
  REGION 1..14: note = Cerebellar degeneration-related protein 2 (286-299)
NSELEQQLGATGAY

SEQ ID NO: 9116 - protein, 10 aa, synthetic construct
  REGION 1..10: note = YY1-associated protein 1 (320-329)
NSELGSETRY

SEQ ID NO: 9117 - protein, 9 aa, synthetic construct
  REGION 1..9: note = Myosin-14 (29-37)
NSELLNDRY

SEQ ID NO: 9118 - protein, 9 aa, synthetic construct
  REGION 1..9: note = Thymidylate synthase (205-213)
NSELSCQLY

SEQ ID NO: 9119 - protein, 14 aa, synthetic construct
  REGION 1..14: note = Neuroblastoma-amplified sequence (1978-1991)
NSEQETLQKYSHLY

SEQ ID NO: 9120 - protein, 13 aa, synthetic construct
  REGION 1..13: note = Cytochrome c oxidase subunit 1 (360-372)
NSSLDIVLHDTYY

SEQ ID NO: 9121 - protein, 11 aa, synthetic construct
  REGION 1..11: note = LIM domain and actin-binding protein 1 (82-92)
NTDASGKIEKY

SEQ ID NO: 9122 - protein, 11 aa, synthetic construct
  REGION 1..11: note = Zinc finger protein 462 (265-275)
NTDFGDSGRLY

SEQ ID NO: 9123 - protein, 12 aa, synthetic construct
  REGION 1..12: note = Zinc finger protein 462 (265-276)
NTDFGDSGRLYY

SEQ ID NO: 9124 - protein, 9 aa, synthetic construct
  REGION 1..9: note = Protein YIPF5 (8-16)
NTDFYQTSY

SEQ ID NO: 9125 - protein, 9 aa, synthetic construct
  REGION 1..9: note = 2-oxoisovalerate dehydrogenase subunit alpha, mitochondrial (83-91)
NTDLVFGQY

SEQ ID NO: 9126 - protein, 11 aa, synthetic construct
  REGION 1..11: note = Protein TASOR (346-356)
NTDRNIDKYNY

SEQ ID NO: 9127 - protein, 12 aa, synthetic construct
  REGION 1..12: note = 26S proteasome non-ATPase regulatory subunit 13 (227-238)
NTDRQWLIDTLY

SEQ ID NO: 9128 - protein, 11 aa, synthetic construct
  REGION 1..11: note = Pericentriolar material 1 protein (1414-1424)
NTDYLRQRALY

SEQ ID NO: 9129 - protein, 12 aa, synthetic construct
  REGION 1..12: note = DnaJ homolog subfamily C member 3 (221-232)
NTEAFYKISTLY

SEQ ID NO: 9130 - protein, 13 aa, synthetic construct
  REGION 1..13: note = Polypyrimidine tract-binding protein 1 (102-114)
NTEEAANTMVNYY

SEQ ID NO: 9131 - protein, 13 aa, synthetic construct
  REGION 1..13: note = DNA-directed RNA polymerase I subunit RPA1 (1579-1591)
NTEGINLPELFKY

SEQ ID NO: 9132 - protein, 9 aa, synthetic construct
  REGION 1..9: note = Putative SMEK homolog 3 (187-195)
NTEGLHHLY

SEQ ID NO: 9133 - protein, 13 aa, synthetic construct
  REGION 1..13: note = Condensin complex subunit 1 (509-521)
NTETTEDVKGRIY

SEQ ID NO: 9134 - protein, 10 aa, synthetic construct
  REGION 1..10: note = Charged multivesicular body protein 4b (102-111)
NTEVLKNMGY

SEQ ID NO: 9135 - protein, 13 aa, synthetic construct
  REGION 1..13: note = Solute carrier family 25 member 46 (374-386)
NTIRQEEGVFGFY

SEQ ID NO: 9136 - protein, 13 aa, synthetic construct
  REGION 1..13: note = Microphthalmia-associated transcription factor (237-249)
NTLPVSGNLIDLY

SEQ ID NO: 9137 - protein, 11 aa, synthetic construct
  REGION 1..11: note = AT-rich interactive domain-containing protein 1A (858-868)
NTSDMMGRMSY

SEQ ID NO: 9138 - protein, 13 aa, synthetic construct
  REGION 1..13: note = Lysine-specific demethylase 5A (460-472)
NVDISGMKVPWLY

SEQ ID NO: 9139 - protein, 12 aa, synthetic construct
  REGION 1..12: note = Anaphase-promoting complex subunit 7 (270-281)
NVDLLGSLADLY

SEQ ID NO: 9140 - protein, 9 aa, synthetic construct
  REGION 1..9: note = 60S ribosomal protein L13a (184-192)
NVEKKIDKY

SEQ ID NO: 9141 - protein, 10 aa, synthetic construct
  REGION 1..10: note = Unhealthy ribosome biogenesis protein 2 homolog (1354-1363)
PLDHLKPLEY

SEQ ID NO: 9142 - protein, 10 aa, synthetic construct
  REGION 1..10: note = Nardilysin (107-116)
PSDPKQYRYI

SEQ ID NO: 9143 - protein, 11 aa, synthetic construct
  REGION 1..11: note = Probable 28S rRNA (cytosine-C(5))-methyltransferase (291-301)
PSDPRYHEVHY

SEQ ID NO: 9144 - protein, 9 aa, synthetic construct
  REGION 1..9: note = Vesicle-associated membrane protein 7 (37-45)
PSENNKLTY

SEQ ID NO: 9145 - protein, 12 aa, synthetic construct
  REGION 1..12: note = ELAV-like protein 1 (98-109)
PSSEVIKDANLY

SEQ ID NO: 9146 - protein, 9 aa, synthetic construct
  REGION 1..9: note = Copine-1 (299-307)
PSSPDSLHY

SEQ ID NO: 9147 - protein, 9 aa, synthetic construct
  REGION 1..9: note = Leucyl-cystinyl aminopeptidase (155-163)
PTAVVPLRY

SEQ ID NO: 9148 - protein, 12 aa, synthetic construct
  REGION 1..12: note = Mitogen-activated protein kinase kinase kinase kinase 2 (799-810)
PTDNPEAHSNLY

SEQ ID NO: 9149 - protein, 11 aa, synthetic construct
  REGION 1..11: note = GRAM domain-containing protein 4 (500-510)
PTDYIRNGVLY

SEQ ID NO: 9150 - protein, 10 aa, synthetic construct
  REGION 1..10: note = Vam6/Vps39-like protein (288-297)
PTDYRKQLQY

SEQ ID NO: 9151 - protein, 9 aa, synthetic construct
  REGION 1..9: note = Syntaxin-binding protein 5 (645-653)
PTEIQRLTY

SEQ ID NO: 9152 - protein, 12 aa, synthetic construct
  REGION 1..12: note = Mitochondrial import receptor subunit TOM70 (145-156)
PTEKNVDLSTFY

SEQ ID NO: 9153 - protein, 12 aa, synthetic construct
  REGION 1..12: note = Nuclear factor erythroid 2-related factor 1 (309-320)
PVEEFNELLSKY

SEQ ID NO: 9154 - protein, 11 aa, synthetic construct
  REGION 1..11: note = Uncharacterized protein KIAA2013 (534-544)
QADPDVLHNSY

SEQ ID NO: 9155 - protein, 10 aa, synthetic construct
  REGION 1..10: note = Lysophospholipid acyltransferase LPCAT4 (420-429)
QAEGPNRLLY

SEQ ID NO: 9156 - protein, 13 aa, synthetic construct
  REGION 1..13: note = Actin-related protein 6 (44-56)
QIDEIKDPSGLFY

SEQ ID NO: 9157 - protein, 9 aa, synthetic construct
  REGION 1..9: note = Hepatocyte growth factor-regulated tyrosine kinase substrate (459-467)
QLDERRLYY

SEQ ID NO: 9158 - protein, 9 aa, synthetic construct
  REGION 1..9: note = Speriolin-like protein (48-56)
QLDRRILAY

SEQ ID NO: 9159 - protein, 10 aa, synthetic construct
  REGION 1..10: note = Zinc finger protein 74 (59-68)
QLDSPQRALY

SEQ ID NO: 9160 - protein, 9 aa, synthetic construct
  REGION 1..9: note = trabeculin-alpha (4357-4365)
QLDTHMELY

SEQ ID NO: 9161 - protein, 11 aa, synthetic construct
  REGION 1..11: note = Phosphofurin acidic cluster sorting protein 1 (106-116)
QLDVAGRVMQY

SEQ ID NO: 9162 - protein, 11 aa, synthetic construct
  REGION 1..11: note = Ubiquitin-40S ribosomal protein S27a (69-79)
QLEDGRTLSDY

SEQ ID NO: 9163 - protein, 12 aa, synthetic construct
  REGION 1..12: note = PH domain leucine-rich repeat-containing protein phosphatase 2 (23-34)
QLERPGGLDTLY

SEQ ID NO: 9164 - protein, 9 aa, synthetic construct
  REGION 1..9: note = Transketolase (102-110)
QSDPAPLQH

SEQ ID NO: 9165 - protein, 10 aa, synthetic construct
  REGION 1..10: note = HMG box-containing protein 1 (66-75)
QSDPTQSGMY

SEQ ID NO: 9166 - protein, 10 aa, synthetic construct
  REGION 1..10: note = Aryl hydrocarbon receptor (150-159)
QSDVIHQSVY

SEQ ID NO: 9167 - protein, 13 aa, synthetic construct
  REGION 1..13: note = HLA class I histocompatibility antigen, A-1 alpha chain (86-98)
QSEDGSHTIQIMY

SEQ ID NO: 9168 - protein, 11 aa, synthetic construct
  REGION 1..11: note = Pre-mRNA-splicing factor ISY1 homolog (275-285)
QSEEARRLLGY

SEQ ID NO: 9169 - protein, 10 aa, synthetic construct
  REGION 1..10: note = LIM and SH3 domain protein 1 (77-86)
QSELQSQVRY

SEQ ID NO: 9170 - protein, 9 aa, synthetic construct
  REGION 1..9: note = Dynamin-1-like protein (672-680)
QSELVGQLY

SEQ ID NO: 9171 - protein, 12 aa, synthetic construct
  REGION 1..12: note = E3 ubiquitin-protein ligase synoviolin (163-174)
QSENPWDNKAVY

SEQ ID NO: 9172 - protein, 9 aa, synthetic construct
  REGION 1..9: note = Vacuolar protein sorting-associated protein 13D (1153-1161)
QSEREYIRY

SEQ ID NO: 9173 - protein, 10 aa, synthetic construct
  REGION 1..10: note = Ubiquitin carboxyl-terminal hydrolase 25 (71-80)
QTALPGNDRY

SEQ ID NO: 9174 - protein, 10 aa, synthetic construct
  REGION 1..10: note = Zinc finger MYM-type protein 2 (609-618)
QTDDTWRTEY

SEQ ID NO: 9175 - protein, 9 aa, synthetic construct
  REGION 1..9: note = Disintegrin and metalloproteinase domain-containing protein 10 (227-235)
QTDHLFFKY

SEQ ID NO: 9176 - protein, 11 aa, synthetic construct
  REGION 1..11: note = RNA polymerase-associated protein CTR9 homolog (424-434)
QTDIQGALSAY

SEQ ID NO: 9177 - protein, 12 aa, synthetic construct
  REGION 1..12: note = AP-1 complex subunit beta-1 (59-70)
QTDNLELKKLVY

SEQ ID NO: 9178 - protein, 10 aa, synthetic construct
  REGION 1..10: note = Charged multivesicular body protein 7 (274-283)
QTDQMVFNAY

SEQ ID NO: 9179 - protein, 11 aa, synthetic construct
  REGION 1..11: note = Midasin (362-372)
QTDSKMLLGMY

SEQ ID NO: 9180 - protein, 10 aa, synthetic construct
  REGION 1..10: note = RAB6A-GEF complex partner protein 2 (260-269)
QTEERVQPEY

SEQ ID NO: 9181 - protein, 11 aa, synthetic construct
  REGION 1..11: note = UDP-glucose:glycoprotein glucosyltransferase 1 (1328-1338)
QTEKQRIIWGY

SEQ ID NO: 9182 - protein, 10 aa, synthetic construct
  REGION 1..10: note = Probable cation-transporting ATPase 13A3 (131-140)
QTESQQIRYF

SEQ ID NO: 9183 - protein, 12 aa, synthetic construct
  REGION 1..12: note = Intraflagellar transport protein 81 homolog (447-458)
QTMEEKKGISGY

SEQ ID NO: 9184 - protein, 9 aa, synthetic construct
  REGION 1..9: note = Importin subunit alpha-5 (516-524)
QVDLNQQQY

SEQ ID NO: 9185 - protein, 10 aa, synthetic construct
  REGION 1..10: note = Protein PRR14L (815-824)
QVDNSLITKY

SEQ ID NO: 9186 - protein, 10 aa, synthetic construct
  REGION 1..10: note = DNA-directed RNA polymerase II subunit RPB9 (103-112)
RAEDAMRLYY

SEQ ID NO: 9187 - protein, 9 aa, synthetic construct
  REGION 1..9: note = CDK5 regulatory subunit-associated protein 2 (1335-1343)
RIEEDNLTY

SEQ ID NO: 9188 - protein, 9 aa, synthetic construct
  REGION 1..9: note = Vacuole membrane protein 1 (105-113)
RIEKQFLLY

SEQ ID NO: 9189 - protein, 9 aa, synthetic construct
  REGION 1..9: note = Lanosterol 14-alpha demethylase (418-426)
RLDFNPDRY

SEQ ID NO: 9190 - protein, 10 aa, synthetic construct
  REGION 1..10: note = Tubulin alpha-1C chain (355-364)
RLDHKFDLMY

SEQ ID NO: 9191 - protein, 12 aa, synthetic construct
  REGION 1..12: note = Nitric oxide synthase, endothelial (782-793)
RLDTGGQEGLQY

SEQ ID NO: 9192 - protein, 11 aa, synthetic construct
  REGION 1..11: note = Transmembrane emp24 domain-containing protein 7 (68-78)
RLEDPDGKVLY

SEQ ID NO: 9193 - protein, 10 aa, synthetic construct
  REGION 1..10: note = Peptidyl-prolyl cis-trans isomerase FKBP3 (189-198)
RLEIEPEWAY

SEQ ID NO: 9194 - protein, 11 aa, synthetic construct
  REGION 1..11: note = Ubiquitin carboxyl-terminal hydrolase 15 (403-413)
RMDPLTKPMQY

SEQ ID NO: 9195 - protein, 12 aa, synthetic construct
  REGION 1..12: note = WASH complex subunit strumpellin (230-241)
RSDDIYNQVSAY

SEQ ID NO: 9196 - protein, 10 aa, synthetic construct
  REGION 1..10: note = Selenocysteine insertion sequence-binding protein 2-like (379-388)
RSDPNSESLY

SEQ ID NO: 9197 - protein, 11 aa, synthetic construct
  REGION 1..11: note = Nuclear cap-binding protein subunit 2 (10-20)
RSDSYVELSQY

SEQ ID NO: 9198 - protein, 12 aa, synthetic construct
  REGION 1..12: note = Methyltransferase-like protein 22 (16-27)
RSDTVLSDVHLY

SEQ ID NO: 9199 - protein, 15 aa, synthetic construct
  REGION 1..15: note = Eukaryotic translation initiation factor 3 subunit E (431-445)
RSEAPNWATQDSGFY

SEQ ID NO: 9200 - protein, 10 aa, synthetic construct
  REGION 1..10: note = F-box only protein 9 (210-219)
RTDAILLGHY

SEQ ID NO: 9201 - protein, 11 aa, synthetic construct
  REGION 1..11: note = General transcription factor II-I repeat domain-containing protein 2B (69-79)
RTDFQKDFAKY

SEQ ID NO: 9202 - protein, 9 aa, synthetic construct
  REGION 1..9: note = Cytoplasmic dynein 1 heavy chain 1 (3544-3552)
RTDIARTEY

SEQ ID NO: 9203 - protein, 12 aa, synthetic construct
  REGION 1..12: note = ERI1 exoribonuclease 3 (98-109)
RTMEIESTFHMY

SEQ ID NO: 9204 - protein, 10 aa, synthetic construct
  REGION 1..10: note = U5 small nuclear ribonucleoprotein 200 kDa helicase (666-675)
RVDPAKGLFY

SEQ ID NO: 9205 - protein, 10 aa, synthetic construct
  REGION 1..10: note = DmX-like protein 2 (729-738)
RVDPIGPLSY

SEQ ID NO: 9206 - protein, 9 aa, synthetic construct
  REGION 1..9: note = Serine/threonine-protein kinase SMG1 (32-40)
SADPGNLKY

SEQ ID NO: 9207 - protein, 9 aa, synthetic construct
  REGION 1..9: note = DNA mismatch repair protein Msh6 (340-348)
SDSLVQKGY

SEQ ID NO: 9208 - protein, 11 aa, synthetic construct
  REGION 1..11: note = GPI transamidase component PIG-T (52-62)
SELQREGVSHY

SEQ ID NO: 9209 - protein, 11 aa, synthetic construct
  REGION 1..11: note = Ectonucleotide pyrophosphatase/phosphodiesterase family member 2 (308-318)
SEQPDFSGHKY

SEQ ID NO: 9210 - protein, 10 aa, synthetic construct
  REGION 1..10: note = Protein YIPF5 (17-26)
SIDDQSQQSY

SEQ ID NO: 9211 - protein, 10 aa, synthetic construct
  REGION 1..10: note = E3 ubiquitin-protein ligase HECTD1 (532-541)
SIERLPLHLY

SEQ ID NO: 9212 - protein, 11 aa, synthetic construct
  REGION 1..11: note = Creatine kinase B-type (164-174)
SLDGDLAGRYY

SEQ ID NO: 9213 - protein, 11 aa, synthetic construct
  REGION 1..11: note = Protein FAM91A1 (206-216)
SLDYNVVHSLY

SEQ ID NO: 9214 - protein, 9 aa, synthetic construct
  REGION 1..9: note = Cytochrome c oxidase subunit 4 isoform 1, mitochondrial (36-44)
SMDEKVELY

SEQ ID NO: 9215 - protein, 10 aa, synthetic construct
  REGION 1..10: note = Paired box protein Pax-3 (312-321)
SMDPVTGYQY

SEQ ID NO: 9216 - protein, 10 aa, synthetic construct
  REGION 1..10: note = Heat shock protein HSP 90-alpha (174-183)
SSDALDKIRY

SEQ ID NO: 9217 - protein, 11 aa, synthetic construct
  REGION 1..11: note = Integrin beta-3 (536-546)
SSDFGKITGKY

SEQ ID NO: 9218 - protein, 11 aa, synthetic construct
  REGION 1..11: note = Protein SEC13 homolog (124-134)
SSDGAISLLTY

SEQ ID NO: 9219 - protein, 10 aa, synthetic construct
  REGION 1..10: note = Nucleoporin GLE1 (16-25)
SSDKGRLCYY

SEQ ID NO: 9220 - protein, 9 aa, synthetic construct
  REGION 1..9: note = Histone-lysine N-methyltransferase SETDB2 (309-317)
SSDKITTGY

SEQ ID NO: 9221 - protein, 10 aa, synthetic construct
  REGION 1..10: note = Scm-like with four MBT domains protein 1 (201-210)
SSDNYEHWLY

SEQ ID NO: 9222 - protein, 10 aa, synthetic construct
  REGION 1..10: note = Forkhead box protein M1 (39-48)
SSDPASQLSY

SEQ ID NO: 9223 - protein, 11 aa, synthetic construct
  REGION 1..11: note = Protein kinase C and casein kinase substrate in neurons protein 2 (14-24)
SSDSFWEVGNY

SEQ ID NO: 9224 - protein, 12 aa, synthetic construct
  REGION 1..12: note = Vacuolar protein sorting-associated protein 51 homolog (377-388)
SSDSSKRTFSVY

SEQ ID NO: 9225 - protein, 10 aa, synthetic construct
  REGION 1..10: note = Clathrin interactor 1 (163-172)
SSDSVGGFRY

SEQ ID NO: 9226 - protein, 11 aa, synthetic construct
  REGION 1..11: note = Protein FAM189B (167-177)
SSDTADFRDLY

SEQ ID NO: 9227 - protein, 11 aa, synthetic construct
  REGION 1..11: note = WD40 repeat-containing protein SMU1 (7-17)
SSDVIRLIMQY

SEQ ID NO: 9228 - protein, 10 aa, synthetic construct
  REGION 1..10: note = Archaemetzincin-2 (168-177)
SSDYSIFDNY

SEQ ID NO: 9229 - protein, 9 aa, synthetic construct
  REGION 1..9: note = Nuclear receptor-interacting protein 1 (271-279)
SSEAHLQQY

SEQ ID NO: 9230 - protein, 9 aa, synthetic construct
  REGION 1..9: note = KIF1-binding protein (164-172)
SSEALYNQY

SEQ ID NO: 9231 - protein, 13 aa, synthetic construct
  REGION 1..13: note = DNA-dependent protein kinase catalytic subunit (3366-3378)
SSEDSEKVIAGLY

SEQ ID NO: 9232 - protein, 10 aa, synthetic construct
  REGION 1..10: note = Protein C-ets-1 (192-201)
SSEELLSLKY

SEQ ID NO: 9233 - protein, 11 aa, synthetic construct
  REGION 1..11: note = UPF0769 protein C21orf59 (235-245)
SSEEQKQLMLY

SEQ ID NO: 9234 - protein, 11 aa, synthetic construct
  REGION 1..11: note = Protein-glutamate O-methyltransferase (271-281)
SSELATEVHFY

SEQ ID NO: 9235 - protein, 9 aa, synthetic construct
  REGION 1..9: note = Trafficking protein particle complex subunit 3 (15-23)
SSELFTLTY

SEQ ID NO: 9236 - protein, 10 aa, synthetic construct
  REGION 1..10: note = Centriole, cilia and spindle-associated protein (253-262)
SSENPWMTEY

SEQ ID NO: 9237 - protein, 11 aa, synthetic construct
  REGION 1..11: note = Proline and serine-rich protein 1 (34-44)
SSEQVVDLLRY

SEQ ID NO: 9238 - protein, 10 aa, synthetic construct
  REGION 1..10: note = Ubiquitin carboxyl-terminal hydrolase 38 (207-216)
SSESGHYYSY

SEQ ID NO: 9239 - protein, 10 aa, synthetic construct
  REGION 1..10: note = DNA-dependent protein kinase catalytic subunit (556-565)
SSESLNHLLY

SEQ ID NO: 9240 - protein, 14 aa, synthetic construct
  REGION 1..14: note = Single Ig IL-1-related receptor (382-395)
SSEVDVSDLGSRNY

SEQ ID NO: 9241 - protein, 11 aa, synthetic construct
  REGION 1..11: note = ELAV-like protein 1 (99-109)
SSEVIKDANLY

SEQ ID NO: 9242 - protein, 11 aa, synthetic construct
  REGION 1..11: note = Protein FAM65B (857-867)
SSEVVTVFQYY

SEQ ID NO: 9243 - protein, 12 aa, synthetic construct
  REGION 1..12: note = Interferon-induced, double-stranded RNA-activated protein kinase (420-431)
SSQDYGKEVDLY

SEQ ID NO: 9244 - protein, 12 aa, synthetic construct
  REGION 1..12: note = Histone-arginine methyltransferase CARM1 (405-416)
STAPTEPLTHWY

SEQ ID NO: 9245 - protein, 13 aa, synthetic construct
  REGION 1..13: note = Protein HIRA (392-404)
STAVIENPEMLKY

SEQ ID NO: 9246 - protein, 11 aa, synthetic construct
  REGION 1..11: note = Nucleoprotein TPR (1876-1886)
STDGEVETQVY

SEQ ID NO: 9247 - protein, 10 aa, synthetic construct
  REGION 1..10: note = Recombining binding protein suppressor of hairless (318-327)
STDKAEYTFY

SEQ ID NO: 9248 - protein, 11 aa, synthetic construct
  REGION 1..11: note = Holliday junction recognition protein (523-533)
STDKASMEVRY

SEQ ID NO: 9249 - protein, 8 aa, synthetic construct
  REGION 1..8: note = Eukaryotic translation initiation factor 3 subunit I (111-118)
STDKQMGY

SEQ ID NO: 9250 - protein, 11 aa, synthetic construct
  REGION 1..11: note = Myocyte-specific enhancer factor 2A (59-69)
STDMDKVLLKY

SEQ ID NO: 9251 - protein, 11 aa, synthetic construct
  REGION 1..11: note = Integrin alpha-5 (179-189)
STDNFTRILEY

SEQ ID NO: 9252 - protein, 10 aa, synthetic construct
  REGION 1..10: note = Nuclear pore complex protein Nup93 (541-550)
STDPREALQY

SEQ ID NO: 9253 - protein, 10 aa, synthetic construct
  REGION 1..10: note = Immunoglobulin superfamily member 8 (131-140)
STDTRYLGSY

SEQ ID NO: 9254 - protein, 15 aa, synthetic construct
  REGION 1..15: note = RNA-binding protein FUS (44-58)
STDTSGYGQSSYSSY

SEQ ID NO: 9255 - protein, 10 aa, synthetic construct
  REGION 1..10: note = Signal-induced proliferation-associated 1-like protein 1 (909-918)
STDTSLKIFY

SEQ ID NO: 9256 - protein, 12 aa, synthetic construct
  REGION 1..12: note = Eukaryotic translation initiation factor 2A (264-275)
STDVDKTGASYY

SEQ ID NO: 9257 - protein, 11 aa, synthetic construct
  REGION 1..11: note = 26S proteasome non-ATPase regulatory subunit 8 (239-249)
STELAKQVIEY

SEQ ID NO: 9258 - protein, 9 aa, synthetic construct
  REGION 1..9: note = Asparagine-tRNA ligase, cytoplasmic (174-182)
STESSVAVY

SEQ ID NO: 9259 - protein, 12 aa, synthetic construct
  REGION 1..12: note = Mitochondrial import inner membrane translocase subunit Tim17-A (156-167)
STQLPSSPFGDY

SEQ ID NO: 9260 - protein, 9 aa, synthetic construct
  REGION 1..9: note = Zinc finger protein 106 (662-670)
STSEIGTRY

SEQ ID NO: 9261 - protein, 9 aa, synthetic construct
  REGION 1..9: note = Protein strawberry notch homolog 1 (1169-1177)
STSGHVELY

SEQ ID NO: 9262 - protein, 11 aa, synthetic construct
  REGION 1..11: note = T-complex protein 1 subunit epsilon (270-280)
SVEDYKALQKY

SEQ ID NO: 9263 - protein, 10 aa, synthetic construct
  REGION 1..10: note = Glutamine-fructose-6-phosphate aminotransferase (isomerizing) 1 (444-453)
TADTLMGLRY

SEQ ID NO: 9264 - protein, 12 aa, synthetic construct
  REGION 1..12: note = Splicing factor 3B subunit 6 (31-42)
TAEEMYDIFGKY

SEQ ID NO: 9265 - protein, 10 aa, synthetic construct
  REGION 1..10: note = Annexin A11 (431-440)
TDLLDIRSEY

SEQ ID NO: 9266 - protein, 10 aa, synthetic construct
  REGION 1..10: note = RNA binding motif protein 22 (244-253)
TETDLRNHFY

SEQ ID NO: 9267 - protein, 11 aa, synthetic construct
  REGION 1..11: note = Glutamine-tRNA ligase (47-57)
TIDKATGILLY

SEQ ID NO: 9268 - protein, 10 aa, synthetic construct
  REGION 1..10: note = Pre-mRNA-splicing factor ATP-dependent RNA helicase DHX15 (294-303)
TLDAGKFQIY

SEQ ID NO: 9269 - protein, 10 aa, synthetic construct
  REGION 1..10: note = ATP-dependent RNA helicase DHX8 (717-726)
TLDAVKFSQY

SEQ ID NO: 9270 - protein, 10 aa, synthetic construct
  REGION 1..10: note = BRCA2-interacting transcriptional repressor EMSY (945-954)
TLDPQTGLFY

SEQ ID NO: 9271 - protein, 13 aa, synthetic construct
  REGION 1..13: note = A-kinase anchor protein 11 (1443-1455)
TLDPYRNEVSQLY

SEQ ID NO: 9272 - protein, 9 aa, synthetic construct
  REGION 1..9: note = E3 SUMO-protein ligase NSE2 (70-78)
TLDRQLNHY

SEQ ID NO: 9273 - protein, 12 aa, synthetic construct
  REGION 1..12: note = TOX high mobility group box family member 4 (105-116)
TMDLDHSIGTQY

SEQ ID NO: 9274 - protein, 10 aa, synthetic construct
  REGION 1..10: note = Dynein light chain roadblock-type 1 (40-49)
TMDNPTTTQY

SEQ ID NO: 9275 - protein, 11 aa, synthetic construct
  REGION 1..11: note = Retinal dehydrogenase 1 (105-115)
TMESMNGGKLY

SEQ ID NO: 9276 - protein, 14 aa, synthetic construct
  REGION 1..14: note = Alpha-N-acetylglucosaminidase (545-558)
TSAPSLATSPAFRY

SEQ ID NO: 9277 - protein, 10 aa, synthetic construct
  REGION 1..10: note = Cytoplasmic dynein 1 heavy chain 1 (1163-1172)
TSDAVTFITY

SEQ ID NO: 9278 - protein, 10 aa, synthetic construct
  REGION 1..10: note = G1/S-specific cyclin-E2 (81-90)
TSDFSRFTNY

SEQ ID NO: 9279 - protein, 11 aa, synthetic construct
  REGION 1..11: note = E3 SUMO-protein ligase RanBP2 (1071-1081)
TSDKPLQGDGY

SEQ ID NO: 9280 - protein, 11 aa, synthetic construct
  REGION 1..11: note = Endoplasmic reticulum metallopeptidase 1 (361-371)
TSDMLAAASKY

SEQ ID NO: 9281 - protein, 11 aa, synthetic construct
  REGION 1..11: note = Fizzy-related protein homolog (81-91)
TSDNGKDGLAY

SEQ ID NO: 9282 - protein, 9 aa, synthetic construct
  REGION 1..9: note = Beta-hexosaminidase subunit alpha (32-40)
TSDQRYVLY

SEQ ID NO: 9283 - protein, 10 aa, synthetic construct
  REGION 1..10: note = Leucine-rich repeat flightless-interacting protein 1 (241-250)
TSDTLNNVGY

SEQ ID NO: 9284 - protein, 11 aa, synthetic construct
  REGION 1..11: note = Protein SDE2 homolog (58-68)
TSDTVQHGAVY

SEQ ID NO: 9285 - protein, 12 aa, synthetic construct
  REGION 1..12: note = Uncharacterized protein C15orf41 (61-72)
TSEAIESYYQRY

SEQ ID NO: 9286 - protein, 9 aa, synthetic construct
  REGION 1..9: note = High affinity cAMP-specific and IBMX-insensitive 3',5'-cyclic phosphodiesterase 8A (115-123)
TSEDRFIQY

SEQ ID NO: 9287 - protein, 12 aa, synthetic construct
  REGION 1..12: note = Caprin-1 (438-449)
TSEGYTASQPLY

SEQ ID NO: 9288 - protein, 13 aa, synthetic construct
  REGION 1..13: note = Endoplasmin (188-200)
TSELIGQFGVGFY

SEQ ID NO: 9289 - protein, 11 aa, synthetic construct
  REGION 1..11: note = Sodium/potassium-transporting ATPase subunit alpha-2 (19-29)
TSEQLDDILKY

SEQ ID NO: 9290 - protein, 9 aa, synthetic construct
  REGION 1..9: note = Putative pre-mRNA-splicing factor ATP-dependent RNA helicase DHX16 (487-495)
TSERTVLRY

SEQ ID NO: 9291 - protein, 9 aa, synthetic construct
  REGION 1..9: note = Neuroplastin (57-65)
TSSSHTLTY

SEQ ID NO: 9292 - protein, 12 aa, synthetic construct
  REGION 1..12: note = Unconventional myosin-Va (1775-1786)
TTAQIVKVLNLY

SEQ ID NO: 9293 - protein, 10 aa, synthetic construct
  REGION 1..10: note = Leukotriene A-4 hydrolase (421-430)
TTDDWKDFLY

SEQ ID NO: 9294 - protein, 11 aa, synthetic construct
  REGION 1..11: note = DNA-directed RNA polymerases I and III subunit RPAC1 (26-36)
TTDFPGNYSGY

SEQ ID NO: 9295 - protein, 9 aa, synthetic construct
  REGION 1..9: note = Mitotic spindle assembly checkpoint protein MAD2A (56-64)
TTDLELIKY

SEQ ID NO: 9296 - protein, 10 aa, synthetic construct
  REGION 1..10: note = Ubiquitin-like modifier-activating enzyme 6 (145-154)
TTDLSFLDKY

SEQ ID NO: 9297 - protein, 13 aa, synthetic construct
  REGION 1..13: note = Exosome complex component RRP4 (34-46)
TTDTGFMRGHGTY

SEQ ID NO: 9298 - protein, 9 aa, synthetic construct
  REGION 1..9: note = SET domain-containing protein 4 (60-68)
TTDTVIRSY

SEQ ID NO: 9299 - protein, 10 aa, synthetic construct
  REGION 1..10: note = Transmembrane protein 70, mitochondrial (28-37)
TTDTYKAITY

SEQ ID NO: 9300 - protein, 9 aa, synthetic construct
  REGION 1..9: note = Enhancer of filamentation 1 (432-440)
TTDWRCYGY

SEQ ID NO: 9301 - protein, 12 aa, synthetic construct
  REGION 1..12: note = Matrin-3 (444-455)
TTEDAQAAVDYY

SEQ ID NO: 9302 - protein, 10 aa, synthetic construct
  REGION 1..10: note = Superkiller viralicidic activity 2-like 2 (229-238)
TTEILRSMLY

SEQ ID NO: 9303 - protein, 12 aa, synthetic construct
  REGION 1..12: note = TBCC domain-containing protein 1 (479-490)
TTEIPGGLPSVY

SEQ ID NO: 9304 - protein, 13 aa, synthetic construct
  REGION 1..13: note = DNA damage-binding protein 1 (894-906)
TTEKELRTECNHY

SEQ ID NO: 9305 - protein, 12 aa, synthetic construct
  REGION 1..12: note = Mitotic spindle assembly checkpoint protein MAD1 (643-654)
TTENQYRLTSLY

SEQ ID NO: 9306 - protein, 13 aa, synthetic construct
  REGION 1..13: note = Akirin-2 (77-89)
TTEQILYNIKQEY

SEQ ID NO: 9307 - protein, 10 aa, synthetic construct
  REGION 1..10: note = vacuolar protein sorting-associated protein 26A isoform 3 (217-226)
TTETETIAKY

SEQ ID NO: 9308 - protein, 13 aa, synthetic construct
  REGION 1..13: note = BCL2/adenovirus E1B 19 kDa protein-interacting protein 2 (168-180)
TTEVIRKGSITEY

SEQ ID NO: 9309 - protein, 9 aa, synthetic construct
  REGION 1..9: note = ADP-sugar pyrophosphatase (192-200)
TVDARVYSY

SEQ ID NO: 9310 - protein, 9 aa, synthetic construct
  REGION 1..9: note = U3 small nucleolar RNA-associated protein 15 homolog (108-116)
TVDFTADKY

SEQ ID NO: 9311 - protein, 10 aa, synthetic construct
  REGION 1..10: note = Fascin (484-493)
TVDPASLWEY

SEQ ID NO: 9312 - protein, 10 aa, synthetic construct
  REGION 1..10: note = Proteasome subunit alpha type-7 (97-106)
TVEDPVTVEY

SEQ ID NO: 9313 - protein, 12 aa, synthetic construct
  REGION 1..12: note = 14-3-3 protein epsilon (38-49)
TVEERNLLSVAY

SEQ ID NO: 9314 - protein, 12 aa, synthetic construct
  REGION 1..12: note = Importin-11 (432-443)
TVEETGGDSWKY

SEQ ID NO: 9315 - protein, 12 aa, synthetic construct
  REGION 1..12: note = Nodal modulator 2 (271-282)
TVSREDGSFSFY

SEQ ID NO: 9316 - protein, 11 aa, synthetic construct
  REGION 1..11: note = Tetratricopeptide repeat protein 13 (506-516)
VADRLGSLMQY

SEQ ID NO: 9317 - protein, 13 aa, synthetic construct
  REGION 1..13: note = Proteasome subunit beta type-4 (85-97)
VIDEELLGDGHSY

SEQ ID NO: 9318 - protein, 10 aa, synthetic construct
  REGION 1..10: note = Tubulin alpha-1C chain (144-153)
VIDEVRTGTY

SEQ ID NO: 9319 - protein, 12 aa, synthetic construct
  REGION 1..12: note = Spindlin-3 (381-392)
VIDSLVGKQVEY

SEQ ID NO: 9320 - protein, 10 aa, synthetic construct
  REGION 1..10: note = Protein HIRA (395-404)
VIENPEMLKY

SEQ ID NO: 9321 - protein, 9 aa, synthetic construct
  REGION 1..9: note = Beta-hexosaminidase subunit alpha (60-68)
VLDEAFQRY

SEQ ID NO: 9322 - protein, 9 aa, synthetic construct
  REGION 1..9: note = LETM1 and EF-hand domain-containing protein 1, mitochondrial (157-165)
VLDELKHYY

SEQ ID NO: 9323 - protein, 9 aa, synthetic construct
  REGION 1..9: note = Activating signal cointegrator 1 complex subunit 2 (386-394)
VLDETRTAY

SEQ ID NO: 9324 - protein, 12 aa, synthetic construct
  REGION 1..12: note = DNA-directed RNA polymerase I subunit RPA1 (748-759)
VLDKAHYGSSAY

SEQ ID NO: 9325 - protein, 12 aa, synthetic construct
  REGION 1..12: note = Nucleolar protein 14 (322-333)
VLDKDDRRLLSY

SEQ ID NO: 9326 - protein, 10 aa, synthetic construct
  REGION 1..10: note = ATP-binding cassette sub-family B member 10, mitochondrial (194-203)
VLDQGKITEY

SEQ ID NO: 9327 - protein, 9 aa, synthetic construct
  REGION 1..9: note = Kinesin-like protein KIF18B (102-110)
VLDSFLQGY

SEQ ID NO: 9328 - protein, 9 aa, synthetic construct
  REGION 1..9: note = Ubiquitin-conjugating enzyme E2 Z (270-278)
VMEKSFLEY

SEQ ID NO: 9329 - protein, 9 aa, synthetic construct
  REGION 1..9: note = Elongator complex protein 1 (872-880)
VSAEEALKY

SEQ ID NO: 9330 - protein, 12 aa, synthetic construct
  REGION 1..12: note = DNA repair protein XRCC4 (166-177)
VSAKEALETDLY

SEQ ID NO: 9331 - protein, 9 aa, synthetic construct
  REGION 1..9: note = FERM domain-containing protein 4A (924-932)
VSDELRQWY

SEQ ID NO: 9332 - protein, 10 aa, synthetic construct
  REGION 1..10: note = Constitutive coactivator of peroxisome proliferator-activated receptor gamma (279-288)
VSDHISKVLY

SEQ ID NO: 9333 - protein, 12 aa, synthetic construct
  REGION 1..12: note = Importin-5 (842-853)
VSDILHSIFSSY

SEQ ID NO: 9334 - protein, 12 aa, synthetic construct
  REGION 1..12: note = Splicing factor 1 (136-147)
VSDKVMIPQDEY

SEQ ID NO: 9335 - protein, 9 aa, synthetic construct
  REGION 1..9: note = Phosphatidylinositol 4-phosphate 3-kinase C2 domain-containing subunit beta (917-925)
VSDLRVTHY

SEQ ID NO: 9336 - protein, 10 aa, synthetic construct
  REGION 1..10: note = Acetyl-coenzyme A transporter 1 (439-448)
VSDPLIGGTY

SEQ ID NO: 9337 - protein, 13 aa, synthetic construct
  REGION 1..13: note = Zinc finger protein 275 (31-43)
VSDPSPNTDPAKY

SEQ ID NO: 9338 - protein, 12 aa, synthetic construct
  REGION 1..12: note = Tripeptidyl-peptidase 1 (68-79)
VSDPSSPQYGKY

SEQ ID NO: 9339 - protein, 13 aa, synthetic construct
  REGION 1..13: note = Tripeptidyl-peptidase 1 (68-80)
VSDPSSPQYGKYL

SEQ ID NO: 9340 - protein, 11 aa, synthetic construct
  REGION 1..11: note = Cleavage and polyadenylation specificity factor subunit 1 (1271-1281)
VSDRDRNLMVY

SEQ ID NO: 9341 - protein, 12 aa, synthetic construct
  REGION 1..12: note = TELO2-interacting protein 1 homolog (40-51)
VSDSALQELQQY

SEQ ID NO: 9342 - protein, 10 aa, synthetic construct
  REGION 1..10: note = E3 ubiquitin-protein ligase HACE1 (749-758)
VSDWIKNTEY

SEQ ID NO: 9343 - protein, 9 aa, synthetic construct
  REGION 1..9: note = AT-rich interactive domain-containing protein 2 (138-146)
VSDYLRQSY

SEQ ID NO: 9344 - protein, 11 aa, synthetic construct
  REGION 1..11: note Dolichyl-diphosphooligosaccharide-proteinosyltransferase subunit 2 (116-126)
VSEDSSVTQIY

SEQ ID NO: 9345 - protein, 11 aa, synthetic construct
  REGION 1..11: note = Histone H2B type 1-A (113-123)
VSEGTKAVTKY

SEQ ID NO: 9346 - protein, 12 aa, synthetic construct
  REGION 1..12: note = Tetraspanin-33 (126-137)
VSEIINNAIVHY

SEQ ID NO: 9347 - protein, 9 aa, synthetic construct
  REGION 1..9: note = Peroxisome assembly factor 2 (962-970)
VSEQELLRY

SEQ ID NO: 9348 - protein, 10 aa, synthetic construct
  REGION 1..10: note = TraB domain-containing protein (260-269)
VSERDVYLTY

SEQ ID NO: 9349 - protein, 13 aa, synthetic construct
  REGION 1..13: note = Paired amphipathic helix protein Sin3a (44-56)
VSETMQSATGIQY

SEQ ID NO: 9350 - protein, 15 aa, synthetic construct
  REGION 1..15: note = Nuclear pore complex protein Nup160 (1171-1185)
VSEYVDAVLGKGHQY

SEQ ID NO: 9351 - protein, 12 aa, synthetic construct
  REGION 1..12: note = Oral-facial-digital syndrome 1 protein (787-798)
VSSPPEQKVGLY

SEQ ID NO: 9352 - protein, 11 aa, synthetic construct
  REGION 1..11: note = Zinc finger protein 106 (703-713)
VSSTSEIGTRY

SEQ ID NO: 9353 - protein, 13 aa, synthetic construct
  REGION 1..13: note = Nuclear factor of activated T-cells, cytoplasmic 1 (282-294)
VTDDSWLGNTTQY

SEQ ID NO: 9354 - protein, 12 aa, synthetic construct
  REGION 1..12: note = Mediator of RNA polymerase II transcription subunit 27 (204-215)
VTDHATTALLHY

SEQ ID NO: 9355 - protein, 10 aa, synthetic construct
  REGION 1..10: note = DnaJ homolog subfamily B member 12 (287-296)
VTDHLGVVYY

SEQ ID NO: 9356 - protein, 11 aa, synthetic construct
  REGION 1..11: note = Telomerase protein component 1 (1368-1378)
VTDHLRLFTLY

SEQ ID NO: 9357 - protein, 12 aa, synthetic construct
  REGION 1..12: note = TBC1 domain family member 8 (757-768)
VTDISDLIRDSY

SEQ ID NO: 9358 - protein, 10 aa, synthetic construct
  REGION 1..10: note = Protein MEF2BNB (13-22)
VTDKFTESVY

SEQ ID NO: 9359 - protein, 12 aa, synthetic construct
  REGION 1..12: note = Complex I assembly factor TMEM126B, mitochondrial (46-57)
VTDKLFVIDALY

SEQ ID NO: 9360 - protein, 13 aa, synthetic construct
  REGION 1..13: note = Histone acetyltransferase type B catalytic subunit (339-351)
VTDMSDAEQYRSY

SEQ ID NO: 9361 - protein, 12 aa, synthetic construct
  REGION 1..12: note = Afadin (762-773)
VTDPDSGLCSHY

SEQ ID NO: 9362 - protein, 10 aa, synthetic construct
  REGION 1..10: note = Cation-independent mannose-6-phosphate receptor (769-778)
VTDPSTLEQY

SEQ ID NO: 9363 - protein, 10 aa, synthetic construct
  REGION 1..10: note = DNA polymerase delta subunit 3 (14-23)
VTDQNKIVTY

SEQ ID NO: 9364 - protein, 11 aa, synthetic construct
  REGION 1..11: note = Gamma-secretase subunit APH-1A (59-69)
VTDRSDARLQY

SEQ ID NO: 9365 - protein, 10 aa, synthetic construct
  REGION 1..10: note = DNA topoisomerase 2-alpha (1118-1127)
VTDSGPTFNY

SEQ ID NO: 9366 - protein, 10 aa, synthetic construct
  REGION 1..10: note = Bcl-2-modifying factor (88-97)
VTEEPQRLFY

SEQ ID NO: 9367 - protein, 11 aa, synthetic construct
  REGION 1..11: note = Protein SET (135-145)
VTEFEDIKSGY

SEQ ID NO: 9368 - protein, 9 aa, synthetic construct
  REGION 1..9: note = Epididymis-specific alpha-mannosidase (660-668)
VTEIRQYFY

SEQ ID NO: 9369 - protein, 11 aa, synthetic construct
  REGION 1..11: note = Ras association domain-containing protein 3 (64-74)
VTESPAKFALY

SEQ ID NO: 9370 - protein, 10 aa, synthetic construct
  REGION 1..10: note = WD repeat-containing protein 63 (174-183)
VTESTKQITY

SEQ ID NO: 9371 - protein, 9 aa, synthetic construct
  REGION 1..9: note = Uncharacterized protein C15orf61 (132-140)
VTETVHTSY

SEQ ID NO: 9372 - protein, 12 aa, synthetic construct
  REGION 1..12: note = Nesprin-2 (266-277)
VVDPDEKSIMTY

SEQ ID NO: 9373 - protein, 12 aa, synthetic construct
  REGION 1..12: note = Spindlin-1 (194-205)
VVDSLVGKQVEY

SEQ ID NO: 9374 - protein, 13 aa, synthetic construct
  REGION 1..13: note = Protein transport protein Sec61 subunit alpha isoform 1 (324-336)
WSDTSSGGPARAY

SEQ ID NO: 9375 - protein, 10 aa, synthetic construct
  REGION 1..10: note = Cholinesterase (404-413)
WVDDQRPENY

SEQ ID NO: 9376 - protein, 13 aa, synthetic construct
  REGION 1..13: note = Acetyl-CoA carboxylase 1 (1775-1787)
WVDPEDPYKGYRY

SEQ ID NO: 9377 - protein, 10 aa, synthetic construct
  REGION 1..10: note = Proteasome subunit beta type-4 (129-138)
YADGESFLGY

SEQ ID NO: 9378 - protein, 10 aa, synthetic construct
  REGION 1..10: note = DNA polymerase epsilon catalytic subunit A (1792-1801)
YADNQVMHFY

SEQ ID NO: 9379 - protein, 11 aa, synthetic construct
  REGION 1..11: note = Sorting nexin-4 (300-310)
YADQLKEYLFY

SEQ ID NO: 9380 - protein, 11 aa, synthetic construct
  REGION 1..11: note = Cleavage stimulation factor subunit 3 (337-347)
YADYEESRMKY

SEQ ID NO: 9381 - protein, 9 aa, synthetic construct
  REGION 1..9: note = Transmembrane protein 87A (216-224)
YAEFQNIRY

SEQ ID NO: 9382 - protein, 9 aa, synthetic construct
  REGION 1..9: note = Transcription elongation factor SPT6 (993-1001)
YGDKHITLY

SEQ ID NO: 9383 - protein, 11 aa, synthetic construct
  REGION 1..11: note = Lysyl oxidase homolog 3 (543-553)
YIEDRPLHMLY

SEQ ID NO: 9384 - protein, 12 aa, synthetic construct
  REGION 1..12: note = High mobility group protein 20A (39-50)
YLDEADRDKERY

SEQ ID NO: 9385 - protein, 12 aa, synthetic construct
  REGION 1..12: note = SWI/SNF-related matrix-associated actin-dependent regulator of chromatin subfamily E member 1-related (119-130)
YLDEAEREKQQY

SEQ ID NO: 9386 - protein, 9 aa, synthetic construct
  REGION 1..9: note = Prostamide/prostaglandin F synthase (122-130)
YLDESKQLY

SEQ ID NO: 9387 - protein, 9 aa, synthetic construct
  REGION 1..9: note = putative RHO/RAC effector protein (1124-1132)
YLDIPNPRY

SEQ ID NO: 9388 - protein, 8 aa, synthetic construct
  REGION 1..8: note = Proteasome activator complex subunit 3 (188-195)
YLDQISRY

SEQ ID NO: 9389 - protein, 12 aa, synthetic construct
  REGION 1..12: note = E3 ubiquitin-protein ligase TRIM4 (423-434)
YLDRGTGNVSFY

SEQ ID NO: 9390 - protein, 11 aa, synthetic construct
  REGION 1..11: note = U3 small nucleolar RNA-associated protein 6 homolog (480-490)
YLDWAYRSGGY

SEQ ID NO: 9391 - protein, 11 aa, synthetic construct
  REGION 1..11: note = E3 ubiquitin-protein ligase UBR2 (1583-1593)
YLEGERDAIRY

SEQ ID NO: 9392 - protein, 12 aa, synthetic construct
  REGION 1..12: note = MAGUK p55 subfamily member 2 (440-451)
YLEHGEYEGNLY

SEQ ID NO: 9393 - protein, 13 aa, synthetic construct
  REGION 1..13: note = DNA-directed RNA polymerase II subunit RPB1 (657-669)
YLEMGHDITRLFY

SEQ ID NO: 9394 - protein, 12 aa, synthetic construct
  REGION 1..12: note = KIF1-binding protein (161-172)
YLESSEALYNQY

SEQ ID NO: 9395 - protein, 10 aa, synthetic construct
  REGION 1..10: note = Immediate early response gene 5-like protein (47-56)
YLSERYAELY

SEQ ID NO: 9396 - protein, 9 aa, synthetic construct
  REGION 1..9: note = Cullin-1 (42-50)
YMELYTHVY

SEQ ID NO: 9397 - protein, 9 aa, synthetic construct
  REGION 1..9: note = Far upstream element-binding protein 1 (632-640)
YSAAWAEYY

SEQ ID NO: 9398 - protein, 13 aa, synthetic construct
  REGION 1..13: note = Nuclear factor erythroid 2-related factor 1 (12-24)
YSAPPGDPLSTNY

SEQ ID NO: 9399 - protein, 13 aa, synthetic construct
  REGION 1..13: note = Cohesin subunit SA-2 (319-331)
YSDAFLNDSYLKY

SEQ ID NO: 9400 - protein, 10 aa, synthetic construct
  REGION 1..10: note = Dimethylaniline monooxygenase (N-oxide-forming) 4 (69-78)
YSDFPFHEDY

SEQ ID NO: 9401 - protein, 12 aa, synthetic construct
  REGION 1..12: note = Dihydropyrimidine dehydrogenase (NADP(+)) (211-222)
YSDITIFEKQEY

SEQ ID NO: 9402 - protein, 12 aa, synthetic construct
  REGION 1..12: note = Cyclin-dependent kinases regulatory subunit 2 (8-19)
YSDKYFDEHYEY

SEQ ID NO: 9403 - protein, 11 aa, synthetic construct
  REGION 1..11: note = Spermatogenesis-associated protein 20 (357-367)
YSDVAKGILQY

SEQ ID NO: 9404 - protein, 11 aa, synthetic construct
  REGION 1..11: note = F-box only protein 3 (79-89)
YSDVGRYIDHY

SEQ ID NO: 9405 - protein, 9 aa, synthetic construct
  REGION 1..9: note = AN1-type zinc finger protein 6 (175-183)
YSDVHNCSY

SEQ ID NO: 9406 - protein, 12 aa, synthetic construct
  REGION 1..12: note = YTH domain-containing family protein 1 (300-311)
YSEDDIHRSIKY

SEQ ID NO: 9407 - protein, 10 aa, synthetic construct
  REGION 1..10: note = Intraflagellar transport protein 122 homolog (415-424)
YSEDLSDMHY

SEQ ID NO: 9408 - protein, 11 aa, synthetic construct
  REGION 1..11: note = SUN domain-containing protein 2 (38-48)
YSEDRIGLADY

SEQ ID NO: 9409 - protein, 11 aa, synthetic construct
  REGION 1..11: note = MICOS complex subunit MIC60 (615-625)
YSEETLRARFY

SEQ ID NO: 9410 - protein, 13 aa, synthetic construct
  REGION 1..13: note = 45 kDa calcium-binding protein (340-352)
YSEFFTGSKLVDY

SEQ ID NO: 9411 - protein, 10 aa, synthetic construct
  REGION 1..10: note = Protein artemis (322-331)
YSEIKDFLSY

SEQ ID NO: 9412 - protein, 10 aa, synthetic construct
  REGION 1..10: note = Integrator complex subunit 6 (86-95)
YSELGHPFGY

SEQ ID NO: 9413 - protein, 11 aa, synthetic construct
  REGION 1..11: note = Plectin (1309-1319)
YSELTTLTSQY

SEQ ID NO: 9414 - protein, 10 aa, synthetic construct
  REGION 1..10: note = Vacuolar protein sorting-associated protein 13C (3362-3371)
YSEQFLKQMY

SEQ ID NO: 9415 - protein, 9 aa, synthetic construct
  REGION 1..9: note = Protein Lines homolog 1 (181-189)
YSESNKAIY

SEQ ID NO: 9416 - protein, 12 aa, synthetic construct
  REGION 1..12: note = Proline-rich protein 7 (145-156)
YSEVLTDTRGLY

SEQ ID NO: 9417 - protein, 10 aa, synthetic construct
  REGION 1..10: note = Zinc finger MIZ domain-containing protein 2 (269-278)
YSEVYPGQQY

SEQ ID NO: 9418 - protein, 12 aa, synthetic construct
  REGION 1..12: note = Annexin A4 (298-309)
YSFIKGDTSGDY

SEQ ID NO: 9419 - protein, 10 aa, synthetic construct
  REGION 1..10: note = Nucleoporin NUP188 homolog (239-248)
YSFLDKMSFY

SEQ ID NO: 9420 - protein, 9 aa, synthetic construct
  REGION 1..9: note = RNA-binding protein 5 (374-382)
YSQDYQQFY

SEQ ID NO: 9421 - protein, 12 aa, synthetic construct
  REGION 1..12: note = Serine/arginine-rich splicing factor 10 (105-116)
YSSSRYDDYDRY

SEQ ID NO: 9422 - protein, 9 aa, synthetic construct
  REGION 1..9: note = Interferon-induced helicase C domain-containing protein 1 (5-13)
YSTDENFRY

SEQ ID NO: 9423 - protein, 9 aa, synthetic construct
  REGION 1..9: note = Filamin-A (1685-1693)
YTAPQPGKY

SEQ ID NO: 9424 - protein, 12 aa, synthetic construct
  REGION 1..12: note = DAZ-associated protein 2 (35-46)
YTDAPPAYSELY

SEQ ID NO: 9425 - protein, 8 aa, synthetic construct
  REGION 1..8: note = Tetraspanin-4 (107-114)
YTDKIDRY

SEQ ID NO: 9426 - protein, 10 aa, synthetic construct
  REGION 1..10: note = Serine/threonine-protein phosphatase PP1-beta catalytic subunit (68-77)
YTDLLRLFEY

SEQ ID NO: 9427 - protein, 12 aa, synthetic construct
  REGION 1..12: note = E3 ubiquitin-protein ligase HUWE1 (157-168)
YTDMESEDYHFY

SEQ ID NO: 9428 - protein, 11 aa, synthetic construct
  REGION 1..11: note = Chromodomain-helicase-DNA-binding protein 8 (513-523)
YTEAEEFFVKY

SEQ ID NO: 9429 - protein, 10 aa, synthetic construct
  REGION 1..10: note = Protein transport protein Sec61 subunit beta (59-68)
YTEDSPGLKV

SEQ ID NO: 9430 - protein, 13 aa, synthetic construct
  REGION 1..13: note = DNA-directed RNA polymerases I, II, and III subunit RPABC5 (29-41)
YTEGDALDALGLK

SEQ ID NO: 9431 - protein, 15 aa, synthetic construct
  REGION 1..15: note = DNA-directed RNA polymerases I, II, and III subunit RPABC5 (29-43)
YTEGDALDALGLKRY

SEQ ID NO: 9432 - protein, 11 aa, synthetic construct
  REGION 1..11: note = Ribosomal RNA small subunit methyltransferase NEP1 (207-217)
YTEKMVSISNY

SEQ ID NO: 9433 - protein, 10 aa, synthetic construct
  REGION 1..10: note = Presenilin-2 (112-121)
YTEKNGQLIY

SEQ ID NO: 9434 - protein, 11 aa, synthetic construct
  REGION 1..11: note = Exocyst complex component 4 (66-76)
YTELTTAIRTY

SEQ ID NO: 9435 - protein, 10 aa, synthetic construct
  REGION 1..10: note = Prolyl 3-hydroxylase 2 (212-221)
YTEPNYWIRY

SEQ ID NO: 9436 - protein, 11 aa, synthetic construct
  REGION 1..11: note = Mitogen-activated protein kinase kinase kinase 1 (1349-1359)
YTEQLLRGLSY

SEQ ID NO: 9437 - protein, 12 aa, synthetic construct
  REGION 1..12: note = Coiled-coil domain-containing protein 121 (212-223)
YTEQPEKVWNSY

SEQ ID NO: 9438 - protein, 10 aa, synthetic construct
  REGION 1..10: note = Gamma-secretase subunit PEN-2 (47-56)
YTEQSQIKGY

SEQ ID NO: 9439 - protein, 9 aa, synthetic construct
  REGION 1..9: note = Vacuolar protein sorting-associated protein 18 homolog (381-389)
YTERAVFRY

SEQ ID NO: 9440 - protein, 12 aa, synthetic construct
  REGION 1..12: note = Osteoclast-stimulating factor 1 (21-32)
YTFEPRTPDELY

SEQ ID NO: 9441 - protein, 10 aa, synthetic construct
  REGION 1..10: note = Cleavage and polyadenylation specificity factor subunit 5 (45-54)
YTFGTKEPLY

SEQ ID NO: 9442 - protein, 9 aa, synthetic construct
  REGION 1..9: note = Coatomer subunit alpha (543-551)
YTTSNHIKY

SEQ ID NO: 9443 - protein, 11 aa, synthetic construct
  REGION 1..11: note = Nodal modulator 2 (270-280)
YTVSREDGSFS

SEQ ID NO: 9444 - protein, 13 aa, synthetic construct
  REGION 1..13: note = Nodal modulator 2 (270-282)
YTVSREDGSFSFY

SEQ ID NO: 9445 - protein, 12 aa, synthetic construct
  REGION 1..12: note = Nuclear pore complex protein Nup160 (1174-1185)
YVDAVLGKGHQY

SEQ ID NO: 9446 - protein, 10 aa, synthetic construct
  REGION 1..10: note = General transcription factor 3C polypeptide 1 (627-636)
YVDDASWMRY

SEQ ID NO: 9447 - protein, 9 aa, synthetic construct
  REGION 1..9: note = 39S ribosomal protein L35, mitochondrial (172-180)
YVDDPYQKY

SEQ ID NO: 9448 - protein, 10 aa, synthetic construct
  REGION 1..10: note = UDP-N-acetylhexosamine pyrophosphorylase-like protein 1 (277-286)
YVDEEGNLVK

SEQ ID NO: 9449 - protein, 12 aa, synthetic construct
  REGION 1..12: note = RNA-binding protein 39 (436-447)
YVDKNSAQGNVY

SEQ ID NO: 9450 - protein, 9 aa, synthetic construct
  REGION 1..9: note = Thioredoxin-like protein AAED1 (118-126)
YVDPEREIY

SEQ ID NO: 9451 - protein, 11 aa, synthetic construct
  REGION 1..11: note = Transmembrane emp24 domain-containing protein 3 (68-78)
YVEDPQGNTIY

SEQ ID NO: 9452 - protein, 9 aa, synthetic construct
  REGION 1..9: note = Vacuole membrane protein 1 (94-102)
YVEGVHQQY

SEQ ID NO: 9453 - protein, 11 aa, synthetic construct
  REGION 1..11: note = Eukaryotic translation initiation factor 3 subunit K (32-42)
YVETQAKENAY

SEQ ID NO: 9454 - protein, 10 aa, synthetic construct
  REGION 1..10: note = Serine/threonine-protein kinase mTOR (89-98)
AIASLIGVEG

SEQ ID NO: 9455 - protein, 9 aa, synthetic construct
  REGION 1..9: note = Eukaryotic translation initiation factor 4 gamma 1 (1248-1256)
AIIEEYLHL

SEQ ID NO: 9456 - protein, 9 aa, synthetic construct
  REGION 1..9: note = Protein timeless homolog (848-856)
AILAHLNTV

SEQ ID NO: 9457 - protein, 9 aa, synthetic construct
  REGION 1..9: note = Zinc finger and BTB domain-containing protein 6 (396-404)
ALKKHLTSV

SEQ ID NO: 9458 - protein, 9 aa, synthetic construct
  REGION 1..9: note = Small subunit processome component 20 homolog (626-634)
ALMELFPKL

SEQ ID NO: 9459 - protein, 9 aa, synthetic construct
  REGION 1..9: note = Ribosome-binding protein 1 (124-132)
ALQKRLDEV

SEQ ID NO: 9460 - protein, 10 aa, synthetic construct
  REGION 1..10: note = Cytochrome c oxidase subunit 7A2, mitochondrial (74-83)
AVASFPKKQE

SEQ ID NO: 9461 - protein, 9 aa, synthetic construct
  REGION 1..9: note = DNA-dependent protein kinase catalytic subunit (145-153)
DEFKIGELF

SEQ ID NO: 9462 - protein, 9 aa, synthetic construct
  REGION 1..9: note = Exosome component 10 (58-66)
DEYDFYRSF

SEQ ID NO: 9463 - protein, 14 aa, synthetic construct
  REGION 1..14: note = Peptidyl-prolyl cis-trans isomerase A (9-22)
DIAVDGEPLGRVSF

SEQ ID NO: 9464 - protein, 21 aa, synthetic construct
  REGION 1..21: note = Endoplasmin (783-803)
DVGTDEEEETAKESTAEKDEL

SEQ ID NO: 9465 - protein, 9 aa, synthetic construct
  REGION 1..9: note = Zinc finger protein 638 (1756-1764)
EEDEDSLAD

SEQ ID NO: 9466 - protein, 9 aa, synthetic construct
  REGION 1..9: note = Inner centromere protein (48-56)
EFSKEPELM

SEQ ID NO: 9467 - protein, 9 aa, synthetic construct
  REGION 1..9: note = ATP-binding cassette sub-family A member 3 (1686-1694)
EQVFLSFAH

SEQ ID NO: 9468 - protein, 10 aa, synthetic construct
  REGION 1..10: note = Vinculin (10-19)
ESILEPVAQQ

SEQ ID NO: 9469 - protein, 9 aa, synthetic construct
  REGION 1..9: note = Microtubule-associated protein 1A (806-814)
ETELTYPTN

SEQ ID NO: 9470 - protein, 10 aa, synthetic construct
  REGION 1..10: note = C-Jun-amino-terminal kinase-interacting protein 2 (683-692)
FDVQFLGSVE

SEQ ID NO: 9471 - protein, 19 aa, synthetic construct
  REGION 1..19: note = Cytochrome c oxidase subunit 7C, mitochondrial (45-63)
FGSAFATPFLVVRHQLLKT

SEQ ID NO: 9472 - protein, 25 aa, synthetic construct
  REGION 1..25: note = Peptidyl-prolyl cis-trans isomerase A (88-112)
FILKHTGPGILSMANAGPNTNGSQF

SEQ ID NO: 9473 - protein, 10 aa, synthetic construct
  REGION 1..10: note = Elongation factor 1-alpha 1 (415-424)
FSDYPPLGRF

SEQ ID NO: 9474 - protein, 14 aa, synthetic construct
  REGION 1..14: note = Elongation factor 1-beta (2-15)
GFGDLKSPAGLQVL

SEQ ID NO: 9475 - protein, 23 aa, synthetic construct
  REGION 1..23: note = Elongation factor 1-beta (2-24)
GFGDLKSPAGLQVLNDYLADKSY

SEQ ID NO: 9476 - protein, 10 aa, synthetic construct
  REGION 1..10: note = Plakophilin-2 (581-590)
GLIDSLVHYV

SEQ ID NO: 9477 - protein, 15 aa, synthetic construct
  REGION 1..15: note = Peptidyl-prolyl cis-trans isomerase A (10-24)
IAVDGEPLGRVSFEL

SEQ ID NO: 9478 - protein, 9 aa, synthetic construct
  REGION 1..9: note = 39S ribosomal protein L34, mitochondrial (58-66)
IKRKNKHGW

SEQ ID NO: 9479 - protein, 9 aa, synthetic construct
  REGION 1..9: note = Centrosome-associated protein 350 (2297-2305)
ILSKKDLPL

SEQ ID NO: 9480 - protein, 16 aa, synthetic construct
  REGION 1..16: note = Glyceraldehyde-3-phosphate dehydrogenase (269-284)
ISWYDNEFGYSNRVVD

SEQ ID NO: 9481 - protein, 19 aa, synthetic construct
  REGION 1..19: note = Macrophage migration inhibitory factor (3-21)
IVNTNVPRASVPDGFLSEL

SEQ ID NO: 9482 - protein, 9 aa, synthetic construct
  REGION 1..9: note = T-complex protein 1 subunit theta (234-242)
KYNIMLVRL

SEQ ID NO: 9483 - protein, 9 aa, synthetic construct
  REGION 1..9: note = Ras-related protein Rab-27A (178-186)
LDLIMKRME

SEQ ID NO: 9484 - protein, 9 aa, synthetic construct
  REGION 1..9: note = Uncharacterized protein C18orf8 (501-509)
LHELVIKTL

SEQ ID NO: 9485 - protein, 9 aa, synthetic construct
  REGION 1..9: note = ER membrane protein complex subunit 1 (641-649)
LLIDDEYKV

SEQ ID NO: 9486 - protein, 9 aa, synthetic construct
  REGION 1..9: note = DNA-dependent protein kinase catalytic subunit (2836-2844)
LLQDFNRFL

SEQ ID NO: 9487 - protein, 9 aa, synthetic construct
  REGION 1..9: note = Acyl-CoA desaturase (132-140)
LPLRLFLII

SEQ ID NO: 9488 - protein, 9 aa, synthetic construct
  REGION 1..9: note = Serine/threonine-protein kinase tousled-like 1 (49-57)
MDELASLDP

SEQ ID NO: 9489 - protein, 14 aa, synthetic construct
  REGION 1..14: note = Protein S100-A4 (59-72)
MSNLDSNRDNEVDF

SEQ ID NO: 9490 - protein, 9 aa, synthetic construct
  REGION 1..9: note = Centriolin (2174-2182)
NLNQFLPEL

SEQ ID NO: 9491 - protein, 9 aa, synthetic construct
  REGION 1..9: note = Transcriptional repressor CTCF (102-110)
NMEEQPINI

SEQ ID NO: 9492 - protein, 9 aa, synthetic construct
  REGION 1..9: note = Golgin subfamily A member 3 (875-883)
RLDSELKEL

SEQ ID NO: 9493 - protein, 22 aa, synthetic construct
  REGION 1..22: note = Cytochrome c oxidase subunit 7C, mitochondrial (17-38)
SHYEEGPGKNLPFSVENKWSLL

SEQ ID NO: 9494 - protein, 11 aa, synthetic construct
  REGION 1..11: note = Midasin (1471-1481)
SLADDSVLERL

SEQ ID NO: 9495 - protein, 9 aa, synthetic construct
  REGION 1..9: note = Cullin-7 (999-1007)
SLHTELNSV

SEQ ID NO: 9496 - protein, 9 aa, synthetic construct
  REGION 1..9: note = Small subunit processome component 20 homolog (299-307)
SLLDLHTKV

SEQ ID NO: 9497 - protein, 11 aa, synthetic construct
  REGION 1..11: note = Death-inducer obliterator 1 (941-951)
SPLEDLSPCPA

SEQ ID NO: 9498 - protein, 11 aa, synthetic construct
  REGION 1..11: note = Glycogen debranching enzyme (980-990)
TIAEVGKWLQA

SEQ ID NO: 9499 - protein, 9 aa, synthetic construct
  REGION 1..9: note = Inositol 1,4,5-trisphosphate receptor type 3 (2354-2362)
TLFNVIKSV

SEQ ID NO: 9500 - protein, 9 aa, synthetic construct
  REGION 1..9: note = Transmembrane protein 181 (304-312)
TYNPAFSRL

SEQ ID NO: 9501 - protein, 10 aa, synthetic construct
  REGION 1..10: note = A-kinase anchor protein 9 (1398-1407)
VDSVVITESD

SEQ ID NO: 9502 - protein, 9 aa, synthetic construct
  REGION 1..9: note = Signal peptidase complex catalytic subunit SEC11A (146-154)
VPYIGIVTI

SEQ ID NO: 9503 - protein, 9 aa, synthetic construct
  REGION 1..9: note = E3 ubiquitin-protein ligase MYLIP (431-439)
VYLPTHTSL

SEQ ID NO: 9504 - protein, 9 aa, synthetic construct
  REGION 1..9: note = Guanine nucleotide-binding protein G(i) subunit alpha-2 (155-163)
YYLNDLERI

SEQ ID NO: 9505 - protein, 9 aa, synthetic construct
  REGION 1..9: note = Peptidyl-prolyl cis-trans isomerase FKBP4 (372-380)
ARADFQKVL

SEQ ID NO: 9506 - protein, 9 aa, synthetic construct
  REGION 1..9: note = Metaxin-1 (300-308)
ARAPGTRTL

SEQ ID NO: 9507 - protein, 9 aa, synthetic construct
  REGION 1..9: note = Exosome component 10 (437-445)
ARDDTHYLL

SEQ ID NO: 9508 - protein, 11 aa, synthetic construct
  REGION 1..11: note = Annexin A2 (195-205)
ARDLYDAGVKR

SEQ ID NO: 9509 - protein, 9 aa, synthetic construct
  REGION 1..9: note = Coronin-1C (333-341)
ARFFKLHER

SEQ ID NO: 9510 - protein, 9 aa, synthetic construct
  REGION 1..9: note = Uncharacterized protein KIAA1143 (19-27)
ARFKERVGY

SEQ ID NO: 9511 - protein, 10 aa, synthetic construct
  REGION 1..10: note = Disabled homolog 2 (41-50)
ARFKGDGVKY

SEQ ID NO: 9512 - protein, 10 aa, synthetic construct
  REGION 1..10: note = Serine/threonine-protein kinase tousled-like 2 (17-26)
ARFTGVGVSK

SEQ ID NO: 9513 - protein, 9 aa, synthetic construct
  REGION 1..9: note = ER degradation-enhancing alpha-mannosidase-like protein 1 (134-142)
ARGMFVFGY

SEQ ID NO: 9514 - protein, 12 aa, synthetic construct
  REGION 1..12: note = Lon protease homolog 2, peroxisomal (291-302)
ARILLDNDHYAM

SEQ ID NO: 9515 - protein, 9 aa, synthetic construct
  REGION 1..9: note = Chromodomain-helicase-DNA-binding protein 4 (1901-1909)
ARIPPVAVR

SEQ ID NO: 9516 - protein, 10 aa, synthetic construct
  REGION 1..10: note = Actin-related protein 2/3 complex subunit 4 (157-166)
ARIVAEEFLK

SEQ ID NO: 9517 - protein, 9 aa, synthetic construct
  REGION 1..9: note = Coiled-coil domain-containing protein 85B (34-42)
ARLAALVQR

SEQ ID NO: 9518 - protein, 11 aa, synthetic construct
  REGION 1..11: note = THO complex subunit 5 homolog (189-199)
ARLDWELEQRK

SEQ ID NO: 9519 - protein, 10 aa, synthetic construct
  REGION 1..10: note = Squamous cell carcinoma antigen recognized by T-cells 3 (242-251)
ARLEKVHSLF

SEQ ID NO: 9520 - protein, 9 aa, synthetic construct
  REGION 1..9: note = G patch domain-containing protein 4 (161-169)
ARLGITMKA

SEQ ID NO: 9521 - protein, 9 aa, synthetic construct
  REGION 1..9: note = Natural resistance-associated macrophage protein 2 (119-127)
ARLGVVTGL

SEQ ID NO: 9522 - protein, 10 aa, synthetic construct
  REGION 1..10: note = WD repeat-containing protein 36 (93-102)
ARNKEIVHTF

SEQ ID NO: 9523 - protein, 9 aa, synthetic construct
  REGION 1..9: note = General transcription factor 3C polypeptide 1 (196-204)
ARSELLTTV

SEQ ID NO: 9524 - protein, 9 aa, synthetic construct
  REGION 1..9: note = Nucleolin (392-400)
ARTLLAKNL

SEQ ID NO: 9525 - protein, 9 aa, synthetic construct
  REGION 1..9: note = S-adenosyl-L-methionine-dependent tRNA 4-demethylwyosine synthase (634-642)
ARTPHWALF

SEQ ID NO: 9526 - protein, 9 aa, synthetic construct
  REGION 1..9: note = Puromycin-sensitive aminopeptidase (236-244)
ARTPVMSTY

SEQ ID NO: 9527 - protein, 9 aa, synthetic construct
  REGION 1..9: note = Puromycin-sensitive aminopeptidase-like protein (236-244)
ARTPVTSTY

SEQ ID NO: 9528 - protein, 9 aa, synthetic construct
  REGION 1..9: note = Protocadherin gamma-A11 (880-888)
ARYGPQFTL

SEQ ID NO: 9529 - protein, 9 aa, synthetic construct
  REGION 1..9: note = Protein ELYS (743-751)
ERIEKLWKR

SEQ ID NO: 9530 - protein, 9 aa, synthetic construct
  REGION 1..9: note = Unconventional myosin-Ic (223-231)
ERNPQSYLY

SEQ ID NO: 9531 - protein, 9 aa, synthetic construct
  REGION 1..9: note = TRPM8 channel-associated factor 1 (164-172)
FRGPLVINR

SEQ ID NO: 9532 - protein, 9 aa, synthetic construct
  REGION 1..9: note = Translocon-associated protein subunit alpha (124-132)
FRYPQDYQF

SEQ ID NO: 9533 - protein, 10 aa, synthetic construct
  REGION 1..10: note = Protein DEK (128-137)
GQFSGFPFEK

SEQ ID NO: 9534 - protein, 9 aa, synthetic construct
  REGION 1..9: note = DAZ-associated protein 2 (5-13)
GQYPTQPTY

SEQ ID NO: 9535 - protein, 10 aa, synthetic construct
  REGION 1..10: note = Sorting and assembly machinery component 50 homolog (154-163)
GRAEKVTFQF

SEQ ID NO: 9536 - protein, 10 aa, synthetic construct
  REGION 1..10: note = Replication protein A 32 kDa subunit (83-92)
GRAPISNPGM

SEQ ID NO: 9537 - protein, 9 aa, synthetic construct
  REGION 1..9: note = Eukaryotic peptide chain release factor GTP-binding subunit ERF3A (142-150)
GRAYFETEK

SEQ ID NO: 9538 - protein, 9 aa, synthetic construct
  REGION 1..9: note = Actin, gamma-enteric smooth muscle (140-148)
GRDLTDYLM

SEQ ID NO: 9539 - protein, 9 aa, synthetic construct
  REGION 1..9: note = Protocadherin Fat 1 (1957-1965)
GRFAGLTSV

SEQ ID NO: 9540 - protein, 10 aa, synthetic construct
  REGION 1..10: note = H(+)/Cl(-) exchange transporter 7 (345-354)
GRFDSEKMAY

SEQ ID NO: 9541 - protein, 10 aa, synthetic construct
  REGION 1..10: note = Zinc finger protein 407 (271-280)
GRFDSSIIRI

SEQ ID NO: 9542 - protein, 10 aa, synthetic construct
  REGION 1..10: note = U2 small nuclear ribonucleoprotein B'' (185-194)
GRHDIAFVEF

SEQ ID NO: 9543 - protein, 11 aa, synthetic construct
  REGION 1..11: note = 40S ribosomal protein S4, X isoform (171-181)
GRIGVITNRER

SEQ ID NO: 9544 - protein, 11 aa, synthetic construct
  REGION 1..11: note = 40S ribosomal protein S11 (70-80)
GRILSGVVTKM

SEQ ID NO: 9545 - protein, 11 aa, synthetic construct
  REGION 1..11: note = Desmoplakin (1624-1634)
GRISTEEAIRK

SEQ ID NO: 9546 - protein, 9 aa, synthetic construct
  REGION 1..9: note = Protein PML (295-303)
GRLDAVLQR

SEQ ID NO: 9547 - protein, 10 aa, synthetic construct
  REGION 1..10: note = Plectin (581-590)
GRLDLQYAKL

SEQ ID NO: 9548 - protein, 9 aa, synthetic construct
  REGION 1..9: note = Kelch-like protein 7 (492-500)
GRLGHILEY

SEQ ID NO: 9549 - protein, 9 aa, synthetic construct
  REGION 1..9: note = H(+)/Cl(-) exchange transporter 3 (772-780)
GRLLGIITK

SEQ ID NO: 9550 - protein, 11 aa, synthetic construct
  REGION 1..11: note = Heat shock cognate 71 kDa protein (508-518)
GRLSKEDIERM

SEQ ID NO: 9551 - protein, 10 aa, synthetic construct
  REGION 1..10: note = Protein phosphatase 1 regulatory subunit 3C (303-312)
GRMENLASYR

SEQ ID NO: 9552 - protein, 9 aa, synthetic construct
  REGION 1..9: note = Integrin-linked protein kinase (45-53)
GRSAVVEML

SEQ ID NO: 9553 - protein, 9 aa, synthetic construct
  REGION 1..9: note = Interleukin-17 receptor C (13-21)
GRSPVVLSL

SEQ ID NO: 9554 - protein, 10 aa, synthetic construct
  REGION 1..10: note = Solute carrier family 22 member 18 (21-30)
GRSSVILLTY

SEQ ID NO: 9555 - protein, 11 aa, synthetic construct
  REGION 1..11: note = Insulin receptor substrate 2 (717-727)
GRTFPASGGGY

SEQ ID NO: 9556 - protein, 9 aa, synthetic construct
  REGION 1..9: note = Sodium/potassium-transporting ATPase subunit beta-1 (26-34)
GRTGGSWFK

SEQ ID NO: 9557 - protein, 9 aa, synthetic construct
  REGION 1..9: note = ATP-binding cassette sub-family B member 8, mitochondrial (643-651)
GRTVLVIAH

SEQ ID NO: 9558 - protein, 9 aa, synthetic construct
  REGION 1..9: note = ATP-dependent RNA helicase A (565-573)
GRTYPVQEY

SEQ ID NO: 9559 - protein, 10 aa, synthetic construct
  REGION 1..10: note = Sorbin and SH3 domain-containing protein 2 (299-308)
GRVGIFPISY

SEQ ID NO: 9560 - protein, 11 aa, synthetic construct
  REGION 1..11: note = Poly (ADP-ribose) polymerase 1 (590-600)
GRVGTVIGSNK

SEQ ID NO: 9561 - protein, 9 aa, synthetic construct
  REGION 1..9: note = Intraflagellar transport protein 172 homolog (293-301)
GRWEQAHKL

SEQ ID NO: 9562 - protein, 9 aa, synthetic construct
  REGION 1..9: note = Histidine-tRNA ligase, cytoplasmic (247-255)
GRYDGLVGM

SEQ ID NO: 9563 - protein, 10 aa, synthetic construct
  REGION 1..10: note = DNA mismatch repair protein Msh6 (337-346)
GRYSDSLVQK

SEQ ID NO: 9564 - protein, 11 aa, synthetic construct
  REGION 1..11: note = Anion exchange protein 2 (262-272)
HRFEDVPGVRR

SEQ ID NO: 9565 - protein, 9 aa, synthetic construct
  REGION 1..9: note = Probable cation-transporting ATPase 13A2 (626-634)
HRFPFSSAL

SEQ ID NO: 9566 - protein, 9 aa, synthetic construct
  REGION 1..9: note = 26S proteasome non-ATPase regulatory subunit 13 (23-31)
HRLEELYTK

SEQ ID NO: 9567 - protein, 10 aa, synthetic construct
  REGION 1..10: note = 26S proteasome non-ATPase regulatory subunit 13 (23-32)
HRLEELYTKK

SEQ ID NO: 9568 - protein, 9 aa, synthetic construct
  REGION 1..9: note = 40S ribosomal protein S16 (83-91)
IRQSISKAL

SEQ ID NO: 9569 - protein, 9 aa, synthetic construct
  REGION 1..9: note = RNA-binding motif protein 22 (258-266)
IRTITVVQR

SEQ ID NO: 9570 - protein, 9 aa, synthetic construct
  REGION 1..9: note = Protein MCM10 homolog (426-434)
KRADLQSTF

SEQ ID NO: 9571 - protein, 10 aa, synthetic construct
  REGION 1..10: note = Signal peptidase complex subunit 2 (164-173)
KRFDDKYTLK

SEQ ID NO: 9572 - protein, 11 aa, synthetic construct
  REGION 1..11: note = Unconventional myosin-Ib (37-47)
KRFDHSEIYTY

SEQ ID NO: 9573 - protein, 9 aa, synthetic construct
  REGION 1..9: note = Eukaryotic translation initiation factor 3 subunit C-like protein (55-63)
KRFEELTNL

SEQ ID NO: 9574 - protein, 9 aa, synthetic construct
  REGION 1..9: note = KIF1-binding protein (201-209)
KRFEKVYTH

SEQ ID NO: 9575 - protein, 9 aa, synthetic construct
  REGION 1..9: note = NADH dehydrogenase (ubiquinone) iron-sulfur protein 5 (8-16)
KRFGLNIDR

SEQ ID NO: 9576 - protein, 9 aa, synthetic construct
  REGION 1..9: note = Peptidyl-prolyl cis-trans isomerase FKBP3 (70-78)
KRFKGTESI

SEQ ID NO: 9577 - protein, 10 aa, synthetic construct
  REGION 1..10: note = Intron-binding protein aquarius (24-33)
KRHDLVKLGF

SEQ ID NO: 9578 - protein, 9 aa, synthetic construct
  REGION 1..9: note = THO complex subunit 5 homolog (342-350)
KRHPLSVML

SEQ ID NO: 9579 - protein, 9 aa, synthetic construct
  REGION 1..9: note = MAP/microtubule affinity-regulating kinase 3 (330-338)
KRIDIMVGM

SEQ ID NO: 9580 - protein, 10 aa, synthetic construct
  REGION 1..10: note = NADH dehydrogenase (ubiquinone) flavoprotein 2, mitochondrial (61-70)
KRIEAIVKNY

SEQ ID NO: 9581 - protein, 9 aa, synthetic construct
  REGION 1..9: note = ATP-binding cassette sub-family F member 2 (275-283)
KRILVLVSH

SEQ ID NO: 9582 - protein, 9 aa, synthetic construct
  REGION 1..9: note = Ceramide synthase 5 (210-218)
KRKDFLIMF

SEQ ID NO: 9583 - protein, 9 aa, synthetic construct
  REGION 1..9: note = Probable ATP-dependent RNA helicase DDX47 (296-304)
KRLGSLNKF

SEQ ID NO: 9584 - protein, 9 aa, synthetic construct
  REGION 1..9: note = Transcription intermediary factor 1-beta (207-215)
KRVQVDVKM

SEQ ID NO: 9585 - protein, 9 aa, synthetic construct
  REGION 1..9: note = Arginine-tRNA ligase, cytoplasmic (579-587)
LRFPEILQK

SEQ ID NO: 9586 - protein, 9 aa, synthetic construct
  REGION 1..9: note = Neurosecretory protein VGF (4-12)
LRLSASALF

SEQ ID NO: 9587 - protein, 9 aa, synthetic construct
  REGION 1..9: note = Large proline-rich protein BAG6 (1102-1110)
LRSDIQKRL

SEQ ID NO: 9588 - protein, 11 aa, synthetic construct
  REGION 1..11: note = Ribonucleoside-diphosphate reductase subunit M2 (271-281)
LRWIGDKEATY

SEQ ID NO: 9589 - protein, 10 aa, synthetic construct
  REGION 1..10: note = T-complex protein 1 subunit gamma (305-314)
MRANITAIRR

SEQ ID NO: 9590 - protein, 9 aa, synthetic construct
  REGION 1..9: note = U8 snoRNA-decapping enzyme (48-56)
MRFDGRLGF

SEQ ID NO: 9591 - protein, 9 aa, synthetic construct
  REGION 1..9: note = Epididymal secretory protein E1 (1-9)
MRFLAATFL

SEQ ID NO: 9592 - protein, 9 aa, synthetic construct
  REGION 1..9: note = 26S proteasome non-ATPase regulatory subunit 2 (477-485)
MRLGSIFGL

SEQ ID NO: 9593 - protein, 9 aa, synthetic construct
  REGION 1..9: note = Translocon-associated protein subunit alpha (1-9)
MRLLPRLLL

SEQ ID NO: 9594 - protein, 10 aa, synthetic construct
  REGION 1..10: note = Phenylalanine-tRNA ligase alpha subunit (94-103)
MRLPSGKVGF

SEQ ID NO: 9595 - protein, 9 aa, synthetic construct
  REGION 1..9: note = Dipeptidyl peptidase 8 (31-39)
NRFKGVKYF

SEQ ID NO: 9596 - protein, 9 aa, synthetic construct
  REGION 1..9: note = E3 ubiquitin-protein ligase UHRF1 (553-561)
NRYDGIYKV

SEQ ID NO: 9597 - protein, 9 aa, synthetic construct
  REGION 1..9: note = ATP-dependent RNA helicase DDX19B (371-379)
QRAAVIERF

SEQ ID NO: 9598 - protein, 9 aa, synthetic construct
  REGION 1..9: note = V-type proton ATPase subunit H (106-114)
QRVSIFFDY

SEQ ID NO: 9599 - protein, 9 aa, synthetic construct
  REGION 1..9: note = Zinc finger protein 536 (380-388)
RRFKEPWFL

SEQ ID NO: 9600 - protein, 9 aa, synthetic construct
  REGION 1..9: note = F-box only protein 25 (53-61)
RRFNYVVKL

SEQ ID NO: 9601 - protein, 9 aa, synthetic construct
  REGION 1..9: note = Myosin-9 (1209-1217)
RRGDLPFVV

SEQ ID NO: 9602 - protein, 11 aa, synthetic construct
  REGION 1..11: note = Plectin (1853-1863)
RRLAEDEAFQR

SEQ ID NO: 9603 - protein, 11 aa, synthetic construct
  REGION 1..11: note = 60S ribosomal protein L15 (143-153)
RRNPDTQWITK

SEQ ID NO: 9604 - protein, 9 aa, synthetic construct
  REGION 1..9: note = E3 SUMO-protein ligase RanBP2 (1126-1134)
RRSDDMFTF

SEQ ID NO: 9605 - protein, 9 aa, synthetic construct
  REGION 1..9: note = F-box only protein 21 (295-303)
RRTGIPISM

SEQ ID NO: 9606 - protein, 9 aa, synthetic construct
  REGION 1..9: note = Prelamin-A/C (40-48)
RRVDAENRL

SEQ ID NO: 9607 - protein, 10 aa, synthetic construct
  REGION 1..10: note = Polymerase I and transcript release factor (137-146)
RRVDDFKKAF

SEQ ID NO: 9608 - protein, 12 aa, synthetic construct
  REGION 1..12: note = Polymerase I and transcript release factor (137-148)
RRVDDFKKAFSK

SEQ ID NO: 9609 - protein, 10 aa, synthetic construct
  REGION 1..10: note = Hsp90 co-chaperone Cdc37 (166-175)
RRWDDSQKYL

SEQ ID NO: 9610 - protein, 9 aa, synthetic construct
  REGION 1..9: note = Vascular endothelial growth factor A (62-70)
SRFGGAVVR

SEQ ID NO: 9611 - protein, 9 aa, synthetic construct
  REGION 1..9: note = Lysosomal protective protein (472-480)
SRFLNKQPY

SEQ ID NO: 9612 - protein, 9 aa, synthetic construct
  REGION 1..9: note = Decapping and exoribonuclease protein (154-162)
SRFQGTLYL

SEQ ID NO: 9613 - protein, 10 aa, synthetic construct
  REGION 1..10: note = Glia-derived nexin (207-216)
SRFQPENTKK

SEQ ID NO: 9614 - protein, 9 aa, synthetic construct
  REGION 1..9: note = Signal transducer and activator of transcription 1-alpha/beta (69-77)
SRFSLENNF

SEQ ID NO: 9615 - protein, 9 aa, synthetic construct
  REGION 1..9: note = PITH domain-containing protein 1 (143-151)
SRFSNVYHL

SEQ ID NO: 9616 - protein, 9 aa, synthetic construct
  REGION 1..9: note = Gamma-aminobutyric acid receptor subunit beta-3 (452-460)
SRIVFPFTF

SEQ ID NO: 9617 - protein, 8 aa, synthetic construct
  REGION 1..8: note = Probable dolichyl pyrophosphate Glc1Man9GlcNAc2 alpha-1,3-glucosyltransferase (267-274)
SRLFPFKR

SEQ ID NO: 9618 - protein, 9 aa, synthetic construct
  REGION 1..9: note = Lysine-specific demethylase 3B (1181-1189)
SRLPSYFVR

SEQ ID NO: 9619 - protein, 9 aa, synthetic construct
  REGION 1..9: note = Arginine-tRNA ligase, cytoplasmic (78-86)
SRLQEVFGH

SEQ ID NO: 9620 - protein, 10 aa, synthetic construct
  REGION 1..10: note = Myeloid leukemia factor 2 (28-37)
SRMLSGGFGY

SEQ ID NO: 9621 - protein, 9 aa, synthetic construct
  REGION 1..9: note = Protein diaphanous homolog 2 (855-863)
SRNAQSLGF

SEQ ID NO: 9622 - protein, 9 aa, synthetic construct
  REGION 1..9: note = Catenin beta-1 (646-654)
SRNEGVATY

SEQ ID NO: 9623 - protein, 9 aa, synthetic construct
  REGION 1..9: note = Nuclear protein localization protein 4 homolog (328-336)
SRNKDTYFL

SEQ ID NO: 9624 - protein, 11 aa, synthetic construct
  REGION 1..11: note = TOX high mobility group box family member 4 (588-598)
SRNSNTVVFVK

SEQ ID NO: 9625 - protein, 9 aa, synthetic construct
  REGION 1..9: note = Spectrin beta chain, non-erythrocytic 1 (903-911)
SRVAVVNQI

SEQ ID NO: 9626 - protein, 10 aa, synthetic construct
  REGION 1..10: note = Aldehyde dehydrogenase family 1 member A3 (318-327)
SRVFVEEQVY

SEQ ID NO: 9627 - protein, 9 aa, synthetic construct
  REGION 1..9: note = Dystonin (6683-6691)
SRWEKVVQR

SEQ ID NO: 9628 - protein, 11 aa, synthetic construct
  REGION 1..11: note = Phosphatidylinositol-binding clathrin assembly protein (128-138)
SRYLNEKAVSY

SEQ ID NO: 9629 - protein, 10 aa, synthetic construct
  REGION 1..10: note = TRPM8 channel-associated factor 1 (46-55)
SRYRLPVATR

SEQ ID NO: 9630 - protein, 9 aa, synthetic construct
  REGION 1..9: note = Protein yippee-like 5 (33-41)
TRFTGATGR

SEQ ID NO: 9631 - protein, 9 aa, synthetic construct
  REGION 1..9: note = 78 kDa glucose-regulated protein (364-372)
TRIPKIQQL

SEQ ID NO: 9632 - protein, 9 aa, synthetic construct
  REGION 1..9: note = Ubiquitin-like protein 5 (37-45)
TRWNKIVLK

SEQ ID NO: 9633 - protein, 9 aa, synthetic construct
  REGION 1..9: note = Zinc finger BED domain-containing protein 5 (574-582)
VRNPFTVTV

SEQ ID NO: 9634 - protein, 10 aa, synthetic construct
  REGION 1..10: note = Proteasome subunit beta type-4 (223-232)
YRDARSYNRF

SEQ ID NO: 9635 - protein, 10 aa, synthetic construct
  REGION 1..10: note = Proteasome subunit beta type-4 (22-31)
YRIPSTPDSF

SEQ ID NO: 9636 - protein, 10 aa, synthetic construct
  REGION 1..10: note = Rho GTPase-activating protein 5 (1010-1019)
YRLDLEGNEY

SEQ ID NO: 9637 - protein, 9 aa, synthetic construct
  REGION 1..9: note = Pre-mRNA-processing-splicing factor 8 (1786-1794)
YRVTIHKTF

SEQ ID NO: 9638 - protein, 9 aa, synthetic construct
  REGION 1..9: note = Arginine-glutamic acid dipeptide repeats protein (336-344)
AAAYPHTSL

SEQ ID NO: 9639 - protein, 10 aa, synthetic construct
  REGION 1..10: note = Lon protease homolog 2, peroxisomal (789-798)
AAFDGGFTVK

SEQ ID NO: 9640 - protein, 9 aa, synthetic construct
  REGION 1..9: note = Double-stranded RNA-binding protein Staufen homolog 2 (139-147)
AAMKALQAL

SEQ ID NO: 9641 - protein, 10 aa, synthetic construct
  REGION 1..10: note = 26S proteasome non-ATPase regulatory subunit 14 (301-310)
AAMLDTVVFK

SEQ ID NO: 9642 - protein, 9 aa, synthetic construct
  REGION 1..9: note = 40S ribosomal protein S17 (12-20)
AARVIIEKY

SEQ ID NO: 9643 - protein, 9 aa, synthetic construct
  REGION 1..9: note = Endoplasmic reticulum resident protein 29 (3-11)
AAVPRAAFL

SEQ ID NO: 9644 - protein, 9 aa, synthetic construct
  REGION 1..9: note = Tyrosine-protein phosphatase non-receptor type 1 (264-272)
ADQLRFSYL

SEQ ID NO: 9645 - protein, 9 aa, synthetic construct
  REGION 1..9: note = ATP-dependent RNA helicase DDX18 (335-343)
ADRILDVGF

SEQ ID NO: 9646 - protein, 9 aa, synthetic construct
  REGION 1..9: note = Spectrin alpha chain, non-erythrocytic 1 (781-789)
ADSLRLQQL

SEQ ID NO: 9647 - protein, 8 aa, synthetic construct
  REGION 1..8: note = Exosome complex exonuclease RRP44 (753-760)
ADVIVHRL

SEQ ID NO: 9648 - protein, 9 aa, synthetic construct
  REGION 1..9: note = Trafficking protein particle complex subunit 4 (26-34)
AEAEKTFSY

SEQ ID NO: 9649 - protein, 9 aa, synthetic construct
  REGION 1..9: note = Plectin (2624-2632)
AEAEPEHSF

SEQ ID NO: 9650 - protein, 10 aa, synthetic construct
  REGION 1..10: note = Spectrin beta chain, non-erythrocytic 1 (1181-1190)
AEAFLNNQEY

SEQ ID NO: 9651 - protein, 11 aa, synthetic construct
  REGION 1..11: note = Structural maintenance of chromosomes protein 2 (370-380)
AEALAAAQQHF

SEQ ID NO: 9652 - protein, 9 aa, synthetic construct
  REGION 1..9: note = Coatomer subunit alpha (1048-1056)
AEAQQLITI

SEQ ID NO: 9653 - protein, 11 aa, synthetic construct
  REGION 1..11: note = Dihydropyrimidinase-related protein 1 (233-243)
AEAVFRAITIA

SEQ ID NO: 9654 - protein, 9 aa, synthetic construct
  REGION 1..9: note = Mitochondrial import receptor subunit TOM20 homolog (63-71)
AEAVQKFFL

SEQ ID NO: 9655 - protein, 11 aa, synthetic construct
  REGION 1..11: note = ADP-ribosylation factor 3 (112-122)
AEDELRDAVLL

SEQ ID NO: 9656 - protein, 10 aa, synthetic construct
  REGION 1..10: note = WD repeat-containing protein 26 (246-255)
AEDLRAKAEW

SEQ ID NO: 9657 - protein, 9 aa, synthetic construct
  REGION 1..9: note = Mitogen-activated protein kinase kinase kinase 3 (613-621)
AEELLTHHF

SEQ ID NO: 9658 - protein, 10 aa, synthetic construct
  REGION 1..10: note = LisH domain-containing protein ARMC9 (22-31)
AEFEDTLKTF

SEQ ID NO: 9659 - protein, 10 aa, synthetic construct
  REGION 1..10: note = RNA-binding protein 28 (545-554)
AEFQEHEHAL

SEQ ID NO: 9660 - protein, 9 aa, synthetic construct
  REGION 1..9: note = Tubulin alpha-1C chain (243-251)
AEKAYHEQL

SEQ ID NO: 9661 - protein, 9 aa, synthetic construct
  REGION 1..9: note = Junction plakoglobin (137-145)
AELATRALP

SEQ ID NO: 9662 - protein, 9 aa, synthetic construct
  REGION 1..9: note = Zinc finger protein 579 (465-473)
AELERAAAL

SEQ ID NO: 9663 - protein, 10 aa, synthetic construct
  REGION 1..10: note = Myosin-9 (780-789)
AELERLNKQF

SEQ ID NO: 9664 - protein, 9 aa, synthetic construct
  REGION 1..9: note = F-box/LRR-repeat protein 5 (165-173)
AELLRGLSL

SEQ ID NO: 9665 - protein, 11 aa, synthetic construct
  REGION 1..11: note = Cyclin-dependent kinase inhibitor 1C (51-61)
AELNAEDQNRW

SEQ ID NO: 9666 - protein, 10 aa, synthetic construct
  REGION 1..10: note = Calmodulin (104-113)
AELRHVMTNL

SEQ ID NO: 9667 - protein, 9 aa, synthetic construct
  REGION 1..9: note = Uridine phosphorylase 1 (195-203)
AELSEFTTV

SEQ ID NO: 9668 - protein, 9 aa, synthetic construct
  REGION 1..9: note = U5 small nuclear ribonucleoprotein 200 kDa helicase (318-326)
AELTGDHQL

SEQ ID NO: 9669 - protein, 9 aa, synthetic construct
  REGION 1..9: note = E3 ubiquitin/ISG15 ligase TRIM25 (482-490)
AEMPQNYRP

SEQ ID NO: 9670 - protein, 9 aa, synthetic construct
  REGION 1..9: note = Heterogeneous nuclear ribonucleoprotein U (399-407)
AENPGKYNI

SEQ ID NO: 9671 - protein, 9 aa, synthetic construct
  REGION 1..9: note = Nuclear pore complex protein Nup160 (377-385)
AENQTVVKY

SEQ ID NO: 9672 - protein, 9 aa, synthetic construct
  REGION 1..9: note = MORF4 family-associated protein 1 (10-18)
AEPEEVEVL

SEQ ID NO: 9673 - protein, 10 aa, synthetic construct
  REGION 1..10: note = Matrin-3 (229-238)
AEPYGKIKNY

SEQ ID NO: 9674 - protein, 9 aa, synthetic construct
  REGION 1..9: note = Exocyst complex component 1 (513-521)
AEQDFISKF

SEQ ID NO: 9675 - protein, 11 aa, synthetic construct
  REGION 1..11: note = Keratin, type I cytoskeletal 10 (133-143)
AEQNRKDAEAW

SEQ ID NO: 9676 - protein, 10 aa, synthetic construct
  REGION 1..10: note = 14 kDa phosphohistidine phosphatase (38-47)
AESKEIVRGY

SEQ ID NO: 9677 - protein, 9 aa, synthetic construct
  REGION 1..9: note = Heterogeneous nuclear ribonucleoproteins A2/B1 (61-69)
AEVDAAMAA

SEQ ID NO: 9678 - protein, 9 aa, synthetic construct
  REGION 1..9: note = Rho GTPase-activating protein 18 (654-662)
AEWVIKSKP

SEQ ID NO: 9679 - protein, 9 aa, synthetic construct
  REGION 1..9: note = RNA-binding protein 8A (94-102)
AEYGEIKNI

SEQ ID NO: 9680 - protein, 10 aa, synthetic construct
  REGION 1..10: note = Mitotic checkpoint serine/threonine-protein kinase BUB1 (76-85)
AEYNSDLHQF

SEQ ID NO: 9681 - protein, 11 aa, synthetic construct
  REGION 1..11: note = T-complex protein 1 subunit eta (249-259)
AGFDATNILNK

SEQ ID NO: 9682 - protein, 9 aa, synthetic construct
  REGION 1..9: note = Eukaryotic translation initiation factor 4 gamma 1 (1268-1276)
AGHLSTAQY

SEQ ID NO: 9683 - protein, 12 aa, synthetic construct
  REGION 1..12: note = Cytoplasmic dynein 1 heavy chain 1 (3396-3407)
AIAQLNYADMLK

SEQ ID NO: 9684 - protein, 11 aa, synthetic construct
  REGION 1..11: note = Transmembrane protein 131 (804-814)
AIFEVNTDLQK

SEQ ID NO: 9685 - protein, 9 aa, synthetic construct
  REGION 1..9: note = Mortality factor 4-like protein 1 (34-42)
AIKDKQVKY

SEQ ID NO: 9686 - protein, 9 aa, synthetic construct
  REGION 1..9: note = Endoribonuclease Dicer (608-616)
AILDYLITK

SEQ ID NO: 9687 - protein, 9 aa, synthetic construct
  REGION 1..9: note = Ceramide synthase 6 (81-89)
AILEKVFTA

SEQ ID NO: 9688 - protein, 11 aa, synthetic construct
  REGION 1..11: note = Aryl hydrocarbon receptor (422-432)
AIMDPLPLRTK

SEQ ID NO: 9689 - protein, 9 aa, synthetic construct
  REGION 1..9: note = MICOS complex subunit MIC25 (96-104)
AIQDKLFQV

SEQ ID NO: 9690 - protein, 9 aa, synthetic construct
  REGION 1..9: note = DNA mismatch repair protein Msh2 (765-773)
AISEYIATK

SEQ ID NO: 9691 - protein, 10 aa, synthetic construct
  REGION 1..10: note = Cytochrome b-c1 complex subunit 9 (42-51)
AIYDHINEGK

SEQ ID NO: 9692 - protein, 12 aa, synthetic construct
  REGION 1..12: note = Cytochrome c oxidase subunit 7A2, mitochondrial (69-80)
AIYELAVASFPK

SEQ ID NO: 9693 - protein, 11 aa, synthetic construct
  REGION 1..11: note = BCL-6 corepressor (147-157)
AIYKTPPGIQK

SEQ ID NO: 9694 - protein, 9 aa, synthetic construct
  REGION 1..9: note = Apolipoprotein L2 (101-109)
ALAEEVEQV

SEQ ID NO: 9695 - protein, 10 aa, synthetic construct
  REGION 1..10: note = Epidermal growth factor receptor substrate 15 (283-292)
ALAFHLISQK

SEQ ID NO: 9696 - protein, 9 aa, synthetic construct
  REGION 1..9: note = E3 ubiquitin-protein ligase RNF114 (70-78)
ALAPGVRAV

SEQ ID NO: 9697 - protein, 9 aa, synthetic construct
  REGION 1..9: note = Neudesin (124-132)
ALDEVFTKV

SEQ ID NO: 9698 - protein, 9 aa, synthetic construct
  REGION 1..9: note = JNK1/MAPK8-associated membrane protein (109-117)
ALFQHITAL

SEQ ID NO: 9699 - protein, 9 aa, synthetic construct
  REGION 1..9: note = Set1/Ash2 histone methyltransferase complex subunit ASH2 (290-298)
ALHDRAPQL

SEQ ID NO: 9700 - protein, 9 aa, synthetic construct
  REGION 1..9: note = Coiled-coil domain-containing protein 14 (24-32)
ALIEDEHNL

SEQ ID NO: 9701 - protein, 9 aa, synthetic construct
  REGION 1..9: note = Clustered mitochondria protein homolog (826-834)
ALLDNNIGL

SEQ ID NO: 9702 - protein, 10 aa, synthetic construct
  REGION 1..10: note = Lysine-specific demethylase 5C (683-692)
ALLEKGITEA

SEQ ID NO: 9703 - protein, 9 aa, synthetic construct
  REGION 1..9: note = Cleft lip and palate transmembrane protein 1 (348-356)
ALLETNPYL

SEQ ID NO: 9704 - protein, 9 aa, synthetic construct
  REGION 1..9: note = S100P-binding protein (349-357)
ALMDQVHHM

SEQ ID NO: 9705 - protein, 9 aa, synthetic construct
  REGION 1..9: note = Brefeldin A-inhibited guanine nucleotide-exchange protein 2 (869-877)
ALMEAVSHA

SEQ ID NO: 9706 - protein, 9 aa, synthetic construct
  REGION 1..9: note = Exosome complex component MTR3 (214-222)
ALMPVLNQV

SEQ ID NO: 9707 - protein, 11 aa, synthetic construct
  REGION 1..11: note = Endoplasmic reticulum resident protein 29 (38-48)
ALPLDTVTFYK

SEQ ID NO: 9708 - protein, 9 aa, synthetic construct
  REGION 1..9: note = Vimentin (268-276)
ALRDVRQQY

SEQ ID NO: 9709 - protein, 9 aa, synthetic construct
  REGION 1..9: note = Interferon regulatory factor 2-binding protein 1 (300-308)
ALREPGKAL

SEQ ID NO: 9710 - protein, 9 aa, synthetic construct
  REGION 1..9: note = PR domain zinc finger protein 4 (284-292)
ALSDSIHTV

SEQ ID NO: 9711 - protein, 9 aa, synthetic construct
  REGION 1..9: note = Annexin A2 (108-116)
ALSGHLETV

SEQ ID NO: 9712 - protein, 9 aa, synthetic construct
  REGION 1..9: note = Protein CutA (89-97)
ALTDFVRSV

SEQ ID NO: 9713 - protein, 10 aa, synthetic construct
  REGION 1..10: note = Trafficking protein particle complex subunit 2-like protein (19-28)
ALVDQRELYL

SEQ ID NO: 9714 - protein, 9 aa, synthetic construct
  REGION 1..9: note = Flap endonuclease 1 (165-173)
ALVKAGKVY

SEQ ID NO: 9715 - protein, 10 aa, synthetic construct
  REGION 1..10: note = Cofilin-1 (83-92)
ALYDATYETK

SEQ ID NO: 9716 - protein, 9 aa, synthetic construct
  REGION 1..9: note = COP9 signalosome complex subunit 2 (216-224)
ALYEQSLHI

SEQ ID NO: 9717 - protein, 13 aa, synthetic construct
  REGION 1..13: note = TGF-beta-activated kinase 1 and MAP3K7-binding protein 1 (311-323)
AMIDTEFAKQTSL

SEQ ID NO: 9718 - protein, 14 aa, synthetic construct
  REGION 1..14: note = Cyclin-dependent kinase 2-associated protein 2 (6-19)
AMKPPGAQGSQSTY

SEQ ID NO: 9719 - protein, 9 aa, synthetic construct
  REGION 1..9: note = Poly(rC)-binding protein 1 (249-257)
AMMHGGTGF

SEQ ID NO: 9720 - protein, 9 aa, synthetic construct
  REGION 1..9: note = Eyes absent homolog 3 (200-208)
APAPAAQRL

SEQ ID NO: 9721 - protein, 9 aa, synthetic construct
  REGION 1..9: note = Homocysteine-responsive endoplasmic reticulum-resident ubiquitin-like domain member 1 protein (211-219)
APAPIHNQF

SEQ ID NO: 9722 - protein, 9 aa, synthetic construct
  REGION 1..9: note = Wings apart-like protein homolog (598-606)
APAPPSKVI

SEQ ID NO: 9723 - protein, 9 aa, synthetic construct
  REGION 1..9: note = Pre-mRNA-splicing factor ATP-dependent RNA helicase PRP16 (41-49)
APAPRPSLL

SEQ ID NO: 9724 - protein, 9 aa, synthetic construct
  REGION 1..9: note = Two pore calcium channel protein 1 (59-67)
APAVPALRL

SEQ ID NO: 9725 - protein, 9 aa, synthetic construct
  REGION 1..9: note = Structural maintenance of chromosomes protein 3 (150-158)
APDSQRLKL

SEQ ID NO: 9726 - protein, 9 aa, synthetic construct
  REGION 1..9: note = Integrator complex subunit 3 (30-38)
APGGGRLLL

SEQ ID NO: 9727 - protein, 17 aa, synthetic construct
  REGION 1..17: note = Fructose-bisphosphate aldolase A (79-95)
APGKGILAADESTGSIA

SEQ ID NO: 9728 - protein, 9 aa, synthetic construct
  REGION 1..9: note = DNA/RNA-binding protein KIN17 (338-346)
APGKRILVL

SEQ ID NO: 9729 - protein, 10 aa, synthetic construct
  REGION 1..10: note = Ribonucleoprotein PTB-binding 1 (298-307)
APGPPGRSML

SEQ ID NO: 9730 - protein, 9 aa, synthetic construct
  REGION 1..9: note = Sterol regulatory element-binding protein 1 (1104-1112)
APGQRVGML

SEQ ID NO: 9731 - protein, 9 aa, synthetic construct
  REGION 1..9: note = E3 ubiquitin-protein ligase RNF114 (72-80)
APGVRAVEL

SEQ ID NO: 9732 - protein, 9 aa, synthetic construct
  REGION 1..9: note = LIM domain and actin-binding protein 1 (397-405)
APIAKVGVL

SEQ ID NO: 9733 - protein, 9 aa, synthetic construct
  REGION 1..9: note = Destrin (109-117)
APLKSKMIY

SEQ ID NO: 9734 - protein, 11 aa, synthetic construct
  REGION 1..11: note = Talin-1 (1688-1698)
APREGISQEAL

SEQ ID NO: 9735 - protein, 10 aa, synthetic construct
  REGION 1..10: note = NADH dehydrogenase (ubiquinone) 1 alpha subcomplex assembly factor 4 (30-39)
APRHPSTNSL

SEQ ID NO: 9736 - protein, 11 aa, synthetic construct
  REGION 1..11: note = Proline-rich nuclear receptor coactivator 2 (5-15)
APRLNSADRPM

SEQ ID NO: 9737 - protein, 9 aa, synthetic construct
  REGION 1..9: note = Zinc finger protein 526 (559-567)
APRLPITGL

SEQ ID NO: 9738 - protein, 9 aa, synthetic construct
  REGION 1..9: note = Protein Wiz (126-134)
APRPGLLSL

SEQ ID NO: 9739 - protein, 11 aa, synthetic construct
  REGION 1..11: note = Coiled-coil-helix-coiled-coil-helix domain-containing protein 2 (49-59)
APRQPGLMAQM

SEQ ID NO: 9740 - protein, 11 aa, synthetic construct
  REGION 1..11: note = PHD finger protein 23 (80-90)
APSDLRTIQTF

SEQ ID NO: 9741 - protein, 10 aa, synthetic construct
  REGION 1..10: note = Aladin (253-262)
APSGGRLLSA

SEQ ID NO: 9742 - protein, 9 aa, synthetic construct
  REGION 1..9: note = SWI/SNF-related matrix-associated actin-dependent regulator of chromatin subfamily A member 5 (16-24)
APSKPAASI

SEQ ID NO: 9743 - protein, 9 aa, synthetic construct
  REGION 1..9: note = Pre-mRNA-processing-splicing factor 8 (2018-2026)
APSQQRQQI

SEQ ID NO: 9744 - protein, 10 aa, synthetic construct
  REGION 1..10: note Dolichyl-diphosphooligosaccharide-proteinosyltransferase 48 kDa subunit (183-192)
APTIVGKSSL

SEQ ID NO: 9745 - protein, 13 aa, synthetic construct
  REGION 1..13: note = Eukaryotic initiation factor 4A-II (75-87)
AQAQSGTGKTATF

SEQ ID NO: 9746 - protein, 15 aa, synthetic construct
  REGION 1..15: note = Crooked neck-like protein 1 (704-718)
AQFELSSGKEGSLTK

SEQ ID NO: 9747 - protein, 9 aa, synthetic construct
  REGION 1..9: note = Carboxymethylenebutenolidase homolog (123-131)
AQKIGIVGF

SEQ ID NO: 9748 - protein, 9 aa, synthetic construct
  REGION 1..9: note = Suppressor of SWI4 1 homolog (17-25)
AQLRNLEAY

SEQ ID NO: 9749 - protein, 10 aa, synthetic construct
  REGION 1..10: note = Hsc70-interacting protein (339-348)
AQNPANMSKY

SEQ ID NO: 9750 - protein, 9 aa, synthetic construct
  REGION 1..9: note = Protein phosphatase 1 regulatory subunit 15B (54-62)
AQPETRVSY

SEQ ID NO: 9751 - protein, 12 aa, synthetic construct
  REGION 1..12: note = Putative PIP5K1A and PSMD4-like protein (282-293)
AQREPLSSETQY

SEQ ID NO: 9752 - protein, 9 aa, synthetic construct
  REGION 1..9: note = Ras-related C3 botulinum toxin substrate 1 (44-52)
ASFENVRAK

SEQ ID NO: 9753 - protein, 10 aa, synthetic construct
  REGION 1..10: note = Dynein light chain roadblock-type 1 (43-52)
ASLMHSFILK

SEQ ID NO: 9754 - protein, 11 aa, synthetic construct
  REGION 1..11: note = Heterogeneous nuclear ribonucleoprotein H (160-170)
ASQEIAEKALK

SEQ ID NO: 9755 - protein, 9 aa, synthetic construct
  REGION 1..9: note = VPS53 protein (19-27)
ASYTKIVVK

SEQ ID NO: 9756 - protein, 11 aa, synthetic construct
  REGION 1..11: note = Catenin alpha-1 (826-836)
ASYVASTKYQK

SEQ ID NO: 9757 - protein, 9 aa, synthetic construct
  REGION 1..9: note = Acyl-protein thioesterase 1 (20-28)
ATAAVIFLH

SEQ ID NO: 9758 - protein, 12 aa, synthetic construct
  REGION 1..12: note = Prohibitin (229-240)
ATAGDGLIELRK

SEQ ID NO: 9759 - protein, 10 aa, synthetic construct
  REGION 1..10: note = Major facilitator superfamily domain-containing protein 10 (72-81)
ATAIGMPVEK

SEQ ID NO: 9760 - protein, 9 aa, synthetic construct
  REGION 1..9: note = Biogenesis of lysosome-related organelles complex 1 subunit 1 (109-117)
ATALEYVYK

SEQ ID NO: 9761 - protein, 13 aa, synthetic construct
  REGION 1..13: note = E3 ubiquitin-protein ligase BRE1A (84-96)
ATDDASLLIVNRY

SEQ ID NO: 9762 - protein, 9 aa, synthetic construct
  REGION 1..9: note = Alpha-1,2-mannosyltransferase ALG9 (450-458)
ATDPTIHTV

SEQ ID NO: 9763 - protein, 11 aa, synthetic construct
  REGION 1..11: note = Probable ATP-dependent RNA helicase DDX56 (198-208)
ATFNEDVQALK

SEQ ID NO: 9764 - protein, 9 aa, synthetic construct
  REGION 1..9: note = Major facilitator superfamily domain-containing protein 10 (320-328)
ATIQGAYAR

SEQ ID NO: 9765 - protein, 9 aa, synthetic construct
  REGION 1..9: note = E3 ubiquitin-protein ligase MYLIP (151-159)
ATLNSIVAK

SEQ ID NO: 9766 - protein, 9 aa, synthetic construct
  REGION 1..9: note = Ankyrin repeat domain-containing protein 10 (82-90)
ATLNVSTTR

SEQ ID NO: 9767 - protein, 10 aa, synthetic construct
  REGION 1..10: note = Filamin-A (829-838)
ATPTSPIRVK

SEQ ID NO: 9768 - protein, 11 aa, synthetic construct
  REGION 1..11: note = Nucleolar protein 14 (841-851)
ATQEGEWKALK

SEQ ID NO: 9769 - protein, 9 aa, synthetic construct
  REGION 1..9: note = Cullin-7 (1690-1698)
ATQSFSTFR

SEQ ID NO: 9770 - protein, 10 aa, synthetic construct
  REGION 1..10: note = Gamma-interferon-inducible protein 16 (234-243)
ATQTQFFHVK

SEQ ID NO: 9771 - protein, 9 aa, synthetic construct
  REGION 1..9: note = Vesicle transport protein SEC20 (257-265)
ATVLYIVKK

SEQ ID NO: 9772 - protein, 12 aa, synthetic construct
  REGION 1..12: note = Glycerol-3-phosphate dehydrogenase, mitochondrial (373-384)
ATYGDKAFEVAK

SEQ ID NO: 9773 - protein, 9 aa, synthetic construct
  REGION 1..9: note = DNA (cytosine-5)-methyltransferase 3A (168-176)
ATYNKQPMY

SEQ ID NO: 9774 - protein, 9 aa, synthetic construct
  REGION 1..9: note = Cytoplasmic dynein 1 heavy chain 1 (156-164)
AVAPFFKSY

SEQ ID NO: 9775 - protein, 9 aa, synthetic construct
  REGION 1..9: note = Triple functional domain protein (2585-2593)
AVATKFVNK

SEQ ID NO: 9776 - protein, 9 aa, synthetic construct
  REGION 1..9: note = Cleavage stimulation factor subunit 1 (359-367)
AVFNHTEDY

SEQ ID NO: 9777 - protein, 10 aa, synthetic construct
  REGION 1..10: note = Inositol hexakisphosphate and diphosphoinositol-pentakisphosphate kinase 1 (189-198)
AVFPKPFVEK

SEQ ID NO: 9778 - protein, 11 aa, synthetic construct
  REGION 1..11: note = POTE ankyrin domain family member F (729-739)
AVFPSIVGRPR

SEQ ID NO: 9779 - protein, 9 aa, synthetic construct
  REGION 1..9: note = Probable ATP-dependent RNA helicase DDX10 (63-71)
AVIENLPKK

SEQ ID NO: 9780 - protein, 11 aa, synthetic construct
  REGION 1..11: note = Zinc finger protein 292 (1897-1907)
AVIPEKQLVEK

SEQ ID NO: 9781 - protein, 9 aa, synthetic construct
  REGION 1..9: note = Leucine-rich repeat and calponin homology domain-containing protein 3 (504-512)
AVLDFVKQK

SEQ ID NO: 9782 - protein, 11 aa, synthetic construct
  REGION 1..11: note = Calcium-binding protein 39 (24-34)
AVLEKQDISDK

SEQ ID NO: 9783 - protein, 9 aa, synthetic construct
  REGION 1..9: note = Small integral membrane protein 15 (38-46)
AVLSWKLAK

SEQ ID NO: 9784 - protein, 11 aa, synthetic construct
  REGION 1..11: note = Cytoskeleton-associated protein 5 (403-413)
AVMDNKNPTIK

SEQ ID NO: 9785 - protein, 13 aa, synthetic construct
  REGION 1..13: note = MICOS complex subunit MIC60 (234-246)
AVQAVNAHSNILK

SEQ ID NO: 9786 - protein, 12 aa, synthetic construct
  REGION 1..12: note = Ran GTPase-activating protein 1 (489-500)
AVQDAVDALMQK

SEQ ID NO: 9787 - protein, 9 aa, synthetic construct
  REGION 1..9: note = PRELI domain-containing protein 1, mitochondrial (142-150)
AVQEFGLAR

SEQ ID NO: 9788 - protein, 10 aa, synthetic construct
  REGION 1..10: note = V-type proton ATPase subunit E 1 (147-156)
AVQKAIPMYK

SEQ ID NO: 9789 - protein, 9 aa, synthetic construct
  REGION 1..9: note = Lamin-B receptor (364-372)
AVYDFFIGR

SEQ ID NO: 9790 - protein, 13 aa, synthetic construct
  REGION 1..13: note = Protein phosphatase 1A (57-69)
AVYDGHAGSQVAK

SEQ ID NO: 9791 - protein, 9 aa, synthetic construct
  REGION 1..9: note = ATPase family AAA domain-containing protein 2 (1085-1093)
AYAIIKEEL

SEQ ID NO: 9792 - protein, 9 aa, synthetic construct
  REGION 1..9: note = ATP-dependent RNA helicase DHX29 (855-863)
AYLDKSPQF

SEQ ID NO: 9793 - protein, 9 aa, synthetic construct
  REGION 1..9: note = Structural maintenance of chromosomes protein 6 (494-502)
AYRQGHFTY

SEQ ID NO: 9794 - protein, 9 aa, synthetic construct
  REGION 1..9: note = Protein PRRC2C (846-854)
AYSVEHNQL

SEQ ID NO: 9795 - protein, 8 aa, synthetic construct
  REGION 1..8: note = Coatomer subunit alpha (194-201)
DAVVKHVL

SEQ ID NO: 9796 - protein, 8 aa, synthetic construct
  REGION 1..8: note = Talin-1 (1943-1950)
DAYTKKEL

SEQ ID NO: 9797 - protein, 8 aa, synthetic construct
  REGION 1..8: note = Spindlin-1 (249-256)
DDFHIYVY

SEQ ID NO: 9798 - protein, 9 aa, synthetic construct
  REGION 1..9: note = Caldesmon (92-100)
DEAAFLERL

SEQ ID NO: 9799 - protein, 11 aa, synthetic construct
  REGION 1..11: note = E3 ubiquitin-protein ligase CHIP (39-49)
DEAIANLQRAY

SEQ ID NO: 9800 - protein, 10 aa, synthetic construct
  REGION 1..10: note = REST corepressor 1 (472-481)
DEAPVLDVRY

SEQ ID NO: 9801 - protein, 9 aa, synthetic construct
  REGION 1..9: note = Peptidyl-prolyl cis-trans isomerase-like 2 (267-275)
DEDVLRYQF

SEQ ID NO: 9802 - protein, 9 aa, synthetic construct
  REGION 1..9: note = Annexin A5 (190-198)
DEEKFITIF

SEQ ID NO: 9803 - protein, 9 aa, synthetic construct
  REGION 1..9: note = Coatomer subunit gamma-1 (781-789)
DEFEKEETF

SEQ ID NO: 9804 - protein, 9 aa, synthetic construct
  REGION 1..9: note = Pre-mRNA-splicing factor ATP-dependent RNA helicase PRP16 (334-342)
DEFHNPLAY

SEQ ID NO: 9805 - protein, 9 aa, synthetic construct
  REGION 1..9: note = Calmodulin-like protein 4 (136-144)
DEFIHKITL

SEQ ID NO: 9806 - protein, 8 aa, synthetic construct
  REGION 1..8: note = Coatomer subunit gamma-1 (373-380)
DEFKVVVV

SEQ ID NO: 9807 - protein, 9 aa, synthetic construct
  REGION 1..9: note = Eukaryotic translation initiation factor 4 gamma 3 (1231-1239)
DEFLHINDF

SEQ ID NO: 9808 - protein, 9 aa, synthetic construct
  REGION 1..9: note = F-box/WD repeat-containing protein 5 (42-50)
DEFLWREQF

SEQ ID NO: 9809 - protein, 9 aa, synthetic construct
  REGION 1..9: note = Calreticulin (166-174)
DEFTHLYTL

SEQ ID NO: 9810 - protein, 8 aa, synthetic construct
  REGION 1..8: note = Zinc finger RNA-binding protein (575-582)
DEGKVIRF

SEQ ID NO: 9811 - protein, 9 aa, synthetic construct
  REGION 1..9: note = Sterol O-acyltransferase 1 (163-171)
DEGRLVLEF

SEQ ID NO: 9812 - protein, 8 aa, synthetic construct
  REGION 1..8: note = L-aminoadipate-semialdehyde dehydrogenase-phosphopantetheinyl transferase (236-243)
DEHHFVAV

SEQ ID NO: 9813 - protein, 9 aa, synthetic construct
  REGION 1..9: note = Menin (320-328)
DEHIYPYMY

SEQ ID NO: 9814 - protein, 8 aa, synthetic construct
  REGION 1..8: note = U5 small nuclear ribonucleoprotein 200 kDa helicase (1248-1255)
DEHLITFF

SEQ ID NO: 9815 - protein, 8 aa, synthetic construct
  REGION 1..8: note = Oxysterol-binding protein-related protein 9 (560-567)
DEHYILTF

SEQ ID NO: 9816 - protein, 10 aa, synthetic construct
  REGION 1..10: note = Ras GTPase-activating-like protein IQGAP1 (124-133)
DEIGLPKIFY

SEQ ID NO: 9817 - protein, 9 aa, synthetic construct
  REGION 1..9: note = Hom s 5 (293-301)
DEINFLRAL

SEQ ID NO: 9818 - protein, 10 aa, synthetic construct
  REGION 1..10: note = Hom s 5 (293-302)
DEINFLRALY

SEQ ID NO: 9819 - protein, 9 aa, synthetic construct
  REGION 1..9: note = Harmonin (132-140)
DEIVRINGY

SEQ ID NO: 9820 - protein, 9 aa, synthetic construct
  REGION 1..9: note = Splicing factor 3B subunit 4 (112-120)
DEKLLYDTF

SEQ ID NO: 9821 - protein, 8 aa, synthetic construct
  REGION 1..8: note = Plectin (380-387)
DEKSIITY

SEQ ID NO: 9822 - protein, 11 aa, synthetic construct
  REGION 1..11: note = 60 kDa heat shock protein, mitochondrial (209-219)
DELEIIEGMKF

SEQ ID NO: 9823 - protein, 9 aa, synthetic construct
  REGION 1..9: note = tRNA selenocysteine 1-associated protein 1 (146-154)
DELEQKRAL

SEQ ID NO: 9824 - protein, 9 aa, synthetic construct
  REGION 1..9: note = Vacuolar protein sorting-associated protein 35 (72-80)
DELHYLEVY

SEQ ID NO: 9825 - protein, 8 aa, synthetic construct
  REGION 1..8: note = Exocyst complex component 4 (59-66)
DELIVQHY

SEQ ID NO: 9826 - protein, 9 aa, synthetic construct
  REGION 1..9: note = Signal transducer and activator of transcription 2 (704-712)
DELQQPLEL

SEQ ID NO: 9827 - protein, 8 aa, synthetic construct
  REGION 1..8: note = Spectrin beta chain, non-erythrocytic 1 (545-552)
DEMKVLVL

SEQ ID NO: 9828 - protein, 8 aa, synthetic construct
  REGION 1..8: note = Eukaryotic initiation factor 4A-I (185-192)
DEMLSRGF

SEQ ID NO: 9829 - protein, 8 aa, synthetic construct
  REGION 1..8: note = Myosin light polypeptide 6 (58-65)
DEMNVKVL

SEQ ID NO: 9830 - protein, 9 aa, synthetic construct
  REGION 1..9: note = Ras GTPase-activating protein-binding protein 2 (343-351)
DENELKEFF

SEQ ID NO: 9831 - protein, 9 aa, synthetic construct
  REGION 1..9: note = Pyruvate kinase PKM (153-161)
DENILWLDY

SEQ ID NO: 9832 - protein, 9 aa, synthetic construct
  REGION 1..9: note = Argininosuccinate synthase (182-190)
DENLMHISY

SEQ ID NO: 9833 - protein, 10 aa, synthetic construct
  REGION 1..10: note = HLA class II histocompatibility antigen, DR alpha chain (196-205)
DEPLLKHWEF

SEQ ID NO: 9834 - protein, 9 aa, synthetic construct
  REGION 1..9: note = RNA-binding protein 3 (18-26)
DEQALEDHF

SEQ ID NO: 9835 - protein, 9 aa, synthetic construct
  REGION 1..9: note = 40S ribosomal protein S6 (20-28)
DERKLRTFY

SEQ ID NO: 9836 - protein, 9 aa, synthetic construct
  REGION 1..9: note = Myosin-11 (1867-1875)
DERKMAEQY

SEQ ID NO: 9837 - protein, 9 aa, synthetic construct
  REGION 1..9: note = Carbonic anhydrase 12 (281-289)
DERLVYTSF

SEQ ID NO: 9838 - protein, 9 aa, synthetic construct
  REGION 1..9: note = Myosin-10 (277-285)
DERTFHIFY

SEQ ID NO: 9839 - protein, 9 aa, synthetic construct
  REGION 1..9: note = Carboxy-terminal domain RNA polymerase II polypeptide A small phosphatase 2 (109-117)
DETLVHSSF

SEQ ID NO: 9840 - protein, 11 aa, synthetic construct
  REGION 1..11: note = Alpha-ketoglutarate-dependent dioxygenase FTO (189-199)
DEVDIKSRAAY

SEQ ID NO: 9841 - protein, 8 aa, synthetic construct
  REGION 1..8: note = FACT complex subunit SPT16 (838-845)
DEVELIHF

SEQ ID NO: 9842 - protein, 9 aa, synthetic construct
  REGION 1..9: note = Electrogenic sodium bicarbonate cotransporter 1 (306-314)
DEVFHDIAY

SEQ ID NO: 9843 - protein, 8 aa, synthetic construct
  REGION 1..8: note = Annexin A4 (191-198)
DEVKFLTV

SEQ ID NO: 9844 - protein, 9 aa, synthetic construct
  REGION 1..9: note = Annexin A4 (191-199)
DEVKFLTVL

SEQ ID NO: 9845 - protein, 9 aa, synthetic construct
  REGION 1..9: note = Polymerase I and transcript release factor (158-166)
DEVKLPAKL

SEQ ID NO: 9846 - protein, 8 aa, synthetic construct
  REGION 1..8: note = Protein arginine N-methyltransferase 1 (69-76)
DEVRTLTY

SEQ ID NO: 9847 - protein, 14 aa, synthetic construct
  REGION 1..14: note = Annexin A2 (52-65)
DEVTIVNILTNRSN

SEQ ID NO: 9848 - protein, 9 aa, synthetic construct
  REGION 1..9: note = Deoxyribose-phosphate aldolase (278-286)
DEWLKPELF

SEQ ID NO: 9849 - protein, 9 aa, synthetic construct
  REGION 1..9: note = Cell cycle progression protein 1 (726-734)
DEYIYRHFF

SEQ ID NO: 9850 - protein, 10 aa, synthetic construct
  REGION 1..10: note = Epidermal growth factor receptor (1014-1023)
DEYLIPQQGF

SEQ ID NO: 9851 - protein, 9 aa, synthetic construct
  REGION 1..9: note = 39S ribosomal protein L49, mitochondrial (43-51)
DEYQFVERL

SEQ ID NO: 9852 - protein, 9 aa, synthetic construct
  REGION 1..9: note = Talin-1 (125-133)
DEYSLVREL

SEQ ID NO: 9853 - protein, 15 aa, synthetic construct
  REGION 1..15: note = Peptidyl-prolyl cis-trans isomerase A (9-23)
DIAVDGEPLGRVSFE

SEQ ID NO: 9854 - protein, 9 aa, synthetic construct
  REGION 1..9: note = DNA (cytosine-5)-methyltransferase 1 (811-819)
DLDSRVLYY

SEQ ID NO: 9855 - protein, 9 aa, synthetic construct
  REGION 1..9: note = ELKS/Rab6-interacting/CAST family member 1 (356-364)
DLKEKVSLL

SEQ ID NO: 9856 - protein, 9 aa, synthetic construct
  REGION 1..9: note = Alpha-taxilin (480-488)
DLNKRVQDL

SEQ ID NO: 9857 - protein, 8 aa, synthetic construct
  REGION 1..8: note = DnaJ homolog subfamily A member 1 (244-251)
DQKDHAVF

SEQ ID NO: 9858 - protein, 9 aa, synthetic construct
  REGION 1..9: note = Statherin (20-28)
DSSEEKFLR

SEQ ID NO: 9859 - protein, 10 aa, synthetic construct
  REGION 1..10: note = Protein S100-A9 (67-76)
DTNADKQLSF

SEQ ID NO: 9860 - protein, 8 aa, synthetic construct
  REGION 1..8: note = Myosin light polypeptide 6 (148-155)
EAFVRHIL

SEQ ID NO: 9861 - protein, 10 aa, synthetic construct
  REGION 1..10: note = ATP-dependent RNA helicase DDX1 (481-490)
EAIKILKGEY

SEQ ID NO: 9862 - protein, 9 aa, synthetic construct
  REGION 1..9: note = 6-phosphofructo-2-kinase/fructose-2,6-bisphosphatase 3 (57-65)
EAVKQYSSY

SEQ ID NO: 9863 - protein, 9 aa, synthetic construct
  REGION 1..9: note = Formin-like protein 3 (893-901)
EAYNAVVRY

SEQ ID NO: 9864 - protein, 9 aa, synthetic construct
  REGION 1..9: note = Elongator complex protein 2 (246-254)
EDWIRGVEW

SEQ ID NO: 9865 - protein, 10 aa, synthetic construct
  REGION 1..10: note = Vimentin (197-206)
EEAENTLQSF

SEQ ID NO: 9866 - protein, 9 aa, synthetic construct
  REGION 1..9: note = X-ray repair cross-complementing protein 5 (699-707)
EEAKKFLAP

SEQ ID NO: 9867 - protein, 9 aa, synthetic construct
  REGION 1..9: note = Prostaglandin G/H synthase 1 (266-274)
EEAPVLMHY

SEQ ID NO: 9868 - protein, 10 aa, synthetic construct
  REGION 1..10: note = ATP-dependent DNA helicase Q5 (961-970)
EEAQNLIRHF

SEQ ID NO: 9869 - protein, 10 aa, synthetic construct
  REGION 1..10: note = Chromodomain-helicase-DNA-binding protein 4 (166-175)
EEDYRTLTNY

SEQ ID NO: 9870 - protein, 10 aa, synthetic construct
  REGION 1..10: note = Nucleolar protein 10 (434-443)
EEEEKQKSTW

SEQ ID NO: 9871 - protein, 9 aa, synthetic construct
  REGION 1..9: note = Thioredoxin-like protein 1 (254-262)
EEETTRISY

SEQ ID NO: 9872 - protein, 9 aa, synthetic construct
  REGION 1..9: note = ETS translocation variant 3 (48-56)
EEFRHVIAW

SEQ ID NO: 9873 - protein, 10 aa, synthetic construct
  REGION 1..10: note = Pre-mRNA-processing-splicing factor 8 (1205-1214)
EEFTHKDGVW

SEQ ID NO: 9874 - protein, 8 aa, synthetic construct
  REGION 1..8: note = Interferon-induced transmembrane protein 1 (4-11)
EEHEVAVL

SEQ ID NO: 9875 - protein, 10 aa, synthetic construct
  REGION 1..10: note = Actin, alpha skeletal muscle (101-110)
EEHPTLLTEA

SEQ ID NO: 9876 - protein, 9 aa, synthetic construct
  REGION 1..9: note = KAT8 regulatory NSL complex subunit 3 (37-45)
EEHVNRTGW

SEQ ID NO: 9877 - protein, 8 aa, synthetic construct
  REGION 1..8: note = General transcription factor II-I (535-542)
EEIFNLKF

SEQ ID NO: 9878 - protein, 9 aa, synthetic construct
  REGION 1..9: note = Neutral and basic amino acid transport protein rBAT (294-302)
EEIKEILRF

SEQ ID NO: 9879 - protein, 10 aa, synthetic construct
  REGION 1..10: note = Calmodulin (87-96)
EEIREAFRVF

SEQ ID NO: 9880 - protein, 9 aa, synthetic construct
  REGION 1..9: note = Protein PRR14L (198-206)
EEIYTNKNY

SEQ ID NO: 9881 - protein, 11 aa, synthetic construct
  REGION 1..11: note = Choline-phosphate cytidylyltransferase A (268-278)
EEKSIDLIQKW

SEQ ID NO: 9882 - protein, 9 aa, synthetic construct
  REGION 1..9: note = Myotubularin-related protein 2 (253-261)
EELKRVASF

SEQ ID NO: 9883 - protein, 10 aa, synthetic construct
  REGION 1..10: note = Glutathione S-transferase Mu 4 (129-138)
EELPTMMQHF

SEQ ID NO: 9884 - protein, 8 aa, synthetic construct
  REGION 1..8: note = DNA polymerase epsilon subunit 3 (74-81)
EEMEFQRF

SEQ ID NO: 9885 - protein, 9 aa, synthetic construct
  REGION 1..9: note = DNA replication licensing factor MCM3 (760-768)
EEMPQVHTP

SEQ ID NO: 9886 - protein, 9 aa, synthetic construct
  REGION 1..9: note = Serine hydroxymethyltransferase, cytosolic (187-195)
EENARLFHP

SEQ ID NO: 9887 - protein, 8 aa, synthetic construct
  REGION 1..8: note = Vimentin (348-355)
EENFAVEA

SEQ ID NO: 9888 - protein, 9 aa, synthetic construct
  REGION 1..9: note = ADP-ribosylation factor-like protein 2-binding protein (56-64)
EENKLIYTP

SEQ ID NO: 9889 - protein, 8 aa, synthetic construct
  REGION 1..8: note = Signal transducer and activator of transcription 3 (306-313)
EERIVELF

SEQ ID NO: 9890 - protein, 9 aa, synthetic construct
  REGION 1..9: note = A-kinase-interacting protein 1 (76-84)
EERPPTLSA

SEQ ID NO: 9891 - protein, 9 aa, synthetic construct
  REGION 1..9: note = Calnexin (478-486)
EERPWLWVV

SEQ ID NO: 9892 - protein, 9 aa, synthetic construct
  REGION 1..9: note = WASH complex subunit strumpellin (506-514)
EEVQEFHQL

SEQ ID NO: 9893 - protein, 9 aa, synthetic construct
  REGION 1..9: note = Cytoplasmic FMR1-interacting protein 2 (432-440)
EEYERATRY

SEQ ID NO: 9894 - protein, 11 aa, synthetic construct
  REGION 1..11: note = Sorting nexin-7 (294-304)
ELDSKVEVLTY

SEQ ID NO: 9895 - protein, 9 aa, synthetic construct
  REGION 1..9: note = Serine-protein kinase ATM (744-752)
ELFQKAKSL

SEQ ID NO: 9896 - protein, 15 aa, synthetic construct
  REGION 1..15: note = Heat shock cognate 71 kDa protein (446-460)
ERAMTKDNNLLGKFE

SEQ ID NO: 9897 - protein, 20 aa, synthetic construct
  REGION 1..20: note = Heat shock protein beta-1 (186-205)
ESRAQLGGPEAAKSDETAAK

SEQ ID NO: 9898 - protein, 9 aa, synthetic construct
  REGION 1..9: note = 40S ribosomal protein S7 (169-177)
ETFSGVYKK

SEQ ID NO: 9899 - protein, 9 aa, synthetic construct
  REGION 1..9: note = Kelch-like protein 15 (308-316)
ETFYSTERY

SEQ ID NO: 9900 - protein, 9 aa, synthetic construct
  REGION 1..9: note = Poly (ADP-ribose) polymerase (202-210)
EYNTIKDKF

SEQ ID NO: 9901 - protein, 9 aa, synthetic construct
  REGION 1..9: note = Dynamin-like 120 kDa protein, mitochondrial (717-725)
FAEDSLRVI

SEQ ID NO: 9902 - protein, 9 aa, synthetic construct
  REGION 1..9: note = Transcription factor AP-1 (110-118)
FAEGFVRAL

SEQ ID NO: 9903 - protein, 9 aa, synthetic construct
  REGION 1..9: note = Piezo-type mechanosensitive ion channel component 1 (1665-1673)
FAEGQGRAL

SEQ ID NO: 9904 - protein, 9 aa, synthetic construct
  REGION 1..9: note = Sister chromatid cohesion protein PDS5 homolog A (273-281)
FAIDPHLLL

SEQ ID NO: 9905 - protein, 9 aa, synthetic construct
  REGION 1..9: note = Spermatid perinuclear RNA-binding protein (7-15)
FANDDRHVM

SEQ ID NO: 9906 - protein, 9 aa, synthetic construct
  REGION 1..9: note = Multidrug resistance-associated protein 1 (1201-1209)
FAVISRHSL

SEQ ID NO: 9907 - protein, 10 aa, synthetic construct
  REGION 1..10: note = Glutathione-specific gamma-glutamylcyclotransferase 1 (89-98)
FAYSDSRVGF

SEQ ID NO: 9908 - protein, 15 aa, synthetic construct
  REGION 1..15: note = Peptidyl-prolyl cis-trans isomerase A (8-22)
FDIAVDGEPLGRVSF

SEQ ID NO: 9909 - protein, 17 aa, synthetic construct
  REGION 1..17: note = Peptidyl-prolyl cis-trans isomerase A (8-24)
FDIAVDGEPLGRVSFEL

SEQ ID NO: 9910 - protein, 10 aa, synthetic construct
  REGION 1..10: note = Probable ATP-dependent RNA helicase DDX56 (464-473)
FEDNPRDLQL

SEQ ID NO: 9911 - protein, 9 aa, synthetic construct
  REGION 1..9: note = Inhibitor of growth protein 4 (19-27)
FELQRNFQL

SEQ ID NO: 9912 - protein, 10 aa, synthetic construct
  REGION 1..10: note = Macrophage metalloelastase (449-458)
FEYDFLLQRI

SEQ ID NO: 9913 - protein, 9 aa, synthetic construct
  REGION 1..9: note = SURP and G-patch domain-containing protein 1 (604-612)
FGIDRPAEL

SEQ ID NO: 9914 - protein, 9 aa, synthetic construct
  REGION 1..9: note = Signal-induced proliferation-associated 1-like protein 2 (760-768)
FGPPIPKGV

SEQ ID NO: 9915 - protein, 8 aa, synthetic construct
  REGION 1..8: note = Factor VIII intron 22 protein (50-57)
FGQLGREL

SEQ ID NO: 9916 - protein, 9 aa, synthetic construct
  REGION 1..9: note = Disintegrin and metalloproteinase domain-containing protein 10 (19-27)
FIQTRGGTF

SEQ ID NO: 9917 - protein, 9 aa, synthetic construct
  REGION 1..9: note = 2'-5'-oligoadenylate synthase 1 (278-286)
FKNPIIEKY

SEQ ID NO: 9918 - protein, 19 aa, synthetic construct
  REGION 1..19: note = Alpha-enolase (261-279)
FKSPDDPSRYISPDQLADL

SEQ ID NO: 9919 - protein, 9 aa, synthetic construct
  REGION 1..9: note = Sacsin (89-97)
FLADIVQKL

SEQ ID NO: 9920 - protein, 9 aa, synthetic construct
  REGION 1..9: note = Serine-protein kinase ATM (1077-1085)
FLADNHHQV

SEQ ID NO: 9921 - protein, 10 aa, synthetic construct
  REGION 1..10: note = Epithelial discoidin domain-containing receptor 1 (885-894)
FLAEDALNTV

SEQ ID NO: 9922 - protein, 9 aa, synthetic construct
  REGION 1..9: note = T-complex protein 1 subunit theta (105-113)
FLAKLIAQA

SEQ ID NO: 9923 - protein, 10 aa, synthetic construct
  REGION 1..10: note = Phospholipid transfer protein (8-17)
FLALLAGAHA

SEQ ID NO: 9924 - protein, 9 aa, synthetic construct
  REGION 1..9: note = Pseudouridylate synthase 7 homolog-like protein (128-136)
FLDEKTHEL

SEQ ID NO: 9925 - protein, 11 aa, synthetic construct
  REGION 1..11: note = RuvB-like 2 (433-443)
FLDESRSTQYM

SEQ ID NO: 9926 - protein, 10 aa, synthetic construct
  REGION 1..10: note = La-related protein 1 (530-539)
FLFDEEMEQM

SEQ ID NO: 9927 - protein, 9 aa, synthetic construct
  REGION 1..9: note = Alpha-2-macroglobulin receptor-associated protein (22-30)
FLGPWPAAS

SEQ ID NO: 9928 - protein, 9 aa, synthetic construct
  REGION 1..9: note = Sterol regulatory element-binding protein 2 (1033-1041)
FLHEATVRL

SEQ ID NO: 9929 - protein, 10 aa, synthetic construct
  REGION 1..10: note = Adenylate kinase 2, mitochondrial (96-105)
FLLDGFPRTV

SEQ ID NO: 9930 - protein, 11 aa, synthetic construct
  REGION 1..11: note = ATR-interacting protein (164-174)
FLLEQEKTQAL

SEQ ID NO: 9931 - protein, 9 aa, synthetic construct
  REGION 1..9: note = YY1-associated protein 1 (323-331)
FLNPLISKY

SEQ ID NO: 9932 - protein, 11 aa, synthetic construct
  REGION 1..11: note = BRCA1-A complex subunit BRE (92-102)
FLPDPSALQNL

SEQ ID NO: 9933 - protein, 9 aa, synthetic construct
  REGION 1..9: note = Nesprin-2 (5714-5722)
FLTDTSHLL

SEQ ID NO: 9934 - protein, 9 aa, synthetic construct
  REGION 1..9: note = Transmembrane protein 41B (141-149)
FLYPFPLAL

SEQ ID NO: 9935 - protein, 9 aa, synthetic construct
  REGION 1..9: note = Zinc finger RNA-binding protein (569-577)
FNDPNAKEM

SEQ ID NO: 9936 - protein, 9 aa, synthetic construct
  REGION 1..9: note = Fc receptor-like A (169-177)
FPAPILRAV

SEQ ID NO: 9937 - protein, 9 aa, synthetic construct
  REGION 1..9: note = Sphingolipid delta(4)-desaturase DES1 (265-273)
FPNIPGKSL

SEQ ID NO: 9938 - protein, 11 aa, synthetic construct
  REGION 1..11: note = Protein SZT2 (903-913)
FPRSPGQPSSL

SEQ ID NO: 9939 - protein, 10 aa, synthetic construct
  REGION 1..10: note = Dipeptidyl peptidase 8 (180-189)
FQAGSGIYHV

SEQ ID NO: 9940 - protein, 9 aa, synthetic construct
  REGION 1..9: note = Transient receptor potential cation channel subfamily V member 2 (517-525)
FQHTGIYSV

SEQ ID NO: 9941 - protein, 8 aa, synthetic construct
  REGION 1..8: note = Elongation factor 1-gamma (423-430)
FQHVGKAF

SEQ ID NO: 9942 - protein, 9 aa, synthetic construct
  REGION 1..9: note = Phosphatidylcholine translocator ABCB4 (241-249)
FSDKELAAY

SEQ ID NO: 9943 - protein, 8 aa, synthetic construct
  REGION 1..8: note = Ras GTPase-activating-like protein IQGAP2 (196-203)
FSKIGGIL

SEQ ID NO: 9944 - protein, 9 aa, synthetic construct
  REGION 1..9: note = RNA-binding protein 4B (186-194)
FTEQYNEQY

SEQ ID NO: 9945 - protein, 9 aa, synthetic construct
  REGION 1..9: note = F-box DNA helicase 1 (553-561)
FTVPHTHVF

SEQ ID NO: 9946 - protein, 10 aa, synthetic construct
  REGION 1..10: note = Fas apoptotic inhibitory molecule 1 (167-176)
FVDDGTETHF

SEQ ID NO: 9947 - protein, 9 aa, synthetic construct
  REGION 1..9: note = DNA damage-binding protein 1 (451-459)
FVDDQQTFF

SEQ ID NO: 9948 - protein, 9 aa, synthetic construct
  REGION 1..9: note = Interferon regulatory factor 2-binding protein 2 (51-59)
FVIETARQL

SEQ ID NO: 9949 - protein, 9 aa, synthetic construct
  REGION 1..9: note = Inactive serine/threonine-protein kinase VRK3 (37-45)
FVNPHVSSF

SEQ ID NO: 9950 - protein, 9 aa, synthetic construct
  REGION 1..9: note = DNA polymerase epsilon catalytic subunit A (732-740)
FYVDTVRAF

SEQ ID NO: 9951 - protein, 11 aa, synthetic construct
  REGION 1..11: note = NADH dehydrogenase (ubiquinone) flavoprotein 2, mitochondrial (33-43)
GAGGALFVHRD

SEQ ID NO: 9952 - protein, 9 aa, synthetic construct
  REGION 1..9: note = Complement C1q tumor necrosis factor-related protein 3 (229-237)
GDHQRFSTF

SEQ ID NO: 9953 - protein, 9 aa, synthetic construct
  REGION 1..9: note = Deoxyribose-phosphate aldolase (201-209)
GEAHLKTIL

SEQ ID NO: 9954 - protein, 11 aa, synthetic construct
  REGION 1..11: note = ATPase family AAA domain-containing protein 2 (286-296)
GEEENQKRYYL

SEQ ID NO: 9955 - protein, 9 aa, synthetic construct
  REGION 1..9: note = Interferon regulatory factor 2-binding protein-like (561-569)
GEEQQRQQW

SEQ ID NO: 9956 - protein, 9 aa, synthetic construct
  REGION 1..9: note = NADPH-cytochrome P450 reductase (240-248)
GEESSIRQY

SEQ ID NO: 9957 - protein, 10 aa, synthetic construct
  REGION 1..10: note = Coiled-coil domain-containing protein 106 (234-243)
GEFDPSKERL

SEQ ID NO: 9958 - protein, 9 aa, synthetic construct
  REGION 1..9: note = LIM and senescent cell antigen-like-containing domain protein 1 (75-83)
GEFIIGRVI

SEQ ID NO: 9959 - protein, 11 aa, synthetic construct
  REGION 1..11: note = Thioredoxin (66-76)
GEFSGANKEKL

SEQ ID NO: 9960 - protein, 12 aa, synthetic construct
  REGION 1..12: note = Fibrinogen alpha chain (23-34)
GEGDFLAEGGGV

SEQ ID NO: 9961 - protein, 9 aa, synthetic construct
  REGION 1..9: note = Cytospin-B (579-587)
GEIKHVSSL

SEQ ID NO: 9962 - protein, 9 aa, synthetic construct
  REGION 1..9: note = Filamin-B (1758-1766)
GEITGEVHM

SEQ ID NO: 9963 - protein, 9 aa, synthetic construct
  REGION 1..9: note = DNA-directed RNA polymerase III subunit RPC7 (24-32)
GEKLPDVVL

SEQ ID NO: 9964 - protein, 11 aa, synthetic construct
  REGION 1..11: note = Regulator of nonsense transcripts 1 (585-595)
GELSSADEKRY

SEQ ID NO: 9965 - protein, 12 aa, synthetic construct
  REGION 1..12: note = Heat shock protein HSP 90-beta (172-183)
GEPIGRGTKVIL

SEQ ID NO: 9966 - protein, 10 aa, synthetic construct
  REGION 1..10: note = 60S ribosomal protein L4 (15-24)
GESSGKNVTL

SEQ ID NO: 9967 - protein, 9 aa, synthetic construct
  REGION 1..9: note = Prefoldin subunit 6 (11-19)
GEVEKYQQL

SEQ ID NO: 9968 - protein, 10 aa, synthetic construct
  REGION 1..10: note = 60S ribosomal protein L3 (319-328)
GEVTNDFVML

SEQ ID NO: 9969 - protein, 9 aa, synthetic construct
  REGION 1..9: note = Eukaryotic translation initiation factor 3 subunit L (258-266)
GEYGRHSLY

SEQ ID NO: 9970 - protein, 16 aa, synthetic construct
  REGION 1..16: note = Keratin, type II cytoskeletal 2 epidermal (142-157)
GGPGGFGPGGYPGGIH

SEQ ID NO: 9971 - protein, 11 aa, synthetic construct
  REGION 1..11: note = Actin, cytoplasmic 2 (12-22)
GIHETTFNSIM

SEQ ID NO: 9972 - protein, 11 aa, synthetic construct
  REGION 1..11: note = Glyceraldehyde-3-phosphate dehydrogenase (2-12)
GKVKVGVNGFG

SEQ ID NO: 9973 - protein, 9 aa, synthetic construct
  REGION 1..9: note = E3 ubiquitin-protein ligase RNF213 (2847-2855)
GLAEDSPKM

SEQ ID NO: 9974 - protein, 9 aa, synthetic construct
  REGION 1..9: note = Gem-associated protein 4 (541-549)
GLAKAVASV

SEQ ID NO: 9975 - protein, 9 aa, synthetic construct
  REGION 1..9: note = Histone-lysine N-methyltransferase ASH1L (2026-2034)
GLFPAPIHV

SEQ ID NO: 9976 - protein, 9 aa, synthetic construct
  REGION 1..9: note = Signal-induced proliferation-associated 1-like protein 2 (957-965)
GLGQLGFHV

SEQ ID NO: 9977 - protein, 9 aa, synthetic construct
  REGION 1..9: note = Plectin (4147-4155)
GLIDHQTYL

SEQ ID NO: 9978 - protein, 10 aa, synthetic construct
  REGION 1..10: note = Protein strawberry notch homolog 1 (1078-1087)
GLIGVGLINV

SEQ ID NO: 9979 - protein, 9 aa, synthetic construct
  REGION 1..9: note = Elongation factor 2 (343-351)
GLKEGIPAL

SEQ ID NO: 9980 - protein, 9 aa, synthetic construct
  REGION 1..9: note = Coatomer subunit alpha (991-999)
GLKNGVPAV

SEQ ID NO: 9981 - protein, 9 aa, synthetic construct
  REGION 1..9: note = Serine/threonine-protein kinase 17A (41-49)
GLLTEIRAV

SEQ ID NO: 9982 - protein, 9 aa, synthetic construct
  REGION 1..9: note = Nuclear receptor corepressor 2 (413-421)
GLMADPMKV

SEQ ID NO: 9983 - protein, 9 aa, synthetic construct
  REGION 1..9: note = Serine/threonine-protein kinase Sgk1 (62-70)
GLNDFIQKI

SEQ ID NO: 9984 - protein, 9 aa, synthetic construct
  REGION 1..9: note = MORC family CW-type zinc finger protein 4 (519-527)
GLNNKTIGY

SEQ ID NO: 9985 - protein, 11 aa, synthetic construct
  REGION 1..11: note = DNA polymerase alpha subunit B (470-480)
GLTSTDLLFHL

SEQ ID NO: 9986 - protein, 11 aa, synthetic construct
  REGION 1..11: note = C-terminal-binding protein 2 (814-824)
GLVDEKALAQA

SEQ ID NO: 9987 - protein, 10 aa, synthetic construct
  REGION 1..10: note = Staphylococcal nuclease domain-containing protein 1 (829-838)
GLVKEGLVMV

SEQ ID NO: 9988 - protein, 10 aa, synthetic construct
  REGION 1..10: note = Basic salivary proline-rich protein 2 (70-79)
GPPPPPGKPQ

SEQ ID NO: 9989 - protein, 11 aa, synthetic construct
  REGION 1..11: note = Salivary acidic proline-rich phosphoprotein 1/2 (137-147)
GPPPPPPGKPQ

SEQ ID NO: 9990 - protein, 12 aa, synthetic construct
  REGION 1..12: note = Salivary acidic proline-rich phosphoprotein 1/2 (110-121)
GPPQQGGHPRPP

SEQ ID NO: 9991 - protein, 9 aa, synthetic construct
  REGION 1..9: note = Nuclear receptor corepressor 1 (1455-1463)
GPSVLRSTL

SEQ ID NO: 9992 - protein, 9 aa, synthetic construct
  REGION 1..9: note = Histone chaperone ASF1A (103-111)
GQEFIRVGY

SEQ ID NO: 9993 - protein, 9 aa, synthetic construct
  REGION 1..9: note = Beclin-1 (280-288)
GQFGTINNF

SEQ ID NO: 9994 - protein, 12 aa, synthetic construct
  REGION 1..12: note = Putative methyltransferase-like protein 15P1 (77-88)
GQFSQAEALLMK

SEQ ID NO: 9995 - protein, 9 aa, synthetic construct
  REGION 1..9: note = Dual specificity tyrosine-phosphorylation-regulated kinase 1A (32-40)
GQMPHSHQY

SEQ ID NO: 9996 - protein, 11 aa, synthetic construct
  REGION 1..11: note = Myosin light polypeptide 6 (46-56)
GQNPTNAEVLK

SEQ ID NO: 9997 - protein, 12 aa, synthetic construct
  REGION 1..12: note = RNA-binding protein EWS (221-232)
GQQSSYGQQSSY

SEQ ID NO: 9998 - protein, 9 aa, synthetic construct
  REGION 1..9: note = Putative peripheral benzodiazepine receptor-related protein (21-29)
GQWGGGSHY

SEQ ID NO: 9999 - protein, 11 aa, synthetic construct
  REGION 1..11: note = Store-operated calcium entry-associated regulatory factor (197-207)
GQYSPPPYSEY

SEQ ID NO: 10000 - protein, 10 aa, synthetic construct
  REGION 1..10: note = EH domain-containing protein 1 (65-74)
GQYSTGKTTF

SEQ ID NO: 10001 - protein, 9 aa, synthetic construct
  REGION 1..9: note = Protein FAM216A (60-68)
GSDRIKDGY

SEQ ID NO: 10002 - protein, 9 aa, synthetic construct
  REGION 1..9: note = Splicing factor 3B subunit 1 (46-54)
GSDSRFAGY

SEQ ID NO: 10003 - protein, 9 aa, synthetic construct
  REGION 1..9: note = AP-2 complex subunit beta (568-576)
GSLASVYHK

SEQ ID NO: 10004 - protein, 9 aa, synthetic construct
  REGION 1..9: note = L-lactate dehydrogenase A chain (68-76)
GSLFLRTPK

SEQ ID NO: 10005 - protein, 9 aa, synthetic construct
  REGION 1..9: note = PHD and RING finger domain-containing protein 1 (519-527)
GSSDVIIHR

SEQ ID NO: 10006 - protein, 10 aa, synthetic construct
  REGION 1..10: note = E3 ubiquitin-protein ligase TRAF7 (378-387)
GSYDPQQIFK

SEQ ID NO: 10007 - protein, 11 aa, synthetic construct
  REGION 1..11: note = Voltage-dependent anion-selective channel protein 3 (187-197)
GTEFGGSIYQK

SEQ ID NO: 10008 - protein, 11 aa, synthetic construct
  REGION 1..11: note = Iron-responsive element-binding protein 2 (740-750)
GTFANIKLFNK

SEQ ID NO: 10009 - protein, 11 aa, synthetic construct
  REGION 1..11: note = Cyclin-dependent kinase 1 (191-201)
GTIFAELATKK

SEQ ID NO: 10010 - protein, 9 aa, synthetic construct
  REGION 1..9: note = AP-1 complex subunit beta-1 (568-576)
GTLASVYHK

SEQ ID NO: 10011 - protein, 9 aa, synthetic construct
  REGION 1..9: note = Alpha-ketoglutarate-dependent dioxygenase FTO (329-337)
GTLDYILQR

SEQ ID NO: 10012 - protein, 12 aa, synthetic construct
  REGION 1..12: note = Structural maintenance of chromosomes protein 4 (663-674)
GTMTGGGSKVMK

SEQ ID NO: 10013 - protein, 9 aa, synthetic construct
  REGION 1..9: note = Sigma non-opioid intracellular receptor 1 (31-39)
GTQSFVFQR

SEQ ID NO: 10014 - protein, 9 aa, synthetic construct
  REGION 1..9: note = F-box/WD repeat-containing protein 11 (19-27)
GTSSVIVSR

SEQ ID NO: 10015 - protein, 11 aa, synthetic construct
  REGION 1..11: note = Protein O-GlcNAcase (729-739)
GTVDVTPFIKK

SEQ ID NO: 10016 - protein, 10 aa, synthetic construct
  REGION 1..10: note = Transcription factor BTF3 (75-84)
GTVIHFNNPK

SEQ ID NO: 10017 - protein, 9 aa, synthetic construct
  REGION 1..9: note = Peptidyl-prolyl cis-trans isomerase FKBP4 (277-285)
GTVYFKEGK

SEQ ID NO: 10018 - protein, 9 aa, synthetic construct
  REGION 1..9: note = Tubulin-folding cofactor B (7-15)
GVDDKFYSK

SEQ ID NO: 10019 - protein, 11 aa, synthetic construct
  REGION 1..11: note = Activating signal cointegrator 1 complex subunit 1 (166-176)
GVDSSIFQNPK

SEQ ID NO: 10020 - protein, 9 aa, synthetic construct
  REGION 1..9: note = Eukaryotic translation initiation factor 4 gamma 1 (757-765)
GVIDLIFEK

SEQ ID NO: 10021 - protein, 9 aa, synthetic construct
  REGION 1..9: note = 40S ribosomal protein S19 (86-94)
GVMPSHFSR

SEQ ID NO: 10022 - protein, 9 aa, synthetic construct
  REGION 1..9: note = Heat shock cognate 71 kDa protein (408-416)
GVMTVLIKR

SEQ ID NO: 10023 - protein, 9 aa, synthetic construct
  REGION 1..9: note = Polypyrimidine tract-binding protein 3 (285-293)
GVYGDVHRV

SEQ ID NO: 10024 - protein, 10 aa, synthetic construct
  REGION 1..10: note = Polypyrimidine tract-binding protein 2 (308-317)
GVYGDVQRVK

SEQ ID NO: 10025 - protein, 9 aa, synthetic construct
  REGION 1..9: note = Mitochondrial genome maintenance exonuclease 1 (204-212)
GYIESVQHI

SEQ ID NO: 10026 - protein, 9 aa, synthetic construct
  REGION 1..9: note = Catenin beta-1 (186-194)
HAIMRSPQM

SEQ ID NO: 10027 - protein, 9 aa, synthetic construct
  REGION 1..9: note = Adenylyl cyclase-associated protein 1 (417-425)
HAYLSKNSL

SEQ ID NO: 10028 - protein, 9 aa, synthetic construct
  REGION 1..9: note = Surfeit locus protein 4 (232-240)
HDFLKYDFF

SEQ ID NO: 10029 - protein, 9 aa, synthetic construct
  REGION 1..9: note = NEDD4-binding protein 2-like 1 (64-72)
HDFPRALIF

SEQ ID NO: 10030 - protein, 9 aa, synthetic construct
  REGION 1..9: note = Cold shock domain-containing protein E1 (507-515)
HDKEIFFHY

SEQ ID NO: 10031 - protein, 9 aa, synthetic construct
  REGION 1..9: note = Protein Niban (200-208)
HDYMKQMTF

SEQ ID NO: 10032 - protein, 9 aa, synthetic construct
  REGION 1..9: note = Zinc finger and BTB domain-containing protein 38 (210-218)
HEAEPVRTL

SEQ ID NO: 10033 - protein, 10 aa, synthetic construct
  REGION 1..10: note = Synaptic vesicle membrane protein VAT-1 homolog (222-231)
HEALKENGVT

SEQ ID NO: 10034 - protein, 9 aa, synthetic construct
  REGION 1..9: note = Protein sel-1 homolog 3 (891-899)
HEALLYYVL

SEQ ID NO: 10035 - protein, 10 aa, synthetic construct
  REGION 1..10: note = Nuclear migration protein nudC (79-88)
HEAQLKNGSL

SEQ ID NO: 10036 - protein, 9 aa, synthetic construct
  REGION 1..9: note = EH domain-containing protein 1 (210-218)
HEDKIRVVL

SEQ ID NO: 10037 - protein, 9 aa, synthetic construct
  REGION 1..9: note = Exosome complex exonuclease RRP44 (679-687)
HEEFSEHAL

SEQ ID NO: 10038 - protein, 9 aa, synthetic construct
  REGION 1..9: note = Repressor of RNA polymerase III transcription MAF1 homolog (116-124)
HEFSREPSL

SEQ ID NO: 10039 - protein, 9 aa, synthetic construct
  REGION 1..9: note = Versican core protein (1534-1542)
HEHTEPVSL

SEQ ID NO: 10040 - protein, 9 aa, synthetic construct
  REGION 1..9: note = Sphingolipid delta(4)-desaturase DES1 (89-97)
HEIAHNAAF

SEQ ID NO: 10041 - protein, 10 aa, synthetic construct
  REGION 1..10: note = Histone-lysine N-methyltransferase 2E (353-362)
HEIQDGTIHL

SEQ ID NO: 10042 - protein, 9 aa, synthetic construct
  REGION 1..9: note = Endothelial PAS domain-containing protein 1 (39-47)
HELPLPHSV

SEQ ID NO: 10043 - protein, 10 aa, synthetic construct
  REGION 1..10: note = ATP-dependent RNA helicase DHX8 (1152-1161)
HELVLTTKEY

SEQ ID NO: 10044 - protein, 8 aa, synthetic construct
  REGION 1..8: note = E3 ubiquitin-protein ligase RNF213 (1247-1254)
HEMIILKL

SEQ ID NO: 10045 - protein, 9 aa, synthetic construct
  REGION 1..9: note = Histone-lysine N-methyltransferase NSD2 (449-457)
HENDITHFY

SEQ ID NO: 10046 - protein, 9 aa, synthetic construct
  REGION 1..9: note = Sorting nexin-6 (212-220)
HERTFLLEY

SEQ ID NO: 10047 - protein, 9 aa, synthetic construct
  REGION 1..9: note = Heterogeneous nuclear ribonucleoprotein K (415-423)
HESGASIKI

SEQ ID NO: 10048 - protein, 9 aa, synthetic construct
  REGION 1..9: note = Amyloid-like protein 2 (692-700)
HGYENPTYK

SEQ ID NO: 10049 - protein, 9 aa, synthetic construct
  REGION 1..9: note = Transcription initiation factor TFIID subunit 4 (42-50)
HLAPRTPEV

SEQ ID NO: 10050 - protein, 9 aa, synthetic construct
  REGION 1..9: note = Cysteine and histidine-rich protein 1 (106-114)
HLGPEGRSV

SEQ ID NO: 10051 - protein, 10 aa, synthetic construct
  REGION 1..10: note = Formin-like protein 2 (244-253)
HPHAVNEIAL

SEQ ID NO: 10052 - protein, 9 aa, synthetic construct
  REGION 1..9: note = KRR1 small subunit processome component homolog (214-222)
HPIYNIKSL

SEQ ID NO: 10053 - protein, 10 aa, synthetic construct
  REGION 1..10: note = HLA class I histocompatibility antigen, Cw-7 alpha chain (216-225)
HPLSDHEATL

SEQ ID NO: 10054 - protein, 9 aa, synthetic construct
  REGION 1..9: note = V-type proton ATPase 116 kDa subunit a isoform 3 (715-723)
HQAIHTIEF

SEQ ID NO: 10055 - protein, 9 aa, synthetic construct
  REGION 1..9: note = Dymeclin (278-286)
HQNSNIRTY

SEQ ID NO: 10056 - protein, 8 aa, synthetic construct
  REGION 1..8: note = WD repeat-containing protein 1 (59-66)
HQVVVAKY

SEQ ID NO: 10057 - protein, 9 aa, synthetic construct
  REGION 1..9: note = HLA class I histocompatibility antigen, A-2 alpha chain (73-81)
HRVDLGTLR

SEQ ID NO: 10058 - protein, 8 aa, synthetic construct
  REGION 1..8: note = Endoplasmic reticulum resident protein 44 (95-102)
HSDIAQRY

SEQ ID NO: 10059 - protein, 9 aa, synthetic construct
  REGION 1..9: note = Histone deacetylase 4 (715-723)
HSEAHTLLY

SEQ ID NO: 10060 - protein, 9 aa, synthetic construct
  REGION 1..9: note = Nucleolar protein 10 (122-130)
HSQSGFYYK

SEQ ID NO: 10061 - protein, 8 aa, synthetic construct
  REGION 1..8: note = Eukaryotic translation initiation factor 3 subunit F (182-189)
HSVLIHEY

SEQ ID NO: 10062 - protein, 9 aa, synthetic construct
  REGION 1..9: note = Dual specificity protein phosphatase 5 (234-242)
HTADISSHF

SEQ ID NO: 10063 - protein, 10 aa, synthetic construct
  REGION 1..10: note = AP-3 complex subunit delta-1 (383-392)
HVDKAEGTTY

SEQ ID NO: 10064 - protein, 9 aa, synthetic construct
  REGION 1..9: note = Rac GTPase-activating protein 1 (480-488)
HVIENSNAF

SEQ ID NO: 10065 - protein, 9 aa, synthetic construct
  REGION 1..9: note = T-complex protein 1 subunit epsilon (135-143)
HVIETLIGK

SEQ ID NO: 10066 - protein, 9 aa, synthetic construct
  REGION 1..9: note = Triple functional domain protein (477-485)
HVLDVIHEV

SEQ ID NO: 10067 - protein, 9 aa, synthetic construct
  REGION 1..9: note = Manganese-transporting ATPase 13A1 (956-964)
IAAPFTSKL

SEQ ID NO: 10068 - protein, 15 aa, synthetic construct
  REGION 1..15: note = Solute carrier family 2, facilitated glucose transporter member 1 (21-35)
IAQVFGLDSIMGNKD

SEQ ID NO: 10069 - protein, 8 aa, synthetic construct
  REGION 1..8: note = Insulin receptor substrate 2 (1323-1330)
IDFLSHHL

SEQ ID NO: 10070 - protein, 8 aa, synthetic construct
  REGION 1..8: note = Neuroblast differentiation-associated protein AHNAK (4419-4426)
IDIKGPSL

SEQ ID NO: 10071 - protein, 9 aa, synthetic construct
  REGION 1..9: note = Tripeptidyl-peptidase 2 (1087-1095)
IDQTALAVY

SEQ ID NO: 10072 - protein, 11 aa, synthetic construct
  REGION 1..11: note = U5 small nuclear ribonucleoprotein 200 kDa helicase (803-813)
IEEPSAKINVL

SEQ ID NO: 10073 - protein, 9 aa, synthetic construct
  REGION 1..9: note = Structural maintenance of chromosomes protein 1A (7-15)
IEIENFKSY

SEQ ID NO: 10074 - protein, 8 aa, synthetic construct
  REGION 1..8: note = Casein kinase I isoform delta (51-58)
IESKIYKM

SEQ ID NO: 10075 - protein, 8 aa, synthetic construct
  REGION 1..8: note = Protein S100-A9 (12-19)
IETIINTF

SEQ ID NO: 10076 - protein, 10 aa, synthetic construct
  REGION 1..10: note = Probable UDP-sugar transporter protein SLC35A5 (264-273)
IFIQNSKLYF

SEQ ID NO: 10077 - protein, 10 aa, synthetic construct
  REGION 1..10: note = Pre-mRNA-processing-splicing factor 8 (1809-1818)
IFNPRTGQLF

SEQ ID NO: 10078 - protein, 13 aa, synthetic construct
  REGION 1..13: note = ATP synthase-coupling factor 6, mitochondrial (25-37)
IGVTAVAFNKELD

SEQ ID NO: 10079 - protein, 9 aa, synthetic construct
  REGION 1..9: note = DNA damage-binding protein 1 (793-801)
IIDQHTFEV

SEQ ID NO: 10080 - protein, 9 aa, synthetic construct
  REGION 1..9: note = 26S proteasome non-ATPase regulatory subunit 2 (809-817)
IILGKSHYV

SEQ ID NO: 10081 - protein, 12 aa, synthetic construct
  REGION 1..12: note = Elongation factor 1-alpha 1 (178-189)
IKKIGYNPDTVA

SEQ ID NO: 10082 - protein, 11 aa, synthetic construct
  REGION 1..11: note = Probable ATP-dependent RNA helicase DDX60-like (1497-1507)
ILAELPEDFKA

SEQ ID NO: 10083 - protein, 9 aa, synthetic construct
  REGION 1..9: note = Interferon-induced GTP-binding protein Mx2 (436-444)
ILATNTQKV

SEQ ID NO: 10084 - protein, 11 aa, synthetic construct
  REGION 1..11: note = Eukaryotic translation initiation factor 4 gamma 3 (389-399)
ILENPPEEMKL

SEQ ID NO: 10085 - protein, 9 aa, synthetic construct
  REGION 1..9: note = ATP-dependent RNA helicase DDX42 (333-341)
ILIDPIRVV

SEQ ID NO: 10086 - protein, 9 aa, synthetic construct
  REGION 1..9: note = Phosphorylated CTD-interacting factor 1 (267-275)
IMNDIPIRL

SEQ ID NO: 10087 - protein, 9 aa, synthetic construct
  REGION 1..9: note = RNA polymerase-associated protein CTR9 homolog (124-132)
IMYDQNHLL

SEQ ID NO: 10088 - protein, 17 aa, synthetic construct
  REGION 1..17: note = Cystatin-A (2-18)
IPGGLSEAKPATPEIQE

SEQ ID NO: 10089 - protein, 10 aa, synthetic construct
  REGION 1..10: note = Splicing factor U2AF 65 kDa subunit (413-422)
IPRPVDGVEV

SEQ ID NO: 10090 - protein, 9 aa, synthetic construct
  REGION 1..9: note = Membrane-bound transcription factor site-1 protease (189-197)
IPRQVAQTL

SEQ ID NO: 10091 - protein, 11 aa, synthetic construct
  REGION 1..11: note = Cytospin-A (862-872)
IPRTPLSPSPM

SEQ ID NO: 10092 - protein, 11 aa, synthetic construct
  REGION 1..11: note = Filamin-A (1569-1579)
IQDNHDGTYTV

SEQ ID NO: 10093 - protein, 11 aa, synthetic construct
  REGION 1..11: note = UBX domain-containing protein 4 (322-332)
IQFRLPDGSSF

SEQ ID NO: 10094 - protein, 10 aa, synthetic construct
  REGION 1..10: note = Thyroid receptor-interacting protein 11 (87-96)
IQIKQQSTSY

SEQ ID NO: 10095 - protein, 9 aa, synthetic construct
  REGION 1..9: note = Coatomer subunit delta (393-401)
IQVTKVTQV

SEQ ID NO: 10096 - protein, 9 aa, synthetic construct
  REGION 1..9: note = Kinesin-like protein KIF11 (400-408)
ISEENFRVM

SEQ ID NO: 10097 - protein, 14 aa, synthetic construct
  REGION 1..14: note = FAST kinase domain-containing protein 2 (542-555)
ISELLTSDDMKNAY

SEQ ID NO: 10098 - protein, 9 aa, synthetic construct
  REGION 1..9: note = LEM domain-containing protein 2 (23-31)
ITDTTRDVY

SEQ ID NO: 10099 - protein, 16 aa, synthetic construct
  REGION 1..16: note = Galectin-3 (132-147)
ITILGTVKPNANRIAL

SEQ ID NO: 10100 - protein, 9 aa, synthetic construct
  REGION 1..9: note = NADH dehydrogenase (ubiquinone) 1 beta subcomplex subunit 10 (34-42)
IVDRPVTLV

SEQ ID NO: 10101 - protein, 9 aa, synthetic construct
  REGION 1..9: note = Cell division cycle protein 27 homolog (695-703)
IVIDPKNPL

SEQ ID NO: 10102 - protein, 14 aa, synthetic construct
  REGION 1..14: note = Macrophage migration inhibitory factor (3-16)
IVNTNVPRASVPDG

SEQ ID NO: 10103 - protein, 10 aa, synthetic construct
  REGION 1..10: note = Solute carrier family 12 member 6 (219-228)
IYAGAIKSSF

SEQ ID NO: 10104 - protein, 9 aa, synthetic construct
  REGION 1..9: note = ATP-dependent RNA helicase DHX29 (1317-1325)
IYFQAPVKI

SEQ ID NO: 10105 - protein, 9 aa, synthetic construct
  REGION 1..9: note = Tripeptidyl-peptidase 2 (478-486)
IYLRDPVQV

SEQ ID NO: 10106 - protein, 9 aa, synthetic construct
  REGION 1..9: note = BCL2/adenovirus E1B 19 kDa protein-interacting protein 3 (38-46)
IYNGDMEKI

SEQ ID NO: 10107 - protein, 9 aa, synthetic construct
  REGION 1..9: note = Serine/threonine-protein phosphatase 2A 56 kDa regulatory subunit gamma isoform (91-99)
IYPEVVHMF

SEQ ID NO: 10108 - protein, 11 aa, synthetic construct
  REGION 1..11: note = Flotillin-2 (104-114)
IYQDRDQFAKL

SEQ ID NO: 10109 - protein, 9 aa, synthetic construct
  REGION 1..9: note = Bardet-Biedl syndrome 4 protein (45-53)
IYQKAFEHL

SEQ ID NO: 10110 - protein, 9 aa, synthetic construct
  REGION 1..9: note = Signal transducer and activator of transcription 6 (87-95)
IYQRDPLKL

SEQ ID NO: 10111 - protein, 9 aa, synthetic construct
  REGION 1..9: note = Progestin and adipoQ receptor family member 4 (52-60)
IYTHGLALL

SEQ ID NO: 10112 - protein, 8 aa, synthetic construct
  REGION 1..8: note = 40S ribosomal protein S23 (29-36)
KAHLGTAL

SEQ ID NO: 10113 - protein, 9 aa, synthetic construct
  REGION 1..9: note = Peroxisomal membrane protein PMP34 (213-221)
KAIATTVTY

SEQ ID NO: 10114 - protein, 9 aa, synthetic construct
  REGION 1..9: note = Protein PRRC2C (2255-2263)
KAWENSPNV

SEQ ID NO: 10115 - protein, 10 aa, synthetic construct
  REGION 1..10: note = Polycystic kidney disease and receptor for egg jelly-related protein (701-710)
KDFLPAGYLL

SEQ ID NO: 10116 - protein, 9 aa, synthetic construct
  REGION 1..9: note = FERM domain-containing protein 6 (545-553)
KDFLRIAGL

SEQ ID NO: 10117 - protein, 11 aa, synthetic construct
  REGION 1..11: note = Microtubule-actin cross-linking factor 1, isoforms 1/2/3/5 (2405-2415)
KDKLKDATERY

SEQ ID NO: 10118 - protein, 9 aa, synthetic construct
  REGION 1..9: note = Calcium-binding protein 39 (189-197)
KDLLTRHKL

SEQ ID NO: 10119 - protein, 9 aa, synthetic construct
  REGION 1..9: note = Ribonucleoside-diphosphate reductase subunit M2 B (73-81)
KDLPHWNKL

SEQ ID NO: 10120 - protein, 9 aa, synthetic construct
  REGION 1..9: note = Spectrin beta chain, non-erythrocytic 1 (655-663)
KDLTSVMRL

SEQ ID NO: 10121 - protein, 9 aa, synthetic construct
  REGION 1..9: note = Plastin-3 (18-26)
KEAFAKVDL

SEQ ID NO: 10122 - protein, 9 aa, synthetic construct
  REGION 1..9: note = Protein Red (496-504)
KEALPKAAF

SEQ ID NO: 10123 - protein, 10 aa, synthetic construct
  REGION 1..10: note = Protein KHNYN (158-167)
KEALQDPFTL

SEQ ID NO: 10124 - protein, 9 aa, synthetic construct
  REGION 1..9: note = 40S ribosomal protein S15 (65-73)
KEAPPMEKP

SEQ ID NO: 10125 - protein, 9 aa, synthetic construct
  REGION 1..9: note = Protein transport protein Sec23B (564-572)
KEDPTSFRL

SEQ ID NO: 10126 - protein, 11 aa, synthetic construct
  REGION 1..11: note = Tropomyosin alpha-4 chain (228-238)
KEENVGLHQTL

SEQ ID NO: 10127 - protein, 10 aa, synthetic construct
  REGION 1..10: note = Putative methyltransferase NSUN6 (163-172)
KEFDGTKVFL

SEQ ID NO: 10128 - protein, 10 aa, synthetic construct
  REGION 1..10: note = Sin3 histone deacetylase corepressor complex component SDS3 (137-146)
KEFEDKKVEL

SEQ ID NO: 10129 - protein, 9 aa, synthetic construct
  REGION 1..9: note = Heat shock protein HSP 90-alpha (656-664)
KEFEGKTLV

SEQ ID NO: 10130 - protein, 9 aa, synthetic construct
  REGION 1..9: note = Protein S100-A10 (37-45)
KEFPGFLEN

SEQ ID NO: 10131 - protein, 12 aa, synthetic construct
  REGION 1..12: note = Serine palmitoyltransferase 2 (526-537)
KEIDEVGDLLQL

SEQ ID NO: 10132 - protein, 9 aa, synthetic construct
  REGION 1..9: note = Melanoma-associated antigen D4 (471-479)
KEIDKEEHL

SEQ ID NO: 10133 - protein, 13 aa, synthetic construct
  REGION 1..13: note = Spectrin beta chain, non-erythrocytic 1 (1434-1446)
KEIEELQSQAQAL

SEQ ID NO: 10134 - protein, 12 aa, synthetic construct
  REGION 1..12: note = Calcium/calmodulin-dependent protein kinase type IV (135-146)
KEIFETPTEISL

SEQ ID NO: 10135 - protein, 9 aa, synthetic construct
  REGION 1..9: note = E3 ubiquitin-protein ligase RNF19B (187-195)
KEISDLHYL

SEQ ID NO: 10136 - protein, 9 aa, synthetic construct
  REGION 1..9: note = Centromere protein F (392-400)
KEKEFQEEL

SEQ ID NO: 10137 - protein, 10 aa, synthetic construct
  REGION 1..10: note = Girdin (728-737)
KELESEKEQL

SEQ ID NO: 10138 - protein, 10 aa, synthetic construct
  REGION 1..10: note = Testin (173-182)
KEMEQFVKKY

SEQ ID NO: 10139 - protein, 10 aa, synthetic construct
  REGION 1..10: note = Leucine-tRNA ligase, cytoplasmic (775-784)
KEMVANWDSL

SEQ ID NO: 10140 - protein, 10 aa, synthetic construct
  REGION 1..10: note = SWI/SNF-related matrix-associated actin-dependent regulator of chromatin subfamily B member 1 (277-286)
KENSPEKFAL

SEQ ID NO: 10141 - protein, 11 aa, synthetic construct
  REGION 1..11: note = Squalene monooxygenase (157-167)
KEPDRIVGEFL

SEQ ID NO: 10142 - protein, 9 aa, synthetic construct
  REGION 1..9: note = Calcium uptake protein 2, mitochondrial (204-212)
KEPEINTTL

SEQ ID NO: 10143 - protein, 9 aa, synthetic construct
  REGION 1..9: note = Farnesyl pyrophosphate synthase (39-47)
KEVLEYNAI

SEQ ID NO: 10144 - protein, 8 aa, synthetic construct
  REGION 1..8: note = Tetratricopeptide repeat protein 25 (351-358)
KEYDLPDA

SEQ ID NO: 10145 - protein, 10 aa, synthetic construct
  REGION 1..10: note = Inhibitor of growth protein 5 (76-85)
KEYSDDKVQL

SEQ ID NO: 10146 - protein, 9 aa, synthetic construct
  REGION 1..9: note = Son of sevenless homolog 2 (677-685)
KEYVQPVQL

SEQ ID NO: 10147 - protein, 9 aa, synthetic construct
  REGION 1..9: note = Nodal modulator 2 (392-400)
KIAPNTPQL

SEQ ID NO: 10148 - protein, 10 aa, synthetic construct
  REGION 1..10: note = Trans-Golgi network integral membrane protein 2 (408-417)
KIIAFVLEGK

SEQ ID NO: 10149 - protein, 9 aa, synthetic construct
  REGION 1..9: note = Interleukin enhancer-binding factor 2 (127-135)
KILPTLEAV

SEQ ID NO: 10150 - protein, 9 aa, synthetic construct
  REGION 1..9: note = Insulin-like growth factor 2 mRNA-binding protein 3 (552-560)
KIQEILTQV

SEQ ID NO: 10151 - protein, 10 aa, synthetic construct
  REGION 1..10: note = WD repeat-containing protein 1 (119-128)
KIWDVSVNSV

SEQ ID NO: 10152 - protein, 9 aa, synthetic construct
  REGION 1..9: note = Transcription factor SOX-8 (1-9)
KLADQYPHL

SEQ ID NO: 10153 - protein, 9 aa, synthetic construct
  REGION 1..9: note = 14-3-3 protein theta (11-19)
KLAEQAERY

SEQ ID NO: 10154 - protein, 9 aa, synthetic construct
  REGION 1..9: note = Akirin-1 (163-171)
KLAEQYESF

SEQ ID NO: 10155 - protein, 11 aa, synthetic construct
  REGION 1..11: note = Akirin-1 (163-173)
KLAEQYESFVK

SEQ ID NO: 10156 - protein, 9 aa, synthetic construct
  REGION 1..9: note = V-type proton ATPase subunit C 1 (25-33)
KLDAFVEGV

SEQ ID NO: 10157 - protein, 9 aa, synthetic construct
  REGION 1..9: note = Kinetochore-associated protein 1 (1298-1306)
KLFGETTLV

SEQ ID NO: 10158 - protein, 9 aa, synthetic construct
  REGION 1..9: note = Heterogeneous nuclear ribonucleoprotein A0 (8-16)
KLFIGGLNV

SEQ ID NO: 10159 - protein, 9 aa, synthetic construct
  REGION 1..9: note = Heterogeneous nuclear ribonucleoprotein A1 (15-23)
KLFIGGLSF

SEQ ID NO: 10160 - protein, 10 aa, synthetic construct
  REGION 1..10: note = Serine/threonine-protein kinase DCLK2 (534-543)
KLGDFGLATV

SEQ ID NO: 10161 - protein, 9 aa, synthetic construct
  REGION 1..9: note = TRPM8 channel-associated factor 1 (199-207)
KLGSVPVTV

SEQ ID NO: 10162 - protein, 9 aa, synthetic construct
  REGION 1..9: note = Transformation/transcription domain-associated protein (911-919)
KLHYVVTEV

SEQ ID NO: 10163 - protein, 11 aa, synthetic construct
  REGION 1..11: note = E3 ubiquitin-protein ligase UBR4 (1375-1385)
KLIDETQDMLL

SEQ ID NO: 10164 - protein, 9 aa, synthetic construct
  REGION 1..9: note = Pericentriolar material 1 protein (412-420)
KLLGELHTL

SEQ ID NO: 10165 - protein, 9 aa, synthetic construct
  REGION 1..9: note = Peptidyl-prolyl cis-trans isomerase FKBP3 (42-50)
KLLGNIKNV

SEQ ID NO: 10166 - protein, 9 aa, synthetic construct
  REGION 1..9: note = Calnexin (166-174)
KLLSKTPEL

SEQ ID NO: 10167 - protein, 9 aa, synthetic construct
  REGION 1..9: note = Golgin subfamily A member 5 (484-492)
KLMGQIHQL

SEQ ID NO: 10168 - protein, 9 aa, synthetic construct
  REGION 1..9: note = TBC1 domain family member 13 (39-47)
KLNPGIAYV

SEQ ID NO: 10169 - protein, 9 aa, synthetic construct
  REGION 1..9: note = E3 ubiquitin-protein ligase TRIP12 (912-920)
KLPDIFSVY

SEQ ID NO: 10170 - protein, 10 aa, synthetic construct
  REGION 1..10: note = Kelch-like protein 24 (347-356)
KLPEFTKSEY

SEQ ID NO: 10171 - protein, 9 aa, synthetic construct
  REGION 1..9: note = Transmembrane and coiled-coil domain-containing protein 1 (116-124)
KLPFTPLSY

SEQ ID NO: 10172 - protein, 10 aa, synthetic construct
  REGION 1..10: note = HLA class II histocompatibility antigen, DR beta 5 chain (5-14)
KLPGGSYMAK

SEQ ID NO: 10173 - protein, 9 aa, synthetic construct
  REGION 1..9: note = Fanconi anemia group I protein (16-24)
KLQEFLQTL

SEQ ID NO: 10174 - protein, 9 aa, synthetic construct
  REGION 1..9: note = Tyrosine-protein kinase BAZ1B (379-387)
KLSEIPLTL

SEQ ID NO: 10175 - protein, 9 aa, synthetic construct
  REGION 1..9: note = E3 SUMO-protein ligase CBX4 (347-355)
KLSPTKEAF

SEQ ID NO: 10176 - protein, 9 aa, synthetic construct
  REGION 1..9: note = PWWP domain-containing protein MUM1 (574-582)
KLVEYIVKA

SEQ ID NO: 10177 - protein, 9 aa, synthetic construct
  REGION 1..9: note = Minor histocompatibility protein HA-1 (532-540)
KLYDPGQQY

SEQ ID NO: 10178 - protein, 9 aa, synthetic construct
  REGION 1..9: note = Replication factor C subunit 5 (304-312)
KMADIEYRL

SEQ ID NO: 10179 - protein, 12 aa, synthetic construct
  REGION 1..12: note = Interferon-induced transmembrane protein 2 (87-98)
KMVGDVTGAQAY

SEQ ID NO: 10180 - protein, 11 aa, synthetic construct
  REGION 1..11: note = U1 small nuclear ribonucleoprotein 70 kDa (87-97)
KMWDPHNDPNA

SEQ ID NO: 10181 - protein, 11 aa, synthetic construct
  REGION 1..11: note = Myosin-9 (517-527)
KPAGPPGILAL

SEQ ID NO: 10182 - protein, 10 aa, synthetic construct
  REGION 1..10: note = Transketolase (6-15)
KPDQQKLQAL

SEQ ID NO: 10183 - protein, 10 aa, synthetic construct
  REGION 1..10: note = Calponin-3 (156-165)
KPFDQTTISL

SEQ ID NO: 10184 - protein, 11 aa, synthetic construct
  REGION 1..11: note = DNA polymerase kappa (36-46)
KPIAVGSMSML

SEQ ID NO: 10185 - protein, 9 aa, synthetic construct
  REGION 1..9: note = Elongation factor 2 (445-453)
KPIQRTILM

SEQ ID NO: 10186 - protein, 9 aa, synthetic construct
  REGION 1..9: note = Galectin-3 (139-147)
KPNANRIAL

SEQ ID NO: 10187 - protein, 11 aa, synthetic construct
  REGION 1..11: note = Spectrin beta chain, non-erythrocytic 1 (1939-1949)
KPRDVSSVELL

SEQ ID NO: 10188 - protein, 10 aa, synthetic construct
  REGION 1..10: note = Methionine synthase (342-351)
KPRVPPATAF

SEQ ID NO: 10189 - protein, 9 aa, synthetic construct
  REGION 1..9: note = Peroxisomal multifunctional enzyme type 2 (565-573)
KPVYPGQTL

SEQ ID NO: 10190 - protein, 8 aa, synthetic construct
  REGION 1..8: note = SWI/SNF-related matrix-associated actin-dependent regulator of chromatin subfamily A containing DEAD/H box 1 (68-75)
KPYQKVGL

SEQ ID NO: 10191 - protein, 9 aa, synthetic construct
  REGION 1..9: note = Programmed cell death protein 6 (116-124)
KQALSGFGY

SEQ ID NO: 10192 - protein, 9 aa, synthetic construct
  REGION 1..9: note = Ubiquitin-associated protein 2-like (939-947)
KQHGVNVSV

SEQ ID NO: 10193 - protein, 9 aa, synthetic construct
  REGION 1..9: note = DnaJ homolog subfamily A member 1 (46-54)
KQISQAYEV

SEQ ID NO: 10194 - protein, 9 aa, synthetic construct
  REGION 1..9: note = E3 ubiquitin-protein ligase MGRN1 (240-248)
KQIVDRVSY

SEQ ID NO: 10195 - protein, 10 aa, synthetic construct
  REGION 1..10: note = MICOS complex subunit MIC60 (724-733)
KQIVEILTAY

SEQ ID NO: 10196 - protein, 9 aa, synthetic construct
  REGION 1..9: note = Transgelin-2 (88-96)
KQMEQISQF

SEQ ID NO: 10197 - protein, 10 aa, synthetic construct
  REGION 1..10: note = Transgelin-2 (88-97)
KQMEQISQFL

SEQ ID NO: 10198 - protein, 9 aa, synthetic construct
  REGION 1..9: note = Zinc finger MIZ domain-containing protein 2 (174-182)
KQSQELSQY

SEQ ID NO: 10199 - protein, 9 aa, synthetic construct
  REGION 1..9: note = Heat shock cognate 71 kDa protein (423-431)
KQTQTFTTY

SEQ ID NO: 10200 - protein, 9 aa, synthetic construct
  REGION 1..9: note = Heterogeneous nuclear ribonucleoprotein K (456-464)
KQYADVEGF

SEQ ID NO: 10201 - protein, 9 aa, synthetic construct
  REGION 1..9: note = T-complex protein 1 subunit theta (98-106)
KQYGNEVFL

SEQ ID NO: 10202 - protein, 9 aa, synthetic construct
  REGION 1..9: note = Coatomer subunit beta' (386-394)
KSFGSAQEF

SEQ ID NO: 10203 - protein, 11 aa, synthetic construct
  REGION 1..11: note = Elongation factor 1-alpha 1 (20-30)
KSTTTGHLIYK

SEQ ID NO: 10204 - protein, 9 aa, synthetic construct
  REGION 1..9: note = Translocation protein SEC63 homolog (95-103)
KTDREYQEY

SEQ ID NO: 10205 - protein, 9 aa, synthetic construct
  REGION 1..9: note = E3 ubiquitin-protein ligase RBBP6 (1474-1482)
KTDYDTREY

SEQ ID NO: 10206 - protein, 11 aa, synthetic construct
  REGION 1..11: note = Probable ATP-dependent RNA helicase DDX47 (195-205)
KTFLFSATMTK

SEQ ID NO: 10207 - protein, 9 aa, synthetic construct
  REGION 1..9: note = Cytoplasmic dynein 1 heavy chain 1 (872-880)
KTFSEILNR

SEQ ID NO: 10208 - protein, 9 aa, synthetic construct
  REGION 1..9: note = Chromodomain Y-like protein (93-101)
KTSPKALVI

SEQ ID NO: 10209 - protein, 12 aa, synthetic construct
  REGION 1..12: note = Protein polybromo-1 (260-271)
KTYNEPGSQVFK

SEQ ID NO: 10210 - protein, 9 aa, synthetic construct
  REGION 1..9: note = 60S ribosomal protein L7a (11-19)
KVAPAPAVV

SEQ ID NO: 10211 - protein, 9 aa, synthetic construct
  REGION 1..9: note = Procollagen-lysine,2-oxoglutarate 5-dioxygenase 2 (109-117)
KVFAGYYTK

SEQ ID NO: 10212 - protein, 9 aa, synthetic construct
  REGION 1..9: note = Nucleolin (370-378)
KVFGNEIKL

SEQ ID NO: 10213 - protein, 9 aa, synthetic construct
  REGION 1..9: note = F-box only protein 28 (103-111)
KVIDEIYRV

SEQ ID NO: 10214 - protein, 9 aa, synthetic construct
  REGION 1..9: note = Trafficking protein particle complex subunit 5 (81-89)
KVLGALLFV

SEQ ID NO: 10215 - protein, 10 aa, synthetic construct
  REGION 1..10: note = Long-chain-fatty-acid-CoA ligase 4 (347-356)
KVQEMNYIQK

SEQ ID NO: 10216 - protein, 9 aa, synthetic construct
  REGION 1..9: note = 78 kDa glucose-regulated protein (146-154)
KVTHAVVTV

SEQ ID NO: 10217 - protein, 9 aa, synthetic construct
  REGION 1..9: note = 26S proteasome non-ATPase regulatory subunit 11 (409-417)
KVVDSLYNK

SEQ ID NO: 10218 - protein, 9 aa, synthetic construct
  REGION 1..9: note = Tripartite motif-containing protein 34 (162-170)
KYGVFEESL

SEQ ID NO: 10219 - protein, 9 aa, synthetic construct
  REGION 1..9: note = Tubulin-tyrosine ligase (184-192)
KYLEHPLLL

SEQ ID NO: 10220 - protein, 9 aa, synthetic construct
  REGION 1..9: note = DNA topoisomerase 3-beta-1 (425-433)
KYLQSTISF

SEQ ID NO: 10221 - protein, 9 aa, synthetic construct
  REGION 1..9: note = Lysine-specific demethylase 2A (48-56)
KYNANFVTF

SEQ ID NO: 10222 - protein, 9 aa, synthetic construct
  REGION 1..9: note = Hermansky-Pudlak syndrome 3 protein (16-24)
KYQIINEEF

SEQ ID NO: 10223 - protein, 9 aa, synthetic construct
  REGION 1..9: note = G/T mismatch-specific thymine DNAosylase (221-229)
KYQPRIAVF

SEQ ID NO: 10224 - protein, 9 aa, synthetic construct
  REGION 1..9: note = Casein kinase II subunit alpha (49-57)
KYSEVFEAI

SEQ ID NO: 10225 - protein, 12 aa, synthetic construct
  REGION 1..12: note = Eukaryotic translation initiation factor 3 subunit D (58-69)
KYSSQFGGGSQY

SEQ ID NO: 10226 - protein, 9 aa, synthetic construct
  REGION 1..9: note = E3 ubiquitin-protein ligase listerin (1408-1416)
KYVSSVLSF

SEQ ID NO: 10227 - protein, 17 aa, synthetic construct
  REGION 1..17: note = Glutathione S-transferase P (194-210)
LASPEYVNLPINGNGKQ

SEQ ID NO: 10228 - protein, 9 aa, synthetic construct
  REGION 1..9: note = Msx2-interacting protein (2085-2093)
LAVDKSASL

SEQ ID NO: 10229 - protein, 8 aa, synthetic construct
  REGION 1..8: note = Transducin beta-like protein 3 (781-788)
LDFLWHNM

SEQ ID NO: 10230 - protein, 9 aa, synthetic construct
  REGION 1..9: note = Negative regulator of reactive oxygen species (186-194)
LDLQRNYIF

SEQ ID NO: 10231 - protein, 9 aa, synthetic construct
  REGION 1..9: note = Protein S100-A9 (66-74)
LDTNADKQL

SEQ ID NO: 10232 - protein, 10 aa, synthetic construct
  REGION 1..10: note = Ubiquitin-60S ribosomal protein L40 (55-64)
LEDGRTLSDY

SEQ ID NO: 10233 - protein, 9 aa, synthetic construct
  REGION 1..9: note = Microtubule-actin cross-linking factor 1 isoform X1 (2426-2434)
LEEDSAREI

SEQ ID NO: 10234 - protein, 8 aa, synthetic construct
  REGION 1..8: note = Coatomer subunit zeta-1 (62-69)
LEGLTVVY

SEQ ID NO: 10235 - protein, 9 aa, synthetic construct
  REGION 1..9: note = Phosphatidylinositol 4-kinase alpha (113-121)
LEIQDKEYL

SEQ ID NO: 10236 - protein, 8 aa, synthetic construct
  REGION 1..8: note = Vimentin (220-227)
LERKVESL

SEQ ID NO: 10237 - protein, 9 aa, synthetic construct
  REGION 1..9: note = BAG family molecular chaperone regulator 2 (29-37)
LESLDQLEL

SEQ ID NO: 10238 - protein, 9 aa, synthetic construct
  REGION 1..9: note = Ubiquitin carboxyl-terminal hydrolase 11 (266-274)
LETGQLIIM

SEQ ID NO: 10239 - protein, 9 aa, synthetic construct
  REGION 1..9: note = ATP-dependent RNA helicase DDX1 (284-292)
LIVEPSREL

SEQ ID NO: 10240 - protein, 9 aa, synthetic construct
  REGION 1..9: note = 60S acidic ribosomal protein P0 (102-110)
LLANKVPAA

SEQ ID NO: 10241 - protein, 9 aa, synthetic construct
  REGION 1..9: note = Ras GTPase-activating-like protein IQGAP2 (984-992)
LLAPVVKEI

SEQ ID NO: 10242 - protein, 9 aa, synthetic construct
  REGION 1..9: note = Nucleolar complex protein 4 homolog (333-341)
LLDPSVFHV

SEQ ID NO: 10243 - protein, 9 aa, synthetic construct
  REGION 1..9: note = Inositol hexakisphosphate kinase 2 (76-84)
LLEPFVHQV

SEQ ID NO: 10244 - protein, 9 aa, synthetic construct
  REGION 1..9: note = TBC1 domain family member 9B (211-219)
LLFPESIRV

SEQ ID NO: 10245 - protein, 9 aa, synthetic construct
  REGION 1..9: note = Ganglioside GM2 activator (15-23)
LLLAAPAQA

SEQ ID NO: 10246 - protein, 9 aa, synthetic construct
  REGION 1..9: note = DNA damage-binding protein 1 (1050-1058)
LLLDMQNRL

SEQ ID NO: 10247 - protein, 9 aa, synthetic construct
  REGION 1..9: note = Retinoblastoma-associated protein (476-484)
LLNDNIFHM

SEQ ID NO: 10248 - protein, 10 aa, synthetic construct
  REGION 1..10: note = RNA-binding protein 12B (432-441)
LLYDDKGVGL

SEQ ID NO: 10249 - protein, 9 aa, synthetic construct
  REGION 1..9: note = Beta-galactoside alpha-2,6-sialyltransferase 1 (371-379)
LLYEKNLVK

SEQ ID NO: 10250 - protein, 11 aa, synthetic construct
  REGION 1..11: note = Junction plakoglobin (16-26)
LLYQEGAKMAV

SEQ ID NO: 10251 - protein, 12 aa, synthetic construct
  REGION 1..12: note = General transcription factor IIH subunit 5 (60-71)
LMDQNAFSLTQK

SEQ ID NO: 10252 - protein, 10 aa, synthetic construct
  REGION 1..10: note = Dynactin subunit 5 (164-173)
LMIDVTKSYY

SEQ ID NO: 10253 - protein, 9 aa, synthetic construct
  REGION 1..9: note = Protein SSXT (79-87)
LPAPPTQNM

SEQ ID NO: 10254 - protein, 9 aa, synthetic construct
  REGION 1..9: note = N-terminal Xaa-Pro-Lys N-methyltransferase 1 (211-219)
LPDEIYHVY

SEQ ID NO: 10255 - protein, 9 aa, synthetic construct
  REGION 1..9: note = Ran-binding protein 9 (350-358)
LPKQPPLAL

SEQ ID NO: 10256 - protein, 9 aa, synthetic construct
  REGION 1..9: note = E3 ubiquitin-protein ligase RNF216 (406-414)
LPRPVPQNL

SEQ ID NO: 10257 - protein, 10 aa, synthetic construct
  REGION 1..10: note = SET domain-containing protein 5 (1382-1391)
LPSDLRTISL

SEQ ID NO: 10258 - protein, 9 aa, synthetic construct
  REGION 1..9: note = Anaphase-promoting complex subunit 7 (132-140)
LPSEIEVKY

SEQ ID NO: 10259 - protein, 9 aa, synthetic construct
  REGION 1..9: note = F-box/WD repeat-containing protein 7 (467-475)
LQFDGIHVV

SEQ ID NO: 10260 - protein, 13 aa, synthetic construct
  REGION 1..13: note = Keratin, type I cytoskeletal 10 (222-234)
LQIDNARLAADDF

SEQ ID NO: 10261 - protein, 10 aa, synthetic construct
  REGION 1..10: note = Double-stranded RNA-binding protein Staufen homolog 1 (119-128)
LQNEPLPERL

SEQ ID NO: 10262 - protein, 15 aa, synthetic construct
  REGION 1..15: note = HLA class I histocompatibility antigen, Cw-3 alpha chain (296-310)
LRWEPSSQPTIPIVG

SEQ ID NO: 10263 - protein, 8 aa, synthetic construct
  REGION 1..8: note = TRIO and F-actin-binding protein (42-49)
LTDSSLKY

SEQ ID NO: 10264 - protein, 9 aa, synthetic construct
  REGION 1..9: note = Pleckstrin homology domain-containing family A member 2 (315-323)
LTRPGSSSL

SEQ ID NO: 10265 - protein, 9 aa, synthetic construct
  REGION 1..9: note = DNA topoisomerase 2-beta (566-574)
LTYNDFINK

SEQ ID NO: 10266 - protein, 9 aa, synthetic construct
  REGION 1..9: note = Suppressor of SWI4 1 homolog (117-125)
LVRDVVSSL

SEQ ID NO: 10267 - protein, 10 aa, synthetic construct
  REGION 1..10: note = Leucine-rich repeat-containing protein 20 (34-43)
LVSFPIGIYK

SEQ ID NO: 10268 - protein, 11 aa, synthetic construct
  REGION 1..11: note = Beta-actin-like protein 2 (9-19)
LVVDNGSGMCK

SEQ ID NO: 10269 - protein, 9 aa, synthetic construct
  REGION 1..9: note = Peptidyl-prolyl cis-trans isomerase FKBP4 (410-418)
LYANMFERL

SEQ ID NO: 10270 - protein, 9 aa, synthetic construct
  REGION 1..9: note = AKT-interacting protein (201-209)
LYEKDIQLF

SEQ ID NO: 10271 - protein, 9 aa, synthetic construct
  REGION 1..9: note = Serine palmitoyltransferase 2 (282-290)
LYLDEAHSI

SEQ ID NO: 10272 - protein, 9 aa, synthetic construct
  REGION 1..9: note = DNA-dependent protein kinase catalytic subunit (3377-3385)
LYQRAFQHL

SEQ ID NO: 10273 - protein, 9 aa, synthetic construct
  REGION 1..9: note = Stimulator of interferon genes protein (214-222)
MADPNIRFL

SEQ ID NO: 10274 - protein, 8 aa, synthetic construct
  REGION 1..8: note = Putative V-set and immunoglobulin domain-containing-like protein IGHV4OR15-8 (1-8)
MDLLHKNM

SEQ ID NO: 10275 - protein, 9 aa, synthetic construct
  REGION 1..9: note = Ig kappa chain V-I region HK102 (1-9)
MDMRVPAQL

SEQ ID NO: 10276 - protein, 9 aa, synthetic construct
  REGION 1..9: note = Hypoxia-inducible factor 1-alpha (632-640)
MEDIKILIA

SEQ ID NO: 10277 - protein, 8 aa, synthetic construct
  REGION 1..8: note = Ras GTPase-activating protein-binding protein 1 (183-190)
MEEHLEEP

SEQ ID NO: 10278 - protein, 9 aa, synthetic construct
  REGION 1..9: note = Vimentin (347-355)
MEENFAVEA

SEQ ID NO: 10279 - protein, 10 aa, synthetic construct
  REGION 1..10: note = Protein S100-A10 (5-14)
MEHAMETMMF

SEQ ID NO: 10280 - protein, 9 aa, synthetic construct
  REGION 1..9: note = Actin, alpha skeletal muscle (84-92)
MEKIWHHTF

SEQ ID NO: 10281 - protein, 9 aa, synthetic construct
  REGION 1..9: note = Arachidonate 5-lipoxygenase (186-194)
MENLFINRF

SEQ ID NO: 10282 - protein, 9 aa, synthetic construct
  REGION 1..9: note = Protein diaphanous homolog 1 (496-504)
MESDFEQKL

SEQ ID NO: 10283 - protein, 9 aa, synthetic construct
  REGION 1..9: note = Cytochrome c oxidase subunit 2 (20-28)
METVWTILP

SEQ ID NO: 10284 - protein, 9 aa, synthetic construct
  REGION 1..9: note = Poly(A)-specific ribonuclease PARN (243-251)
MLLDVMHTV

SEQ ID NO: 10285 - protein, 9 aa, synthetic construct
  REGION 1..9: note = DNA ligase 1 (393-401)
MLPPPPLTA

SEQ ID NO: 10286 - protein, 10 aa, synthetic construct
  REGION 1..10: note = Eukaryotic translation initiation factor 3 subunit A (514-523)
MPSEQIRNQL

SEQ ID NO: 10287 - protein, 9 aa, synthetic construct
  REGION 1..9: note = U2 snRNP-associated SURP motif-containing protein (392-400)
MTESKFSKY

SEQ ID NO: 10288 - protein, 9 aa, synthetic construct
  REGION 1..9: note = Probable ATP-dependent RNA helicase DDX6 (168-176)
MVIVPTREL

SEQ ID NO: 10289 - protein, 9 aa, synthetic construct
  REGION 1..9: note = Staphylococcal nuclease domain-containing protein 1 (327-335)
NADAIVVKL

SEQ ID NO: 10290 - protein, 10 aa, synthetic construct
  REGION 1..10: note = Ceruloplasmin (651-660)
NEADVHGIYF

SEQ ID NO: 10291 - protein, 9 aa, synthetic construct
  REGION 1..9: note = HLA class I histocompatibility antigen, A-3 alpha chain (151-159)
NEDLRSWTA

SEQ ID NO: 10292 - protein, 11 aa, synthetic construct
  REGION 1..11: note = Nuclear pore complex protein Nup50 (371-381)
NEFKEKGIGTL

SEQ ID NO: 10293 - protein, 8 aa, synthetic construct
  REGION 1..8: note = 40S ribosomal protein S3 (22-29)
NEFLTREL

SEQ ID NO: 10294 - protein, 9 aa, synthetic construct
  REGION 1..9: note = Adenylyl cyclase-associated protein 1 (449-457)
NEFPVPEQF

SEQ ID NO: 10295 - protein, 10 aa, synthetic construct
  REGION 1..10: note = Protein C-ets-1 (86-95)
NEFSLKGVDF

SEQ ID NO: 10296 - protein, 9 aa, synthetic construct
  REGION 1..9: note = Midasin (329-337)
NEILGSLRW

SEQ ID NO: 10297 - protein, 8 aa, synthetic construct
  REGION 1..8: note = Guanine nucleotide-binding protein-like 3-like protein (192-199)
NELPTVAF

SEQ ID NO: 10298 - protein, 10 aa, synthetic construct
  REGION 1..10: note = Trinucleotide repeat-containing gene 6B protein (723-732)
NENPSKDQGW

SEQ ID NO: 10299 - protein, 10 aa, synthetic construct
  REGION 1..10: note = DNA dC-dU-editing enzyme APOBEC-3B (23-32)
NEPILYGRSY

SEQ ID NO: 10300 - protein, 9 aa, synthetic construct
  REGION 1..9: note = Catenin alpha-1 (169-177)
NEQDLGIQY

SEQ ID NO: 10301 - protein, 10 aa, synthetic construct
  REGION 1..10: note = Cytoplasmic FMR1-interacting protein 2 (99-108)
NEQPNRVEIY

SEQ ID NO: 10302 - protein, 9 aa, synthetic construct
  REGION 1..9: note = Four and a half LIM domains protein 2 (121-129)
NESLFGKKY

SEQ ID NO: 10303 - protein, 8 aa, synthetic construct
  REGION 1..8: note = Protein disulfide-isomerase (430-437)
NEVEAVKV

SEQ ID NO: 10304 - protein, 9 aa, synthetic construct
  REGION 1..9: note = Radial spoke head protein 3 homolog (440-448)
NEVEKTMEY

SEQ ID NO: 10305 - protein, 8 aa, synthetic construct
  REGION 1..8: note = Nucleosome assembly protein 1-like 1 (226-233)
NEVLTKTY

SEQ ID NO: 10306 - protein, 9 aa, synthetic construct
  REGION 1..9: note = Collagen alpha-3(VI) chain (2246-2254)
NEVTTEIRF

SEQ ID NO: 10307 - protein, 8 aa, synthetic construct
  REGION 1..8: note = 60S ribosomal protein L31 (18-25)
NEVVTREY

SEQ ID NO: 10308 - protein, 9 aa, synthetic construct
  REGION 1..9: note = Synaptobrevin homolog YKT6 (83-91)
NEYPSRVAF

SEQ ID NO: 10309 - protein, 9 aa, synthetic construct
  REGION 1..9: note = 26S proteasome non-ATPase regulatory subunit 4 (18-26)
NGDFLPTRL

SEQ ID NO: 10310 - protein, 13 aa, synthetic construct
  REGION 1..13: note = Eukaryotic translation initiation factor 3 subunit D (57-69)
NKYSSQFGGGSQY

SEQ ID NO: 10311 - protein, 10 aa, synthetic construct
  REGION 1..10: note = Structural maintenance of chromosomes protein 4 (634-643)
NLDQATRVAY

SEQ ID NO: 10312 - protein, 9 aa, synthetic construct
  REGION 1..9: note = Heterogeneous nuclear ribonucleoprotein U-like protein 2 (358-366)
NPEKRYNVL

SEQ ID NO: 10313 - protein, 9 aa, synthetic construct
  REGION 1..9: note = 2'-5'-oligoadenylate synthase 1 (128-136)
NPRALSFVL

SEQ ID NO: 10314 - protein, 10 aa, synthetic construct
  REGION 1..10: note = Cleavage and polyadenylation specificity factor subunit 3 (308-317)
NPRNTEAVTL

SEQ ID NO: 10315 - protein, 9 aa, synthetic construct
  REGION 1..9: note = ETS translocation variant 5 (210-218)
NQYPSEQRF

SEQ ID NO: 10316 - protein, 9 aa, synthetic construct
  REGION 1..9: note = Protein TASOR (346-354)
NTDRNIDKY

SEQ ID NO: 10317 - protein, 17 aa, synthetic construct
  REGION 1..17: note = Actin, cytoplasmic 2 (35-51)
NTVLSGGTTMYPGIADR

SEQ ID NO: 10318 - protein, 9 aa, synthetic construct
  REGION 1..9: note = ORM1-like protein 2 (53-61)
NVIHNLATY

SEQ ID NO: 10319 - protein, 9 aa, synthetic construct
  REGION 1..9: note = Unconventional myosin-Ic (852-860)
NYPQSVPRL

SEQ ID NO: 10320 - protein, 9 aa, synthetic construct
  REGION 1..9: note = Myotubularin-related protein 6 (104-112)
NYSNIRFQF

SEQ ID NO: 10321 - protein, 9 aa, synthetic construct
  REGION 1..9: note = Actin-related protein 2/3 complex subunit 3 (2-10)
PAYHSSLMD

SEQ ID NO: 10322 - protein, 10 aa, synthetic construct
  REGION 1..10: note = NADH dehydrogenase (ubiquinone) 1 beta subcomplex subunit 11, mitochondrial (144-153)
PSKIQLPEDE

SEQ ID NO: 10323 - protein, 9 aa, synthetic construct
  REGION 1..9: note = Probable helicase with zinc finger domain (955-963)
PYADQVFRI

SEQ ID NO: 10324 - protein, 9 aa, synthetic construct
  REGION 1..9: note = Polypeptide N-acetylgalactosaminyltransferase 2 (407-415)
PYGNIQSRL

SEQ ID NO: 10325 - protein, 9 aa, synthetic construct
  REGION 1..9: note = Nucleolin (401-409)
PYKVTQDEL

SEQ ID NO: 10326 - protein, 16 aa, synthetic construct
  REGION 1..16: note = Cytochrome c oxidase subunit 5B, mitochondrial (61-76)
PYNVLAPKGASGTRED

SEQ ID NO: 10327 - protein, 9 aa, synthetic construct
  REGION 1..9: note = Dol-P-Man:Man(7)GlcNAc(2)-PP-Dol alpha-1,6-mannosyltransferase (29-37)
PYTKVEESF

SEQ ID NO: 10328 - protein, 9 aa, synthetic construct
  REGION 1..9: note = Serglycin (81-89)
QDLNRIFPL

SEQ ID NO: 10329 - protein, 9 aa, synthetic construct
  REGION 1..9: note = Paraneoplastic antigen Ma1 (117-125)
QDVARVLGF

SEQ ID NO: 10330 - protein, 9 aa, synthetic construct
  REGION 1..9: note = UDP-glucuronic acid decarboxylase 1 (248-256)
QEGVEVRVA

SEQ ID NO: 10331 - protein, 9 aa, synthetic construct
  REGION 1..9: note = Talin-1 (1707-1715)
QEISHLIEP

SEQ ID NO: 10332 - protein, 9 aa, synthetic construct
  REGION 1..9: note = Integrin beta-2 (422-430)
QEQSFVIRA

SEQ ID NO: 10333 - protein, 9 aa, synthetic construct
  REGION 1..9: note = Forkhead-associated domain-containing protein 1 (519-527)
QLIEKITQV

SEQ ID NO: 10334 - protein, 9 aa, synthetic construct
  REGION 1..9: note = Integrin alpha-V (217-225)
QVAEIVSKY

SEQ ID NO: 10335 - protein, 9 aa, synthetic construct
  REGION 1..9: note = Biogenesis of lysosome-related organelles complex 1 subunit 1 (64-72)
QVQAAQFAK

SEQ ID NO: 10336 - protein, 9 aa, synthetic construct
  REGION 1..9: note = CCR4-NOT transcription complex subunit 1 (465-473)
QYEQVKQLF

SEQ ID NO: 10337 - protein, 9 aa, synthetic construct
  REGION 1..9: note = Phosphatidylinositol 3,4,5-trisphosphate-dependent Rac exchanger 1 protein (1095-1103)
QYVTQINRL

SEQ ID NO: 10338 - protein, 12 aa, synthetic construct
  REGION 1..12: note = Non-POU domain-containing octamer-binding protein (367-378)
RAAPGAEFAPNK

SEQ ID NO: 10339 - protein, 9 aa, synthetic construct
  REGION 1..9: note = SWI/SNF-related matrix-associated actin-dependent regulator of chromatin subfamily E member 1-related (135-143)
RAYQQSEAY

SEQ ID NO: 10340 - protein, 8 aa, synthetic construct
  REGION 1..8: note = Zinc finger protein 36, C3H1 type-like 2 (239-246)
RDALHLGF

SEQ ID NO: 10341 - protein, 9 aa, synthetic construct
  REGION 1..9: note = Chloride intracellular channel protein 6 (640-648)
RDFEFPSEM

SEQ ID NO: 10342 - protein, 8 aa, synthetic construct
  REGION 1..8: note = Rab3 GTPase-activating protein non-catalytic subunit (18-25)
RDFLFPHL

SEQ ID NO: 10343 - protein, 8 aa, synthetic construct
  REGION 1..8: note = 60S ribosomal protein L9 (36-43)
RDFNHINV

SEQ ID NO: 10344 - protein, 9 aa, synthetic construct
  REGION 1..9: note = Guanylate-binding protein 4 (196-204)
RDFTLELKL

SEQ ID NO: 10345 - protein, 9 aa, synthetic construct
  REGION 1..9: note = Alkyldihydroxyacetonephosphate synthase, peroxisomal (515-523)
RDLALEYYV

SEQ ID NO: 10346 - protein, 8 aa, synthetic construct
  REGION 1..8: note = Cell division control protein 42 homolog (147-154)
RDLKAVKY

SEQ ID NO: 10347 - protein, 8 aa, synthetic construct
  REGION 1..8: note = 40S ribosomal protein S27-like (5-12)
RDLLHPSL

SEQ ID NO: 10348 - protein, 9 aa, synthetic construct
  REGION 1..9: note = Septin-9 (519-527)
RDLLIRTHM

SEQ ID NO: 10349 - protein, 9 aa, synthetic construct
  REGION 1..9: note = Eukaryotic translation initiation factor 3 subunit C (586-594)
RDLMLMSHL

SEQ ID NO: 10350 - protein, 11 aa, synthetic construct
  REGION 1..11: note = Macrosialin (238-248)
RDLQAPLGQSF

SEQ ID NO: 10351 - protein, 9 aa, synthetic construct
  REGION 1..9: note = E3 ubiquitin-protein ligase RNF213 (160-168)
RDLSHILGI

SEQ ID NO: 10352 - protein, 9 aa, synthetic construct
  REGION 1..9: note = Serine/threonine-protein kinase RIO1 (201-209)
RDMDIIMKL

SEQ ID NO: 10353 - protein, 9 aa, synthetic construct
  REGION 1..9: note = Transcription factor 25 (650-658)
RDMMANFHL

SEQ ID NO: 10354 - protein, 8 aa, synthetic construct
  REGION 1..8: note = Transcription elongation factor A protein 1 (123-130)
RDTYVSSF

SEQ ID NO: 10355 - protein, 9 aa, synthetic construct
  REGION 1..9: note = Growth arrest and DNA damage-inducible protein GADD45 alpha (67-75)
RDVALQIHF

SEQ ID NO: 10356 - protein, 8 aa, synthetic construct
  REGION 1..8: note = Transmembrane protein 14A (51-58)
RDVKVSLF

SEQ ID NO: 10357 - protein, 9 aa, synthetic construct
  REGION 1..9: note = TraB domain-containing protein (259-267)
RDVYLTYML

SEQ ID NO: 10358 - protein, 10 aa, synthetic construct
  REGION 1..10: note = Pyruvate kinase PKM (383-392)
REAEAAIYHL

SEQ ID NO: 10359 - protein, 9 aa, synthetic construct
  REGION 1..9: note = Protein nepro homolog (226-234)
REAESFTQL

SEQ ID NO: 10360 - protein, 10 aa, synthetic construct
  REGION 1..10: note = 40S ribosomal protein S4, X isoform (39-48)
RECLPLIIFL

SEQ ID NO: 10361 - protein, 9 aa, synthetic construct
  REGION 1..9: note = T-complex protein 1 subunit gamma (260-268)
REEDFTRIL

SEQ ID NO: 10362 - protein, 11 aa, synthetic construct
  REGION 1..11: note = Transcription factor E2F7 (433-443)
REEQGSGGYSL

SEQ ID NO: 10363 - protein, 8 aa, synthetic construct
  REGION 1..8: note = Ribonucleoside-diphosphate reductase subunit M2 (190-197)
REFLFNAI

SEQ ID NO: 10364 - protein, 9 aa, synthetic construct
  REGION 1..9: note = DNA-dependent protein kinase catalytic subunit (1087-1095)
REFREEESL

SEQ ID NO: 10365 - protein, 8 aa, synthetic construct
  REGION 1..8: note = Vacuolar protein sorting-associated protein 51 homolog (490-497)
REGLIVGF

SEQ ID NO: 10366 - protein, 9 aa, synthetic construct
  REGION 1..9: note = Torsin-4A (350-358)
REHPLWQAA

SEQ ID NO: 10367 - protein, 9 aa, synthetic construct
  REGION 1..9: note = Vimentin (186-194)
REKLQEEML

SEQ ID NO: 10368 - protein, 9 aa, synthetic construct
  REGION 1..9: note = Protein CEBPZOS (68-76)
RELDQKTWL

SEQ ID NO: 10369 - protein, 9 aa, synthetic construct
  REGION 1..9: note = Extended synaptotagmin-1 (125-133)
RELPAWVSF

SEQ ID NO: 10370 - protein, 9 aa, synthetic construct
  REGION 1..9: note = DNA-directed RNA polymerase II subunit RPB1 (1380-1388)
RELYHVISF

SEQ ID NO: 10371 - protein, 8 aa, synthetic construct
  REGION 1..8: note = HLA class I histocompatibility antigen, B-57 alpha chain (99-106)
RENLRIAL

SEQ ID NO: 10372 - protein, 9 aa, synthetic construct
  REGION 1..9: note = Ras-related protein M-Ras (116-124)
RESFPMILV

SEQ ID NO: 10373 - protein, 9 aa, synthetic construct
  REGION 1..9: note = Large proline-rich protein BAG6 (814-822)
RESFSLVQV

SEQ ID NO: 10374 - protein, 9 aa, synthetic construct
  REGION 1..9: note = Vimentin (424-432)
RETNLDSLP

SEQ ID NO: 10375 - protein, 10 aa, synthetic construct
  REGION 1..10: note = DNA polymerase delta subunit 2 (109-118)
REVSEEHNLL

SEQ ID NO: 10376 - protein, 9 aa, synthetic construct
  REGION 1..9: note = Zinc finger protein 343 (243-251)
REYEPDHNL

SEQ ID NO: 10377 - protein, 9 aa, synthetic construct
  REGION 1..9: note = Desmin (386-394)
REYQDLLNV

SEQ ID NO: 10378 - protein, 9 aa, synthetic construct
  REGION 1..9: note = ADP-ribosylation factor 6 (95-103)
RIDEARQEL

SEQ ID NO: 10379 - protein, 14 aa, synthetic construct
  REGION 1..14: note = Heat shock 70 kDa protein 1-like (173-186)
RIINEPTAAAIAYG

SEQ ID NO: 10380 - protein, 9 aa, synthetic construct
  REGION 1..9: note = Chromobox protein homolog 6 (91-99)
RISDVHFSV

SEQ ID NO: 10381 - protein, 9 aa, synthetic construct
  REGION 1..9: note = Vimentin (410-418)
RISLPLPNF

SEQ ID NO: 10382 - protein, 10 aa, synthetic construct
  REGION 1..10: note = Discoidin, CUB and LCCL domain-containing protein 2 (86-95)
RIYNGIGVSR

SEQ ID NO: 10383 - protein, 9 aa, synthetic construct
  REGION 1..9: note = Polyribonucleotide 5'-hydroxyl-kinase Clp1 (206-214)
RLADVFNQR

SEQ ID NO: 10384 - protein, 9 aa, synthetic construct
  REGION 1..9: note = Clathrin heavy chain 1 (1226-1234)
RLASTLVHL

SEQ ID NO: 10385 - protein, 9 aa, synthetic construct
  REGION 1..9: note = Transcription elongation factor SPT6 (292-300)
RLFEKMQAY

SEQ ID NO: 10386 - protein, 11 aa, synthetic construct
  REGION 1..11: note = Deoxyhypusine synthase (263-273)
RLINTQAIFAK

SEQ ID NO: 10387 - protein, 9 aa, synthetic construct
  REGION 1..9: note = Lysophospholipid acyltransferase 5 (293-301)
RLIQESPTL

SEQ ID NO: 10388 - protein, 9 aa, synthetic construct
  REGION 1..9: note = trabeculin-alpha (476-484)
RLQDELVTL

SEQ ID NO: 10389 - protein, 9 aa, synthetic construct
  REGION 1..9: note = Gamma-tubulin complex component 5 (326-334)
RLQEFIDEV

SEQ ID NO: 10390 - protein, 9 aa, synthetic construct
  REGION 1..9: note = Nuclear cap-binding protein subunit 1 (694-702)
RLQEKVESA

SEQ ID NO: 10391 - protein, 9 aa, synthetic construct
  REGION 1..9: note = Integrin beta-7 (181-189)
RLQEVTHSV

SEQ ID NO: 10392 - protein, 9 aa, synthetic construct
  REGION 1..9: note = 40S ribosomal protein S27 (87-95)
RLVQSPNSY

SEQ ID NO: 10393 - protein, 10 aa, synthetic construct
  REGION 1..10: note = Serpin H1 (133-142)
RLYGPSSVSF

SEQ ID NO: 10394 - protein, 9 aa, synthetic construct
  REGION 1..9: note = Tetratricopeptide repeat protein 30A (82-90)
RLYQAQALY

SEQ ID NO: 10395 - protein, 9 aa, synthetic construct
  REGION 1..9: note = DNA mismatch repair protein Msh2 (406-414)
RLYQGINQL

SEQ ID NO: 10396 - protein, 9 aa, synthetic construct
  REGION 1..9: note = Probable 18S rRNA (guanine-N(7))-methyltransferase (31-39)
RMIDIQTRM

SEQ ID NO: 10397 - protein, 9 aa, synthetic construct
  REGION 1..9: note = 26S protease regulatory subunit 4 (411-419)
RMKVTNEDF

SEQ ID NO: 10398 - protein, 9 aa, synthetic construct
  REGION 1..9: note = A-kinase anchor protein 8-like (199-207)
RMWEDPMGA

SEQ ID NO: 10399 - protein, 11 aa, synthetic construct
  REGION 1..11: note = Keratin, type I cytoskeletal 10 (99-109)
RNVSTGDVNVE

SEQ ID NO: 10400 - protein, 9 aa, synthetic construct
  REGION 1..9: note = Ubiquitin-like modifier-activating enzyme 1 (325-333)
RPAQLHIGF

SEQ ID NO: 10401 - protein, 11 aa, synthetic construct
  REGION 1..11: note = Eukaryotic translation initiation factor 4 gamma 1 (191-201)
RPDDRSQGAII

SEQ ID NO: 10402 - protein, 9 aa, synthetic construct
  REGION 1..9: note = Microtubule-associated protein 4 (670-678)
RPEEGRPVV

SEQ ID NO: 10403 - protein, 9 aa, synthetic construct
  REGION 1..9: note = Syntenin-1 (193-201)
RPFERTITM

SEQ ID NO: 10404 - protein, 9 aa, synthetic construct
  REGION 1..9: note = Cellular tumor antigen p53 (25-33)
RPILTIITL

SEQ ID NO: 10405 - protein, 9 aa, synthetic construct
  REGION 1..9: note = Methionine adenosyltransferase 2 subunit beta (277-285)
RPITDSPVL

SEQ ID NO: 10406 - protein, 9 aa, synthetic construct
  REGION 1..9: note = U2 snRNP-associated SURP motif-containing protein (430-438)
RPKKPGQSF

SEQ ID NO: 10407 - protein, 9 aa, synthetic construct
  REGION 1..9: note = Methionine-tRNA ligase, cytoplasmic (45-53)
RPKVPVLQL

SEQ ID NO: 10408 - protein, 9 aa, synthetic construct
  REGION 1..9: note = Actin-related protein 3 (262-270)
RPLYKNIVL

SEQ ID NO: 10409 - protein, 8 aa, synthetic construct
  REGION 1..8: note = Proline-rich nuclear receptor coactivator 2 (13-20)
RPMKTSVL

SEQ ID NO: 10410 - protein, 9 aa, synthetic construct
  REGION 1..9: note = DNA damage-binding protein 1 (753-761)
RPSASTQAL

SEQ ID NO: 10411 - protein, 10 aa, synthetic construct
  REGION 1..10: note = Inositol-tetrakisphosphate 1-kinase (256-265)
RPSDEVIREL

SEQ ID NO: 10412 - protein, 9 aa, synthetic construct
  REGION 1..9: note = Nucleoprotein TPR (1808-1816)
RPSTSTAVF

SEQ ID NO: 10413 - protein, 10 aa, synthetic construct
  REGION 1..10: note = Nuclear pore complex protein Nup214 (1284-1293)
RPVAPSGTAL

SEQ ID NO: 10414 - protein, 9 aa, synthetic construct
  REGION 1..9: note = 60S ribosomal protein L15 (73-81)
RPVPKGATY

SEQ ID NO: 10415 - protein, 9 aa, synthetic construct
  REGION 1..9: note = STE20-related kinase adapter protein alpha (358-366)
RPVTPITNF

SEQ ID NO: 10416 - protein, 9 aa, synthetic construct
  REGION 1..9: note = Grancalcin (145-153)
RQAIGLMGY

SEQ ID NO: 10417 - protein, 10 aa, synthetic construct
  REGION 1..10: note = Transcriptional repressor p66-beta (415-424)
RQAPQPQSSL

SEQ ID NO: 10418 - protein, 12 aa, synthetic construct
  REGION 1..12: note = UBX domain-containing protein 4 (346-357)
RQFAAQTVGNTY

SEQ ID NO: 10419 - protein, 9 aa, synthetic construct
  REGION 1..9: note = Spectrin alpha chain, non-erythrocytic 1 (1012-1020)
RQGFVPAAY

SEQ ID NO: 10420 - protein, 8 aa, synthetic construct
  REGION 1..8: note = Fragile X mental retardation syndrome-related protein 1 (376-383)
RQIGSRSY

SEQ ID NO: 10421 - protein, 9 aa, synthetic construct
  REGION 1..9: note = Sialidase-1 (69-77)
RQIGSVDTF

SEQ ID NO: 10422 - protein, 9 aa, synthetic construct
  REGION 1..9: note = Cytochrome b-245 heavy chain (92-100)
RQLDRNLTF

SEQ ID NO: 10423 - protein, 9 aa, synthetic construct
  REGION 1..9: note = Vacuole membrane protein 1 (48-56)
RQPLITLQY

SEQ ID NO: 10424 - protein, 9 aa, synthetic construct
  REGION 1..9: note = Lanosterol synthase (234-242)
RQVYLPMSY

SEQ ID NO: 10425 - protein, 8 aa, synthetic construct
  REGION 1..8: note = Eukaryotic translation initiation factor 3 subunit L (38-45)
RQYEQQTY

SEQ ID NO: 10426 - protein, 9 aa, synthetic construct
  REGION 1..9: note = Protein CDV3 homolog (7-15)
RSLDNFFAK

SEQ ID NO: 10427 - protein, 11 aa, synthetic construct
  REGION 1..11: note = Cation-independent mannose-6-phosphate receptor (2345-2355)
RSSNVSYKYSK

SEQ ID NO: 10428 - protein, 9 aa, synthetic construct
  REGION 1..9: note = Protein phosphatase 1 regulatory subunit 12A (704-712)
RTYDETYQR

SEQ ID NO: 10429 - protein, 11 aa, synthetic construct
  REGION 1..11: note = Protein FAM168A (83-93)
RTYQASSAAFR

SEQ ID NO: 10430 - protein, 9 aa, synthetic construct
  REGION 1..9: note = Manganese-transporting ATPase 13A1 (839-847)
RVAPKQKEF

SEQ ID NO: 10431 - protein, 9 aa, synthetic construct
  REGION 1..9: note = Alpha-adducin (27-35)
RVDENNPEY

SEQ ID NO: 10432 - protein, 9 aa, synthetic construct
  REGION 1..9: note = DNA damage-binding protein 1 (263-271)
RVDPNGSRY

SEQ ID NO: 10433 - protein, 10 aa, synthetic construct
  REGION 1..10: note = Eukaryotic translation initiation factor 3 subunit C-like protein (873-882)
RVFDHKQGTY

SEQ ID NO: 10434 - protein, 13 aa, synthetic construct
  REGION 1..13: note = LIM and senescent cell antigen-like-containing domain protein 1 (319-331)
RVIEGDVVSALNK

SEQ ID NO: 10435 - protein, 9 aa, synthetic construct
  REGION 1..9: note = Ran GTPase-activating protein 1 (205-213)
RVIGTLEEV

SEQ ID NO: 10436 - protein, 9 aa, synthetic construct
  REGION 1..9: note = HLA class II histocompatibility antigen, DRB1-16 beta chain (89-97)
RVQPKVTVY

SEQ ID NO: 10437 - protein, 11 aa, synthetic construct
  REGION 1..11: note = Glucose-6-phosphate 1-dehydrogenase (240-250)
RVQPNEAVYTK

SEQ ID NO: 10438 - protein, 9 aa, synthetic construct
  REGION 1..9: note = Rotatin (803-811)
RVTDLFIGK

SEQ ID NO: 10439 - protein, 15 aa, synthetic construct
  REGION 1..15: note = Histone H2A type 1-B/E (100-114)
RVTIAQGGVLPNIQA

SEQ ID NO: 10440 - protein, 14 aa, synthetic construct
  REGION 1..14: note = SH3 domain-binding glutamic acid-rich-like protein (4-17)
RVYIASSSGSTAIK

SEQ ID NO: 10441 - protein, 11 aa, synthetic construct
  REGION 1..11: note = WD repeat domain phosphoinositide-interacting protein 3 (34-44)
RVYNTDPLKEK

SEQ ID NO: 10442 - protein, 10 aa, synthetic construct
  REGION 1..10: note = Serine/arginine-rich splicing factor 9 (181-190)
RVYPERSTSY

SEQ ID NO: 10443 - protein, 9 aa, synthetic construct
  REGION 1..9: note = Lysine-specific demethylase 6B (135-143)
RYGGSFAEL

SEQ ID NO: 10444 - protein, 9 aa, synthetic construct
  REGION 1..9: note = Ras GTPase-activating protein-binding protein 2 (293-301)
RYPDSHQLF

SEQ ID NO: 10445 - protein, 9 aa, synthetic construct
  REGION 1..9: note = Eukaryotic translation initiation factor 3 subunit L (328-336)
RYQDAIRVF

SEQ ID NO: 10446 - protein, 9 aa, synthetic construct
  REGION 1..9: note = Poly (ADP-ribose) polymerase 8 (33-41)
RYSDSTFTF

SEQ ID NO: 10447 - protein, 11 aa, synthetic construct
  REGION 1..11: note = ATPase family AAA domain-containing protein 2 (163-173)
RYSGVNQSMLF

SEQ ID NO: 10448 - protein, 9 aa, synthetic construct
  REGION 1..9: note = Heterogeneous nuclear ribonucleoprotein H (23-31)
SADEVQRFF

SEQ ID NO: 10449 - protein, 9 aa, synthetic construct
  REGION 1..9: note = Intraflagellar transport protein 25 homolog (121-129)
SAFDHFASV

SEQ ID NO: 10450 - protein, 9 aa, synthetic construct
  REGION 1..9: note = Histone-lysine N-methyltransferase setd3 (403-411)
SAIDRIFTL

SEQ ID NO: 10451 - protein, 9 aa, synthetic construct
  REGION 1..9: note = Rho guanine nucleotide exchange factor 12 (613-621)
SAIGRAMEL

SEQ ID NO: 10452 - protein, 9 aa, synthetic construct
  REGION 1..9: note = Cell division cycle protein 16 homolog (483-491)
SAIGYIHSL

SEQ ID NO: 10453 - protein, 9 aa, synthetic construct
  REGION 1..9: note = Transient receptor potential cation channel subfamily V member 2 (165-173)
SALHIAIEK

SEQ ID NO: 10454 - protein, 9 aa, synthetic construct
  REGION 1..9: note = ATP-dependent zinc metalloprotease YME1L1 (158-166)
SAQSFFENK

SEQ ID NO: 10455 - protein, 9 aa, synthetic construct
  REGION 1..9: note = Putative annexin A2-like protein (22-30)
SAYGSVKAY

SEQ ID NO: 10456 - protein, 9 aa, synthetic construct
  REGION 1..9: note = Guanine nucleotide-binding protein G(I)/G(S)/G(T) subunit beta-1 (245-253)
SDDATCRLF

SEQ ID NO: 10457 - protein, 9 aa, synthetic construct
  REGION 1..9: note = Ubiquitin thioesterase OTUB1 (215-223)
SDHIHIIAL

SEQ ID NO: 10458 - protein, 9 aa, synthetic construct
  REGION 1..9: note = Homeobox-containing protein 1 (316-324)
SDLERVTSL

SEQ ID NO: 10459 - protein, 9 aa, synthetic construct
  REGION 1..9: note = Protein FAM162A (32-40)
SDLKRINGF

SEQ ID NO: 10460 - protein, 9 aa, synthetic construct
  REGION 1..9: note = Group XIIB secretory phospholipase A2-like protein (142-150)
SDLKRSLGF

SEQ ID NO: 10461 - protein, 9 aa, synthetic construct
  REGION 1..9: note = SH3 domain-binding protein 2 (218-226)
SDMPRAHSF

SEQ ID NO: 10462 - protein, 11 aa, synthetic construct
  REGION 1..11: note = Vimentin (299-309)
SEAANRNNDAL

SEQ ID NO: 10463 - protein, 9 aa, synthetic construct
  REGION 1..9: note = 14-3-3 protein eta (80-88)
SEAAYKEAF

SEQ ID NO: 10464 - protein, 9 aa, synthetic construct
  REGION 1..9: note = WD repeat-containing protein 6 (1032-1040)
SEDGSLHVF

SEQ ID NO: 10465 - protein, 10 aa, synthetic construct
  REGION 1..10: note = 60S ribosomal protein L7a (85-94)
SEDKGALAKL

SEQ ID NO: 10466 - protein, 9 aa, synthetic construct
  REGION 1..9: note = Cofilin-1 (41-49)
SEDKKNIIL

SEQ ID NO: 10467 - protein, 9 aa, synthetic construct
  REGION 1..9: note = Coatomer subunit alpha (268-276)
SEDKSIRVW

SEQ ID NO: 10468 - protein, 11 aa, synthetic construct
  REGION 1..11: note = 26S proteasome non-ATPase regulatory subunit 2 (436-446)
SEDYIKSGALL

SEQ ID NO: 10469 - protein, 9 aa, synthetic construct
  REGION 1..9: note = Calmodulin (82-90)
SEEEIREAF

SEQ ID NO: 10470 - protein, 10 aa, synthetic construct
  REGION 1..10: note = Nucleolar transcription factor 1 (115-124)
SEEGITKSTL

SEQ ID NO: 10471 - protein, 9 aa, synthetic construct
  REGION 1..9: note = Nucleoside diphosphate kinase 3 (61-69)
SEELLREHY

SEQ ID NO: 10472 - protein, 9 aa, synthetic construct
  REGION 1..9: note = A-kinase anchor protein 6 (991-999)
SEEQQQHLY

SEQ ID NO: 10473 - protein, 10 aa, synthetic construct
  REGION 1..10: note = 14-3-3 protein zeta/delta (227-236)
SEESYKDSTL

SEQ ID NO: 10474 - protein, 10 aa, synthetic construct
  REGION 1..10: note = CTTNBP2 N-terminal-like protein (259-268)
SEFDIEREQL

SEQ ID NO: 10475 - protein, 9 aa, synthetic construct
  REGION 1..9: note = Alpha-enolase (79-87)
SEFFRSGKY

SEQ ID NO: 10476 - protein, 9 aa, synthetic construct
  REGION 1..9: note = Dynamin-like 120 kDa protein, mitochondrial (351-359)
SEGPHHVAL

SEQ ID NO: 10477 - protein, 10 aa, synthetic construct
  REGION 1..10: note = Cyclic AMP-dependent transcription factor ATF-6 beta (8-17)
SEIADPTRFF

SEQ ID NO: 10478 - protein, 9 aa, synthetic construct
  REGION 1..9: note = Claspin (704-712)
SEIGKAVGF

SEQ ID NO: 10479 - protein, 9 aa, synthetic construct
  REGION 1..9: note = ATP-dependent zinc metalloprotease YME1L1 (695-703)
SEKLGVMTY

SEQ ID NO: 10480 - protein, 8 aa, synthetic construct
  REGION 1..8: note = Protein yippee-like 5 (28-35)
SELISTRF

SEQ ID NO: 10481 - protein, 9 aa, synthetic construct
  REGION 1..9: note = Ubiquitin carboxyl-terminal hydrolase 7 (778-786)
SELPTAKEY

SEQ ID NO: 10482 - protein, 9 aa, synthetic construct
  REGION 1..9: note = Mitochondrial import receptor subunit TOM70 (577-585)
SEMEMAHLY

SEQ ID NO: 10483 - protein, 9 aa, synthetic construct
  REGION 1..9: note = ADP-ribosylation factor 4 (137-145)
SEMTDKLGL

SEQ ID NO: 10484 - protein, 9 aa, synthetic construct
  REGION 1..9: note = Geranylgeranyl transferase type-1 subunit beta (168-176)
SENDMRFVY

SEQ ID NO: 10485 - protein, 9 aa, synthetic construct
  REGION 1..9: note = Nuclear pore complex protein Nup153 (1194-1202)
SEQPAKATF

SEQ ID NO: 10486 - protein, 9 aa, synthetic construct
  REGION 1..9: note = Coatomer subunit gamma-1 (353-361)
SESSIDRLM

SEQ ID NO: 10487 - protein, 8 aa, synthetic construct
  REGION 1..8: note = T-complex protein 1 subunit zeta (155-162)
SETDTSLI

SEQ ID NO: 10488 - protein, 8 aa, synthetic construct
  REGION 1..8: note = Caprin-1 (287-294)
SEVESTEY

SEQ ID NO: 10489 - protein, 9 aa, synthetic construct
  REGION 1..9: note = Galectin-2 (80-88)
SEVKFTVTF

SEQ ID NO: 10490 - protein, 10 aa, synthetic construct
  REGION 1..10: note = Serpin B8 (75-84)
SEVNRTGTQY

SEQ ID NO: 10491 - protein, 9 aa, synthetic construct
  REGION 1..9: note = Protein yippee-like 5 (54-62)
SEVQDRVML

SEQ ID NO: 10492 - protein, 13 aa, synthetic construct
  REGION 1..13: note = Heterogeneous nuclear ribonucleoproteins A2/B1 (266-278)
SGNFGGSRNMGGP

SEQ ID NO: 10493 - protein, 9 aa, synthetic construct
  REGION 1..9: note = Protein PRRC2C (661-669)
SGYFKQFQK

SEQ ID NO: 10494 - protein, 9 aa, synthetic construct
  REGION 1..9: note = CAAX prenyl protease 1 homolog (244-252)
SIDFPLTKV

SEQ ID NO: 10495 - protein, 9 aa, synthetic construct
  REGION 1..9: note = Signal transducer and activator of transcription 2 (358-366)
SIDRNPPQL

SEQ ID NO: 10496 - protein, 12 aa, synthetic construct
  REGION 1..12: note = Phospholipase D1 (579-590)
SIDSTSSYFNHY

SEQ ID NO: 10497 - protein, 11 aa, synthetic construct
  REGION 1..11: note = Double-stranded RNA-specific adenosine deaminase (938-948)
SIFEPAKGGEK

SEQ ID NO: 10498 - protein, 12 aa, synthetic construct
  REGION 1..12: note = DNA-directed RNA polymerase III subunit RPC4 (107-118)
SIFEQGPAEMMK

SEQ ID NO: 10499 - protein, 9 aa, synthetic construct
  REGION 1..9: note = Serine/threonine-protein kinase MARK2 (578-586)
SIFSKFTSK

SEQ ID NO: 10500 - protein, 10 aa, synthetic construct
  REGION 1..10: note = Mortality factor 4-like protein 1 (192-201)
SILEDYANYK

SEQ ID NO: 10501 - protein, 9 aa, synthetic construct
  REGION 1..9: note = Transmembrane protein 41B (276-284)
SILPAIFQK

SEQ ID NO: 10502 - protein, 9 aa, synthetic construct
  REGION 1..9: note = DNA polymerase delta subunit 3 (419-427)
SITGFFQRK

SEQ ID NO: 10503 - protein, 12 aa, synthetic construct
  REGION 1..12: note = Double-stranded RNA-specific adenosine deaminase (134-145)
SIYQDQEQRILK

SEQ ID NO: 10504 - protein, 9 aa, synthetic construct
  REGION 1..9: note = Histone H2B type 2-E (14-22)
SIYVYKVLK

SEQ ID NO: 10505 - protein, 9 aa, synthetic construct
  REGION 1..9: note = Serine/threonine-protein kinase Nek6 (66-74)
SLADFQIEK

SEQ ID NO: 10506 - protein, 9 aa, synthetic construct
  REGION 1..9: note = Poly(rC)-binding protein 2 (315-323)
SLAQYLINV

SEQ ID NO: 10507 - protein, 9 aa, synthetic construct
  REGION 1..9: note = Eukaryotic translation initiation factor 3 subunit C-like protein (835-843)
SLDQPTQTV

SEQ ID NO: 10508 - protein, 9 aa, synthetic construct
  REGION 1..9: note = FGFR1 oncogene partner 2 (28-36)
SLIEQTTAL

SEQ ID NO: 10509 - protein, 9 aa, synthetic construct
  REGION 1..9: note = 60S ribosomal protein L10a (115-123)
SLIKQIPRI

SEQ ID NO: 10510 - protein, 9 aa, synthetic construct
  REGION 1..9: note = Protein zyg-11 homolog B (362-370)
SLLDDLHSA

SEQ ID NO: 10511 - protein, 11 aa, synthetic construct
  REGION 1..11: note = 4F2 cell-surface antigen heavy chain (289-299)
SLLESNKDLLL

SEQ ID NO: 10512 - protein, 10 aa, synthetic construct
  REGION 1..10: note = Homocysteine-responsive endoplasmic reticulum-resident ubiquitin-like domain member 1 protein (221-230)
SLLPEGPPAI

SEQ ID NO: 10513 - protein, 9 aa, synthetic construct
  REGION 1..9: note = Bromodomain-containing protein 8 (139-147)
SLLPTSPRL

SEQ ID NO: 10514 - protein, 13 aa, synthetic construct
  REGION 1..13: note = Mitochondrial coenzyme A transporter SLC25A42 (36-48)
SLLSGALAGALAK

SEQ ID NO: 10515 - protein, 9 aa, synthetic construct
  REGION 1..9: note = Mediator of RNA polymerase II transcription subunit 12 (1321-1329)
SLLSQQPFL

SEQ ID NO: 10516 - protein, 10 aa, synthetic construct
  REGION 1..10: note = Ganglioside GM2 activator (3-12)
SLMQAPLLIA

SEQ ID NO: 10517 - protein, 9 aa, synthetic construct
  REGION 1..9: note = Terminal uridylyltransferase 7 (826-834)
SLNHFTHSV

SEQ ID NO: 10518 - protein, 9 aa, synthetic construct
  REGION 1..9: note = Signal transducer and activator of transcription 6 (256-264)
SLTGRLDEV

SEQ ID NO: 10519 - protein, 9 aa, synthetic construct
  REGION 1..9: note = Hyccin (36-44)
SLVSSLYKV

SEQ ID NO: 10520 - protein, 10 aa, synthetic construct
  REGION 1..10: note = Keratin, type II cytoskeletal 2 epidermal (342-351)
SMDNSRNLDL

SEQ ID NO: 10521 - protein, 10 aa, synthetic construct
  REGION 1..10: note = Serine/threonine-protein phosphatase 2B catalytic subunit beta isoform (116-125)
SPANTRYLFL

SEQ ID NO: 10522 - protein, 9 aa, synthetic construct
  REGION 1..9: note = Treacle protein (700-708)
SPAQVKTSV

SEQ ID NO: 10523 - protein, 17 aa, synthetic construct
  REGION 1..17: note = Alpha-enolase (263-279)
SPDDPSRYISPDQLADL

SEQ ID NO: 10524 - protein, 9 aa, synthetic construct
  REGION 1..9: note = LIM domain and actin-binding protein 1 (264-272)
SPDSRASSL

SEQ ID NO: 10525 - protein, 9 aa, synthetic construct
  REGION 1..9: note = Sterol regulatory element-binding protein 2 (1098-1106)
SPGQRAVLL

SEQ ID NO: 10526 - protein, 9 aa, synthetic construct
  REGION 1..9: note = Midasin (1754-1762)
SPGVGKTSL

SEQ ID NO: 10527 - protein, 10 aa, synthetic construct
  REGION 1..10: note = Nucleophosmin (70-79)
SPIKVTLATL

SEQ ID NO: 10528 - protein, 11 aa, synthetic construct
  REGION 1..11: note = Cation-independent mannose-6-phosphate receptor (554-564)
SPMKEKGNIQL

SEQ ID NO: 10529 - protein, 9 aa, synthetic construct
  REGION 1..9: note = Transcription factor SOX-9 (199-207)
SPNAIFKAL

SEQ ID NO: 10530 - protein, 9 aa, synthetic construct
  REGION 1..9: note = F-box/LRR-repeat protein 6 (377-385)
SPNLRLLDL

SEQ ID NO: 10531 - protein, 9 aa, synthetic construct
  REGION 1..9: note = Adiponectin receptor protein 1 (231-239)
SPQPRLIYL

SEQ ID NO: 10532 - protein, 11 aa, synthetic construct
  REGION 1..11: note = Ribosomal protein S6 kinase beta-1 (418-428)
SPRTPVSPVKF

SEQ ID NO: 10533 - protein, 9 aa, synthetic construct
  REGION 1..9: note = Zinc finger protein 655 (12-20)
SPRVQFQSL

SEQ ID NO: 10534 - protein, 11 aa, synthetic construct
  REGION 1..11: note = Probable aminopeptidase NPEPL1 (88-98)
SPSAAHFITRL

SEQ ID NO: 10535 - protein, 11 aa, synthetic construct
  REGION 1..11: note = Activating transcription factor 7-interacting protein 1 (907-917)
SPSTNRGPIQM

SEQ ID NO: 10536 - protein, 10 aa, synthetic construct
  REGION 1..10: note = Protein transport protein Sec24A (613-622)
SPTGGRMSVF

SEQ ID NO: 10537 - protein, 8 aa, synthetic construct
  REGION 1..8: note = Exportin-5 (826-833)
SPVFKTVL

SEQ ID NO: 10538 - protein, 11 aa, synthetic construct
  REGION 1..11: note = Vacuolar protein sorting-associated protein 41 homolog (371-381)
SPYLPRGDPVL

SEQ ID NO: 10539 - protein, 10 aa, synthetic construct
  REGION 1..10: note Dolichyl-diphosphooligosaccharide-proteinosyltransferase subunit 1 (164-173)
SPYPTKTQTM

SEQ ID NO: 10540 - protein, 11 aa, synthetic construct
  REGION 1..11: note = Cell division control protein 6 homolog (6-16)
SQAQATISFPK

SEQ ID NO: 10541 - protein, 10 aa, synthetic construct
  REGION 1..10: note = Nuclear transcription factor Y subunit gamma (290-299)
SQFTDGQQLY

SEQ ID NO: 10542 - protein, 9 aa, synthetic construct
  REGION 1..9: note = Inactive serine/threonine-protein kinase VRK3 (34-42)
SQTFVNPHV

SEQ ID NO: 10543 - protein, 9 aa, synthetic construct
  REGION 1..9: note = Vacuolar protein sorting-associated protein 13B (2936-2944)
SQWDSPMRV

SEQ ID NO: 10544 - protein, 12 aa, synthetic construct
  REGION 1..12: note = Zinc finger MIZ domain-containing protein 2 (180-191)
SQYGAMGAGQSF

SEQ ID NO: 10545 - protein, 9 aa, synthetic construct
  REGION 1..9: note = Methylsterol monooxygenase 1 (145-153)
SQYNAYNEK

SEQ ID NO: 10546 - protein, 10 aa, synthetic construct
  REGION 1..10: note = COUP transcription factor 2 (198-207)
SQYPNQPTRF

SEQ ID NO: 10547 - protein, 9 aa, synthetic construct
  REGION 1..9: note = SUN domain-containing protein 2 (62-70)
SSDAHTSYY

SEQ ID NO: 10548 - protein, 9 aa, synthetic construct
  REGION 1..9: note = E3 ISG15-protein ligase HERC5 (113-121)
SSDGKPFEY

SEQ ID NO: 10549 - protein, 9 aa, synthetic construct
  REGION 1..9: note = Serrate RNA effector molecule homolog (88-96)
SSDPYHSGY

SEQ ID NO: 10550 - protein, 9 aa, synthetic construct
  REGION 1..9: note = Chromodomain-helicase-DNA-binding protein 1 (1545-1553)
SSDRHLTQY

SEQ ID NO: 10551 - protein, 9 aa, synthetic construct
  REGION 1..9: note = Glycogen phosphorylase, brain form (813-821)
SSDRTITEY

SEQ ID NO: 10552 - protein, 9 aa, synthetic construct
  REGION 1..9: note = HMG box-containing protein 1 (78-86)
SSDVSHQEY

SEQ ID NO: 10553 - protein, 9 aa, synthetic construct
  REGION 1..9: note = Disintegrin and metalloproteinase domain-containing protein 23 (174-182)
SSDYVEIHY

SEQ ID NO: 10554 - protein, 9 aa, synthetic construct
  REGION 1..9: note = Insulin-like growth factor I (5-13)
SSLPTQLFK

SEQ ID NO: 10555 - protein, 11 aa, synthetic construct
  REGION 1..11: note = Keratin, type I cytoskeletal 10 (37-47)
SSSKGSLGGGF

SEQ ID NO: 10556 - protein, 21 aa, synthetic construct
  REGION 1..21: note = Keratin, type I cytoskeletal 10 (37-57)
SSSKGSLGGGFSSGGFSGGSF

SEQ ID NO: 10557 - protein, 15 aa, synthetic construct
  REGION 1..15: note = Keratin, type I cytoskeletal 10 (568-582)
SSSSGSVGESSSKGP

SEQ ID NO: 10558 - protein, 9 aa, synthetic construct
  REGION 1..9: note = 40S ribosomal protein S19 (59-67)
STARHLYLR

SEQ ID NO: 10559 - protein, 9 aa, synthetic construct
  REGION 1..9: note = Putative elongation factor 1-alpha-like 3 (157-165)
STEPPYSQK

SEQ ID NO: 10560 - protein, 10 aa, synthetic construct
  REGION 1..10: note = DNA-dependent protein kinase catalytic subunit (1861-1870)
STFDTQITKK

SEQ ID NO: 10561 - protein, 9 aa, synthetic construct
  REGION 1..9: note = Sentrin-specific protease 2 (440-448)
STFFYPKLK

SEQ ID NO: 10562 - protein, 10 aa, synthetic construct
  REGION 1..10: note = Actin, alpha cardiac muscle 1 (22-31)
STFQQMWISK

SEQ ID NO: 10563 - protein, 9 aa, synthetic construct
  REGION 1..9: note = Transketolase (258-266)
STFSEIFKK

SEQ ID NO: 10564 - protein, 10 aa, synthetic construct
  REGION 1..10: note = Syntenin-1 (205-214)
STGHVGFIFK

SEQ ID NO: 10565 - protein, 9 aa, synthetic construct
  REGION 1..9: note = E3 ubiquitin-protein ligase HECTD1 (455-463)
STIFYYVQK

SEQ ID NO: 10566 - protein, 11 aa, synthetic construct
  REGION 1..11: note = Hexokinase-2 (408-418)
STIGVDGSVYK

SEQ ID NO: 10567 - protein, 9 aa, synthetic construct
  REGION 1..9: note = Heat shock protein HSP 90-beta (541-549)
STMGYMMAK

SEQ ID NO: 10568 - protein, 11 aa, synthetic construct
  REGION 1..11: note = Actin-related protein 2 (307-317)
STMYPGLPSRL

SEQ ID NO: 10569 - protein, 12 aa, synthetic construct
  REGION 1..12: note = Adenosylhomocysteinase (85-96)
STQDHAAAAIAK

SEQ ID NO: 10570 - protein, 11 aa, synthetic construct
  REGION 1..11: note = Apoptosis-inducing factor 1, mitochondrial (76-86)
STVGAGAYAYK

SEQ ID NO: 10571 - protein, 9 aa, synthetic construct
  REGION 1..9: note = Denticleless protein homolog (404-412)
STVGWASQK

SEQ ID NO: 10572 - protein, 9 aa, synthetic construct
  REGION 1..9: note = WD repeat-containing protein 48 (319-327)
STVNKWTLK

SEQ ID NO: 10573 - protein, 11 aa, synthetic construct
  REGION 1..11: note = Sarcoplasmic/endoplasmic reticulum calcium ATPase 2 (387-397)
STYAPIGEVHK

SEQ ID NO: 10574 - protein, 11 aa, synthetic construct
  REGION 1..11: note = Integrator complex subunit 11 (175-185)
STYATTIRDSK

SEQ ID NO: 10575 - protein, 11 aa, synthetic construct
  REGION 1..11: note = Nucleolar RNA helicase 2 (324-334)
STYEQVDLIGK

SEQ ID NO: 10576 - protein, 10 aa, synthetic construct
  REGION 1..10: note = Eukaryotic translation initiation factor 3 subunit H (119-128)
STYYGSFVTR

SEQ ID NO: 10577 - protein, 9 aa, synthetic construct
  REGION 1..9: note = Heterogeneous nuclear ribonucleoprotein A1-like 2 (5-13)
SVDKIVIQK

SEQ ID NO: 10578 - protein, 10 aa, synthetic construct
  REGION 1..10: note = Mitochondrial import inner membrane translocase subunit TIM50 (213-222)
SVDPHGFISY

SEQ ID NO: 10579 - protein, 9 aa, synthetic construct
  REGION 1..9: note = Lysine-tRNA ligase (98-106)
SVDPNQYYK

SEQ ID NO: 10580 - protein, 11 aa, synthetic construct
  REGION 1..11: note = 39S ribosomal protein L43, mitochondrial (93-103)
SVEEISTLVQK

SEQ ID NO: 10581 - protein, 11 aa, synthetic construct
  REGION 1..11: note = Chromodomain-helicase-DNA-binding protein 3 (1189-1199)
SVEERITQVAK

SEQ ID NO: 10582 - protein, 13 aa, synthetic construct
  REGION 1..13: note = Cirhin (180-192)
SVFDVKSGSAVHK

SEQ ID NO: 10583 - protein, 12 aa, synthetic construct
  REGION 1..12: note = Histone-lysine N-methyltransferase EHMT1 (87-98)
SVIGSNGYILNK

SEQ ID NO: 10584 - protein, 10 aa, synthetic construct
  REGION 1..10: note = Integrin alpha-4 (81-90)
SVINPGAIYR

SEQ ID NO: 10585 - protein, 16 aa, synthetic construct
  REGION 1..16: note = Protein S100-A9 (23-38)
SVKLGHPDTLNQGEFK

SEQ ID NO: 10586 - protein, 9 aa, synthetic construct
  REGION 1..9: note = Mediator of RNA polymerase II transcription subunit 6 (28-36)
SVLDYFSER

SEQ ID NO: 10587 - protein, 13 aa, synthetic construct
  REGION 1..13: note = Gelsolin (378-390)
SVLPEGGETPLFK

SEQ ID NO: 10588 - protein, 11 aa, synthetic construct
  REGION 1..11: note = Heat shock 70 kDa protein 14 (206-216)
SVMEVNSGIYR

SEQ ID NO: 10589 - protein, 10 aa, synthetic construct
  REGION 1..10: note = Basic leucine zipper and W2 domain-containing protein 1 (215-224)
SVMSTVEWNK

SEQ ID NO: 10590 - protein, 9 aa, synthetic construct
  REGION 1..9: note = 60S ribosomal protein L7 (149-157)
SVNELIYKR

SEQ ID NO: 10591 - protein, 12 aa, synthetic construct
  REGION 1..12: note = Chromatin complexes subunit BAP18 (122-133)
SVPEAGGPPIKK

SEQ ID NO: 10592 - protein, 9 aa, synthetic construct
  REGION 1..9: note = ADP/ATP translocase 2 (180-188)
SVQGIIIYR

SEQ ID NO: 10593 - protein, 9 aa, synthetic construct
  REGION 1..9: note = Anaphase-promoting complex subunit 16 (24-32)
SVSDLAPPR

SEQ ID NO: 10594 - protein, 9 aa, synthetic construct
  REGION 1..9: note = Nesprin-2 (1819-1827)
SVSDLFNTK

SEQ ID NO: 10595 - protein, 12 aa, synthetic construct
  REGION 1..12: note = A-kinase anchor protein 1, mitochondrial (874-885)
SVVGDEVVLINR

SEQ ID NO: 10596 - protein, 12 aa, synthetic construct
  REGION 1..12: note = Exocyst complex component 6 (35-46)
SVYDDQPNAHKK

SEQ ID NO: 10597 - protein, 10 aa, synthetic construct
  REGION 1..10: note = Dehydrodolichyl diphosphate syntase complex subunit NUS1 (133-142)
SVYDHQGIFK

SEQ ID NO: 10598 - protein, 11 aa, synthetic construct
  REGION 1..11: note = Dehydrodolichyl diphosphate syntase complex subunit NUS1 (133-143)
SVYDHQGIFKR

SEQ ID NO: 10599 - protein, 16 aa, synthetic construct
  REGION 1..16: note = Actin, alpha skeletal muscle (35-50)
SYELPDGQVITIGNER

SEQ ID NO: 10600 - protein, 10 aa, synthetic construct
  REGION 1..10: note = Tetratricopeptide repeat protein 27 (18-27)
SYLEKQVVTF

SEQ ID NO: 10601 - protein, 9 aa, synthetic construct
  REGION 1..9: note = U5 small nuclear ribonucleoprotein 200 kDa helicase (1958-1966)
SYLKQLPHF

SEQ ID NO: 10602 - protein, 9 aa, synthetic construct
  REGION 1..9: note = Intraflagellar transport protein 122 homolog (100-108)
SYNPITHQL

SEQ ID NO: 10603 - protein, 9 aa, synthetic construct
  REGION 1..9: note = Constitutive coactivator of peroxisome proliferator-activated receptor gamma (261-269)
SYTSVKENF

SEQ ID NO: 10604 - protein, 8 aa, synthetic construct
  REGION 1..8: note = 60S ribosomal protein L24 (24-31)
TDGKVFQF

SEQ ID NO: 10605 - protein, 9 aa, synthetic construct
  REGION 1..9: note = DNA-directed RNA polymerase II subunit RPB11-b2 (113-121)
TDLIRELSL

SEQ ID NO: 10606 - protein, 9 aa, synthetic construct
  REGION 1..9: note = WD repeat-containing protein (630-638)
TDLMRLKEI

SEQ ID NO: 10607 - protein, 9 aa, synthetic construct
  REGION 1..9: note = Protein disulfide-isomerase (296-304)
TDNQRILEF

SEQ ID NO: 10608 - protein, 9 aa, synthetic construct
  REGION 1..9: note = Tensin-1 (1649-1657)
TDNQRKLFF

SEQ ID NO: 10609 - protein, 9 aa, synthetic construct
  REGION 1..9: note = Keratin, type I cytoskeletal 19 (327-335)
TEARFGAQL

SEQ ID NO: 10610 - protein, 9 aa, synthetic construct
  REGION 1..9: note = Nucleolin (584-592)
TEETLKESF

SEQ ID NO: 10611 - protein, 9 aa, synthetic construct
  REGION 1..9: note = UPF0568 protein C14orf166 (23-31)
TEFRNFIVW

SEQ ID NO: 10612 - protein, 9 aa, synthetic construct
  REGION 1..9: note = Cytoplasmic dynein 1 heavy chain 1 (1693-1701)
TEHPKINEW

SEQ ID NO: 10613 - protein, 9 aa, synthetic construct
  REGION 1..9: note = Disheveled-associated activator of morphogenesis 1 (629-637)
TEIDDTKVF

SEQ ID NO: 10614 - protein, 9 aa, synthetic construct
  REGION 1..9: note = Proteasome activator complex subunit 3 (207-215)
TEIDEKEYI

SEQ ID NO: 10615 - protein, 11 aa, synthetic construct
  REGION 1..11: note = Nucleolin (452-462)
TEIDGRSISLY

SEQ ID NO: 10616 - protein, 10 aa, synthetic construct
  REGION 1..10: note = Coatomer subunit alpha (1207-1216)
TEIGKDVIGL

SEQ ID NO: 10617 - protein, 9 aa, synthetic construct
  REGION 1..9: note = Thiopurine S-methyltransferase (113-121)
TEIPGTKVF

SEQ ID NO: 10618 - protein, 10 aa, synthetic construct
  REGION 1..10: note = Angiomotin (467-476)
TEIQRVSEAY

SEQ ID NO: 10619 - protein, 9 aa, synthetic construct
  REGION 1..9: note = Eukaryotic translation initiation factor 3 subunit C-like protein (323-331)
TEITHAVVI

SEQ ID NO: 10620 - protein, 9 aa, synthetic construct
  REGION 1..9: note = Fructose-bisphosphate aldolase A (206-214)
TEKVLAAVY

SEQ ID NO: 10621 - protein, 9 aa, synthetic construct
  REGION 1..9: note = Staphylococcal nuclease domain-containing protein 1 (260-268)
TELLLKEGF

SEQ ID NO: 10622 - protein, 9 aa, synthetic construct
  REGION 1..9: note = Sorting nexin-5 (292-300)
TELLRYYML

SEQ ID NO: 10623 - protein, 9 aa, synthetic construct
  REGION 1..9: note = Tuftelin (365-373)
TENPGSIRI

SEQ ID NO: 10624 - protein, 9 aa, synthetic construct
  REGION 1..9: note = KN motif and ankyrin repeat domain-containing protein 2 (612-620)
TERELKVAY

SEQ ID NO: 10625 - protein, 9 aa, synthetic construct
  REGION 1..9: note = Tensin-1 (19-27)
TERIIAVSF

SEQ ID NO: 10626 - protein, 10 aa, synthetic construct
  REGION 1..10: note = Microtubule-actin cross-linking factor 1, isoforms 1/2/3/5 (327-336)
TEVDSRWQEY

SEQ ID NO: 10627 - protein, 9 aa, synthetic construct
  REGION 1..9: note = Melanoma-associated antigen D2 (67-75)
TEVSKTPEA

SEQ ID NO: 10628 - protein, 11 aa, synthetic construct
  REGION 1..11: note = Cytoplasmic dynein 1 heavy chain 1 (3550-3560)
TEYLSNADERL

SEQ ID NO: 10629 - protein, 10 aa, synthetic construct
  REGION 1..10: note = Autophagy-related protein 9A (6-15)
TEYQRLEASY

SEQ ID NO: 10630 - protein, 13 aa, synthetic construct
  REGION 1..13: note = Glyceraldehyde-3-phosphate dehydrogenase (3-15)
TFDAGAGIALNDH

SEQ ID NO: 10631 - protein, 9 aa, synthetic construct
  REGION 1..9: note = Hydroxymethylglutaryl-CoA synthase, cytoplasmic (131-139)
TIIDKSKSV

SEQ ID NO: 10632 - protein, 11 aa, synthetic construct
  REGION 1..11: note = Histone H3.3 (119-129)
TIMPKDIQLAR

SEQ ID NO: 10633 - protein, 10 aa, synthetic construct
  REGION 1..10: note = NADH dehydrogenase (ubiquinone) iron-sulfur protein 5 (19-28)
TIQSGEQPYK

SEQ ID NO: 10634 - protein, 10 aa, synthetic construct
  REGION 1..10: note = T-complex protein 1 subunit zeta-2 (204-213)
TKEVNSGFFY

SEQ ID NO: 10635 - protein, 9 aa, synthetic construct
  REGION 1..9: note = Serine/threonine-protein phosphatase 6 regulatory ankyrin repeat subunit C (603-611)
TLAETLVNL

SEQ ID NO: 10636 - protein, 9 aa, synthetic construct
  REGION 1..9: note = Leucine-rich repeat-containing protein 41 (19-27)
TLASSLHTL

SEQ ID NO: 10637 - protein, 9 aa, synthetic construct
  REGION 1..9: note = MOB kinase activator 1A (130-138)
TLFPSKIGV

SEQ ID NO: 10638 - protein, 9 aa, synthetic construct
  REGION 1..9: note = A-kinase anchor protein 11 (1555-1563)
TLGSTVFRV

SEQ ID NO: 10639 - protein, 9 aa, synthetic construct
  REGION 1..9: note = Nucleosome-remodeling factor subunit BPTF (281-289)
TLMAEMHVV

SEQ ID NO: 10640 - protein, 9 aa, synthetic construct
  REGION 1..9: note = WD repeat-containing protein 81 (157-165)
TLMDILPRI

SEQ ID NO: 10641 - protein, 9 aa, synthetic construct
  REGION 1..9: note = Exportin-1 (346-354)
TLMEALHYM

SEQ ID NO: 10642 - protein, 9 aa, synthetic construct
  REGION 1..9: note = Splicing factor 3A subunit 1 (521-529)
TLQEQIEAI

SEQ ID NO: 10643 - protein, 9 aa, synthetic construct
  REGION 1..9: note = Replication protein A 32 kDa subunit (58-66)
TLVDEVFRI

SEQ ID NO: 10644 - protein, 9 aa, synthetic construct
  REGION 1..9: note = Elongator complex protein 2 (406-414)
TLWPEVQKL

SEQ ID NO: 10645 - protein, 9 aa, synthetic construct
  REGION 1..9: note = Exosome complex component RRP42 (108-116)
TLYRIFNNK

SEQ ID NO: 10646 - protein, 9 aa, synthetic construct
  REGION 1..9: note = Transmembrane protein 50A (48-56)
TMKDFNHSY

SEQ ID NO: 10647 - protein, 9 aa, synthetic construct
  REGION 1..9: note = snRNA-activating protein complex subunit 4 (1152-1160)
TPAPPTHAL

SEQ ID NO: 10648 - protein, 10 aa, synthetic construct
  REGION 1..10: note = Spectrin beta chain, non-erythrocytic 1 (2320-2329)
TPASSRAQTL

SEQ ID NO: 10649 - protein, 11 aa, synthetic construct
  REGION 1..11: note = 26S proteasome non-ATPase regulatory subunit 4 (65-75)
TPDTGRILSKL

SEQ ID NO: 10650 - protein, 9 aa, synthetic construct
  REGION 1..9: note = ATP-dependent zinc metalloprotease YME1L1 (25-33)
TPKNTSVSL

SEQ ID NO: 10651 - protein, 9 aa, synthetic construct
  REGION 1..9: note = Galectin-8 (193-201)
TPMGPGRTV

SEQ ID NO: 10652 - protein, 9 aa, synthetic construct
  REGION 1..9: note = WAS/WASL-interacting protein family member 1 (331-339)
TPRLPQRNL

SEQ ID NO: 10653 - protein, 11 aa, synthetic construct
  REGION 1..11: note = ATP synthase F(0) complex subunit C2, mitochondrial (26-36)
TPSLVKSTSQL

SEQ ID NO: 10654 - protein, 9 aa, synthetic construct
  REGION 1..9: note = Ubiquitin carboxyl-terminal hydrolase 48 (860-868)
TQATIYVHK

SEQ ID NO: 10655 - protein, 11 aa, synthetic construct
  REGION 1..11: note = HLA class I histocompatibility antigen, B-13 alpha chain (63-73)
TQISKTNTQTY

SEQ ID NO: 10656 - protein, 10 aa, synthetic construct
  REGION 1..10: note = rRNA-processing protein FCF1 homolog (61-70)
TQLGPPYHIL

SEQ ID NO: 10657 - protein, 9 aa, synthetic construct
  REGION 1..9: note = 14-3-3 protein gamma (115-123)
TQYESKVFY

SEQ ID NO: 10658 - protein, 9 aa, synthetic construct
  REGION 1..9: note = Gamma-interferon-inducible protein 16 (419-427)
TTFPESHLR

SEQ ID NO: 10659 - protein, 9 aa, synthetic construct
  REGION 1..9: note = MIT domain-containing protein 1 (236-244)
TTVDIFHKK

SEQ ID NO: 10660 - protein, 9 aa, synthetic construct
  REGION 1..9: note = Lys-63-specific deubiquitinase BRCC36 (66-74)
TVAEKVDAV

SEQ ID NO: 10661 - protein, 9 aa, synthetic construct
  REGION 1..9: note = 28S ribosomal protein S24, mitochondrial (78-86)
TVEDVFLRK

SEQ ID NO: 10662 - protein, 12 aa, synthetic construct
  REGION 1..12: note = Phosphatidylinositol-4,5-bisphosphate 4-phosphatase 2 (39-50)
TVESPELQVPYK

SEQ ID NO: 10663 - protein, 9 aa, synthetic construct
  REGION 1..9: note = Glycine-tRNA ligase (533-541)
TVFEHTFHV

SEQ ID NO: 10664 - protein, 11 aa, synthetic construct
  REGION 1..11: note = Tubulin alpha-1C chain (38-48)
TVIDEVRTGTY

SEQ ID NO: 10665 - protein, 9 aa, synthetic construct
  REGION 1..9: note = Transcription factor BTF3 (76-84)
TVIHFNNPK

SEQ ID NO: 10666 - protein, 11 aa, synthetic construct
  REGION 1..11: note = DNA replication licensing factor MCM6 (163-173)
TVIRDVEQQFK

SEQ ID NO: 10667 - protein, 11 aa, synthetic construct
  REGION 1..11: note Dolichyl-diphosphooligosaccharide-proteinosyltransferase subunit 2 (165-175)
TVLESRSLFSK

SEQ ID NO: 10668 - protein, 16 aa, synthetic construct
  REGION 1..16: note = Actin, cytoplasmic 2 (36-51)
TVLSGGTTMYPGIADR

SEQ ID NO: 10669 - protein, 9 aa, synthetic construct
  REGION 1..9: note = Ubiquitin-protein ligase E3A (325-333)
TYKVISNEF

SEQ ID NO: 10670 - protein, 9 aa, synthetic construct
  REGION 1..9: note = Vacuolar protein sorting-associated protein 51 homolog (480-488)
VADEELVHL

SEQ ID NO: 10671 - protein, 8 aa, synthetic construct
  REGION 1..8: note = Eukaryotic translation initiation factor 3 subunit H (221-228)
VADKHELL

SEQ ID NO: 10672 - protein, 9 aa, synthetic construct
  REGION 1..9: note = Bifunctional polynucleotide phosphatase/kinase (54-62)
VADPETRTV

SEQ ID NO: 10673 - protein, 9 aa, synthetic construct
  REGION 1..9: note = Serine/threonine-protein kinase PLK2 (471-479)
VADTVARVL

SEQ ID NO: 10674 - protein, 9 aa, synthetic construct
  REGION 1..9: note = Ubiquitin carboxyl-terminal hydrolase 16 (733-741)
VAEENTRVL

SEQ ID NO: 10675 - protein, 9 aa, synthetic construct
  REGION 1..9: note = HLA class I histocompatibility antigen, B-8 alpha chain (151-159)
VAEQDRAYL

SEQ ID NO: 10676 - protein, 9 aa, synthetic construct
  REGION 1..9: note = Mitochondrial import receptor subunit TOM5 homolog (35-43)
VALLRVTPF

SEQ ID NO: 10677 - protein, 18 aa, synthetic construct
  REGION 1..18: note = Actin, cytoplasmic 1 (13-30)
VAPEEHPVLLTEAPLNPK

SEQ ID NO: 10678 - protein, 8 aa, synthetic construct
  REGION 1..8: note = Polymerase I and transcript release factor (229-236)
VDDFKKAF

SEQ ID NO: 10679 - protein, 9 aa, synthetic construct
  REGION 1..9: note = Cholesteryl ester transfer protein (230-238)
VDISLTGDP

SEQ ID NO: 10680 - protein, 8 aa, synthetic construct
  REGION 1..8: note = Heterogeneous nuclear ribonucleoproteins C1/C2 (33-40)
VEAIFSKY

SEQ ID NO: 10681 - protein, 9 aa, synthetic construct
  REGION 1..9: note = Sodium/potassium-transporting ATPase subunit alpha-1 (701-709)
VEDSYGQQW

SEQ ID NO: 10682 - protein, 10 aa, synthetic construct
  REGION 1..10: note = 116 kDa U5 small nuclear ribonucleoprotein component (621-630)
VEESGEHVIL

SEQ ID NO: 10683 - protein, 11 aa, synthetic construct
  REGION 1..11: note = Adenosylhomocysteinase 2 (222-232)
VEESVTGVHRL

SEQ ID NO: 10684 - protein, 12 aa, synthetic construct
  REGION 1..12: note = ATP synthase subunit alpha, mitochondrial (96-107)
VEFSSGLKGMSL

SEQ ID NO: 10685 - protein, 9 aa, synthetic construct
  REGION 1..9: note = HLA class II histocompatibility antigen, DRB1-4 beta chain (204-212)
VEHPSLTSP

SEQ ID NO: 10686 - protein, 11 aa, synthetic construct
  REGION 1..11: note = Protein disulfide-isomerase A6 (411-421)
VELDDLGKDEL

SEQ ID NO: 10687 - protein, 9 aa, synthetic construct
  REGION 1..9: note = Galectin-3 (204-212)
VEPDHFKVA

SEQ ID NO: 10688 - protein, 8 aa, synthetic construct
  REGION 1..8: note = SARM1 protein (269-276)
VEREVEQV

SEQ ID NO: 10689 - protein, 8 aa, synthetic construct
  REGION 1..8: note = N6-adenosine-methyltransferase 70 kDa subunit (116-123)
VESLLQKF

SEQ ID NO: 10690 - protein, 9 aa, synthetic construct
  REGION 1..9: note = Protein RMD5 homolog B (280-288)
VESPLSVSF

SEQ ID NO: 10691 - protein, 11 aa, synthetic construct
  REGION 1..11: note = Nucleosome assembly protein 1-like 1 (60-70)
VETPTGYIESL

SEQ ID NO: 10692 - protein, 9 aa, synthetic construct
  REGION 1..9: note = Influenza virus NS1A-binding protein (83-91)
VEVLLNYAY

SEQ ID NO: 10693 - protein, 9 aa, synthetic construct
  REGION 1..9: note = Rho GDP-dissociation inhibitor 1 (108-116)
VEYRIKISF

SEQ ID NO: 10694 - protein, 17 aa, synthetic construct
  REGION 1..17: note = 40S ribosomal protein S3a (66-82)
VFEVSLADLQNDEVAFR

SEQ ID NO: 10695 - protein, 9 aa, synthetic construct
  REGION 1..9: note = 40S ribosomal protein S23 (112-120)
VGDIPGVRF

SEQ ID NO: 10696 - protein, 9 aa, synthetic construct
  REGION 1..9: note = AT-rich interactive domain-containing protein 1A (1378-1386)
VGDPGQRTL

SEQ ID NO: 10697 - protein, 9 aa, synthetic construct
  REGION 1..9: note = Bromodomain-containing protein 8 (239-247)
VGDPHTVTV

SEQ ID NO: 10698 - protein, 9 aa, synthetic construct
  REGION 1..9: note = F-box/LRR-repeat protein 19 (440-448)
VGDPSVHLL

SEQ ID NO: 10699 - protein, 9 aa, synthetic construct
  REGION 1..9: note = Nucleolar protein 56 (117-125)
VIAEILRGV

SEQ ID NO: 10700 - protein, 9 aa, synthetic construct
  REGION 1..9: note = Kelch-like ECH-associated protein 1 (420-428)
VIDGHIYAV

SEQ ID NO: 10701 - protein, 9 aa, synthetic construct
  REGION 1..9: note = Eukaryotic translation initiation factor 3 subunit L (83-91)
VIDQKVYEI

SEQ ID NO: 10702 - protein, 9 aa, synthetic construct
  REGION 1..9: note = E3 ubiquitin-protein ligase RNF213 (1305-1313)
VIFKDFVNK

SEQ ID NO: 10703 - protein, 9 aa, synthetic construct
  REGION 1..9: note = MICOS complex subunit MIC27 (158-166)
VIIAKVTAK

SEQ ID NO: 10704 - protein, 13 aa, synthetic construct
  REGION 1..13: note = Elongation factor 1-alpha 1 (344-356)
VIILNHPGQISAG

SEQ ID NO: 10705 - protein, 9 aa, synthetic construct
  REGION 1..9: note = Plectin (1820-1828)
VLAEKLAAI

SEQ ID NO: 10706 - protein, 8 aa, synthetic construct
  REGION 1..8: note = Lysine-specific demethylase 5A (1593-1600)
VLDIPSKY

SEQ ID NO: 10707 - protein, 9 aa, synthetic construct
  REGION 1..9: note = Integrin-linked protein kinase (219-227)
VLHEGTNFV

SEQ ID NO: 10708 - protein, 9 aa, synthetic construct
  REGION 1..9: note = Interleukin-12 subunit alpha (14-22)
VLLDHLSLA

SEQ ID NO: 10709 - protein, 11 aa, synthetic construct
  REGION 1..11: note = Tumor necrosis factor receptor superfamily member 19 (5-15)
VLLEQEKTFFT

SEQ ID NO: 10710 - protein, 10 aa, synthetic construct
  REGION 1..10: note = Protein CNPPD1 (210-219)
VLLEQPTWQL

SEQ ID NO: 10711 - protein, 10 aa, synthetic construct
  REGION 1..10: note = Fatty acid synthase (2105-2114)
VLSSFVLAEK

SEQ ID NO: 10712 - protein, 9 aa, synthetic construct
  REGION 1..9: note = 2'-deoxynucleoside 5'-phosphate N-hydrolase 1 (52-60)
VLTEHVAAA

SEQ ID NO: 10713 - protein, 10 aa, synthetic construct
  REGION 1..10: note = AKT-interacting protein (200-209)
VLYEKDIQLF

SEQ ID NO: 10714 - protein, 9 aa, synthetic construct
  REGION 1..9: note = Thioredoxin-like protein 4A (44-52)
VLYSIAEKV

SEQ ID NO: 10715 - protein, 11 aa, synthetic construct
  REGION 1..11: note = Putative PIP5K1A and PSMD4-like protein (813-823)
VMQDPEFLQSV

SEQ ID NO: 10716 - protein, 16 aa, synthetic construct
  REGION 1..16: note = 78 kDa glucose-regulated protein (177-192)
VMRIINEPTAAAIAYG

SEQ ID NO: 10717 - protein, 11 aa, synthetic construct
  REGION 1..11: note = Glutathione S-transferase P (200-210)
VNLPINGNGKQ

SEQ ID NO: 10718 - protein, 9 aa, synthetic construct
  REGION 1..9: note = Eukaryotic translation initiation factor 3 subunit E (109-117)
VPATDRNAL

SEQ ID NO: 10719 - protein, 11 aa, synthetic construct
  REGION 1..11: note = Protein UXT (95-105)
VPDTSRIYVAL

SEQ ID NO: 10720 - protein, 11 aa, synthetic construct
  REGION 1..11: note = A-kinase-interacting protein 1 (107-117)
VPEEGGATHVY

SEQ ID NO: 10721 - protein, 9 aa, synthetic construct
  REGION 1..9: note = N-alpha-acetyltransferase 10 (67-75)
VPHGHITSL

SEQ ID NO: 10722 - protein, 9 aa, synthetic construct
  REGION 1..9: note = Tubulin beta chain (80-88)
VPRAILVDL

SEQ ID NO: 10723 - protein, 9 aa, synthetic construct
  REGION 1..9: note = Protein phosphatase 1 regulatory subunit 15A (126-134)
VPRGQGSQF

SEQ ID NO: 10724 - protein, 9 aa, synthetic construct
  REGION 1..9: note = Protein Wiz (759-767)
VPRPPQTSL

SEQ ID NO: 10725 - protein, 8 aa, synthetic construct
  REGION 1..8: note = Transmembrane protein 140 (75-82)
VPRVGLGL

SEQ ID NO: 10726 - protein, 9 aa, synthetic construct
  REGION 1..9: note = Nucleolar transcription factor 1 (161-169)
VPSTERMVL

SEQ ID NO: 10727 - protein, 9 aa, synthetic construct
  REGION 1..9: note = Replication protein A 70 kDa DNA-binding subunit (383-391)
VSDFGGRSL

SEQ ID NO: 10728 - protein, 9 aa, synthetic construct
  REGION 1..9: note = Cytosolic non-specific dipeptidase (386-394)
VSDFSHPHY

SEQ ID NO: 10729 - protein, 9 aa, synthetic construct
  REGION 1..9: note = Sister chromatid cohesion protein PDS5 homolog A (258-266)
VSDLSEHVF

SEQ ID NO: 10730 - protein, 8 aa, synthetic construct
  REGION 1..8: note = DNA damage-inducible transcript 4 protein (124-131)
VSQVGKEL

SEQ ID NO: 10731 - protein, 10 aa, synthetic construct
  REGION 1..10: note = Tetratricopeptide repeat protein 28 (985-994)
VTDPTGFLRM

SEQ ID NO: 10732 - protein, 9 aa, synthetic construct
  REGION 1..9: note = Beta-2-syntrophin (352-360)
VTEKDLLLY

SEQ ID NO: 10733 - protein, 10 aa, synthetic construct
  REGION 1..10: note = T-complex protein 1 subunit epsilon (13-22)
VTIFIRGGNK

SEQ ID NO: 10734 - protein, 10 aa, synthetic construct
  REGION 1..10: note = NHP2-like protein 1 (104-113)
VTIKEGSQLK

SEQ ID NO: 10735 - protein, 12 aa, synthetic construct
  REGION 1..12: note = T-complex protein 1 subunit delta (68-79)
VTITNDGATILK

SEQ ID NO: 10736 - protein, 9 aa, synthetic construct
  REGION 1..9: note = HLA class I histocompatibility antigen, alpha chain E (313-321)
VVAAVIWRK

SEQ ID NO: 10737 - protein, 9 aa, synthetic construct
  REGION 1..9: note = Jouberin (370-378)
VVDEHTGQY

SEQ ID NO: 10738 - protein, 9 aa, synthetic construct
  REGION 1..9: note = WASH complex subunit 7 (157-165)
VVMNVVHQL

SEQ ID NO: 10739 - protein, 11 aa, synthetic construct
  REGION 1..11: note = Cyclin-G-associated kinase (580-590)
VVMTPVPLFSK

SEQ ID NO: 10740 - protein, 10 aa, synthetic construct
  REGION 1..10: note = Exportin-6 (715-724)
VVQEPGQVFK

SEQ ID NO: 10741 - protein, 9 aa, synthetic construct
  REGION 1..9: note = DNA damage-binding protein 1 (508-516)
VVVAVGRAL

SEQ ID NO: 10742 - protein, 11 aa, synthetic construct
  REGION 1..11: note = rRNA 2'-O-methyltransferase fibrillarin (305-315)
VVVGVYRPPPK

SEQ ID NO: 10743 - protein, 9 aa, synthetic construct
  REGION 1..9: note = Transmembrane protein 41B (174-182)
VVYKYLTEK

SEQ ID NO: 10744 - protein, 9 aa, synthetic construct
  REGION 1..9: note = Ribose-phosphate pyrophosphokinase 1 (40-48)
VYAILTHGI

SEQ ID NO: 10745 - protein, 10 aa, synthetic construct
  REGION 1..10: note = ATP synthase mitochondrial F1 complex assembly factor 1 (87-96)
VYAVIPAEKF

SEQ ID NO: 10746 - protein, 9 aa, synthetic construct
  REGION 1..9: note = Antizyme inhibitor 1 (320-328)
VYGSFASKL

SEQ ID NO: 10747 - protein, 10 aa, synthetic construct
  REGION 1..10: note = ATP-dependent RNA helicase DHX8 (1133-1142)
VYIHPSSALF

SEQ ID NO: 10748 - protein, 9 aa, synthetic construct
  REGION 1..9: note = Adenosylhomocysteinase 2 (207-215)
VYKKYPNVF

SEQ ID NO: 10749 - protein, 9 aa, synthetic construct
  REGION 1..9: note = Inactive tyrosine-protein kinase 7 (955-963)
VYNSEYYHF

SEQ ID NO: 10750 - protein, 9 aa, synthetic construct
  REGION 1..9: note = 2'-5'-oligoadenylate synthase 3 (865-873)
WENPRVLSF

SEQ ID NO: 10751 - protein, 7 aa, synthetic construct
  REGION 1..7: note = Actin, aortic smooth muscle (358-364)
WISKQEY

SEQ ID NO: 10752 - protein, 9 aa, synthetic construct
  REGION 1..9: note = Protein LYRIC (404-412)
WVDEERASL

SEQ ID NO: 10753 - protein, 10 aa, synthetic construct
  REGION 1..10: note = General transcription factor 3C polypeptide 5 (51-60)
YADPTKRLEL

SEQ ID NO: 10754 - protein, 9 aa, synthetic construct
  REGION 1..9: note = Translocon-associated protein subunit delta (67-75)
YADVGGKQF

SEQ ID NO: 10755 - protein, 10 aa, synthetic construct
  REGION 1..10: note = U5 small nuclear ribonucleoprotein 200 kDa helicase (1245-1254)
YAQDEHLITF

SEQ ID NO: 10756 - protein, 11 aa, synthetic construct
  REGION 1..11: note = HLA class I histocompatibility antigen, alpha chain G (137-147)
YAYDGKDYLAL

SEQ ID NO: 10757 - protein, 15 aa, synthetic construct
  REGION 1..15: note = Cofilin-1 (85-99)
YDATYETKESKKEDL

SEQ ID NO: 10758 - protein, 9 aa, synthetic construct
  REGION 1..9: note = Transcriptional adapter 2-alpha (431-439)
YDFLIREGY

SEQ ID NO: 10759 - protein, 9 aa, synthetic construct
  REGION 1..9: note = Myeloid cell nuclear differentiation antigen (31-39)
YDLGLTTKM

SEQ ID NO: 10760 - protein, 9 aa, synthetic construct
  REGION 1..9: note = Dual specificity tyrosine-phosphorylation-regulated kinase 1A (246-254)
YDLLRNTNF

SEQ ID NO: 10761 - protein, 8 aa, synthetic construct
  REGION 1..8: note = Renin receptor (335-342)
YDSIIYRM

SEQ ID NO: 10762 - protein, 9 aa, synthetic construct
  REGION 1..9: note = Integrin beta-1 (314-322)
YDYPSIAHL

SEQ ID NO: 10763 - protein, 9 aa, synthetic construct
  REGION 1..9: note = ATP-dependent RNA helicase DDX3X (283-291)
YEEARKFSY

SEQ ID NO: 10764 - protein, 9 aa, synthetic construct
  REGION 1..9: note = Cytochrome c oxidase subunit 7C, mitochondrial (19-27)
YEEGPGKNL

SEQ ID NO: 10765 - protein, 9 aa, synthetic construct
  REGION 1..9: note = Spectrin beta chain, non-erythrocytic 1 (461-469)
YEERVQAVV

SEQ ID NO: 10766 - protein, 11 aa, synthetic construct
  REGION 1..11: note = La-related protein 1 (633-643)
YEIDDRDVNKI

SEQ ID NO: 10767 - protein, 10 aa, synthetic construct
  REGION 1..10: note = Nodal modulator 2 (181-190)
YEILATHPTW

SEQ ID NO: 10768 - protein, 9 aa, synthetic construct
  REGION 1..9: note = Keratin, type I cytoskeletal 10 (42-50)
YENEVALRQ

SEQ ID NO: 10769 - protein, 9 aa, synthetic construct
  REGION 1..9: note = Ubiquitin carboxyl-terminal hydrolase 22 (258-266)
YEQQDAHEF

SEQ ID NO: 10770 - protein, 10 aa, synthetic construct
  REGION 1..10: note = Regulator of microtubule dynamics protein 1 (94-103)
YESGETEKLY

SEQ ID NO: 10771 - protein, 9 aa, synthetic construct
  REGION 1..9: note = Thioredoxin-interacting protein (97-105)
YEYKFGFEL

SEQ ID NO: 10772 - protein, 11 aa, synthetic construct
  REGION 1..11: note = Hemoglobin subunit alpha (25-35)
YGAEALERMFL

SEQ ID NO: 10773 - protein, 9 aa, synthetic construct
  REGION 1..9: note = Solute carrier family 25 member 43 (300-308)
YILSPLSYK

SEQ ID NO: 10774 - protein, 10 aa, synthetic construct
  REGION 1..10: note = UDP-N-acetylglucosamine transporter (266-275)
YIYDGELVSK

SEQ ID NO: 10775 - protein, 10 aa, synthetic construct
  REGION 1..10: note = Zinc finger protein 573 (42-51)
YLDPNQRDLY

SEQ ID NO: 10776 - protein, 9 aa, synthetic construct
  REGION 1..9: note = Splicing factor 3A subunit 3 (192-200)
YLQDYTDRV

SEQ ID NO: 10777 - protein, 11 aa, synthetic construct
  REGION 1..11: note = Regulator of microtubule dynamics protein 1 (92-102)
YLYESGETEKL

SEQ ID NO: 10778 - protein, 9 aa, synthetic construct
  REGION 1..9: note = Myc proto-oncogene protein (334-342)
YPAAKRVKL

SEQ ID NO: 10779 - protein, 9 aa, synthetic construct
  REGION 1..9: note = Exportin-T (608-616)
YPAERKQAL

SEQ ID NO: 10780 - protein, 10 aa, synthetic construct
  REGION 1..10: note = Ubiquitin-conjugating enzyme E2 D2 (59-68)
YPFKPPKVAF

SEQ ID NO: 10781 - protein, 10 aa, synthetic construct
  REGION 1..10: note = Ubiquitin-conjugating enzyme E2 E1 (89-98)
YPFKPPKVTF

SEQ ID NO: 10782 - protein, 9 aa, synthetic construct
  REGION 1..9: note = ATP-dependent RNA helicase DDX24 (383-391)
YPKRPLLGL

SEQ ID NO: 10783 - protein, 9 aa, synthetic construct
  REGION 1..9: note = All-trans-retinol 13,14-reductase (15-23)
YPRGGSSEI

SEQ ID NO: 10784 - protein, 9 aa, synthetic construct
  REGION 1..9: note = Laminin subunit gamma-1 (615-623)
YPSETTVKY

SEQ ID NO: 10785 - protein, 9 aa, synthetic construct
  REGION 1..9: note = Eukaryotic translation initiation factor 3 subunit E (62-70)
YSDDIPHAL

SEQ ID NO: 10786 - protein, 12 aa, synthetic construct
  REGION 1..12: note = Bromodomain and WD repeat-containing protein 1 (854-865)
YSESSSDSSSRY

SEQ ID NO: 10787 - protein, 9 aa, synthetic construct
  REGION 1..9: note = Nuclear pore complex protein Nup160 (345-353)
YSLDHISSL

SEQ ID NO: 10788 - protein, 9 aa, synthetic construct
  REGION 1..9: note = ATP-dependent RNA helicase DDX51 (304-312)
YTDATPLRV

SEQ ID NO: 10789 - protein, 8 aa, synthetic construct
  REGION 1..8: note = Cytosolic purine 5'-nucleotidase (255-262)
YTDKIMTY

SEQ ID NO: 10790 - protein, 10 aa, synthetic construct
  REGION 1..10: note = Sterol regulatory element-binding protein cleavage-activating protein (160-169)
YTDPAGLRNY

SEQ ID NO: 10791 - protein, 9 aa, synthetic construct
  REGION 1..9: note = General transcription factor 3C polypeptide 2 (787-795)
YTETVNHHY

SEQ ID NO: 10792 - protein, 9 aa, synthetic construct
  REGION 1..9: note = Cytochrome c oxidase subunit 1 (403-411)
YTLDQTYAK

SEQ ID NO: 10793 - protein, 9 aa, synthetic construct
  REGION 1..9: note = 3-phosphoinositide-dependent protein kinase 1 (486-494)
YVDPVNKVL

SEQ ID NO: 10794 - protein, 10 aa, synthetic construct
  REGION 1..10: note = Alanine-tRNA ligase, cytoplasmic (497-506)
YVFENTVATV

SEQ ID NO: 10795 - protein, 14 aa, synthetic construct
  REGION 1..14: note = Actin, aortic smooth muscle (55-68)
YVGDEAQSKRGILT

SEQ ID NO: 10796 - protein, 9 aa, synthetic construct
  REGION 1..9: note = Exocyst complex component 2 (206-214)
YYAEVETRI

SEQ ID NO: 10797 - protein, 9 aa, synthetic construct
  REGION 1..9: note = Nuclear receptor corepressor 2 (332-340)
YYEKQFPEI

SEQ ID NO: 10798 - protein, 9 aa, synthetic construct
  REGION 1..9: note = Plexin-B2 (1-9)
YYTDIMHTL

SEQ ID NO: 10799 - protein, 9 aa, synthetic construct
  REGION 1..9: note = Tankyrase-1 (100-108)
AAAPVVPAV

SEQ ID NO: 10800 - protein, 9 aa, synthetic construct
  REGION 1..9: note = Ubiquitin-conjugating enzyme E2 J2 (242-250)
AAFAYTVKY

SEQ ID NO: 10801 - protein, 9 aa, synthetic construct
  REGION 1..9: note = DNA replication licensing factor MCM5 (326-334)
AALPNVYEV

SEQ ID NO: 10802 - protein, 9 aa, synthetic construct
  REGION 1..9: note = Heterogeneous nuclear ribonucleoprotein Q (215-223)
AAQEAVKLY

SEQ ID NO: 10803 - protein, 9 aa, synthetic construct
  REGION 1..9: note = Zinc finger protein 609 (360-368)
AEADKIYSF

SEQ ID NO: 10804 - protein, 9 aa, synthetic construct
  REGION 1..9: note = M-phase inducer phosphatase 2 (285-293)
AEEPKARVL

SEQ ID NO: 10805 - protein, 10 aa, synthetic construct
  REGION 1..10: note = SHC SH2 domain-binding protein 1 (437-446)
AEFLMKNSDL

SEQ ID NO: 10806 - protein, 9 aa, synthetic construct
  REGION 1..9: note = Pre-mRNA-splicing factor ATP-dependent RNA helicase DHX15 (563-571)
AEFPLDPQL

SEQ ID NO: 10807 - protein, 11 aa, synthetic construct
  REGION 1..11: note = Intraflagellar transport protein 81 homolog (43-53)
AEIDPKQLVDI

SEQ ID NO: 10808 - protein, 9 aa, synthetic construct
  REGION 1..9: note = Clathrin heavy chain 1 (493-501)
AETGQVQKI

SEQ ID NO: 10809 - protein, 9 aa, synthetic construct
  REGION 1..9: note = Uncharacterized protein C8orf59 (62-70)
AHFAKSISL

SEQ ID NO: 10810 - protein, 9 aa, synthetic construct
  REGION 1..9: note = 60S ribosomal protein L9 (97-105)
AHFPINVVI

SEQ ID NO: 10811 - protein, 9 aa, synthetic construct
  REGION 1..9: note = Intraflagellar transport protein 27 homolog (30-38)
AHFQKSYTL

SEQ ID NO: 10812 - protein, 9 aa, synthetic construct
  REGION 1..9: note = Xaa-Pro aminopeptidase 1 (333-341)
AHIKDAVAL

SEQ ID NO: 10813 - protein, 9 aa, synthetic construct
  REGION 1..9: note = CCR4-NOT transcription complex subunit 1 (2246-2254)
AHMDIFQNL

SEQ ID NO: 10814 - protein, 9 aa, synthetic construct
  REGION 1..9: note = NEDD8 ultimate buster 1 (148-156)
AHNVKAMVL

SEQ ID NO: 10815 - protein, 10 aa, synthetic construct
  REGION 1..10: note = Peptidyl-prolyl cis-trans isomerase FKBP8 (230-239)
AHYQRADFVL

SEQ ID NO: 10816 - protein, 9 aa, synthetic construct
  REGION 1..9: note = Zinc phosphodiesterase ELAC protein 2 (230-238)
AIAPIIAAV

SEQ ID NO: 10817 - protein, 10 aa, synthetic construct
  REGION 1..10: note = Sister chromatid cohesion protein PDS5 homolog A (274-283)
AIDPHLLLSV

SEQ ID NO: 10818 - protein, 9 aa, synthetic construct
  REGION 1..9: note = RNA-binding motif, single-stranded-interacting protein 2 (87-95)
AILDKTTNK

SEQ ID NO: 10819 - protein, 9 aa, synthetic construct
  REGION 1..9: note = S-phase kinase-associated protein 1 (53-61)
AILKKVIQW

SEQ ID NO: 10820 - protein, 9 aa, synthetic construct
  REGION 1..9: note = Importin-11 (662-670)
AILTTLIHL

SEQ ID NO: 10821 - protein, 9 aa, synthetic construct
  REGION 1..9: note = Probable ATP-dependent RNA helicase DDX5 (466-474)
AINPKLLQL

SEQ ID NO: 10822 - protein, 9 aa, synthetic construct
  REGION 1..9: note = Mitochondrial fission process protein 1 (94-102)
AIPGFTINR

SEQ ID NO: 10823 - protein, 11 aa, synthetic construct
  REGION 1..11: note = Rab GDP dissociation inhibitor beta (163-173)
AIYGGTYMLNK

SEQ ID NO: 10824 - protein, 9 aa, synthetic construct
  REGION 1..9: note = Protein SHQ1 homolog (400-408)
ALAEALKEV

SEQ ID NO: 10825 - protein, 9 aa, synthetic construct
  REGION 1..9: note = DNA mismatch repair protein Msh2 (789-797)
ALANQIPTV

SEQ ID NO: 10826 - protein, 9 aa, synthetic construct
  REGION 1..9: note = EH domain-containing protein 2 (507-515)
ALASHLIEA

SEQ ID NO: 10827 - protein, 9 aa, synthetic construct
  REGION 1..9: note = Carboxypeptidase Q (122-130)
ALASLIRSV

SEQ ID NO: 10828 - protein, 9 aa, synthetic construct
  REGION 1..9: note = serine/threonine-protein phosphatase 2A 65 kDa regulatory subunit A beta isoform isoform e (229-237)
ALASVIMGL

SEQ ID NO: 10829 - protein, 9 aa, synthetic construct
  REGION 1..9: note = Fidgetin-like protein 1 (133-141)
ALASVVIHK

SEQ ID NO: 10830 - protein, 9 aa, synthetic construct
  REGION 1..9: note = Cleavage and polyadenylation specificity factor subunit 1 (195-203)
ALDEKLLNI

SEQ ID NO: 10831 - protein, 10 aa, synthetic construct
  REGION 1..10: note = Serine/threonine-protein kinase 10 (901-910)
ALDESHNQNL

SEQ ID NO: 10832 - protein, 10 aa, synthetic construct
  REGION 1..10: note = Protein phosphatase 1 regulatory subunit 15B (166-175)
ALDPAAQAFL

SEQ ID NO: 10833 - protein, 11 aa, synthetic construct
  REGION 1..11: note = Cardiolipin synthase (CMP-forming) (167-177)
ALDPLADKILI

SEQ ID NO: 10834 - protein, 9 aa, synthetic construct
  REGION 1..9: note = Splicing regulatory glutamine/lysine-rich protein 1 (152-160)
ALDPNIATL

SEQ ID NO: 10835 - protein, 9 aa, synthetic construct
  REGION 1..9: note = ATP-binding cassette sub-family A member 7 (273-281)
ALDSHPLSR

SEQ ID NO: 10836 - protein, 9 aa, synthetic construct
  REGION 1..9: note = Ras-related protein Rab-11A (155-163)
ALDSTNVEA

SEQ ID NO: 10837 - protein, 9 aa, synthetic construct
  REGION 1..9: note = AT-rich interactive domain-containing protein 1B (1641-1649)
ALDTINILL

SEQ ID NO: 10838 - protein, 10 aa, synthetic construct
  REGION 1..10: note = SWI/SNF-related matrix-associated actin-dependent regulator of chromatin subfamily A member 5 (920-929)
ALDTKIGRYK

SEQ ID NO: 10839 - protein, 9 aa, synthetic construct
  REGION 1..9: note = Glutamate carboxypeptidase 2 (718-726)
ALFDIESKV

SEQ ID NO: 10840 - protein, 11 aa, synthetic construct
  REGION 1..11: note = Sodium/potassium-transporting ATPase subunit beta-3 (132-142)
ALFEQKGPVYV

SEQ ID NO: 10841 - protein, 10 aa, synthetic construct
  REGION 1..10: note = RING finger protein 214 (467-476)
ALFPAPLAQI

SEQ ID NO: 10842 - protein, 9 aa, synthetic construct
  REGION 1..9: note = Protein disulfide-isomerase A3 (7-15)
ALFPGVALL

SEQ ID NO: 10843 - protein, 11 aa, synthetic construct
  REGION 1..11: note = Exportin-2 (684-694)
ALFPHLLQPVL

SEQ ID NO: 10844 - protein, 9 aa, synthetic construct
  REGION 1..9: note = Zinc finger BED domain-containing protein 1 (596-604)
ALFPLLPKV

SEQ ID NO: 10845 - protein, 9 aa, synthetic construct
  REGION 1..9: note = UDP-glucuronosyltransferase 1-10 (322-330)
ALGKIPQTV

SEQ ID NO: 10846 - protein, 10 aa, synthetic construct
  REGION 1..10: note = Developmentally-regulated GTP-binding protein 2 (66-75)
ALIGFPSVGK

SEQ ID NO: 10847 - protein, 9 aa, synthetic construct
  REGION 1..9: note = Transcription factor Maf (116-124)
ALISNSHQL

SEQ ID NO: 10848 - protein, 8 aa, synthetic construct
  REGION 1..8: note = U3 small nucleolar ribonucleoprotein protein IMP3 (78-85)
ALLDKLYA

SEQ ID NO: 10849 - protein, 9 aa, synthetic construct
  REGION 1..9: note = microtubule-actin cross-linking factor 1 isoform X2 (1652-1660)
ALLDWVTSV

SEQ ID NO: 10850 - protein, 11 aa, synthetic construct
  REGION 1..11: note = Coatomer subunit zeta-1 (90-100)
ALLENMEGLFL

SEQ ID NO: 10851 - protein, 10 aa, synthetic construct
  REGION 1..10: note = Serine/threonine-protein kinase 35 (192-201)
ALLENPKMEL

SEQ ID NO: 10852 - protein, 9 aa, synthetic construct
  REGION 1..9: note = GRIP and coiled-coil domain-containing protein 2 (277-285)
ALLETVNRL

SEQ ID NO: 10853 - protein, 9 aa, synthetic construct
  REGION 1..9: note = Progestin and adipoQ receptor family member 4 (146-154)
ALLGGLVNV

SEQ ID NO: 10854 - protein, 11 aa, synthetic construct
  REGION 1..11: note = Elongation of very long chain fatty acids protein 5 (14-24)
ALLGPRDTRVK

SEQ ID NO: 10855 - protein, 9 aa, synthetic construct
  REGION 1..9: note = Minor histocompatibility antigen H13 (43-51)
ALLPIFFGA

SEQ ID NO: 10856 - protein, 9 aa, synthetic construct
  REGION 1..9: note = Transcription factor IIIB 90 kDa subunit (582-590)
ALLPSSPTL

SEQ ID NO: 10857 - protein, 9 aa, synthetic construct
  REGION 1..9: note = TAF6-like RNA polymerase II p300/CBP-associated factor-associated factor 65 kDa subunit 6L (191-199)
ALLPYFVYV

SEQ ID NO: 10858 - protein, 9 aa, synthetic construct
  REGION 1..9: note = Plectin (403-411)
ALLQSDVRL

SEQ ID NO: 10859 - protein, 9 aa, synthetic construct
  REGION 1..9: note = RNA-binding protein Raly (187-195)
ALLSRLEQI

SEQ ID NO: 10860 - protein, 9 aa, synthetic construct
  REGION 1..9: note = Serine/threonine-protein phosphatase 6 regulatory ankyrin repeat subunit B (148-156)
ALNGHVEMV

SEQ ID NO: 10861 - protein, 9 aa, synthetic construct
  REGION 1..9: note = Ankyrin repeat domain-containing protein 27 (605-613)
ALNSKILSV

SEQ ID NO: 10862 - protein, 9 aa, synthetic construct
  REGION 1..9: note = Zinc finger protein 148 (107-115)
ALNVPISVK

SEQ ID NO: 10863 - protein, 9 aa, synthetic construct
  REGION 1..9: note = Putative eukaryotic translation initiation factor 2 subunit 3-like protein (363-371)
ALPEIFTEL

SEQ ID NO: 10864 - protein, 9 aa, synthetic construct
  REGION 1..9: note = La-related protein 1 (131-139)
ALPPVLTTV

SEQ ID NO: 10865 - protein, 9 aa, synthetic construct
  REGION 1..9: note = Importin subunit alpha-5 (339-347)
ALQSLLHLL

SEQ ID NO: 10866 - protein, 9 aa, synthetic construct
  REGION 1..9: note = Nuclear receptor-interacting protein 1 (745-753)
ALSEQILMV

SEQ ID NO: 10867 - protein, 9 aa, synthetic construct
  REGION 1..9: note = Glutamate-rich WD repeat-containing protein 1 (434-442)
ALSGFTIFR

SEQ ID NO: 10868 - protein, 9 aa, synthetic construct
  REGION 1..9: note = Fidgetin-like protein 1 (268-276)
ALSNPILNK

SEQ ID NO: 10869 - protein, 9 aa, synthetic construct
  REGION 1..9: note = TBC domain-containing protein kinase-like protein (116-124)
ALSPHNILL

SEQ ID NO: 10870 - protein, 9 aa, synthetic construct
  REGION 1..9: note = Enhancer of mRNA-decapping protein 4 (739-747)
ALSQDIPEI

SEQ ID NO: 10871 - protein, 9 aa, synthetic construct
  REGION 1..9: note = Quinone oxidoreductase-like protein 1 (41-49)
ALSQINTKL

SEQ ID NO: 10872 - protein, 9 aa, synthetic construct
  REGION 1..9: note = Prelamin-A/C (147-155)
ALSTALSEK

SEQ ID NO: 10873 - protein, 9 aa, synthetic construct
  REGION 1..9: note = Cyclin-dependent kinase 4 (96-104)
ALTPVVVTL

SEQ ID NO: 10874 - protein, 9 aa, synthetic construct
  REGION 1..9: note = Transcription initiation factor TFIID subunit 2 (948-956)
ALVDQLWKL

SEQ ID NO: 10875 - protein, 9 aa, synthetic construct
  REGION 1..9: note = Beta-hexosaminidase subunit beta (22-30)
ALVVQVAEA

SEQ ID NO: 10876 - protein, 9 aa, synthetic construct
  REGION 1..9: note = Nesprin-2 (1646-1654)
ALWDKLFNL

SEQ ID NO: 10877 - protein, 11 aa, synthetic construct
  REGION 1..11: note = Transmembrane protein 234 (16-26)
ALWGGTQPLLK

SEQ ID NO: 10878 - protein, 9 aa, synthetic construct
  REGION 1..9: note = 28S ribosomal protein S29, mitochondrial (267-275)
ALWGRTTLK

SEQ ID NO: 10879 - protein, 9 aa, synthetic construct
  REGION 1..9: note = Lamin-B receptor (434-442)
ALWNEEALL

SEQ ID NO: 10880 - protein, 9 aa, synthetic construct
  REGION 1..9: note = CAS1 domain-containing protein 1 (533-541)
ALWPQIIQK

SEQ ID NO: 10881 - protein, 11 aa, synthetic construct
  REGION 1..11: note = Tetratricopeptide repeat protein 14 (349-359)
ALYATKGSLNK

SEQ ID NO: 10882 - protein, 9 aa, synthetic construct
  REGION 1..9: note = Ubiquitin carboxyl-terminal hydrolase 4 (552-560)
ALYGQPLLL

SEQ ID NO: 10883 - protein, 9 aa, synthetic construct
  REGION 1..9: note = Tyrosine-protein kinase Fyn (383-391)
ALYGRFTIK

SEQ ID NO: 10884 - protein, 9 aa, synthetic construct
  REGION 1..9: note = Putative ATP-dependent RNA helicase DHX57 (1220-1228)
ALYPNVVQV

SEQ ID NO: 10885 - protein, 9 aa, synthetic construct
  REGION 1..9: note = Nuclear pore complex protein Nup155 (411-419)
ALYSKGILL

SEQ ID NO: 10886 - protein, 9 aa, synthetic construct
  REGION 1..9: note = Heterogeneous nuclear ribonucleoprotein A0 (64-72)
AMAASPHAV

SEQ ID NO: 10887 - protein, 9 aa, synthetic construct
  REGION 1..9: note = Synemin (1524-1532)
AMFDKKVQL

SEQ ID NO: 10888 - protein, 10 aa, synthetic construct
  REGION 1..10: note = DNA-dependent protein kinase catalytic subunit (1302-1311)
AMHDIIAAEK

SEQ ID NO: 10889 - protein, 9 aa, synthetic construct
  REGION 1..9: note = Methionine synthase (186-194)
AMHGVFLYH

SEQ ID NO: 10890 - protein, 9 aa, synthetic construct
  REGION 1..9: note = Transformation/transcription domain-associated protein (2516-2524)
AMLPSITNV

SEQ ID NO: 10891 - protein, 9 aa, synthetic construct
  REGION 1..9: note = Heterogeneous nuclear ribonucleoprotein A1 (71-79)
AMNARPHKV

SEQ ID NO: 10892 - protein, 10 aa, synthetic construct
  REGION 1..10: note = Double-strand-break repair protein rad21 homolog (467-476)
AMPPPPPQGV

SEQ ID NO: 10893 - protein, 11 aa, synthetic construct
  REGION 1..11: note = Biogenesis of lysosome-related organelles complex 1 subunit 3 (99-109)
APAPAPARSLL

SEQ ID NO: 10894 - protein, 9 aa, synthetic construct
  REGION 1..9: note = Solute carrier family 23 member 2 (174-182)
APARAILSL

SEQ ID NO: 10895 - protein, 9 aa, synthetic construct
  REGION 1..9: note = ATP-binding cassette sub-family F member 3 (303-311)
APARASVIL

SEQ ID NO: 10896 - protein, 9 aa, synthetic construct
  REGION 1..9: note = Syndecan-4 (2-10)
APARLFALL

SEQ ID NO: 10897 - protein, 10 aa, synthetic construct
  REGION 1..10: note = Ankyrin repeat domain-containing protein 11 (1778-1787)
APARPLSTNL

SEQ ID NO: 10898 - protein, 9 aa, synthetic construct
  REGION 1..9: note = Solute carrier family 22 member 18 (145-153)
APEERPAAL

SEQ ID NO: 10899 - protein, 9 aa, synthetic construct
  REGION 1..9: note = Zinc fingers and homeoboxes protein 2 (415-423)
APEPKRPHI

SEQ ID NO: 10900 - protein, 10 aa, synthetic construct
  REGION 1..10: note = Hepatoma-derived growth factor (231-240)
APGIRDHESL

SEQ ID NO: 10901 - protein, 10 aa, synthetic construct
  REGION 1..10: note = Heterogeneous nuclear ribonucleoprotein M (460-469)
APIDRVGQTI

SEQ ID NO: 10902 - protein, 10 aa, synthetic construct
  REGION 1..10: note = Gamma-interferon-inducible protein 16 (685-694)
APKSGNTGEL

SEQ ID NO: 10903 - protein, 10 aa, synthetic construct
  REGION 1..10: note = Cancer/testis antigen 2 (114-123)
APLPRPGAVL

SEQ ID NO: 10904 - protein, 8 aa, synthetic construct
  REGION 1..8: note = Talin-1 (1328-1335)
APNLKSQL

SEQ ID NO: 10905 - protein, 10 aa, synthetic construct
  REGION 1..10: note = REST corepressor 1 (61-70)
APNNGQNKSL

SEQ ID NO: 10906 - protein, 9 aa, synthetic construct
  REGION 1..9: note = Histone deacetylase 6 (706-714)
APQPAKPRL

SEQ ID NO: 10907 - protein, 9 aa, synthetic construct
  REGION 1..9: note = BAG family molecular chaperone regulator 3 (130-138)
APQRSQSPL

SEQ ID NO: 10908 - protein, 9 aa, synthetic construct
  REGION 1..9: note = Conserved oligomeric Golgi complex subunit 7 (287-295)
APRAALTRL

SEQ ID NO: 10909 - protein, 11 aa, synthetic construct
  REGION 1..11: note = Protein PRRC2B (1519-1529)
APRAGEQGEAM

SEQ ID NO: 10910 - protein, 11 aa, synthetic construct
  REGION 1..11: note = Striatin-4 (219-229)
APRAPPGPAGL

SEQ ID NO: 10911 - protein, 11 aa, synthetic construct
  REGION 1..11: note = Tricarboxylate transport protein, mitochondrial (3-13)
APRAPRALAAA

SEQ ID NO: 10912 - protein, 9 aa, synthetic construct
  REGION 1..9: note = Actin, gamma-enteric smooth muscle (27-35)
APRAVFPSI

SEQ ID NO: 10913 - protein, 9 aa, synthetic construct
  REGION 1..9: note = General transcription factor IIF subunit 2 (77-85)
APREHPFVL

SEQ ID NO: 10914 - protein, 11 aa, synthetic construct
  REGION 1..11: note = Proteasome subunit beta type-8 (9-19)
APRGQRPESAL

SEQ ID NO: 10915 - protein, 10 aa, synthetic construct
  REGION 1..10: note = 40S ribosomal protein S2 (198-207)
APRGTGIVSA

SEQ ID NO: 10916 - protein, 10 aa, synthetic construct
  REGION 1..10: note = General transcription factor 3C polypeptide 2 (702-711)
APRKGTVWSL

SEQ ID NO: 10917 - protein, 9 aa, synthetic construct
  REGION 1..9: note = Coiled-coil domain-containing protein 12 (108-116)
APRKPDWDL

SEQ ID NO: 10918 - protein, 9 aa, synthetic construct
  REGION 1..9: note = RNA demethylase ALKBH5 (289-297)
APRLETKSL

SEQ ID NO: 10919 - protein, 11 aa, synthetic construct
  REGION 1..11: note = Phosphatidylinositide phosphatase SAC2 (898-908)
APRLGSRSQSL

SEQ ID NO: 10920 - protein, 9 aa, synthetic construct
  REGION 1..9: note = Structural maintenance of chromosomes protein 4 (79-87)
APRLMITHI

SEQ ID NO: 10921 - protein, 9 aa, synthetic construct
  REGION 1..9: note = IST1 homolog (107-115)
APRLQSEVA

SEQ ID NO: 10922 - protein, 11 aa, synthetic construct
  REGION 1..11: note = IST1 homolog (107-117)
APRLQSEVAEL

SEQ ID NO: 10923 - protein, 12 aa, synthetic construct
  REGION 1..12: note = 60S ribosomal protein L13 (47-58)
APRPASGPIRPI

SEQ ID NO: 10924 - protein, 11 aa, synthetic construct
  REGION 1..11: note = Cold shock domain-containing protein E1 (762-772)
APRPDRLVNRL

SEQ ID NO: 10925 - protein, 11 aa, synthetic construct
  REGION 1..11: note = tRNA-splicing endonuclease subunit Sen34 (71-81)
APRPDSRHHSL

SEQ ID NO: 10926 - protein, 9 aa, synthetic construct
  REGION 1..9: note = WAS/WASL-interacting protein family member 2 (122-130)
APRPPVSAA

SEQ ID NO: 10927 - protein, 9 aa, synthetic construct
  REGION 1..9: note = Rab GTPase-activating protein 1 (88-96)
APRSEVEAL

SEQ ID NO: 10928 - protein, 11 aa, synthetic construct
  REGION 1..11: note = HLA class II histocompatibility antigen, DP beta 1 chain (9-19)
APRTVALTALL

SEQ ID NO: 10929 - protein, 11 aa, synthetic construct
  REGION 1..11: note = Protocadherin gamma-C3 (257-267)
APSGTRVVQVL

SEQ ID NO: 10930 - protein, 10 aa, synthetic construct
  REGION 1..10: note = Rho GTPase-activating protein 7 (785-794)
APSLFHLNTL

SEQ ID NO: 10931 - protein, 11 aa, synthetic construct
  REGION 1..11: note = Round spermatid basic protein 1-like protein (94-104)
APSPSSSRSSF

SEQ ID NO: 10932 - protein, 9 aa, synthetic construct
  REGION 1..9: note = intercellular adhesion molecule-1
APSSPRPAL

SEQ ID NO: 10933 - protein, 10 aa, synthetic construct
  REGION 1..10: note = intercellular adhesion molecule-1
APSSPRPALP

SEQ ID NO: 10934 - protein, 8 aa, synthetic construct
  REGION 1..8: note = Unconventional myosin-Ic (176-183)
APVGGHIL

SEQ ID NO: 10935 - protein, 9 aa, synthetic construct
  REGION 1..9: note = Alpha-mannosidase 2C1 (660-668)
APVPPPTSL

SEQ ID NO: 10936 - protein, 9 aa, synthetic construct
  REGION 1..9: note = Transcription factor p65 (247-255)
APVRVSMQL

SEQ ID NO: 10937 - protein, 9 aa, synthetic construct
  REGION 1..9: note = Serine protease 23 (107-115)
APWKPTWPA

SEQ ID NO: 10938 - protein, 9 aa, synthetic construct
  REGION 1..9: note = Splicing factor, arginine/serine-rich 15 (410-418)
AQNEPLTQK

SEQ ID NO: 10939 - protein, 10 aa, synthetic construct
  REGION 1..10: note = GTP-binding nuclear protein Ran (215-224)
AQYEHDLEVA

SEQ ID NO: 10940 - protein, 9 aa, synthetic construct
  REGION 1..9: note = Neuropathy target esterase (279-287)
ARDSTVLRL

SEQ ID NO: 10941 - protein, 9 aa, synthetic construct
  REGION 1..9: note = Tubulin epsilon chain (273-281)
ARFEGSLNM

SEQ ID NO: 10942 - protein, 9 aa, synthetic construct
  REGION 1..9: note = Splicing factor 3A subunit 1 (306-314)
ARILIQERY

SEQ ID NO: 10943 - protein, 9 aa, synthetic construct
  REGION 1..9: note = Dedicator of cytokinesis protein 7 (251-259)
ARVKMQVTM

SEQ ID NO: 10944 - protein, 9 aa, synthetic construct
  REGION 1..9: note = MICOS complex subunit MIC13 (3-11)
ARVWSLMRF

SEQ ID NO: 10945 - protein, 9 aa, synthetic construct
  REGION 1..9: note = Endonuclease domain-containing 1 protein (4-12)
ARWLALGSL

SEQ ID NO: 10946 - protein, 9 aa, synthetic construct
  REGION 1..9: note = Sodium-dependent phosphate transport protein 4 (18-26)
ARYGIALVL

SEQ ID NO: 10947 - protein, 11 aa, synthetic construct
  REGION 1..11: note = Deubiquitinating protein VCIP135 (28-38)
ASAAASGGLLK

SEQ ID NO: 10948 - protein, 9 aa, synthetic construct
  REGION 1..9: note = Kinase D-interacting substrate of 220 kDa (763-771)
ASDPHIIIK

SEQ ID NO: 10949 - protein, 10 aa, synthetic construct
  REGION 1..10: note = Multivesicular body subunit 12A (40-49)
ASFGKSFAQK

SEQ ID NO: 10950 - protein, 11 aa, synthetic construct
  REGION 1..11: note = Myosin-9 (366-376)
ASMPDNTAAQK

SEQ ID NO: 10951 - protein, 9 aa, synthetic construct
  REGION 1..9: note = Pro-interleukin-16 (1150-1158)
ASQEGTIQK

SEQ ID NO: 10952 - protein, 9 aa, synthetic construct
  REGION 1..9: note = Cullin-4B (91-99)
ASSHVPIQK

SEQ ID NO: 10953 - protein, 11 aa, synthetic construct
  REGION 1..11: note = Vimentin (54-64)
ASSPGGVYATR

SEQ ID NO: 10954 - protein, 9 aa, synthetic construct
  REGION 1..9: note = Heterogeneous nuclear ribonucleoprotein D-like (81-89)
ASVDKVLEL

SEQ ID NO: 10955 - protein, 9 aa, synthetic construct
  REGION 1..9: note = Gamma-adducin (236-244)
ATAAVSSMK

SEQ ID NO: 10956 - protein, 10 aa, synthetic construct
  REGION 1..10: note = Clathrin heavy chain 1 (311-320)
ATAGIIGVNR

SEQ ID NO: 10957 - protein, 9 aa, synthetic construct
  REGION 1..9: note = WD repeat-containing protein 44 (93-101)
ATASPIVAR

SEQ ID NO: 10958 - protein, 9 aa, synthetic construct
  REGION 1..9: note = Nucleotide exchange factor SIL1 (214-222)
ATEQPLTAK

SEQ ID NO: 10959 - protein, 9 aa, synthetic construct
  REGION 1..9: note = Ankyrin repeat and KH domain-containing protein 1 (1541-1549)
ATFTNVFGK

SEQ ID NO: 10960 - protein, 10 aa, synthetic construct
  REGION 1..10: note = Protein artemis (555-564)
ATGESIAVKK

SEQ ID NO: 10961 - protein, 10 aa, synthetic construct
  REGION 1..10: note = Guanine nucleotide-binding protein G(I)/G(S)/G(T) subunit beta-1 (228-237)
ATGSWDSFLK

SEQ ID NO: 10962 - protein, 9 aa, synthetic construct
  REGION 1..9: note = Serine/threonine-protein kinase mTOR (800-808)
ATIGELAQV

SEQ ID NO: 10963 - protein, 11 aa, synthetic construct
  REGION 1..11: note = Interferon regulatory factor 2-binding protein-like (88-98)
ATILAGDVKVK

SEQ ID NO: 10964 - protein, 9 aa, synthetic construct
  REGION 1..9: note = Protein FAM76B (209-217)
ATIQNETPK

SEQ ID NO: 10965 - protein, 11 aa, synthetic construct
  REGION 1..11: note = Paired amphipathic helix protein Sin3a (628-638)
ATIRVLEAIQK

SEQ ID NO: 10966 - protein, 12 aa, synthetic construct
  REGION 1..12: note = T-complex protein 1 subunit eta (44-55)
ATISNDGATILK

SEQ ID NO: 10967 - protein, 9 aa, synthetic construct
  REGION 1..9: note = Hexokinase-1 (356-364)
ATLGAILNR

SEQ ID NO: 10968 - protein, 9 aa, synthetic construct
  REGION 1..9: note = Nuclear mitotic apparatus protein 1 (150-158)
ATLQEALAH

SEQ ID NO: 10969 - protein, 9 aa, synthetic construct
  REGION 1..9: note = Cytoplasmic dynein 1 heavy chain 1 (3080-3088)
ATSPALFNR

SEQ ID NO: 10970 - protein, 10 aa, synthetic construct
  REGION 1..10: note = Isoaspartyl peptidase/L-asparaginase (183-192)
ATSTGGIVNK

SEQ ID NO: 10971 - protein, 9 aa, synthetic construct
  REGION 1..9: note = Ankyrin repeat domain-containing protein 17 (653-661)
ATTLPIRNK

SEQ ID NO: 10972 - protein, 11 aa, synthetic construct
  REGION 1..11: note = Alsin (409-419)
ATYEAGALSLK

SEQ ID NO: 10973 - protein, 10 aa, synthetic construct
  REGION 1..10: note = Chromobox protein homolog 2 (418-427)
AVAPPTPASK

SEQ ID NO: 10974 - protein, 12 aa, synthetic construct
  REGION 1..12: note = Guanine nucleotide-binding protein G(I)/G(S)/G(T) subunit beta-2 (326-337)
AVATGSWDSFLK

SEQ ID NO: 10975 - protein, 10 aa, synthetic construct
  REGION 1..10: note = Cilia- and flagella-associated protein 97 (505-514)
AVDPSSGHPR

SEQ ID NO: 10976 - protein, 12 aa, synthetic construct
  REGION 1..12: note = Heme-binding protein 1 (85-96)
AVFPNEDGSLQK

SEQ ID NO: 10977 - protein, 9 aa, synthetic construct
  REGION 1..9: note = SCY1-like protein 2 (22-30)
AVMGNPVTR

SEQ ID NO: 10978 - protein, 9 aa, synthetic construct
  REGION 1..9: note = PH domain leucine-rich repeat-containing protein phosphatase 1 (285-293)
AVRNVPDAL

SEQ ID NO: 10979 - protein, 11 aa, synthetic construct
  REGION 1..11: note = Histone H2B type 1-A (112-122)
AVSEGTKAVTK

SEQ ID NO: 10980 - protein, 9 aa, synthetic construct
  REGION 1..9: note = E3 ubiquitin-protein ligase RNF123 (619-627)
AVTGILVQL

SEQ ID NO: 10981 - protein, 9 aa, synthetic construct
  REGION 1..9: note = Transcription termination factor 1 (809-817)
AVYVPFWQK

SEQ ID NO: 10982 - protein, 9 aa, synthetic construct
  REGION 1..9: note = Tyrosine-protein kinase Fyn (324-332)
AYIERMNYI

SEQ ID NO: 10983 - protein, 9 aa, synthetic construct
  REGION 1..9: note = COP9 signalosome complex subunit 4 (165-173)
AYINRASLL

SEQ ID NO: 10984 - protein, 9 aa, synthetic construct
  REGION 1..9: note = UDP-N-acetylglucosamine-peptide N-acetylglucosaminyltransferase 110 kDa subunit (697-705)
AYMPHTFFI

SEQ ID NO: 10985 - protein, 9 aa, synthetic construct
  REGION 1..9: note = Translocating chain-associated membrane protein 1 (155-163)
AYPHNLMTF

SEQ ID NO: 10986 - protein, 9 aa, synthetic construct
  REGION 1..9: note = Dihydropyrimidine dehydrogenase (NADP(+)) (185-193)
AYSAKIALF

SEQ ID NO: 10987 - protein, 9 aa, synthetic construct
  REGION 1..9: note = Double-stranded RNA-binding protein Staufen homolog 1 (70-78)
DAAAKALRI

SEQ ID NO: 10988 - protein, 8 aa, synthetic construct
  REGION 1..8: note = Minor histocompatibility antigen H13 (74-81)
DAARFPII

SEQ ID NO: 10989 - protein, 9 aa, synthetic construct
  REGION 1..9: note = Conserved oligomeric Golgi complex subunit 2 (338-346)
DAFHEKYTI

SEQ ID NO: 10990 - protein, 8 aa, synthetic construct
  REGION 1..8: note = AP-2 complex subunit mu (30-37)
DAFRVNVI

SEQ ID NO: 10991 - protein, 9 aa, synthetic construct
  REGION 1..9: note = UDP-N-acetylglucosamine-peptide N-acetylglucosaminyltransferase 110 kDa subunit (430-438)
DAHSNLASI

SEQ ID NO: 10992 - protein, 8 aa, synthetic construct
  REGION 1..8: note = Neurobeachin-like protein 2 (378-385)
DAIAVHVV

SEQ ID NO: 10993 - protein, 9 aa, synthetic construct
  REGION 1..9: note = Rho-associated protein kinase 2 (203-211)
DAIHSMGLI

SEQ ID NO: 10994 - protein, 9 aa, synthetic construct
  REGION 1..9: note = Ubiquitin carboxyl-terminal hydrolase 22 (496-504)
DAIITKASI

SEQ ID NO: 10995 - protein, 9 aa, synthetic construct
  REGION 1..9: note = NF-kappa-B essential modulator (63-71)
DAIRQSNQI

SEQ ID NO: 10996 - protein, 8 aa, synthetic construct
  REGION 1..8: note = Uncharacterized protein C1orf43 (108-115)
DAIRTSEI

SEQ ID NO: 10997 - protein, 9 aa, synthetic construct
  REGION 1..9: note = Enhancer of filamentation 1 (541-549)
DAKQLTTTI

SEQ ID NO: 10998 - protein, 9 aa, synthetic construct
  REGION 1..9: note = Endoplasmin (89-97)
DALDKIRLI

SEQ ID NO: 10999 - protein, 9 aa, synthetic construct
  REGION 1..9: note = 60S ribosomal protein L23a (145-153)
DALDVANKI

SEQ ID NO: 11000 - protein, 9 aa, synthetic construct
  REGION 1..9: note = Peroxisome proliferator activated receptor interacting complex protein (2369-2377)
DALGKLISI

SEQ ID NO: 11001 - protein, 8 aa, synthetic construct
  REGION 1..8: note = S-adenosylmethionine synthase isoform type-2 (220-227)
DALKEKVI

SEQ ID NO: 11002 - protein, 9 aa, synthetic construct
  REGION 1..9: note = Microtubule-actin cross-linking factor 1, isoforms 1/2/3/5 (533-541)
DALKVINKV

SEQ ID NO: 11003 - protein, 9 aa, synthetic construct
  REGION 1..9: note = Bax inhibitor 1 (57-65)
DALLKFSHI

SEQ ID NO: 11004 - protein, 9 aa, synthetic construct
  REGION 1..9: note = Spectrin beta chain, non-erythrocytic 1 (949-957)
DALLSALSI

SEQ ID NO: 11005 - protein, 8 aa, synthetic construct
  REGION 1..8: note = Protein FAM179B (198-205)
DALQILHI

SEQ ID NO: 11006 - protein, 8 aa, synthetic construct
  REGION 1..8: note = Isoleucine-tRNA ligase, cytoplasmic (621-628)
DALRLYLI

SEQ ID NO: 11007 - protein, 9 aa, synthetic construct
  REGION 1..9: note = Programmed cell death protein 4 (72-80)
DALRSGLTV

SEQ ID NO: 11008 - protein, 9 aa, synthetic construct
  REGION 1..9: note = Methionine-tRNA ligase, cytoplasmic (281-289)
DALRSILTI

SEQ ID NO: 11009 - protein, 9 aa, synthetic construct
  REGION 1..9: note = ATP synthase subunit alpha, mitochondrial (164-172)
DAMKYTIVV

SEQ ID NO: 11010 - protein, 9 aa, synthetic construct
  REGION 1..9: note = Plectin (246-254)
DAMPRVPDV

SEQ ID NO: 11011 - protein, 8 aa, synthetic construct
  REGION 1..8: note = Cyclic AMP-responsive element-binding protein 1 (144-151)
DAPGVPRI

SEQ ID NO: 11012 - protein, 9 aa, synthetic construct
  REGION 1..9: note = Putative Polycomb group protein ASXL1 (26-34)
DAPMTPKQI

SEQ ID NO: 11013 - protein, 9 aa, synthetic construct
  REGION 1..9: note = NEDD4 family-interacting protein 1 (37-45)
DAPPPYSSI

SEQ ID NO: 11014 - protein, 8 aa, synthetic construct
  REGION 1..8: note = E3 ubiquitin-protein ligase MGRN1 (127-134)
DARVAITI

SEQ ID NO: 11015 - protein, 9 aa, synthetic construct
  REGION 1..9: note = HLA class I histocompatibility antigen, A-1 alpha chain (115-123)
DAYDGKDYI

SEQ ID NO: 11016 - protein, 8 aa, synthetic construct
  REGION 1..8: note = Probable ATP-dependent RNA helicase DDX49 (232-239)
DAYLVHLI

SEQ ID NO: 11017 - protein, 9 aa, synthetic construct
  REGION 1..9: note = Endothelin-converting enzyme 1 (30-38)
DAYPNGLQV

SEQ ID NO: 11018 - protein, 9 aa, synthetic construct
  REGION 1..9: note = Cohesin subunit SA-2 (683-691)
DAYQVLSTL

SEQ ID NO: 11019 - protein, 9 aa, synthetic construct
  REGION 1..9: note = Torsin-1A-interacting protein 1 (432-440)
DAYSSFRSV

SEQ ID NO: 11020 - protein, 9 aa, synthetic construct
  REGION 1..9: note = ATP-binding cassette sub-family E member 1 (434-442)
DAYTHPQFV

SEQ ID NO: 11021 - protein, 9 aa, synthetic construct
  REGION 1..9: note = Talin-1 (1943-1951)
DAYTKKELI

SEQ ID NO: 11022 - protein, 9 aa, synthetic construct
  REGION 1..9: note = Gelsolin (93-101)
DAYVILKTV

SEQ ID NO: 11023 - protein, 8 aa, synthetic construct
  REGION 1..8: note = 40S ribosomal protein S26 (60-67)
DAYVLPKL

SEQ ID NO: 11024 - protein, 9 aa, synthetic construct
  REGION 1..9: note = 40S ribosomal protein S26 (60-68)
DAYVLPKLY

SEQ ID NO: 11025 - protein, 9 aa, synthetic construct
  REGION 1..9: note = Intraflagellar transport protein 25 homolog (124-132)
DHFASVHSV

SEQ ID NO: 11026 - protein, 9 aa, synthetic construct
  REGION 1..9: note = Vacuolar protein sorting-associated protein 13A (1926-1934)
DHFNAMTSL

SEQ ID NO: 11027 - protein, 9 aa, synthetic construct
  REGION 1..9: note = Cytoplasmic FMR1-interacting protein 2 (355-363)
DHIRFISEL

SEQ ID NO: 11028 - protein, 9 aa, synthetic construct
  REGION 1..9: note = Protein zer-1 homolog (237-245)
DHIRVIVQL

SEQ ID NO: 11029 - protein, 9 aa, synthetic construct
  REGION 1..9: note = Cytoplasmic FMR1-interacting protein 1 (355-363)
DHMRFISEL

SEQ ID NO: 11030 - protein, 10 aa, synthetic construct
  REGION 1..10: note = 60S ribosomal protein L9 (11-20)
DIPENVDITL

SEQ ID NO: 11031 - protein, 9 aa, synthetic construct
  REGION 1..9: note = 5'-3' exoribonuclease 1 (835-843)
DIRAFDSRF

SEQ ID NO: 11032 - protein, 10 aa, synthetic construct
  REGION 1..10: note = MAX gene-associated protein (126-135)
DISPVDNHRY

SEQ ID NO: 11033 - protein, 10 aa, synthetic construct
  REGION 1..10: note = Protein MAK16 homolog (177-186)
DIYNFPIHAF

SEQ ID NO: 11034 - protein, 9 aa, synthetic construct
  REGION 1..9: note = DNA-directed RNA polymerases I, II, and III subunit RPABC5 (54-62)
DLIEKLLNY

SEQ ID NO: 11035 - protein, 9 aa, synthetic construct
  REGION 1..9: note = TAR DNA-binding protein 43 (128-136)
DLIIKGISV

SEQ ID NO: 11036 - protein, 9 aa, synthetic construct
  REGION 1..9: note = Arf-GAP with Rho-GAP domain, ANK repeat and PH domain-containing protein 3 (271-279)
DLISPYASF

SEQ ID NO: 11037 - protein, 9 aa, synthetic construct
  REGION 1..9: note = V-type proton ATPase subunit C 1 (62-70)
DLVTYITRF

SEQ ID NO: 11038 - protein, 9 aa, synthetic construct
  REGION 1..9: note = Lysine-specific demethylase 5B (44-52)
DPFAFIHKI

SEQ ID NO: 11039 - protein, 9 aa, synthetic construct
  REGION 1..9: note = 116 kDa U5 small nuclear ribonucleoprotein component (910-918)
DPLDKSIVI

SEQ ID NO: 11040 - protein, 9 aa, synthetic construct
  REGION 1..9: note = Signal recognition particle 9 kDa protein (21-29)
DPMKARVVL

SEQ ID NO: 11041 - protein, 9 aa, synthetic construct
  REGION 1..9: note = Probable 28S rRNA (cytosine-C(5))-methyltransferase (223-231)
DPPPGSHVI

SEQ ID NO: 11042 - protein, 9 aa, synthetic construct
  REGION 1..9: note = Protein BTG2 (105-113)
DPYEVSYRI

SEQ ID NO: 11043 - protein, 9 aa, synthetic construct
  REGION 1..9: note = Small integral membrane protein 15 (18-26)
DPYGFLTTV

SEQ ID NO: 11044 - protein, 9 aa, synthetic construct
  REGION 1..9: note = Serine/threonine-protein kinase mTOR (895-903)
DPYKHKVNI

SEQ ID NO: 11045 - protein, 8 aa, synthetic construct
  REGION 1..8: note = Serine/threonine-protein kinase tousled-like 2 (715-722)
DPYLLPHI

SEQ ID NO: 11046 - protein, 8 aa, synthetic construct
  REGION 1..8: note = AP-3 complex subunit delta-1 isoform 3 (706-713)
DPYRALDI

SEQ ID NO: 11047 - protein, 8 aa, synthetic construct
  REGION 1..8: note = DnaJ homolog subfamily C member 16 (29-36)
DPYRVLGV

SEQ ID NO: 11048 - protein, 10 aa, synthetic construct
  REGION 1..10: note = CSC1-like protein 1 (174-183)
DPYSFGRTTI

SEQ ID NO: 11049 - protein, 9 aa, synthetic construct
  REGION 1..9: note = Nuclear pore membraneoprotein 210 (430-438)
DQDGGVHIL

SEQ ID NO: 11050 - protein, 9 aa, synthetic construct
  REGION 1..9: note = Ubiquitin carboxyl-terminal hydrolase 7 (365-373)
DRFEFPEQL

SEQ ID NO: 11051 - protein, 10 aa, synthetic construct
  REGION 1..10: note = 39S ribosomal protein L38, mitochondrial (371-380)
DSHEPTYGIY

SEQ ID NO: 11052 - protein, 10 aa, synthetic construct
  REGION 1..10: note = Golgin subfamily A member 2 (517-526)
DTIGEYIALY

SEQ ID NO: 11053 - protein, 10 aa, synthetic construct
  REGION 1..10: note = N-alpha-acetyltransferase 25, NatB auxiliary subunit (540-549)
DTIGYLLTRY

SEQ ID NO: 11054 - protein, 9 aa, synthetic construct
  REGION 1..9: note = E3 ubiquitin-protein ligase RNF213 (545-553)
DTINLNSFF

SEQ ID NO: 11055 - protein, 9 aa, synthetic construct
  REGION 1..9: note = Gamma-interferon-inducible protein 16 (447-455)
DTISKMNDF

SEQ ID NO: 11056 - protein, 9 aa, synthetic construct
  REGION 1..9: note = ADP-ribosylation factor-like protein 2 (42-50)
DTISPTLGF

SEQ ID NO: 11057 - protein, 9 aa, synthetic construct
  REGION 1..9: note = Protein Asterix (74-82)
DTKQMMSSF

SEQ ID NO: 11058 - protein, 9 aa, synthetic construct
  REGION 1..9: note = Long-chain-fatty-acid-CoA ligase 3 (86-94)
DTLDKVFTY

SEQ ID NO: 11059 - protein, 11 aa, synthetic construct
  REGION 1..11: note = Heterogeneous nuclear ribonucleoprotein A3 (178-188)
DTVDKIVVQKY

SEQ ID NO: 11060 - protein, 9 aa, synthetic construct
  REGION 1..9: note = Protein SDE2 homolog (60-68)
DTVQHGAVY

SEQ ID NO: 11061 - protein, 11 aa, synthetic construct
  REGION 1..11: note = Heterogeneous nuclear ribonucleoprotein A0 (108-118)
DVAEGDLIEHF

SEQ ID NO: 11062 - protein, 11 aa, synthetic construct
  REGION 1..11: note = Small ubiquitin-related modifier 2 isoform b precursor (61-71)
DVFQQQTGGVY

SEQ ID NO: 11063 - protein, 10 aa, synthetic construct
  REGION 1..10: note = Dapper homolog 1 (245-254)
DVIADVNPKY

SEQ ID NO: 11064 - protein, 11 aa, synthetic construct
  REGION 1..11: note = Transmembrane protein 64 (301-311)
DVIAEQSVSGY

SEQ ID NO: 11065 - protein, 10 aa, synthetic construct
  REGION 1..10: note = 60S acidic ribosomal protein P2 (53-62)
DVIAQGIGKL

SEQ ID NO: 11066 - protein, 9 aa, synthetic construct
  REGION 1..9: note = Transcription factor EB (253-261)
DVIDNIMRL

SEQ ID NO: 11067 - protein, 9 aa, synthetic construct
  REGION 1..9: note = Nipped-B-like protein (1331-1339)
DVIERVIQY

SEQ ID NO: 11068 - protein, 9 aa, synthetic construct
  REGION 1..9: note = Magnesium transporter NIPA2 (278-286)
DVIGTLSGF

SEQ ID NO: 11069 - protein, 9 aa, synthetic construct
  REGION 1..9: note = DnaJ homolog subfamily C member 8 (26-34)
DVIQAGKEY

SEQ ID NO: 11070 - protein, 9 aa, synthetic construct
  REGION 1..9: note = Mitochondrial import receptor subunit TOM5 homolog (23-31)
DVISSIRNF

SEQ ID NO: 11071 - protein, 9 aa, synthetic construct
  REGION 1..9: note = Membrane-bound transcription factor site-2 protease (264-272)
DVKDLIGFF

SEQ ID NO: 11072 - protein, 9 aa, synthetic construct
  REGION 1..9: note = E3 ubiquitin-protein ligase RNF213 (4145-4153)
DVKDYIQEY

SEQ ID NO: 11073 - protein, 11 aa, synthetic construct
  REGION 1..11: note = Pre-mRNA-processing-splicing factor 8 (1650-1660)
DVMDSTTTQKY

SEQ ID NO: 11074 - protein, 9 aa, synthetic construct
  REGION 1..9: note = Coiled-coil domain-containing protein 134 (67-75)
DVMLKGLFK

SEQ ID NO: 11075 - protein, 10 aa, synthetic construct
  REGION 1..10: note = Dipeptidyl peptidase 9 (772-781)
DVPENNQHGY

SEQ ID NO: 11076 - protein, 9 aa, synthetic construct
  REGION 1..9: note = Vimentin (271-279)
DVRQQYESV

SEQ ID NO: 11077 - protein, 9 aa, synthetic construct
  REGION 1..9: note = Src substrate cortactin (289-297)
DVTQVSSAY

SEQ ID NO: 11078 - protein, 9 aa, synthetic construct
  REGION 1..9: note = Kynurenine 3-monooxygenase (252-260)
DVVDFFQKY

SEQ ID NO: 11079 - protein, 11 aa, synthetic construct
  REGION 1..11: note = Vigilin (521-531)
DVVDSEALQVY

SEQ ID NO: 11080 - protein, 9 aa, synthetic construct
  REGION 1..9: note = Clathrin heavy chain 1 (271-279)
DVVFLITKY

SEQ ID NO: 11081 - protein, 9 aa, synthetic construct
  REGION 1..9: note = Peptidyl-prolyl cis-trans isomerase F, mitochondrial (179-187)
DVVKKIESF

SEQ ID NO: 11082 - protein, 9 aa, synthetic construct
  REGION 1..9: note = GH3 domain-containing protein (366-374)
DVVRVVGAY

SEQ ID NO: 11083 - protein, 10 aa, synthetic construct
  REGION 1..10: note = MAP kinase-activated protein kinase 2 (122-131)
DVYENLYAGR

SEQ ID NO: 11084 - protein, 10 aa, synthetic construct
  REGION 1..10: note = AF4/FMR2 family member 1 (32-41)
EAFPEKIPLF

SEQ ID NO: 11085 - protein, 9 aa, synthetic construct
  REGION 1..9: note = Protein SHQ1 homolog (207-215)
EAIEQILKY

SEQ ID NO: 11086 - protein, 9 aa, synthetic construct
  REGION 1..9: note = Condensin complex subunit 1 (636-644)
EAIGIISKM

SEQ ID NO: 11087 - protein, 9 aa, synthetic construct
  REGION 1..9: note = Protein transport protein Sec16A (1405-1413)
EAIQRTEAY

SEQ ID NO: 11088 - protein, 9 aa, synthetic construct
  REGION 1..9: note = Trafficking protein particle complex subunit 9 (320-328)
EAISYYSKY

SEQ ID NO: 11089 - protein, 8 aa, synthetic construct
  REGION 1..8: note = Heat shock cognate 71 kDa protein (88-95)
EAYLGKTV

SEQ ID NO: 11090 - protein, 9 aa, synthetic construct
  REGION 1..9: note = Calcineurin B homologous protein 1 (15-23)
EEIKKETGF

SEQ ID NO: 11091 - protein, 9 aa, synthetic construct
  REGION 1..9: note = Protein diaphanous homolog 1 (941-949)
EELRKSESF

SEQ ID NO: 11092 - protein, 9 aa, synthetic construct
  REGION 1..9: note = Plectin (1635-1643)
EEVAQQKSL

SEQ ID NO: 11093 - protein, 9 aa, synthetic construct
  REGION 1..9: note = Poly(ADP-ribose)ohydrolase ARH3 (12-20)
EGLARPLPL

SEQ ID NO: 11094 - protein, 9 aa, synthetic construct
  REGION 1..9: note = Mitochondrial enolase superfamily member 1 (393-401)
EHFKYPVMI

SEQ ID NO: 11095 - protein, 9 aa, synthetic construct
  REGION 1..9: note = TERF1-interacting nuclear factor 2 (29-37)
EHFPRVLEF

SEQ ID NO: 11096 - protein, 11 aa, synthetic construct
  REGION 1..11: note = Basigin (50-60)
EHINEGETAML

SEQ ID NO: 11097 - protein, 9 aa, synthetic construct
  REGION 1..9: note = Prefoldin subunit 2 (53-61)
EHSLVIDTL

SEQ ID NO: 11098 - protein, 9 aa, synthetic construct
  REGION 1..9: note = Regulator of microtubule dynamics protein 3 (350-358)
EHVDKAIAL

SEQ ID NO: 11099 - protein, 9 aa, synthetic construct
  REGION 1..9: note = E3 ubiquitin-protein ligase MARCH6 (288-296)
EHVFWVVSL

SEQ ID NO: 11100 - protein, 9 aa, synthetic construct
  REGION 1..9: note = Early endosome antigen 1 (171-179)
EIADIKSKY

SEQ ID NO: 11101 - protein, 9 aa, synthetic construct
  REGION 1..9: note = Heat shock 70 kDa protein 1B (129-137)
EIAEAYLGY

SEQ ID NO: 11102 - protein, 9 aa, synthetic construct
  REGION 1..9: note = Pumilio homolog 1 (848-856)
EIAGHIMEF

SEQ ID NO: 11103 - protein, 10 aa, synthetic construct
  REGION 1..10: note = GMP synthase (glutamine-hydrolyzing) (148-157)
EIFPLETPAF

SEQ ID NO: 11104 - protein, 11 aa, synthetic construct
  REGION 1..11: note = ATP synthase subunit g, mitochondrial (91-101)
EIIGKRGIIGY

SEQ ID NO: 11105 - protein, 9 aa, synthetic construct
  REGION 1..9: note = Serine/threonine-protein kinase 4 (69-77)
EIIKEISIM

SEQ ID NO: 11106 - protein, 9 aa, synthetic construct
  REGION 1..9: note = Protein furry homolog-like (472-480)
EIIKIIGKY

SEQ ID NO: 11107 - protein, 9 aa, synthetic construct
  REGION 1..9: note = Arf-GAP with SH3 domain, ANK repeat and PH domain-containing protein 2 (422-430)
EIISEVQRM

SEQ ID NO: 11108 - protein, 9 aa, synthetic construct
  REGION 1..9: note = Structural maintenance of chromosomes flexible hinge domain-containing protein 1 (760-768)
EIISHISQH

SEQ ID NO: 11109 - protein, 9 aa, synthetic construct
  REGION 1..9: note = Vacuolar protein sorting-associated protein 13C (916-924)
EIKEVILEF

SEQ ID NO: 11110 - protein, 9 aa, synthetic construct
  REGION 1..9: note = Pre-mRNA-processing-splicing factor 8 (2006-2014)
EIRDIILGM

SEQ ID NO: 11111 - protein, 10 aa, synthetic construct
  REGION 1..10: note = Filamin A (106-115)
EIVEGENHTY

SEQ ID NO: 11112 - protein, 9 aa, synthetic construct
  REGION 1..9: note = Putative elongation factor 1-alpha-like 3 (169-177)
EIVKEVSTY

SEQ ID NO: 11113 - protein, 10 aa, synthetic construct
  REGION 1..10: note = Bifunctional 3'-phosphoadenosine 5'-phosphosulfate synthase 1 (555-564)
EIVPFRVAAY

SEQ ID NO: 11114 - protein, 10 aa, synthetic construct
  REGION 1..10: note = Splicing factor 3B subunit 1 (42-51)
EIYGGSDSRF

SEQ ID NO: 11115 - protein, 9 aa, synthetic construct
  REGION 1..9: note = Protein SET (73-81)
ELIAKIPNF

SEQ ID NO: 11116 - protein, 9 aa, synthetic construct
  REGION 1..9: note = Protein CMSS1 (152-160)
ELIRSMTAF

SEQ ID NO: 11117 - protein, 8 aa, synthetic construct
  REGION 1..8: note = Beta-lactamase-like protein 2 (240-247)
ELVKIIYK

SEQ ID NO: 11118 - protein, 9 aa, synthetic construct
  REGION 1..9: note = Structural maintenance of chromosomes flexible hinge domain-containing protein 1 (1904-1912)
EQIDLLQQY

SEQ ID NO: 11119 - protein, 11 aa, synthetic construct
  REGION 1..11: note = Glutamine-fructose-6-phosphate aminotransferase (isomerizing) 1 (443-453)
ETADTLMGLRY

SEQ ID NO: 11120 - protein, 9 aa, synthetic construct
  REGION 1..9: note = Ezrin (109-117)
ETAVLLGSY

SEQ ID NO: 11121 - protein, 10 aa, synthetic construct
  REGION 1..10: note = Mediator of RNA polymerase II transcription subunit 13 (1609-1618)
ETFGEAGQKY

SEQ ID NO: 11122 - protein, 11 aa, synthetic construct
  REGION 1..11: note = A-kinase anchor protein 13 (546-556)
ETFGGFDSHQM

SEQ ID NO: 11123 - protein, 10 aa, synthetic construct
  REGION 1..10: note = DnaJ homolog subfamily C member 7 (29-38)
ETFKEQGNAY

SEQ ID NO: 11124 - protein, 9 aa, synthetic construct
  REGION 1..9: note = ERO1-like protein alpha (51-59)
ETIDRFNNY

SEQ ID NO: 11125 - protein, 10 aa, synthetic construct
  REGION 1..10: note = Protein SLX4IP (47-56)
ETIDSRVQEY

SEQ ID NO: 11126 - protein, 9 aa, synthetic construct
  REGION 1..9: note = Pre-mRNA-processing-splicing factor 8 (1612-1620)
ETIHPRKSY

SEQ ID NO: 11127 - protein, 9 aa, synthetic construct
  REGION 1..9: note = Far upstream element-binding protein 1 (396-404)
ETIKSISQQ

SEQ ID NO: 11128 - protein, 9 aa, synthetic construct
  REGION 1..9: note = Vacuolar protein sorting-associated protein 8 homolog (1056-1064)
ETIQITQKY

SEQ ID NO: 11129 - protein, 9 aa, synthetic construct
  REGION 1..9: note = RING finger protein 145 (166-174)
ETIVIINKF

SEQ ID NO: 11130 - protein, 10 aa, synthetic construct
  REGION 1..10: note = RNA polymerase-associated protein CTR9 homolog (376-385)
ETMKILGSLY

SEQ ID NO: 11131 - protein, 10 aa, synthetic construct
  REGION 1..10: note = Protein phosphatase 1 regulatory subunit 12A (825-834)
ETQTDSISRY

SEQ ID NO: 11132 - protein, 10 aa, synthetic construct
  REGION 1..10: note = WD repeat-containing protein 11 (1019-1028)
ETSADNQHYY

SEQ ID NO: 11133 - protein, 11 aa, synthetic construct
  REGION 1..11: note = Heterogeneous nuclear ribonucleoproteins A2/B1 (19-29)
ETTEESLRNYY

SEQ ID NO: 11134 - protein, 11 aa, synthetic construct
  REGION 1..11: note = Constitutive coactivator of PPAR-gamma-like protein 1 (893-903)
ETVATGPYRAF

SEQ ID NO: 11135 - protein, 10 aa, synthetic construct
  REGION 1..10: note = Type II inositol 1,4,5-trisphosphate 5-phosphatase (190-199)
ETVGTGIMGR

SEQ ID NO: 11136 - protein, 9 aa, synthetic construct
  REGION 1..9: note = HLA class II histocompatibility antigen, DR alpha chain (35-43)
ETVWRLEEF

SEQ ID NO: 11137 - protein, 9 aa, synthetic construct
  REGION 1..9: note = Spectrin alpha chain, non-erythrocytic 1 (648-656)
EVAARMNEV

SEQ ID NO: 11138 - protein, 9 aa, synthetic construct
  REGION 1..9: note = Heterogeneous nuclear ribonucleoprotein M (10-18)
EVAATEIKM

SEQ ID NO: 11139 - protein, 10 aa, synthetic construct
  REGION 1..10: note = Transmembrane anterior posterior transformation protein 1 homolog (204-213)
EVADRLFSSF

SEQ ID NO: 11140 - protein, 9 aa, synthetic construct
  REGION 1..9: note = Tankyrase-2 (792-800)
EVAEYLLQH

SEQ ID NO: 11141 - protein, 9 aa, synthetic construct
  REGION 1..9: note = Nuclear pore membraneoprotein 210 (776-784)
EVAGHLRTY

SEQ ID NO: 11142 - protein, 10 aa, synthetic construct
  REGION 1..10: note = Nucleoprotein TPR (1215-1224)
EVAQVESLRY

SEQ ID NO: 11143 - protein, 9 aa, synthetic construct
  REGION 1..9: note = Glutamyl-tRNA(Gln) amidotransferase subunit A, mitochondrial (334-342)
EVASNMARF

SEQ ID NO: 11144 - protein, 10 aa, synthetic construct
  REGION 1..10: note = Rho guanine nucleotide exchange factor 1 (666-675)
EVATDHKAFY

SEQ ID NO: 11145 - protein, 10 aa, synthetic construct
  REGION 1..10: note = Disheveled-associated activator of morphogenesis 1 (1034-1043)
EVFDKDLSKL

SEQ ID NO: 11146 - protein, 10 aa, synthetic construct
  REGION 1..10: note = Fatty acyl-CoA reductase 1 (146-155)
EVFMHVSTAY

SEQ ID NO: 11147 - protein, 10 aa, synthetic construct
  REGION 1..10: note = G1/S-specific cyclin-D2 (75-84)
EVFPLAMNYL

SEQ ID NO: 11148 - protein, 10 aa, synthetic construct
  REGION 1..10: note = Uncharacterized protein ZMYM6NB (45-54)
EVFPLKVFGY

SEQ ID NO: 11149 - protein, 10 aa, synthetic construct
  REGION 1..10: note = Mitotic spindle assembly checkpoint protein MAD1 (619-628)
EVFQTKIQEF

SEQ ID NO: 11150 - protein, 9 aa, synthetic construct
  REGION 1..9: note = Zinc finger and BTB domain-containing protein 38 (82-90)
EVFTEILNY

SEQ ID NO: 11151 - protein, 9 aa, synthetic construct
  REGION 1..9: note = Peroxisomal multifunctional enzyme type 2 (214-222)
EVGAGWIGK

SEQ ID NO: 11152 - protein, 9 aa, synthetic construct
  REGION 1..9: note = Chromodomain-helicase-DNA-binding protein 1-like (232-240)
EVGDFIQRY

SEQ ID NO: 11153 - protein, 9 aa, synthetic construct
  REGION 1..9: note = PERQ amino acid-rich with GYF domain-containing protein 2 (1163-1171)
EVHDYIRAY

SEQ ID NO: 11154 - protein, 10 aa, synthetic construct
  REGION 1..10: note = Centrosomal protein of 55 kDa (275-284)
EVHNLNQLLY

SEQ ID NO: 11155 - protein, 10 aa, synthetic construct
  REGION 1..10: note = Transcription termination factor 1, mitochondrial (99-108)
EVIASIISRY

SEQ ID NO: 11156 - protein, 9 aa, synthetic construct
  REGION 1..9: note = Sterol 26-hydroxylase, mitochondrial (180-188)
EVIDDFMTR

SEQ ID NO: 11157 - protein, 9 aa, synthetic construct
  REGION 1..9: note = Alpha/beta hydrolase domain-containing protein 17C (277-285)
EVIDFSHGL

SEQ ID NO: 11158 - protein, 10 aa, synthetic construct
  REGION 1..10: note = PHD finger protein 10 (57-66)
EVIDLMIKEY

SEQ ID NO: 11159 - protein, 10 aa, synthetic construct
  REGION 1..10: note = SNF-related serine/threonine-protein kinase (80-89)
EVIDTQTKLY

SEQ ID NO: 11160 - protein, 9 aa, synthetic construct
  REGION 1..9: note = Transcription initiation factor TFIID subunit 1-like (1043-1051)
EVIDVVRTM

SEQ ID NO: 11161 - protein, 9 aa, synthetic construct
  REGION 1..9: note = Shootin-1 (164-172)
EVIEEVNKV

SEQ ID NO: 11162 - protein, 12 aa, synthetic construct
  REGION 1..12: note = Glucocorticoid receptor (538-549)
EVIEPEVLYAGY

SEQ ID NO: 11163 - protein, 10 aa, synthetic construct
  REGION 1..10: note = Transformation/transcription domain-associated protein (3103-3112)
EVIESTNLKY

SEQ ID NO: 11164 - protein, 10 aa, synthetic construct
  REGION 1..10: note = Serine/threonine-protein kinase MARK2 (117-126)
EVIETEKTLY

SEQ ID NO: 11165 - protein, 10 aa, synthetic construct
  REGION 1..10: note = Histone H2A deubiquitinase MYSM1 (495-504)
EVIGLLGGRY

SEQ ID NO: 11166 - protein, 9 aa, synthetic construct
  REGION 1..9: note = CD9 antigen (116-124)
EVIKEVQEF

SEQ ID NO: 11167 - protein, 9 aa, synthetic construct
  REGION 1..9: note = Eukaryotic translation initiation factor 3 subunit L (50-58)
EVIKNFIQY

SEQ ID NO: 11168 - protein, 10 aa, synthetic construct
  REGION 1..10: note = Calcium signal-modulating cyclophilin ligand (207-216)
EVINRSMDTY

SEQ ID NO: 11169 - protein, 9 aa, synthetic construct
  REGION 1..9: note = NADH dehydrogenase (ubiquinone) 1 beta subcomplex subunit 6 (115-123)
EVIPPMKEF

SEQ ID NO: 11170 - protein, 9 aa, synthetic construct
  REGION 1..9: note = Tyrosyl-DNA phosphodiesterase 2 (152-160)
EVIPPYYSY

SEQ ID NO: 11171 - protein, 9 aa, synthetic construct
  REGION 1..9: note = 60 kDa SS-A/Ro ribonucleoprotein (72-80)
EVIQEIKSF

SEQ ID NO: 11172 - protein, 9 aa, synthetic construct
  REGION 1..9: note = Insulin-degrading enzyme (951-959)
EVIQNMTEF

SEQ ID NO: 11173 - protein, 9 aa, synthetic construct
  REGION 1..9: note = Cytosolic 5'-nucleotidase 3A (161-169)
EVIRQAGVY

SEQ ID NO: 11174 - protein, 10 aa, synthetic construct
  REGION 1..10: note = Nucleoprotein TPR (531-540)
EVISQHLVSY

SEQ ID NO: 11175 - protein, 9 aa, synthetic construct
  REGION 1..9: note = Mediator of RNA polymerase II transcription subunit 26 (33-41)
EVISSLEKY

SEQ ID NO: 11176 - protein, 9 aa, synthetic construct
  REGION 1..9: note = Bloom syndrome protein (1277-1285)
EVISVLQKY

SEQ ID NO: 11177 - protein, 11 aa, synthetic construct
  REGION 1..11: note = Ribosomal protein S6 kinase alpha-3 (14-24)
EVKEDIGVGSY

SEQ ID NO: 11178 - protein, 12 aa, synthetic construct
  REGION 1..12: note = Farnesyl pyrophosphate synthase (40-51)
EVLEYNAIGGKY

SEQ ID NO: 11179 - protein, 11 aa, synthetic construct
  REGION 1..11: note = Tight junction protein ZO-2 (118-128)
EVMDEFDGRSF

SEQ ID NO: 11180 - protein, 9 aa, synthetic construct
  REGION 1..9: note = DNA polymerase eta (98-106)
EVMEIMSRF

SEQ ID NO: 11181 - protein, 9 aa, synthetic construct
  REGION 1..9: note = 2',3'-cyclic-nucleotide 3'-phosphodiesterase (369-377)
EVRAIFTGY

SEQ ID NO: 11182 - protein, 10 aa, synthetic construct
  REGION 1..10: note = Fragile X mental retardation syndrome-related protein 1 (7-16)
EVRGSNGAFY

SEQ ID NO: 11183 - protein, 9 aa, synthetic construct
  REGION 1..9: note = Glycylpeptide N-tetradecanoyltransferase 1 (60-68)
EVTDFLSFY

SEQ ID NO: 11184 - protein, 9 aa, synthetic construct
  REGION 1..9: note = A-kinase anchor protein 9 (664-672)
EVTEIISQF

SEQ ID NO: 11185 - protein, 9 aa, synthetic construct
  REGION 1..9: note = DNA-directed RNA polymerases I, II, and III subunit RPABC1 (155-163)
EVTELLARY

SEQ ID NO: 11186 - protein, 9 aa, synthetic construct
  REGION 1..9: note = DNA topoisomerase 2-alpha (74-82)
EVTFVPGLY

SEQ ID NO: 11187 - protein, 9 aa, synthetic construct
  REGION 1..9: note = Volume-regulated anion channel subunit LRRC8D (74-82)
EVTTNIPKM

SEQ ID NO: 11188 - protein, 9 aa, synthetic construct
  REGION 1..9: note = Vacuolar protein sorting-associated protein 13D (1985-1993)
EVVAFIQHF

SEQ ID NO: 11189 - protein, 9 aa, synthetic construct
  REGION 1..9: note = Mortality factor 4-like protein 1 (216-224)
EVVAGIKEY

SEQ ID NO: 11190 - protein, 10 aa, synthetic construct
  REGION 1..10: note = Mortality factor 4-like protein 1 (216-225)
EVVAGIKEYF

SEQ ID NO: 11191 - protein, 9 aa, synthetic construct
  REGION 1..9: note = Nesprin-2 (1588-1596)
EVVDKINQV

SEQ ID NO: 11192 - protein, 9 aa, synthetic construct
  REGION 1..9: note = Peptide-N(4)-(N-acetyl-beta-glucosaminyl)asparagine amidase (383-391)
EVVDVTWRY

SEQ ID NO: 11193 - protein, 9 aa, synthetic construct
  REGION 1..9: note = GA-binding protein subunit beta-1 (118-126)
EVVELLIKY

SEQ ID NO: 11194 - protein, 9 aa, synthetic construct
  REGION 1..9: note = Glucocorticoid receptor (728-736)
EVVENLLNY

SEQ ID NO: 11195 - protein, 9 aa, synthetic construct
  REGION 1..9: note = Inverted formin-2 (336-344)
EVVERLLSV

SEQ ID NO: 11196 - protein, 9 aa, synthetic construct
  REGION 1..9: note = F-box only protein 22 (27-35)
EVVERVLTF

SEQ ID NO: 11197 - protein, 11 aa, synthetic construct
  REGION 1..11: note = Actin-binding protein IPP (418-428)
EVVGNMAVSRY

SEQ ID NO: 11198 - protein, 10 aa, synthetic construct
  REGION 1..10: note = 26S proteasome non-ATPase regulatory subunit 2 (581-590)
EVVSEPFRSF

SEQ ID NO: 11199 - protein, 10 aa, synthetic construct
  REGION 1..10: note = Cold shock domain-containing protein E1 (630-639)
EVYPFGIVGM

SEQ ID NO: 11200 - protein, 9 aa, synthetic construct
  REGION 1..9: note = Zinc finger MIZ domain-containing protein 2 (271-279)
EVYPGQQYL

SEQ ID NO: 11201 - protein, 9 aa, synthetic construct
  REGION 1..9: note = Uncharacterized protein C18orf8 (437-445)
EYIRSLNQF

SEQ ID NO: 11202 - protein, 9 aa, synthetic construct
  REGION 1..9: note = Oxysterol-binding protein (17-25)
EYMEHVYLI

SEQ ID NO: 11203 - protein, 9 aa, synthetic construct
  REGION 1..9: note = Insulin receptor substrate 2 (597-605)
EYTLMRATF

SEQ ID NO: 11204 - protein, 9 aa, synthetic construct
  REGION 1..9: note = Striatin-interacting protein 2 (594-602)
EYVSQHLVF

SEQ ID NO: 11205 - protein, 9 aa, synthetic construct
  REGION 1..9: note = Phospholipid hydroperoxide glutathione peroxidase, mitochondrial (119-127)
FAAGYNVKF

SEQ ID NO: 11206 - protein, 8 aa, synthetic construct
  REGION 1..8: note = Tuftelin-interacting protein 11 (132-139)
FAGGTKSF

SEQ ID NO: 11207 - protein, 11 aa, synthetic construct
  REGION 1..11: note = Sister chromatid cohesion protein PDS5 homolog A (273-283)
FAIDPHLLLSV

SEQ ID NO: 11208 - protein, 9 aa, synthetic construct
  REGION 1..9: note = ATP-dependent RNA helicase DDX24 (247-255)
FAIPMIHAV

SEQ ID NO: 11209 - protein, 9 aa, synthetic construct
  REGION 1..9: note = Clathrin heavy chain 1 (1594-1602)
FAMPYFIQV

SEQ ID NO: 11210 - protein, 9 aa, synthetic construct
  REGION 1..9: note = Splicing factor, proline- and glutamine-rich (486-494)
FEYEYSQRW

SEQ ID NO: 11211 - protein, 9 aa, synthetic construct
  REGION 1..9: note = Serine/threonine-protein phosphatase PP1-beta catalytic subunit (226-234)
FGADVVSKF

SEQ ID NO: 11212 - protein, 9 aa, synthetic construct
  REGION 1..9: note = Chromatin assembly factor 1 subunit B (228-236)
FHDDSMKSF

SEQ ID NO: 11213 - protein, 9 aa, synthetic construct
  REGION 1..9: note = Endoplasmin (422-430)
FHDMMPKYL

SEQ ID NO: 11214 - protein, 9 aa, synthetic construct
  REGION 1..9: note = Protein transport protein Sec23B (630-638)
FHGPPEPVL

SEQ ID NO: 11215 - protein, 9 aa, synthetic construct
  REGION 1..9: note = Coatomer subunit alpha (101-109)
FHHEYPWIL

SEQ ID NO: 11216 - protein, 9 aa, synthetic construct
  REGION 1..9: note = Putative heat shock protein HSP 90-alpha A5 (3-11)
FHHVGQAGL

SEQ ID NO: 11217 - protein, 9 aa, synthetic construct
  REGION 1..9: note = Phosphatidylinositol 4,5-bisphosphate 3-kinase catalytic subunit gamma isoform (961-969)
FHIDFGHIL

SEQ ID NO: 11218 - protein, 9 aa, synthetic construct
  REGION 1..9: note = Fas apoptotic inhibitory molecule 3 (252-260)
FHILIPTIL

SEQ ID NO: 11219 - protein, 9 aa, synthetic construct
  REGION 1..9: note = Rho GTPase-activating protein 4 (276-284)
FHLALGQVL

SEQ ID NO: 11220 - protein, 10 aa, synthetic construct
  REGION 1..10: note = Proteasome subunit alpha type-5 (154-163)
FHMDPSGTFV

SEQ ID NO: 11221 - protein, 9 aa, synthetic construct
  REGION 1..9: note = Anaphase-promoting complex subunit 1 (1137-1145)
FHNGVAAGL

SEQ ID NO: 11222 - protein, 9 aa, synthetic construct
  REGION 1..9: note = Ubiquitin-conjugating enzyme E2 J1 (237-245)
FHQPTQPVA

SEQ ID NO: 11223 - protein, 9 aa, synthetic construct
  REGION 1..9: note = Mitotic checkpoint serine/threonine-protein kinase BUB1 (438-446)
FHTTPNTSL

SEQ ID NO: 11224 - protein, 9 aa, synthetic construct
  REGION 1..9: note = WD repeat-containing protein 47 (348-356)
FHYPGVQNL

SEQ ID NO: 11225 - protein, 10 aa, synthetic construct
  REGION 1..10: note = Probable ubiquitin carboxyl-terminal hydrolase FAF-X (1466-1475)
FIFPASNVYL

SEQ ID NO: 11226 - protein, 9 aa, synthetic construct
  REGION 1..9: note = Endoplasmic reticulum aminopeptidase 1 (249-257)
FIISDFESV

SEQ ID NO: 11227 - protein, 9 aa, synthetic construct
  REGION 1..9: note = Protein kinase C-binding protein 1 (213-221)
FLADAKWIL

SEQ ID NO: 11228 - protein, 9 aa, synthetic construct
  REGION 1..9: note = Unconventional myosin-Ic (773-781)
FLDHVRTSF

SEQ ID NO: 11229 - protein, 9 aa, synthetic construct
  REGION 1..9: note = E3 ubiquitin-protein ligase RNF216 (134-142)
FLDLGPPGI

SEQ ID NO: 11230 - protein, 9 aa, synthetic construct
  REGION 1..9: note = UDP-glucose:glycoprotein glucosyltransferase 2 (97-105)
FLDNLHINL

SEQ ID NO: 11231 - protein, 9 aa, synthetic construct
  REGION 1..9: note = Proteasome-associated protein ECM29 homolog (801-809)
FLDSTSPLL

SEQ ID NO: 11232 - protein, 9 aa, synthetic construct
  REGION 1..9: note = Eukaryotic translation initiation factor 3 subunit M (218-226)
FLFDHLLTL

SEQ ID NO: 11233 - protein, 9 aa, synthetic construct
  REGION 1..9: note = HEAT repeat-containing protein 1 (2003-2011)
FLFDTQHFI

SEQ ID NO: 11234 - protein, 10 aa, synthetic construct
  REGION 1..10: note = Apolipoprotein L1 (239-248)
FLGENISNFL

SEQ ID NO: 11235 - protein, 9 aa, synthetic construct
  REGION 1..9: note = WASH complex subunit strumpellin (1046-1054)
FLIAQLPKL

SEQ ID NO: 11236 - protein, 10 aa, synthetic construct
  REGION 1..10: note = Tensin-1 (1527-1536)
FLIETGPRGV

SEQ ID NO: 11237 - protein, 9 aa, synthetic construct
  REGION 1..9: note = Plexin-B2 (395-403)
FLINFIHTL

SEQ ID NO: 11238 - protein, 9 aa, synthetic construct
  REGION 1..9: note = cAMP-specific 3',5'-cyclic phosphodiesterase 4B (382-390)
FLINTNSEL

SEQ ID NO: 11239 - protein, 10 aa, synthetic construct
  REGION 1..10: note = Serine/threonine-protein kinase 11-interacting protein (316-325)
FLLDGKVLSL

SEQ ID NO: 11240 - protein, 11 aa, synthetic construct
  REGION 1..11: note = Tyrosine-protein kinase BAZ1B (291-301)
FLLDPYKYMTL

SEQ ID NO: 11241 - protein, 10 aa, synthetic construct
  REGION 1..10: note = Transmembrane emp24 domain-containing protein 10 (22-31)
FLLGPRLVLA

SEQ ID NO: 11242 - protein, 9 aa, synthetic construct
  REGION 1..9: note = TBC1 domain family member 13 (329-337)
FLLPDVIRI

SEQ ID NO: 11243 - protein, 10 aa, synthetic construct
  REGION 1..10: note = Atlastin-3 (263-272)
FLLPHPGLQV

SEQ ID NO: 11244 - protein, 9 aa, synthetic construct
  REGION 1..9: note = Glycerol-3-phosphate acyltransferase 4 (174-182)
FLLPLRIAL

SEQ ID NO: 11245 - protein, 10 aa, synthetic construct
  REGION 1..10: note = ATP-dependent RNA helicase DDX24 (582-591)
FLMQYPGRSL

SEQ ID NO: 11246 - protein, 9 aa, synthetic construct
  REGION 1..9: note = Quinone oxidoreductase-like protein 1 (284-292)
FLNDEVWNL

SEQ ID NO: 11247 - protein, 9 aa, synthetic construct
  REGION 1..9: note = Spectrin beta chain, non-erythrocytic 1 (1184-1192)
FLNNQEYVL

SEQ ID NO: 11248 - protein, 9 aa, synthetic construct
  REGION 1..9: note = Bifunctional coenzyme A synthase (125-133)
FLPPLPTSV

SEQ ID NO: 11249 - protein, 9 aa, synthetic construct
  REGION 1..9: note = RNA-binding protein EWS (550-558)
FLPPPFPPP

SEQ ID NO: 11250 - protein, 9 aa, synthetic construct
  REGION 1..9: note = Arginyl aminopeptidase-like 1 (87-95)
FLPPSFPIV

SEQ ID NO: 11251 - protein, 10 aa, synthetic construct
  REGION 1..10: note = Exosome complex component RRP4 (134-143)
FLQEGDLISA

SEQ ID NO: 11252 - protein, 10 aa, synthetic construct
  REGION 1..10: note = Cirhin (214-223)
FLSDGTIISV

SEQ ID NO: 11253 - protein, 9 aa, synthetic construct
  REGION 1..9: note = 26S proteasome non-ATPase regulatory subunit 1 (260-268)
FLSSVIQNL

SEQ ID NO: 11254 - protein, 9 aa, synthetic construct
  REGION 1..9: note = Acidic leucine-rich nuclear phosphoprotein 32 family member A (46-54)
FLSTINVGL

SEQ ID NO: 11255 - protein, 10 aa, synthetic construct
  REGION 1..10: note = Mannosyl-oligosaccharide glucosidase (448-457)
FLWDEGFHQL

SEQ ID NO: 11256 - protein, 9 aa, synthetic construct
  REGION 1..9: note = rRNA methyltransferase 1, mitochondrial (246-254)
FLWERPTLL

SEQ ID NO: 11257 - protein, 8 aa, synthetic construct
  REGION 1..8: note = Transmembrane protein 41B (141-148)
FLYPFPLA

SEQ ID NO: 11258 - protein, 9 aa, synthetic construct
  REGION 1..9: note = tRNA-splicing endonuclease subunit Sen15 (185-193)
FMLPDPQNI

SEQ ID NO: 11259 - protein, 11 aa, synthetic construct
  REGION 1..11: note = tRNA-splicing endonuclease subunit Sen15 (185-195)
FMLPDPQNISL

SEQ ID NO: 11260 - protein, 9 aa, synthetic construct
  REGION 1..9: note = Intraflagellar transport protein 172 homolog (435-443)
FMNPHLISV

SEQ ID NO: 11261 - protein, 9 aa, synthetic construct
  REGION 1..9: note = Ecto-NOX disulfide-thiol exchanger 1 (187-195)
FMVDKAIYL

SEQ ID NO: 11262 - protein, 9 aa, synthetic construct
  REGION 1..9: note = Integrin alpha-4 (949-957)
FPEPNPRVI

SEQ ID NO: 11263 - protein, 9 aa, synthetic construct
  REGION 1..9: note = Protein RRP5 homolog (1250-1258)
FPFGKIGTV

SEQ ID NO: 11264 - protein, 9 aa, synthetic construct
  REGION 1..9: note = Zinc finger protein 662 (74-82)
FPFPKPALI

SEQ ID NO: 11265 - protein, 10 aa, synthetic construct
  REGION 1..10: note = U2 small nuclear ribonucleoprotein B'' (72-81)
FPFYGKPMRI

SEQ ID NO: 11266 - protein, 9 aa, synthetic construct
  REGION 1..9: note = Cyclin-dependent kinase 9 (59-67)
FPITALREI

SEQ ID NO: 11267 - protein, 8 aa, synthetic construct
  REGION 1..8: note = HLA class II histocompatibility antigen, DP alpha 1 chain (123-130)
FPKEPVEL

SEQ ID NO: 11268 - protein, 9 aa, synthetic construct
  REGION 1..9: note = Poly(A)-specific ribonuclease PARN (273-281)
FPRLLDTKL

SEQ ID NO: 11269 - protein, 9 aa, synthetic construct
  REGION 1..9: note = Glutamine-fructose-6-phosphate aminotransferase (isomerizing) 2 (671-679)
FPRNLAKSV

SEQ ID NO: 11270 - protein, 9 aa, synthetic construct
  REGION 1..9: note = AT-rich interactive domain-containing protein 2 (669-677)
FPVQGVHTV

SEQ ID NO: 11271 - protein, 9 aa, synthetic construct
  REGION 1..9: note = Putative heat shock protein HSP 90-beta 2 (17-25)
FQAEIAQLM

SEQ ID NO: 11272 - protein, 9 aa, synthetic construct
  REGION 1..9: note = Transcription intermediary factor 1-alpha (890-898)
FQDPVPLTV

SEQ ID NO: 11273 - protein, 9 aa, synthetic construct
  REGION 1..9: note = Integrin beta-7 (790-798)
FQEADSPTL

SEQ ID NO: 11274 - protein, 9 aa, synthetic construct
  REGION 1..9: note = Nicotinate phosphoribosyltransferase (342-350)
FQVPWLESV

SEQ ID NO: 11275 - protein, 9 aa, synthetic construct
  REGION 1..9: note = 5-aminolevulinate synthase, nonspecific, mitochondrial (214-222)
FQYDRFFEK

SEQ ID NO: 11276 - protein, 9 aa, synthetic construct
  REGION 1..9: note = Asparagine synthetase (glutamine-hydrolyzing) (11-19)
FRFENVNGY

SEQ ID NO: 11277 - protein, 10 aa, synthetic construct
  REGION 1..10: note = Probable ATP-dependent RNA helicase DDX5 (558-567)
FRTGNPTGTY

SEQ ID NO: 11278 - protein, 10 aa, synthetic construct
  REGION 1..10: note = Protein transport protein Sec31A (398-407)
FSFGGKLVTF

SEQ ID NO: 11279 - protein, 9 aa, synthetic construct
  REGION 1..9: note = Polymeric immunoglobulin receptor (132-140)
FSVVINQLR

SEQ ID NO: 11280 - protein, 9 aa, synthetic construct
  REGION 1..9: note = Neutral amino acid transporter B(0) (89-97)
FVFPGELLL

SEQ ID NO: 11281 - protein, 9 aa, synthetic construct
  REGION 1..9: note = Clathrin heavy chain 1 (783-791)
FVHDLVLYL

SEQ ID NO: 11282 - protein, 9 aa, synthetic construct
  REGION 1..9: note = Actin-binding protein anillin (958-966)
FVLDKVPFL

SEQ ID NO: 11283 - protein, 8 aa, synthetic construct
  REGION 1..8: note = Myosin light polypeptide 6 (150-157)
FVRHILSG

SEQ ID NO: 11284 - protein, 11 aa, synthetic construct
  REGION 1..11: note = Alkyldihydroxyacetonephosphate synthase, peroxisomal (497-507)
GEDNGQRGYLL

SEQ ID NO: 11285 - protein, 9 aa, synthetic construct
  REGION 1..9: note = Putative deoxyribonuclease TATDN3 (48-56)
GEFEKIMQL

SEQ ID NO: 11286 - protein, 9 aa, synthetic construct
  REGION 1..9: note = Zinc finger protein 428 (174-182)
GELHGHFML

SEQ ID NO: 11287 - protein, 9 aa, synthetic construct
  REGION 1..9: note = Patatin-like phospholipase domain-containing protein 2 (124-132)
GENVIISHF

SEQ ID NO: 11288 - protein, 9 aa, synthetic construct
  REGION 1..9: note = DAZ-associated protein 1 (125-133)
GETELREYF

SEQ ID NO: 11289 - protein, 11 aa, synthetic construct
  REGION 1..11: note = Nuclear pore complex protein Nup93 (311-321)
GEVEGHPVWAL

SEQ ID NO: 11290 - protein, 9 aa, synthetic construct
  REGION 1..9: note = Elongation factor 2 (120-128)
GEVSARQEL

SEQ ID NO: 11291 - protein, 9 aa, synthetic construct
  REGION 1..9: note = WD repeat-containing protein 61 (188-196)
GHAMPIRSL

SEQ ID NO: 11292 - protein, 9 aa, synthetic construct
  REGION 1..9: note = Elongator complex protein 2 (237-245)
GHFDGVQDL

SEQ ID NO: 11293 - protein, 9 aa, synthetic construct
  REGION 1..9: note = Neuropathy target esterase (188-196)
GHFEKPLFL

SEQ ID NO: 11294 - protein, 10 aa, synthetic construct
  REGION 1..10: note = Protein SCAF8 (919-928)
GILGIQPPSV

SEQ ID NO: 11295 - protein, 10 aa, synthetic construct
  REGION 1..10: note = MKL/myocardin-like protein 2 (440-449)
GLAAGGIVAV

SEQ ID NO: 11296 - protein, 10 aa, synthetic construct
  REGION 1..10: note = TRPM8 channel-associated factor 2 (73-82)
GLAPFLLNAV

SEQ ID NO: 11297 - protein, 9 aa, synthetic construct
  REGION 1..9: note = Neurobeachin-like protein 2 (789-797)
GLAPKPVQV

SEQ ID NO: 11298 - protein, 9 aa, synthetic construct
  REGION 1..9: note = Rapamycin-insensitive companion of mTOR (711-719)
GLARVILSK

SEQ ID NO: 11299 - protein, 11 aa, synthetic construct
  REGION 1..11: note = Nuclear pore complex protein Nup107 (915-925)
GLDPLGYEIQL

SEQ ID NO: 11300 - protein, 9 aa, synthetic construct
  REGION 1..9: note = Elongation factor 2 (217-225)
GLHGWAFTL

SEQ ID NO: 11301 - protein, 9 aa, synthetic construct
  REGION 1..9: note = CCR4-NOT transcription complex subunit 1 (373-381)
GLHNVVYGI

SEQ ID NO: 11302 - protein, 9 aa, synthetic construct
  REGION 1..9: note = DNA-dependent protein kinase catalytic subunit (2509-2517)
GLIDENPGL

SEQ ID NO: 11303 - protein, 9 aa, synthetic construct
  REGION 1..9: note = Structural maintenance of chromosomes flexible hinge domain-containing protein 1 (829-837)
GLLDLPFRV

SEQ ID NO: 11304 - protein, 10 aa, synthetic construct
  REGION 1..10: note = F-box only protein 22 (210-219)
GLLDNPELRV

SEQ ID NO: 11305 - protein, 11 aa, synthetic construct
  REGION 1..11: note = Nuclear receptor subfamily 2 group C member 2 (238-248)
GLLDPGMLVNI

SEQ ID NO: 11306 - protein, 9 aa, synthetic construct
  REGION 1..9: note = Protein zer-1 homolog (593-601)
GLLGNVAEV

SEQ ID NO: 11307 - protein, 9 aa, synthetic construct
  REGION 1..9: note = Protein zyg-11 homolog B (299-307)
GLLNNIAEV

SEQ ID NO: 11308 - protein, 9 aa, synthetic construct
  REGION 1..9: note = Lysophospholipid acyltransferase 7 (141-149)
GLLPDVPSL

SEQ ID NO: 11309 - protein, 9 aa, synthetic construct
  REGION 1..9: note = E3 ubiquitin-protein ligase UBR4 (1708-1716)
GLLRIIPYL

SEQ ID NO: 11310 - protein, 9 aa, synthetic construct
  REGION 1..9: note = Protein ELYS (929-937)
GLMEDLLKL

SEQ ID NO: 11311 - protein, 9 aa, synthetic construct
  REGION 1..9: note = Exocyst complex component 4 (173-181)
GLSDLRLEL

SEQ ID NO: 11312 - protein, 9 aa, synthetic construct
  REGION 1..9: note = Nuclear pore complex protein Nup155 (139-147)
GLSETILAV

SEQ ID NO: 11313 - protein, 9 aa, synthetic construct
  REGION 1..9: note = Leucine-rich repeat and calponin homology domain-containing protein 3 (750-758)
GLSQVAVTV

SEQ ID NO: 11314 - protein, 9 aa, synthetic construct
  REGION 1..9: note = Glucocorticoid modulatory element-binding protein 1 (503-511)
GLTSAIQAV

SEQ ID NO: 11315 - protein, 10 aa, synthetic construct
  REGION 1..10: note = Complex I assembly factor TIMMDC1, mitochondrial (187-196)
GLVAGGIIGA

SEQ ID NO: 11316 - protein, 9 aa, synthetic construct
  REGION 1..9: note = Serine-tRNA ligase, cytoplasmic (31-39)
GLVDQLVKA

SEQ ID NO: 11317 - protein, 9 aa, synthetic construct
  REGION 1..9: note = KATNB1-like protein 1 (274-282)
GLWEQENHL

SEQ ID NO: 11318 - protein, 9 aa, synthetic construct
  REGION 1..9: note = Rotatin (1413-1421)
GLWGTVVNI

SEQ ID NO: 11319 - protein, 10 aa, synthetic construct
  REGION 1..10: note = Melanoma-associated antigen 10 (254-263)
GLYDGMEHLI

SEQ ID NO: 11320 - protein, 9 aa, synthetic construct
  REGION 1..9: note = tRNA (adenine(58)-N(1))-methyltransferase non-catalytic subunit TRM6 (83-91)
GLYEFPLNK

SEQ ID NO: 11321 - protein, 9 aa, synthetic construct
  REGION 1..9: note = Putative ATP-dependent RNA helicase DHX30 (983-991)
GLYPNLIQV

SEQ ID NO: 11322 - protein, 10 aa, synthetic construct
  REGION 1..10: note = Catenin alpha-1 (725-734)
GMASLNLPAV

SEQ ID NO: 11323 - protein, 9 aa, synthetic construct
  REGION 1..9: note = RNA-binding protein 12 (509-517)
GMLEKIDMI

SEQ ID NO: 11324 - protein, 9 aa, synthetic construct
  REGION 1..9: note = Probable ATP-dependent RNA helicase YTHDC2 (978-986)
GMYPNLVHV

SEQ ID NO: 11325 - protein, 9 aa, synthetic construct
  REGION 1..9: note = Heterogeneous nuclear ribonucleoprotein M (480-488)
GPAIERMGL

SEQ ID NO: 11326 - protein, 9 aa, synthetic construct
  REGION 1..9: note = ETS translocation variant 5 (173-181)
GPAPAPHSL

SEQ ID NO: 11327 - protein, 11 aa, synthetic construct
  REGION 1..11: note = Filamin-A (852-862)
GPGLSRTGVEL

SEQ ID NO: 11328 - protein, 10 aa, synthetic construct
  REGION 1..10: note = Splicing factor, proline- and glutamine-rich (215-224)
GPKPGGGPGL

SEQ ID NO: 11329 - protein, 9 aa, synthetic construct
  REGION 1..9: note = Peptidyl-prolyl cis-trans isomerase-like 2 (134-142)
GPNSNRSQF

SEQ ID NO: 11330 - protein, 10 aa, synthetic construct
  REGION 1..10: note = RuvB-like 1 (70-79)
GPPGTGKTAL

SEQ ID NO: 11331 - protein, 9 aa, synthetic construct
  REGION 1..9: note = Transmembrane protein 214 (461-469)
GPRLPWTRL

SEQ ID NO: 11332 - protein, 9 aa, synthetic construct
  REGION 1..9: note = PHD finger protein 3 (205-213)
GQIEVVPEV

SEQ ID NO: 11333 - protein, 9 aa, synthetic construct
  REGION 1..9: note = Nucleolar RNA helicase 2 (190-198)
GRAPQVLVL

SEQ ID NO: 11334 - protein, 10 aa, synthetic construct
  REGION 1..10: note = Ran-binding protein 9 (76-85)
GRDGYMGIGL

SEQ ID NO: 11335 - protein, 9 aa, synthetic construct
  REGION 1..9: note = COP9 signalosome complex subunit 5 (281-289)
GRGSFMLGL

SEQ ID NO: 11336 - protein, 9 aa, synthetic construct
  REGION 1..9: note = WD repeat-containing protein 81 (717-725)
GRILLPEGF

SEQ ID NO: 11337 - protein, 10 aa, synthetic construct
  REGION 1..10: note = Neutral amino acid transporter A (111-120)
GRLGGIAVAY

SEQ ID NO: 11338 - protein, 10 aa, synthetic construct
  REGION 1..10: note = Spectrin beta chain, non-erythrocytic 1 (822-831)
GRLSGIEERY

SEQ ID NO: 11339 - protein, 11 aa, synthetic construct
  REGION 1..11: note = ATP-binding cassette sub-family F member 3 (595-605)
GRYGISGELAM

SEQ ID NO: 11340 - protein, 9 aa, synthetic construct
  REGION 1..9: note = Stathmin 1/oncoprotein 18 (118-126)
GSHFISHLS

SEQ ID NO: 11341 - protein, 9 aa, synthetic construct
  REGION 1..9: note = AP-5 complex subunit beta-1 (317-325)
GTAQLTLLH

SEQ ID NO: 11342 - protein, 9 aa, synthetic construct
  REGION 1..9: note = UPF0428 protein CXorf56 (73-81)
GTLIDNQFK

SEQ ID NO: 11343 - protein, 9 aa, synthetic construct
  REGION 1..9: note = PX domain-containing protein kinase-like protein (149-157)
GTLKDLIYK

SEQ ID NO: 11344 - protein, 9 aa, synthetic construct
  REGION 1..9: note = Putative inactive carbonic anhydrase 5B-like protein (13-21)
GTLSSWNLK

SEQ ID NO: 11345 - protein, 9 aa, synthetic construct
  REGION 1..9: note = Small integral membrane protein 4 (34-42)
GTMEWIMIK

SEQ ID NO: 11346 - protein, 9 aa, synthetic construct
  REGION 1..9: note = Arf-GAP with SH3 domain, ANK repeat and PH domain-containing protein 2 (482-490)
GTSELLLAK

SEQ ID NO: 11347 - protein, 9 aa, synthetic construct
  REGION 1..9: note = DNA cross-link repair 1A protein (877-885)
GTYSIGKEK

SEQ ID NO: 11348 - protein, 9 aa, synthetic construct
  REGION 1..9: note = Proteasome subunit beta type-3 (184-192)
GVIVHIIEK

SEQ ID NO: 11349 - protein, 9 aa, synthetic construct
  REGION 1..9: note = Tensin-1 (71-79)
HAKVLEFGW

SEQ ID NO: 11350 - protein, 9 aa, synthetic construct
  REGION 1..9: note = Mothers against decapentaplegic homolog 2 (291-299)
HASQPSLTV

SEQ ID NO: 11351 - protein, 9 aa, synthetic construct
  REGION 1..9: note = TIP41-like protein (203-211)
HEADKTYML

SEQ ID NO: 11352 - protein, 9 aa, synthetic construct
  REGION 1..9: note = Zinc finger protein 655 (167-175)
HEPEKSFSL

SEQ ID NO: 11353 - protein, 8 aa, synthetic construct
  REGION 1..8: note = Retinol dehydrogenase 10 (221-228)
HESLSHEL

SEQ ID NO: 11354 - protein, 9 aa, synthetic construct
  REGION 1..9: note = Hippocampus abundant transcript-like protein 1 (50-58)
HETFSQHTF

SEQ ID NO: 11355 - protein, 9 aa, synthetic construct
  REGION 1..9: note = N-acetyltransferase 9 (4-12)
HEWMKSEEL

SEQ ID NO: 11356 - protein, 9 aa, synthetic construct
  REGION 1..9: note = Tubulin beta-4B chain (28-36)
HGIDPTGTY

SEQ ID NO: 11357 - protein, 9 aa, synthetic construct
  REGION 1..9: note = MOB kinase activator 3A (169-177)
HHFDRIAQM

SEQ ID NO: 11358 - protein, 9 aa, synthetic construct
  REGION 1..9: note = Fanconi anemia group I protein (98-106)
HHFPGPLLV

SEQ ID NO: 11359 - protein, 9 aa, synthetic construct
  REGION 1..9: note = Transcriptional repressor protein YY1 (78-86)
HHHPPMIAL

SEQ ID NO: 11360 - protein, 9 aa, synthetic construct
  REGION 1..9: note = Myotubularin-related protein 6 (51-59)
HHIASVEKL

SEQ ID NO: 11361 - protein, 9 aa, synthetic construct
  REGION 1..9: note = Kelch-like protein 6 (219-227)
HHILKSDDL

SEQ ID NO: 11362 - protein, 10 aa, synthetic construct
  REGION 1..10: note = Squalene synthase (268-277)
HHIPDVITYL

SEQ ID NO: 11363 - protein, 8 aa, synthetic construct
  REGION 1..8: note = N-alpha-acetyltransferase 38, NatC auxiliary subunit (107-114)
HHIVSIEV

SEQ ID NO: 11364 - protein, 10 aa, synthetic construct
  REGION 1..10: note = Fructose-bisphosphate aldolase A (220-229)
HHIYLEGTLL

SEQ ID NO: 11365 - protein, 9 aa, synthetic construct
  REGION 1..9: note = Signal recognition particle 54 kDa protein (472-480)
HHMGGMAGL

SEQ ID NO: 11366 - protein, 10 aa, synthetic construct
  REGION 1..10: note = U1 small nuclear ribonucleoprotein A (155-164)
HHMPGQPPYM

SEQ ID NO: 11367 - protein, 8 aa, synthetic construct
  REGION 1..8: note = DNA topoisomerase 2-alpha (558-565)
HHNWPSLL

SEQ ID NO: 11368 - protein, 9 aa, synthetic construct
  REGION 1..9: note = Ubiquitin-associated protein 2-like (890-898)
HHTTQQTFL

SEQ ID NO: 11369 - protein, 10 aa, synthetic construct
  REGION 1..10: note = Dedicator of cytokinesis protein 2 (573-582)
HHVENKGATL

SEQ ID NO: 11370 - protein, 9 aa, synthetic construct
  REGION 1..9: note = Oxidative stress-induced growth inhibitor 2 (114-122)
HHYIPHVVL

SEQ ID NO: 11371 - protein, 10 aa, synthetic construct
  REGION 1..10: note = 60S ribosomal protein L30 (72-81)
HHYSGNNIEL

SEQ ID NO: 11372 - protein, 9 aa, synthetic construct
  REGION 1..9: note = Ribosomal L1 domain-containing protein 1 (227-235)
HIIENIVAV

SEQ ID NO: 11373 - protein, 9 aa, synthetic construct
  REGION 1..9: note = E3 ubiquitin-protein ligase TRIM11 (224-232)
HLAELIAEL

SEQ ID NO: 11374 - protein, 9 aa, synthetic construct
  REGION 1..9: note = Probable E3 ubiquitin-protein ligase HERC1 (1903-1911)
HLGDFLVFL

SEQ ID NO: 11375 - protein, 9 aa, synthetic construct
  REGION 1..9: note = Talin-1 (1711-1719)
HLIEPLANA

SEQ ID NO: 11376 - protein, 9 aa, synthetic construct
  REGION 1..9: note = Transmembrane protein 41B (196-204)
HLINYIIFL

SEQ ID NO: 11377 - protein, 9 aa, synthetic construct
  REGION 1..9: note = tRNA-specific adenosine deaminase 1 (169-177)
HLLEEPIYL

SEQ ID NO: 11378 - protein, 9 aa, synthetic construct
  REGION 1..9: note = Nuclear pore complex protein Nup205 (808-816)
HLLNESPML

SEQ ID NO: 11379 - protein, 10 aa, synthetic construct
  REGION 1..10: note = Activating transcription factor 7-interacting protein 1 (1036-1045)
HLLPTAPTTV

SEQ ID NO: 11380 - protein, 9 aa, synthetic construct
  REGION 1..9: note = Ras GTPase-activating-like protein IQGAP1 (1247-1255)
HLSIINEYL

SEQ ID NO: 11381 - protein, 9 aa, synthetic construct
  REGION 1..9: note = Nucleoprotein TPR (907-915)
HLSNMEVQV

SEQ ID NO: 11382 - protein, 9 aa, synthetic construct
  REGION 1..9: note = Next to BRCA1 gene 1 protein (330-338)
HLWNSIHGL

SEQ ID NO: 11383 - protein, 11 aa, synthetic construct
  REGION 1..11: note = E3 ubiquitin-protein ligase HUWE1 (111-121)
HLYSSIEHLTT

SEQ ID NO: 11384 - protein, 9 aa, synthetic construct
  REGION 1..9: note = Transmembrane protein 248 (135-143)
HLYSTILGH

SEQ ID NO: 11385 - protein, 9 aa, synthetic construct
  REGION 1..9: note = E3 ubiquitin-protein ligase RNF167 (2-10)
HPAAFPLPV

SEQ ID NO: 11386 - protein, 9 aa, synthetic construct
  REGION 1..9: note = T-complex protein 1 subunit theta (7-15)
HPAAKMIVM

SEQ ID NO: 11387 - protein, 9 aa, synthetic construct
  REGION 1..9: note = Ras GTPase-activating protein-binding protein 1 (336-344)
HPDSHQLFI

SEQ ID NO: 11388 - protein, 11 aa, synthetic construct
  REGION 1..11: note = Sterol regulatory element-binding protein 2 (512-522)
HPHSGSGRSVL

SEQ ID NO: 11389 - protein, 9 aa, synthetic construct
  REGION 1..9: note = AP-2 complex subunit beta (191-199)
HPNSNLLDL

SEQ ID NO: 11390 - protein, 9 aa, synthetic construct
  REGION 1..9: note = Catenin beta-1 (499-507)
HPPSHWPLI

SEQ ID NO: 11391 - protein, 10 aa, synthetic construct
  REGION 1..10: note = Uncharacterized protein C20orf196 (108-117)
HPQPGSANSL

SEQ ID NO: 11392 - protein, 9 aa, synthetic construct
  REGION 1..9: note = Polycomb protein EED (185-193)
HPRDPNLLL

SEQ ID NO: 11393 - protein, 10 aa, synthetic construct
  REGION 1..10: note = Hypoxia-inducible factor 1-alpha (708-717)
HPRSPNVLSV

SEQ ID NO: 11394 - protein, 9 aa, synthetic construct
  REGION 1..9: note = Exosome complex component RRP46 (111-119)
HPRTSITVV

SEQ ID NO: 11395 - protein, 9 aa, synthetic construct
  REGION 1..9: note = Kelch-like protein 11 (343-351)
HPTSHVSLL

SEQ ID NO: 11396 - protein, 9 aa, synthetic construct
  REGION 1..9: note = Cytoplasmic dynein 1 heavy chain 1 (331-339)
HRLLLIQAF

SEQ ID NO: 11397 - protein, 9 aa, synthetic construct
  REGION 1..9: note = Chromodomain-helicase-DNA-binding protein 3 (1077-1085)
HRVLIFSQM

SEQ ID NO: 11398 - protein, 9 aa, synthetic construct
  REGION 1..9: note = Helicase SRCAP (1801-1809)
HRVLIFTQM

SEQ ID NO: 11399 - protein, 9 aa, synthetic construct
  REGION 1..9: note = Endothelial PAS domain-containing protein 1 (15-23)
HSMDMKFTY

SEQ ID NO: 11400 - protein, 10 aa, synthetic construct
  REGION 1..10: note = Histone-binding protein RBBP7 (375-384)
HTAKISDFSW

SEQ ID NO: 11401 - protein, 9 aa, synthetic construct
  REGION 1..9: note = Adenylyl cyclase-associated protein 1 (23-31)
HTSDMHRGY

SEQ ID NO: 11402 - protein, 9 aa, synthetic construct
  REGION 1..9: note = POTE ankyrin domain family member I (78-86)
HTVPIYEGY

SEQ ID NO: 11403 - protein, 10 aa, synthetic construct
  REGION 1..10: note = Thioredoxin-interacting protein (164-173)
HTYLANGQTK

SEQ ID NO: 11404 - protein, 9 aa, synthetic construct
  REGION 1..9: note = Activity-dependent neuroprotector homeobox protein (162-170)
HVAAPYIAK

SEQ ID NO: 11405 - protein, 9 aa, synthetic construct
  REGION 1..9: note = DNA-binding protein inhibitor ID-4 (93-101)
HVIDYILDL

SEQ ID NO: 11406 - protein, 10 aa, synthetic construct
  REGION 1..10: note = Secernin-2 (133-142)
HVITGLLEHY

SEQ ID NO: 11407 - protein, 11 aa, synthetic construct
  REGION 1..11: note = ETS-related transcription factor Elf-1 (38-48)
HVPGADILNSY

SEQ ID NO: 11408 - protein, 10 aa, synthetic construct
  REGION 1..10: note = Cholinesterase (154-163)
HVYDGKFLAR

SEQ ID NO: 11409 - protein, 9 aa, synthetic construct
  REGION 1..9: note = TCDD-inducible poly (ADP-ribose) polymerase (387-395)
HYILHNSFF

SEQ ID NO: 11410 - protein, 9 aa, synthetic construct
  REGION 1..9: note = Proliferation-associated protein 2G4 (20-28)
IAFPTSISV

SEQ ID NO: 11411 - protein, 9 aa, synthetic construct
  REGION 1..9: note = Growth hormone-inducible transmembrane protein (143-151)
IAISRTPVL

SEQ ID NO: 11412 - protein, 10 aa, synthetic construct
  REGION 1..10: note = TRPM8 channel-associated factor 1 (376-385)
IALWPPVREK

SEQ ID NO: 11413 - protein, 9 aa, synthetic construct
  REGION 1..9: note = Kinesin-like protein KIF18B (388-396)
IARLPSSTL

SEQ ID NO: 11414 - protein, 9 aa, synthetic construct
  REGION 1..9: note = Eukaryotic initiation factor 4A-II (97-105)
IEFKETQAL

SEQ ID NO: 11415 - protein, 11 aa, synthetic construct
  REGION 1..11: note = Casein kinase II subunit alpha (263-273)
IELDPRFNDIL

SEQ ID NO: 11416 - protein, 9 aa, synthetic construct
  REGION 1..9: note = Methionine adenosyltransferase 2 subunit beta (82-90)
IHDFQPHVI

SEQ ID NO: 11417 - protein, 9 aa, synthetic construct
  REGION 1..9: note = Ubiquitin-like protein 5 (62-70)
IHDGMNLEL

SEQ ID NO: 11418 - protein, 11 aa, synthetic construct
  REGION 1..11: note = NudC domain-containing protein 1 (119-129)
IHFSSSTWVTL

SEQ ID NO: 11419 - protein, 9 aa, synthetic construct
  REGION 1..9: note = DNA topoisomerase 2-alpha (557-565)
IHHNWPSLL

SEQ ID NO: 11420 - protein, 10 aa, synthetic construct
  REGION 1..10: note = Probable ATP-dependent RNA helicase DDX5 (298-307)
IHINIGALEL

SEQ ID NO: 11421 - protein, 9 aa, synthetic construct
  REGION 1..9: note = Nucleolar protein 58 (107-115)
IHSPVVNEL

SEQ ID NO: 11422 - protein, 9 aa, synthetic construct
  REGION 1..9: note = ATPase family AAA domain-containing protein 2B (521-529)
IHSSIVSTL

SEQ ID NO: 11423 - protein, 9 aa, synthetic construct
  REGION 1..9: note = RNA polymerase II-associated protein 3 (126-134)
IHVDSQKAL

SEQ ID NO: 11424 - protein, 9 aa, synthetic construct
  REGION 1..9: note = Cytochrome c oxidase subunit 1 (311-319)
IIAIPTGVK

SEQ ID NO: 11425 - protein, 9 aa, synthetic construct
  REGION 1..9: note = 40S ribosomal protein S7 (59-67)
IIFVPVPQL

SEQ ID NO: 11426 - protein, 9 aa, synthetic construct
  REGION 1..9: note = Zinc fingers and homeoboxes protein 3 (566-574)
IIIDSVPEV

SEQ ID NO: 11427 - protein, 9 aa, synthetic construct
  REGION 1..9: note = Dedicator of cytokinesis protein 7 (1109-1117)
IIMETVPQL

SEQ ID NO: 11428 - protein, 9 aa, synthetic construct
  REGION 1..9: note = Ras GTPase-activating-like protein IQGAP1 (1302-1310)
IINTHTLLL

SEQ ID NO: 11429 - protein, 9 aa, synthetic construct
  REGION 1..9: note = Intron-binding protein aquarius (273-281)
ILDDSHLLV

SEQ ID NO: 11430 - protein, 9 aa, synthetic construct
  REGION 1..9: note = Coatomer subunit zeta-1 (5-13)
ILEPSLYTV

SEQ ID NO: 11431 - protein, 10 aa, synthetic construct
  REGION 1..10: note = Methylmalonyl-CoA mutase, mitochondrial (172-181)
ILFDGIPLEK

SEQ ID NO: 11432 - protein, 9 aa, synthetic construct
  REGION 1..9: note = Asparagine synthetase (glutamine-hydrolyzing) (154-162)
ILFNNAVKK

SEQ ID NO: 11433 - protein, 9 aa, synthetic construct
  REGION 1..9: note = Protein SCAF8 (920-928)
ILGIQPPSV

SEQ ID NO: 11434 - protein, 9 aa, synthetic construct
  REGION 1..9: note = CREB-binding protein (26-34)
ILIGYLEYV

SEQ ID NO: 11435 - protein, 9 aa, synthetic construct
  REGION 1..9: note = Protein RRNAD1 (424-432)
ILLDRLLYL

SEQ ID NO: 11436 - protein, 8 aa, synthetic construct
  REGION 1..8: note = MAU2 chromatid cohesion factor homolog (246-253)
ILLEHIIM

SEQ ID NO: 11437 - protein, 9 aa, synthetic construct
  REGION 1..9: note = Phospholipase A-2-activating protein (517-525)
ILLEKILSL

SEQ ID NO: 11438 - protein, 9 aa, synthetic construct
  REGION 1..9: note = Serine-protein kinase ATM (144-152)
ILLKDILSV

SEQ ID NO: 11439 - protein, 9 aa, synthetic construct
  REGION 1..9: note = Glycerol-3-phosphate acyltransferase 3 (22-30)
ILLPSVFGV

SEQ ID NO: 11440 - protein, 9 aa, synthetic construct
  REGION 1..9: note = Protein FAM122B (239-247)
ILMDDLSPK

SEQ ID NO: 11441 - protein, 10 aa, synthetic construct
  REGION 1..10: note = DNA (cytosine-5)-methyltransferase 1 (382-391)
ILMDPSPEYA

SEQ ID NO: 11442 - protein, 9 aa, synthetic construct
  REGION 1..9: note = A-kinase anchor protein 8-like (529-537)
ILNNKLISK

SEQ ID NO: 11443 - protein, 9 aa, synthetic construct
  REGION 1..9: note = Protein TASOR (898-906)
ILNPEVVTV

SEQ ID NO: 11444 - protein, 10 aa, synthetic construct
  REGION 1..10: note = Anaphase-promoting complex subunit 1 (57-66)
ILSKDGVLYV

SEQ ID NO: 11445 - protein, 9 aa, synthetic construct
  REGION 1..9: note = Uncharacterized protein KIAA1109 (858-866)
ILSPLNVFV

SEQ ID NO: 11446 - protein, 9 aa, synthetic construct
  REGION 1..9: note = General vesicular transport factor p115 (329-337)
ILTETINTV

SEQ ID NO: 11447 - protein, 9 aa, synthetic construct
  REGION 1..9: note = ORM1-like protein 2 (28-36)
ILVGLLHMV

SEQ ID NO: 11448 - protein, 9 aa, synthetic construct
  REGION 1..9: note = Fibronectin type III domain-containing protein 3B (1072-1080)
ILWETVPSM

SEQ ID NO: 11449 - protein, 10 aa, synthetic construct
  REGION 1..10: note = Phenylalanine-tRNA ligase, mitochondrial (215-224)
ILYDIPDIRL

SEQ ID NO: 11450 - protein, 9 aa, synthetic construct
  REGION 1..9: note = Serine/threonine-protein phosphatase 2B catalytic subunit alpha isoform (138-146)
ILYPKTLFL

SEQ ID NO: 11451 - protein, 9 aa, synthetic construct
  REGION 1..9: note = Serine/threonine-protein phosphatase 2B catalytic subunit beta isoform (165-173)
ILYPSTLFL

SEQ ID NO: 11452 - protein, 9 aa, synthetic construct
  REGION 1..9: note = Proteasome activator complex subunit 4 (38-46)
ILYSKTEHL

SEQ ID NO: 11453 - protein, 9 aa, synthetic construct
  REGION 1..9: note = Vigilin (627-635)
IPAKLHNSL

SEQ ID NO: 11454 - protein, 9 aa, synthetic construct
  REGION 1..9: note = Thioredoxin domain-containing protein 11 (92-100)
IPAKPPVSF

SEQ ID NO: 11455 - protein, 9 aa, synthetic construct
  REGION 1..9: note = RNA-binding protein 12B (28-36)
IPDGGVHII

SEQ ID NO: 11456 - protein, 9 aa, synthetic construct
  REGION 1..9: note = Bifunctional glutamate/proline-tRNA ligase (709-717)
IPDGHTKEM

SEQ ID NO: 11457 - protein, 9 aa, synthetic construct
  REGION 1..9: note = Plectin (3582-3590)
IPEEQRAQL

SEQ ID NO: 11458 - protein, 8 aa, synthetic construct
  REGION 1..8: note = Filamin-A (1600-1607)
IPFSPYRV

SEQ ID NO: 11459 - protein, 9 aa, synthetic construct
  REGION 1..9: note = Coatomer subunit beta' (567-575)
IPKDNRLYL

SEQ ID NO: 11460 - protein, 9 aa, synthetic construct
  REGION 1..9: note = Bladder cancer-associated protein (13-21)
IPKPLNPAL

SEQ ID NO: 11461 - protein, 9 aa, synthetic construct
  REGION 1..9: note = Integrin beta-1 (92-100)
IPKSAVGTL

SEQ ID NO: 11462 - protein, 10 aa, synthetic construct
  REGION 1..10: note = Sodium/potassium-transporting ATPase subunit alpha-1 (601-610)
IPLPLGTVTI

SEQ ID NO: 11463 - protein, 9 aa, synthetic construct
  REGION 1..9: note = Tubulin beta chain (365-373)
IPNNVKTAV

SEQ ID NO: 11464 - protein, 9 aa, synthetic construct
  REGION 1..9: note = Membrane cofactor protein (71-79)
IPPLATHTI

SEQ ID NO: 11465 - protein, 8 aa, synthetic construct
  REGION 1..8: note = Chromodomain-helicase-DNA-binding protein 4 (1903-1910)
IPPVAVRL

SEQ ID NO: 11466 - protein, 10 aa, synthetic construct
  REGION 1..10: note = V-type proton ATPase catalytic subunit A (118-127)
IPRGVNVSAL

SEQ ID NO: 11467 - protein, 9 aa, synthetic construct
  REGION 1..9: note = Ubiquitin-associated domain-containing protein 2 (32-40)
IPRVQVAQI

SEQ ID NO: 11468 - protein, 9 aa, synthetic construct
  REGION 1..9: note = Probable ubiquitin carboxyl-terminal hydrolase FAF-X (1578-1586)
IPSIRNGIL

SEQ ID NO: 11469 - protein, 9 aa, synthetic construct
  REGION 1..9: note = Patatin-like phospholipase domain-containing protein 2 (212-220)
IQFNLRNLY

SEQ ID NO: 11470 - protein, 9 aa, synthetic construct
  REGION 1..9: note = Hypoxia-inducible factor 1-alpha (370-378)
IQHDLIFSL

SEQ ID NO: 11471 - protein, 9 aa, synthetic construct
  REGION 1..9: note = AN1-type zinc finger protein 5 (198-206)
IRKENPVVV

SEQ ID NO: 11472 - protein, 9 aa, synthetic construct
  REGION 1..9: note = Plectin (3944-3952)
IRPGTAFEL

SEQ ID NO: 11473 - protein, 9 aa, synthetic construct
  REGION 1..9: note = Nuclear factor of activated T-cells, cytoplasmic 2 (431-439)
IRTPVKVNF

SEQ ID NO: 11474 - protein, 9 aa, synthetic construct
  REGION 1..9: note = Cytospin-A (888-896)
ISGPISTSK

SEQ ID NO: 11475 - protein, 11 aa, synthetic construct
  REGION 1..11: note = Endothelin-converting enzyme 1 (719-729)
ITDPHSPSRFR

SEQ ID NO: 11476 - protein, 9 aa, synthetic construct
  REGION 1..9: note = TRAF2 and NCK-interacting protein kinase (425-433)
ITKDVVLQW

SEQ ID NO: 11477 - protein, 10 aa, synthetic construct
  REGION 1..10: note = Heat shock protein HSP 90-alpha (91-100)
IVDTGIGMTK

SEQ ID NO: 11478 - protein, 9 aa, synthetic construct
  REGION 1..9: note = Smith-Magenis syndrome chromosomal region candidate gene 8 protein (742-750)
IVRKLVTAL

SEQ ID NO: 11479 - protein, 10 aa, synthetic construct
  REGION 1..10: note = Actin, cytoplasmic 2 (75-84)
IVTNWDDMEK

SEQ ID NO: 11480 - protein, 9 aa, synthetic construct
  REGION 1..9: note = Importin subunit alpha-5 (492-500)
IYQKAFDLI

SEQ ID NO: 11481 - protein, 10 aa, synthetic construct
  REGION 1..10: note = Krueppel-like factor 3 (37-46)
IYSTPLPEKF

SEQ ID NO: 11482 - protein, 9 aa, synthetic construct
  REGION 1..9: note = Butyrophilin subfamily 3 member A3 secreted isoform (315-323)
IYTFPHASF

SEQ ID NO: 11483 - protein, 9 aa, synthetic construct
  REGION 1..9: note = Probable C-mannosyltransferase DPY19L1 (119-127)
IYTKIMDLI

SEQ ID NO: 11484 - protein, 9 aa, synthetic construct
  REGION 1..9: note = Basic leucine zipper and W2 domain-containing protein 2 (358-366)
KAFQKIVVL

SEQ ID NO: 11485 - protein, 9 aa, synthetic construct
  REGION 1..9: note = Structural maintenance of chromosomes protein 1A (1026-1034)
KAMEKLESV

SEQ ID NO: 11486 - protein, 9 aa, synthetic construct
  REGION 1..9: note = Histone H2B type 1-K (58-66)
KAMGIMNSF

SEQ ID NO: 11487 - protein, 9 aa, synthetic construct
  REGION 1..9: note = Replication protein A 70 kDa DNA-binding subunit (157-165)
KAYGASKTF

SEQ ID NO: 11488 - protein, 9 aa, synthetic construct
  REGION 1..9: note = Protein arginine N-methyltransferase 3 (98-106)
KEEYLKPVL

SEQ ID NO: 11489 - protein, 11 aa, synthetic construct
  REGION 1..11: note = Heat shock protein HSP 90-alpha (656-666)
KEFEGKTLVSV

SEQ ID NO: 11490 - protein, 10 aa, synthetic construct
  REGION 1..10: note = Nuclear autoantigenic sperm protein (298-307)
KEIEELKELL

SEQ ID NO: 11491 - protein, 10 aa, synthetic construct
  REGION 1..10: note = Nucleoporin GLE1 (442-451)
KEIFDKIHSL

SEQ ID NO: 11492 - protein, 11 aa, synthetic construct
  REGION 1..11: note = CDK5 and ABL1 enzyme substrate 1 (180-190)
KEIIGLEGVEL

SEQ ID NO: 11493 - protein, 11 aa, synthetic construct
  REGION 1..11: note = 40S ribosomal protein S14 (7-17)
KEKKEEQVISL

SEQ ID NO: 11494 - protein, 11 aa, synthetic construct
  REGION 1..11: note = 14-3-3 protein theta (158-168)
KEMQPTHPIRL

SEQ ID NO: 11495 - protein, 10 aa, synthetic construct
  REGION 1..10: note = Store-operated calcium entry-associated regulatory factor (86-95)
KGWDGYDVQW

SEQ ID NO: 11496 - protein, 9 aa, synthetic construct
  REGION 1..9: note = Midasin (3076-3084)
KIAQFLESV

SEQ ID NO: 11497 - protein, 9 aa, synthetic construct
  REGION 1..9: note = Heme oxygenase 1 (149-157)
KIAQKALDL

SEQ ID NO: 11498 - protein, 9 aa, synthetic construct
  REGION 1..9: note = WD repeat-containing protein 82 (84-92)
KIDDTIRYL

SEQ ID NO: 11499 - protein, 11 aa, synthetic construct
  REGION 1..11: note = Cytochrome c oxidase subunit 2 (217-227)
KIFEMGPVFTL

SEQ ID NO: 11500 - protein, 9 aa, synthetic construct
  REGION 1..9: note = Poly (ADP-ribose) polymerase 14 (1060-1068)
KIGSIIFQV

SEQ ID NO: 11501 - protein, 11 aa, synthetic construct
  REGION 1..11: note = KH domain-containing, RNA-binding, signal transduction-associated protein 1 (175-185)
KILGPQGNTIK

SEQ ID NO: 11502 - protein, 9 aa, synthetic construct
  REGION 1..9: note = Nucleolar pre-ribosomal-associated protein 1 (278-286)
KILPDLNTV

SEQ ID NO: 11503 - protein, 9 aa, synthetic construct
  REGION 1..9: note = Protein SON (1565-1573)
KILPTSETK

SEQ ID NO: 11504 - protein, 9 aa, synthetic construct
  REGION 1..9: note = Phosphatidylinositol 4-phosphate 5-kinase type-1 beta (263-271)
KIMDYSLLL

SEQ ID NO: 11505 - protein, 10 aa, synthetic construct
  REGION 1..10: note = Heat shock protein HSP 90-alpha (389-398)
KIMKDILEKK

SEQ ID NO: 11506 - protein, 9 aa, synthetic construct
  REGION 1..9: note = Mitotic checkpoint serine/threonine-protein kinase BUB1 beta (908-916)
KIVDFSYSV

SEQ ID NO: 11507 - protein, 9 aa, synthetic construct
  REGION 1..9: note = Tripeptidyl-peptidase 2 (81-89)
KIWDPVHRV

SEQ ID NO: 11508 - protein, 11 aa, synthetic construct
  REGION 1..11: note = Cyclin-dependent kinase 16 (375-385)
KLADFGLARAK

SEQ ID NO: 11509 - protein, 10 aa, synthetic construct
  REGION 1..10: note = Probable RNA-binding protein 23 (357-366)
KLAEGAGIQL

SEQ ID NO: 11510 - protein, 10 aa, synthetic construct
  REGION 1..10: note = SAP domain-containing ribonucleoprotein (19-28)
KLAELKQECL

SEQ ID NO: 11511 - protein, 9 aa, synthetic construct
  REGION 1..9: note = LIM and senescent cell antigen-like-containing domain protein 1 (317-325)
KLAETLGRK

SEQ ID NO: 11512 - protein, 9 aa, synthetic construct
  REGION 1..9: note = Protein NDRG1 (209-217)
KLDPTKTTL

SEQ ID NO: 11513 - protein, 11 aa, synthetic construct
  REGION 1..11: note = SEC14-like protein 1 (60-70)
KLDVDAPRLLK

SEQ ID NO: 11514 - protein, 9 aa, synthetic construct
  REGION 1..9: note = B-cell receptor-associated protein 31 (167-175)
KLDVGNAEV

SEQ ID NO: 11515 - protein, 9 aa, synthetic construct
  REGION 1..9: note = WAS protein family homolog 1 (210-218)
KLFDAPLSI

SEQ ID NO: 11516 - protein, 11 aa, synthetic construct
  REGION 1..11: note = Putative WAS protein family homolog 3 (208-218)
KLFDAPLSISK

SEQ ID NO: 11517 - protein, 10 aa, synthetic construct
  REGION 1..10: note = Oxysterol-binding protein-related protein 9 (138-147)
KLFDDKLQNC

SEQ ID NO: 11518 - protein, 10 aa, synthetic construct
  REGION 1..10: note = FACT complex subunit SSRP1 (413-422)
KLFDFVNAKK

SEQ ID NO: 11519 - protein, 12 aa, synthetic construct
  REGION 1..12: note = Eukaryotic translation initiation factor 3 subunit I (213-224)
KLFDSTTLEHQK

SEQ ID NO: 11520 - protein, 9 aa, synthetic construct
  REGION 1..9: note = Interferon regulatory factor 4 (356-364)
KLFDTQQFL

SEQ ID NO: 11521 - protein, 9 aa, synthetic construct
  REGION 1..9: note = Protein transport protein Sec61 subunit alpha isoform 2 (95-103)
KLFGMIITI

SEQ ID NO: 11522 - protein, 9 aa, synthetic construct
  REGION 1..9: note = Vacuolar fusion protein CCZ1 homolog (146-154)
KLFNGTFLK

SEQ ID NO: 11523 - protein, 9 aa, synthetic construct
  REGION 1..9: note = Iron-responsive element-binding protein 2 (746-754)
KLFNKFIGK

SEQ ID NO: 11524 - protein, 10 aa, synthetic construct
  REGION 1..10: note = Interleukin enhancer-binding factor 3 (591-600)
KLFPDTPLAL

SEQ ID NO: 11525 - protein, 9 aa, synthetic construct
  REGION 1..9: note = DNA-directed DNA/RNA polymerase mu (238-246)
KLFTQIFGV

SEQ ID NO: 11526 - protein, 11 aa, synthetic construct
  REGION 1..11: note = Serine/threonine-protein phosphatase 2A 65 kDa regulatory subunit A alpha isoform (188-198)
KLGEFAKVLEL

SEQ ID NO: 11527 - protein, 9 aa, synthetic construct
  REGION 1..9: note = ADP-ribosylation factor 5 (38-46)
KLGEIVTTI

SEQ ID NO: 11528 - protein, 8 aa, synthetic construct
  REGION 1..8: note = Ras GTPase-activating-like protein IQGAP2 (158-165)
KLGIAPQI

SEQ ID NO: 11529 - protein, 9 aa, synthetic construct
  REGION 1..9: note = Actin-like protein 6A (337-345)
KLIANNTTV

SEQ ID NO: 11530 - protein, 11 aa, synthetic construct
  REGION 1..11: note = Serine/threonine-protein kinase pim-2 (179-189)
KLIDFGSGALL

SEQ ID NO: 11531 - protein, 12 aa, synthetic construct
  REGION 1..12: note = Serine/threonine-protein kinase pim-1 (274-285)
KLIDFGSGALLK

SEQ ID NO: 11532 - protein, 9 aa, synthetic construct
  REGION 1..9: note = Dedicator of cytokinesis protein 4 (165-173)
KLIDKLDSL

SEQ ID NO: 11533 - protein, 9 aa, synthetic construct
  REGION 1..9: note = Protein furry homolog (375-383)
KLIGQVHEV

SEQ ID NO: 11534 - protein, 9 aa, synthetic construct
  REGION 1..9: note = Nodal modulator 3 (764-772)
KLIPLLLQL

SEQ ID NO: 11535 - protein, 10 aa, synthetic construct
  REGION 1..10: note = Nucleolar pre-ribosomal-associated protein 1 (172-181)
KLIQLPVVYV

SEQ ID NO: 11536 - protein, 9 aa, synthetic construct
  REGION 1..9: note = Telomere-associated protein RIF1 (232-240)
KLISELQKL

SEQ ID NO: 11537 - protein, 10 aa, synthetic construct
  REGION 1..10: note = 26S protease regulatory subunit 6A (109-118)
KLKPGDLVGV

SEQ ID NO: 11538 - protein, 11 aa, synthetic construct
  REGION 1..11: note = Ras association domain-containing protein 1 (139-149)
KLLDDEQPLRL

SEQ ID NO: 11539 - protein, 9 aa, synthetic construct
  REGION 1..9: note = Cytochrome P450 2J2 (182-190)
KLLDEVTYL

SEQ ID NO: 11540 - protein, 10 aa, synthetic construct
  REGION 1..10: note = Phosphopantothenoylcysteine decarboxylase (39-48)
KLLDIPGLEV

SEQ ID NO: 11541 - protein, 10 aa, synthetic construct
  REGION 1..10: note = Protein scribble homolog (779-788)
KLLEVNGVAL

SEQ ID NO: 11542 - protein, 9 aa, synthetic construct
  REGION 1..9: note = Integrator complex subunit 4-like protein 2 isoform X2 (94-102)
KLLGSMEQV

SEQ ID NO: 11543 - protein, 9 aa, synthetic construct
  REGION 1..9: note = Nucleolar pre-ribosomal-associated protein 1 (170-178)
KLLNKIYEA

SEQ ID NO: 11544 - protein, 9 aa, synthetic construct
  REGION 1..9: note = Acidic leucine-rich nuclear phosphoprotein 32 family member A (137-145)
KLLPQLTYL

SEQ ID NO: 11545 - protein, 9 aa, synthetic construct
  REGION 1..9: note = Proheparin-binding EGF-like growth factor (2-10)
KLLPSVVLK

SEQ ID NO: 11546 - protein, 10 aa, synthetic construct
  REGION 1..10: note = Transmembrane protein 43 (13-22)
KLLSDPNYGV

SEQ ID NO: 11547 - protein, 9 aa, synthetic construct
  REGION 1..9: note = Ubiquitin carboxyl-terminal hydrolase 48 (231-239)
KLLSKFYEL

SEQ ID NO: 11548 - protein, 11 aa, synthetic construct
  REGION 1..11: note = Cytosolic acyl coenzyme A thioester hydrolase (210-220)
KLMDEVAGIVA

SEQ ID NO: 11549 - protein, 9 aa, synthetic construct
  REGION 1..9: note = N-alpha-acetyltransferase 20 (79-87)
KLMELLEEI

SEQ ID NO: 11550 - protein, 9 aa, synthetic construct
  REGION 1..9: note = Transcription intermediary factor 1-alpha (341-349)
KLMQQQQEV

SEQ ID NO: 11551 - protein, 9 aa, synthetic construct
  REGION 1..9: note = Cohesin subunit SA-1 (228-236)
KLMTALVNV

SEQ ID NO: 11552 - protein, 9 aa, synthetic construct
  REGION 1..9: note = Proteasome subunit alpha type-5 (151-159)
KLNATNIEL

SEQ ID NO: 11553 - protein, 9 aa, synthetic construct
  REGION 1..9: note = Myomegalin (424-432)
KLNEMSYEL

SEQ ID NO: 11554 - protein, 9 aa, synthetic construct
  REGION 1..9: note = Twinfilin-1 (192-200)
KLNNRQLNY

SEQ ID NO: 11555 - protein, 10 aa, synthetic construct
  REGION 1..10: note = Stromal interaction molecule 1 (571-580)
KLPDSPALAK

SEQ ID NO: 11556 - protein, 9 aa, synthetic construct
  REGION 1..9: note = Probable U3 small nucleolar RNA-associated protein 11 (5-13)
KLQDGVHII

SEQ ID NO: 11557 - protein, 9 aa, synthetic construct
  REGION 1..9: note = Hyaluronan mediated motility receptor (672-680)
KLQEELNKV

SEQ ID NO: 11558 - protein, 9 aa, synthetic construct
  REGION 1..9: note = Centromere-associated protein E (1817-1825)
KLQEKIQEL

SEQ ID NO: 11559 - protein, 9 aa, synthetic construct
  REGION 1..9: note = Zinc finger C3H1 domain-containing protein (891-899)
KLQEQIHRV

SEQ ID NO: 11560 - protein, 10 aa, synthetic construct
  REGION 1..10: note = Transmembrane protein 131 (929-938)
KLREPNFTLK

SEQ ID NO: 11561 - protein, 9 aa, synthetic construct
  REGION 1..9: note = EF-hand domain-containing protein D1 (174-182)
KLSEIDVAL

SEQ ID NO: 11562 - protein, 9 aa, synthetic construct
  REGION 1..9: note = Keratin, type II cytoskeletal 8 (148-156)
KLSELEAAL

SEQ ID NO: 11563 - protein, 9 aa, synthetic construct
  REGION 1..9: note = 78 kDa glucose-regulated protein (2-10)
KLSLVAAML

SEQ ID NO: 11564 - protein, 9 aa, synthetic construct
  REGION 1..9: note = Retrotransposon-derived protein PEG10 (112-120)
KLTEENTTL

SEQ ID NO: 11565 - protein, 9 aa, synthetic construct
  REGION 1..9: note = Zinc finger MYM-type protein 2 (166-174)
KLTEIRHEV

SEQ ID NO: 11566 - protein, 10 aa, synthetic construct
  REGION 1..10: note = Cyclin-dependent kinase 2 (24-33)
KLTGEVVALK

SEQ ID NO: 11567 - protein, 10 aa, synthetic construct
  REGION 1..10: note = Transforming acidic coiled-coil-containing protein 3 (599-608)
KLVEFDFLGA

SEQ ID NO: 11568 - protein, 9 aa, synthetic construct
  REGION 1..9: note = Adenylyl cyclase-associated protein 1 (465-473)
KLVTTVTEI

SEQ ID NO: 11569 - protein, 9 aa, synthetic construct
  REGION 1..9: note = Inactive hydroxysteroid dehydrogenase-like protein 1 (148-156)
KLWDIINVN

SEQ ID NO: 11570 - protein, 9 aa, synthetic construct
  REGION 1..9: note = UBX domain-containing protein 11 (82-90)
KLWDLEQQV

SEQ ID NO: 11571 - protein, 9 aa, synthetic construct
  REGION 1..9: note = Pecanex-like protein 3 (1234-1242)
KLWDLLYKL

SEQ ID NO: 11572 - protein, 9 aa, synthetic construct
  REGION 1..9: note = MORF4 family-associated protein 1-like 1 (56-64)
KLWEMDNML

SEQ ID NO: 11573 - protein, 10 aa, synthetic construct
  REGION 1..10: note = MORF4 family-associated protein 1-like 1 (56-65)
KLWEMDNMLI

SEQ ID NO: 11574 - protein, 11 aa, synthetic construct
  REGION 1..11: note = MORF4 family-associated protein 1-like 1 (56-66)
KLWEMDNMLIQ

SEQ ID NO: 11575 - protein, 9 aa, synthetic construct
  REGION 1..9: note = Rho guanine nucleotide exchange factor 3 (108-116)
KLWSETFDV

SEQ ID NO: 11576 - protein, 9 aa, synthetic construct
  REGION 1..9: note = ADP-ribosylation factor-like protein 4C (157-165)
KLYEMILKR

SEQ ID NO: 11577 - protein, 9 aa, synthetic construct
  REGION 1..9: note = Splicing factor 3B subunit 4 (78-86)
KLYGKPIRV

SEQ ID NO: 11578 - protein, 9 aa, synthetic construct
  REGION 1..9: note = Tuberin (574-582)
KLYTLPASH

SEQ ID NO: 11579 - protein, 11 aa, synthetic construct
  REGION 1..11: note = E3 ubiquitin-protein ligase BRE1A (694-704)
KMADEDALRKI

SEQ ID NO: 11580 - protein, 9 aa, synthetic construct
  REGION 1..9: note = Melanoma-associated antigen 12 (112-120)
KMAELVHFL

SEQ ID NO: 11581 - protein, 11 aa, synthetic construct
  REGION 1..11: note = Ribosome biogenesis protein BOP1 (115-125)
KMDDPDYWRTV

SEQ ID NO: 11582 - protein, 9 aa, synthetic construct
  REGION 1..9: note = Talin-1 (535-543)
KMDESKHEI

SEQ ID NO: 11583 - protein, 9 aa, synthetic construct
  REGION 1..9: note = KDEL motif-containing protein 2 (215-223)
KMFSDEILL

SEQ ID NO: 11584 - protein, 10 aa, synthetic construct
  REGION 1..10: note = Structural maintenance of chromosomes protein 5 (378-387)
KMIEDLQNEL

SEQ ID NO: 11585 - protein, 12 aa, synthetic construct
  REGION 1..12: note = UPF0428 protein CXorf56 (70-81)
KMKGTLIDNQFK

SEQ ID NO: 11586 - protein, 11 aa, synthetic construct
  REGION 1..11: note = Tropomodulin-3 (307-317)
KMLEENTNILK

SEQ ID NO: 11587 - protein, 9 aa, synthetic construct
  REGION 1..9: note = HEAT repeat-containing protein 1 (682-690)
KMVEDLISV

SEQ ID NO: 11588 - protein, 9 aa, synthetic construct
  REGION 1..9: note = cAMP-dependent protein kinase type I-beta regulatory subunit (244-252)
KMYEEFLSK

SEQ ID NO: 11589 - protein, 10 aa, synthetic construct
  REGION 1..10: note = La-related protein 4B (374-383)
KPAASPLTSL

SEQ ID NO: 11590 - protein, 9 aa, synthetic construct
  REGION 1..9: note = Myosin-9 (517-525)
KPAGPPGIL

SEQ ID NO: 11591 - protein, 9 aa, synthetic construct
  REGION 1..9: note = Serine/threonine-protein kinase Nek6 (199-207)
KPANVFITA

SEQ ID NO: 11592 - protein, 9 aa, synthetic construct
  REGION 1..9: note = Acid ceramidase (209-217)
KPGLFSLTL

SEQ ID NO: 11593 - protein, 9 aa, synthetic construct
  REGION 1..9: note = BAG family molecular chaperone regulator 3 (324-332)
KPGPVGPEL

SEQ ID NO: 11594 - protein, 9 aa, synthetic construct
  REGION 1..9: note = Proteasome assembly chaperone 1 (230-238)
KPILSTRSL

SEQ ID NO: 11595 - protein, 10 aa, synthetic construct
  REGION 1..10: note = Radixin (3-12)
KPINVRVTTM

SEQ ID NO: 11596 - protein, 9 aa, synthetic construct
  REGION 1..9: note = Retinoblastoma-binding protein 5 (324-332)
KPKTTNIEL

SEQ ID NO: 11597 - protein, 9 aa, synthetic construct
  REGION 1..9: note = Transketolase (451-459)
KPLDRKLIL

SEQ ID NO: 11598 - protein, 9 aa, synthetic construct
  REGION 1..9: note = Forkhead box protein N2 (170-178)
KPLPLKTAL

SEQ ID NO: 11599 - protein, 11 aa, synthetic construct
  REGION 1..11: note = Galectin-3 (139-149)
KPNANRIALDF

SEQ ID NO: 11600 - protein, 9 aa, synthetic construct
  REGION 1..9: note = Catenin beta-1 (666-674)
KPQDYKKRL

SEQ ID NO: 11601 - protein, 11 aa, synthetic construct
  REGION 1..11: note = Catenin beta-1 (666-676)
KPQDYKKRLSV

SEQ ID NO: 11602 - protein, 9 aa, synthetic construct
  REGION 1..9: note = Serine/threonine-protein kinase tousled-like 2 (155-163)
KPRLDTEQL

SEQ ID NO: 11603 - protein, 9 aa, synthetic construct
  REGION 1..9: note = Retrotransposon-derived protein PEG10 (325-333)
KPRSPPRAL

SEQ ID NO: 11604 - protein, 11 aa, synthetic construct
  REGION 1..11: note = Retrotransposon-derived protein PEG10 (325-335)
KPRSPPRALVL

SEQ ID NO: 11605 - protein, 9 aa, synthetic construct
  REGION 1..9: note = rRNA-processing protein UTP23 homolog (149-157)
KPSPKTIAF

SEQ ID NO: 11606 - protein, 9 aa, synthetic construct
  REGION 1..9: note = 60S ribosomal protein L13a (130-138)
KPTRKFAYL

SEQ ID NO: 11607 - protein, 10 aa, synthetic construct
  REGION 1..10: note = U3 small nucleolar ribonucleoprotein protein IMP3 (14-23)
KQVDFLNWEV

SEQ ID NO: 11608 - protein, 9 aa, synthetic construct
  REGION 1..9: note = Src kinase-associated phosphoprotein 2 (319-327)
KRGDVIYIL

SEQ ID NO: 11609 - protein, 10 aa, synthetic construct
  REGION 1..10: note = Guanylate-binding protein 4 (305-314)
KRLGTLVVTY

SEQ ID NO: 11610 - protein, 11 aa, synthetic construct
  REGION 1..11: note = Eukaryotic translation initiation factor 4 gamma 1 (570-580)
KRYDREFLLGF

SEQ ID NO: 11611 - protein, 10 aa, synthetic construct
  REGION 1..10: note = Hom s 1 (791-800)
KSMNANTITK

SEQ ID NO: 11612 - protein, 11 aa, synthetic construct
  REGION 1..11: note = Prefoldin subunit 5 (107-117)
KTAEDAKDFFK

SEQ ID NO: 11613 - protein, 11 aa, synthetic construct
  REGION 1..11: note = Death-inducer obliterator 1 (585-595)
KTAPPGSAVGK

SEQ ID NO: 11614 - protein, 9 aa, synthetic construct
  REGION 1..9: note = Volume-regulated anion channel subunit LRRC8C (100-108)
KTDLDLQQY

SEQ ID NO: 11615 - protein, 9 aa, synthetic construct
  REGION 1..9: note = Activating transcription factor 7-interacting protein 1 (394-402)
KTIDASVSK

SEQ ID NO: 11616 - protein, 10 aa, synthetic construct
  REGION 1..10: note = Arfaptin-1 (216-225)
KTIEDTLMTV

SEQ ID NO: 11617 - protein, 12 aa, synthetic construct
  REGION 1..12: note = UPF0769 protein C21orf59 (114-125)
KTIEEAKAIISK

SEQ ID NO: 11618 - protein, 11 aa, synthetic construct
  REGION 1..11: note = Acyl-CoA dehydrogenase family member 9, mitochondrial (521-531)
KTIMEEQLVLK

SEQ ID NO: 11619 - protein, 9 aa, synthetic construct
  REGION 1..9: note = Beta-synuclein (32-40)
KTKEGVLYV

SEQ ID NO: 11620 - protein, 9 aa, synthetic construct
  REGION 1..9: note = Transcriptional repressor protein YY1 (213-221)
KTLEGEFSV

SEQ ID NO: 11621 - protein, 10 aa, synthetic construct
  REGION 1..10: note = SWI/SNF-related matrix-associated actin-dependent regulator of chromatin subfamily A member 5 (112-121)
KTPTSPLKMK

SEQ ID NO: 11622 - protein, 9 aa, synthetic construct
  REGION 1..9: note = Short coiled-coil protein (97-105)
KTRLINQVL

SEQ ID NO: 11623 - protein, 9 aa, synthetic construct
  REGION 1..9: note = Collagen alpha-2(VI) chain (132-140)
KTRVFAVVI

SEQ ID NO: 11624 - protein, 9 aa, synthetic construct
  REGION 1..9: note = Ubinuclein-2 (526-534)
KTSDKPLMY

SEQ ID NO: 11625 - protein, 9 aa, synthetic construct
  REGION 1..9: note = 26S proteasome non-ATPase regulatory subunit 6 (126-134)
KTYDKTVAL

SEQ ID NO: 11626 - protein, 10 aa, synthetic construct
  REGION 1..10: note = Coiled-coil domain-containing protein 14 (522-531)
KTYENVLSSR

SEQ ID NO: 11627 - protein, 10 aa, synthetic construct
  REGION 1..10: note = Heterogeneous nuclear ribonucleoprotein L-like (486-495)
KVFDAKPSAK

SEQ ID NO: 11628 - protein, 9 aa, synthetic construct
  REGION 1..9: note = Dihydroxyacetone phosphate acyltransferase (128-136)
KVFKQIFSK

SEQ ID NO: 11629 - protein, 10 aa, synthetic construct
  REGION 1..10: note = Ubiquitin carboxyl-terminal hydrolase 11 (139-148)
KVIELPNIQK

SEQ ID NO: 11630 - protein, 9 aa, synthetic construct
  REGION 1..9: note = Syntenin-1 (14-22)
KVIQAQTAF

SEQ ID NO: 11631 - protein, 9 aa, synthetic construct
  REGION 1..9: note = Plasmalemma vesicle-associated protein (164-172)
KVKTLEVEI

SEQ ID NO: 11632 - protein, 9 aa, synthetic construct
  REGION 1..9: note = Mitofusin-2 (84-92)
KVRGISEVL

SEQ ID NO: 11633 - protein, 9 aa, synthetic construct
  REGION 1..9: note = Heterogeneous nuclear ribonucleoprotein R isoform 7 (155-163)
KVWGNVVTV

SEQ ID NO: 11634 - protein, 10 aa, synthetic construct
  REGION 1..10: note = Small integral membrane protein 20 (58-67)
KVWSDPFGRK

SEQ ID NO: 11635 - protein, 9 aa, synthetic construct
  REGION 1..9: note = Stromal interaction molecule 2 (478-486)
KVYNGILEK

SEQ ID NO: 11636 - protein, 9 aa, synthetic construct
  REGION 1..9: note = Homeobox-containing protein 1 (325-333)
KVYNWFANR

SEQ ID NO: 11637 - protein, 9 aa, synthetic construct
  REGION 1..9: note = Threonylcarbamoyladenosine tRNA methylthiotransferase (405-413)
KVYTPSISK

SEQ ID NO: 11638 - protein, 9 aa, synthetic construct
  REGION 1..9: note = WD repeat-containing protein 1 (65-73)
KYAPSGFYI

SEQ ID NO: 11639 - protein, 9 aa, synthetic construct
  REGION 1..9: note = Alpha-soluble NSF attachment protein (227-235)
KYEELFPAF

SEQ ID NO: 11640 - protein, 9 aa, synthetic construct
  REGION 1..9: note = Putative E3 ubiquitin-protein ligase UBR7 (125-133)
KYNDNFFGL

SEQ ID NO: 11641 - protein, 9 aa, synthetic construct
  REGION 1..9: note = Rho guanine nucleotide exchange factor 1 (516-524)
KYPLLLQSI

SEQ ID NO: 11642 - protein, 9 aa, synthetic construct
  REGION 1..9: note = Zinc finger MYND domain-containing protein 11 (415-423)
KYTKIFNDF

SEQ ID NO: 11643 - protein, 8 aa, synthetic construct
  REGION 1..8: note = Transformation/transcription domain-associated protein (379-386)
LADLVHHV

SEQ ID NO: 11644 - protein, 8 aa, synthetic construct
  REGION 1..8: note = Ras GTPase-activating-like protein IQGAP1 (1072-1079)
LAPVVKEI

SEQ ID NO: 11645 - protein, 9 aa, synthetic construct
  REGION 1..9: note = Vimentin (124-132)
LEQQNKILL

SEQ ID NO: 11646 - protein, 9 aa, synthetic construct
  REGION 1..9: note = HLA class II histocompatibility antigen, DRB1-15 beta chain (48-56)
LGRPDAEYW

SEQ ID NO: 11647 - protein, 9 aa, synthetic construct
  REGION 1..9: note = U5 small nuclear ribonucleoprotein 200 kDa helicase (620-628)
LHDDRGPVL

SEQ ID NO: 11648 - protein, 8 aa, synthetic construct
  REGION 1..8: note = Elongation factor 2 (218-225)
LHGWAFTL

SEQ ID NO: 11649 - protein, 9 aa, synthetic construct
  REGION 1..9: note = Importin subunit alpha-1 (260-268)
LHHDDPEVL

SEQ ID NO: 11650 - protein, 9 aa, synthetic construct
  REGION 1..9: note = Protein kinase C delta type (286-294)
LLAEALNQV

SEQ ID NO: 11651 - protein, 9 aa, synthetic construct
  REGION 1..9: note = Protein sel-1 homolog 1 (580-588)
LLAEQGYEV

SEQ ID NO: 11652 - protein, 9 aa, synthetic construct
  REGION 1..9: note = BRCA1-associated ATM activator 1 (541-549)
LLASEVPQL

SEQ ID NO: 11653 - protein, 9 aa, synthetic construct
  REGION 1..9: note = 15 kDa selenoprotein (21-29)
LLATVLQAV

SEQ ID NO: 11654 - protein, 9 aa, synthetic construct
  REGION 1..9: note = Talin-1 (2250-2258)
LLDHVLLTL

SEQ ID NO: 11655 - protein, 8 aa, synthetic construct
  REGION 1..8: note = Annexin A11 (433-440)
LLDIRSEY

SEQ ID NO: 11656 - protein, 8 aa, synthetic construct
  REGION 1..8: note = U3 small nucleolar ribonucleoprotein protein IMP3 (79-86)
LLDKLYAL

SEQ ID NO: 11657 - protein, 9 aa, synthetic construct
  REGION 1..9: note = WD repeat-containing protein 36 (605-613)
LLDSAPLNV

SEQ ID NO: 11658 - protein, 9 aa, synthetic construct
  REGION 1..9: note = Group XIIA secretory phospholipase A2 (158-166)
LLFDSVIHL

SEQ ID NO: 11659 - protein, 9 aa, synthetic construct
  REGION 1..9: note = Ras-related GTP-binding protein A (204-212)
LLFERATFL

SEQ ID NO: 11660 - protein, 9 aa, synthetic construct
  REGION 1..9: note = Transcription factor 20 (837-845)
LLHEENFSV

SEQ ID NO: 11661 - protein, 9 aa, synthetic construct
  REGION 1..9: note = NADH dehydrogenase (ubiquinone) 1 alpha subcomplex subunit 1 (16-24)
LLIPGLATA

SEQ ID NO: 11662 - protein, 9 aa, synthetic construct
  REGION 1..9: note = ERO1-like protein alpha (260-268)
LLLEILHEI

SEQ ID NO: 11663 - protein, 9 aa, synthetic construct
  REGION 1..9: note = Staphylococcal nuclease domain-containing protein 1 (186-194)
LLLPDYYLV

SEQ ID NO: 11664 - protein, 11 aa, synthetic construct
  REGION 1..11: note = Staphylococcal nuclease domain-containing protein 1 (186-196)
LLLPDYYLVTV

SEQ ID NO: 11665 - protein, 9 aa, synthetic construct
  REGION 1..9: note = Histone H2B type 2-F (101-109)
LLLPGELAK

SEQ ID NO: 11666 - protein, 9 aa, synthetic construct
  REGION 1..9: note = Clathrin heavy chain 1 (1422-1430)
LLMVLSPRL

SEQ ID NO: 11667 - protein, 9 aa, synthetic construct
  REGION 1..9: note = DNA-dependent protein kinase catalytic subunit (2454-2462)
LLNPVVEFV

SEQ ID NO: 11668 - protein, 9 aa, synthetic construct
  REGION 1..9: note = Superkiller viralicidic activity 2-like 2 (273-281)
LLPDNVHYV

SEQ ID NO: 11669 - protein, 9 aa, synthetic construct
  REGION 1..9: note = Homocysteine-responsive endoplasmic reticulum-resident ubiquitin-like domain member 1 protein (222-230)
LLPEGPPAI

SEQ ID NO: 11670 - protein, 9 aa, synthetic construct
  REGION 1..9: note = Potassium channel subfamily K member 4 (365-373)
LLPPPPCPA

SEQ ID NO: 11671 - protein, 9 aa, synthetic construct
  REGION 1..9: note = Casein kinase I isoform alpha (57-65)
LLYESKLYK

SEQ ID NO: 11672 - protein, 9 aa, synthetic construct
  REGION 1..9: note = Syntenin-1 (290-298)
LMDHTIPEV

SEQ ID NO: 11673 - protein, 9 aa, synthetic construct
  REGION 1..9: note = Bombesin receptor-activated protein C6orf89 (120-128)
LMSLPIAKK

SEQ ID NO: 11674 - protein, 9 aa, synthetic construct
  REGION 1..9: note = Constitutive coactivator of PPAR-gamma-like protein 1 (567-575)
LMYPYIFHV

SEQ ID NO: 11675 - protein, 9 aa, synthetic construct
  REGION 1..9: note = Peripheral plasma membrane protein CASK (705-713)
LPAFKRKTL

SEQ ID NO: 11676 - protein, 9 aa, synthetic construct
  REGION 1..9: note = Butyrophilin subfamily 3 member A3 secreted isoform (388-396)
LPAHPGAEV

SEQ ID NO: 11677 - protein, 9 aa, synthetic construct
  REGION 1..9: note = FERM domain-containing protein 4A (166-174)
LPALPTQAL

SEQ ID NO: 11678 - protein, 9 aa, synthetic construct
  REGION 1..9: note = Proline-rich protein PRCC (42-50)
LPAPKGPAL

SEQ ID NO: 11679 - protein, 9 aa, synthetic construct
  REGION 1..9: note = Serine/threonine-protein kinase SIK2 (446-454)
LPASVHPQL

SEQ ID NO: 11680 - protein, 11 aa, synthetic construct
  REGION 1..11: note = Host cell factor 1 (1377-1387)
LPDATSSHRTV

SEQ ID NO: 11681 - protein, 9 aa, synthetic construct
  REGION 1..9: note = Actin-related protein 2 (246-254)
LPDGRIIKV

SEQ ID NO: 11682 - protein, 9 aa, synthetic construct
  REGION 1..9: note = Transducin-like enhancer protein 4 (517-525)
LPDGRTLIV

SEQ ID NO: 11683 - protein, 11 aa, synthetic construct
  REGION 1..11: note = Biogenesis of lysosome-related organelles complex 1 subunit 6 (61-71)
LPDLQRSKQAL

SEQ ID NO: 11684 - protein, 9 aa, synthetic construct
  REGION 1..9: note = Integrator complex subunit 11 (441-449)
LPEAKKPRL

SEQ ID NO: 11685 - protein, 9 aa, synthetic construct
  REGION 1..9: note = Queuine tRNA-ribosyltransferase subunit QTRTD1 (120-128)
LPEDKPRLI

SEQ ID NO: 11686 - protein, 9 aa, synthetic construct
  REGION 1..9: note = Tyrosine-protein phosphatase non-receptor type 11 (283-291)
LPFDHTRVV

SEQ ID NO: 11687 - protein, 9 aa, synthetic construct
  REGION 1..9: note = Polypyrimidine tract-binding protein 2 (91-99)
LPFGKVTNI

SEQ ID NO: 11688 - protein, 9 aa, synthetic construct
  REGION 1..9: note = Nodal modulator 3 (615-623)
LPHHRVIEV

SEQ ID NO: 11689 - protein, 9 aa, synthetic construct
  REGION 1..9: note = RNA-binding protein 33 (711-719)
LPIAPSHVI

SEQ ID NO: 11690 - protein, 9 aa, synthetic construct
  REGION 1..9: note = Leucine-rich repeat-containing protein 59 (38-46)
LPKATILDL

SEQ ID NO: 11691 - protein, 9 aa, synthetic construct
  REGION 1..9: note = 26S proteasome non-ATPase regulatory subunit 6 (11-19)
LPKNPDLRI

SEQ ID NO: 11692 - protein, 9 aa, synthetic construct
  REGION 1..9: note = Telomerase protein component 1 (671-679)
LPLLPGRTV

SEQ ID NO: 11693 - protein, 9 aa, synthetic construct
  REGION 1..9: note = Transcription factor Sp3 (515-523)
LPNLQTVTV

SEQ ID NO: 11694 - protein, 9 aa, synthetic construct
  REGION 1..9: note = Eukaryotic initiation factor 4A-III (354-362)
LPNNRELYI

SEQ ID NO: 11695 - protein, 8 aa, synthetic construct
  REGION 1..8: note = eIF-2-alpha kinase activator GCN1 (1363-1370)
LPPLVPAI

SEQ ID NO: 11696 - protein, 9 aa, synthetic construct
  REGION 1..9: note = E3 ubiquitin-protein ligase RNF181 (50-58)
LPPPAAKTV

SEQ ID NO: 11697 - protein, 9 aa, synthetic construct
  REGION 1..9: note = Mediator of RNA polymerase II transcription subunit 7 (10-18)
LPPPPMQYI

SEQ ID NO: 11698 - protein, 9 aa, synthetic construct
  REGION 1..9: note = Crooked neck-like protein 1 (45-53)
LPPPPQQKI

SEQ ID NO: 11699 - protein, 9 aa, synthetic construct
  REGION 1..9: note = Terminal uridylyltransferase 7 (284-292)
LPPPTPSQI

SEQ ID NO: 11700 - protein, 9 aa, synthetic construct
  REGION 1..9: note = Transcription elongation factor SPT4 (93-101)
LPQGIVREL

SEQ ID NO: 11701 - protein, 10 aa, synthetic construct
  REGION 1..10: note = Homeobox protein TGIF2 (105-114)
LPRGSSPSVL

SEQ ID NO: 11702 - protein, 9 aa, synthetic construct
  REGION 1..9: note = ATP-dependent RNA helicase DHX36 (300-308)
LPRKQGSIL

SEQ ID NO: 11703 - protein, 9 aa, synthetic construct
  REGION 1..9: note = Carnitine O-palmitoyltransferase 1, liver isoform (171-179)
LPRLPVPAV

SEQ ID NO: 11704 - protein, 10 aa, synthetic construct
  REGION 1..10: note = Beta-hexosaminidase subunit beta (8-17)
LPRPPMLLAL

SEQ ID NO: 11705 - protein, 9 aa, synthetic construct
  REGION 1..9: note = cGMP-inhibited 3',5'-cyclic phosphodiesterase B (240-248)
LPSALRPLL

SEQ ID NO: 11706 - protein, 10 aa, synthetic construct
  REGION 1..10: note = Polymerase delta-interacting protein 3 (241-250)
LPSSIRTKAL

SEQ ID NO: 11707 - protein, 8 aa, synthetic construct
  REGION 1..8: note = Runt-related transcription factor 2 (116-123)
LPVAFKVV

SEQ ID NO: 11708 - protein, 9 aa, synthetic construct
  REGION 1..9: note = THUMP domain-containing protein 3 (124-132)
LPWSNPLKV

SEQ ID NO: 11709 - protein, 9 aa, synthetic construct
  REGION 1..9: note = Peptidyl-prolyl cis-trans isomerase FKBP4 (200-208)
LPYGLERAI

SEQ ID NO: 11710 - protein, 8 aa, synthetic construct
  REGION 1..8: note = eIF-2-alpha kinase activator GCN1 (2077-2084)
LPYLVPKL

SEQ ID NO: 11711 - protein, 8 aa, synthetic construct
  REGION 1..8: note = E3 ubiquitin-protein ligase UBR4 (260-267)
LPYQIKKI

SEQ ID NO: 11712 - protein, 10 aa, synthetic construct
  REGION 1..10: note = Lysyl oxidase homolog 3 (408-417)
LPYTGAETRI

SEQ ID NO: 11713 - protein, 9 aa, synthetic construct
  REGION 1..9: note = Histone acetyltransferase KAT6B (711-719)
LSDLGRLSY

SEQ ID NO: 11714 - protein, 9 aa, synthetic construct
  REGION 1..9: note = Phosphatidylinositide phosphatase SAC2 (667-675)
LSLENLEKI

SEQ ID NO: 11715 - protein, 11 aa, synthetic construct
  REGION 1..11: note = Serpin B6 (76-86)
LTEVNKTGTQY

SEQ ID NO: 11716 - protein, 10 aa, synthetic construct
  REGION 1..10: note = Heat shock-related 70 kDa protein 2 (213-222)
LTIEDGIFEV

SEQ ID NO: 11717 - protein, 10 aa, synthetic construct
  REGION 1..10: note = Heat shock protein HSP 90-beta (36-45)
LVDTGIGMTK

SEQ ID NO: 11718 - protein, 9 aa, synthetic construct
  REGION 1..9: note = Interleukin-32 (97-105)
LVHAVQALW

SEQ ID NO: 11719 - protein, 9 aa, synthetic construct
  REGION 1..9: note = Protein diaphanous homolog 1 (1090-1098)
LYKELGEYF

SEQ ID NO: 11720 - protein, 9 aa, synthetic construct
  REGION 1..9: note = AKT-interacting protein (116-124)
LYQDGVFKF

SEQ ID NO: 11721 - protein, 8 aa, synthetic construct
  REGION 1..8: note = HLA class I histocompatibility antigen, Cw-3 alpha chain (4-11)
MAPRTLIL

SEQ ID NO: 11722 - protein, 9 aa, synthetic construct
  REGION 1..9: note = Charged multivesicular body protein 2a (127-135)
MEFERQAEI

SEQ ID NO: 11723 - protein, 9 aa, synthetic construct
  REGION 1..9: note = Bifunctional glutamate/proline-tRNA ligase (487-495)
MEWDKIWAF

SEQ ID NO: 11724 - protein, 9 aa, synthetic construct
  REGION 1..9: note = Sodium-coupled neutral amino acid transporter 1 (2-10)
MHFKSGLEL

SEQ ID NO: 11725 - protein, 9 aa, synthetic construct
  REGION 1..9: note = Nucleoside diphosphate kinase A (68-76)
MHSGPVVAM

SEQ ID NO: 11726 - protein, 11 aa, synthetic construct
  REGION 1..11: note = Cytochrome b (53-63)
MHYSPDASTAF

SEQ ID NO: 11727 - protein, 9 aa, synthetic construct
  REGION 1..9: note = Lysosomal protective protein (1-9)
MIRAAPPPL

SEQ ID NO: 11728 - protein, 9 aa, synthetic construct
  REGION 1..9: note = 78 kDa glucose-regulated protein (1-9)
MKLSLVAAM

SEQ ID NO: 11729 - protein, 9 aa, synthetic construct
  REGION 1..9: note = Putative uncharacterized protein ZNF436-AS1 (1-9)
MLAVPVRLK

SEQ ID NO: 11730 - protein, 9 aa, synthetic construct
  REGION 1..9: note = Transformation/transcription domain-associated protein (1824-1832)
MLDSLRIYL

SEQ ID NO: 11731 - protein, 11 aa, synthetic construct
  REGION 1..11: note = Ubiquitin carboxyl-terminal hydrolase 11 (568-578)
MLFGHPLLVSV

SEQ ID NO: 11732 - protein, 8 aa, synthetic construct
  REGION 1..8: note = Beta-1-syntrophin (41-48)
MPILISKI

SEQ ID NO: 11733 - protein, 9 aa, synthetic construct
  REGION 1..9: note = Neuroblast differentiation-associated protein AHNAK (882-890)
MPKFSMPGF

SEQ ID NO: 11734 - protein, 9 aa, synthetic construct
  REGION 1..9: note = Neuroblast differentiation-associated protein AHNAK (2766-2774)
MPKIKMPKI

SEQ ID NO: 11735 - protein, 9 aa, synthetic construct
  REGION 1..9: note = Synergin gamma (422-430)
MPLPGTKAL

SEQ ID NO: 11736 - protein, 9 aa, synthetic construct
  REGION 1..9: note = Cyclin-dependent kinase 6 (54-62)
MPLSTIREV

SEQ ID NO: 11737 - protein, 9 aa, synthetic construct
  REGION 1..9: note = Type II inositol 3,4-bisphosphate 4-phosphatase (788-796)
MPPDYISHF

SEQ ID NO: 11738 - protein, 9 aa, synthetic construct
  REGION 1..9: note = Double-strand-break repair protein rad21 homolog (468-476)
MPPPPPQGV

SEQ ID NO: 11739 - protein, 9 aa, synthetic construct
  REGION 1..9: note = Eukaryotic initiation factor 4A-III (311-319)
MPQKERESI

SEQ ID NO: 11740 - protein, 10 aa, synthetic construct
  REGION 1..10: note = Mitotic-spindle organizing protein 2A (99-108)
MPRQPSATRL

SEQ ID NO: 11741 - protein, 9 aa, synthetic construct
  REGION 1..9: note = UDP-N-acetylglucosamine-peptide N-acetylglucosaminyltransferase 110 kDa subunit (774-782)
MPVIPMNTI

SEQ ID NO: 11742 - protein, 9 aa, synthetic construct
  REGION 1..9: note = Protein diaphanous homolog 1 (845-853)
MPYQEIKNV

SEQ ID NO: 11743 - protein, 9 aa, synthetic construct
  REGION 1..9: note = Prelamin-A/C (199-207)
MRARMQQQL

SEQ ID NO: 11744 - protein, 9 aa, synthetic construct
  REGION 1..9: note = Transcobalamin-2 (1-9)
MRHLGAFLF

SEQ ID NO: 11745 - protein, 9 aa, synthetic construct
  REGION 1..9: note = Suppressor of SWI4 1 homolog (100-108)
MRLPGGPTL

SEQ ID NO: 11746 - protein, 9 aa, synthetic construct
  REGION 1..9: note = Calcium/calmodulin-dependent protein kinase II inhibitor 1 (17-25)
MTDKAPPGV

SEQ ID NO: 11747 - protein, 9 aa, synthetic construct
  REGION 1..9: note = Insulin receptor substrate 2 (543-551)
MTMDRPLSH

SEQ ID NO: 11748 - protein, 9 aa, synthetic construct
  REGION 1..9: note = Necdin (58-66)
MVKDVIGSY

SEQ ID NO: 11749 - protein, 12 aa, synthetic construct
  REGION 1..12: note = ATP-citrate synthase (529-540)
MVYPFTGDHKQK

SEQ ID NO: 11750 - protein, 9 aa, synthetic construct
  REGION 1..9: note = Melanoma-associated antigen D2 (110-118)
NADPQAVTM

SEQ ID NO: 11751 - protein, 9 aa, synthetic construct
  REGION 1..9: note = FERM domain-containing protein 8 (198-206)
NAYRQVQEV

SEQ ID NO: 11752 - protein, 9 aa, synthetic construct
  REGION 1..9: note = Rapamycin-insensitive companion of mTOR (139-147)
NEVERTQAL

SEQ ID NO: 11753 - protein, 9 aa, synthetic construct
  REGION 1..9: note = 26S protease regulatory subunit 4 (119-127)
NHAIVSTSV

SEQ ID NO: 11754 - protein, 8 aa, synthetic construct
  REGION 1..8: note = Serine/threonine-protein phosphatase 2A catalytic subunit beta isoform (229-236)
NHANGLTL

SEQ ID NO: 11755 - protein, 10 aa, synthetic construct
  REGION 1..10: note = Transcription factor 4 (402-411)
NHAVGPSTAM

SEQ ID NO: 11756 - protein, 9 aa, synthetic construct
  REGION 1..9: note = Translationally-controlled tumor protein (75-83)
NHHLQETSF

SEQ ID NO: 11757 - protein, 9 aa, synthetic construct
  REGION 1..9: note = SHC-transforming protein 4 (284-292)
NHHMQSISF

SEQ ID NO: 11758 - protein, 9 aa, synthetic construct
  REGION 1..9: note = E3 ubiquitin-protein ligase synoviolin (308-316)
NHIFHTSCL

SEQ ID NO: 11759 - protein, 9 aa, synthetic construct
  REGION 1..9: note = Dedicator of cytokinesis protein 8 (737-745)
NHLEKFFTL

SEQ ID NO: 11760 - protein, 9 aa, synthetic construct
  REGION 1..9: note = Cytochrome c oxidase subunit 6C (21-29)
NHMAVAFVL

SEQ ID NO: 11761 - protein, 9 aa, synthetic construct
  REGION 1..9: note = Ankyrin repeat domain-containing protein 54 (187-195)
NHVPVITTL

SEQ ID NO: 11762 - protein, 10 aa, synthetic construct
  REGION 1..10: note = Transcription factor jun-B (150-159)
NHVTPPNVSL

SEQ ID NO: 11763 - protein, 9 aa, synthetic construct
  REGION 1..9: note = Periodic tryptophan protein 2 homolog (866-874)
NHYNMQYAL

SEQ ID NO: 11764 - protein, 9 aa, synthetic construct
  REGION 1..9: note = Alpha-2-macroglobulin receptor-associated protein (292-300)
NHYQKQLEI

SEQ ID NO: 11765 - protein, 9 aa, synthetic construct
  REGION 1..9: note = Protein SCAF11 (912-920)
NIFPYPVGV

SEQ ID NO: 11766 - protein, 9 aa, synthetic construct
  REGION 1..9: note = RUS1 family protein C16orf58 (197-205)
NLAKCIVSV

SEQ ID NO: 11767 - protein, 9 aa, synthetic construct
  REGION 1..9: note = Pterin-4-alpha-carbinolamine dehydratase (19-27)
NLASFIEQV

SEQ ID NO: 11768 - protein, 9 aa, synthetic construct
  REGION 1..9: note = E3 ubiquitin-protein ligase RNF123 (595-603)
NLFDRVVTL

SEQ ID NO: 11769 - protein, 9 aa, synthetic construct
  REGION 1..9: note = Plastin-3 (327-335)
NLFNKYPAL

SEQ ID NO: 11770 - protein, 10 aa, synthetic construct
  REGION 1..10: note = THO complex subunit 2 (162-171)
NLIDLDDLYV

SEQ ID NO: 11771 - protein, 9 aa, synthetic construct
  REGION 1..9: note = Tyrosine-protein phosphatase non-receptor type 13 (472-480)
NLINQEIML

SEQ ID NO: 11772 - protein, 9 aa, synthetic construct
  REGION 1..9: note = Trifunctional purine biosynthetic protein adenosine-3 (39-47)
NLISALEEA

SEQ ID NO: 11773 - protein, 9 aa, synthetic construct
  REGION 1..9: note = Protein virilizer homolog (623-631)
NLLEEVFHL

SEQ ID NO: 11774 - protein, 9 aa, synthetic construct
  REGION 1..9: note = Chloride intracellular channel protein 5 (187-195)
NLLPKLHVV

SEQ ID NO: 11775 - protein, 9 aa, synthetic construct
  REGION 1..9: note = PHD finger protein 20-like protein 1 (210-218)
NLLTHIENV

SEQ ID NO: 11776 - protein, 9 aa, synthetic construct
  REGION 1..9: note = AP-3 complex subunit mu-2 (268-276)
NLVAIPVYV

SEQ ID NO: 11777 - protein, 10 aa, synthetic construct
  REGION 1..10: note = 55 kDa erythrocyte membrane protein (337-346)
NMFGTKFETV

SEQ ID NO: 11778 - protein, 9 aa, synthetic construct
  REGION 1..9: note = Tetratricopeptide repeat protein 4 (260-268)
NPHGARLSL

SEQ ID NO: 11779 - protein, 9 aa, synthetic construct
  REGION 1..9: note = General transcription factor 3C polypeptide 1 (336-344)
NPKESSSSL

SEQ ID NO: 11780 - protein, 11 aa, synthetic construct
  REGION 1..11: note = Talin-1 (1623-1633)
NPRDPPSWSVL

SEQ ID NO: 11781 - protein, 11 aa, synthetic construct
  REGION 1..11: note = Roundabout homolog 1 (1497-1507)
NPRDPSSSSSM

SEQ ID NO: 11782 - protein, 9 aa, synthetic construct
  REGION 1..9: note = Clathrin interactor 1 (379-387)
NQAPSGPVA

SEQ ID NO: 11783 - protein, 9 aa, synthetic construct
  REGION 1..9: note = Coiled-coil domain-containing protein 134 (154-162)
NQGPHSPIL

SEQ ID NO: 11784 - protein, 9 aa, synthetic construct
  REGION 1..9: note = Transcription factor p65 (186-194)
NRAPNTAEL

SEQ ID NO: 11785 - protein, 9 aa, synthetic construct
  REGION 1..9: note = Putative methyltransferase NSUN3 (57-65)
NRFNYPFEL

SEQ ID NO: 11786 - protein, 9 aa, synthetic construct
  REGION 1..9: note = Toll-like receptor 9 (425-433)
NRISGASEL

SEQ ID NO: 11787 - protein, 9 aa, synthetic construct
  REGION 1..9: note Dolichyl-diphosphooligosaccharide-proteinosyltransferase subunit 2 (618-626)
NRMLAQQAV

SEQ ID NO: 11788 - protein, 9 aa, synthetic construct
  REGION 1..9: note Dolichyl-diphosphooligosaccharide-proteinosyltransferase subunit 2 (358-366)
NVADVVIKF

SEQ ID NO: 11789 - protein, 9 aa, synthetic construct
  REGION 1..9: note = Calcium homeostasis endoplasmic reticulum protein (14-22)
NVIDKLAQF

SEQ ID NO: 11790 - protein, 10 aa, synthetic construct
  REGION 1..10: note = E3 ubiquitin-protein ligase DTX3L (376-385)
NVIEVDSAHY

SEQ ID NO: 11791 - protein, 9 aa, synthetic construct
  REGION 1..9: note = U5 small nuclear ribonucleoprotein 200 kDa helicase (1517-1525)
NVRPVPLEL

SEQ ID NO: 11792 - protein, 9 aa, synthetic construct
  REGION 1..9: note = Arf-GAP with SH3 domain, ANK repeat and PH domain-containing protein 1 (87-95)
NYAQVLDKF

SEQ ID NO: 11793 - protein, 9 aa, synthetic construct
  REGION 1..9: note = GRB2-related adapter protein (100-108)
NYGDQVQHF

SEQ ID NO: 11794 - protein, 9 aa, synthetic construct
  REGION 1..9: note = Heat shock protein HSP 90-alpha (249-257)
NYKKFYEQF

SEQ ID NO: 11795 - protein, 9 aa, synthetic construct
  REGION 1..9: note = Fructosamine-3-kinase (284-292)
NYLNHWNHF

SEQ ID NO: 11796 - protein, 11 aa, synthetic construct
  REGION 1..11: note = SEC14-like protein 1 (424-434)
NYPETLGRLLI

SEQ ID NO: 11797 - protein, 10 aa, synthetic construct
  REGION 1..10: note = TATA element modulatory factor (751-760)
QEAENRNQEL

SEQ ID NO: 11798 - protein, 9 aa, synthetic construct
  REGION 1..9: note = Threonine-tRNA ligase, cytoplasmic (318-326)
QELYFFHEL

SEQ ID NO: 11799 - protein, 10 aa, synthetic construct
  REGION 1..10: note = Nuclear autoantigen Sp-100 (132-141)
QEYPDLIHIY

SEQ ID NO: 11800 - protein, 9 aa, synthetic construct
  REGION 1..9: note = Myosin-9 (709-717)
QGFPNRVVF

SEQ ID NO: 11801 - protein, 9 aa, synthetic construct
  REGION 1..9: note = MOB kinase activator 1A (165-173)
QHFDSVMQL

SEQ ID NO: 11802 - protein, 9 aa, synthetic construct
  REGION 1..9: note = ATP-citrate synthase (996-1004)
QHFPATPLL

SEQ ID NO: 11803 - protein, 10 aa, synthetic construct
  REGION 1..10: note = Cullin-3 (489-498)
QHLQATGVSL

SEQ ID NO: 11804 - protein, 9 aa, synthetic construct
  REGION 1..9: note = Angio-associated migratory cell protein (356-364)
QHQSGIVQL

SEQ ID NO: 11805 - protein, 9 aa, synthetic construct
  REGION 1..9: note = Protein PML (767-775)
QHVYPFSSL

SEQ ID NO: 11806 - protein, 9 aa, synthetic construct
  REGION 1..9: note = Solute carrier family 41 member 3 (91-99)
QHWPVFVEV

SEQ ID NO: 11807 - protein, 9 aa, synthetic construct
  REGION 1..9: note = Putative Polycomb group protein ASXL2 (1383-1391)
QILPKPLTK

SEQ ID NO: 11808 - protein, 9 aa, synthetic construct
  REGION 1..9: note = Programmed cell death 6-interacting protein (435-443)
QLIKELPEL

SEQ ID NO: 11809 - protein, 9 aa, synthetic construct
  REGION 1..9: note = Dynactin subunit 1 (1167-1175)
QLMEQVAQL

SEQ ID NO: 11810 - protein, 9 aa, synthetic construct
  REGION 1..9: note = E3 ubiquitin-protein ligase DTX3L (447-455)
QLMREVLLL

SEQ ID NO: 11811 - protein, 9 aa, synthetic construct
  REGION 1..9: note = Non-specific lipid-transfer protein (539-547)
QLQPGNAKL

SEQ ID NO: 11812 - protein, 9 aa, synthetic construct
  REGION 1..9: note = Poly (ADP-ribose) polymerase 14 (218-226)
QLSPRLLEV

SEQ ID NO: 11813 - protein, 9 aa, synthetic construct
  REGION 1..9: note = Protein ZGRF1 (2047-2055)
QLWGRVIQH

SEQ ID NO: 11814 - protein, 9 aa, synthetic construct
  REGION 1..9: note = Myosin-10 (655-663)
QLYKESLTK

SEQ ID NO: 11815 - protein, 9 aa, synthetic construct
  REGION 1..9: note = Signal recognition particle subunit SRP72 (247-255)
QLYNQIIKL

SEQ ID NO: 11816 - protein, 9 aa, synthetic construct
  REGION 1..9: note = Casein kinase I isoform alpha (119-127)
QMISRIEYV

SEQ ID NO: 11817 - protein, 10 aa, synthetic construct
  REGION 1..10: note = rRNA 2'-O-methyltransferase fibrillarin (236-245)
QPDQTRIVAL

SEQ ID NO: 11818 - protein, 9 aa, synthetic construct
  REGION 1..9: note = Eukaryotic translation initiation factor 4 gamma 3 (664-672)
QPKLPMRTL

SEQ ID NO: 11819 - protein, 9 aa, synthetic construct
  REGION 1..9: note = Activating transcription factor 7-interacting protein 1 (787-795)
QPLPVILHV

SEQ ID NO: 11820 - protein, 9 aa, synthetic construct
  REGION 1..9: note = Transmembrane emp24 domain-containing protein 5 (50-58)
QPMPLKASL

SEQ ID NO: 11821 - protein, 9 aa, synthetic construct
  REGION 1..9: note = E3 ubiquitin-protein ligase RNF31 (125-133)
QPRPQSTSL

SEQ ID NO: 11822 - protein, 10 aa, synthetic construct
  REGION 1..10: note = Nuclear factor of activated T-cells, cytoplasmic 2 (486-495)
QPYYPQHPMV

SEQ ID NO: 11823 - protein, 9 aa, synthetic construct
  REGION 1..9: note = Threonylcarbamoyladenosine tRNA methylthiotransferase (88-96)
QQIDRVVEV

SEQ ID NO: 11824 - protein, 9 aa, synthetic construct
  REGION 1..9: note = 60S ribosomal protein L26 (65-73)
QQIGKVVQV

SEQ ID NO: 11825 - protein, 9 aa, synthetic construct
  REGION 1..9: note = Long-chain-fatty-acid-CoA ligase 3 (405-413)
QRNLFILAY

SEQ ID NO: 11826 - protein, 9 aa, synthetic construct
  REGION 1..9: note = B-cell receptor-associated protein 29 (101-109)
QRNLYISGF

SEQ ID NO: 11827 - protein, 11 aa, synthetic construct
  REGION 1..11: note = Nucleolar RNA helicase 2 (558-568)
QRSLINSNVGF

SEQ ID NO: 11828 - protein, 9 aa, synthetic construct
  REGION 1..9: note = GPI transamidase component PIG-T (351-359)
QRYVSGYGL

SEQ ID NO: 11829 - protein, 12 aa, synthetic construct
  REGION 1..12: note = Zinc finger protein 143 (64-75)
QVIQLEDGSAAY

SEQ ID NO: 11830 - protein, 9 aa, synthetic construct
  REGION 1..9: note = mRNA cap guanine-N7 methyltransferase (448-456)
QVRLPLGTL

SEQ ID NO: 11831 - protein, 9 aa, synthetic construct
  REGION 1..9: note = Elongation of very long chain fatty acids protein 1 (201-209)
QYPVIIHLI

SEQ ID NO: 11832 - protein, 9 aa, synthetic construct
  REGION 1..9: note = Arf-GAP with SH3 domain, ANK repeat and PH domain-containing protein 2 (74-82)
QYTQALEKF

SEQ ID NO: 11833 - protein, 9 aa, synthetic construct
  REGION 1..9: note = Telomerase protein component 1 (820-828)
RAAPHRISL

SEQ ID NO: 11834 - protein, 9 aa, synthetic construct
  REGION 1..9: note = MICOS complex subunit MIC60 (432-440)
RAFDSAVAK

SEQ ID NO: 11835 - protein, 10 aa, synthetic construct
  REGION 1..10: note = Uromodulin (615-624)
RAFSSLGLLK

SEQ ID NO: 11836 - protein, 9 aa, synthetic construct
  REGION 1..9: note = Signal transducer CD24 (3-11)
RAMVARLGL

SEQ ID NO: 11837 - protein, 9 aa, synthetic construct
  REGION 1..9: note = Eukaryotic translation initiation factor 4H (185-193)
RAQRPRLQL

SEQ ID NO: 11838 - protein, 9 aa, synthetic construct
  REGION 1..9: note = Cytochrome b-c1 complex subunit 8 (25-33)
RAYPHVFTK

SEQ ID NO: 11839 - protein, 10 aa, synthetic construct
  REGION 1..10: note = CLIP-associating protein 1 (519-528)
REAEHLYHTL

SEQ ID NO: 11840 - protein, 9 aa, synthetic construct
  REGION 1..9: note = Integrin alpha-6 (29-37)
REDNVIRKY

SEQ ID NO: 11841 - protein, 9 aa, synthetic construct
  REGION 1..9: note = Eukaryotic initiation factor 4A-III (260-268)
REEWKFDTL

SEQ ID NO: 11842 - protein, 11 aa, synthetic construct
  REGION 1..11: note = TCF3 fusion partner (90-100)
REIEQVNERVL

SEQ ID NO: 11843 - protein, 11 aa, synthetic construct
  REGION 1..11: note = Ataxin-2-like protein (324-334)
REIESSPQYRL

SEQ ID NO: 11844 - protein, 11 aa, synthetic construct
  REGION 1..11: note = NF-kappa-B essential modulator (319-329)
REKLAEKKELL

SEQ ID NO: 11845 - protein, 10 aa, synthetic construct
  REGION 1..10: note = ER membrane protein complex subunit 7 (192-201)
REMEQSMNML

SEQ ID NO: 11846 - protein, 11 aa, synthetic construct
  REGION 1..11: note = HMG box-containing protein 1 (104-114)
RENEVDWLTEL

SEQ ID NO: 11847 - protein, 10 aa, synthetic construct
  REGION 1..10: note = Kinesin-like protein KIFC1 (639-648)
RETQAINSSL

SEQ ID NO: 11848 - protein, 9 aa, synthetic construct
  REGION 1..9: note = Translation machinery-associated protein 16 (109-117)
RETVIKQTM

SEQ ID NO: 11849 - protein, 10 aa, synthetic construct
  REGION 1..10: note = Protein timeless homolog (623-632)
REVWPEGDVF

SEQ ID NO: 11850 - protein, 9 aa, synthetic construct
  REGION 1..9: note = E3 SUMO-protein ligase PIAS3 (145-153)
RFEEAHFTF

SEQ ID NO: 11851 - protein, 9 aa, synthetic construct
  REGION 1..9: note = Tubulin alpha-1C chain (334-342)
RIHFPLATY

SEQ ID NO: 11852 - protein, 9 aa, synthetic construct
  REGION 1..9: note = Poly (ADP-ribose) polymerase 4 (631-639)
RIIDTVAQV

SEQ ID NO: 11853 - protein, 9 aa, synthetic construct
  REGION 1..9: note = Moesin (275-283)
RINKRILAL

SEQ ID NO: 11854 - protein, 9 aa, synthetic construct
  REGION 1..9: note = Valine-tRNA ligase (530-538)
RIPAYFVTV

SEQ ID NO: 11855 - protein, 12 aa, synthetic construct
  REGION 1..12: note = COMM domain-containing protein 9 (145-156)
RIRDQLSAVASK

SEQ ID NO: 11856 - protein, 9 aa, synthetic construct
  REGION 1..9: note = SUN domain-containing protein 2 (117-125)
RIRPTAVTL

SEQ ID NO: 11857 - protein, 10 aa, synthetic construct
  REGION 1..10: note = 28S ribosomal protein S21, mitochondrial (50-59)
RIYNMEMARK

SEQ ID NO: 11858 - protein, 10 aa, synthetic construct
  REGION 1..10: note = Heterogeneous nuclear ribonucleoprotein A1 (14-23)
RKLFIGGLSF

SEQ ID NO: 11859 - protein, 10 aa, synthetic construct
  REGION 1..10: note = Catenin beta-1 (124-133)
RLAEPSQMLK

SEQ ID NO: 11860 - protein, 9 aa, synthetic construct
  REGION 1..9: note = Kalirin (2002-2010)
RLAQLFIKH

SEQ ID NO: 11861 - protein, 9 aa, synthetic construct
  REGION 1..9: note = Thyroid adenoma-associated protein (345-353)
RLASKVISH

SEQ ID NO: 11862 - protein, 9 aa, synthetic construct
  REGION 1..9: note = Prostaglandin F2 receptor negative regulator (3-11)
RLASRPLLL

SEQ ID NO: 11863 - protein, 9 aa, synthetic construct
  REGION 1..9: note = Transcription factor 4 (368-376)
RLDDAIHVL

SEQ ID NO: 11864 - protein, 9 aa, synthetic construct
  REGION 1..9: note = Fanconi anemia group D2 protein (253-261)
RLDPNFLLK

SEQ ID NO: 11865 - protein, 11 aa, synthetic construct
  REGION 1..11: note = Ubiquitin carboxyl-terminal hydrolase 19 (1354-1364)
RLFDDSTVTTV

SEQ ID NO: 11866 - protein, 11 aa, synthetic construct
  REGION 1..11: note = BTB/POZ domain-containing protein 2 (2-12)
RLFDEPQLASL

SEQ ID NO: 11867 - protein, 9 aa, synthetic construct
  REGION 1..9: note = Heat shock protein beta-1 (27-35)
RLFDQAFGL

SEQ ID NO: 11868 - protein, 9 aa, synthetic construct
  REGION 1..9: note = V-type proton ATPase subunit S1 (315-323)
RLFGTTVTF

SEQ ID NO: 11869 - protein, 10 aa, synthetic construct
  REGION 1..10: note = V-type proton ATPase subunit S1 (225-234)
RLFGTTVTFK

SEQ ID NO: 11870 - protein, 10 aa, synthetic construct
  REGION 1..10: note = Dol-P-Man:Man(5)GlcNAc(2)-PP-Dol alpha-1,3-mannosyltransferase (123-132)
RLFNDPVAMV

SEQ ID NO: 11871 - protein, 9 aa, synthetic construct
  REGION 1..9: note = tRNA-dihydrouridine(20) synthase (NAD(P)+)-like (362-370)
RLFSSIVTV

SEQ ID NO: 11872 - protein, 9 aa, synthetic construct
  REGION 1..9: note = Surfeit locus protein 6 (121-129)
RLHEKIQEA

SEQ ID NO: 11873 - protein, 9 aa, synthetic construct
  REGION 1..9: note = Proteasome subunit alpha type-4 (20-28)
RLIAQRYLL

SEQ ID NO: 11874 - protein, 9 aa, synthetic construct
  REGION 1..9: note = Lysine-specific demethylase 5B (975-983)
RLIDLGVGL

SEQ ID NO: 11875 - protein, 10 aa, synthetic construct
  REGION 1..10: note = Rho GTPase-activating protein 19 (65-74)
RLIDLPGTEL

SEQ ID NO: 11876 - protein, 9 aa, synthetic construct
  REGION 1..9: note = General transcription factor 3C polypeptide 1 (377-385)
RLIESLFTI

SEQ ID NO: 11877 - protein, 11 aa, synthetic construct
  REGION 1..11: note = Heat shock 70 kDa protein 1-like (51-61)
RLIGDAAKNQV

SEQ ID NO: 11878 - protein, 9 aa, synthetic construct
  REGION 1..9: note = Short coiled-coil protein (55-63)
RLINQVLEL

SEQ ID NO: 11879 - protein, 9 aa, synthetic construct
  REGION 1..9: note = Importin-9 (241-249)
RLIPTLVSI

SEQ ID NO: 11880 - protein, 9 aa, synthetic construct
  REGION 1..9: note = Eukaryotic translation initiation factor 4E (61-69)
RLISKFDTV

SEQ ID NO: 11881 - protein, 9 aa, synthetic construct
  REGION 1..9: note = C-X-C motif chemokine 14 (14-22)
RLLAAALLL

SEQ ID NO: 11882 - protein, 10 aa, synthetic construct
  REGION 1..10: note = Engulfment and cell motility protein 1 (697-706)
RLLDLENIQI

SEQ ID NO: 11883 - protein, 9 aa, synthetic construct
  REGION 1..9: note = PX domain-containing protein kinase-like protein (219-227)
RLLDLENSL

SEQ ID NO: 11884 - protein, 9 aa, synthetic construct
  REGION 1..9: note = Collagen alpha-1(XVIII) chain (14-22)
RLLDVLAPL

SEQ ID NO: 11885 - protein, 9 aa, synthetic construct
  REGION 1..9: note = Baculoviral IAP repeat-containing protein 6 (2177-2185)
RLLDYVATV

SEQ ID NO: 11886 - protein, 9 aa, synthetic construct
  REGION 1..9: note = Lysine-specific histone demethylase 1A (180-188)
RLLEATSYL

SEQ ID NO: 11887 - protein, 9 aa, synthetic construct
  REGION 1..9: note = Isochorismatase domain-containing protein 2 (49-57)
RLLEVPVML

SEQ ID NO: 11888 - protein, 12 aa, synthetic construct
  REGION 1..12: note = Histone H2B type 1-K (100-111)
RLLLPGELAKHA

SEQ ID NO: 11889 - protein, 10 aa, synthetic construct
  REGION 1..10: note = Attractin (51-60)
RLLSPPLRPR

SEQ ID NO: 11890 - protein, 9 aa, synthetic construct
  REGION 1..9: note = Heat shock protein 105 kDa (183-191)
RLMNDMTAV

SEQ ID NO: 11891 - protein, 9 aa, synthetic construct
  REGION 1..9: note = Heat shock 70 kDa protein 4L (128-136)
RLMNETTAV

SEQ ID NO: 11892 - protein, 11 aa, synthetic construct
  REGION 1..11: note = Heat shock 70 kDa protein 4L (128-138)
RLMNETTAVAL

SEQ ID NO: 11893 - protein, 9 aa, synthetic construct
  REGION 1..9: note = Cyclin-D1-binding protein 1 (55-63)
RLNEAAVTV

SEQ ID NO: 11894 - protein, 10 aa, synthetic construct
  REGION 1..10: note = Coatomer subunit gamma-2 (708-717)
RLPDDDPTAV

SEQ ID NO: 11895 - protein, 9 aa, synthetic construct
  REGION 1..9: note = Glyoxylate reductase/hydroxypyruvate reductase (125-133)
RLPEAIEEV

SEQ ID NO: 11896 - protein, 9 aa, synthetic construct
  REGION 1..9: note = EH domain-containing protein 4 (337-345)
RLPEIYIQL

SEQ ID NO: 11897 - protein, 9 aa, synthetic construct
  REGION 1..9: note = Sorting nexin-1 (13-21)
RLPPPFPGL

SEQ ID NO: 11898 - protein, 9 aa, synthetic construct
  REGION 1..9: note = DNA-directed RNA polymerase III subunit RPC1 (218-226)
RLPPPTILK

SEQ ID NO: 11899 - protein, 9 aa, synthetic construct
  REGION 1..9: note = Kazrin (78-86)
RLQEEVHLL

SEQ ID NO: 11900 - protein, 11 aa, synthetic construct
  REGION 1..11: note = Synaptojanin-2-binding protein (58-68)
RLQEGDKILSV

SEQ ID NO: 11901 - protein, 9 aa, synthetic construct
  REGION 1..9: note = Centrosomal protein of 85 kDa (243-251)
RLQMEQMQL

SEQ ID NO: 11902 - protein, 12 aa, synthetic construct
  REGION 1..12: note = KIF1-binding protein (494-505)
RLRDPDSHIVKK

SEQ ID NO: 11903 - protein, 9 aa, synthetic construct
  REGION 1..9: note = Transmembrane protein 69 (146-154)
RLSEAIVTV

SEQ ID NO: 11904 - protein, 10 aa, synthetic construct
  REGION 1..10: note = WASH complex subunit strumpellin (31-40)
RLSEFIPAVF

SEQ ID NO: 11905 - protein, 9 aa, synthetic construct
  REGION 1..9: note = COP9 signalosome complex subunit 8 (199-207)
RLTDYVAFL

SEQ ID NO: 11906 - protein, 9 aa, synthetic construct
  REGION 1..9: note = Proliferating cell nuclear antigen (5-13)
RLVQGSILK

SEQ ID NO: 11907 - protein, 11 aa, synthetic construct
  REGION 1..11: note = Serine-threonine kinase receptor-associated protein (167-177)
RLWDHATMTEV

SEQ ID NO: 11908 - protein, 9 aa, synthetic construct
  REGION 1..9: note = Probable ubiquitin carboxyl-terminal hydrolase FAF-Y (1674-1682)
RLWGEPVNL

SEQ ID NO: 11909 - protein, 11 aa, synthetic construct
  REGION 1..11: note = Lariat debranching enzyme (301-311)
RLWNMPENNGL

SEQ ID NO: 11910 - protein, 9 aa, synthetic construct
  REGION 1..9: note = DNA damage-inducible transcript 4 protein (184-192)
RLWPKIQGL

SEQ ID NO: 11911 - protein, 10 aa, synthetic construct
  REGION 1..10: note = Serine/threonine-protein kinase mTOR (2035-2044)
RLYFGERNVK

SEQ ID NO: 11912 - protein, 10 aa, synthetic construct
  REGION 1..10: note = Filamin-A (142-151)
RLYSVSYLLK

SEQ ID NO: 11913 - protein, 9 aa, synthetic construct
  REGION 1..9: note = C-1-tetrahydrofolate synthase, cytoplasmic (746-754)
RMFGIPVVV

SEQ ID NO: 11914 - protein, 10 aa, synthetic construct
  REGION 1..10: note = Hemoglobin subunit alpha (3-12)
RMFLSFPTTK

SEQ ID NO: 11915 - protein, 9 aa, synthetic construct
  REGION 1..9: note = Transaldolase (28-36)
RMFNAENGK

SEQ ID NO: 11916 - protein, 9 aa, synthetic construct
  REGION 1..9: note = Receptor activity-modifying protein 2 (21-29)
RPAALRLLL

SEQ ID NO: 11917 - protein, 11 aa, synthetic construct
  REGION 1..11: note = Nucleolar protein 11 (53-63)
RPADPEKNQSL

SEQ ID NO: 11918 - protein, 9 aa, synthetic construct
  REGION 1..9: note = F-box only protein 32 (160-168)
RPAFKGLTF

SEQ ID NO: 11919 - protein, 9 aa, synthetic construct
  REGION 1..9: note = Transcription cofactor vestigial-like protein 4 (144-152)
RPAGLSPTL

SEQ ID NO: 11920 - protein, 10 aa, synthetic construct
  REGION 1..10: note = 26S proteasome non-ATPase regulatory subunit 13 (284-293)
RPANHRQLTF

SEQ ID NO: 11921 - protein, 9 aa, synthetic construct
  REGION 1..9: note = SH3 domain-binding protein 1 (567-575)
RPAPARPTM

SEQ ID NO: 11922 - protein, 9 aa, synthetic construct
  REGION 1..9: note = Epsin-2 (471-479)
RPAPPAQSL

SEQ ID NO: 11923 - protein, 9 aa, synthetic construct
  REGION 1..9: note = Sterol regulatory element-binding protein 2 (1026-1034)
RPAYRKVFL

SEQ ID NO: 11924 - protein, 10 aa, synthetic construct
  REGION 1..10: note = Protein O-GlcNAcase (828-837)
RPDDKRILEF

SEQ ID NO: 11925 - protein, 9 aa, synthetic construct
  REGION 1..9: note = Transcription factor 25 (211-219)
RPENRSFYL

SEQ ID NO: 11926 - protein, 9 aa, synthetic construct
  REGION 1..9: note = NFX1-type zinc finger-containing protein 1 (350-358)
RPFLRPNII

SEQ ID NO: 11927 - protein, 9 aa, synthetic construct
  REGION 1..9: note = Procollagen-lysine,2-oxoglutarate 5-dioxygenase 2 (137-145)
RPHHDASTF

SEQ ID NO: 11928 - protein, 9 aa, synthetic construct
  REGION 1..9: note = Transducin beta-like protein 3 (564-572)
RPHTVLTVI

SEQ ID NO: 11929 - protein, 10 aa, synthetic construct
  REGION 1..10: note = Mitogen-activated protein kinase 3 (229-238)
RPIFPGKHYL

SEQ ID NO: 11930 - protein, 9 aa, synthetic construct
  REGION 1..9: note = Ragulator complex protein LAMTOR2 (3-11)
RPKALTQVL

SEQ ID NO: 11931 - protein, 10 aa, synthetic construct
  REGION 1..10: note = Pre-mRNA-processing factor 19 (62-71)
RPKPPSATSI

SEQ ID NO: 11932 - protein, 10 aa, synthetic construct
  REGION 1..10: note = Poly(rC)-binding protein 2 (183-192)
RPKPSSSPVI

SEQ ID NO: 11933 - protein, 9 aa, synthetic construct
  REGION 1..9: note = Mitogen-activated protein kinase 9 (263-271)
RPKYPGIKF

SEQ ID NO: 11934 - protein, 9 aa, synthetic construct
  REGION 1..9: note = Probable ATP-dependent RNA helicase DDX27 (196-204)
RPLLKAITA

SEQ ID NO: 11935 - protein, 10 aa, synthetic construct
  REGION 1..10: note = Protein transport protein Sec23B (243-252)
RPLRSTGVAL

SEQ ID NO: 11936 - protein, 9 aa, synthetic construct
  REGION 1..9: note = RNA-binding protein 39 (297-305)
RPMKVGHVT

SEQ ID NO: 11937 - protein, 9 aa, synthetic construct
  REGION 1..9: note = UAP56-interacting factor (71-79)
RPNGVITGL

SEQ ID NO: 11938 - protein, 9 aa, synthetic construct
  REGION 1..9: note = Adipocyte plasma membrane-associated protein (337-345)
RPNPGFSML

SEQ ID NO: 11939 - protein, 9 aa, synthetic construct
  REGION 1..9: note = Induced myeloid leukemia cell differentiation protein Mcl-1 (78-86)
RPPPIGAEV

SEQ ID NO: 11940 - protein, 9 aa, synthetic construct
  REGION 1..9: note = Sterol regulatory element-binding protein 1 (1003-1011)
RPQASALEL

SEQ ID NO: 11941 - protein, 9 aa, synthetic construct
  REGION 1..9: note = (Pyruvate dehydrogenase (acetyl-transferring))-phosphatase 1, mitochondrial (443-451)
RPQDKFLVL

SEQ ID NO: 11942 - protein, 9 aa, synthetic construct
  REGION 1..9: note = RuvB-like 1 (249-257)
RPQGGQDIL

SEQ ID NO: 11943 - protein, 9 aa, synthetic construct
  REGION 1..9: note = 28S ribosomal protein S12, mitochondrial (55-63)
RPQLKGVVL

SEQ ID NO: 11944 - protein, 10 aa, synthetic construct
  REGION 1..10: note = WD repeat and FYVE domain-containing protein 1 (8-17)
RPQSSRPVLL

SEQ ID NO: 11945 - protein, 9 aa, synthetic construct
  REGION 1..9: note = Renin receptor (59-67)
RPRATVMVM

SEQ ID NO: 11946 - protein, 10 aa, synthetic construct
  REGION 1..10: note = Protein OS-9 (186-195)
RPREAEVRFL

SEQ ID NO: 11947 - protein, 8 aa, synthetic construct
  REGION 1..8: note = Protein disulfide-isomerase A4 (2-9)
RPRKAFLL

SEQ ID NO: 11948 - protein, 10 aa, synthetic construct
  REGION 1..10: note = Protein disulfide-isomerase A4 (2-11)
RPRKAFLLLL

SEQ ID NO: 11949 - protein, 11 aa, synthetic construct
  REGION 1..11: note = Glycogen synthase kinase-3 beta (306-316)
RPRTPPEAIAL

SEQ ID NO: 11950 - protein, 10 aa, synthetic construct
  REGION 1..10: note = Apolipoprotein L1 (285-294)
RPRVTEPISA

SEQ ID NO: 11951 - protein, 9 aa, synthetic construct
  REGION 1..9: note = ATP-dependent RNA helicase A (272-280)
RPSAAGINL

SEQ ID NO: 11952 - protein, 9 aa, synthetic construct
  REGION 1..9: note = Protein DEPP (195-203)
RPSSVLRTL

SEQ ID NO: 11953 - protein, 9 aa, synthetic construct
  REGION 1..9: note = Filamin-B (69-77)
RPTFRQMQL

SEQ ID NO: 11954 - protein, 9 aa, synthetic construct
  REGION 1..9: note = Antigen peptide transporter 2 (168-176)
RPVLKGLTF

SEQ ID NO: 11955 - protein, 9 aa, synthetic construct
  REGION 1..9: note = FAS-associated factor 1 (77-85)
RPVMPSRQI

SEQ ID NO: 11956 - protein, 9 aa, synthetic construct
  REGION 1..9: note = CDC42 small effector protein 1 (69-77)
RPWSNSRGL

SEQ ID NO: 11957 - protein, 10 aa, synthetic construct
  REGION 1..10: note = Cyclin-dependent kinase 13 (254-263)
RPYTNKVITL

SEQ ID NO: 11958 - protein, 12 aa, synthetic construct
  REGION 1..12: note = Rac GTPase-activating protein 1 (547-558)
RQGNFFASPMLK

SEQ ID NO: 11959 - protein, 11 aa, synthetic construct
  REGION 1..11: note = SEC14-like protein 1 (168-178)
RQLEEEGITFV

SEQ ID NO: 11960 - protein, 10 aa, synthetic construct
  REGION 1..10: note = Ubiquitin carboxyl-terminal hydrolase 22 (419-428)
RRKITTYVSF

SEQ ID NO: 11961 - protein, 9 aa, synthetic construct
  REGION 1..9: note = MICOS complex subunit MIC10 (38-46)
RRMWPLAFG

SEQ ID NO: 11962 - protein, 9 aa, synthetic construct
  REGION 1..9: note = Protein transport protein Sec23B (569-577)
RRSPFLQVF

SEQ ID NO: 11963 - protein, 9 aa, synthetic construct
  REGION 1..9: note = Protein transport protein Sec23A (585-593)
RRSSFLQVF

SEQ ID NO: 11964 - protein, 9 aa, synthetic construct
  REGION 1..9: note = Nicastrin (225-233)
RRSSIQSTF

SEQ ID NO: 11965 - protein, 9 aa, synthetic construct
  REGION 1..9: note = Protein FAM73A (222-230)
RRWEQALTF

SEQ ID NO: 11966 - protein, 9 aa, synthetic construct
  REGION 1..9: note = Complement C1q subcomponent subunit C (184-192)
RSGVKVVTF

SEQ ID NO: 11967 - protein, 11 aa, synthetic construct
  REGION 1..11: note = RNA polymerase II subunit A C-terminal domain phosphatase SSU72 (18-28)
RSMEAHNILSK

SEQ ID NO: 11968 - protein, 10 aa, synthetic construct
  REGION 1..10: note = Heterogeneous nuclear ribonucleoproteins A2/B1 (60-69)
RSRGFGFVTF

SEQ ID NO: 11969 - protein, 9 aa, synthetic construct
  REGION 1..9: note = Dynamin-2 (199-207)
RTIGVITKL

SEQ ID NO: 11970 - protein, 11 aa, synthetic construct
  REGION 1..11: note = Profilin-1 (87-97)
RTKSTGGAPTF

SEQ ID NO: 11971 - protein, 11 aa, synthetic construct
  REGION 1..11: note = 28S ribosomal protein S7, mitochondrial (198-208)
RTLMPEKLSHK

SEQ ID NO: 11972 - protein, 10 aa, synthetic construct
  REGION 1..10: note = Protein SDA1 homolog (403-412)
RTLNPQMLQK

SEQ ID NO: 11973 - protein, 9 aa, synthetic construct
  REGION 1..9: note = Serine/threonine-protein kinase TAO1 (49-57)
RTNEVVAIK

SEQ ID NO: 11974 - protein, 10 aa, synthetic construct
  REGION 1..10: note = Serine/threonine-protein kinase TAO1 (49-58)
RTNEVVAIKK

SEQ ID NO: 11975 - protein, 10 aa, synthetic construct
  REGION 1..10: note = Ras GTPase-activating protein 3 (360-369)
RTQDPNTIFR

SEQ ID NO: 11976 - protein, 11 aa, synthetic construct
  REGION 1..11: note = Zinc finger protein 706 (45-55)
RTQMPDPKTFK

SEQ ID NO: 11977 - protein, 12 aa, synthetic construct
  REGION 1..12: note = Fructose-bisphosphate aldolase A (259-270)
RTVPPAVTGITF

SEQ ID NO: 11978 - protein, 9 aa, synthetic construct
  REGION 1..9: note = Protein LDOC1L (175-183)
RTYKSPLRH

SEQ ID NO: 11979 - protein, 11 aa, synthetic construct
  REGION 1..11: note = Sorting nexin-4 (243-253)
RVADRLYGVYK

SEQ ID NO: 11980 - protein, 9 aa, synthetic construct
  REGION 1..9: note = Cell division cycle and apoptosis regulator protein 1 (148-156)
RVFTGVVTK

SEQ ID NO: 11981 - protein, 10 aa, synthetic construct
  REGION 1..10: note = Centrosomal protein of 57 kDa (325-334)
RVINSIPLAK

SEQ ID NO: 11982 - protein, 9 aa, synthetic construct
  REGION 1..9: note = Hom s 1 (22-30)
RVKAPNKSL

SEQ ID NO: 11983 - protein, 9 aa, synthetic construct
  REGION 1..9: note = Cytosolic 10-formyltetrahydrofolate dehydrogenase (894-902)
RVKTVTFEY

SEQ ID NO: 11984 - protein, 10 aa, synthetic construct
  REGION 1..10: note = E3 ubiquitin-protein ligase HUWE1 (812-821)
RVLDFDVKRK

SEQ ID NO: 11985 - protein, 10 aa, synthetic construct
  REGION 1..10: note = Eukaryotic translation initiation factor 4 gamma 3 (1045-1054)
RVLDPSKFLK

SEQ ID NO: 11986 - protein, 9 aa, synthetic construct
  REGION 1..9: note = Paired amphipathic helix protein Sin3a (631-639)
RVLEAIQKK

SEQ ID NO: 11987 - protein, 10 aa, synthetic construct
  REGION 1..10: note = Smoothelin (476-485)
RVLLPTGNQR

SEQ ID NO: 11988 - protein, 12 aa, synthetic construct
  REGION 1..12: note = 40S ribosomal protein S18 (14-25)
RVLNTNIDGRRK

SEQ ID NO: 11989 - protein, 9 aa, synthetic construct
  REGION 1..9: note = WASH complex subunit strumpellin (573-581)
RVNPSMVTK

SEQ ID NO: 11990 - protein, 9 aa, synthetic construct
  REGION 1..9: note = Transcription factor 4 (552-560)
RVRDINEAF

SEQ ID NO: 11991 - protein, 9 aa, synthetic construct
  REGION 1..9: note = WW domain-binding protein 5 (82-90)
RVRNKLIVM

SEQ ID NO: 11992 - protein, 11 aa, synthetic construct
  REGION 1..11: note = Phosphatidylinositide phosphatase SAC1 (35-45)
RVSTEVTLAVK

SEQ ID NO: 11993 - protein, 11 aa, synthetic construct
  REGION 1..11: note = Periodic tryptophan protein 1 homolog (244-254)
RVWDISTVSSV

SEQ ID NO: 11994 - protein, 11 aa, synthetic construct
  REGION 1..11: note = 39S ribosomal protein L3, mitochondrial (250-260)
RVWPGTKMPGK

SEQ ID NO: 11995 - protein, 9 aa, synthetic construct
  REGION 1..9: note = Inositol-trisphosphate 3-kinase B (33-41)
RVWQGTMEK

SEQ ID NO: 11996 - protein, 10 aa, synthetic construct
  REGION 1..10: note = Guanine nucleotide-binding protein subunit beta-2-like 1 (308-317)
RVWQVTIGTR

SEQ ID NO: 11997 - protein, 9 aa, synthetic construct
  REGION 1..9: note = Cip1-interacting zinc finger protein (591-599)
RYFKTPRKF

SEQ ID NO: 11998 - protein, 9 aa, synthetic construct
  REGION 1..9: note = Signal transducer and activator of transcription 3 (93-101)
RYLEKPMEI

SEQ ID NO: 11999 - protein, 9 aa, synthetic construct
  REGION 1..9: note = Erythrocyte band 7 integral membrane protein (251-259)
RYLQTLTTI

SEQ ID NO: 12000 - protein, 9 aa, synthetic construct
  REGION 1..9: note = Telomerase protein component 1 (464-472)
RYPSNLQLF

SEQ ID NO: 12001 - protein, 9 aa, synthetic construct
  REGION 1..9: note = Histone H3.1 (41-49)
RYRPGTVAL

SEQ ID NO: 12002 - protein, 9 aa, synthetic construct
  REGION 1..9: note = 26S proteasome non-ATPase regulatory subunit 6 (267-275)
RYSVFFQSL

SEQ ID NO: 12003 - protein, 9 aa, synthetic construct
  REGION 1..9: note = G1/S-specific cyclin-D3 (37-45)
RYVPRASYF

SEQ ID NO: 12004 - protein, 8 aa, synthetic construct
  REGION 1..8: note = Heterogeneous nuclear ribonucleoprotein H (23-30)
SADEVQRF

SEQ ID NO: 12005 - protein, 9 aa, synthetic construct
  REGION 1..9: note = Solute carrier family 35 member E1 (53-61)
SAFPFPVTV

SEQ ID NO: 12006 - protein, 11 aa, synthetic construct
  REGION 1..11: note = Probable 28S rRNA (cytosine(4447)-C(5))-methyltransferase (511-521)
SAIDSVNATSK

SEQ ID NO: 12007 - protein, 9 aa, synthetic construct
  REGION 1..9: note = Catenin alpha-2 (667-675)
SARAIMAQL

SEQ ID NO: 12008 - protein, 9 aa, synthetic construct
  REGION 1..9: note = Large proline-rich protein BAG6 (145-153)
SAVDVHINM

SEQ ID NO: 12009 - protein, 9 aa, synthetic construct
  REGION 1..9: note = Gamma-interferon-inducible protein 16 (280-288)
SEAGPNQTF

SEQ ID NO: 12010 - protein, 9 aa, synthetic construct
  REGION 1..9: note = Y-box-binding protein 3 (149-157)
SEDAEKKVL

SEQ ID NO: 12011 - protein, 9 aa, synthetic construct
  REGION 1..9: note = Proline-, glutamic acid- and leucine-rich protein 1 (231-239)
SEDGDAHVL

SEQ ID NO: 12012 - protein, 11 aa, synthetic construct
  REGION 1..11: note = Vacuolar protein sorting-associated protein 35 (500-510)
SEDPDQQYLIL

SEQ ID NO: 12013 - protein, 12 aa, synthetic construct
  REGION 1..12: note = Actin-binding protein anillin (796-807)
SEFMPSKGSVTL

SEQ ID NO: 12014 - protein, 9 aa, synthetic construct
  REGION 1..9: note = Actin-related protein 2 (295-303)
SEFYKHIVL

SEQ ID NO: 12015 - protein, 10 aa, synthetic construct
  REGION 1..10: note = Neutral amino acid transporter A (22-31)
SEGEDLIRFF

SEQ ID NO: 12016 - protein, 10 aa, synthetic construct
  REGION 1..10: note = HCLS1-binding protein 3 (72-81)
SEIEEFYQKL

SEQ ID NO: 12017 - protein, 9 aa, synthetic construct
  REGION 1..9: note = Poly (ADP-ribose) polymerase 1 (25-33)
SESIPKDSL

SEQ ID NO: 12018 - protein, 11 aa, synthetic construct
  REGION 1..11: note = ATP-citrate synthase (769-779)
SETAVAKNQAL

SEQ ID NO: 12019 - protein, 11 aa, synthetic construct
  REGION 1..11: note = Antigen KI-67 (2326-2336)
SETSGHTQESL

SEQ ID NO: 12020 - protein, 8 aa, synthetic construct
  REGION 1..8: note = 40S ribosomal protein S23 (45-52)
SHAKGIVL

SEQ ID NO: 12021 - protein, 9 aa, synthetic construct
  REGION 1..9: note = Mitogen-activated protein kinase kinase kinase 1 (497-505)
SHDFYSHEL

SEQ ID NO: 12022 - protein, 11 aa, synthetic construct
  REGION 1..11: note = Bax inhibitor 1 (17-27)
SHITPSTQQHL

SEQ ID NO: 12023 - protein, 9 aa, synthetic construct
  REGION 1..9: note = Hypoxia-inducible factor 1-alpha (52-60)
SHLDKASVM

SEQ ID NO: 12024 - protein, 9 aa, synthetic construct
  REGION 1..9: note = Ubiquitin carboxyl-terminal hydrolase 37 (54-62)
SHNIKNVVL

SEQ ID NO: 12025 - protein, 9 aa, synthetic construct
  REGION 1..9: note = Protein-L-isoaspartate(D-aspartate) O-methyltransferase (9-17)
SHSELIHNL

SEQ ID NO: 12026 - protein, 9 aa, synthetic construct
  REGION 1..9: note = Cyclin-T1 (431-439)
SHSSVILKM

SEQ ID NO: 12027 - protein, 9 aa, synthetic construct
  REGION 1..9: note = Transcriptional activator Myb (257-265)
SHVPYPVAL

SEQ ID NO: 12028 - protein, 9 aa, synthetic construct
  REGION 1..9: note = Ubiquitin carboxyl-terminal hydrolase 22 (354-362)
SHVSGTTTL

SEQ ID NO: 12029 - protein, 9 aa, synthetic construct
  REGION 1..9: note = MAP kinase-activating death domain protein (181-189)
SHYPFFSTF

SEQ ID NO: 12030 - protein, 9 aa, synthetic construct
  REGION 1..9: note = Abnormal spindle-like microcephaly-associated protein (532-540)
SIFRTPISK

SEQ ID NO: 12031 - protein, 9 aa, synthetic construct
  REGION 1..9: note = ATPase family AAA domain-containing protein 5 (1793-1801)
SIIEYLPTL

SEQ ID NO: 12032 - protein, 9 aa, synthetic construct
  REGION 1..9: note = Exportin-4 (345-353)
SIISNLITV

SEQ ID NO: 12033 - protein, 9 aa, synthetic construct
  REGION 1..9: note = LIM domain and actin-binding protein 1 (168-176)
SIKDRMAKY

SEQ ID NO: 12034 - protein, 9 aa, synthetic construct
  REGION 1..9: note = GMP reductase 1 (115-123)
SILEAVPQV

SEQ ID NO: 12035 - protein, 9 aa, synthetic construct
  REGION 1..9: note = DNA replication licensing factor MCM4 (252-260)
SILEHQIQV

SEQ ID NO: 12036 - protein, 9 aa, synthetic construct
  REGION 1..9: note = Sperm-associated antigen 7 (79-87)
SILHDVVEV

SEQ ID NO: 12037 - protein, 9 aa, synthetic construct
  REGION 1..9: note = Regulation of nuclear pre-mRNA domain-containing protein 2 (432-440)
SILSSLTSV

SEQ ID NO: 12038 - protein, 9 aa, synthetic construct
  REGION 1..9: note = E3 ubiquitin-protein ligase TRIP12 (580-588)
SINAQRNAL

SEQ ID NO: 12039 - protein, 9 aa, synthetic construct
  REGION 1..9: note = Pre-mRNA-processing-splicing factor 8 (1693-1701)
SIYPSPTGV

SEQ ID NO: 12040 - protein, 10 aa, synthetic construct
  REGION 1..10: note = 40S ribosomal protein S3a (70-79)
SLADLQNDEV

SEQ ID NO: 12041 - protein, 9 aa, synthetic construct
  REGION 1..9: note = All-trans-retinol 13,14-reductase (241-249)
SLAEVLQQL

SEQ ID NO: 12042 - protein, 11 aa, synthetic construct
  REGION 1..11: note = Condensin complex subunit 1 (928-938)
SLAGDVALQQL

SEQ ID NO: 12043 - protein, 9 aa, synthetic construct
  REGION 1..9: note = AP-3 complex subunit delta-1 (220-228)
SLAPLFFKL

SEQ ID NO: 12044 - protein, 9 aa, synthetic construct
  REGION 1..9: note = Poly(rC)-binding protein 1 (337-345)
SLAQYLINA

SEQ ID NO: 12045 - protein, 11 aa, synthetic construct
  REGION 1..11: note = Tyrosine-protein kinase Fer (665-675)
SLDAAAGMLYL

SEQ ID NO: 12046 - protein, 9 aa, synthetic construct
  REGION 1..9: note = Hemoglobin subunit alpha (29-37)
SLDKFLASV

SEQ ID NO: 12047 - protein, 9 aa, synthetic construct
  REGION 1..9: note = General transcription factor 3C polypeptide 1 (202-210)
SLDKTSHSV

SEQ ID NO: 12048 - protein, 9 aa, synthetic construct
  REGION 1..9: note = Regulator of nonsense transcripts 1 (683-691)
SLFERLVVL

SEQ ID NO: 12049 - protein, 9 aa, synthetic construct
  REGION 1..9: note = MKL/myocardin-like protein 2 (820-828)
SLFGSPVAK

SEQ ID NO: 12050 - protein, 10 aa, synthetic construct
  REGION 1..10: note = Protein flightless-1 homolog (1009-1018)
SLFPGKLEVV

SEQ ID NO: 12051 - protein, 10 aa, synthetic construct
  REGION 1..10: note = Cip1-interacting zinc finger protein (720-729)
SLGHFENLQK

SEQ ID NO: 12052 - protein, 9 aa, synthetic construct
  REGION 1..9: note = T-complex protein 1 subunit eta (301-309)
SLHDAIMIV

SEQ ID NO: 12053 - protein, 10 aa, synthetic construct
  REGION 1..10: note = Coronin-1B (173-182)
SLHPDLIYNV

SEQ ID NO: 12054 - protein, 9 aa, synthetic construct
  REGION 1..9: note = T-complex protein 1 subunit zeta-2 (75-83)
SLIAKVATA

SEQ ID NO: 12055 - protein, 9 aa, synthetic construct
  REGION 1..9: note = Tyrosine-protein kinase JAK2 (367-375)
SLIDGYYRL

SEQ ID NO: 12056 - protein, 10 aa, synthetic construct
  REGION 1..10: note = Acidic leucine-rich nuclear phosphoprotein 32 family member B (48-57)
SLINVGLISV

SEQ ID NO: 12057 - protein, 9 aa, synthetic construct
  REGION 1..9: note = Protein Smaug homolog 2 (238-246)
SLIPTSPQV

SEQ ID NO: 12058 - protein, 9 aa, synthetic construct
  REGION 1..9: note = Syntaxin-binding protein 2 (433-441)
SLIRNLEQL

SEQ ID NO: 12059 - protein, 9 aa, synthetic construct
  REGION 1..9: note = Phospholipase A-2-activating protein (670-678)
SLISTILEV

SEQ ID NO: 12060 - protein, 9 aa, synthetic construct
  REGION 1..9: note = Serine/threonine-protein phosphatase PP1-beta catalytic subunit (10-18)
SLITRLLEV

SEQ ID NO: 12061 - protein, 9 aa, synthetic construct
  REGION 1..9: note = Schlafen family member 5 (473-481)
SLKQKLVNK

SEQ ID NO: 12062 - protein, 9 aa, synthetic construct
  REGION 1..9: note = Caprin-1 (184-192)
SLLDEFYKL

SEQ ID NO: 12063 - protein, 10 aa, synthetic construct
  REGION 1..10: note = Macrophage erythroblast attacher (64-73)
SLLDGVVEKL

SEQ ID NO: 12064 - protein, 8 aa, synthetic construct
  REGION 1..8: note = Cyclin-I (71-78)
SLLDRFLA

SEQ ID NO: 12065 - protein, 10 aa, synthetic construct
  REGION 1..10: note = Cyclin-I (71-80)
SLLDRFLATV

SEQ ID NO: 12066 - protein, 11 aa, synthetic construct
  REGION 1..11: note = Splicing factor 3B subunit 3 (509-519)
SLLGDDALVQV

SEQ ID NO: 12067 - protein, 9 aa, synthetic construct
  REGION 1..9: note = Histidine triad nucleotide-binding protein 1 (72-80)
SLLGHLMIV

SEQ ID NO: 12068 - protein, 11 aa, synthetic construct
  REGION 1..11: note = Acyl-CoA desaturase (80-90)
SLLHLGALYGI

SEQ ID NO: 12069 - protein, 9 aa, synthetic construct
  REGION 1..9: note = Splicing factor 3B subunit 1 (643-651)
SLLPFLKAV

SEQ ID NO: 12070 - protein, 9 aa, synthetic construct
  REGION 1..9: note = Transformation/transcription domain-associated protein (819-827)
SLLPYLPML

SEQ ID NO: 12071 - protein, 9 aa, synthetic construct
  REGION 1..9: note = Histone acetyltransferase KAT2A (320-328)
SLLRSIFTV

SEQ ID NO: 12072 - protein, 9 aa, synthetic construct
  REGION 1..9: note = Mitotic spindle assembly checkpoint protein MAD2B (114-122)
SLLSHVEQL

SEQ ID NO: 12073 - protein, 9 aa, synthetic construct
  REGION 1..9: note = Gamma-secretase C-terminal fragment 59 (436-444)
SLLYNVPAV

SEQ ID NO: 12074 - protein, 10 aa, synthetic construct
  REGION 1..10: note = Syntenin-1 (289-298)
SLMDHTIPEV

SEQ ID NO: 12075 - protein, 9 aa, synthetic construct
  REGION 1..9: note = DNA topoisomerase 2-alpha (763-771)
SLMMTIINL

SEQ ID NO: 12076 - protein, 9 aa, synthetic construct
  REGION 1..9: note = Phospholipase A-2-activating protein (625-633)
SLMSHAIEL

SEQ ID NO: 12077 - protein, 9 aa, synthetic construct
  REGION 1..9: note = RecQ-mediated genome instability protein 1 (437-445)
SLNNKILNR

SEQ ID NO: 12078 - protein, 10 aa, synthetic construct
  REGION 1..10: note = A-kinase anchor protein 13 (131-140)
SLPTVIMRNK

SEQ ID NO: 12079 - protein, 9 aa, synthetic construct
  REGION 1..9: note = Lon protease homolog 2, peroxisomal (51-59)
SLQSTILGV

SEQ ID NO: 12080 - protein, 9 aa, synthetic construct
  REGION 1..9: note = Up-regulator of cell proliferation (550-558)
SLSEKQYFL

SEQ ID NO: 12081 - protein, 9 aa, synthetic construct
  REGION 1..9: note = Pleiotropic regulator 1 (232-240)
SLTGHISTV

SEQ ID NO: 12082 - protein, 9 aa, synthetic construct
  REGION 1..9: note = Tyrosine-protein kinase JAK1 (405-413)
SLVDGYFRL

SEQ ID NO: 12083 - protein, 9 aa, synthetic construct
  REGION 1..9: note = Long-chain-fatty-acid-CoA ligase 1 (410-418)
SLWDRLIFH

SEQ ID NO: 12084 - protein, 9 aa, synthetic construct
  REGION 1..9: note = Nucleoside diphosphate kinase (246-254)
SLWFKPEEL

SEQ ID NO: 12085 - protein, 9 aa, synthetic construct
  REGION 1..9: note = Eukaryotic translation initiation factor 3 subunit C-like protein (382-390)
SLYDYNPNL

SEQ ID NO: 12086 - protein, 9 aa, synthetic construct
  REGION 1..9: note = DNA repair and recombination protein RAD54B (618-626)
SLYKGLLSV

SEQ ID NO: 12087 - protein, 9 aa, synthetic construct
  REGION 1..9: note = C-myc promoter-binding protein (1841-1849)
SLYREILFL

SEQ ID NO: 12088 - protein, 9 aa, synthetic construct
  REGION 1..9: note = Molybdate-anion transporter (297-305)
SLYRIATSK

SEQ ID NO: 12089 - protein, 11 aa, synthetic construct
  REGION 1..11: note = 60S ribosome subunit biogenesis protein NIP7 homolog (135-145)
SMADIPLGFGV

SEQ ID NO: 12090 - protein, 9 aa, synthetic construct
  REGION 1..9: note = Eukaryotic translation initiation factor 3 subunit L (348-356)
SMFQRTTYK

SEQ ID NO: 12091 - protein, 9 aa, synthetic construct
  REGION 1..9: note = Probable ATP-dependent RNA helicase DDX6 (451-459)
SNIDKSLYV

SEQ ID NO: 12092 - protein, 9 aa, synthetic construct
  REGION 1..9: note = Integrator complex subunit 5 (495-503)
SPAGLKAVL

SEQ ID NO: 12093 - protein, 9 aa, synthetic construct
  REGION 1..9: note = Centrosomal protein of 170 kDa (1260-1268)
SPALKTTRL

SEQ ID NO: 12094 - protein, 8 aa, synthetic construct
  REGION 1..8: note = Cellular tumor antigen p53 (2-9)
SPALNKMF

SEQ ID NO: 12095 - protein, 9 aa, synthetic construct
  REGION 1..9: note = E3 ubiquitin-protein ligase HUWE1 (376-384)
SPAPTITSL

SEQ ID NO: 12096 - protein, 9 aa, synthetic construct
  REGION 1..9: note = Type II inositol 3,4-bisphosphate 4-phosphatase (439-447)
SPDSLKNSL

SEQ ID NO: 12097 - protein, 9 aa, synthetic construct
  REGION 1..9: note = N6-adenosine-methyltransferase 70 kDa subunit (525-533)
SPGTRKIEL

SEQ ID NO: 12098 - protein, 9 aa, synthetic construct
  REGION 1..9: note = Integrator complex subunit 1 (254-262)
SPHGGALVM

SEQ ID NO: 12099 - protein, 9 aa, synthetic construct
  REGION 1..9: note = Protein CASC5 (837-845)
SPIEKSGVL

SEQ ID NO: 12100 - protein, 9 aa, synthetic construct
  REGION 1..9: note = Ephrin-A4 (18-26)
SPLRGGSSL

SEQ ID NO: 12101 - protein, 9 aa, synthetic construct
  REGION 1..9: note = Cullin-7 (801-809)
SPNTDREVL

SEQ ID NO: 12102 - protein, 9 aa, synthetic construct
  REGION 1..9: note = Tumor suppressor p53-binding protein 1 (1028-1036)
SPQKTMSVL

SEQ ID NO: 12103 - protein, 9 aa, synthetic construct
  REGION 1..9: note = Stromal interaction molecule 2 (531-539)
SPQPQRAQL

SEQ ID NO: 12104 - protein, 10 aa, synthetic construct
  REGION 1..10: note = Polyadenylate-binding protein-interacting protein 1 (120-129)
SPQSGNFRQL

SEQ ID NO: 12105 - protein, 9 aa, synthetic construct
  REGION 1..9: note = Proteasomal ATPase-associated factor 1 (195-203)
SPRAPVQVI

SEQ ID NO: 12106 - protein, 10 aa, synthetic construct
  REGION 1..10: note = Gephyrin (270-279)
SPRAQATSRL

SEQ ID NO: 12107 - protein, 9 aa, synthetic construct
  REGION 1..9: note = Tumor suppressor p53-binding protein 1 (1656-1664)
SPRASMGVL

SEQ ID NO: 12108 - protein, 10 aa, synthetic construct
  REGION 1..10: note = Ras-related protein Rab-7a (111-120)
SPRDPENFPF

SEQ ID NO: 12109 - protein, 9 aa, synthetic construct
  REGION 1..9: note = Ankyrin repeat and LEM domain-containing protein 2 (512-520)
SPRDPVLTL

SEQ ID NO: 12110 - protein, 9 aa, synthetic construct
  REGION 1..9: note = Helicase SKI2W (1016-1024)
SPRFPAQYL

SEQ ID NO: 12111 - protein, 11 aa, synthetic construct
  REGION 1..11: note = Pleckstrin homology domain-containing family G member 2 (45-55)
SPRGSGSSTSL

SEQ ID NO: 12112 - protein, 9 aa, synthetic construct
  REGION 1..9: note = Serine/threonine-protein kinase receptor R3 (5-13)
SPRKGLLML

SEQ ID NO: 12113 - protein, 9 aa, synthetic construct
  REGION 1..9: note = Procollagen-lysine,2-oxoglutarate 5-dioxygenase 2 (174-182)
SPRKGWSFM

SEQ ID NO: 12114 - protein, 9 aa, synthetic construct
  REGION 1..9: note = Tyrosine-protein kinase BAZ1B (197-205)
SPRKLPTSL

SEQ ID NO: 12115 - protein, 9 aa, synthetic construct
  REGION 1..9: note = Mitochondrial carrier homolog 1 (89-97)
SPRLMSNAL

SEQ ID NO: 12116 - protein, 10 aa, synthetic construct
  REGION 1..10: note = Intercellular adhesion molecule 1 (5-14)
SPRPALPALL

SEQ ID NO: 12117 - protein, 9 aa, synthetic construct
  REGION 1..9: note = AP-5 complex subunit mu-1 (117-125)
SPRPPLISV

SEQ ID NO: 12118 - protein, 9 aa, synthetic construct
  REGION 1..9: note = Integrator complex subunit 1 (211-219)
SPRPVALAL

SEQ ID NO: 12119 - protein, 11 aa, synthetic construct
  REGION 1..11: note = Nuclear receptor subfamily 1 group D member 1 (405-415)
SPRQGNSKNVL

SEQ ID NO: 12120 - protein, 9 aa, synthetic construct
  REGION 1..9: note = Sorbin and SH3 domain-containing protein 2 (230-238)
SPRSYSSTL

SEQ ID NO: 12121 - protein, 9 aa, synthetic construct
  REGION 1..9: note = Baculoviral IAP repeat-containing protein 6 (4258-4266)
SPRVPNSSV

SEQ ID NO: 12122 - protein, 11 aa, synthetic construct
  REGION 1..11: note = Thymidine kinase, cytosolic (13-23)
SPSKTRGQIQV

SEQ ID NO: 12123 - protein, 9 aa, synthetic construct
  REGION 1..9: note = Histone deacetylase 9 (322-330)
SPSLPNITL

SEQ ID NO: 12124 - protein, 8 aa, synthetic construct
  REGION 1..8: note = Nucleolin (67-74)
SPTKKVAV

SEQ ID NO: 12125 - protein, 9 aa, synthetic construct
  REGION 1..9: note = Nucleolar protein 11 (166-174)
SQDPGTHVV

SEQ ID NO: 12126 - protein, 9 aa, synthetic construct
  REGION 1..9: note = Unconventional myosin-If (124-132)
SRFGKYFEI

SEQ ID NO: 12127 - protein, 10 aa, synthetic construct
  REGION 1..10: note = DnaJ homolog subfamily B member 2 (131-140)
SRHSGPFFTF

SEQ ID NO: 12128 - protein, 9 aa, synthetic construct
  REGION 1..9: note = Hyccin (228-236)
SRIPVSSGF

SEQ ID NO: 12129 - protein, 9 aa, synthetic construct
  REGION 1..9: note = Merlin (587-595)
SRVAFFEEL

SEQ ID NO: 12130 - protein, 9 aa, synthetic construct
  REGION 1..9: note = Catenin beta-1 (341-349)
SRVLKVLSV

SEQ ID NO: 12131 - protein, 11 aa, synthetic construct
  REGION 1..11: note = Stomatin-like protein 2, mitochondrial (29-39)
SSGLPRNTVVL

SEQ ID NO: 12132 - protein, 9 aa, synthetic construct
  REGION 1..9: note = General transcription factor 3C polypeptide 2 (775-783)
SSGVPNPPK

SEQ ID NO: 12133 - protein, 10 aa, synthetic construct
  REGION 1..10: note = 60S ribosomal protein L10a (2-11)
SSKVSRDTLY

SEQ ID NO: 12134 - protein, 9 aa, synthetic construct
  REGION 1..9: note = Ashwin (155-163)
SSNLPVNNK

SEQ ID NO: 12135 - protein, 9 aa, synthetic construct
  REGION 1..9: note = Transmembrane protein 176A (50-58)
SSRLLVASW

SEQ ID NO: 12136 - protein, 9 aa, synthetic construct
  REGION 1..9: note = Vimentin (72-80)
SSVPGVRLL

SEQ ID NO: 12137 - protein, 9 aa, synthetic construct
  REGION 1..9: note = Synaptotagmin-like protein 2 (282-290)
STDSETLRY

SEQ ID NO: 12138 - protein, 9 aa, synthetic construct
  REGION 1..9: note = Ribosomal protein S6 kinase alpha-3 (327-335)
STIDWNKLY

SEQ ID NO: 12139 - protein, 11 aa, synthetic construct
  REGION 1..11: note = Serine/threonine-protein kinase RIO2 (494-504)
STIPPELVKQK

SEQ ID NO: 12140 - protein, 12 aa, synthetic construct
  REGION 1..12: note = AP-3 complex subunit beta-1 (26-37)
STISPSGAFGLF

SEQ ID NO: 12141 - protein, 11 aa, synthetic construct
  REGION 1..11: note = Forkhead box protein O1 (544-554)
STMPHTSGMNR

SEQ ID NO: 12142 - protein, 9 aa, synthetic construct
  REGION 1..9: note = ATP-dependent RNA helicase DDX3X (410-418)
STSENITQK

SEQ ID NO: 12143 - protein, 10 aa, synthetic construct
  REGION 1..10: note = Elongation factor 1-alpha 1 (21-30)
STTTGHLIYK

SEQ ID NO: 12144 - protein, 9 aa, synthetic construct
  REGION 1..9: note = Protein STON1-GTF2A1L (339-347)
SVAGKIHTV

SEQ ID NO: 12145 - protein, 10 aa, synthetic construct
  REGION 1..10: note = Lysine-specific demethylase 7A (208-217)
SVFPKPFVQK

SEQ ID NO: 12146 - protein, 10 aa, synthetic construct
  REGION 1..10: note = Round spermatid basic protein 1-like protein (733-742)
SVFSDKLHSK

SEQ ID NO: 12147 - protein, 10 aa, synthetic construct
  REGION 1..10: note = Disintegrin and metalloproteinase domain-containing protein 10 (118-127)
SVIDGRFEGF

SEQ ID NO: 12148 - protein, 9 aa, synthetic construct
  REGION 1..9: note = Inactive phospholipase C-like protein 2 (372-380)
SVIDIINKY

SEQ ID NO: 12149 - protein, 9 aa, synthetic construct
  REGION 1..9: note = E3 ubiquitin-protein ligase UBR2 (812-820)
SVIEAVAHF

SEQ ID NO: 12150 - protein, 9 aa, synthetic construct
  REGION 1..9: note = Transcription factor MafG (149-157)
SVITIVKSK

SEQ ID NO: 12151 - protein, 10 aa, synthetic construct
  REGION 1..10: note = Probable E3 ubiquitin-protein ligase HERC4 (549-558)
SVLEPPLFLK

SEQ ID NO: 12152 - protein, 10 aa, synthetic construct
  REGION 1..10: note = 40S ribosomal protein S6 (105-114)
SVLNLVIVKK

SEQ ID NO: 12153 - protein, 10 aa, synthetic construct
  REGION 1..10: note = Pumilio homolog 1 (183-192)
SVSQPIMVQR

SEQ ID NO: 12154 - protein, 9 aa, synthetic construct
  REGION 1..9: note = Phosphatidylinositol 3-kinase regulatory subunit gamma (51-59)
SVVELINHY

SEQ ID NO: 12155 - protein, 9 aa, synthetic construct
  REGION 1..9: note Dolichyl-diphosphooligosaccharide-proteinosyltransferase subunit DAD1 (4-12)
SVVSVISRF

SEQ ID NO: 12156 - protein, 9 aa, synthetic construct
  REGION 1..9: note = Protein TBRG4 (151-159)
SVWHGTLSK

SEQ ID NO: 12157 - protein, 9 aa, synthetic construct
  REGION 1..9: note = Nesprin-1 (4541-4549)
SVYDSVLQK

SEQ ID NO: 12158 - protein, 11 aa, synthetic construct
  REGION 1..11: note = Protein ELYS (1415-1425)
SVYEGKIFTQK

SEQ ID NO: 12159 - protein, 10 aa, synthetic construct
  REGION 1..10: note = ATPase family AAA domain-containing protein 2 (757-766)
SVYENGLSQK

SEQ ID NO: 12160 - protein, 9 aa, synthetic construct
  REGION 1..9: note = Type I inositol 1,4,5-trisphosphate 5-phosphatase (94-102)
SVYSGIRHK

SEQ ID NO: 12161 - protein, 9 aa, synthetic construct
  REGION 1..9: note = Disks large homolog 3 (45-53)
SYGDILHVI

SEQ ID NO: 12162 - protein, 9 aa, synthetic construct
  REGION 1..9: note = Long-chain-fatty-acid-CoA ligase 5 (359-367)
SYLPLAHMF

SEQ ID NO: 12163 - protein, 9 aa, synthetic construct
  REGION 1..9: note = Trafficking protein particle complex subunit 1 (132-140)
SYVRSLPFF

SEQ ID NO: 12164 - protein, 9 aa, synthetic construct
  REGION 1..9: note = HLA class I histocompatibility antigen, B-15 alpha chain (158-166)
TAADTAAQI

SEQ ID NO: 12165 - protein, 9 aa, synthetic construct
  REGION 1..9: note = Bromodomain testis-specific protein (144-152)
TAAPPAQPL

SEQ ID NO: 12166 - protein, 8 aa, synthetic construct
  REGION 1..8: note = Heterochromatin protein 1-binding protein 3 (363-370)
TALKKYVL

SEQ ID NO: 12167 - protein, 8 aa, synthetic construct
  REGION 1..8: note = Probable E3 ubiquitin-protein ligase HERC4 (592-599)
TALKVLEI

SEQ ID NO: 12168 - protein, 8 aa, synthetic construct
  REGION 1..8: note = Histone H1.3 (4-11)
TAPLAPTI

SEQ ID NO: 12169 - protein, 9 aa, synthetic construct
  REGION 1..9: note = Malectin (10-18)
TAVALLRLL

SEQ ID NO: 12170 - protein, 9 aa, synthetic construct
  REGION 1..9: note = Glyoxalase domain-containing protein 4 (117-125)
TEAPGGYKF

SEQ ID NO: 12171 - protein, 9 aa, synthetic construct
  REGION 1..9: note = SRSF protein kinase 2 (529-537)
TEDIQTRQY

SEQ ID NO: 12172 - protein, 12 aa, synthetic construct
  REGION 1..12: note = Twinfilin-2 (164-175)
TEISVESKHQTL

SEQ ID NO: 12173 - protein, 9 aa, synthetic construct
  REGION 1..9: note = Nucleolar protein 14 (741-749)
TEMESQKQL

SEQ ID NO: 12174 - protein, 9 aa, synthetic construct
  REGION 1..9: note = ATPase WRNIP1 (477-485)
TENDVKEGL

SEQ ID NO: 12175 - protein, 10 aa, synthetic construct
  REGION 1..10: note = 4F2 cell-surface antigen heavy chain (5-14)
TEVDMKEVEL

SEQ ID NO: 12176 - protein, 9 aa, synthetic construct
  REGION 1..9: note = Transgelin (191-199)
TGYGRPRQI

SEQ ID NO: 12177 - protein, 9 aa, synthetic construct
  REGION 1..9: note = Splicing factor 3A subunit 3 (238-246)
THAGAHLDL

SEQ ID NO: 12178 - protein, 9 aa, synthetic construct
  REGION 1..9: note = Histone-binding protein RBBP4 (37-45)
THALEWPSL

SEQ ID NO: 12179 - protein, 9 aa, synthetic construct
  REGION 1..9: note = Bifunctional glutamate/proline-tRNA ligase (614-622)
THALPIPVI

SEQ ID NO: 12180 - protein, 9 aa, synthetic construct
  REGION 1..9: note = Activator of 90 kDa heat shock protein ATPase homolog 1 (236-244)
THAPATLEA

SEQ ID NO: 12181 - protein, 9 aa, synthetic construct
  REGION 1..9: note = Integrin beta-7 (446-454)
THCLPEPHL

SEQ ID NO: 12182 - protein, 10 aa, synthetic construct
  REGION 1..10: note = Echinoderm microtubule-associated protein-like 3 (848-857)
THDDSHLVSL

SEQ ID NO: 12183 - protein, 9 aa, synthetic construct
  REGION 1..9: note = Double-stranded RNA-specific adenosine deaminase (1054-1062)
THFLQPIYL

SEQ ID NO: 12184 - protein, 9 aa, synthetic construct
  REGION 1..9: note = Histone deacetylase complex subunit SAP18 (85-93)
THFNFAIVF

SEQ ID NO: 12185 - protein, 9 aa, synthetic construct
  REGION 1..9: note = Ubiquitin carboxyl-terminal hydrolase 34 (2105-2113)
THFSFPLRL

SEQ ID NO: 12186 - protein, 9 aa, synthetic construct
  REGION 1..9: note = Syntaxin-binding protein 1 (570-578)
THILTPQKL

SEQ ID NO: 12187 - protein, 10 aa, synthetic construct
  REGION 1..10: note = Telomere-associated protein RIF1 (62-71)
THISSQNSEL

SEQ ID NO: 12188 - protein, 10 aa, synthetic construct
  REGION 1..10: note = RE1-silencing transcription factor (917-926)
THISSSGQNL

SEQ ID NO: 12189 - protein, 9 aa, synthetic construct
  REGION 1..9: note = Microtubule-actin cross-linking factor 1, isoforms 1/2/3/5 (6374-6382)
THMELYSQL

SEQ ID NO: 12190 - protein, 9 aa, synthetic construct
  REGION 1..9: note = ATP-citrate synthase (409-417)
THMTAIVGM

SEQ ID NO: 12191 - protein, 9 aa, synthetic construct
  REGION 1..9: note = Protein tyrosine phosphatase type IVA 1 (22-30)
THNPTNATL

SEQ ID NO: 12192 - protein, 9 aa, synthetic construct
  REGION 1..9: note = Phospholipase D3 (389-397)
THSDIQVKL

SEQ ID NO: 12193 - protein, 9 aa, synthetic construct
  REGION 1..9: note = General transcription factor IIH subunit 5 (41-49)
THVFVIAEL

SEQ ID NO: 12194 - protein, 10 aa, synthetic construct
  REGION 1..10: note = DNA replication licensing factor MCM6 (781-790)
THYDHVLIEL

SEQ ID NO: 12195 - protein, 9 aa, synthetic construct
  REGION 1..9: note = Microfibrillar-associated protein 1 (372-380)
TILPKVMQV

SEQ ID NO: 12196 - protein, 9 aa, synthetic construct
  REGION 1..9: note = Putative protein arginine N-methyltransferase 9 (164-172)
TIYNAAIQK

SEQ ID NO: 12197 - protein, 9 aa, synthetic construct
  REGION 1..9: note = Protein NYNRIN (1487-1495)
TLADIIARL

SEQ ID NO: 12198 - protein, 9 aa, synthetic construct
  REGION 1..9: note = Ankyrin repeat and KH domain-containing protein 1 (1028-1036)
TLDDLIAAV

SEQ ID NO: 12199 - protein, 9 aa, synthetic construct
  REGION 1..9: note = TGF-beta-activated kinase 1 and MAP3K7-binding protein 1 (426-434)
TLDEATPTL

SEQ ID NO: 12200 - protein, 9 aa, synthetic construct
  REGION 1..9: note = Exocyst complex component 1 (91-99)
TLGNVLVTV

SEQ ID NO: 12201 - protein, 10 aa, synthetic construct
  REGION 1..10: note = Spliceosome RNA helicase DDX39B (114-123)
TLHGLQQYYV

SEQ ID NO: 12202 - protein, 9 aa, synthetic construct
  REGION 1..9: note = Hexokinase-1 (35-43)
TLIDIMTRF

SEQ ID NO: 12203 - protein, 9 aa, synthetic construct
  REGION 1..9: note = Short transient receptor potential channel 4-associated protein (209-217)
TLIEDILGV

SEQ ID NO: 12204 - protein, 9 aa, synthetic construct
  REGION 1..9: note = Cullin-7 (386-394)
TLISELVQA

SEQ ID NO: 12205 - protein, 11 aa, synthetic construct
  REGION 1..11: note = T-complex protein 1 subunit eta (11-21)
TLLAAEFLKQV

SEQ ID NO: 12206 - protein, 11 aa, synthetic construct
  REGION 1..11: note = NADH-cytochrome b5 reductase 1 (39-49)
TLLDPNEKYLL

SEQ ID NO: 12207 - protein, 9 aa, synthetic construct
  REGION 1..9: note = Centrosomal protein POC5 (254-262)
TLLKKVWKV

SEQ ID NO: 12208 - protein, 9 aa, synthetic construct
  REGION 1..9: note = Protrudin (88-96)
TLLNSTLFL

SEQ ID NO: 12209 - protein, 9 aa, synthetic construct
  REGION 1..9: note = Eukaryotic translation initiation factor 3 subunit M (163-171)
TLLRLLYEA

SEQ ID NO: 12210 - protein, 9 aa, synthetic construct
  REGION 1..9: note = DNA mismatch repair protein Msh6 (739-747)
TLNNLEIFL

SEQ ID NO: 12211 - protein, 9 aa, synthetic construct
  REGION 1..9: note = Protein SDA1 homolog (404-412)
TLNPQMLQK

SEQ ID NO: 12212 - protein, 9 aa, synthetic construct
  REGION 1..9: note = Testis-expressed sequence 10 protein (436-444)
TLSDIMVSL

SEQ ID NO: 12213 - protein, 9 aa, synthetic construct
  REGION 1..9: note = Transcription initiation factor TFIID subunit 8 (89-97)
TLSDIVVTL

SEQ ID NO: 12214 - protein, 9 aa, synthetic construct
  REGION 1..9: note = Serine/threonine-protein kinase SIK2 (269-277)
TLSEVTNQL

SEQ ID NO: 12215 - protein, 9 aa, synthetic construct
  REGION 1..9: note = MAP kinase-activating death domain protein (291-299)
TLVDFPLHL

SEQ ID NO: 12216 - protein, 11 aa, synthetic construct
  REGION 1..11: note = Motile sperm domain-containing protein 1 (39-49)
TLYNPYEFALK

SEQ ID NO: 12217 - protein, 9 aa, synthetic construct
  REGION 1..9: note = Chondroitin sulfate proteoglycan 4 (21-29)
TMLARLASA

SEQ ID NO: 12218 - protein, 9 aa, synthetic construct
  REGION 1..9: note = Poly (ADP-ribose) polymerase 14 (1511-1519)
TMNEKQLFH

SEQ ID NO: 12219 - protein, 9 aa, synthetic construct
  REGION 1..9: note = ATP-binding cassette sub-family F member 2 (218-226)
TPAMQRKKL

SEQ ID NO: 12220 - protein, 9 aa, synthetic construct
  REGION 1..9: note = Splicing factor, arginine/serine-rich 19 (1147-1155)
TPAPVPTSL

SEQ ID NO: 12221 - protein, 9 aa, synthetic construct
  REGION 1..9: note = SCAN domain-containing protein 1 (132-140)
TPGPAGSRL

SEQ ID NO: 12222 - protein, 9 aa, synthetic construct
  REGION 1..9: note Dolichyl-diphosphooligosaccharide-proteinosyltransferase subunit 2 (291-299)
TPHQTFVRL

SEQ ID NO: 12223 - protein, 9 aa, synthetic construct
  REGION 1..9: note = Protein ELYS (1773-1781)
TPKMPGQSV

SEQ ID NO: 12224 - protein, 9 aa, synthetic construct
  REGION 1..9: note = Microtubule-associated protein 4 (892-900)
TPMPSRPST

SEQ ID NO: 12225 - protein, 8 aa, synthetic construct
  REGION 1..8: note = Nucleophosmin (95-102)
TPPVVLRL

SEQ ID NO: 12226 - protein, 11 aa, synthetic construct
  REGION 1..11: note = Filamin-A (812-822)
TPRGAGSYTIM

SEQ ID NO: 12227 - protein, 11 aa, synthetic construct
  REGION 1..11: note = 40S ribosomal protein S9 (15-25)
TPRRPFEKSRL

SEQ ID NO: 12228 - protein, 9 aa, synthetic construct
  REGION 1..9: note = BTB/POZ domain-containing adapter for CUL3-mediated RhoA degradation protein 2 (290-298)
TPRVPDNSL

SEQ ID NO: 12229 - protein, 9 aa, synthetic construct
  REGION 1..9: note = Sentrin-specific protease 3 (353-361)
TPSRKGLVL

SEQ ID NO: 12230 - protein, 8 aa, synthetic construct
  REGION 1..8: note = Interferon regulatory factor 1 (54-61)
TPVRLPSI

SEQ ID NO: 12231 - protein, 9 aa, synthetic construct
  REGION 1..9: note = Replication protein A 70 kDa DNA-binding subunit (191-199)
TPYQSKWTI

SEQ ID NO: 12232 - protein, 9 aa, synthetic construct
  REGION 1..9: note = Splicing factor U2AF 65 kDa subunit (179-187)
TQAPGNPVL

SEQ ID NO: 12233 - protein, 9 aa, synthetic construct
  REGION 1..9: note = GPN-loop GTPase 1 (88-96)
TRFDQVMKF

SEQ ID NO: 12234 - protein, 9 aa, synthetic construct
  REGION 1..9: note = RuvB-like 2 (391-399)
TRIGLETSL

SEQ ID NO: 12235 - protein, 9 aa, synthetic construct
  REGION 1..9: note = 40S ribosomal protein S4, Y isoform 2 (220-228)
TRISNIFVI

SEQ ID NO: 12236 - protein, 9 aa, synthetic construct
  REGION 1..9: note = 40S ribosomal protein S4, X isoform (201-209)
TRLSNIFVI

SEQ ID NO: 12237 - protein, 9 aa, synthetic construct
  REGION 1..9: note = Transmembrane protein 147 (157-165)
TRYDLYHTF

SEQ ID NO: 12238 - protein, 10 aa, synthetic construct
  REGION 1..10: note = Transcriptional regulator Kaiso (365-374)
TSFDGSLIQK

SEQ ID NO: 12239 - protein, 8 aa, synthetic construct
  REGION 1..8: note = HCG2043421, isoform CRA_c (58-65)
TSKQPVGF

SEQ ID NO: 12240 - protein, 9 aa, synthetic construct
  REGION 1..9: note = WD repeat-containing protein 78 (675-683)
TSVVYDVAW

SEQ ID NO: 12241 - protein, 9 aa, synthetic construct
  REGION 1..9: note = Non-POU domain-containing octamer-binding protein (127-135)
TTFPRPVTV

SEQ ID NO: 12242 - protein, 11 aa, synthetic construct
  REGION 1..11: note = Nicotinamide phosphoribosyltransferase (220-230)
TVAGLALIKKY

SEQ ID NO: 12243 - protein, 9 aa, synthetic construct
  REGION 1..9: note = 1,2-dihydroxy-3-keto-5-methylthiopentene dioxygenase (150-158)
TVDEKNYTK

SEQ ID NO: 12244 - protein, 10 aa, synthetic construct
  REGION 1..10: note = Aldehyde dehydrogenase family 16 member A1 (661-670)
TVFPAGLANV

SEQ ID NO: 12245 - protein, 9 aa, synthetic construct
  REGION 1..9: note = Protein phosphatase 1D (261-269)
TVIDQIPFL

SEQ ID NO: 12246 - protein, 9 aa, synthetic construct
  REGION 1..9: note = Integrin beta-7 (200-208)
TVLPFVSTV

SEQ ID NO: 12247 - protein, 9 aa, synthetic construct
  REGION 1..9: note = Caspase-1 (49-57)
TVMDKTRAL

SEQ ID NO: 12248 - protein, 9 aa, synthetic construct
  REGION 1..9: note = Kelch-like protein 8 (200-208)
TVMGKIFAV

SEQ ID NO: 12249 - protein, 9 aa, synthetic construct
  REGION 1..9: note CMP-N-acetylneuraminate-beta-galactosamide-alpha-2,3-sialyl transf erase 1 (229-237)
TYIPVPAKI

SEQ ID NO: 12250 - protein, 9 aa, synthetic construct
  REGION 1..9: note = Vacuolar protein sorting-associated protein 13C (2564-2572)
TYISWKEEL

SEQ ID NO: 12251 - protein, 9 aa, synthetic construct
  REGION 1..9: note = Rho GTPase-activating protein 18 (597-605)
TYMKDLYQL

SEQ ID NO: 12252 - protein, 9 aa, synthetic construct
  REGION 1..9: note = Plexin-B2 (1279-1287)
TYTDRVFFL

SEQ ID NO: 12253 - protein, 9 aa, synthetic construct
  REGION 1..9: note = Poly (ADP-ribose) polymerase 14 (1544-1552)
VAYGKGTYF

SEQ ID NO: 12254 - protein, 9 aa, synthetic construct
  REGION 1..9: note = Zinc finger SWIM domain-containing protein 1 (322-330)
VESHIQHSL

SEQ ID NO: 12255 - protein, 9 aa, synthetic construct
  REGION 1..9: note = Putative 40S ribosomal protein S10-like (27-35)
VHMPKHPEL

SEQ ID NO: 12256 - protein, 10 aa, synthetic construct
  REGION 1..10: note = Inosine-5'-monophosphate dehydrogenase 2 (361-370)
VIADGGIQNV

SEQ ID NO: 12257 - protein, 9 aa, synthetic construct
  REGION 1..9: note = Protein DENND6A (261-269)
VILPTVHEV

SEQ ID NO: 12258 - protein, 9 aa, synthetic construct
  REGION 1..9: note = N-glycosylase/DNA lyase (58-66)
VLADQVWTL

SEQ ID NO: 12259 - protein, 9 aa, synthetic construct
  REGION 1..9: note = CREB-binding protein (238-246)
VLAETLTQV

SEQ ID NO: 12260 - protein, 9 aa, synthetic construct
  REGION 1..9: note = Transmembrane protein 209 (29-37)
VLAWGLLNV

SEQ ID NO: 12261 - protein, 9 aa, synthetic construct
  REGION 1..9: note = Kelch-like protein 5 (324-332)
VLDDKLYVV

SEQ ID NO: 12262 - protein, 9 aa, synthetic construct
  REGION 1..9: note = RNA-binding protein 40 (490-498)
VLFGKPMVV

SEQ ID NO: 12263 - protein, 9 aa, synthetic construct
  REGION 1..9: note = Pre-mRNA-splicing factor ATP-dependent RNA helicase PRP16 (663-671)
VLFGLLREV

SEQ ID NO: 12264 - protein, 12 aa, synthetic construct
  REGION 1..12: note = Translocon-associated protein subunit alpha (19-30)
VLFRGGPRGLLA

SEQ ID NO: 12265 - protein, 12 aa, synthetic construct
  REGION 1..12: note = Translocon-associated protein subunit alpha (19-30)
VLFRGGPRGSLA

SEQ ID NO: 12266 - protein, 11 aa, synthetic construct
  REGION 1..11: note = Major prion protein (226-236)
VLFSSPPVILL

SEQ ID NO: 12267 - protein, 9 aa, synthetic construct
  REGION 1..9: note = Fibroblast growth factor receptor substrate 2 (252-260)
VLGPTPVQK

SEQ ID NO: 12268 - protein, 10 aa, synthetic construct
  REGION 1..10: note = Actin-related protein 2/3 complex subunit 4 (61-70)
VLIEGSINSV

SEQ ID NO: 12269 - protein, 10 aa, synthetic construct
  REGION 1..10: note = mRNA cap guanine-N7 methyltransferase (182-191)
VLIGEFLEKV

SEQ ID NO: 12270 - protein, 10 aa, synthetic construct
  REGION 1..10: note = Trabeculin-alpha (4505-4514)
VLIKNLLVSV

SEQ ID NO: 12271 - protein, 9 aa, synthetic construct
  REGION 1..9: note = ATP-binding cassette sub-family F member 3 (85-93)
VLLDAPIQL

SEQ ID NO: 12272 - protein, 9 aa, synthetic construct
  REGION 1..9: note = Vacuolar protein sorting-associated protein 8 homolog (414-422)
VLLDSVEKL

SEQ ID NO: 12273 - protein, 10 aa, synthetic construct
  REGION 1..10: note = Fragile X mental retardation protein 1 (19-28)
VLLDYHLNYL

SEQ ID NO: 12274 - protein, 9 aa, synthetic construct
  REGION 1..9: note = Signal recognition particle 14 kDa protein (2-10)
VLLESEQFL

SEQ ID NO: 12275 - protein, 12 aa, synthetic construct
  REGION 1..12: note = Signal recognition particle 14 kDa protein (2-13)
VLLESEQFLTEL

SEQ ID NO: 12276 - protein, 9 aa, synthetic construct
  REGION 1..9: note = Leucine-tRNA ligase, cytoplasmic (328-336)
VLMENIVYL

SEQ ID NO: 12277 - protein, 10 aa, synthetic construct
  REGION 1..10: note = E3 ubiquitin-protein ligase MARCH6 (457-466)
VLPNFLPYNV

SEQ ID NO: 12278 - protein, 9 aa, synthetic construct
  REGION 1..9: note = DNA replication licensing factor MCM5 (120-128)
VLQDIQVML

SEQ ID NO: 12279 - protein, 9 aa, synthetic construct
  REGION 1..9: note = Sarcolemmal membrane-associated protein (140-148)
VLQEKIEVV

SEQ ID NO: 12280 - protein, 9 aa, synthetic construct
  REGION 1..9: note = Trabeculin-alpha (2088-2096)
VLQGKLAEV

SEQ ID NO: 12281 - protein, 9 aa, synthetic construct
  REGION 1..9: note = Cytoplasmic dynein 1 heavy chain 1 (1781-1789)
VLSNVEVTL

SEQ ID NO: 12282 - protein, 9 aa, synthetic construct
  REGION 1..9: note = 5-formyltetrahydrofolate cyclo-ligase (35-43)
VLSQKVIAH

SEQ ID NO: 12283 - protein, 8 aa, synthetic construct
  REGION 1..8: note = Signal transducer and activator of transcription 1-alpha/beta (300-307)
VLWDRTFS

SEQ ID NO: 12284 - protein, 10 aa, synthetic construct
  REGION 1..10: note = Signal transducer and activator of transcription 1-alpha/beta (300-309)
VLWDRTFSLF

SEQ ID NO: 12285 - protein, 9 aa, synthetic construct
  REGION 1..9: note = Pre-rRNA-processing protein TSR1 homolog (678-686)
VLWFKPVEL

SEQ ID NO: 12286 - protein, 9 aa, synthetic construct
  REGION 1..9: note = Dolichol-phosphate mannosyltransferase subunit 3 (58-66)
VLWPLPAYL

SEQ ID NO: 12287 - protein, 11 aa, synthetic construct
  REGION 1..11: note = Msx2-interacting protein (557-567)
VLYNEIEYAQA

SEQ ID NO: 12288 - protein, 9 aa, synthetic construct
  REGION 1..9: note = 2',5'-phosphodiesterase 12 (419-427)
VLYPSAQEK

SEQ ID NO: 12289 - protein, 9 aa, synthetic construct
  REGION 1..9: note = Serine/threonine-protein kinase ATR (2265-2273)
VMIPTLPSI

SEQ ID NO: 12290 - protein, 9 aa, synthetic construct
  REGION 1..9: note = Receptor-type tyrosine-protein phosphatase U (975-983)
VMITKLVEV

SEQ ID NO: 12291 - protein, 9 aa, synthetic construct
  REGION 1..9: note = Translocon-associated protein subunit gamma (64-72)
VMTLVSTYL

SEQ ID NO: 12292 - protein, 8 aa, synthetic construct
  REGION 1..8: note = 60S ribosomal protein L13a (120-127)
VPAALKVV

SEQ ID NO: 12293 - protein, 9 aa, synthetic construct
  REGION 1..9: note = Ankyrin repeat and KH domain-containing protein 1 (1721-1729)
VPASVVSRI

SEQ ID NO: 12294 - protein, 9 aa, synthetic construct
  REGION 1..9: note = Protein UXT (95-103)
VPDTSRIYV

SEQ ID NO: 12295 - protein, 9 aa, synthetic construct
  REGION 1..9: note = Guanine nucleotide-binding protein-like 3 (295-303)
VPLDKQITI

SEQ ID NO: 12296 - protein, 9 aa, synthetic construct
  REGION 1..9: note = Pumilio homolog 1 (345-353)
VPLDPMEHV

SEQ ID NO: 12297 - protein, 9 aa, synthetic construct
  REGION 1..9: note = Myotubularin (85-93)
VPLGVISRI

SEQ ID NO: 12298 - protein, 8 aa, synthetic construct
  REGION 1..8: note = Ran-binding protein 6 (956-963)
VPLLVKVI

SEQ ID NO: 12299 - protein, 9 aa, synthetic construct
  REGION 1..9: note = Cytoplasmic dynein 1 heavy chain 1 (2524-2532)
VPLPTAPNI

SEQ ID NO: 12300 - protein, 9 aa, synthetic construct
  REGION 1..9: note = Transcriptional regulator Kaiso (118-126)
VPLSQVKSI

SEQ ID NO: 12301 - protein, 9 aa, synthetic construct
  REGION 1..9: note = Transcription factor Sp4 (217-225)
VPNLQTVSV

SEQ ID NO: 12302 - protein, 9 aa, synthetic construct
  REGION 1..9: note = L-lactate dehydrogenase B chain (19-27)
VPNNKITVV

SEQ ID NO: 12303 - protein, 9 aa, synthetic construct
  REGION 1..9: note = Histone deacetylase complex subunit SAP130 (800-808)
VPPLATNTV

SEQ ID NO: 12304 - protein, 10 aa, synthetic construct
  REGION 1..10: note = Endoplasmic reticulum resident protein 29 (5-14)
VPRAAFLSPL

SEQ ID NO: 12305 - protein, 9 aa, synthetic construct
  REGION 1..9: note = Myotubularin (35-43)
VPRLPGETL

SEQ ID NO: 12306 - protein, 9 aa, synthetic construct
  REGION 1..9: note = Adapter protein CIKS (387-395)
VPRPPSNPP

SEQ ID NO: 12307 - protein, 9 aa, synthetic construct
  REGION 1..9: note = Histone H2A deubiquitinase MYSM1 (446-454)
VPRPTKSSF

SEQ ID NO: 12308 - protein, 10 aa, synthetic construct
  REGION 1..10: note = PDZ and LIM domain protein 5 (203-212)
VPRQPTVTSV

SEQ ID NO: 12309 - protein, 11 aa, synthetic construct
  REGION 1..11: note = Filamin-A (1503-1513)
VPRSPFKVKVL

SEQ ID NO: 12310 - protein, 9 aa, synthetic construct
  REGION 1..9: note = Ankyrin repeat domain-containing protein 40 (223-231)
VPSKPPMSL

SEQ ID NO: 12311 - protein, 9 aa, synthetic construct
  REGION 1..9: note = Uroporphyrinogen decarboxylase (106-114)
VPYLVGQVV

SEQ ID NO: 12312 - protein, 8 aa, synthetic construct
  REGION 1..8: note = Puromycin-sensitive aminopeptidase-like protein (298-305)
VPYPLPKI

SEQ ID NO: 12313 - protein, 12 aa, synthetic construct
  REGION 1..12: note = Elongation factor 1-beta (214-225)
VQSMDVAAFNKI

SEQ ID NO: 12314 - protein, 10 aa, synthetic construct
  REGION 1..10: note = DNA repair protein RAD51 homolog 3 (23-32)
VRVKLVSAGF

SEQ ID NO: 12315 - protein, 9 aa, synthetic construct
  REGION 1..9: note = CGG triplet repeat-binding protein 1 (6-14)
VTAPPARNR

SEQ ID NO: 12316 - protein, 9 aa, synthetic construct
  REGION 1..9: note = UDP-N-acetylhexosamine pyrophosphorylase-like protein 1 (35-43)
VTYPKGMYR

SEQ ID NO: 12317 - protein, 9 aa, synthetic construct
  REGION 1..9: note = Transformation/transcription domain-associated protein (246-254)
VVAEFVPLI

SEQ ID NO: 12318 - protein, 9 aa, synthetic construct
  REGION 1..9: note = Ubiquitin carboxyl-terminal hydrolase BAP1 (172-180)
VVKPPGSSL

SEQ ID NO: 12319 - protein, 9 aa, synthetic construct
  REGION 1..9: note = Ran-binding protein 9 (33-41)
VVLPAPPAV

SEQ ID NO: 12320 - protein, 10 aa, synthetic construct
  REGION 1..10: note = ATP-dependent DNA helicase Q1 (430-439)
VVMENVGQQK

SEQ ID NO: 12321 - protein, 9 aa, synthetic construct
  REGION 1..9: note = Heterogeneous nuclear ribonucleoprotein A1 (44-52)
VVMRDPNTK

SEQ ID NO: 12322 - protein, 10 aa, synthetic construct
  REGION 1..10: note = G2/mitotic-specific cyclin-B1 (387-396)
VVMVNQGLTK

SEQ ID NO: 12323 - protein, 9 aa, synthetic construct
  REGION 1..9: note = Ral GTPase-activating protein subunit beta (37-45)
VVRPLGQVL

SEQ ID NO: 12324 - protein, 9 aa, synthetic construct
  REGION 1..9: note = CTD small phosphatase-like protein 2 (354-362)
VYADKLLNI

SEQ ID NO: 12325 - protein, 9 aa, synthetic construct
  REGION 1..9: note = Sorting nexin-8 (400-408)
VYLPLTSHI

SEQ ID NO: 12326 - protein, 9 aa, synthetic construct
  REGION 1..9: note = Tuftelin-interacting protein 11 (428-436)
VYPLMKEYF

SEQ ID NO: 12327 - protein, 9 aa, synthetic construct
  REGION 1..9: note = Syntaxin-binding protein 6 (92-100)
WMLEQLRQV

SEQ ID NO: 12328 - protein, 9 aa, synthetic construct
  REGION 1..9: note = Protein syndesmos (33-41)
YAANPGQLF

SEQ ID NO: 12329 - protein, 9 aa, synthetic construct
  REGION 1..9: note = Heat shock cognate 71 kDa protein (545-553)
YAFNMKATV

SEQ ID NO: 12330 - protein, 9 aa, synthetic construct
  REGION 1..9: note = HLA class I histocompatibility antigen, alpha chain G (115-123)
YAYDGKDYL

SEQ ID NO: 12331 - protein, 10 aa, synthetic construct
  REGION 1..10: note = RHO/RAC effector protein (1011-1020)
YEIDMKQYTL

SEQ ID NO: 12332 - protein, 9 aa, synthetic construct
  REGION 1..9: note = Actin, alpha skeletal muscle (36-44)
YELPDGQVI

SEQ ID NO: 12333 - protein, 12 aa, synthetic construct
  REGION 1..12: note = Mitogen-activated protein kinase kinase kinase 6 (112-123)
YEYTETGERLVL

SEQ ID NO: 12334 - protein, 9 aa, synthetic construct
  REGION 1..9: note = Gametogenetin-binding protein 2 (25-33)
YIDDTLTMV

SEQ ID NO: 12335 - protein, 9 aa, synthetic construct
  REGION 1..9: note = ATP-dependent 6-phosphofructokinase, muscle type (292-300)
YIFEEPFTI

SEQ ID NO: 12336 - protein, 9 aa, synthetic construct
  REGION 1..9: note = Sphingomyelin phosphodiesterase 4 (105-113)
YKFDFPVSY

SEQ ID NO: 12337 - protein, 9 aa, synthetic construct
  REGION 1..9: note = Microsomal glutathione S-transferase 3 (36-44)
YKVEYPIMY

SEQ ID NO: 12338 - protein, 9 aa, synthetic construct
  REGION 1..9: note = Zinc finger BED domain-containing protein 5 (476-484)
YLADIFTKL

SEQ ID NO: 12339 - protein, 9 aa, synthetic construct
  REGION 1..9: note = SH3 domain-binding protein 1 (145-153)
YLADLYHFV

SEQ ID NO: 12340 - protein, 9 aa, synthetic construct
  REGION 1..9: note = E3 ubiquitin-protein ligase UBR4 (824-832)
YLADVTNAL

SEQ ID NO: 12341 - protein, 9 aa, synthetic construct
  REGION 1..9: note = Exportin-4 (318-326)
YLAHFIEGL

SEQ ID NO: 12342 - protein, 9 aa, synthetic construct
  REGION 1..9: note = ATP-dependent RNA helicase DHX8 (756-764)
YLDASLITV

SEQ ID NO: 12343 - protein, 10 aa, synthetic construct
  REGION 1..10: note = ADP-ribosylation factor-like protein 6-interacting protein 1 (32-41)
YLDPSVLSGV

SEQ ID NO: 12344 - protein, 11 aa, synthetic construct
  REGION 1..11: note = Protein dpy-30 homolog (56-66)
YLDQTVVPILL

SEQ ID NO: 12345 - protein, 10 aa, synthetic construct
  REGION 1..10: note = Trafficking protein particle complex subunit 1 (7-16)
YLFDRNGVCL

SEQ ID NO: 12346 - protein, 8 aa, synthetic construct
  REGION 1..8: note = Sphingomyelin phosphodiesterase 2 (372-379)
YLFHVQEV

SEQ ID NO: 12347 - protein, 9 aa, synthetic construct
  REGION 1..9: note = Protein yippee-like 1 (49-57)
YLFNSVVNV

SEQ ID NO: 12348 - protein, 9 aa, synthetic construct
  REGION 1..9: note = Coatomer subunit alpha (738-746)
YLGDVSERV

SEQ ID NO: 12349 - protein, 9 aa, synthetic construct
  REGION 1..9: note = 26S protease regulatory subunit 6B (239-247)
YLGEGPRMV

SEQ ID NO: 12350 - protein, 9 aa, synthetic construct
  REGION 1..9: note = U2 snRNP-associated SURP motif-containing protein (276-284)
YLGNINPQM

SEQ ID NO: 12351 - protein, 9 aa, synthetic construct
  REGION 1..9: note = Mortality factor 4-like protein 1 (290-298)
YLHDFLKYL

SEQ ID NO: 12352 - protein, 11 aa, synthetic construct
  REGION 1..11: note = Coatomer subunit epsilon (127-137)
YLHDQNPDAAL

SEQ ID NO: 12353 - protein, 9 aa, synthetic construct
  REGION 1..9: note = Antigen peptide transporter 2 (25-33)
YLHSQVVSV

SEQ ID NO: 12354 - protein, 9 aa, synthetic construct
  REGION 1..9: note = Signal recognition particle subunit SRP68 (347-355)
YLHSYLTYI

SEQ ID NO: 12355 - protein, 10 aa, synthetic construct
  REGION 1..10: note = ATP-binding cassette sub-family E member 1 (483-492)
YLIDEPSAYL

SEQ ID NO: 12356 - protein, 9 aa, synthetic construct
  REGION 1..9: note = Probable ATP-dependent RNA helicase DDX6 (139-147)
YLIPLLERL

SEQ ID NO: 12357 - protein, 9 aa, synthetic construct
  REGION 1..9: note = Mitotic checkpoint serine/threonine-protein kinase BUB1 (44-52)
YLITLLEHL

SEQ ID NO: 12358 - protein, 9 aa, synthetic construct
  REGION 1..9: note = 60S ribosomal protein L19 (105-113)
YLKVKGNVF

SEQ ID NO: 12359 - protein, 9 aa, synthetic construct
  REGION 1..9: note = E3 ubiquitin-protein ligase MARCH6 (514-522)
YLLDLHSYL

SEQ ID NO: 12360 - protein, 9 aa, synthetic construct
  REGION 1..9: note = Ras-like protein family member 11A (22-30)
YLLPKDIKL

SEQ ID NO: 12361 - protein, 9 aa, synthetic construct
  REGION 1..9: note = Nuclear pore complex protein Nup160 (542-550)
YLLPYENLL

SEQ ID NO: 12362 - protein, 9 aa, synthetic construct
  REGION 1..9: note = E3 ubiquitin-protein ligase MGRN1 (248-256)
YLLQEIYGI

SEQ ID NO: 12363 - protein, 9 aa, synthetic construct
  REGION 1..9: note = Eukaryotic initiation factor 4A-III (207-215)
YLPPATQVV

SEQ ID NO: 12364 - protein, 9 aa, synthetic construct
  REGION 1..9: note = COP9 signalosome complex subunit 1 (211-219)
YLQNWSHVL

SEQ ID NO: 12365 - protein, 11 aa, synthetic construct
  REGION 1..11: note = Leucyl-cystinyl aminopeptidase (548-558)
YLSEDVFQHAV

SEQ ID NO: 12366 - protein, 9 aa, synthetic construct
  REGION 1..9: note = Core histone macro-H2A.1 (55-63)
YLTAEILEL

SEQ ID NO: 12367 - protein, 9 aa, synthetic construct
  REGION 1..9: note = U1 small nuclear ribonucleoprotein C (12-20)
YLTHDSPSV

SEQ ID NO: 12368 - protein, 9 aa, synthetic construct
  REGION 1..9: note = Cohesin subunit SA-2 (775-783)
YLTNVNTTV

SEQ ID NO: 12369 - protein, 9 aa, synthetic construct
  REGION 1..9: note = Vacuolar protein sorting-associated protein 16 homolog (308-316)
YLVPELDGV

SEQ ID NO: 12370 - protein, 9 aa, synthetic construct
  REGION 1..9: note = Lamin-B receptor (474-482)
YLVSHPNEV

SEQ ID NO: 12371 - protein, 10 aa, synthetic construct
  REGION 1..10: note = DNA topoisomerase 2-alpha (684-693)
YLYGQTTTYL

SEQ ID NO: 12372 - protein, 9 aa, synthetic construct
  REGION 1..9: note = ER lumen protein-retaining receptor 2 (196-204)
YLYITKVLK

SEQ ID NO: 12373 - protein, 9 aa, synthetic construct
  REGION 1..9: note = V-type proton ATPase subunit d 1 (27-35)
YMIDNVILL

SEQ ID NO: 12374 - protein, 9 aa, synthetic construct
  REGION 1..9: note = Ras GTPase-activating protein-binding protein 2 (294-302)
YPDSHQLFV

SEQ ID NO: 12375 - protein, 9 aa, synthetic construct
  REGION 1..9: note = Transcription factor p65 (479-487)
YPEAITRLV

SEQ ID NO: 12376 - protein, 9 aa, synthetic construct
  REGION 1..9: note = Neuropathy target esterase (299-307)
YPESLVRVV

SEQ ID NO: 12377 - protein, 9 aa, synthetic construct
  REGION 1..9: note = Ral GTPase-activating protein subunit beta (25-33)
YPESVGREV

SEQ ID NO: 12378 - protein, 8 aa, synthetic construct
  REGION 1..8: note = Ubiquitin-conjugating enzyme E2 L3 (61-68)
YPFKPPKI

SEQ ID NO: 12379 - protein, 8 aa, synthetic construct
  REGION 1..8: note = Phosphatidate cytidylyltransferase 1 (350-357)
YPFQIHSI

SEQ ID NO: 12380 - protein, 9 aa, synthetic construct
  REGION 1..9: note = LIM and SH3 domain protein 1 (57-65)
YPKQSFTMV

SEQ ID NO: 12381 - protein, 9 aa, synthetic construct
  REGION 1..9: note = Pumilio homolog 1 (841-849)
YPNLQLREI

SEQ ID NO: 12382 - protein, 9 aa, synthetic construct
  REGION 1..9: note = Ubiquitin-associated protein 2-like (268-276)
YPPAPFMHI

SEQ ID NO: 12383 - protein, 9 aa, synthetic construct
  REGION 1..9: note = Splicing factor 3A subunit 1 (44-52)
YPPPEVRNI

SEQ ID NO: 12384 - protein, 9 aa, synthetic construct
  REGION 1..9: note = Putative oxidoreductase GLYR1 (19-27)
YPPWPGKIV

SEQ ID NO: 12385 - protein, 9 aa, synthetic construct
  REGION 1..9: note = ETS-related transcription factor Elf-1 (354-362)
YPTQLFRTV

SEQ ID NO: 12386 - protein, 9 aa, synthetic construct
  REGION 1..9: note = 39S ribosomal protein L37, mitochondrial (283-291)
YPYPYPHTL

SEQ ID NO: 12387 - protein, 9 aa, synthetic construct
  REGION 1..9: note = LEM domain-containing protein 2 (134-142)
YPYVGILHV

SEQ ID NO: 12388 - protein, 9 aa, synthetic construct
  REGION 1..9: note = HLA class II histocompatibility antigen, DQ beta 1 chain (78-86)
YQLELRTTL

SEQ ID NO: 12389 - protein, 9 aa, synthetic construct
  REGION 1..9: note = Farnesyl pyrophosphate synthase (158-166)
YQTEIGQTL

SEQ ID NO: 12390 - protein, 8 aa, synthetic construct
  REGION 1..8: note = Mitogen-activated protein kinase 14 (188-195)
YRAPEIML

SEQ ID NO: 12391 - protein, 8 aa, synthetic construct
  REGION 1..8: note = Mitogen-activated protein kinase 7 (227-234)
YRAPELML

SEQ ID NO: 12392 - protein, 9 aa, synthetic construct
  REGION 1..9: note = Endoplasmic reticulum lectin 1 (115-123)
YRIESYWTY

SEQ ID NO: 12393 - protein, 9 aa, synthetic construct
  REGION 1..9: note = Transmembrane protein 258 (9-17)
YTSPVNPAV

SEQ ID NO: 12394 - protein, 9 aa, synthetic construct
  REGION 1..9: note = Protein SZT2 (2368-2376)
YVADHASSY

SEQ ID NO: 12395 - protein, 10 aa, synthetic construct
  REGION 1..10: note = DDB1- and CUL4-associated factor 8 (338-347)
YVNPANTHQF

SEQ ID NO: 12396 - protein, 8 aa, synthetic construct
  REGION 1..8: note = Tubulin beta chain (79-86)
YVPRAILV

SEQ ID NO: 12397 - protein, 9 aa, synthetic construct
  REGION 1..9: note = E3 ubiquitin-protein ligase MARCH7 (172-180)
YVQDRVPSY

SEQ ID NO: 12398 - protein, 9 aa, synthetic construct
  REGION 1..9: note = Single-stranded DNA-binding protein 2 (25-33)
YVYEYLLHV

SEQ ID NO: 12399 - protein, 9 aa, synthetic construct
  REGION 1..9: note = Tyrosine-protein kinase Fyn (213-221)
YYITTRAQF

SEQ ID NO: 12400 - protein, 9 aa, synthetic construct
  REGION 1..9: note = Heat shock cognate 71 kDa protein (16-24)
AMNPTNTVF

SEQ ID NO: 12401 - protein, 9 aa, synthetic construct
  REGION 1..9: note = HLA class II histocompatibility antigen, DP alpha 1 chain (32-40)
IKADHVSTY

SEQ ID NO: 12402 - protein, 9 aa, synthetic construct
  REGION 1..9: note = Protein SSX2 (41-49)
KASEKIFYV

SEQ ID NO: 12403 - protein, 9 aa, synthetic construct
  REGION 1..9: note = Paired amphipathic helix protein Sin3a (790-798)
AAALIIHHV

SEQ ID NO: 12404 - protein, 9 aa, synthetic construct
  REGION 1..9: note = Rho GTPase-activating protein 17 (420-428)
AAATSVHVV

SEQ ID NO: 12405 - protein, 11 aa, synthetic construct
  REGION 1..11: note = Abhydrolase domain-containing protein 2 (342-352)
AADDPLVHESL

SEQ ID NO: 12406 - protein, 9 aa, synthetic construct
  REGION 1..9: note = Pre-mRNA-processing factor 19 (410-418)
AADDSSVKL

SEQ ID NO: 12407 - protein, 9 aa, synthetic construct
  REGION 1..9: note = Ubiquitin carboxyl-terminal hydrolase 4 (677-685)
AADGKLLKL

SEQ ID NO: 12408 - protein, 11 aa, synthetic construct
  REGION 1..11: note = EP300-interacting inhibitor of differentiation 1 (69-79)
AALEEADKMFL

SEQ ID NO: 12409 - protein, 9 aa, synthetic construct
  REGION 1..9: note = Vacuolar protein sorting-associated protein 51 homolog (131-139)
AATEIVERV

SEQ ID NO: 12410 - protein, 10 aa, synthetic construct
  REGION 1..10: note = Codanin-1 (412-421)
AAYEGSVAKV

SEQ ID NO: 12411 - protein, 9 aa, synthetic construct
  REGION 1..9: note = Tetratricopeptide repeat protein 19, mitochondrial (92-100)
AEAEIIQLL

SEQ ID NO: 12412 - protein, 11 aa, synthetic construct
  REGION 1..11: note = 40S ribosomal protein S10 (140-150)
AEAGAGSATEF

SEQ ID NO: 12413 - protein, 9 aa, synthetic construct
  REGION 1..9: note = A-kinase anchor protein 11 (1199-1207)
AEALATHIL

SEQ ID NO: 12414 - protein, 9 aa, synthetic construct
  REGION 1..9: note = Staphylococcal nuclease domain-containing protein 1 (426-434)
AEALVSKGL

SEQ ID NO: 12415 - protein, 9 aa, synthetic construct
  REGION 1..9: note = DnaJ homolog subfamily C member 3 (124-132)
AEDDFKKVL

SEQ ID NO: 12416 - protein, 9 aa, synthetic construct
  REGION 1..9: note = Cyclin-dependent kinase 11B (701-709)
AEDGLKHEY

SEQ ID NO: 12417 - protein, 10 aa, synthetic construct
  REGION 1..10: note = High affinity cationic amino acid transporter 1 (354-363)
AEDGLLFKFL

SEQ ID NO: 12418 - protein, 10 aa, synthetic construct
  REGION 1..10: note = Protein strawberry notch homolog 2 (92-101)
AEELGHTETY

SEQ ID NO: 12419 - protein, 10 aa, synthetic construct
  REGION 1..10: note = Casein kinase II subunit alpha (179-188)
AEFYHPGQEY

SEQ ID NO: 12420 - protein, 10 aa, synthetic construct
  REGION 1..10: note = Probable E3 ubiquitin-protein ligase HERC4 (886-895)
AEHPTIKIFW

SEQ ID NO: 12421 - protein, 8 aa, synthetic construct
  REGION 1..8: note = Rabankyrin-5 (229-236)
AEIIASHW

SEQ ID NO: 12422 - protein, 10 aa, synthetic construct
  REGION 1..10: note = 26S proteasome non-ATPase regulatory subunit 6 (244-253)
AEILEVLHSL

SEQ ID NO: 12423 - protein, 10 aa, synthetic construct
  REGION 1..10: note = Son of sevenless homolog 2 (963-972)
AEITGEIQQY

SEQ ID NO: 12424 - protein, 9 aa, synthetic construct
  REGION 1..9: note = Leucine-rich repeat and calponin homology domain-containing protein 3 (340-348)
AEITKEQRL

SEQ ID NO: 12425 - protein, 10 aa, synthetic construct
  REGION 1..10: note = HEAT repeat-containing protein 6 (209-218)
AEKDGVSSSF

SEQ ID NO: 12426 - protein, 9 aa, synthetic construct
  REGION 1..9: note = Transformation/transcription domain-associated protein (2625-2633)
AEKTWVQLF

SEQ ID NO: 12427 - protein, 11 aa, synthetic construct
  REGION 1..11: note = Glycerol-3-phosphate acyltransferase 3 (4-14)
AELAGKILSTW

SEQ ID NO: 12428 - protein, 9 aa, synthetic construct
  REGION 1..9: note = Hom s 1 (495-503)
AELELQKQL

SEQ ID NO: 12429 - protein, 9 aa, synthetic construct
  REGION 1..9: note = HEAT repeat-containing protein 1 (617-625)
AEMKIAIYL

SEQ ID NO: 12430 - protein, 9 aa, synthetic construct
  REGION 1..9: note = Mitochondrial antiviral-signaling protein (471-479)
AENPSIQLL

SEQ ID NO: 12431 - protein, 10 aa, synthetic construct
  REGION 1..10: note = Exocyst complex component 1 (513-522)
AEQDFISKFF

SEQ ID NO: 12432 - protein, 9 aa, synthetic construct
  REGION 1..9: note = Liprin-alpha-1 (374-382)
AEQKLQQTL

SEQ ID NO: 12433 - protein, 9 aa, synthetic construct
  REGION 1..9: note = Chromodomain-helicase-DNA-binding protein 9 (618-626)
AEQMPQHTL

SEQ ID NO: 12434 - protein, 10 aa, synthetic construct
  REGION 1..10: note = F-box DNA helicase 1 (868-877)
AEQRIGPLAF

SEQ ID NO: 12435 - protein, 11 aa, synthetic construct
  REGION 1..11: note = Nuclear cap-binding protein subunit 1 (577-587)
AESDEGKLHVL

SEQ ID NO: 12436 - protein, 11 aa, synthetic construct
  REGION 1..11: note = Ras-specific guanine nucleotide-releasing factor RalGPS2 (418-428)
AESEDLAVHLY

SEQ ID NO: 12437 - protein, 9 aa, synthetic construct
  REGION 1..9: note = Transmembrane 9 superfamily member 1 (89-97)
AESLYEIRF

SEQ ID NO: 12438 - protein, 10 aa, synthetic construct
  REGION 1..10: note = Glycerol-3-phosphate dehydrogenase, mitochondrial (535-544)
AEVKYGIKEY

SEQ ID NO: 12439 - protein, 10 aa, synthetic construct
  REGION 1..10: note = Protein PRRC2C (2815-2824)
AEVLQSTQRF

SEQ ID NO: 12440 - protein, 8 aa, synthetic construct
  REGION 1..8: note = Eukaryotic translation initiation factor 3 subunit D (442-449)
AGSEYLKL

SEQ ID NO: 12441 - protein, 9 aa, synthetic construct
  REGION 1..9: note = Coatomer subunit gamma-2 (147-155)
AIVDKVSSV

SEQ ID NO: 12442 - protein, 11 aa, synthetic construct
  REGION 1..11: note = Dipeptidyl peptidase 2 (134-144)
ALADFAELLRA

SEQ ID NO: 12443 - protein, 9 aa, synthetic construct
  REGION 1..9: note = Mediator of RNA polymerase II transcription subunit 23 (388-396)
ALADFLPVM

SEQ ID NO: 12444 - protein, 10 aa, synthetic construct
  REGION 1..10: note = Coatomer subunit gamma-2 (844-853)
ALADGVTMQV

SEQ ID NO: 12445 - protein, 9 aa, synthetic construct
  REGION 1..9: note = Nicastrin (466-474)
ALADVATVL

SEQ ID NO: 12446 - protein, 9 aa, synthetic construct
  REGION 1..9: note = Lysophosphatidylcholine acyltransferase 1 (178-186)
ALAEGQLRL

SEQ ID NO: 12447 - protein, 9 aa, synthetic construct
  REGION 1..9: note = Filamin-A (1713-1721)
ALAGDQPSV

SEQ ID NO: 12448 - protein, 9 aa, synthetic construct
  REGION 1..9: note = CAD protein (1492-1500)
ALAGGITMV

SEQ ID NO: 12449 - protein, 9 aa, synthetic construct
  REGION 1..9: note = Microtubule-associated protein 4 (259-267)
ALAKDMALA

SEQ ID NO: 12450 - protein, 10 aa, synthetic construct
  REGION 1..10: note = E1A-binding protein p400 (910-919)
ALAKPPVVSV

SEQ ID NO: 12451 - protein, 9 aa, synthetic construct
  REGION 1..9: note = Transcription factor p65 (361-369)
ALAPAPPQV

SEQ ID NO: 12452 - protein, 9 aa, synthetic construct
  REGION 1..9: note = HEAT repeat-containing protein 2 (159-167)
ALAPHLDDA

SEQ ID NO: 12453 - protein, 9 aa, synthetic construct
  REGION 1..9: note = DNA fragmentation factor subunit alpha (236-244)
ALASHILTA

SEQ ID NO: 12454 - protein, 9 aa, synthetic construct
  REGION 1..9: note = DNA mismatch repair protein Mlh1 (103-111)
ALASISHVA

SEQ ID NO: 12455 - protein, 9 aa, synthetic construct
  REGION 1..9: note = Intraflagellar transport protein 81 homolog (503-511)
ALASVIKEL

SEQ ID NO: 12456 - protein, 9 aa, synthetic construct
  REGION 1..9: note = T-complex protein 1 subunit zeta (19-27)
ALAVNISAA

SEQ ID NO: 12457 - protein, 10 aa, synthetic construct
  REGION 1..10: note = Elongation factor 2 (191-200)
ALCEENMRGV

SEQ ID NO: 12458 - protein, 9 aa, synthetic construct
  REGION 1..9: note = DNA repair protein RAD50 (1090-1098)
ALDEPTTNL

SEQ ID NO: 12459 - protein, 9 aa, synthetic construct
  REGION 1..9: note = Perilipin-3 (400-408)
ALDHMVEYV

SEQ ID NO: 12460 - protein, 11 aa, synthetic construct
  REGION 1..11: note = Receptor-interacting serine/threonine-protein kinase 4 (482-492)
ALDSGASLLHL

SEQ ID NO: 12461 - protein, 9 aa, synthetic construct
  REGION 1..9: note = Centrosomal protein of 104 kDa (617-625)
ALEHRVYEV

SEQ ID NO: 12462 - protein, 9 aa, synthetic construct
  REGION 1..9: note = Alpha-tubulin N-acetyltransferase 1 (9-17)
ALFPERITV

SEQ ID NO: 12463 - protein, 11 aa, synthetic construct
  REGION 1..11: note = SEC14-like protein 1 (357-367)
ALGEEALLRYV

SEQ ID NO: 12464 - protein, 11 aa, synthetic construct
  REGION 1..11: note = HLA class I histocompatibility antigen, B-40 alpha chain (204-214)
ALGFYPAEITL

SEQ ID NO: 12465 - protein, 10 aa, synthetic construct
  REGION 1..10: note = Dystonin (3724-3733)
ALIEQKLNEA

SEQ ID NO: 12466 - protein, 9 aa, synthetic construct
  REGION 1..9: note = RILP-like protein 1 (221-229)
ALIEQKVEL

SEQ ID NO: 12467 - protein, 11 aa, synthetic construct
  REGION 1..11: note = Aminopeptidase B (193-203)
ALIEVPDGFTA

SEQ ID NO: 12468 - protein, 11 aa, synthetic construct
  REGION 1..11: note = Coatomer subunit zeta-1 (3-13)
ALILEPSLYTV

SEQ ID NO: 12469 - protein, 11 aa, synthetic construct
  REGION 1..11: note = Protein fem-1 homolog A (362-372)
ALITDPDEMRM

SEQ ID NO: 12470 - protein, 9 aa, synthetic construct
  REGION 1..9: note = Rapamycin-insensitive companion of mTOR (226-234)
ALITTILHL

SEQ ID NO: 12471 - protein, 9 aa, synthetic construct
  REGION 1..9: note = DNA polymerase alpha catalytic subunit (520-528)
ALKPDLVNV

SEQ ID NO: 12472 - protein, 9 aa, synthetic construct
  REGION 1..9: note = Agrin (1405-1413)
ALLDGRVQL

SEQ ID NO: 12473 - protein, 10 aa, synthetic construct
  REGION 1..10: note = Protein DGCR6L (54-63)
ALLDGTVFEI

SEQ ID NO: 12474 - protein, 10 aa, synthetic construct
  REGION 1..10: note = Trabeculin-alpha (3432-3441)
ALLDQALSNA

SEQ ID NO: 12475 - protein, 9 aa, synthetic construct
  REGION 1..9: note = Talin-1 (1760-1768)
ALLDQTKTL

SEQ ID NO: 12476 - protein, 11 aa, synthetic construct
  REGION 1..11: note = Histone deacetylase 10 (587-597)
ALLEENSTPQL

SEQ ID NO: 12477 - protein, 9 aa, synthetic construct
  REGION 1..9: note = LEM domain-containing protein 2 (268-276)
ALLELLHEL

SEQ ID NO: 12478 - protein, 10 aa, synthetic construct
  REGION 1..10: note = Dystonin (5785-5794)
ALLELVPWRA

SEQ ID NO: 12479 - protein, 11 aa, synthetic construct
  REGION 1..11: note = Telomerase protein component 1 (281-291)
ALLEPEFILKA

SEQ ID NO: 12480 - protein, 11 aa, synthetic construct
  REGION 1..11: note = Midasin (2257-2267)
ALLEPGGVLTI

SEQ ID NO: 12481 - protein, 10 aa, synthetic construct
  REGION 1..10: note = DENN domain-containing protein 4B (1391-1400)
ALLESVLRHV

SEQ ID NO: 12482 - protein, 9 aa, synthetic construct
  REGION 1..9: note = Transmembrane protein 102 (468-476)
ALLGELARL

SEQ ID NO: 12483 - protein, 9 aa, synthetic construct
  REGION 1..9: note = Inhibitor of growth protein 4 (58-66)
ALLKQIQEA

SEQ ID NO: 12484 - protein, 9 aa, synthetic construct
  REGION 1..9: note = Sorting and assembly machinery component 50 homolog (277-285)
ALLKVNQEL

SEQ ID NO: 12485 - protein, 9 aa, synthetic construct
  REGION 1..9: note = ATP-dependent RNA helicase A (638-646)
ALLKYIETL

SEQ ID NO: 12486 - protein, 10 aa, synthetic construct
  REGION 1..10: note = Nucleolar protein 11 (404-413)
ALLNAILHSA

SEQ ID NO: 12487 - protein, 9 aa, synthetic construct
  REGION 1..9: note = Rapamycin-insensitive companion of mTOR (91-99)
ALLNEAKEV

SEQ ID NO: 12488 - protein, 9 aa, synthetic construct
  REGION 1..9: note = Lysosomal alpha-glucosidase (501-509)
ALLPHLYTL

SEQ ID NO: 12489 - protein, 9 aa, synthetic construct
  REGION 1..9: note = Coiled-coil domain-containing protein 189 isoform 2 (146-154)
ALLQDLHKA

SEQ ID NO: 12490 - protein, 9 aa, synthetic construct
  REGION 1..9: note = Cell differentiation protein RCD1 homolog (65-73)
ALLQEIVNI

SEQ ID NO: 12491 - protein, 9 aa, synthetic construct
  REGION 1..9: note = GSK3-beta interaction protein (125-133)
ALLQRLEAL

SEQ ID NO: 12492 - protein, 9 aa, synthetic construct
  REGION 1..9: note = Mitochondrial import receptor subunit TOM5 homolog (36-44)
ALLRVTPFI

SEQ ID NO: 12493 - protein, 9 aa, synthetic construct
  REGION 1..9: note = Catenin alpha-1 (130-138)
ALLSAVTRL

SEQ ID NO: 12494 - protein, 10 aa, synthetic construct
  REGION 1..10: note = DNA-dependent protein kinase catalytic subunit (2867-2876)
ALLSLDPAAV

SEQ ID NO: 12495 - protein, 9 aa, synthetic construct
  REGION 1..9: note = Multiple inositol polyphosphate phosphatase 1 (26-34)
ALLSSLARC

SEQ ID NO: 12496 - protein, 9 aa, synthetic construct
  REGION 1..9: note = DNA-directed RNA polymerase I subunit RPA1 (343-351)
ALMAQEQKL

SEQ ID NO: 12497 - protein, 9 aa, synthetic construct
  REGION 1..9: note = Brefeldin A-inhibited guanine nucleotide-exchange protein 1 (924-932)
ALMEAVSHV

SEQ ID NO: 12498 - protein, 10 aa, synthetic construct
  REGION 1..10: note = THAP domain-containing protein 11 (268-277)
ALMEVKMKEM

SEQ ID NO: 12499 - protein, 9 aa, synthetic construct
  REGION 1..9: note = Junction plakoglobin (178-186)
ALMGSPQLV

SEQ ID NO: 12500 - protein, 9 aa, synthetic construct
  REGION 1..9: note = Probable E3 ubiquitin-protein ligase HECTD4 (327-335)
ALMPQLVQL

SEQ ID NO: 12501 - protein, 11 aa, synthetic construct
  REGION 1..11: note = Synaptosomal-associated protein 29 (65-75)
ALMYESEKVGV

SEQ ID NO: 12502 - protein, 9 aa, synthetic construct
  REGION 1..9: note = F-box only protein 21 (284-292)
ALNLYMHQV

SEQ ID NO: 12503 - protein, 10 aa, synthetic construct
  REGION 1..10: note = Immunoglobulin-binding protein 1 (279-288)
ALPDQGIAKA

SEQ ID NO: 12504 - protein, 10 aa, synthetic construct
  REGION 1..10: note = Coatomer subunit gamma-1 (711-720)
ALPKEDPTAV

SEQ ID NO: 12505 - protein, 9 aa, synthetic construct
  REGION 1..9: note = EVI5-like protein (617-625)
ALQEKLQYL

SEQ ID NO: 12506 - protein, 9 aa, synthetic construct
  REGION 1..9: note = Signal recognition particle receptor subunit alpha (360-368)
ALQESLVQI

SEQ ID NO: 12507 - protein, 9 aa, synthetic construct
  REGION 1..9: note Dolichyl-diphosphooligosaccharide-proteinosyltransferase subunit 2 (5-13)
ALSALTARL

SEQ ID NO: 12508 - protein, 9 aa, synthetic construct
  REGION 1..9: note = Fas apoptotic inhibitory molecule 1 (45-53)
ALSDGVHKI

SEQ ID NO: 12509 - protein, 10 aa, synthetic construct
  REGION 1..10: note = T-complex protein 1 subunit delta (308-317)
ALSDLALHFL

SEQ ID NO: 12510 - protein, 9 aa, synthetic construct
  REGION 1..9: note = Coiled-coil domain-containing protein 93 (85-93)
ALSEKIVSV

SEQ ID NO: 12511 - protein, 9 aa, synthetic construct
  REGION 1..9: note = Uncharacterized protein C1orf43 (148-156)
ALSELATAV

SEQ ID NO: 12512 - protein, 9 aa, synthetic construct
  REGION 1..9: note = Lanosterol 14-alpha demethylase (197-205)
ALSELIILT

SEQ ID NO: 12513 - protein, 9 aa, synthetic construct
  REGION 1..9: note = 26S proteasome non-ATPase regulatory subunit 14 (135-143)
ALSERAVAV

SEQ ID NO: 12514 - protein, 9 aa, synthetic construct
  REGION 1..9: note = Inversin (365-373)
ALSGHVSTV

SEQ ID NO: 12515 - protein, 9 aa, synthetic construct
  REGION 1..9: note = Small integral membrane protein 10 (21-29)
ALSGLAVRL

SEQ ID NO: 12516 - protein, 9 aa, synthetic construct
  REGION 1..9: note = Kinesin light chain 1 (87-95)
ALSNHLNAV

SEQ ID NO: 12517 - protein, 9 aa, synthetic construct
  REGION 1..9: note = tRNA-splicing endonuclease subunit Sen2 (347-355)
ALSRVSVNV

SEQ ID NO: 12518 - protein, 9 aa, synthetic construct
  REGION 1..9: note = FAST kinase domain-containing protein 2 (485-493)
ALTGYLHTI

SEQ ID NO: 12519 - protein, 9 aa, synthetic construct
  REGION 1..9: note = Putative phospholipase B-like 2 (16-24)
ALTRALALA

SEQ ID NO: 12520 - protein, 9 aa, synthetic construct
  REGION 1..9: note = AP-1 complex subunit gamma-1 (331-339)
ALTSLLKTV

SEQ ID NO: 12521 - protein, 10 aa, synthetic construct
  REGION 1..10: note = E3 ubiquitin-protein ligase RFWD2 (46-55)
ALVSGGVAQA

SEQ ID NO: 12522 - protein, 9 aa, synthetic construct
  REGION 1..9: note = Nesprin-2 (3479-3487)
ALWEKWLSL

SEQ ID NO: 12523 - protein, 9 aa, synthetic construct
  REGION 1..9: note = Integrin alpha-X (412-420)
ALWKGVQSL

SEQ ID NO: 12524 - protein, 9 aa, synthetic construct
  REGION 1..9: note = Helicase with zinc finger domain 2 (1826-1834)
ALWKQLLEL

SEQ ID NO: 12525 - protein, 9 aa, synthetic construct
  REGION 1..9: note = Rabankyrin-5 (638-646)
ALWTGMHTI

SEQ ID NO: 12526 - protein, 10 aa, synthetic construct
  REGION 1..10: note = CDK5 regulatory subunit-associated protein 3 (102-111)
ALYEKDNTYL

SEQ ID NO: 12527 - protein, 9 aa, synthetic construct
  REGION 1..9: note = Small subunit processome component 20 homolog (799-807)
ALYHEQLAL

SEQ ID NO: 12528 - protein, 11 aa, synthetic construct
  REGION 1..11: note = Prohibitin (26-36)
ALYNVDAGHRA

SEQ ID NO: 12529 - protein, 9 aa, synthetic construct
  REGION 1..9: note = Receptor expression-enhancing protein 3 (46-54)
ALYTVIETV

SEQ ID NO: 12530 - protein, 9 aa, synthetic construct
  REGION 1..9: note = Heterogeneous nuclear ribonucleoproteins A2/B1 (66-74)
AMAARPHSI

SEQ ID NO: 12531 - protein, 10 aa, synthetic construct
  REGION 1..10: note = Leucine-tRNA ligase, cytoplasmic (67-76)
AMADAGILRL

SEQ ID NO: 12532 - protein, 11 aa, synthetic construct
  REGION 1..11: note = Translocon-associated protein subunit delta (3-13)
AMASLGALALL

SEQ ID NO: 12533 - protein, 11 aa, synthetic construct
  REGION 1..11: note = Phosphatidylinositol 4-kinase alpha (1043-1053)
AMATESILHFA

SEQ ID NO: 12534 - protein, 9 aa, synthetic construct
  REGION 1..9: note = Nuclear cap-binding protein subunit 1 (147-155)
AMFENFVSV

SEQ ID NO: 12535 - protein, 10 aa, synthetic construct
  REGION 1..10: note = Eukaryotic translation initiation factor 3 subunit K (2-11)
AMFEQMRANV

SEQ ID NO: 12536 - protein, 9 aa, synthetic construct
  REGION 1..9: note = U4/U6 small nuclear ribonucleoprotein Prp3 (237-245)
AMGIAPPKV

SEQ ID NO: 12537 - protein, 9 aa, synthetic construct
  REGION 1..9: note = Chitobiosyldiphosphodolichol beta-mannosyltransferase (57-65)
AMHGFSVTL

SEQ ID NO: 12538 - protein, 9 aa, synthetic construct
  REGION 1..9: note = Tripartite motif-containing protein 44 (233-241)
AMIELVERL

SEQ ID NO: 12539 - protein, 9 aa, synthetic construct
  REGION 1..9: note = Importin subunit beta-1 (122-130)
AMKSDIDEV

SEQ ID NO: 12540 - protein, 9 aa, synthetic construct
  REGION 1..9: note = Intraflagellar transport protein 172 homolog (30-38)
AMLEKNYKL

SEQ ID NO: 12541 - protein, 9 aa, synthetic construct
  REGION 1..9: note = E3 ubiquitin-protein ligase RNF31 (159-167)
AMLNEPWAV

SEQ ID NO: 12542 - protein, 10 aa, synthetic construct
  REGION 1..10: note = HLA class II histocompatibility antigen, DQ beta 1 chain (23-32)
AMLSTPVAEG

SEQ ID NO: 12543 - protein, 9 aa, synthetic construct
  REGION 1..9: note = AP-1 complex subunit gamma-1 (266-274)
AMNDILAQV

SEQ ID NO: 12544 - protein, 9 aa, synthetic construct
  REGION 1..9: note = Splicing factor 3A subunit 3 (45-53)
AMQDRYMEV

SEQ ID NO: 12545 - protein, 11 aa, synthetic construct
  REGION 1..11: note = Guanine nucleotide-binding protein G(s) subunit alpha isoforms short (95-105)
AMSNLVPPVEL

SEQ ID NO: 12546 - protein, 9 aa, synthetic construct
  REGION 1..9: note = Heat shock 70 kDa protein 1-like (450-458)
AMTKDNNLL

SEQ ID NO: 12547 - protein, 9 aa, synthetic construct
  REGION 1..9: note = F-box only protein 21 (416-424)
AMYPDQVQL

SEQ ID NO: 12548 - protein, 10 aa, synthetic construct
  REGION 1..10: note = Vascular endothelial growth factor A (130-139)
APAARAPQAL

SEQ ID NO: 12549 - protein, 9 aa, synthetic construct
  REGION 1..9: note = Sister chromatid cohesion protein PDS5 homolog A (368-376)
APAERQIDL

SEQ ID NO: 12550 - protein, 9 aa, synthetic construct
  REGION 1..9: note = Host cell factor 1 (810-818)
APAKIITAV

SEQ ID NO: 12551 - protein, 10 aa, synthetic construct
  REGION 1..10: note = Histone H1.4 (11-20)
APAPAEKTPV

SEQ ID NO: 12552 - protein, 9 aa, synthetic construct
  REGION 1..9: note = Zinc finger protein 428 (123-131)
APAPEGRAL

SEQ ID NO: 12553 - protein, 10 aa, synthetic construct
  REGION 1..10: note = Pleckstrin homology domain-containing family B member 2 (137-146)
APAPEVGRTL

SEQ ID NO: 12554 - protein, 11 aa, synthetic construct
  REGION 1..11: note = Cathepsin D (16-26)
APASALVRIPL

SEQ ID NO: 12555 - protein, 9 aa, synthetic construct
  REGION 1..9: note = Liprin-beta-1 (819-827)
APNLRGSGV

SEQ ID NO: 12556 - protein, 11 aa, synthetic construct
  REGION 1..11: note = Double-stranded RNA-binding protein Staufen homolog 1 (362-372)
APNPAKATVTA

SEQ ID NO: 12557 - protein, 10 aa, synthetic construct
  REGION 1..10: note = Zinc finger HIT domain-containing protein 2 (59-68)
APPSRLASAL

SEQ ID NO: 12558 - protein, 11 aa, synthetic construct
  REGION 1..11: note = Putative sodium-coupled neutral amino acid transporter 10 (841-851)
APRAAGTVKEL

SEQ ID NO: 12559 - protein, 11 aa, synthetic construct
  REGION 1..11: note = RELT-like protein 1 (2-12)
APRALPGSAVL

SEQ ID NO: 12560 - protein, 9 aa, synthetic construct
  REGION 1..9: note = Rhotekin (385-393)
APRKPPQAL

SEQ ID NO: 12561 - protein, 9 aa, synthetic construct
  REGION 1..9: note = Long-chain fatty acid transport protein 1 (264-272)
APYARPIFL

SEQ ID NO: 12562 - protein, 9 aa, synthetic construct
  REGION 1..9: note = Coiled-coil domain-containing protein 50 (69-77)
AQAQLQKRY

SEQ ID NO: 12563 - protein, 9 aa, synthetic construct
  REGION 1..9: note = Pumilio homolog 2 (180-188)
AQQPHIAGV

SEQ ID NO: 12564 - protein, 9 aa, synthetic construct
  REGION 1..9: note = E3 ubiquitin-protein ligase HUWE1 (1181-1189)
AQVALVNEV

SEQ ID NO: 12565 - protein, 9 aa, synthetic construct
  REGION 1..9: note = Unconventional myosin-If (36-44)
AQYENPPHI

SEQ ID NO: 12566 - protein, 11 aa, synthetic construct
  REGION 1..11: note = Alpha-actinin-1 (231-241)
ARPDEKAIMTY

SEQ ID NO: 12567 - protein, 9 aa, synthetic construct
  REGION 1..9: note = Vacuolar protein sorting-associated protein 54 (467-475)
ATLNIIHSV

SEQ ID NO: 12568 - protein, 10 aa, synthetic construct
  REGION 1..10: note = Cullin-2 (577-586)
AVDEDRKMYL

SEQ ID NO: 12569 - protein, 11 aa, synthetic construct
  REGION 1..11: note = Erlin-1 (214-224)
AVIEAEKIAQV

SEQ ID NO: 12570 - protein, 9 aa, synthetic construct
  REGION 1..9: note = Ubiquitin carboxyl-terminal hydrolase 28 (743-751)
AVMESIQGV

SEQ ID NO: 12571 - protein, 9 aa, synthetic construct
  REGION 1..9: note = 40S ribosomal protein S5 (172-180)
CLADELINA

SEQ ID NO: 12572 - protein, 10 aa, synthetic construct
  REGION 1..10: note = Protein transport protein Sec23B (288-297)
DELKIPIRSW

SEQ ID NO: 12573 - protein, 10 aa, synthetic construct
  REGION 1..10: note = Serine/threonine-protein kinase 11-interacting protein (963-972)
DEVSRLESFW

SEQ ID NO: 12574 - protein, 9 aa, synthetic construct
  REGION 1..9: note = Guanine nucleotide-binding protein G(I)/G(S)/G(T) subunit beta-2 (170-178)
DIETGQQTV

SEQ ID NO: 12575 - protein, 8 aa, synthetic construct
  REGION 1..8: note = Tuberin (529-536)
DIIEKVMA

SEQ ID NO: 12576 - protein, 8 aa, synthetic construct
  REGION 1..8: note = E3 ubiquitin-protein ligase RNF213 (2081-2088)
DINGKMWL

SEQ ID NO: 12577 - protein, 9 aa, synthetic construct
  REGION 1..9: note = Echinoderm microtubule-associated protein-like 5 (1134-1142)
DIRGKLLQV

SEQ ID NO: 12578 - protein, 8 aa, synthetic construct
  REGION 1..8: note = Negative elongation factor A (258-265)
DISELDMV

SEQ ID NO: 12579 - protein, 9 aa, synthetic construct
  REGION 1..9: note = Golgin subfamily A member 4 (852-860)
DLETERILL

SEQ ID NO: 12580 - protein, 10 aa, synthetic construct
  REGION 1..10: note = GRB2-associated-binding protein 1 (123-132)
DPVKPPGSSL

SEQ ID NO: 12581 - protein, 9 aa, synthetic construct
  REGION 1..9: note = Signal recognition particle 54 kDa protein (388-396)
DSTDGAKVF

SEQ ID NO: 12582 - protein, 9 aa, synthetic construct
  REGION 1..9: note = Protein BANP (72-80)
EAKLQALEA

SEQ ID NO: 12583 - protein, 9 aa, synthetic construct
  REGION 1..9: note = Endothelial differentiation-related factor 1 (36-44)
EDVETSKKW

SEQ ID NO: 12584 - protein, 10 aa, synthetic construct
  REGION 1..10: note = Clathrin heavy chain 1 (1066-1075)
EEAFAIFRKF

SEQ ID NO: 12585 - protein, 10 aa, synthetic construct
  REGION 1..10: note = DNA excision repair protein ERCC-1 (203-212)
EEAGRYLETY

SEQ ID NO: 12586 - protein, 9 aa, synthetic construct
  REGION 1..9: note = cAMP-dependent protein kinase type I-alpha regulatory subunit (60-68)
EEAKQIQNL

SEQ ID NO: 12587 - protein, 9 aa, synthetic construct
  REGION 1..9: note = Zinc finger protein 548 (56-64)
EEAPSQQGF

SEQ ID NO: 12588 - protein, 10 aa, synthetic construct
  REGION 1..10: note = Zinc finger and BTB domain-containing protein 17 (715-724)
EEDPNTHILY

SEQ ID NO: 12589 - protein, 10 aa, synthetic construct
  REGION 1..10: note = Cullin-4A (268-277)
EEEGDRVITY

SEQ ID NO: 12590 - protein, 9 aa, synthetic construct
  REGION 1..9: note = S-phase kinase-associated protein 1 (120-128)
EEIRKTFNI

SEQ ID NO: 12591 - protein, 8 aa, synthetic construct
  REGION 1..8: note = Nuclear transcription factor Y subunit gamma (28-35)
EEIRNLTV

SEQ ID NO: 12592 - protein, 10 aa, synthetic construct
  REGION 1..10: note = Flotillin-1 (118-127)
EEIYKDRQKF

SEQ ID NO: 12593 - protein, 9 aa, synthetic construct
  REGION 1..9: note = Microtubule-associated protein 4 (105-113)
EEKMAYQEY

SEQ ID NO: 12594 - protein, 9 aa, synthetic construct
  REGION 1..9: note = Eukaryotic translation initiation factor 3 subunit D (172-180)
EEMDFPQLM

SEQ ID NO: 12595 - protein, 10 aa, synthetic construct
  REGION 1..10: note = HEAT repeat-containing protein 1 (411-420)
EEMDSNKVSL

SEQ ID NO: 12596 - protein, 9 aa, synthetic construct
  REGION 1..9: note = BRISC and BRCA1-A complex member 1 (257-265)
EEMSWKDMF

SEQ ID NO: 12597 - protein, 10 aa, synthetic construct
  REGION 1..10: note = Mitotic checkpoint serine/threonine-protein kinase BUB1 (35-44)
EENFPENKEY

SEQ ID NO: 12598 - protein, 10 aa, synthetic construct
  REGION 1..10: note = Autophagy-related protein 16-1 (158-167)
EENQELVTRW

SEQ ID NO: 12599 - protein, 9 aa, synthetic construct
  REGION 1..9: note = Eukaryotic translation initiation factor 3 subunit C-like protein (786-794)
EESLRTYLF

SEQ ID NO: 12600 - protein, 9 aa, synthetic construct
  REGION 1..9: note = Segment polarity protein dishevelled homolog DVL-2 (23-31)
EETPYLVKI

SEQ ID NO: 12601 - protein, 10 aa, synthetic construct
  REGION 1..10: note = GRIP1-associated protein 1 (706-715)
EEVAELFQRL

SEQ ID NO: 12602 - protein, 9 aa, synthetic construct
  REGION 1..9: note = Glutaredoxin-3 (9-17)
ELAKELPQV

SEQ ID NO: 12603 - protein, 9 aa, synthetic construct
  REGION 1..9: note = Nuclear factor of activated T-cells 5 (953-961)
ELFSSPPAV

SEQ ID NO: 12604 - protein, 8 aa, synthetic construct
  REGION 1..8: note = Cyclin-J-like protein (62-69)
EQLRLQEL

SEQ ID NO: 12605 - protein, 9 aa, synthetic construct
  REGION 1..9: note = Nucleolar RNA helicase 2 (172-180)
FAIPLIEKL

SEQ ID NO: 12606 - protein, 9 aa, synthetic construct
  REGION 1..9: note = Tristetraprolin (304-312)
FAPPQPVAA

SEQ ID NO: 12607 - protein, 10 aa, synthetic construct
  REGION 1..10: note = Laminin subunit gamma-1 (1227-1236)
FEIEELNRKY

SEQ ID NO: 12608 - protein, 9 aa, synthetic construct
  REGION 1..9: note = Nucleolar pre-ribosomal-associated protein 1 (1554-1562)
FEQKTEQKW

SEQ ID NO: 12609 - protein, 9 aa, synthetic construct
  REGION 1..9: note = Non-POU domain-containing octamer-binding protein (174-182)
FEYEYAMRW

SEQ ID NO: 12610 - protein, 9 aa, synthetic construct
  REGION 1..9: note = Antizyme inhibitor 1 (4-12)
FIDDANYSV

SEQ ID NO: 12611 - protein, 10 aa, synthetic construct
  REGION 1..10: note = Activator of 90 kDa heat shock protein ATPase homolog 1 (215-224)
FIDKNGETEL

SEQ ID NO: 12612 - protein, 9 aa, synthetic construct
  REGION 1..9: note = Ral GTPase-activating protein subunit alpha-1 (86-94)
FIFEKILQL

SEQ ID NO: 12613 - protein, 9 aa, synthetic construct
  REGION 1..9: note = DENN domain-containing protein 5B (1150-1158)
FIWDFIEKV

SEQ ID NO: 12614 - protein, 10 aa, synthetic construct
  REGION 1..10: note = Dipeptidyl peptidase 8 (19-28)
FIYGGPQVQL

SEQ ID NO: 12615 - protein, 9 aa, synthetic construct
  REGION 1..9: note = Caspase recruitment domain-containing protein 19 (155-163)
FLADDLGGL

SEQ ID NO: 12616 - protein, 11 aa, synthetic construct
  REGION 1..11: note = Protein YIF1B (55-65)
FLADPVSNMAM

SEQ ID NO: 12617 - protein, 9 aa, synthetic construct
  REGION 1..9: note = Interferon-induced GTP-binding protein Mx2 (30-38)
FLAKDFNFL

SEQ ID NO: 12618 - protein, 9 aa, synthetic construct
  REGION 1..9: note = Eukaryotic translation initiation factor 4 gamma 2 (315-323)
FLDNGPKTI

SEQ ID NO: 12619 - protein, 9 aa, synthetic construct
  REGION 1..9: note = Phospholipase DDHD1 (681-689)
FLDSAYFRL

SEQ ID NO: 12620 - protein, 9 aa, synthetic construct
  REGION 1..9: note = Condensin complex subunit 3 (699-707)
FLDSEVSEL

SEQ ID NO: 12621 - protein, 9 aa, synthetic construct
  REGION 1..9: note = Microtubule-associated protein 1B (32-40)
FLDSKFYLL

SEQ ID NO: 12622 - protein, 9 aa, synthetic construct
  REGION 1..9: note = Catenin alpha-2 (392-400)
FLETNVPLL

SEQ ID NO: 12623 - protein, 10 aa, synthetic construct
  REGION 1..10: note = Calnexin (139-148)
FLFDTKPLIV

SEQ ID NO: 12624 - protein, 9 aa, synthetic construct
  REGION 1..9: note = Vacuolar protein sorting-associated protein 51 homolog (106-114)
FLFELPSRL

SEQ ID NO: 12625 - protein, 10 aa, synthetic construct
  REGION 1..10: note = Ankyrin repeat and LEM domain-containing protein 2 (825-834)
FLFGEEPSKL

SEQ ID NO: 12626 - protein, 9 aa, synthetic construct
  REGION 1..9: note = Cullin-4B (289-297)
FLFLDRTYV

SEQ ID NO: 12627 - protein, 9 aa, synthetic construct
  REGION 1..9: note = Elongation of very long chain fatty acids protein 1 (87-95)
FLFSKFIEL

SEQ ID NO: 12628 - protein, 8 aa, synthetic construct
  REGION 1..8: note = Sacsin (645-652)
FLGKIYQI

SEQ ID NO: 12629 - protein, 9 aa, synthetic construct
  REGION 1..9: note = UDP-N-acetylglucosamine-dolichyl-phosphate N-acetylglucosaminephosphotransferase (221-229)
FLGTFILKV

SEQ ID NO: 12630 - protein, 9 aa, synthetic construct
  REGION 1..9: note = DNA ligase 3 (616-624)
FLHDNMVEI

SEQ ID NO: 12631 - protein, 9 aa, synthetic construct
  REGION 1..9: note = Major facilitator superfamily domain-containing protein 1 (150-158)
FLIDRVFGI

SEQ ID NO: 12632 - protein, 9 aa, synthetic construct
  REGION 1..9: note = ATP-dependent RNA helicase DHX36 (519-527)
FLIIPLHSL

SEQ ID NO: 12633 - protein, 10 aa, synthetic construct
  REGION 1..10: note = Beta-glucuronidase (117-126)
FLINGKPFYF

SEQ ID NO: 12634 - protein, 9 aa, synthetic construct
  REGION 1..9: note = Isoleucine-tRNA ligase, cytoplasmic (662-670)
FLIQNVLRL

SEQ ID NO: 12635 - protein, 9 aa, synthetic construct
  REGION 1..9: note = Puromycin-sensitive aminopeptidase (846-854)
FLISRLIKL

SEQ ID NO: 12636 - protein, 9 aa, synthetic construct
  REGION 1..9: note = Myotubularin-related protein 2 (121-129)
FLITILDHL

SEQ ID NO: 12637 - protein, 9 aa, synthetic construct
  REGION 1..9: note = Putative protein PLEKHA9 (298-306)
FLKGFLTEV

SEQ ID NO: 12638 - protein, 10 aa, synthetic construct
  REGION 1..10: note = Regulator of nonsense transcripts 1 (192-201)
FLLGFIPAKA

SEQ ID NO: 12639 - protein, 10 aa, synthetic construct
  REGION 1..10: note = Alpha-N-acetylglucosaminidase (616-625)
FLLGSWLEQA

SEQ ID NO: 12640 - protein, 9 aa, synthetic construct
  REGION 1..9: note = Probable ATP-dependent RNA helicase DDX59 (257-265)
FLLPVIMRA

SEQ ID NO: 12641 - protein, 10 aa, synthetic construct
  REGION 1..10: note = HLA class II histocompatibility antigen, DP alpha 1 chain (22-31)
FLLSLRGAGA

SEQ ID NO: 12642 - protein, 9 aa, synthetic construct
  REGION 1..9: note = Putative histone H2B type 2-D (86-94)
FLNDIFERI

SEQ ID NO: 12643 - protein, 9 aa, synthetic construct
  REGION 1..9: note = A-kinase anchor protein 9 (956-964)
FLNEEVKSL

SEQ ID NO: 12644 - protein, 9 aa, synthetic construct
  REGION 1..9: note = Osteopetrosis-associated transmembrane protein 1 (171-179)
FLNLFNHTL

SEQ ID NO: 12645 - protein, 10 aa, synthetic construct
  REGION 1..10: note = Structure-specific endonuclease subunit SLX1 (220-229)
FLQEEPGQLL

SEQ ID NO: 12646 - protein, 9 aa, synthetic construct
  REGION 1..9: note = Golgin subfamily A member 4 (1152-1160)
FLQEQLVEL

SEQ ID NO: 12647 - protein, 9 aa, synthetic construct
  REGION 1..9: note = Endoplasmic reticulum-Golgi intermediate compartment protein 3 (5-13)
FLSELQYYL

SEQ ID NO: 12648 - protein, 9 aa, synthetic construct
  REGION 1..9: note = Nicalin (262-270)
FLSTLEHHL

SEQ ID NO: 12649 - protein, 9 aa, synthetic construct
  REGION 1..9: note = Uncharacterized protein KIAA1109 (19-27)
FLTEHNSNV

SEQ ID NO: 12650 - protein, 9 aa, synthetic construct
  REGION 1..9: note = Zinc finger BED domain-containing protein 5 (533-541)
FLTEINSTV

SEQ ID NO: 12651 - protein, 10 aa, synthetic construct
  REGION 1..10: note = Signal transducer and activator of transcription 6 (163-172)
FLVEKQPPQV

SEQ ID NO: 12652 - protein, 10 aa, synthetic construct
  REGION 1..10: note = Phospholipase D3 (58-67)
FLWEYGDLHL

SEQ ID NO: 12653 - protein, 9 aa, synthetic construct
  REGION 1..9: note = Transcription factor 25 (382-390)
FLWKEPATM

SEQ ID NO: 12654 - protein, 9 aa, synthetic construct
  REGION 1..9: note = Cytochrome b (107-115)
FLYSETWNI

SEQ ID NO: 12655 - protein, 10 aa, synthetic construct
  REGION 1..10: note = E3 ubiquitin-protein ligase XIAP (52-61)
FLYTGEGDTV

SEQ ID NO: 12656 - protein, 9 aa, synthetic construct
  REGION 1..9: note = Putative oxidoreductase GLYR1 (382-390)
FMATIAEGL

SEQ ID NO: 12657 - protein, 9 aa, synthetic construct
  REGION 1..9: note = Probable helicase senataxin (266-274)
FMQSILHTM

SEQ ID NO: 12658 - protein, 9 aa, synthetic construct
  REGION 1..9: note = Alpha-adducin (97-105)
FMTTNVPNV

SEQ ID NO: 12659 - protein, 9 aa, synthetic construct
  REGION 1..9: note = Ubiquitin carboxyl-terminal hydrolase 11 (94-102)
FQDEINWRL

SEQ ID NO: 12660 - protein, 11 aa, synthetic construct
  REGION 1..11: note = E3 ubiquitin-protein ligase TRIP12 (633-643)
FQHEENLLQQV

SEQ ID NO: 12661 - protein, 9 aa, synthetic construct
  REGION 1..9: note = Threonine-tRNA ligase, cytoplasmic (598-606)
FQLPIRFNL

SEQ ID NO: 12662 - protein, 9 aa, synthetic construct
  REGION 1..9: note = RNA-binding protein EWS (267-275)
FRQDHPSSM

SEQ ID NO: 12663 - protein, 8 aa, synthetic construct
  REGION 1..8: note = Spliceosome RNA helicase DDX39B (106-113)
FVDDETKL

SEQ ID NO: 12664 - protein, 9 aa, synthetic construct
  REGION 1..9: note = Cytoplasmic dynein 1 heavy chain 1 (4145-4153)
FVFEPPPGV

SEQ ID NO: 12665 - protein, 9 aa, synthetic construct
  REGION 1..9: note = General transcription factor IIH subunit 5 (44-52)
FVIAELVNV

SEQ ID NO: 12666 - protein, 9 aa, synthetic construct
  REGION 1..9: note = Transmembrane protein 147 (181-189)
FVMETFVHL

SEQ ID NO: 12667 - protein, 9 aa, synthetic construct
  REGION 1..9: note = Rhomboid domain-containing protein 2 (68-76)
FVYENPISL

SEQ ID NO: 12668 - protein, 9 aa, synthetic construct
  REGION 1..9: note = ER degradation-enhancing alpha-mannosidase-like protein 1 (33-41)
FYQRFPLSF

SEQ ID NO: 12669 - protein, 9 aa, synthetic construct
  REGION 1..9: note = Filamin-A (998-1006)
GADNSVVRF

SEQ ID NO: 12670 - protein, 9 aa, synthetic construct
  REGION 1..9: note = FACT complex subunit SPT16 (233-241)
GADPSTVEM

SEQ ID NO: 12671 - protein, 10 aa, synthetic construct
  REGION 1..10: note = Telomere length regulation protein TEL2 homolog (189-198)
GEEVVRVLQA

SEQ ID NO: 12672 - protein, 10 aa, synthetic construct
  REGION 1..10: note = Leucine-rich repeat serine/threonine-protein kinase 2 (1802-1811)
GEGETLLKKW

SEQ ID NO: 12673 - protein, 10 aa, synthetic construct
  REGION 1..10: note = Nuclear factor erythroid 2-related factor 2 (521-530)
GENDKSLHLL

SEQ ID NO: 12674 - protein, 9 aa, synthetic construct
  REGION 1..9: note = AT-rich interactive domain-containing protein 2 (80-88)
GESSLIKQL

SEQ ID NO: 12675 - protein, 10 aa, synthetic construct
  REGION 1..10: note = Acetyl-CoA carboxylase 1 (1979-1988)
GGIPVGVVAV

SEQ ID NO: 12676 - protein, 8 aa, synthetic construct
  REGION 1..8: note = DNA damage-binding protein 1 (59-66)
GKIAVMEL

SEQ ID NO: 12677 - protein, 9 aa, synthetic construct
  REGION 1..9: note = Cyclin-dependent kinase 12 (1103-1111)
GLADITQQL

SEQ ID NO: 12678 - protein, 11 aa, synthetic construct
  REGION 1..11: note = ATPase WRNIP1 (548-558)
GLADPSALTQA

SEQ ID NO: 12679 - protein, 10 aa, synthetic construct
  REGION 1..10: note = Negative regulator of reactive oxygen species (203-212)
GLAELRHLNL

SEQ ID NO: 12680 - protein, 9 aa, synthetic construct
  REGION 1..9: note = Flap endonuclease 1 (5-13)
GLAKLIADV

SEQ ID NO: 12681 - protein, 9 aa, synthetic construct
  REGION 1..9: note = GPN-loop GTPase 1 (234-242)
GLDELFVQV

SEQ ID NO: 12682 - protein, 10 aa, synthetic construct
  REGION 1..10: note = Probable ATP-dependent RNA helicase DDX27 (497-506)
GLDIEGVKTV

SEQ ID NO: 12683 - protein, 11 aa, synthetic construct
  REGION 1..11: note = U3 small nucleolar RNA-associated protein 18 homolog (107-117)
GLDNAVSLFQV

SEQ ID NO: 12684 - protein, 9 aa, synthetic construct
  REGION 1..9: note = 26S protease regulatory subunit 4 (189-197)
GLDNQIQEI

SEQ ID NO: 12685 - protein, 10 aa, synthetic construct
  REGION 1..10: note = DNA mismatch repair protein Msh2 (438-447)
GLDPGKQIKL

SEQ ID NO: 12686 - protein, 9 aa, synthetic construct
  REGION 1..9: note = CAP-Gly domain-containing linker protein 1 (270-278)
GLFAPVHKV

SEQ ID NO: 12687 - protein, 11 aa, synthetic construct
  REGION 1..11: note = Ras suppressor protein 1 (35-45)
GLFTLSHITQL

SEQ ID NO: 12688 - protein, 11 aa, synthetic construct
  REGION 1..11: note = Autophagy-related protein 13 (84-94)
GLGEGFQTVRV

SEQ ID NO: 12689 - protein, 11 aa, synthetic construct
  REGION 1..11: note = WD repeat and FYVE domain-containing protein 3 (1077-1087)
GLIDGAVVSGI

SEQ ID NO: 12690 - protein, 11 aa, synthetic construct
  REGION 1..11: note = Structural maintenance of chromosomes flexible hinge domain-containing protein 1 (829-839)
GLLDLPFRVGV

SEQ ID NO: 12691 - protein, 10 aa, synthetic construct
  REGION 1..10: note = Nucleolar complex protein 4 homolog (332-341)
GLLDPSVFHV

SEQ ID NO: 12692 - protein, 9 aa, synthetic construct
  REGION 1..9: note = Transcription initiation factor TFIID subunit 4B (694-702)
GLLEKLTAI

SEQ ID NO: 12693 - protein, 9 aa, synthetic construct
  REGION 1..9: note = Vigilin (1000-1008)
GLLERVKEL

SEQ ID NO: 12694 - protein, 11 aa, synthetic construct
  REGION 1..11: note = Vigilin (354-364)
GLLERVKELQA

SEQ ID NO: 12695 - protein, 9 aa, synthetic construct
  REGION 1..9: note = Phosphatidylinositol N-acetylglucosaminyltransferase subunit H (75-83)
GLLGYLHFV

SEQ ID NO: 12696 - protein, 9 aa, synthetic construct
  REGION 1..9: note = Thyroid adenoma-associated protein (229-237)
GLLSIFTKV

SEQ ID NO: 12697 - protein, 11 aa, synthetic construct
  REGION 1..11: note = Trafficking protein particle complex subunit 2-like protein (29-39)
GLLYPTEDYKV

SEQ ID NO: 12698 - protein, 9 aa, synthetic construct
  REGION 1..9: note = Nuclear receptor corepressor 1 (313-321)
GLMEDPMKV

SEQ ID NO: 12699 - protein, 11 aa, synthetic construct
  REGION 1..11: note = Importin-4 (301-311)
GLMGEGLAPHL

SEQ ID NO: 12700 - protein, 9 aa, synthetic construct
  REGION 1..9: note = Adiponectin receptor protein 2 (286-294)
GLSGIIPTL

SEQ ID NO: 12701 - protein, 9 aa, synthetic construct
  REGION 1..9: note = Protein GPR107 (398-406)
GLWKDSLFL

SEQ ID NO: 12702 - protein, 9 aa, synthetic construct
  REGION 1..9: note = Chromodomain-helicase-DNA-binding protein 8 (115-123)
GMDEKEFTV

SEQ ID NO: 12703 - protein, 9 aa, synthetic construct
  REGION 1..9: note = DnaJ homolog subfamily A member 1 (168-176)
GMVQQIQSV

SEQ ID NO: 12704 - protein, 10 aa, synthetic construct
  REGION 1..10: note = Cysteine and histidine-rich protein 1 (139-148)
GMWGGAMLGV

SEQ ID NO: 12705 - protein, 11 aa, synthetic construct
  REGION 1..11: note = Rab GTPase-activating protein 1-like (35-45)
GMWNPNAPVFL

SEQ ID NO: 12706 - protein, 9 aa, synthetic construct
  REGION 1..9: note = Tumor protein p53-inducible protein 13 (212-220)
GPQPTRSAL

SEQ ID NO: 12707 - protein, 9 aa, synthetic construct
  REGION 1..9: note = Ubiquitin carboxyl-terminal hydrolase 48 (545-553)
GPRLTVKAL

SEQ ID NO: 12708 - protein, 10 aa, synthetic construct
  REGION 1..10: note = Filamin-A (2186-2195)
GPRLVSNHSL

SEQ ID NO: 12709 - protein, 9 aa, synthetic construct
  REGION 1..9: note = Apoptosis-stimulating of p53 protein 2 (99-107)
GPRSQDPSL

SEQ ID NO: 12710 - protein, 9 aa, synthetic construct
  REGION 1..9: note = Interleukin-6 receptor subunit beta (849-857)
GQVERFETV

SEQ ID NO: 12711 - protein, 10 aa, synthetic construct
  REGION 1..10: note = HLA class I histocompatibility antigen, B-15 alpha chain (25-34)
GSHSMRYFYT

SEQ ID NO: 12712 - protein, 10 aa, synthetic construct
  REGION 1..10: note = Nucleolar protein 56 (116-125)
GVIAEILRGV

SEQ ID NO: 12713 - protein, 10 aa, synthetic construct
  REGION 1..10: note = Perilipin-2 (347-356)
GVMAGDIYSV

SEQ ID NO: 12714 - protein, 11 aa, synthetic construct
  REGION 1..11: note = Golgi resident protein GCP60 (488-498)
HEEVYAGSHQY

SEQ ID NO: 12715 - protein, 9 aa, synthetic construct
  REGION 1..9: note = Small subunit processome component 20 homolog (748-756)
HEMENKQFW

SEQ ID NO: 12716 - protein, 9 aa, synthetic construct
  REGION 1..9: note = Kelch domain-containing protein 3 (196-204)
HILDFSPSL

SEQ ID NO: 12717 - protein, 11 aa, synthetic construct
  REGION 1..11: note = Leucine-rich repeat and calponin homology domain-containing protein 3 (744-754)
HILEEKGLSQV

SEQ ID NO: 12718 - protein, 11 aa, synthetic construct
  REGION 1..11: note = Leucine-rich repeat and calponin homology domain-containing protein 1 (668-678)
HILEEKGLVKV

SEQ ID NO: 12719 - protein, 10 aa, synthetic construct
  REGION 1..10: note = Vascular endothelial growth factor receptor 1 (327-336)
HIYDKAFITV

SEQ ID NO: 12720 - protein, 11 aa, synthetic construct
  REGION 1..11: note = Phenylalanine-tRNA ligase alpha subunit (365-375)
HLAEFHQIEGV

SEQ ID NO: 12721 - protein, 9 aa, synthetic construct
  REGION 1..9: note = ZW10 interactor (166-174)
HLAEVSAEV

SEQ ID NO: 12722 - protein, 9 aa, synthetic construct
  REGION 1..9: note = Gamma-adducin (155-163)
HLANTYISV

SEQ ID NO: 12723 - protein, 9 aa, synthetic construct
  REGION 1..9: note = Transcription factor E2-alpha (182-190)
HLDEAIHVL

SEQ ID NO: 12724 - protein, 9 aa, synthetic construct
  REGION 1..9: note = Pre-mRNA-processing factor 17 (71-79)
HLDPAVKEV

SEQ ID NO: 12725 - protein, 9 aa, synthetic construct
  REGION 1..9: note = Membrane-associated tyrosine- and threonine-specific cdc2-inhibitory kinase (162-170)
HLDVKPANI

SEQ ID NO: 12726 - protein, 9 aa, synthetic construct
  REGION 1..9: note = DEP domain-containing protein 1B (290-298)
HLFDAFVSV

SEQ ID NO: 12727 - protein, 9 aa, synthetic construct
  REGION 1..9: note = Clathrin heavy chain 1 (1233-1241)
HLGEYQAAV

SEQ ID NO: 12728 - protein, 9 aa, synthetic construct
  REGION 1..9: note = Neutral alpha-glucosidase AB (77-85)
HLIHEVTKV

SEQ ID NO: 12729 - protein, 10 aa, synthetic construct
  REGION 1..10: note = Heat shock protein HSP 90-beta (110-119)
HLKEDQTEYL

SEQ ID NO: 12730 - protein, 9 aa, synthetic construct
  REGION 1..9: note = Centromere protein F (2031-2039)
HLQEKLQSL

SEQ ID NO: 12731 - protein, 9 aa, synthetic construct
  REGION 1..9: note = Late secretory pathway protein AVL9 homolog (517-525)
HLSDAIVEV

SEQ ID NO: 12732 - protein, 9 aa, synthetic construct
  REGION 1..9: note = Leupaxin (99-107)
HLTEMQAKV

SEQ ID NO: 12733 - protein, 11 aa, synthetic construct
  REGION 1..11: note = Transmembrane protein 2 (1314-1324)
HLYDKGSTIFL

SEQ ID NO: 12734 - protein, 9 aa, synthetic construct
  REGION 1..9: note = Huntingtin-interacting protein 1 (192-200)
HLYDYTVKL

SEQ ID NO: 12735 - protein, 9 aa, synthetic construct
  REGION 1..9: note = Beta-lactamase-like protein 2 (145-153)
HTDDHMALL

SEQ ID NO: 12736 - protein, 8 aa, synthetic construct
  REGION 1..8: note = DNA topoisomerase 2-beta (834-841)
HTDTTVKF

SEQ ID NO: 12737 - protein, 9 aa, synthetic construct
  REGION 1..9: note = NIPA-like protein 3 (122-130)
IAITAGAIF

SEQ ID NO: 12738 - protein, 9 aa, synthetic construct
  REGION 1..9: note = Cyclin-dependent kinase 1 (136-144)
IDDKGTIKL

SEQ ID NO: 12739 - protein, 9 aa, synthetic construct
  REGION 1..9: note = Glucosamine-6-phosphate isomerase 2 (146-154)
IEEGVNHMW

SEQ ID NO: 12740 - protein, 10 aa, synthetic construct
  REGION 1..10: note = Zinc finger protein ZPR1 (195-204)
IIDDPSGNSF

SEQ ID NO: 12741 - protein, 9 aa, synthetic construct
  REGION 1..9: note = U5 small nuclear ribonucleoprotein 200 kDa helicase (612-620)
IILDEIHLL

SEQ ID NO: 12742 - protein, 9 aa, synthetic construct
  REGION 1..9: note = ATP-dependent RNA helicase DDX1 (707-715)
ILAPTVQEL

SEQ ID NO: 12743 - protein, 10 aa, synthetic construct
  REGION 1..10: note = Prohibitin (164-173)
ILDDVSLTHL

SEQ ID NO: 12744 - protein, 9 aa, synthetic construct
  REGION 1..9: note = Dihydroxyacetone phosphate acyltransferase (106-114)
ILDEMSHKL

SEQ ID NO: 12745 - protein, 9 aa, synthetic construct
  REGION 1..9: note = ATP-binding cassette sub-family F member 3 (633-641)
ILDEPTNHL

SEQ ID NO: 12746 - protein, 9 aa, synthetic construct
  REGION 1..9: note = ATP-binding cassette sub-family F member 1 (765-773)
ILDEPTNNL

SEQ ID NO: 12747 - protein, 9 aa, synthetic construct
  REGION 1..9: note = U6 snRNA-associated Sm-like protein LSm8 (16-24)
ILDESHERV

SEQ ID NO: 12748 - protein, 9 aa, synthetic construct
  REGION 1..9: note = Coiled-coil domain-containing protein 66 (307-315)
ILDQSRETV

SEQ ID NO: 12749 - protein, 9 aa, synthetic construct
  REGION 1..9: note = Heterogeneous nuclear ribonucleoprotein U (458-466)
ILDQTNVSA

SEQ ID NO: 12750 - protein, 10 aa, synthetic construct
  REGION 1..10: note = Actin-like protein 6A (127-136)
ILDSGATHTT

SEQ ID NO: 12751 - protein, 9 aa, synthetic construct
  REGION 1..9: note = Putative pre-mRNA-splicing factor ATP-dependent RNA helicase DHX16 (531-539)
ILFGLIKDV

SEQ ID NO: 12752 - protein, 9 aa, synthetic construct
  REGION 1..9: note = Pecanex-like protein 1 (1442-1450)
ILFNKLWEL

SEQ ID NO: 12753 - protein, 11 aa, synthetic construct
  REGION 1..11: note = Copper chaperone for superoxide dismutase (92-102)
ILGGPGTVQGV

SEQ ID NO: 12754 - protein, 9 aa, synthetic construct
  REGION 1..9: note = Major facilitator superfamily domain-containing protein 8 (444-452)
ILGPKPQGV

SEQ ID NO: 12755 - protein, 11 aa, synthetic construct
  REGION 1..11: note = Matrin-3 (67-77)
ILGPPPPSFHL

SEQ ID NO: 12756 - protein, 9 aa, synthetic construct
  REGION 1..9: note = Integrator complex subunit 7 (849-857)
ILGTHNITV

SEQ ID NO: 12757 - protein, 9 aa, synthetic construct
  REGION 1..9: note = Cytoplasmic dynein 1 light intermediate chain 2 (245-253)
ILHENFTTV

SEQ ID NO: 12758 - protein, 11 aa, synthetic construct
  REGION 1..11: note = Adenosylhomocysteinase (339-349)
ILLAEGRLVNL

SEQ ID NO: 12759 - protein, 9 aa, synthetic construct
  REGION 1..9: note = Protein angel homolog 1 (409-417)
ILLAEVDKV

SEQ ID NO: 12760 - protein, 11 aa, synthetic construct
  REGION 1..11: note = Arginine-tRNA ligase, cytoplasmic (564-574)
ILLDHEKEWKL

SEQ ID NO: 12761 - protein, 9 aa, synthetic construct
  REGION 1..9: note = MAP kinase-activating death domain protein (316-324)
ILLEHKVVL

SEQ ID NO: 12762 - protein, 9 aa, synthetic construct
  REGION 1..9: note = Eukaryotic translation initiation factor 3 subunit K (69-77)
ILLKALTNL

SEQ ID NO: 12763 - protein, 11 aa, synthetic construct
  REGION 1..11: note = Serine/threonine-protein kinase TAO1 (157-167)
ILLTEPGQVKL

SEQ ID NO: 12764 - protein, 9 aa, synthetic construct
  REGION 1..9: note = Ubiquitin carboxyl-terminal hydrolase 34 (46-54)
ILMDERTFL

SEQ ID NO: 12765 - protein, 10 aa, synthetic construct
  REGION 1..10: note = Protein BIVM-ERCC5 (1331-1340)
ILNEFPGHGL

SEQ ID NO: 12766 - protein, 10 aa, synthetic construct
  REGION 1..10: note = Unconventional myosin-Ic (579-588)
ILQSKEPAYV

SEQ ID NO: 12767 - protein, 9 aa, synthetic construct
  REGION 1..9: note = Cohesin subunit SA-2 (1002-1010)
ILSEFSSKL

SEQ ID NO: 12768 - protein, 9 aa, synthetic construct
  REGION 1..9: note = TELO2-interacting protein 1 homolog (373-381)
ILSESLHSL

SEQ ID NO: 12769 - protein, 9 aa, synthetic construct
  REGION 1..9: note = Nuclear pore complex protein Nup153 (39-47)
ILSRVTESV

SEQ ID NO: 12770 - protein, 9 aa, synthetic construct
  REGION 1..9: note = XAGE1D protein (105-113)
ILTSIQSLL

SEQ ID NO: 12771 - protein, 9 aa, synthetic construct
  REGION 1..9: note = Importin-11 (663-671)
ILTTLIHLV

SEQ ID NO: 12772 - protein, 9 aa, synthetic construct
  REGION 1..9: note = A-kinase anchor protein 10, mitochondrial (437-445)
ILYDKYFSL

SEQ ID NO: 12773 - protein, 9 aa, synthetic construct
  REGION 1..9: note = Signal transducer and activator of transcription 3 (96-104)
IMDATNILV

SEQ ID NO: 12774 - protein, 9 aa, synthetic construct
  REGION 1..9: note = Long-chain-fatty-acid-CoA ligase 3 (386-394)
IMDRIYKNV

SEQ ID NO: 12775 - protein, 11 aa, synthetic construct
  REGION 1..11: note = Syntaxin-binding protein 6 (160-170)
IMGGNSILHSA

SEQ ID NO: 12776 - protein, 10 aa, synthetic construct
  REGION 1..10: note = Small nuclear ribonucleoprotein E (64-73)
IMLKGDNITL

SEQ ID NO: 12777 - protein, 9 aa, synthetic construct
  REGION 1..9: note = Talin-1 (100-108)
IMVDDSKTV

SEQ ID NO: 12778 - protein, 9 aa, synthetic construct
  REGION 1..9: note = Zinc finger MIZ domain-containing protein 1 (736-744)
IQHSEFEEV

SEQ ID NO: 12779 - protein, 9 aa, synthetic construct
  REGION 1..9: note = L-lactate dehydrogenase A chain (329-337)
ISDLVKVTL

SEQ ID NO: 12780 - protein, 9 aa, synthetic construct
  REGION 1..9: note = Protein cramped-like (737-745)
ISTEVNPKL

SEQ ID NO: 12781 - protein, 9 aa, synthetic construct
  REGION 1..9: note = Transmembrane protein 261 (13-21)
ITAPPGTAA

SEQ ID NO: 12782 - protein, 10 aa, synthetic construct
  REGION 1..10: note = Apoptosis-resistant E3 ubiquitin protein ligase 1 (140-149)
ITVKLGGLNV

SEQ ID NO: 12783 - protein, 9 aa, synthetic construct
  REGION 1..9: note = Alpha-adducin (206-214)
IVDRGSTNL

SEQ ID NO: 12784 - protein, 8 aa, synthetic construct
  REGION 1..8: note = NADH dehydrogenase (ubiquinone) 1 beta subcomplex subunit 10 (34-41)
IVDRPVTL

SEQ ID NO: 12785 - protein, 9 aa, synthetic construct
  REGION 1..9: note = 1-phosphatidylinositol 3-phosphate 5-kinase (742-750)
IVDVRPTLV

SEQ ID NO: 12786 - protein, 9 aa, synthetic construct
  REGION 1..9: note = Cytoplasmic dynein 1 heavy chain 1 (132-140)
IVMQEVETV

SEQ ID NO: 12787 - protein, 9 aa, synthetic construct
  REGION 1..9: note = Eukaryotic translation initiation factor 3 subunit B (187-195)
IVVDNVPQV

SEQ ID NO: 12788 - protein, 9 aa, synthetic construct
  REGION 1..9: note = Trifunctional purine biosynthetic protein adenosine-3 (125-133)
KAFTKPEEA

SEQ ID NO: 12789 - protein, 9 aa, synthetic construct
  REGION 1..9: note = T-complex protein 1 subunit zeta (84-92)
KALQFLEEV

SEQ ID NO: 12790 - protein, 9 aa, synthetic construct
  REGION 1..9: note = Endonuclease G, mitochondrial (153-161)
KAMDDTFYL

SEQ ID NO: 12791 - protein, 9 aa, synthetic construct
  REGION 1..9: note = Histone-lysine N-methyltransferase NSD2 (573-581)
KAMEAASSL

SEQ ID NO: 12792 - protein, 9 aa, synthetic construct
  REGION 1..9: note = Tubulin alpha-1C chain (350-358)
KAYHEQLTV

SEQ ID NO: 12793 - protein, 10 aa, synthetic construct
  REGION 1..10: note = Melanoma-associated antigen 1 (160-169)
KEADPTGHSY

SEQ ID NO: 12794 - protein, 10 aa, synthetic construct
  REGION 1..10: note = Melanoma-associated antigen D2 (337-346)
KEIDKNDHLY

SEQ ID NO: 12795 - protein, 9 aa, synthetic construct
  REGION 1..9: note = Lysine-specific demethylase 5A (1136-1144)
KEIEAMHSL

SEQ ID NO: 12796 - protein, 9 aa, synthetic construct
  REGION 1..9: note = Something about silencing protein 10 (380-388)
KEIEDRQKL

SEQ ID NO: 12797 - protein, 10 aa, synthetic construct
  REGION 1..10: note = Plectin (705-714)
KENAAYFQFF

SEQ ID NO: 12798 - protein, 9 aa, synthetic construct
  REGION 1..9: note = ATP-binding cassette sub-family F member 3 (472-480)
KESEVVMKF

SEQ ID NO: 12799 - protein, 9 aa, synthetic construct
  REGION 1..9: note = Kinetochore protein Nuf2 (447-455)
KIDEKTAEL

SEQ ID NO: 12800 - protein, 11 aa, synthetic construct
  REGION 1..11: note = Interferon-induced, double-stranded RNA-activated protein kinase (388-398)
KIGDFGLVTSL

SEQ ID NO: 12801 - protein, 9 aa, synthetic construct
  REGION 1..9: note = Cyclin-dependent kinase 1 (9-17)
KIGEGTYGV

SEQ ID NO: 12802 - protein, 9 aa, synthetic construct
  REGION 1..9: note = DNA mismatch repair protein Msh6 (740-748)
KIIGIMEEV

SEQ ID NO: 12803 - protein, 11 aa, synthetic construct
  REGION 1..11: note = Arginine-tRNA ligase, cytoplasmic (587-597)
KILDDLFLHTL

SEQ ID NO: 12804 - protein, 10 aa, synthetic construct
  REGION 1..10: note = Vacuolar protein sorting-associated protein 41 homolog (318-327)
KILDIGLAYI

SEQ ID NO: 12805 - protein, 10 aa, synthetic construct
  REGION 1..10: note = Signal transducer and activator of transcription 3 (658-667)
KIMDATNILV

SEQ ID NO: 12806 - protein, 9 aa, synthetic construct
  REGION 1..9: note = UPF0568 protein C14orf166 (218-226)
KINEAIVAV

SEQ ID NO: 12807 - protein, 9 aa, synthetic construct
  REGION 1..9: note = Cell division cycle protein 27 homolog (380-388)
KISTITPQI

SEQ ID NO: 12808 - protein, 9 aa, synthetic construct
  REGION 1..9: note = Calpain-7 (56-64)
KITEYLERV

SEQ ID NO: 12809 - protein, 11 aa, synthetic construct
  REGION 1..11: note = Pre-mRNA-processing factor 19 (375-385)
KIWDLKERTNV

SEQ ID NO: 12810 - protein, 11 aa, synthetic construct
  REGION 1..11: note = Probable ATP-dependent RNA helicase DDX60 (16-26)
KLADMNQEYQL

SEQ ID NO: 12811 - protein, 9 aa, synthetic construct
  REGION 1..9: note = WD repeat-containing protein 11 (1062-1070)
KLAEGVQLL

SEQ ID NO: 12812 - protein, 9 aa, synthetic construct
  REGION 1..9: note = KAT8 regulatory NSL complex subunit 1 (21-29)
KLAPPSSTL

SEQ ID NO: 12813 - protein, 9 aa, synthetic construct
  REGION 1..9: note = Dolichol-phosphate mannosyltransferase subunit 3 (24-32)
KLAQWLWGL

SEQ ID NO: 12814 - protein, 9 aa, synthetic construct
  REGION 1..9: note = DnaJ homolog subfamily C member 7 (322-330)
KLDDTYIKA

SEQ ID NO: 12815 - protein, 9 aa, synthetic construct
  REGION 1..9: note = Nuclear transcription factor Y subunit gamma (53-61)
KLDEDVKMI

SEQ ID NO: 12816 - protein, 9 aa, synthetic construct
  REGION 1..9: note = Coronin-1C (493-501)
KLDEILKEI

SEQ ID NO: 12817 - protein, 9 aa, synthetic construct
  REGION 1..9: note = Protein LAP2 (759-767)
KLDHINMNL

SEQ ID NO: 12818 - protein, 9 aa, synthetic construct
  REGION 1..9: note = Protein NPAT (88-96)
KLDHTLSQI

SEQ ID NO: 12819 - protein, 9 aa, synthetic construct
  REGION 1..9: note = Rab3 GTPase-activating protein catalytic subunit (784-792)
KLEEIIHQI

SEQ ID NO: 12820 - protein, 10 aa, synthetic construct
  REGION 1..10: note = Vacuolar protein sorting-associated protein 35 (323-332)
KLFDIFSQQV

SEQ ID NO: 12821 - protein, 9 aa, synthetic construct
  REGION 1..9: note = Transmembrane protein 223 (189-197)
KLFDNTVGA

SEQ ID NO: 12822 - protein, 9 aa, synthetic construct
  REGION 1..9: note = tRNA wybutosine-synthesizing protein 2 homolog (32-40)
KLFDTQHRV

SEQ ID NO: 12823 - protein, 11 aa, synthetic construct
  REGION 1..11: note = Testin (65-75)
KLFEDTKYTTL

SEQ ID NO: 12824 - protein, 9 aa, synthetic construct
  REGION 1..9: note = T-complex protein 11-like protein 2 (131-139)
KLFEEIREI

SEQ ID NO: 12825 - protein, 9 aa, synthetic construct
  REGION 1..9: note = Exportin-1 (568-576)
KLFEFMHET

SEQ ID NO: 12826 - protein, 9 aa, synthetic construct
  REGION 1..9: note = TATA box-binding protein-associated factor RNA polymerase I subunit B (312-320)
KLFEKKYSV

SEQ ID NO: 12827 - protein, 11 aa, synthetic construct
  REGION 1..11: note = Retinoic acid-induced protein 1 (1841-1851)
KLFGLQEAMKV

SEQ ID NO: 12828 - protein, 9 aa, synthetic construct
  REGION 1..9: note = Rab-like protein 2A (105-113)
KLFNDAIRL

SEQ ID NO: 12829 - protein, 9 aa, synthetic construct
  REGION 1..9: note = WD repeat-containing protein 3 (837-845)
KLFNEFIQL

SEQ ID NO: 12830 - protein, 11 aa, synthetic construct
  REGION 1..11: note = Asparagine synthetase (glutamine-hydrolyzing) (138-148)
KLFPGFEIETV

SEQ ID NO: 12831 - protein, 9 aa, synthetic construct
  REGION 1..9: note = Splicing factor 3B subunit 3 (769-777)
KLGAVFNQV

SEQ ID NO: 12832 - protein, 9 aa, synthetic construct
  REGION 1..9: note = Membrane-associated tyrosine- and threonine-specific cdc2-inhibitory kinase (179-187)
KLGDFGLLV

SEQ ID NO: 12833 - protein, 8 aa, synthetic construct
  REGION 1..8: note = Pre-mRNA-splicing factor ATP-dependent RNA helicase PRP16 (474-481)
KLGDIMGV

SEQ ID NO: 12834 - protein, 9 aa, synthetic construct
  REGION 1..9: note = Inactive ubiquitin carboxyl-terminal hydrolase 54 (272-280)
KLGDLFFRV

SEQ ID NO: 12835 - protein, 9 aa, synthetic construct
  REGION 1..9: note = Probable ATP-dependent RNA helicase DHX37 (678-686)
KLGDLMVLL

SEQ ID NO: 12836 - protein, 8 aa, synthetic construct
  REGION 1..8: note = Ras GTPase-activating-like protein IQGAP1 (161-168)
KLGLAPQI

SEQ ID NO: 12837 - protein, 9 aa, synthetic construct
  REGION 1..9: note = Neutral amino acid transporter B(0) (45-53)
KLGPEGELL

SEQ ID NO: 12838 - protein, 10 aa, synthetic construct
  REGION 1..10: note = Nicotinamide phosphoribosyltransferase (189-198)
KLHDFGYRGV

SEQ ID NO: 12839 - protein, 9 aa, synthetic construct
  REGION 1..9: note = AP-2 complex subunit beta (147-155)
KLHDINAQM

SEQ ID NO: 12840 - protein, 9 aa, synthetic construct
  REGION 1..9: note = Inner nuclear membrane protein Man1 (532-540)
KLHDRLAQL

SEQ ID NO: 12841 - protein, 9 aa, synthetic construct
  REGION 1..9: note = Ribosomal protein S6 kinase alpha-4 (94-102)
KLHLILDYV

SEQ ID NO: 12842 - protein, 9 aa, synthetic construct
  REGION 1..9: note = E3 ubiquitin-protein ligase HECTD1 (525-533)
KLIAVLESI

SEQ ID NO: 12843 - protein, 9 aa, synthetic construct
  REGION 1..9: note = Serine/threonine-protein phosphatase 6 regulatory subunit 3 (43-51)
KLIEFLLKA

SEQ ID NO: 12844 - protein, 9 aa, synthetic construct
  REGION 1..9: note = ATP-dependent RNA helicase DDX18 (507-515)
KLIEKNYFL

SEQ ID NO: 12845 - protein, 9 aa, synthetic construct
  REGION 1..9: note = Early endosome antigen 1 (1075-1083)
KLIQELKTA

SEQ ID NO: 12846 - protein, 9 aa, synthetic construct
  REGION 1..9: note = Centrosomal protein of 57 kDa (383-391)
KLIQESPTV

SEQ ID NO: 12847 - protein, 9 aa, synthetic construct
  REGION 1..9: note = Transmembrane protein 209 (50-58)
KLISSYYNV

SEQ ID NO: 12848 - protein, 9 aa, synthetic construct
  REGION 1..9: note = Kelch-like protein 7 (25-33)
KLLAGFMGV

SEQ ID NO: 12849 - protein, 10 aa, synthetic construct
  REGION 1..10: note = Vacuolar protein sorting-associated protein 35 (14-23)
KLLDEAIQAV

SEQ ID NO: 12850 - protein, 11 aa, synthetic construct
  REGION 1..11: note = 40S ribosomal protein S17 (107-117)
KLLDFGSLSNL

SEQ ID NO: 12851 - protein, 9 aa, synthetic construct
  REGION 1..9: note = Ligand of Numb protein X 2 (105-113)
KLLDKLLVL

SEQ ID NO: 12852 - protein, 11 aa, synthetic construct
  REGION 1..11: note = DDB1- and CUL4-associated factor 16 (79-89)
KLLDPSTPVHI

SEQ ID NO: 12853 - protein, 11 aa, synthetic construct
  REGION 1..11: note = HCG2044777 (36-46)
KLLDTMVDTFL

SEQ ID NO: 12854 - protein, 11 aa, synthetic construct
  REGION 1..11: note = E3 ubiquitin-protein ligase DTX3L (386-396)
KLLETELLQEI

SEQ ID NO: 12855 - protein, 9 aa, synthetic construct
  REGION 1..9: note = GRIP and coiled-coil domain-containing protein 2 (1083-1091)
KLLEVQILE

SEQ ID NO: 12856 - protein, 10 aa, synthetic construct
  REGION 1..10: note = GRIP and coiled-coil domain-containing protein 2 (1083-1092)
KLLEVQILEV

SEQ ID NO: 12857 - protein, 11 aa, synthetic construct
  REGION 1..11: note = V-type proton ATPase subunit H (396-406)
KLLEVSDDPQV

SEQ ID NO: 12858 - protein, 9 aa, synthetic construct
  REGION 1..9: note = TELO2-interacting protein 2 (122-130)
KLLGKVETA

SEQ ID NO: 12859 - protein, 10 aa, synthetic construct
  REGION 1..10: note = TELO2-interacting protein 1 homolog (409-418)
KLLGPKINFV

SEQ ID NO: 12860 - protein, 9 aa, synthetic construct
  REGION 1..9: note = Bromodomain-containing protein 9 (476-484)
KLLQDLHEA

SEQ ID NO: 12861 - protein, 9 aa, synthetic construct
  REGION 1..9: note = Zinc finger protein 644 (475-483)
KLMEEIREL

SEQ ID NO: 12862 - protein, 9 aa, synthetic construct
  REGION 1..9: note = ATP-binding cassette sub-family F member 2 (188-196)
KLMELYERL

SEQ ID NO: 12863 - protein, 9 aa, synthetic construct
  REGION 1..9: note = Dual specificity protein phosphatase 10 (474-482)
KLMGVETVV

SEQ ID NO: 12864 - protein, 9 aa, synthetic construct
  REGION 1..9: note = Tax1-binding protein 1 (296-304)
KLMSEVQTL

SEQ ID NO: 12865 - protein, 9 aa, synthetic construct
  REGION 1..9: note = S-adenosylmethionine synthase isoform type-2 (159-167)
KLNAKLAEL

SEQ ID NO: 12866 - protein, 9 aa, synthetic construct
  REGION 1..9: note = Coatomer subunit alpha (1002-1010)
KLNDLIQRL

SEQ ID NO: 12867 - protein, 9 aa, synthetic construct
  REGION 1..9: note = THAP domain-containing protein 4 (389-397)
KLQEKLDEL

SEQ ID NO: 12868 - protein, 9 aa, synthetic construct
  REGION 1..9: note = E3 ubiquitin-protein ligase BRE1A (194-202)
KLQEKVELL

SEQ ID NO: 12869 - protein, 9 aa, synthetic construct
  REGION 1..9: note = DNA topoisomerase I, mitochondrial (529-537)
KLQEQLAQL

SEQ ID NO: 12870 - protein, 11 aa, synthetic construct
  REGION 1..11: note = Ectopic P granules protein 5 homolog (535-545)
KLQPTPGIQKV

SEQ ID NO: 12871 - protein, 9 aa, synthetic construct
  REGION 1..9: note = Unconventional myosin-Id (406-414)
KLQQLFIQL

SEQ ID NO: 12872 - protein, 9 aa, synthetic construct
  REGION 1..9: note = NFATC2-interacting protein (17-25)
KLSEVNKRL

SEQ ID NO: 12873 - protein, 9 aa, synthetic construct
  REGION 1..9: note = ATPase family AAA domain-containing protein 1 (68-76)
KLSEYEMSI

SEQ ID NO: 12874 - protein, 9 aa, synthetic construct
  REGION 1..9: note = Serpin H1 (262-270)
KLSSLIILM

SEQ ID NO: 12875 - protein, 9 aa, synthetic construct
  REGION 1..9: note = Coiled-coil domain-containing protein 93 (26-34)
KLTEILELL

SEQ ID NO: 12876 - protein, 9 aa, synthetic construct
  REGION 1..9: note = Protein Hook homolog 1 (556-564)
KLTEVHEEL

SEQ ID NO: 12877 - protein, 9 aa, synthetic construct
  REGION 1..9: note = Polypeptide N-acetylgalactosaminyltransferase 18 (204-212)
KLTEYVDKV

SEQ ID NO: 12878 - protein, 9 aa, synthetic construct
  REGION 1..9: note = Kinesin-like protein KIF1C (839-847)
KLTGILQEV

SEQ ID NO: 12879 - protein, 9 aa, synthetic construct
  REGION 1..9: note = Actin-related protein 2/3 complex subunit 4 (130-138)
KLVDFVIHF

SEQ ID NO: 12880 - protein, 11 aa, synthetic construct
  REGION 1..11: note = Caprin-1 (191-201)
KLVDPERDMSL

SEQ ID NO: 12881 - protein, 9 aa, synthetic construct
  REGION 1..9: note = Lysine-tRNA ligase (474-482)
KLVGEFLEV

SEQ ID NO: 12882 - protein, 9 aa, synthetic construct
  REGION 1..9: note = Baculoviral IAP repeat-containing protein 6 (860-868)
KLVNILVQL

SEQ ID NO: 12883 - protein, 9 aa, synthetic construct
  REGION 1..9: note = Eukaryotic peptide chain release factor GTP-binding subunit ERF3A (239-247)
KLVPFLKKV

SEQ ID NO: 12884 - protein, 9 aa, synthetic construct
  REGION 1..9: note = Trafficking protein particle complex subunit 11 (245-253)
KLWADRISL

SEQ ID NO: 12885 - protein, 9 aa, synthetic construct
  REGION 1..9: note = Pecanex-like protein 1 (1446-1454)
KLWELLYKL

SEQ ID NO: 12886 - protein, 9 aa, synthetic construct
  REGION 1..9: note = Intraflagellar transport protein 27 homolog (77-85)
KLWESPNVL

SEQ ID NO: 12887 - protein, 11 aa, synthetic construct
  REGION 1..11: note = Transducin-like enhancer protein 4 (308-318)
KLWTGGLDNTV

SEQ ID NO: 12888 - protein, 10 aa, synthetic construct
  REGION 1..10: note = Cytochrome P450 4V2 (91-100)
KLWVGPVPMV

SEQ ID NO: 12889 - protein, 9 aa, synthetic construct
  REGION 1..9: note = Intraflagellar transport protein 172 homolog (352-360)
KLYDDMIRL

SEQ ID NO: 12890 - protein, 9 aa, synthetic construct
  REGION 1..9: note = General transcription factor II-I repeat domain-containing protein 2B (841-849)
KLYESELTL

SEQ ID NO: 12891 - protein, 9 aa, synthetic construct
  REGION 1..9: note = DNA-directed RNA polymerase I subunit RPA1 (386-394)
KLYNIWIRL

SEQ ID NO: 12892 - protein, 11 aa, synthetic construct
  REGION 1..11: note = Regulator of nonsense transcripts 1 (816-826)
KLYQEVEIASV

SEQ ID NO: 12893 - protein, 9 aa, synthetic construct
  REGION 1..9: note = Glutamine-tRNA ligase (401-409)
KMDPVAYRV

SEQ ID NO: 12894 - protein, 9 aa, synthetic construct
  REGION 1..9: note = Adiponectin receptor protein 1 (79-87)
KMEEFVYKV

SEQ ID NO: 12895 - protein, 9 aa, synthetic construct
  REGION 1..9: note = NADH dehydrogenase (ubiquinone) iron-sulfur protein 2, mitochondrial (1-9)
KMFEFYERV

SEQ ID NO: 12896 - protein, 10 aa, synthetic construct
  REGION 1..10: note = cAMP-dependent protein kinase type II-alpha regulatory subunit (222-231)
KMFESFIESV

SEQ ID NO: 12897 - protein, 10 aa, synthetic construct
  REGION 1..10: note = 3-hydroxy-3-methylglutaryl-coenzyme A reductase (314-323)
KMISMDIEQV

SEQ ID NO: 12898 - protein, 11 aa, synthetic construct
  REGION 1..11: note = Serine/threonine-protein kinase SIK2 (72-82)
KMLDHPHIIKL

SEQ ID NO: 12899 - protein, 9 aa, synthetic construct
  REGION 1..9: note = Transmembrane protein 245 (455-463)
KMLDKIISI

SEQ ID NO: 12900 - protein, 10 aa, synthetic construct
  REGION 1..10: note = Acetyl-CoA acetyltransferase, mitochondrial (365-374)
KMLEIDPQKV

SEQ ID NO: 12901 - protein, 11 aa, synthetic construct
  REGION 1..11: note = HLA class II histocompatibility antigen, DQ beta 1 chain (229-239)
KMLSGIGGFVL

SEQ ID NO: 12902 - protein, 11 aa, synthetic construct
  REGION 1..11: note = HLA class II histocompatibility antigen, DRB1-11 beta chain (227-237)
KMLSGVGGFVL

SEQ ID NO: 12903 - protein, 9 aa, synthetic construct
  REGION 1..9: note = DNA replication licensing factor MCM4 (578-586)
KMNESTRSV

SEQ ID NO: 12904 - protein, 9 aa, synthetic construct
  REGION 1..9: note = MAP kinase-activating death domain protein (389-397)
KMPDDVWLV

SEQ ID NO: 12905 - protein, 9 aa, synthetic construct
  REGION 1..9: note = Mitotic spindle assembly checkpoint protein MAD1 (294-302)
KMQETLVGL

SEQ ID NO: 12906 - protein, 9 aa, synthetic construct
  REGION 1..9: note = Rho GTPase-activating protein 5 (514-522)
KMSEIHTVL

SEQ ID NO: 12907 - protein, 9 aa, synthetic construct
  REGION 1..9: note = Centromere protein F (1431-1439)
KMSELQTYV

SEQ ID NO: 12908 - protein, 9 aa, synthetic construct
  REGION 1..9: note = Nucleolar protein 56 (288-296)
KMSQVAPSL

SEQ ID NO: 12909 - protein, 9 aa, synthetic construct
  REGION 1..9: note = AP-1 complex subunit sigma-1A (29-37)
KMVRELMQV

SEQ ID NO: 12910 - protein, 11 aa, synthetic construct
  REGION 1..11: note = mRNA export factor (111-121)
KMWDLSSNQAI

SEQ ID NO: 12911 - protein, 9 aa, synthetic construct
  REGION 1..9: note = Ski oncogene (28-36)
KPSSWLRTL

SEQ ID NO: 12912 - protein, 9 aa, synthetic construct
  REGION 1..9: note = Breast cancer type 2 susceptibility protein (1180-1188)
KQFEGTVEI

SEQ ID NO: 12913 - protein, 9 aa, synthetic construct
  REGION 1..9: note = E3 UFM1-protein ligase 1 (402-410)
KQISTLESV

SEQ ID NO: 12914 - protein, 9 aa, synthetic construct
  REGION 1..9: note = General transcription factor II-I (532-540)
KQVEEIFNL

SEQ ID NO: 12915 - protein, 9 aa, synthetic construct
  REGION 1..9: note = Ribonuclease H2 subunit B (295-303)
KSIDTFFGV

SEQ ID NO: 12916 - protein, 9 aa, synthetic construct
  REGION 1..9: note = Zinc finger MYM-type protein 3 (414-422)
KTGEVLHEV

SEQ ID NO: 12917 - protein, 11 aa, synthetic construct
  REGION 1..11: note = PRELI domain-containing protein 1, mitochondrial (157-167)
KTMKGFEYILA

SEQ ID NO: 12918 - protein, 9 aa, synthetic construct
  REGION 1..9: note = Sister chromatid cohesion protein PDS5 homolog A (1070-1078)
KTNEKLYTV

SEQ ID NO: 12919 - protein, 9 aa, synthetic construct
  REGION 1..9: note = Pre-rRNA-processing protein TSR1 homolog (106-114)
KVADTILFL

SEQ ID NO: 12920 - protein, 9 aa, synthetic construct
  REGION 1..9: note = TNFAIP3-interacting protein 2 (330-338)
KVASLLHQV

SEQ ID NO: 12921 - protein, 9 aa, synthetic construct
  REGION 1..9: note = Polyadenylate-binding protein 4 (602-610)
KVDEAVAVL

SEQ ID NO: 12922 - protein, 10 aa, synthetic construct
  REGION 1..10: note = Beta-secretase 2 (314-323)
KVFDAVVEAV

SEQ ID NO: 12923 - protein, 9 aa, synthetic construct
  REGION 1..9: note = Melanoma inhibitory activity protein 3 (259-267)
KVLDKVFRA

SEQ ID NO: 12924 - protein, 9 aa, synthetic construct
  REGION 1..9: note = Lipopolysaccharide-responsive and beige-like anchor protein (136-144)
KVLGKIEKV

SEQ ID NO: 12925 - protein, 9 aa, synthetic construct
  REGION 1..9: note = Protein SET (137-145)
KVLSKEFHL

SEQ ID NO: 12926 - protein, 11 aa, synthetic construct
  REGION 1..11: note = E3 ubiquitin-protein ligase RNF213 (3249-3259)
KVSEEAKSILL

SEQ ID NO: 12927 - protein, 10 aa, synthetic construct
  REGION 1..10: note = T-complex protein 1 subunit delta (232-241)
KVSNSGITRV

SEQ ID NO: 12928 - protein, 10 aa, synthetic construct
  REGION 1..10: note = Inhibitor of nuclear factor kappa-B kinase subunit alpha (394-403)
KVWAEAVHYV

SEQ ID NO: 12929 - protein, 9 aa, synthetic construct
  REGION 1..9: note = TRIO and F-actin-binding protein (548-556)
KYQDVYVEL

SEQ ID NO: 12930 - protein, 9 aa, synthetic construct
  REGION 1..9: note = Growth arrest-specific protein 7 (317-325)
LADEAEVHL

SEQ ID NO: 12931 - protein, 8 aa, synthetic construct
  REGION 1..8: note = Heat shock protein HSP 90-beta (497-504)
LDKKVEKV

SEQ ID NO: 12932 - protein, 9 aa, synthetic construct
  REGION 1..9: note = Glutamine-tRNA ligase (170-178)
LEADLEKKF

SEQ ID NO: 12933 - protein, 9 aa, synthetic construct
  REGION 1..9: note = GRIP and coiled-coil domain-containing protein 2 (490-498)
LENEQVQKL

SEQ ID NO: 12934 - protein, 9 aa, synthetic construct
  REGION 1..9: note = ERO1-like protein alpha (69-77)
LESDYFRYY

SEQ ID NO: 12935 - protein, 11 aa, synthetic construct
  REGION 1..11: note = Lethal(2) giant larvae protein homolog 2 (69-79)
LHQENNAVTQI

SEQ ID NO: 12936 - protein, 9 aa, synthetic construct
  REGION 1..9: note = Beta-hexosaminidase subunit beta (194-202)
LIDTSRHYL

SEQ ID NO: 12937 - protein, 9 aa, synthetic construct
  REGION 1..9: note = mRNA cap guanine-N7 methyltransferase (183-191)
LIGEFLEKV

SEQ ID NO: 12938 - protein, 9 aa, synthetic construct
  REGION 1..9: note = Activating signal cointegrator 1 complex subunit 3 (1174-1182)
LIIDEIHLL

SEQ ID NO: 12939 - protein, 9 aa, synthetic construct
  REGION 1..9: note = Elongation factor 2 (292-300)
LILDPIFKV

SEQ ID NO: 12940 - protein, 9 aa, synthetic construct
  REGION 1..9: note = Zinc finger protein 532 (468-476)
LKLANNTTV

SEQ ID NO: 12941 - protein, 9 aa, synthetic construct
  REGION 1..9: note = Protein TBRG4 (214-222)
LLAELLTHL

SEQ ID NO: 12942 - protein, 9 aa, synthetic construct
  REGION 1..9: note = Cytoplasmic dynein 1 heavy chain 1 (1716-1724)
LLAESVTEV

SEQ ID NO: 12943 - protein, 9 aa, synthetic construct
  REGION 1..9: note = m7GpppX diphosphatase (297-305)
LLAEVIENL

SEQ ID NO: 12944 - protein, 9 aa, synthetic construct
  REGION 1..9: note = E3 ubiquitin-protein ligase UBR2 (617-625)
LLAGLHVLL

SEQ ID NO: 12945 - protein, 11 aa, synthetic construct
  REGION 1..11: note = MAP kinase-activating death domain protein (367-377)
LLAPTPYIIGV

SEQ ID NO: 12946 - protein, 9 aa, synthetic construct
  REGION 1..9: note = Peroxiredoxin-5, mitochondrial (164-172)
LLDDSLVSI

SEQ ID NO: 12947 - protein, 10 aa, synthetic construct
  REGION 1..10: note = Beta-adrenergic receptor kinase 1 (324-333)
LLDEHGHVRI

SEQ ID NO: 12948 - protein, 9 aa, synthetic construct
  REGION 1..9: note = Lon protease homolog 2, peroxisomal (678-686)
LLDNTDIHL

SEQ ID NO: 12949 - protein, 9 aa, synthetic construct
  REGION 1..9: note = Coatomer subunit gamma-1 (848-856)
LLDTVTMQV

SEQ ID NO: 12950 - protein, 9 aa, synthetic construct
  REGION 1..9: note = Serine-protein kinase ATM (1590-1598)
LLEEINHFL

SEQ ID NO: 12951 - protein, 11 aa, synthetic construct
  REGION 1..11: note = DNA-directed RNA polymerase II subunit RPB11-a (11-21)
LLFEGEKKITI

SEQ ID NO: 12952 - protein, 9 aa, synthetic construct
  REGION 1..9: note = GCN1 general control of amino-acid synthesis 1-like 1 (1599-1607)
LLGDLLFHI

SEQ ID NO: 12953 - protein, 9 aa, synthetic construct
  REGION 1..9: note = Transport and Golgi organization protein 6 homolog (991-999)
LLGSVVHEV

SEQ ID NO: 12954 - protein, 9 aa, synthetic construct
  REGION 1..9: note = Nucleoprotein TPR (1158-1166)
LLHDQIEKL

SEQ ID NO: 12955 - protein, 9 aa, synthetic construct
  REGION 1..9: note = Sentrin-specific protease 5 (328-336)
LLIPIHLEV

SEQ ID NO: 12956 - protein, 9 aa, synthetic construct
  REGION 1..9: note = cAMP-dependent protein kinase type I-alpha regulatory subunit (30-38)
LLKDSIVQL

SEQ ID NO: 12957 - protein, 10 aa, synthetic construct
  REGION 1..10: note = Coatomer subunit gamma-1 (847-856)
LLLDTVTMQV

SEQ ID NO: 12958 - protein, 9 aa, synthetic construct
  REGION 1..9: note = ATP-binding cassette sub-family B member 8, mitochondrial (150-158)
LLLGQLVEV

SEQ ID NO: 12959 - protein, 11 aa, synthetic construct
  REGION 1..11: note = Ubiquitin/ISG15-conjugating enzyme E2 L6 (38-48)
LLLPDQPPYHL

SEQ ID NO: 12960 - protein, 11 aa, synthetic construct
  REGION 1..11: note = E3 ubiquitin-protein ligase listerin (646-656)
LLMPSSEDLLL

SEQ ID NO: 12961 - protein, 9 aa, synthetic construct
  REGION 1..9: note = Kelch-like protein 12 (470-478)
LLNDHIYVV

SEQ ID NO: 12962 - protein, 9 aa, synthetic construct
  REGION 1..9: note = Polyadenylate-binding protein 4 (162-170)
LLNDRKVFV

SEQ ID NO: 12963 - protein, 10 aa, synthetic construct
  REGION 1..10: note = Staphylococcal nuclease domain-containing protein 1 (187-196)
LLPDYYLVTV

SEQ ID NO: 12964 - protein, 10 aa, synthetic construct
  REGION 1..10: note = tRNA-dihydrouridine(47) synthase (NAD(P)(+))-like (208-217)
LLPELRDWGV

SEQ ID NO: 12965 - protein, 9 aa, synthetic construct
  REGION 1..9: note = Activating molecule in BECN1-regulated autophagy protein 1 (810-818)
LLPEYLPYA

SEQ ID NO: 12966 - protein, 9 aa, synthetic construct
  REGION 1..9: note = Transportin-1 (394-402)
LLPHILPLL

SEQ ID NO: 12967 - protein, 9 aa, synthetic construct
  REGION 1..9: note = Angiomotin-like protein 1 (845-853)
LLPPPPTSA

SEQ ID NO: 12968 - protein, 9 aa, synthetic construct
  REGION 1..9: note = ATP-citrate synthase (43-51)
LLQDHPWLL

SEQ ID NO: 12969 - protein, 9 aa, synthetic construct
  REGION 1..9: note = Pleckstrin homology domain-containing family A member 4 (400-408)
LLQDRLVSV

SEQ ID NO: 12970 - protein, 9 aa, synthetic construct
  REGION 1..9: note = T-complex protein 1 subunit epsilon (314-322)
LLQNNLPAV

SEQ ID NO: 12971 - protein, 9 aa, synthetic construct
  REGION 1..9: note = Nuclear factor erythroid 2-related factor 1 (371-379)
LLREKVEFL

SEQ ID NO: 12972 - protein, 9 aa, synthetic construct
  REGION 1..9: note = Eukaryotic translation initiation factor 4 gamma 3 (1361-1369)
LLSEILHLL

SEQ ID NO: 12973 - protein, 9 aa, synthetic construct
  REGION 1..9: note = Liprin-alpha-3 (437-445)
LLSESNERL

SEQ ID NO: 12974 - protein, 10 aa, synthetic construct
  REGION 1..10: note = Cyclin-dependent kinase 11B (556-565)
LLSHAGILKV

SEQ ID NO: 12975 - protein, 9 aa, synthetic construct
  REGION 1..9: note = TATA-binding protein-associated factor 172 (43-51)
LLSKVLIYL

SEQ ID NO: 12976 - protein, 9 aa, synthetic construct
  REGION 1..9: note = Ras GTPase-activating protein-binding protein 1 (97-105)
LLSNNNQAL

SEQ ID NO: 12977 - protein, 9 aa, synthetic construct
  REGION 1..9: note = Fasciculation and elongation protein zeta-2 (365-373)
LLTDYILKV

SEQ ID NO: 12978 - protein, 9 aa, synthetic construct
  REGION 1..9: note = 5'-nucleotidase domain-containing protein 3 (276-284)
LLWDKIHKL

SEQ ID NO: 12979 - protein, 10 aa, synthetic construct
  REGION 1..10: note = Cyclic AMP-dependent transcription factor ATF-6 beta (206-215)
LLWDVPAPSL

SEQ ID NO: 12980 - protein, 11 aa, synthetic construct
  REGION 1..11: note = Protein KIAA0100 (525-535)
LLWSPPDHMYL

SEQ ID NO: 12981 - protein, 9 aa, synthetic construct
  REGION 1..9: note = Growth arrest-specific protein 8 (22-30)
LLYEHQNNL

SEQ ID NO: 12982 - protein, 10 aa, synthetic construct
  REGION 1..10: note = ATP-dependent RNA helicase DHX29 (149-158)
LLYGGDLHSA

SEQ ID NO: 12983 - protein, 9 aa, synthetic construct
  REGION 1..9: note = Catenin alpha-1 (702-710)
LMNAVVQTV

SEQ ID NO: 12984 - protein, 9 aa, synthetic construct
  REGION 1..9: note = Transient receptor potential cation channel subfamily V member 2 (644-652)
LMSETVNSV

SEQ ID NO: 12985 - protein, 9 aa, synthetic construct
  REGION 1..9: note = 5'-3' exoribonuclease 2 (347-355)
LPHLPSLEI

SEQ ID NO: 12986 - protein, 9 aa, synthetic construct
  REGION 1..9: note = Exosome component 10 (544-552)
LPKEPQGII

SEQ ID NO: 12987 - protein, 8 aa, synthetic construct
  REGION 1..8: note = Girdin (733-740)
LPRASSVI

SEQ ID NO: 12988 - protein, 9 aa, synthetic construct
  REGION 1..9: note = Cytoskeleton-associated protein 5 (598-606)
LPWTAEQVV

SEQ ID NO: 12989 - protein, 9 aa, synthetic construct
  REGION 1..9: note = SLIT-ROBO Rho GTPase-activating protein 2 (519-527)
LQHEGIFRV

SEQ ID NO: 12990 - protein, 11 aa, synthetic construct
  REGION 1..11: note = DNA dC-dU-editing enzyme APOBEC-3A (64-74)
LQLDPAQIYRV

SEQ ID NO: 12991 - protein, 9 aa, synthetic construct
  REGION 1..9: note = N-acetylgalactosamine kinase (236-244)
LQWDKVLRL

SEQ ID NO: 12992 - protein, 9 aa, synthetic construct
  REGION 1..9: note = ATP-binding cassette sub-family A member 7 (407-415)
LSLDKLEAA

SEQ ID NO: 12993 - protein, 9 aa, synthetic construct
  REGION 1..9: note = U6 snRNA-associated Sm-like protein LSm4 (4-12)
LSLLKTAQN

SEQ ID NO: 12994 - protein, 9 aa, synthetic construct
  REGION 1..9: note = Pre-mRNA-processing-splicing factor 8 (249-257)
LVDDNYFYL

SEQ ID NO: 12995 - protein, 10 aa, synthetic construct
  REGION 1..10: note = Protein PRRC2B (148-157)
LVYEGQLSQA

SEQ ID NO: 12996 - protein, 9 aa, synthetic construct
  REGION 1..9: note = E3 ubiquitin-protein ligase Hakai (268-276)
MAPPPPRSV

SEQ ID NO: 12997 - protein, 9 aa, synthetic construct
  REGION 1..9: note = Eukaryotic translation initiation factor 4 gamma 1 (1290-1298)
MEIDIPHVW

SEQ ID NO: 12998 - protein, 10 aa, synthetic construct
  REGION 1..10: note = Keratinocyte-associated transmembrane protein 2 (176-185)
MEIEQSVKSF

SEQ ID NO: 12999 - protein, 9 aa, synthetic construct
  REGION 1..9: note = E3 ubiquitin-protein ligase UBR1 (380-388)
MEMEYKKLF

SEQ ID NO: 13000 - protein, 9 aa, synthetic construct
  REGION 1..9: note = Intron-binding protein aquarius (94-102)
MEQSLFTRF

SEQ ID NO: 13001 - protein, 9 aa, synthetic construct
  REGION 1..9: note = Riboflavin kinase (85-93)
METHIMHTF

SEQ ID NO: 13002 - protein, 9 aa, synthetic construct
  REGION 1..9: note = Adenosylhomocysteinase (210-218)
MIAGKVAVV

SEQ ID NO: 13003 - protein, 9 aa, synthetic construct
  REGION 1..9: note = TFIIH basal transcription factor complex helicase XPB subunit (438-446)
MILDEVHTI

SEQ ID NO: 13004 - protein, 9 aa, synthetic construct
  REGION 1..9: note = GPN-loop GTPase 3 (162-170)
MISLEIPQV

SEQ ID NO: 13005 - protein, 9 aa, synthetic construct
  REGION 1..9: note = DNA replication licensing factor MCM5 (531-539)
MLAKHVITL

SEQ ID NO: 13006 - protein, 9 aa, synthetic construct
  REGION 1..9: note = Microtubule-associated protein RP/EB family member 1 (20-28)
MLAWINESL

SEQ ID NO: 13007 - protein, 9 aa, synthetic construct
  REGION 1..9: note = Protein SSXT (28-36)
MLDDNNHLI

SEQ ID NO: 13008 - protein, 9 aa, synthetic construct
  REGION 1..9: note = Nucleoporin NUP188 homolog (296-304)
MLDDRAYLV

SEQ ID NO: 13009 - protein, 9 aa, synthetic construct
  REGION 1..9: note = Nitrogen permease regulator 3-like protein (542-550)
MLFDKFRSV

SEQ ID NO: 13010 - protein, 11 aa, synthetic construct
  REGION 1..11: note = Protein zyg-11 homolog B (424-434)
MLIEEGGLQHL

SEQ ID NO: 13011 - protein, 9 aa, synthetic construct
  REGION 1..9: note = AP-3 complex subunit beta-1 (138-146)
MLIEVIEKL

SEQ ID NO: 13012 - protein, 9 aa, synthetic construct
  REGION 1..9: note = 1-phosphatidylinositol 3-phosphate 5-kinase (763-771)
MLLEHGITL

SEQ ID NO: 13013 - protein, 10 aa, synthetic construct
  REGION 1..10: note = Eukaryotic translation initiation factor 3 subunit C-like protein (692-701)
MLLEIPYMAA

SEQ ID NO: 13014 - protein, 9 aa, synthetic construct
  REGION 1..9: note = Mitochondrial import receptor subunit TOM20 homolog (121-129)
MLLTKLPTI

SEQ ID NO: 13015 - protein, 9 aa, synthetic construct
  REGION 1..9: note = Beta-2-syntrophin (451-459)
MLNGQEVRL

SEQ ID NO: 13016 - protein, 10 aa, synthetic construct
  REGION 1..10: note = SH3KBP1-binding protein 1 (437-446)
MLSEKHLISV

SEQ ID NO: 13017 - protein, 9 aa, synthetic construct
  REGION 1..9: note = BRCA1-A complex subunit BRE (13-21)
MLSPFISSV

SEQ ID NO: 13018 - protein, 9 aa, synthetic construct
  REGION 1..9: note = Nesprin-2 (4298-4306)
MLTEIEHKV

SEQ ID NO: 13019 - protein, 9 aa, synthetic construct
  REGION 1..9: note = T-complex protein 1 subunit eta (97-105)
MMLDDLLQL

SEQ ID NO: 13020 - protein, 9 aa, synthetic construct
  REGION 1..9: note = ATP-dependent RNA helicase DDX18 (187-195)
MPRNGTGVL

SEQ ID NO: 13021 - protein, 11 aa, synthetic construct
  REGION 1..11: note = Abhydrolase domain-containing protein 2 (301-311)
MQIDDNVMRKF

SEQ ID NO: 13022 - protein, 9 aa, synthetic construct
  REGION 1..9: note = Bifunctional glutamate/proline-tRNA ligase (589-597)
NADGKIISL

SEQ ID NO: 13023 - protein, 9 aa, synthetic construct
  REGION 1..9: note = HEAT repeat-containing protein 1 (1568-1576)
NADKLTVKF

SEQ ID NO: 13024 - protein, 8 aa, synthetic construct
  REGION 1..8: note = Eukaryotic translation initiation factor 3 subunit C-like protein (434-441)
NADQPLRV

SEQ ID NO: 13025 - protein, 9 aa, synthetic construct
  REGION 1..9: note = Inner centromere protein (178-186)
NAEQHVTQL

SEQ ID NO: 13026 - protein, 9 aa, synthetic construct
  REGION 1..9: note = Serine/threonine-protein phosphatase 4 regulatory subunit 3B (168-176)
NEGYIKKLL

SEQ ID NO: 13027 - protein, 8 aa, synthetic construct
  REGION 1..8: note = tRNA (cytosine(34)-C(5))-methyltransferase (262-269)
NELPGLKW

SEQ ID NO: 13028 - protein, 9 aa, synthetic construct
  REGION 1..9: note = Nuclear factor erythroid 2-related factor 2 (459-467)
NEMMSKEQF

SEQ ID NO: 13029 - protein, 10 aa, synthetic construct
  REGION 1..10: note = DDB1- and CUL4-associated factor 8 (367-376)
NENNGVLKKF

SEQ ID NO: 13030 - protein, 9 aa, synthetic construct
  REGION 1..9: note = Syntaxin-binding protein 3 (434-442)
NESDMIRNW

SEQ ID NO: 13031 - protein, 9 aa, synthetic construct
  REGION 1..9: note = Unconventional myosin-XVIIIa (417-425)
NESSVLHTL

SEQ ID NO: 13032 - protein, 11 aa, synthetic construct
  REGION 1..11: note = FACT complex subunit SPT16 (585-595)
NIFPNPEATFV

SEQ ID NO: 13033 - protein, 9 aa, synthetic construct
  REGION 1..9: note = Ras GTPase-activating-like protein IQGAP3 (896-904)
NIMDIKIGL

SEQ ID NO: 13034 - protein, 9 aa, synthetic construct
  REGION 1..9: note = Protein TRIM6-TRIM34 (430-438)
NIVERLKEV

SEQ ID NO: 13035 - protein, 8 aa, synthetic construct
  REGION 1..8: note = Calponin-2 (7-14)
NKGPSYGL

SEQ ID NO: 13036 - protein, 9 aa, synthetic construct
  REGION 1..9: note = Developmentally-regulated GTP-binding protein 1 (83-91)
NLAGVYSEV

SEQ ID NO: 13037 - protein, 9 aa, synthetic construct
  REGION 1..9: note = Nodal modulator 3 (667-675)
NLDNPIQTV

SEQ ID NO: 13038 - protein, 9 aa, synthetic construct
  REGION 1..9: note = Ubiquitin-conjugating enzyme E2 J1 (44-52)
NLFEWHFTV

SEQ ID NO: 13039 - protein, 9 aa, synthetic construct
  REGION 1..9: note = Transcription initiation factor TFIID subunit 1 (767-775)
NLFRAPIYL

SEQ ID NO: 13040 - protein, 9 aa, synthetic construct
  REGION 1..9: note = Vacuolar fusion protein CCZ1 homolog (460-468)
NLIEVNEEV

SEQ ID NO: 13041 - protein, 9 aa, synthetic construct
  REGION 1..9: note = GCN1 general control of amino-acid synthesis 1-like 1 (846-854)
NLLRRLWVV

SEQ ID NO: 13042 - protein, 9 aa, synthetic construct
  REGION 1..9: note = Ras GTPase-activating-like protein IQGAP2 (826-834)
NLMDIKIGL

SEQ ID NO: 13043 - protein, 9 aa, synthetic construct
  REGION 1..9: note = Iron-responsive element-binding protein 2 (380-388)
NLNSIVPSV

SEQ ID NO: 13044 - protein, 9 aa, synthetic construct
  REGION 1..9: note = Phosphoserine aminotransferase (58-66)
NLVRELLAV

SEQ ID NO: 13045 - protein, 9 aa, synthetic construct
  REGION 1..9: note = Zinc finger BED domain-containing protein 4 (1063-1071)
NLWSLVAKV

SEQ ID NO: 13046 - protein, 9 aa, synthetic construct
  REGION 1..9: note = Ubiquitin-like modifier-activating enzyme 7 (733-741)
NLYAQMHGL

SEQ ID NO: 13047 - protein, 9 aa, synthetic construct
  REGION 1..9: note = Rho guanine nucleotide exchange factor 2 (717-725)
NLYGLLHGL

SEQ ID NO: 13048 - protein, 9 aa, synthetic construct
  REGION 1..9: note = RRP12-like protein (634-642)
NLYGQPVAA

SEQ ID NO: 13049 - protein, 11 aa, synthetic construct
  REGION 1..11: note = Splicing factor 3A subunit 1 (774-784)
NMANGAVIHLA

SEQ ID NO: 13050 - protein, 9 aa, synthetic construct
  REGION 1..9: note = Protein C12orf4 (534-542)
NMLPQIFRV

SEQ ID NO: 13051 - protein, 9 aa, synthetic construct
  REGION 1..9: note = Casein kinase II subunit alpha (350-358)
NMMSGISSV

SEQ ID NO: 13052 - protein, 11 aa, synthetic construct
  REGION 1..11: note = Prefoldin subunit 1 (59-69)
NMYEGVGRMFI

SEQ ID NO: 13053 - protein, 9 aa, synthetic construct
  REGION 1..9: note = Putative pre-mRNA-splicing factor ATP-dependent RNA helicase DHX16 (701-709)
NPRTGMESL

SEQ ID NO: 13054 - protein, 9 aa, synthetic construct
  REGION 1..9: note = Histone acetyltransferase p300 (478-486)
NQMPTQPQV

SEQ ID NO: 13055 - protein, 9 aa, synthetic construct
  REGION 1..9: note = Phosphatidate phosphatase LPIN1 (800-808)
NRPADVYSY

SEQ ID NO: 13056 - protein, 11 aa, synthetic construct
  REGION 1..11: note = Nuclear valosin-containing protein-like isoform 4 (634-644)
NRPDIIDPAIL

SEQ ID NO: 13057 - protein, 9 aa, synthetic construct
  REGION 1..9: note = Glyceraldehyde-3-phosphate dehydrogenase (287-295)
NSDTHSSTF

SEQ ID NO: 13058 - protein, 9 aa, synthetic construct
  REGION 1..9: note = Myosin regulatory light chain 12B (155-163)
NYIEFTRIL

SEQ ID NO: 13059 - protein, 9 aa, synthetic construct
  REGION 1..9: note = N-acetyllactosaminide beta-1,3-N-acetylglucosaminyltransferase 2 (208-216)
NYRDTFFNL

SEQ ID NO: 13060 - protein, 8 aa, synthetic construct
  REGION 1..8: note = Vigilin (628-635)
PAKLHNSL

SEQ ID NO: 13061 - protein, 9 aa, synthetic construct
  REGION 1..9: note = Leucine-rich repeat-containing protein 47 (93-101)
PELGPLPAL

SEQ ID NO: 13062 - protein, 9 aa, synthetic construct
  REGION 1..9: note = Mitochondrial fission regulator 1 (152-160)
PHPPPPPPP

SEQ ID NO: 13063 - protein, 9 aa, synthetic construct
  REGION 1..9: note = SCAN domain-containing protein 1 (113-121)
PLGPAPVSV

SEQ ID NO: 13064 - protein, 8 aa, synthetic construct
  REGION 1..8: note = Long-chain-fatty-acid-CoA ligase 4 (577-584)
PNQKRLTL

SEQ ID NO: 13065 - protein, 9 aa, synthetic construct
  REGION 1..9: note = Long-chain-fatty-acid-CoA ligase 4 (577-585)
PNQKRLTLL

SEQ ID NO: 13066 - protein, 10 aa, synthetic construct
  REGION 1..10: note = Proline-rich nuclear receptor coactivator 2 (6-15)
PRLNSADRPM

SEQ ID NO: 13067 - protein, 8 aa, synthetic construct
  REGION 1..8: note = Protein flightless-1 homolog (882-889)
PRQPPMSL

SEQ ID NO: 13068 - protein, 8 aa, synthetic construct
  REGION 1..8: note = RHO/RAC effector protein (1130-1137)
PRYLGPAI

SEQ ID NO: 13069 - protein, 9 aa, synthetic construct
  REGION 1..9: note = Palladin (86-94)
PSPPPPPPP

SEQ ID NO: 13070 - protein, 9 aa, synthetic construct
  REGION 1..9: note = Forkhead box protein J3 (438-446)
QAPPPPQQV

SEQ ID NO: 13071 - protein, 10 aa, synthetic construct
  REGION 1..10: note = AT-rich interactive domain-containing protein 1A (1477-1486)
QEFDSGLLHW

SEQ ID NO: 13072 - protein, 10 aa, synthetic construct
  REGION 1..10: note = Rho GTPase-activating protein 35 (914-923)
QEIDGRFTSI

SEQ ID NO: 13073 - protein, 11 aa, synthetic construct
  REGION 1..11: note = Translin-associated protein X (106-116)
QELSGEDMHQF

SEQ ID NO: 13074 - protein, 9 aa, synthetic construct
  REGION 1..9: note = Acetyl-CoA carboxylase 1 (270-278)
QENDFSKRI

SEQ ID NO: 13075 - protein, 10 aa, synthetic construct
  REGION 1..10: note = Lamin-B receptor (157-166)
QESSYIATQY

SEQ ID NO: 13076 - protein, 9 aa, synthetic construct
  REGION 1..9: note = Death-associated protein kinase 3 (122-130)
QILDGVHYL

SEQ ID NO: 13077 - protein, 9 aa, synthetic construct
  REGION 1..9: note = Dynamin-like 120 kDa protein, mitochondrial (953-961)
QLAEDLKKV

SEQ ID NO: 13078 - protein, 9 aa, synthetic construct
  REGION 1..9: note = Epidermal growth factor receptor kinase substrate 8 (455-463)
QLAESVANV

SEQ ID NO: 13079 - protein, 10 aa, synthetic construct
  REGION 1..10: note = Transforming acidic coiled-coil-containing protein 3 (776-785)
QLANEEIAQV

SEQ ID NO: 13080 - protein, 10 aa, synthetic construct
  REGION 1..10: note = E3 ubiquitin-protein ligase BRE1B (68-77)
QLDEARGLLL

SEQ ID NO: 13081 - protein, 9 aa, synthetic construct
  REGION 1..9: note = Tyrosine-protein phosphatase non-receptor type 12 (162-170)
QLFEKQLQL

SEQ ID NO: 13082 - protein, 10 aa, synthetic construct
  REGION 1..10: note = Phospholipase A1 member A (177-186)
QLFGGQLGQI

SEQ ID NO: 13083 - protein, 9 aa, synthetic construct
  REGION 1..9: note = CDK5 regulatory subunit-associated protein 2 (1222-1230)
QLFSEIHNL

SEQ ID NO: 13084 - protein, 9 aa, synthetic construct
  REGION 1..9: note = Trinucleotide repeat-containing gene 18 protein (900-908)
QLFSQQHFL

SEQ ID NO: 13085 - protein, 9 aa, synthetic construct
  REGION 1..9: note = Dual specificity protein phosphatase 14 (157-165)
QLIDYERQL

SEQ ID NO: 13086 - protein, 9 aa, synthetic construct
  REGION 1..9: note = Eyes absent homolog 2 (420-428)
QLIPALAKV

SEQ ID NO: 13087 - protein, 9 aa, synthetic construct
  REGION 1..9: note = Dual specificity protein phosphatase 6 (193-201)
QLLDFERTL

SEQ ID NO: 13088 - protein, 10 aa, synthetic construct
  REGION 1..10: note = Circadian clock protein PASD1 (39-48)
QLLDGFMITL

SEQ ID NO: 13089 - protein, 9 aa, synthetic construct
  REGION 1..9: note = Transport and Golgi organization protein 6 homolog (720-728)
QLLPLLEKV

SEQ ID NO: 13090 - protein, 9 aa, synthetic construct
  REGION 1..9: note = AP-1 complex subunit beta-1 (483-491)
QLLTAIVKL

SEQ ID NO: 13091 - protein, 9 aa, synthetic construct
  REGION 1..9: note = tRNA (guanine(26)-N(2))-dimethyltransferase (198-206)
QLNDVAHLV

SEQ ID NO: 13092 - protein, 9 aa, synthetic construct
  REGION 1..9: note = WD repeat-containing protein 36 (690-698)
QLNEQLVTL

SEQ ID NO: 13093 - protein, 9 aa, synthetic construct
  REGION 1..9: note = COMM domain-containing protein 8 (116-124)
QLQDFDWQV

SEQ ID NO: 13094 - protein, 9 aa, synthetic construct
  REGION 1..9: note = Thyroid receptor-interacting protein 11 (1241-1249)
QLQEELHQL

SEQ ID NO: 13095 - protein, 9 aa, synthetic construct
  REGION 1..9: note = Golgin subfamily A member 4 (1397-1405)
QLTDLNVQL

SEQ ID NO: 13096 - protein, 9 aa, synthetic construct
  REGION 1..9: note = Eyes absent homolog 3 (439-447)
QLVPALAKV

SEQ ID NO: 13097 - protein, 9 aa, synthetic construct
  REGION 1..9: note = Nuclear factor NF-kappa-B p105 subunit (558-566)
QLVRDLLEV

SEQ ID NO: 13098 - protein, 9 aa, synthetic construct
  REGION 1..9: note = Ketosamine-3-kinase (140-148)
QLYQLFHYL

SEQ ID NO: 13099 - protein, 9 aa, synthetic construct
  REGION 1..9: note = T-complex protein 1 subunit epsilon (184-192)
QMAEIAVNA

SEQ ID NO: 13100 - protein, 9 aa, synthetic construct
  REGION 1..9: note = Spectrin beta chain, non-erythrocytic 1 (1423-1431)
QMLENQMEV

SEQ ID NO: 13101 - protein, 11 aa, synthetic construct
  REGION 1..11: note = Signal transducer and activator of transcription 1-alpha/beta (8-18)
QQLDSKFLEQV

SEQ ID NO: 13102 - protein, 11 aa, synthetic construct
  REGION 1..11: note = E1A-binding protein p400 (1051-1061)
QQTPVASIQQV

SEQ ID NO: 13103 - protein, 8 aa, synthetic construct
  REGION 1..8: note = E3 ubiquitin-protein ligase RLIM (173-180)
QRPPTIVL

SEQ ID NO: 13104 - protein, 9 aa, synthetic construct
  REGION 1..9: note = Cell division cycle protein 27 homolog (580-588)
REHDIAIKF

SEQ ID NO: 13105 - protein, 9 aa, synthetic construct
  REGION 1..9: note = Small nuclear ribonucleoprotein Sm D2 (102-110)
RGDSVIVVL

SEQ ID NO: 13106 - protein, 11 aa, synthetic construct
  REGION 1..11: note = DNA topoisomerase 1 (376-386)
RIMPEDIIINC

SEQ ID NO: 13107 - protein, 9 aa, synthetic construct
  REGION 1..9: note = Cyclin-L2 (140-148)
RIRDVINVF

SEQ ID NO: 13108 - protein, 9 aa, synthetic construct
  REGION 1..9: note = Prelamin-A/C (91-99)
RLADALQEL

SEQ ID NO: 13109 - protein, 9 aa, synthetic construct
  REGION 1..9: note = Clathrin heavy chain 1 (1182-1190)
RLAELEEFI

SEQ ID NO: 13110 - protein, 10 aa, synthetic construct
  REGION 1..10: note = tRNA (cytosine(34)-C(5))-methyltransferase (514-523)
RLAQEGIYTL

SEQ ID NO: 13111 - protein, 10 aa, synthetic construct
  REGION 1..10: note = RUS1 family protein C16orf58 (165-174)
RLFADILNDV

SEQ ID NO: 13112 - protein, 9 aa, synthetic construct
  REGION 1..9: note = HEAT repeat-containing protein 2 (253-261)
RLFDDVPQV

SEQ ID NO: 13113 - protein, 9 aa, synthetic construct
  REGION 1..9: note = BTB/POZ domain-containing protein 2 (2-10)
RLFDEPQLA

SEQ ID NO: 13114 - protein, 11 aa, synthetic construct
  REGION 1..11: note = WD repeat domain phosphoinositide-interacting protein 4 (219-229)
RLFDTQSKEKL

SEQ ID NO: 13115 - protein, 11 aa, synthetic construct
  REGION 1..11: note = DDB1- and CUL4-associated factor 4-like protein 1 (246-256)
RLFHDSAVTSV

SEQ ID NO: 13116 - protein, 11 aa, synthetic construct
  REGION 1..11: note = Histone-lysine N-methyltransferase setd3 (468-478)
RLGEKEILEKA

SEQ ID NO: 13117 - protein, 9 aa, synthetic construct
  REGION 1..9: note = Plectin (462-470)
RLHERLVAI

SEQ ID NO: 13118 - protein, 9 aa, synthetic construct
  REGION 1..9: note = Probable ATP-dependent RNA helicase DDX47 (147-155)
RLIDHLENT

SEQ ID NO: 13119 - protein, 9 aa, synthetic construct
  REGION 1..9: note = Nuclear pore complex protein Nup160 (575-583)
RLIEESVTV

SEQ ID NO: 13120 - protein, 10 aa, synthetic construct
  REGION 1..10: note = Partitioning defective 3 homolog (510-519)
RLIEVNGVDL

SEQ ID NO: 13121 - protein, 9 aa, synthetic construct
  REGION 1..9: note = 3-ketodihydrosphingosine reductase (236-244)
RLISETTSV

SEQ ID NO: 13122 - protein, 9 aa, synthetic construct
  REGION 1..9: note = Eukaryotic translation initiation factor 4 gamma 1 (840-848)
RLKEELEEA

SEQ ID NO: 13123 - protein, 11 aa, synthetic construct
  REGION 1..11: note = Upstream-binding protein 1 (145-155)
RLLDLDIPMSV

SEQ ID NO: 13124 - protein, 11 aa, synthetic construct
  REGION 1..11: note = Cytochrome c oxidase subunit 2 (134-144)
RLLDVDNRVVL

SEQ ID NO: 13125 - protein, 9 aa, synthetic construct
  REGION 1..9: note = Pyridoxal-dependent decarboxylase domain-containing protein 1 (603-611)
RLLENMTEV

SEQ ID NO: 13126 - protein, 11 aa, synthetic construct
  REGION 1..11: note = Xyloside xylosyltransferase 1 (295-305)
RLLEPAQVQQL

SEQ ID NO: 13127 - protein, 10 aa, synthetic construct
  REGION 1..10: note = Telomere length regulation protein TEL2 homolog (186-195)
RLLGEEVVRV

SEQ ID NO: 13128 - protein, 9 aa, synthetic construct
  REGION 1..9: note = Suppressor APC domain-containing protein 2 (290-298)
RLLPKVQEV

SEQ ID NO: 13129 - protein, 9 aa, synthetic construct
  REGION 1..9: note = Translocon-associated protein subunit beta (2-10)
RLLSFVVLA

SEQ ID NO: 13130 - protein, 9 aa, synthetic construct
  REGION 1..9: note = Vacuolar protein sorting-associated protein 33B (607-615)
RLMEAMSEV

SEQ ID NO: 13131 - protein, 11 aa, synthetic construct
  REGION 1..11: note = Probable inactiveosyltransferase 25 family member 3 (351-361)
RLMEDVEAEKL

SEQ ID NO: 13132 - protein, 11 aa, synthetic construct
  REGION 1..11: note = Vacuolar protein sorting-associated protein 13D (1845-1855)
RLPPEGILHNV

SEQ ID NO: 13133 - protein, 9 aa, synthetic construct
  REGION 1..9: note = Ribosome-binding protein 1 (569-577)
RLQEELEKL

SEQ ID NO: 13134 - protein, 11 aa, synthetic construct
  REGION 1..11: note = HMG domain-containing protein 4 (432-442)
RLQETEGMVAV

SEQ ID NO: 13135 - protein, 9 aa, synthetic construct
  REGION 1..9: note = Protein orai-3 (287-295)
RLQGELQAV

SEQ ID NO: 13136 - protein, 9 aa, synthetic construct
  REGION 1..9: note = C-1-tetrahydrofolate synthase, cytoplasmic (478-486)
RLVPSVNGV

SEQ ID NO: 13137 - protein, 11 aa, synthetic construct
  REGION 1..11: note = Guanine nucleotide-binding protein subunit beta-2-like 1 (88-98)
RLWDLTTGTTT

SEQ ID NO: 13138 - protein, 8 aa, synthetic construct
  REGION 1..8: note = Circadian clock protein PASD1 (691-698)
RLWQELSD

SEQ ID NO: 13139 - protein, 9 aa, synthetic construct
  REGION 1..9: note = Ubiquitin carboxyl-terminal hydrolase 11 (210-218)
RLYDTHITV

SEQ ID NO: 13140 - protein, 11 aa, synthetic construct
  REGION 1..11: note = TIP41-like protein (200-210)
RLYHEADKTYM

SEQ ID NO: 13141 - protein, 9 aa, synthetic construct
  REGION 1..9: note = N-acetyllactosaminide beta-1,3-N-acetylglucosaminyltransferase 2 (314-322)
RLYHITDQV

SEQ ID NO: 13142 - protein, 11 aa, synthetic construct
  REGION 1..11: note = Heterogeneous nuclear ribonucleoprotein M (511-521)
RMATGLERMGA

SEQ ID NO: 13143 - protein, 11 aa, synthetic construct
  REGION 1..11: note = Eukaryotic translation initiation factor 3 subunit A (752-762)
RMLEDRDLFVM

SEQ ID NO: 13144 - protein, 11 aa, synthetic construct
  REGION 1..11: note = N-alpha-acetyltransferase 38, NatC auxiliary subunit (104-114)
RMTDGRTLVGC

SEQ ID NO: 13145 - protein, 11 aa, synthetic construct
  REGION 1..11: note = Nucleophosmin (277-287)
RMTDQEAIQDL

SEQ ID NO: 13146 - protein, 10 aa, synthetic construct
  REGION 1..10: note = Copine-3 (121-130)
RPAGKGSITI

SEQ ID NO: 13147 - protein, 9 aa, synthetic construct
  REGION 1..9: note = Myeloid-derived growth factor (146-154)
RPGAFKAEL

SEQ ID NO: 13148 - protein, 9 aa, synthetic construct
  REGION 1..9: note = BTB/POZ domain-containing adapter for CUL3-mediated RhoA degradation protein 1 (319-327)
RPHGQQIVF

SEQ ID NO: 13149 - protein, 9 aa, synthetic construct
  REGION 1..9: note = Histone-lysine N-methyltransferase 2C (1906-1914)
RPPPVGHSF

SEQ ID NO: 13150 - protein, 9 aa, synthetic construct
  REGION 1..9: note = Calcium-independent phospholipase A2-gamma (321-329)
RPTEGVQAL

SEQ ID NO: 13151 - protein, 9 aa, synthetic construct
  REGION 1..9: note = Sperm-specific antigen 2 (241-249)
RQIEVLTTV

SEQ ID NO: 13152 - protein, 10 aa, synthetic construct
  REGION 1..10: note Dolichyl-diphosphooligosaccharide-proteinosyltransferase subunit 1 (268-277)
RQPDSGISSI

SEQ ID NO: 13153 - protein, 9 aa, synthetic construct
  REGION 1..9: note = DNA ligase 1 (294-302)
RTFEKIEEV

SEQ ID NO: 13154 - protein, 9 aa, synthetic construct
  REGION 1..9: note = Trifunctional enzyme subunit alpha, mitochondrial (235-243)
RTIEYLEEV

SEQ ID NO: 13155 - protein, 9 aa, synthetic construct
  REGION 1..9: note = Sorting nexin-4 (243-251)
RVADRLYGV

SEQ ID NO: 13156 - protein, 10 aa, synthetic construct
  REGION 1..10: note = THO complex subunit 2 (904-913)
RVFSDIIYTV

SEQ ID NO: 13157 - protein, 9 aa, synthetic construct
  REGION 1..9: note = Glycerol-3-phosphate acyltransferase 1, mitochondrial (138-146)
RVQEAIAEV

SEQ ID NO: 13158 - protein, 9 aa, synthetic construct
  REGION 1..9: note = Putative eukaryotic translation initiation factor 2 subunit 3-like protein (416-424)
RVSAVKADL

SEQ ID NO: 13159 - protein, 9 aa, synthetic construct
  REGION 1..9: note = Regulation of nuclear pre-mRNA domain-containing protein 1A (271-279)
RVSLVRKEL

SEQ ID NO: 13160 - protein, 10 aa, synthetic construct
  REGION 1..10: note = Nuclear receptor corepressor 2 (2392-2401)
RVWEDRPSSA

SEQ ID NO: 13161 - protein, 9 aa, synthetic construct
  REGION 1..9: note = Replication initiator 1 (328-336)
SAAEPTPAV

SEQ ID NO: 13162 - protein, 9 aa, synthetic construct
  REGION 1..9: note = DAZ-associated protein 2 (62-70)
SAAFPGASL

SEQ ID NO: 13163 - protein, 9 aa, synthetic construct
  REGION 1..9: note = Serine-threonine kinase receptor-associated protein (160-168)
SADDKTVRL

SEQ ID NO: 13164 - protein, 9 aa, synthetic construct
  REGION 1..9: note = Poly (ADP-ribose) polymerase 1 (385-393)
SADKPLSNM

SEQ ID NO: 13165 - protein, 9 aa, synthetic construct
  REGION 1..9: note = Uncharacterized protein C15orf39 (994-1002)
SASPPGPTL

SEQ ID NO: 13166 - protein, 11 aa, synthetic construct
  REGION 1..11: note = Replication protein A 32 kDa subunit (93-103)
SEAGNFGGNSF

SEQ ID NO: 13167 - protein, 9 aa, synthetic construct
  REGION 1..9: note = Kelch repeat and BTB domain-containing protein 6 (137-145)
SEANVERLY

SEQ ID NO: 13168 - protein, 9 aa, synthetic construct
  REGION 1..9: note = Protein PRRC2C (867-875)
SEAQVQKFL

SEQ ID NO: 13169 - protein, 10 aa, synthetic construct
  REGION 1..10: note = Non-POU domain-containing octamer-binding protein (120-129)
SEGSFLLTTF

SEQ ID NO: 13170 - protein, 10 aa, synthetic construct
  REGION 1..10: note = Cyclin-dependent kinase 11B (629-638)
SEIDQINKVF

SEQ ID NO: 13171 - protein, 9 aa, synthetic construct
  REGION 1..9: note = Uncharacterized protein C5orf34 (564-572)
SELEKIQKF

SEQ ID NO: 13172 - protein, 10 aa, synthetic construct
  REGION 1..10: note = V-type proton ATPase subunit H (357-366)
SELKSGRLEW

SEQ ID NO: 13173 - protein, 9 aa, synthetic construct
  REGION 1..9: note = Myomegalin (838-846)
SELQALRQY

SEQ ID NO: 13174 - protein, 10 aa, synthetic construct
  REGION 1..10: note = Small subunit processome component 20 homolog (777-786)
SEQDPLLKNL

SEQ ID NO: 13175 - protein, 10 aa, synthetic construct
  REGION 1..10: note = ATP-citrate synthase (7-16)
SEQTGKELLY

SEQ ID NO: 13176 - protein, 9 aa, synthetic construct
  REGION 1..9: note = PERQ amino acid-rich with GYF domain-containing protein 2 (199-207)
SESENWRIF

SEQ ID NO: 13177 - protein, 9 aa, synthetic construct
  REGION 1..9: note = FACT complex subunit SSRP1 (657-665)
SESFKSKEF

SEQ ID NO: 13178 - protein, 9 aa, synthetic construct
  REGION 1..9: note = FAD synthase (193-201)
SIAPILAEA

SEQ ID NO: 13179 - protein, 11 aa, synthetic construct
  REGION 1..11: note = Coatomer subunit beta (249-259)
SIFGEDALANV

SEQ ID NO: 13180 - protein, 9 aa, synthetic construct
  REGION 1..9: note = Inhibitor of Bruton tyrosine kinase (562-570)
SIHDVTFQV

SEQ ID NO: 13181 - protein, 9 aa, synthetic construct
  REGION 1..9: note = Cell growth-regulating nucleolar protein (128-136)
SILDQVWNI

SEQ ID NO: 13182 - protein, 9 aa, synthetic construct
  REGION 1..9: note = Poly (ADP-ribose) polymerase 1 (711-719)
SILSEVQQA

SEQ ID NO: 13183 - protein, 8 aa, synthetic construct
  REGION 1..8: note = EF-hand domain-containing protein 1 (48-55)
SKAPVLTY

SEQ ID NO: 13184 - protein, 9 aa, synthetic construct
  REGION 1..9: note = CCR4-NOT transcription complex subunit 1 (254-262)
SLADFMQEV

SEQ ID NO: 13185 - protein, 9 aa, synthetic construct
  REGION 1..9: note = DNA replication licensing factor MCM7 (208-216)
SLADYITAA

SEQ ID NO: 13186 - protein, 9 aa, synthetic construct
  REGION 1..9: note = Ubiquitin carboxyl-terminal hydrolase 7 (543-551)
SLAEFVQSL

SEQ ID NO: 13187 - protein, 10 aa, synthetic construct
  REGION 1..10: note = X-ray repair cross-complementing protein 5 (580-589)
SLAEGSVTSV

SEQ ID NO: 13188 - protein, 9 aa, synthetic construct
  REGION 1..9: note = Exosome complex exonuclease RRP44 (720-728)
SLAESLDQA

SEQ ID NO: 13189 - protein, 10 aa, synthetic construct
  REGION 1..10: note = Phosphatidylinositol 3,4,5-trisphosphate-dependent Rac exchanger 1 protein (655-664)
SLAEVAGLQV

SEQ ID NO: 13190 - protein, 9 aa, synthetic construct
  REGION 1..9: note = Centrosome-associated protein CEP250 (112-120)
SLAEVNTQL

SEQ ID NO: 13191 - protein, 9 aa, synthetic construct
  REGION 1..9: note = Apolipoprotein L1 (249-257)
SLAGNTYQL

SEQ ID NO: 13192 - protein, 9 aa, synthetic construct
  REGION 1..9: note = SH3 domain and tetratricopeptide repeat-containing protein 1 (740-748)
SLAGSLRSV

SEQ ID NO: 13193 - protein, 11 aa, synthetic construct
  REGION 1..11: note = Kelch-like protein 21 (506-516)
SLAVLGGKLYV

SEQ ID NO: 13194 - protein, 10 aa, synthetic construct
  REGION 1..10: note = Insulin-degrading enzyme (224-233)
SLDDLTNLVV

SEQ ID NO: 13195 - protein, 9 aa, synthetic construct
  REGION 1..9: note = Bone morphogenetic protein receptor type-2 (221-229)
SLDERPVAV

SEQ ID NO: 13196 - protein, 10 aa, synthetic construct
  REGION 1..10: note = Glycogen debranching enzyme (835-844)
SLDPHAQVAV

SEQ ID NO: 13197 - protein, 9 aa, synthetic construct
  REGION 1..9: note = Cullin-9 (676-684)
SLDQHVAAV

SEQ ID NO: 13198 - protein, 9 aa, synthetic construct
  REGION 1..9: note = Protein RMD5 homolog B (28-36)
SLEELLHYV

SEQ ID NO: 13199 - protein, 9 aa, synthetic construct
  REGION 1..9: note = NAD(P)H dehydrogenase (quinone) 1 (155-163)
SLFDLNFQA

SEQ ID NO: 13200 - protein, 9 aa, synthetic construct
  REGION 1..9: note = Signal recognition particle 54 kDa protein (200-208)
SLFEEMLQV

SEQ ID NO: 13201 - protein, 10 aa, synthetic construct
  REGION 1..10: note = Zinc finger protein 451 (454-463)
SLFGQDVKAV

SEQ ID NO: 13202 - protein, 9 aa, synthetic construct
  REGION 1..9: note = Importin-8 (243-251)
SLFKDQMEL

SEQ ID NO: 13203 - protein, 9 aa, synthetic construct
  REGION 1..9: note = Optineurin (302-310)
SLFKELQEA

SEQ ID NO: 13204 - protein, 8 aa, synthetic construct
  REGION 1..8: note = Kelch domain-containing protein 10 (353-360)
SLFKIWLV

SEQ ID NO: 13205 - protein, 9 aa, synthetic construct
  REGION 1..9: note = Telomere-associated protein RIF1 (802-810)
SLFKLIVKV

SEQ ID NO: 13206 - protein, 9 aa, synthetic construct
  REGION 1..9: note = DNA polymerase alpha subunit B (295-303)
SLFPGQVVI

SEQ ID NO: 13207 - protein, 11 aa, synthetic construct
  REGION 1..11: note = Lamin-B receptor (312-322)
SLFQGVEFHYV

SEQ ID NO: 13208 - protein, 11 aa, synthetic construct
  REGION 1..11: note = Renin receptor (103-113)
SLFSEETPVVL

SEQ ID NO: 13209 - protein, 10 aa, synthetic construct
  REGION 1..10: note = Ubiquitin-protein ligase E3C (505-514)
SLFSHSLISI

SEQ ID NO: 13210 - protein, 9 aa, synthetic construct
  REGION 1..9: note = Cytoplasmic dynein 1 heavy chain 1 (2457-2465)
SLFSMLHQA

SEQ ID NO: 13211 - protein, 9 aa, synthetic construct
  REGION 1..9: note = Kelch-like protein 12 (364-372)
SLHDRIYVI

SEQ ID NO: 13212 - protein, 9 aa, synthetic construct
  REGION 1..9: note = Cytochrome P450 20A1 (53-61)
SLHEFLVNL

SEQ ID NO: 13213 - protein, 9 aa, synthetic construct
  REGION 1..9: note = Ectopic P granules protein 5 homolog (837-845)
SLHSVIIQL

SEQ ID NO: 13214 - protein, 9 aa, synthetic construct
  REGION 1..9: note = DNA-directed RNA polymerase I subunit RPA1 (382-390)
SLIDKLYNI

SEQ ID NO: 13215 - protein, 11 aa, synthetic construct
  REGION 1..11: note = Structural maintenance of chromosomes protein 6 (601-611)
SLIDMRGIETV

SEQ ID NO: 13216 - protein, 9 aa, synthetic construct
  REGION 1..9: note = Transmembrane protein 209 (11-19)
SLIDRTIKM

SEQ ID NO: 13217 - protein, 9 aa, synthetic construct
  REGION 1..9: note = Cation channel sperm-associated protein 2 (33-41)
SLIEHLQGL

SEQ ID NO: 13218 - protein, 9 aa, synthetic construct
  REGION 1..9: note = Mediator of RNA polymerase II transcription subunit 19 (129-137)
SLIEKPPIL

SEQ ID NO: 13219 - protein, 9 aa, synthetic construct
  REGION 1..9: note = Nucleolar pre-ribosomal-associated protein 1 (1761-1769)
SLIERDLKL

SEQ ID NO: 13220 - protein, 9 aa, synthetic construct
  REGION 1..9: note = Solute carrier family 35 member C2 (14-22)
SLIFKLEEL

SEQ ID NO: 13221 - protein, 9 aa, synthetic construct
  REGION 1..9: note = Solute carrier family 35 member E1 (24-32)
SLIPIISGV

SEQ ID NO: 13222 - protein, 9 aa, synthetic construct
  REGION 1..9: note = Putative Polycomb group protein ASXL2 (835-843)
SLIRIVPVV

SEQ ID NO: 13223 - protein, 9 aa, synthetic construct
  REGION 1..9: note = Carboxypeptidase D (372-380)
SLITLIEKV

SEQ ID NO: 13224 - protein, 9 aa, synthetic construct
  REGION 1..9: note = Peroxisomal biogenesis factor 3 (201-209)
SLLDLEQKL

SEQ ID NO: 13225 - protein, 9 aa, synthetic construct
  REGION 1..9: note = Zinc finger BED domain-containing protein 1 (280-288)
SLLDVAVHM

SEQ ID NO: 13226 - protein, 9 aa, synthetic construct
  REGION 1..9: note = Kinesin-like protein KIF3A (470-478)
SLLEKLSAL

SEQ ID NO: 13227 - protein, 9 aa, synthetic construct
  REGION 1..9: note = Kinesin-like protein (557-565)
SLLKDLAEI

SEQ ID NO: 13228 - protein, 9 aa, synthetic construct
  REGION 1..9: note = Phosphatidylinositol 4-phosphate 5-kinase type-1 alpha (312-320)
SLLMSIHNI

SEQ ID NO: 13229 - protein, 9 aa, synthetic construct
  REGION 1..9: note = Claspin (1254-1262)
SLLNQPKAV

SEQ ID NO: 13230 - protein, 11 aa, synthetic construct
  REGION 1..11: note = Sister chromatid cohesion protein PDS5 homolog A (36-46)
SLLPEYVVPYM

SEQ ID NO: 13231 - protein, 11 aa, synthetic construct
  REGION 1..11: note = Inositol 1,4,5-trisphosphate receptor type 1 (1393-1403)
SLLPLDDIVRV

SEQ ID NO: 13232 - protein, 9 aa, synthetic construct
  REGION 1..9: note = Lysosomal-trafficking regulator (78-86)
SLLPLVWKI

SEQ ID NO: 13233 - protein, 11 aa, synthetic construct
  REGION 1..11: note = Signal transducer and activator of transcription 2 (25-35)
SLLPVDIRQYL

SEQ ID NO: 13234 - protein, 9 aa, synthetic construct
  REGION 1..9: note = Cytoplasmic dynein 1 heavy chain 1 (3748-3756)
SLLQALNEV

SEQ ID NO: 13235 - protein, 9 aa, synthetic construct
  REGION 1..9: note = Melanoma antigen preferentially expressed in tumors (425-433)
SLLQHLIGL

SEQ ID NO: 13236 - protein, 10 aa, synthetic construct
  REGION 1..10: note = SH3KBP1-binding protein 1 (47-56)
SLLSGRISTL

SEQ ID NO: 13237 - protein, 9 aa, synthetic construct
  REGION 1..9: note = Uncharacterized aarF domain-containing protein kinase 2 (132-140)
SLLSSVFKL

SEQ ID NO: 13238 - protein, 9 aa, synthetic construct
  REGION 1..9: note = Transportin-3 (89-97)
SLLTHIQNL

SEQ ID NO: 13239 - protein, 9 aa, synthetic construct
  REGION 1..9: note = E3 ubiquitin-protein ligase TRIP12 (971-979)
SLLTSPPKA

SEQ ID NO: 13240 - protein, 10 aa, synthetic construct
  REGION 1..10: note = Mediator of RNA polymerase II transcription subunit 24 (800-809)
SLMDPPGTAL

SEQ ID NO: 13241 - protein, 9 aa, synthetic construct
  REGION 1..9: note = CAP-Gly domain-containing linker protein 2 (873-881)
SLNELRVLL

SEQ ID NO: 13242 - protein, 9 aa, synthetic construct
  REGION 1..9: note = Solute carrier family 35 member E4 (65-73)
SLNKWIFTV

SEQ ID NO: 13243 - protein, 9 aa, synthetic construct
  REGION 1..9: note = Sestrin-3 (47-55)
SLPELVHAV

SEQ ID NO: 13244 - protein, 9 aa, synthetic construct
  REGION 1..9: note = Transmembrane protein 214 (435-443)
SLQETIQSL

SEQ ID NO: 13245 - protein, 9 aa, synthetic construct
  REGION 1..9: note = Centrosome-associated protein CEP250 (2189-2197)
SLQEVAMFL

SEQ ID NO: 13246 - protein, 9 aa, synthetic construct
  REGION 1..9: note = Heat shock protein HSP 90-beta (394-402)
SLSEYVSRM

SEQ ID NO: 13247 - protein, 9 aa, synthetic construct
  REGION 1..9: note = Cell division cycle and apoptosis regulator protein 1 (1078-1086)
SLSGELREV

SEQ ID NO: 13248 - protein, 9 aa, synthetic construct
  REGION 1..9: note = RNA-binding protein 12B (105-113)
SLSNFIESV

SEQ ID NO: 13249 - protein, 9 aa, synthetic construct
  REGION 1..9: note = Bromodomain adjacent to zinc finger domain protein 1A (1093-1101)
SLSQVFLHL

SEQ ID NO: 13250 - protein, 9 aa, synthetic construct
  REGION 1..9: note = Dehydrogenase/reductase SDR family member 1 (277-285)
SLSSVLSHV

SEQ ID NO: 13251 - protein, 9 aa, synthetic construct
  REGION 1..9: note = Spectrin beta chain, erythrocytic (333-341)
SLTGVQQQL

SEQ ID NO: 13252 - protein, 10 aa, synthetic construct
  REGION 1..10: note = Conserved oligomeric Golgi complex subunit 4 (458-467)
SLVAVELEKV

SEQ ID NO: 13253 - protein, 10 aa, synthetic construct
  REGION 1..10: note = Phospholipase A1 member A (341-350)
SLVEFHLKEL

SEQ ID NO: 13254 - protein, 9 aa, synthetic construct
  REGION 1..9: note = 26S proteasome non-ATPase regulatory subunit 13 (75-83)
SLVEIILHV

SEQ ID NO: 13255 - protein, 9 aa, synthetic construct
  REGION 1..9: note = Cyclin-dependent-like kinase 5 (247-255)
SLVNVVPKL

SEQ ID NO: 13256 - protein, 9 aa, synthetic construct
  REGION 1..9: note = Heat shock factor protein 2 (156-164)
SLWKEVSEL

SEQ ID NO: 13257 - protein, 9 aa, synthetic construct
  REGION 1..9: note = GRIP and coiled-coil domain-containing protein 2 (689-697)
SLYEENNKL

SEQ ID NO: 13258 - protein, 9 aa, synthetic construct
  REGION 1..9: note = Centrosome-associated protein CEP250 (1184-1192)
SLYSALQQA

SEQ ID NO: 13259 - protein, 9 aa, synthetic construct
  REGION 1..9: note = Serine/threonine-protein kinase TBK1 (413-421)
SMAKAITGV

SEQ ID NO: 13260 - protein, 11 aa, synthetic construct
  REGION 1..11: note = Erlin-2 (158-168)
SMAPGLVIQAV

SEQ ID NO: 13261 - protein, 9 aa, synthetic construct
  REGION 1..9: note = SEC14-like protein 1 (203-211)
SMAVVIPEA

SEQ ID NO: 13262 - protein, 9 aa, synthetic construct
  REGION 1..9: note = Cullin-1 (79-87)
SMISKLKQA

SEQ ID NO: 13263 - protein, 9 aa, synthetic construct
  REGION 1..9: note = Ubiquitin conjugation factor E4 B (1278-1286)
SMLEPVPEL

SEQ ID NO: 13264 - protein, 9 aa, synthetic construct
  REGION 1..9: note = Antizyme inhibitor 1 (152-160)
SMMKNFFFV

SEQ ID NO: 13265 - protein, 9 aa, synthetic construct
  REGION 1..9: note = Large proline-rich protein BAG6 (763-771)
SMVDVVMLL

SEQ ID NO: 13266 - protein, 10 aa, synthetic construct
  REGION 1..10: note = Band 4.1-like protein 3 (185-194)
SMYGVDLHHA

SEQ ID NO: 13267 - protein, 10 aa, synthetic construct
  REGION 1..10: note = Protein 4.1 (185-194)
SMYGVDLHKA

SEQ ID NO: 13268 - protein, 9 aa, synthetic construct
  REGION 1..9: note = A-kinase anchor protein 10, mitochondrial (278-286)
SPASPLKEL

SEQ ID NO: 13269 - protein, 10 aa, synthetic construct
  REGION 1..10: note = Beta-1-syntrophin (175-184)
SPDAKHTVIL

SEQ ID NO: 13270 - protein, 10 aa, synthetic construct
  REGION 1..10: note = Cytoplasmic dynein 1 heavy chain 1 (577-586)
SPDKIPWSAL

SEQ ID NO: 13271 - protein, 9 aa, synthetic construct
  REGION 1..9: note = Ubiquitin carboxyl-terminal hydrolase 22 (237-245)
SPHIPYKLL

SEQ ID NO: 13272 - protein, 10 aa, synthetic construct
  REGION 1..10: note = ADNP homeobox protein 2 (336-345)
SPLPVGQNSL

SEQ ID NO: 13273 - protein, 11 aa, synthetic construct
  REGION 1..11: note = COUP transcription factor 2 (278-288)
SPMSADRVVAF

SEQ ID NO: 13274 - protein, 9 aa, synthetic construct
  REGION 1..9: note = Ubiquitin carboxyl-terminal hydrolase 6 (1192-1200)
SPNSSPRTL

SEQ ID NO: 13275 - protein, 9 aa, synthetic construct
  REGION 1..9: note = Ubiquitin-associated protein 2-like (477-485)
SPQPAQQKL

SEQ ID NO: 13276 - protein, 10 aa, synthetic construct
  REGION 1..10: note = Acyl-CoA desaturase (281-290)
SPRENILVSL

SEQ ID NO: 13277 - protein, 9 aa, synthetic construct
  REGION 1..9: note = U3 small nucleolar RNA-associated protein 18 homolog (367-375)
SPRSGYFAL

SEQ ID NO: 13278 - protein, 10 aa, synthetic construct
  REGION 1..10: note = Integrator complex subunit 7 (289-298)
SPRSSDLVKL

SEQ ID NO: 13279 - protein, 9 aa, synthetic construct
  REGION 1..9: note = Protein Wiz (5-13)
SPSLPKKSL

SEQ ID NO: 13280 - protein, 9 aa, synthetic construct
  REGION 1..9: note = Mediator of DNA damage checkpoint protein 1 (1786-1794)
SQIQKVEPA

SEQ ID NO: 13281 - protein, 10 aa, synthetic construct
  REGION 1..10: note = DNA-directed RNA polymerases I, II, and III subunit RPABC3 (47-56)
SRADQFEYVM

SEQ ID NO: 13282 - protein, 9 aa, synthetic construct
  REGION 1..9: note = Mitochondrial fission factor (5-13)
SRIQYEMEY

SEQ ID NO: 13283 - protein, 9 aa, synthetic construct
  REGION 1..9: note = Histone H2B type 2-F (33-41)
SRKESYSVY

SEQ ID NO: 13284 - protein, 11 aa, synthetic construct
  REGION 1..11: note = Solute carrier family 35 member E1 (251-261)
SRQSYPNSYSL

SEQ ID NO: 13285 - protein, 9 aa, synthetic construct
  REGION 1..9: note = Mucin-1 (950-958)
STAPPVHNV

SEQ ID NO: 13286 - protein, 11 aa, synthetic construct
  REGION 1..11: note = T-complex protein 1 subunit beta (333-343)
STFDHPELVKL

SEQ ID NO: 13287 - protein, 9 aa, synthetic construct
  REGION 1..9: note = Exosome complex component RRP4 (55-63)
SVAGSVERV

SEQ ID NO: 13288 - protein, 9 aa, synthetic construct
  REGION 1..9: note = Rho guanine nucleotide exchange factor 18 (538-546)
SVDSKPPVI

SEQ ID NO: 13289 - protein, 9 aa, synthetic construct
  REGION 1..9: note = PDZ domain-containing protein GIPC1 (87-95)
SVIDHIHLI

SEQ ID NO: 13290 - protein, 11 aa, synthetic construct
  REGION 1..11: note = Programmed cell death 6-interacting protein (423-433)
SVIEQGGIQTV

SEQ ID NO: 13291 - protein, 9 aa, synthetic construct
  REGION 1..9: note = Nucleolar pre-ribosomal-associated protein 1 (1313-1321)
SVLDQKILL

SEQ ID NO: 13292 - protein, 9 aa, synthetic construct
  REGION 1..9: note = Serine incorporator 1 (244-252)
SVMSILPKI

SEQ ID NO: 13293 - protein, 9 aa, synthetic construct
  REGION 1..9: note = Heterogeneous nuclear ribonucleoprotein K (372-380)
SYAGGRGSY

SEQ ID NO: 13294 - protein, 9 aa, synthetic construct
  REGION 1..9: note = Nectin-2 (494-502)
SYQGKGFVM

SEQ ID NO: 13295 - protein, 9 aa, synthetic construct
  REGION 1..9: note = Transcription intermediary factor 1-beta (33-41)
TADSQPPVF

SEQ ID NO: 13296 - protein, 9 aa, synthetic construct
  REGION 1..9: note = Phosphatidylinositol 4-kinase alpha (299-307)
TEIERLITW

SEQ ID NO: 13297 - protein, 10 aa, synthetic construct
  REGION 1..10: note = Phosphatidylinositol 4-kinase alpha (299-308)
TEIERLITWY

SEQ ID NO: 13298 - protein, 11 aa, synthetic construct
  REGION 1..11: note = Putative oxidoreductase GLYR1 (385-395)
TIAEGLTLAQV

SEQ ID NO: 13299 - protein, 9 aa, synthetic construct
  REGION 1..9: note = Phosphopantothenate-cysteine ligase (151-159)
TLADYLHLL

SEQ ID NO: 13300 - protein, 10 aa, synthetic construct
  REGION 1..10: note = Paraspeckle component 1 (128-137)
TLAEIAKAEL

SEQ ID NO: 13301 - protein, 9 aa, synthetic construct
  REGION 1..9: note = Tumor necrosis factor receptor superfamily member 6 (305-313)
TLAEKIQTI

SEQ ID NO: 13302 - protein, 9 aa, synthetic construct
  REGION 1..9: note = Vacuolar protein sorting-associated protein 29 (57-65)
TLAGDVHIV

SEQ ID NO: 13303 - protein, 9 aa, synthetic construct
  REGION 1..9: note = Nuclear transcription factor Y subunit gamma (147-155)
TLAQQPTAV

SEQ ID NO: 13304 - protein, 10 aa, synthetic construct
  REGION 1..10: note = Pre-mRNA-splicing factor ATP-dependent RNA helicase DHX15 (266-275)
TLATDILMGV

SEQ ID NO: 13305 - protein, 9 aa, synthetic construct
  REGION 1..9: note = Heat shock cognate 71 kDa protein (313-321)
TLDPVEKAL

SEQ ID NO: 13306 - protein, 9 aa, synthetic construct
  REGION 1..9: note = EMILIN-2 (411-419)
TLDQKIERV

SEQ ID NO: 13307 - protein, 9 aa, synthetic construct
  REGION 1..9: note = Ubiquitin carboxyl-terminal hydrolase 33 (252-260)
TLFQGIKTV

SEQ ID NO: 13308 - protein, 9 aa, synthetic construct
  REGION 1..9: note = Cyclic AMP-responsive element-binding protein 1 (213-221)
TLIEELKAL

SEQ ID NO: 13309 - protein, 10 aa, synthetic construct
  REGION 1..10: note = Mediator of RNA polymerase II transcription subunit 14 (53-62)
TLIEFLLHRA

SEQ ID NO: 13310 - protein, 9 aa, synthetic construct
  REGION 1..9: note = Histone-lysine N-methyltransferase 2B (517-525)
TLIEKVQEA

SEQ ID NO: 13311 - protein, 10 aa, synthetic construct
  REGION 1..10: note = Protein arginine N-methyltransferase 3 (288-297)
TLIKGKIEEV

SEQ ID NO: 13312 - protein, 9 aa, synthetic construct
  REGION 1..9: note = UDP-N-acetylglucosamine-dolichyl-phosphate N-acetylglucosaminephosphotransferase (255-263)
TLINLLLKV

SEQ ID NO: 13313 - protein, 11 aa, synthetic construct
  REGION 1..11: note = Peroxisomal acyl-coenzyme A oxidase 1 (597-607)
TLIRSDAVALV

SEQ ID NO: 13314 - protein, 9 aa, synthetic construct
  REGION 1..9: note = Ubiquitin-like modifier-activating enzyme 6 (967-975)
TLLDFINAV

SEQ ID NO: 13315 - protein, 9 aa, synthetic construct
  REGION 1..9: note = Coronin (508-516)
TLLEEIKAL

SEQ ID NO: 13316 - protein, 9 aa, synthetic construct
  REGION 1..9: note = Signal-induced proliferation-associated protein 1 (365-373)
TLLGDVVRL

SEQ ID NO: 13317 - protein, 9 aa, synthetic construct
  REGION 1..9: note = 2-hydroxyacyl-CoA lyase 1 (238-246)
TLLGNIHAV

SEQ ID NO: 13318 - protein, 10 aa, synthetic construct
  REGION 1..10: note = Pecanex-like protein 1 (955-964)
TLLIGSPLSL

SEQ ID NO: 13319 - protein, 9 aa, synthetic construct
  REGION 1..9: note = Kelch-like protein 22 (490-498)
TLLNKLYVI

SEQ ID NO: 13320 - protein, 9 aa, synthetic construct
  REGION 1..9: note = AP-2 complex subunit beta (483-491)
TLLTAIVKL

SEQ ID NO: 13321 - protein, 9 aa, synthetic construct
  REGION 1..9: note = Vacuolar protein sorting-associated protein 11 homolog (911-919)
TLLTDPPTA

SEQ ID NO: 13322 - protein, 9 aa, synthetic construct
  REGION 1..9: note = Fanconi anemia group I protein (1140-1148)
TLLTFFHEL

SEQ ID NO: 13323 - protein, 9 aa, synthetic construct
  REGION 1..9: note = 1-phosphatidylinositol 4,5-bisphosphate phosphodiesterase gamma-1 (436-444)
TLLTKPVEI

SEQ ID NO: 13324 - protein, 10 aa, synthetic construct
  REGION 1..10: note = Pre-mRNA-processing factor 6 (249-258)
TLMDMRLSQV

SEQ ID NO: 13325 - protein, 10 aa, synthetic construct
  REGION 1..10: note = Transgelin-2 (128-137)
TLMNLGGLAV

SEQ ID NO: 13326 - protein, 9 aa, synthetic construct
  REGION 1..9: note = Cleft lip and palate transmembrane protein 1 (101-109)
TLMNLHVYI

SEQ ID NO: 13327 - protein, 9 aa, synthetic construct
  REGION 1..9: note = Nuclear receptor-binding protein (524-532)
TLNSAAVTV

SEQ ID NO: 13328 - protein, 9 aa, synthetic construct
  REGION 1..9: note = Acylglycerol kinase, mitochondrial (127-135)
TLQEVVTGV

SEQ ID NO: 13329 - protein, 9 aa, synthetic construct
  REGION 1..9: note = Baculoviral IAP repeat-containing protein 6 (1801-1809)
TLSDVLDRV

SEQ ID NO: 13330 - protein, 9 aa, synthetic construct
  REGION 1..9: note = Lysine-specific demethylase 5C (849-857)
TLTELRAFL

SEQ ID NO: 13331 - protein, 9 aa, synthetic construct
  REGION 1..9: note = Cytochrome b-c1 complex subunit 9 (5-13)
TLTSKLYSL

SEQ ID NO: 13332 - protein, 9 aa, synthetic construct
  REGION 1..9: note = Putative helicase MOV-10 (131-139)
TLVEAIKQV

SEQ ID NO: 13333 - protein, 9 aa, synthetic construct
  REGION 1..9: note = Transmembrane protein 9B (3-11)
TLWGGLLRL

SEQ ID NO: 13334 - protein, 9 aa, synthetic construct
  REGION 1..9: note = Trafficking protein particle complex subunit 9 (207-215)
TLYDSRLFV

SEQ ID NO: 13335 - protein, 10 aa, synthetic construct
  REGION 1..10: note = Transmembrane protein 214 (42-51)
TLYERGFENI

SEQ ID NO: 13336 - protein, 9 aa, synthetic construct
  REGION 1..9: note = Exportin-6 (594-602)
TLYGSQIKL

SEQ ID NO: 13337 - protein, 11 aa, synthetic construct
  REGION 1..11: note = Insulin-like growth factor 2 mRNA-binding protein 1 (319-329)
TLYNPERTITV

SEQ ID NO: 13338 - protein, 10 aa, synthetic construct
  REGION 1..10: note = AP-1 complex subunit beta-1 (827-836)
TLYPLHILFV

SEQ ID NO: 13339 - protein, 9 aa, synthetic construct
  REGION 1..9: note = Syntaxin-binding protein 3 (176-184)
TMADQIVTV

SEQ ID NO: 13340 - protein, 9 aa, synthetic construct
  REGION 1..9: note = Actin-like protein 6A (279-287)
TMLGVSHVV

SEQ ID NO: 13341 - protein, 9 aa, synthetic construct
  REGION 1..9: note = Tartrate-resistant acid phosphatase type 5 (23-31)
TPALRFVAV

SEQ ID NO: 13342 - protein, 10 aa, synthetic construct
  REGION 1..10: note = Eukaryotic translation initiation factor 2A (542-551)
TPRNTVSQSI

SEQ ID NO: 13343 - protein, 9 aa, synthetic construct
  REGION 1..9: note = Intron-binding protein aquarius (396-404)
TTFDKEFLL

SEQ ID NO: 13344 - protein, 11 aa, synthetic construct
  REGION 1..11: note = Elongation factor 2 (486-496)
TTFEHAHNMRV

SEQ ID NO: 13345 - protein, 9 aa, synthetic construct
  REGION 1..9: note = Nuclear factor of activated T-cells, cytoplasmic 1 (325-333)
TTLEQPPSV

SEQ ID NO: 13346 - protein, 9 aa, synthetic construct
  REGION 1..9: note = Chromatin complexes subunit BAP18 (72-80)
TVAQIKATV

SEQ ID NO: 13347 - protein, 9 aa, synthetic construct
  REGION 1..9: note = Kelch-like protein 18 (361-369)
TVFEGRIYV

SEQ ID NO: 13348 - protein, 9 aa, synthetic construct
  REGION 1..9: note = Ubiquitin carboxyl-terminal hydrolase 10 (731-739)
TYRLFAVVY

SEQ ID NO: 13349 - protein, 9 aa, synthetic construct
  REGION 1..9: note Dolichyl-diphosphooligosaccharide-proteinosyltransferase 48 kDa subunit (203-211)
VADPDNPLV

SEQ ID NO: 13350 - protein, 10 aa, synthetic construct
  REGION 1..10: note = Chromodomain-helicase-DNA-binding protein 4 (243-252)
VAPPPPPVEV

SEQ ID NO: 13351 - protein, 10 aa, synthetic construct
  REGION 1..10: note = Glycogen phosphorylase, liver form (207-216)
VEHTNTGTKW

SEQ ID NO: 13352 - protein, 11 aa, synthetic construct
  REGION 1..11: note = Prelamin-A/C (78-88)
VEIDNGKQREF

SEQ ID NO: 13353 - protein, 9 aa, synthetic construct
  REGION 1..9: note = GPI transamidase component PIG-T (292-300)
VHPPPTTTY

SEQ ID NO: 13354 - protein, 9 aa, synthetic construct
  REGION 1..9: note = Probable ATP-dependent RNA helicase DDX60-like (866-874)
VIFDEVHYL

SEQ ID NO: 13355 - protein, 9 aa, synthetic construct
  REGION 1..9: note = Platelet-activating factor acetylhydrolase IB subunit alpha (114-122)
VIFHPVFSV

SEQ ID NO: 13356 - protein, 9 aa, synthetic construct
  REGION 1..9: note = ORM1-like protein 2 (54-62)
VIHNLATYV

SEQ ID NO: 13357 - protein, 9 aa, synthetic construct
  REGION 1..9: note = Mediator of RNA polymerase II transcription subunit 23 (140-148)
VILEKILTI

SEQ ID NO: 13358 - protein, 9 aa, synthetic construct
  REGION 1..9: note = Protein Mis18-beta (88-96)
VLADSVHLA

SEQ ID NO: 13359 - protein, 11 aa, synthetic construct
  REGION 1..11: note = Guanine nucleotide-binding protein G(i) subunit alpha-1 (233-243)
VLAEDEEMNRM

SEQ ID NO: 13360 - protein, 9 aa, synthetic construct
  REGION 1..9: note = Bromodomain adjacent to zinc finger domain protein 2A (972-980)
VLAFLVHEL

SEQ ID NO: 13361 - protein, 11 aa, synthetic construct
  REGION 1..11: note = Disheveled-associated activator of morphogenesis 2 (194-204)
VLAQPEAISTI

SEQ ID NO: 13362 - protein, 9 aa, synthetic construct
  REGION 1..9: note = DNA repair protein RAD50 (1068-1076)
VLASLIIRL

SEQ ID NO: 13363 - protein, 10 aa, synthetic construct
  REGION 1..10: note = Cytoplasmic dynein 1 heavy chain 1 (2318-2327)
VLDDNKLLTL

SEQ ID NO: 13364 - protein, 10 aa, synthetic construct
  REGION 1..10: note = Cytoplasmic FMR1-interacting protein 2 (170-179)
VLDELKNMKC

SEQ ID NO: 13365 - protein, 9 aa, synthetic construct
  REGION 1..9: note = Serrate RNA effector molecule homolog (161-169)
VLDKLLLYL

SEQ ID NO: 13366 - protein, 9 aa, synthetic construct
  REGION 1..9: note = Protein transport protein Sec61 subunit alpha isoform 1 (354-362)
VLEDPVHAV

SEQ ID NO: 13367 - protein, 10 aa, synthetic construct
  REGION 1..10: note = HLA class I histocompatibility antigen, A-2 alpha chain (291-300)
VLFGAVITGA

SEQ ID NO: 13368 - protein, 10 aa, synthetic construct
  REGION 1..10: note = Fatty acid synthase (743-752)
VLFQEALWHV

SEQ ID NO: 13369 - protein, 9 aa, synthetic construct
  REGION 1..9: note = Protein VAC14 homolog (32-40)
VLGEFLKEI

SEQ ID NO: 13370 - protein, 9 aa, synthetic construct
  REGION 1..9: note = Mediator of RNA polymerase II transcription subunit 23 (1163-1171)
VLHDRIVSV

SEQ ID NO: 13371 - protein, 11 aa, synthetic construct
  REGION 1..11: note = GPN-loop GTPase 1 (103-113)
VLIDTPGQIEV

SEQ ID NO: 13372 - protein, 9 aa, synthetic construct
  REGION 1..9: note = Adenosylhomocysteinase (62-70)
VLIETLVTL

SEQ ID NO: 13373 - protein, 11 aa, synthetic construct
  REGION 1..11: note = Splicing factor 3B subunit 3 (959-969)
VLIGVGKLLRV

SEQ ID NO: 13374 - protein, 10 aa, synthetic construct
  REGION 1..10: note = Membrane-bound transcription factor site-2 protease (164-173)
VLISGVVHEI

SEQ ID NO: 13375 - protein, 9 aa, synthetic construct
  REGION 1..9: note = Cytoplasmic FMR1-interacting protein 2 (505-513)
VLISVLQAI

SEQ ID NO: 13376 - protein, 9 aa, synthetic construct
  REGION 1..9: note = Putative helicase MOV-10 (216-224)
VLITTLITA

SEQ ID NO: 13377 - protein, 11 aa, synthetic construct
  REGION 1..11: note = Ubiquitin-like protein 4A (77-87)
VLLEEGEAQRL

SEQ ID NO: 13378 - protein, 11 aa, synthetic construct
  REGION 1..11: note = Cleavage stimulation factor subunit 1 (368-378)
VLLPDERTISL

SEQ ID NO: 13379 - protein, 9 aa, synthetic construct
  REGION 1..9: note = Glycerol-3-phosphate acyltransferase 3 (155-163)
VLLPLRVTL

SEQ ID NO: 13380 - protein, 9 aa, synthetic construct
  REGION 1..9: note = Eukaryotic translation initiation factor 4 gamma 3 (1360-1368)
VLLSEILHL

SEQ ID NO: 13381 - protein, 9 aa, synthetic construct
  REGION 1..9: note = Vesicle-trafficking protein SEC22b (2-10)
VLLTMIARV

SEQ ID NO: 13382 - protein, 9 aa, synthetic construct
  REGION 1..9: note = Probable ATP-dependent RNA helicase DDX41 (543-551)
VLMDLKALL

SEQ ID NO: 13383 - protein, 10 aa, synthetic construct
  REGION 1..10: note = Probable ATP-dependent RNA helicase DDX41 (543-552)
VLMDLKALLL

SEQ ID NO: 13384 - protein, 10 aa, synthetic construct
  REGION 1..10: note = Sterol regulatory element-binding protein 1 (412-421)
VLMEGVKTEV

SEQ ID NO: 13385 - protein, 9 aa, synthetic construct
  REGION 1..9: note = Cytoskeleton-associated protein 5 (1259-1267)
VLMKALEYL

SEQ ID NO: 13386 - protein, 9 aa, synthetic construct
  REGION 1..9: note = Eukaryotic translation initiation factor 4 gamma 1 (187-195)
VLMNQPPQI

SEQ ID NO: 13387 - protein, 10 aa, synthetic construct
  REGION 1..10: note = Ubiquitin-like protein 7 (159-168)
VLQDKDLFSV

SEQ ID NO: 13388 - protein, 9 aa, synthetic construct
  REGION 1..9: note = Zinc finger CCCH-type antiviral protein 1 (112-120)
VLSEENFKV

SEQ ID NO: 13389 - protein, 9 aa, synthetic construct
  REGION 1..9: note = Probable ubiquitin carboxyl-terminal hydrolase FAF-X (2317-2325)
VLSELLWQV

SEQ ID NO: 13390 - protein, 9 aa, synthetic construct
  REGION 1..9: note = Phosphatidylinositol N-acetylglucosaminyltransferase subunit A (165-173)
VLTNKLLTV

SEQ ID NO: 13391 - protein, 9 aa, synthetic construct
  REGION 1..9: note = UPF0505 protein C16orf62 (670-678)
VLVQLIHSV

SEQ ID NO: 13392 - protein, 10 aa, synthetic construct
  REGION 1..10: note = Coiled-coil domain-containing protein 84 (84-93)
VLYGGLLEHL

SEQ ID NO: 13393 - protein, 10 aa, synthetic construct
  REGION 1..10: note = Signal recognition particle subunit SRP68 (231-240)
VLYNQRVEEI

SEQ ID NO: 13394 - protein, 9 aa, synthetic construct
  REGION 1..9: note = BTB/POZ domain-containing protein 2 (212-220)
VMFKEPVEV

SEQ ID NO: 13395 - protein, 10 aa, synthetic construct
  REGION 1..10: note = Ligand-dependent nuclear receptor-interacting factor 1 (358-367)
VMFNGKVYLL

SEQ ID NO: 13396 - protein, 10 aa, synthetic construct
  REGION 1..10: note = Poly(rC)-binding protein 2 (165-174)
VMLESPPKGV

SEQ ID NO: 13397 - protein, 9 aa, synthetic construct
  REGION 1..9: note = Vesicle-associated membrane protein 4 (66-74)
VMQENITKV

SEQ ID NO: 13398 - protein, 10 aa, synthetic construct
  REGION 1..10: note = Transient receptor potential cation channel subfamily V member 2 (730-739)
VPRTLENPVL

SEQ ID NO: 13399 - protein, 9 aa, synthetic construct
  REGION 1..9: note = UPF0606 protein KIAA1549L (15-23)
VPSLHITTL

SEQ ID NO: 13400 - protein, 9 aa, synthetic construct
  REGION 1..9: note = Cholinesterase (308-316)
VPYGTPLSV

SEQ ID NO: 13401 - protein, 9 aa, synthetic construct
  REGION 1..9: note = Phosphatidylglycerophosphatase and protein-tyrosine phosphatase 1 (6-14)
VQDENVRGV

SEQ ID NO: 13402 - protein, 10 aa, synthetic construct
  REGION 1..10: note = Pre-mRNA-processing-splicing factor 8 (1168-1177)
VQWENSFVSV

SEQ ID NO: 13403 - protein, 8 aa, synthetic construct
  REGION 1..8: note = Nucleoprotein TPR (1846-1853)
VSDDTVEM

SEQ ID NO: 13404 - protein, 8 aa, synthetic construct
  REGION 1..8: note = Proliferating cell nuclear antigen (111-118)
VSDYEMKL

SEQ ID NO: 13405 - protein, 9 aa, synthetic construct
  REGION 1..9: note = SHC-transforming protein 1 (77-85)
VTREAISLV

SEQ ID NO: 13406 - protein, 9 aa, synthetic construct
  REGION 1..9: note = Uncharacterized protein C11orf24 (396-404)
VVDKTLLLV

SEQ ID NO: 13407 - protein, 9 aa, synthetic construct
  REGION 1..9: note = Protein SZT2 (1295-1303)
VVWGTVIRV

SEQ ID NO: 13408 - protein, 9 aa, synthetic construct
  REGION 1..9: note = N-alpha-acetyltransferase 20 (118-126)
VYRTVIEYY

SEQ ID NO: 13409 - protein, 9 aa, synthetic construct
  REGION 1..9: note = E3 ubiquitin-protein ligase UBR5 (446-454)
WVDETLSSV

SEQ ID NO: 13410 - protein, 9 aa, synthetic construct
  REGION 1..9: note = 60S ribosomal protein L32 (95-103)
YCAEIAHNV

SEQ ID NO: 13411 - protein, 9 aa, synthetic construct
  REGION 1..9: note = EF-hand calcium-binding domain-containing protein 7 (548-556)
YENIIVHTY

SEQ ID NO: 13412 - protein, 9 aa, synthetic construct
  REGION 1..9: note = Catenin beta-1 (489-497)
YGLPVVVKL

SEQ ID NO: 13413 - protein, 10 aa, synthetic construct
  REGION 1..10: note = Signal recognition particle subunit SRP68 (333-342)
YILEGEPGKV

SEQ ID NO: 13414 - protein, 9 aa, synthetic construct
  REGION 1..9: note = Protein timeless homolog (772-780)
YILGKFFAL

SEQ ID NO: 13415 - protein, 9 aa, synthetic construct
  REGION 1..9: note = Glucose-fructose oxidoreductase domain-containing protein 2 (181-189)
YIVDLLTHL

SEQ ID NO: 13416 - protein, 9 aa, synthetic construct
  REGION 1..9: note = Kelch repeat and BTB domain-containing protein 4 (141-149)
YIYHGTVKL

SEQ ID NO: 13417 - protein, 9 aa, synthetic construct
  REGION 1..9: note = FACT complex subunit SSRP1 (232-240)
YKIPYTTVL

SEQ ID NO: 13418 - protein, 9 aa, synthetic construct
  REGION 1..9: note = Nucleolar protein 6 (206-214)
YLAHLAHHL

SEQ ID NO: 13419 - protein, 10 aa, synthetic construct
  REGION 1..10: note = NAD kinase (302-311)
YLDGHLITTV

SEQ ID NO: 13420 - protein, 10 aa, synthetic construct
  REGION 1..10: note = S-phase kinase-associated protein 1 (33-42)
YLDIKGLLDV

SEQ ID NO: 13421 - protein, 9 aa, synthetic construct
  REGION 1..9: note = Transcription cofactor vestigial-like protein 4 (13-21)
YLDKMNNNI

SEQ ID NO: 13422 - protein, 9 aa, synthetic construct
  REGION 1..9: note = Zinc finger protein 655 (93-101)
YLDPVQRDL

SEQ ID NO: 13423 - protein, 10 aa, synthetic construct
  REGION 1..10: note = Methyltransferase-like protein 9 (41-50)
YLDQGTQIFL

SEQ ID NO: 13424 - protein, 9 aa, synthetic construct
  REGION 1..9: note = Ubiquitin-conjugating enzyme E2 variant 3 (132-140)
YLDVVQSNV

SEQ ID NO: 13425 - protein, 9 aa, synthetic construct
  REGION 1..9: note = Nuclear factor erythroid 2-related factor 3 (299-307)
YLEDTDRNL

SEQ ID NO: 13426 - protein, 9 aa, synthetic construct
  REGION 1..9: note = MKI67 FHA domain-interacting nucleolar phosphoprotein (43-51)
YLFGERLLE

SEQ ID NO: 13427 - protein, 11 aa, synthetic construct
  REGION 1..11: note = Pyridoxal-dependent decarboxylase domain-containing protein 1 (347-357)
YLGLDGFVERI

SEQ ID NO: 13428 - protein, 10 aa, synthetic construct
  REGION 1..10: note = Unconventional myosin-Id (612-621)
YLGLLENVRV

SEQ ID NO: 13429 - protein, 9 aa, synthetic construct
  REGION 1..9: note = 60S ribosomal protein L13a (137-145)
YLGRLAHEV

SEQ ID NO: 13430 - protein, 9 aa, synthetic construct
  REGION 1..9: note = Ubiquitin-like domain-containing CTD phosphatase 1 (165-173)
YLHEFLTSA

SEQ ID NO: 13431 - protein, 9 aa, synthetic construct
  REGION 1..9: note = Vam6/Vps39-like protein (368-376)
YLHTNVALV

SEQ ID NO: 13432 - protein, 9 aa, synthetic construct
  REGION 1..9: note = GTP-binding protein 2 (227-235)
YLHTTIFGL

SEQ ID NO: 13433 - protein, 10 aa, synthetic construct
  REGION 1..10: note = Isoleucine-tRNA ligase, cytoplasmic (626-635)
YLINSPVVRA

SEQ ID NO: 13434 - protein, 10 aa, synthetic construct
  REGION 1..10: note = Pre-mRNA-processing-splicing factor 8 (794-803)
YLKDGPYITA

SEQ ID NO: 13435 - protein, 10 aa, synthetic construct
  REGION 1..10: note = E3 ubiquitin-protein ligase MARCH6 (514-523)
YLLDLHSYLL

SEQ ID NO: 13436 - protein, 10 aa, synthetic construct
  REGION 1..10: note = Ninein (544-553)
YLLEEKIASL

SEQ ID NO: 13437 - protein, 9 aa, synthetic construct
  REGION 1..9: note = Unconventional myosin-Va (242-250)
YLLEKSRVV

SEQ ID NO: 13438 - protein, 10 aa, synthetic construct
  REGION 1..10: note = EH domain-containing protein 4 (80-89)
YLLEQDFPGM

SEQ ID NO: 13439 - protein, 9 aa, synthetic construct
  REGION 1..9: note = Protein fem-1 homolog A (168-176)
YLLEQGAQV

SEQ ID NO: 13440 - protein, 9 aa, synthetic construct
  REGION 1..9: note = PCI domain-containing protein 2 (252-260)
YLLPVKMLL

SEQ ID NO: 13441 - protein, 9 aa, synthetic construct
  REGION 1..9: note = Pecanex-like protein 3 (1380-1388)
YLNALVHLI

SEQ ID NO: 13442 - protein, 9 aa, synthetic construct
  REGION 1..9: note = Malignant T-cell-amplified sequence 1 (170-178)
YLNDGLWHM

SEQ ID NO: 13443 - protein, 9 aa, synthetic construct
  REGION 1..9: note = Elongation factor 2 (171-179)
YLNEIKDSV

SEQ ID NO: 13444 - protein, 11 aa, synthetic construct
  REGION 1..11: note = H/ACA ribonucleoprotein complex subunit 3 (6-16)
YLNEQGDRVYT

SEQ ID NO: 13445 - protein, 9 aa, synthetic construct
  REGION 1..9: note = Ferritin heavy chain (11-19)
YLNEQVKAI

SEQ ID NO: 13446 - protein, 10 aa, synthetic construct
  REGION 1..10: note = T-complex protein 1 subunit theta (278-287)
YLSEVGDTQV

SEQ ID NO: 13447 - protein, 9 aa, synthetic construct
  REGION 1..9: note = Probable C-mannosyltransferase DPY19L1 (356-364)
YLTSKIFGI

SEQ ID NO: 13448 - protein, 9 aa, synthetic construct
  REGION 1..9: note = Circadian clock protein PASD1 (168-176)
YLVGNVCIL

SEQ ID NO: 13449 - protein, 9 aa, synthetic construct
  REGION 1..9: note = Protocadherin beta-6 (446-454)
YLVTKVVAV

SEQ ID NO: 13450 - protein, 9 aa, synthetic construct
  REGION 1..9: note = Myotubularin-related protein 4 (250-258)
YLVTSIAKA

SEQ ID NO: 13451 - protein, 10 aa, synthetic construct
  REGION 1..10: note = F-actin-capping protein subunit beta (120-129)
YLWDLDHGFA

SEQ ID NO: 13452 - protein, 9 aa, synthetic construct
  REGION 1..9: note = Growth arrest and DNA damage-inducible protein GADD45 alpha (118-126)
YMDQWVPVI

SEQ ID NO: 13453 - protein, 9 aa, synthetic construct
  REGION 1..9: note = Signal transducing adapter molecule 2 (404-412)
YMGQSIHQV

SEQ ID NO: 13454 - protein, 11 aa, synthetic construct
  REGION 1..11: note = SWI/SNF-related matrix-associated actin-dependent regulator of chromatin subfamily B member 1 (26-36)
YMIGSEVGNYL

SEQ ID NO: 13455 - protein, 10 aa, synthetic construct
  REGION 1..10: note = Serine palmitoyltransferase small subunit A (24-33)
YMLEPWERTV

SEQ ID NO: 13456 - protein, 9 aa, synthetic construct
  REGION 1..9: note = Kinetochore protein Nuf2 (65-73)
YMMPVNSEV

SEQ ID NO: 13457 - protein, 9 aa, synthetic construct
  REGION 1..9: note = G patch domain-containing protein 11 (33-41)
YMSDSFINV

SEQ ID NO: 13458 - protein, 9 aa, synthetic construct
  REGION 1..9: note = Transcription factor SOX-8 (6-14)
YPHLHNAEL

SEQ ID NO: 13459 - protein, 9 aa, synthetic construct
  REGION 1..9: note = Immunoglobulin-binding protein 1 (259-267)
YPSLPTMTV

SEQ ID NO: 13460 - protein, 11 aa, synthetic construct
  REGION 1..11: note = RNA-binding motif protein 22 (253-263)
YQFGEIRTITV

SEQ ID NO: 13461 - protein, 9 aa, synthetic construct
  REGION 1..9: note = NADH dehydrogenase (ubiquinone) iron-sulfur protein 2, mitochondrial (245-253)
YQFSKNFSL

SEQ ID NO: 13462 - protein, 9 aa, synthetic construct
  REGION 1..9: note = GRB2-associated-binding protein 2 (324-332)
YQIPRTFTL

SEQ ID NO: 13463 - protein, 9 aa, synthetic construct
  REGION 1..9: note = Copper-transporting ATPase 1 (1410-1418)
YRKPTYESY

SEQ ID NO: 13464 - protein, 11 aa, synthetic construct
  REGION 1..11: note = Tuberin (602-612)
YTLPIASSIRL

SEQ ID NO: 13465 - protein, 9 aa, synthetic construct
  REGION 1..9: note = Heterogeneous nuclear ribonucleoprotein U-like protein 1 (797-805)
YTPPPPPTA

SEQ ID NO: 13466 - protein, 9 aa, synthetic construct
  REGION 1..9: note = PAS domain-containing serine/threonine-protein kinase (890-898)
YTWEEVFRV

SEQ ID NO: 13467 - protein, 16 aa, synthetic construct
  REGION 1..16: note = Selenoprotein H (51-66)
AAALSQALRLEAPELP

SEQ ID NO: 13468 - protein, 15 aa, synthetic construct
  REGION 1..15: note = 40S ribosomal protein S26 (47-61)
AAAVRDISEASVFDA

SEQ ID NO: 13469 - protein, 17 aa, synthetic construct
  REGION 1..17: note = Profilin-1 (33-49)
AAVPGKTFVNITPAEVG

SEQ ID NO: 13470 - protein, 13 aa, synthetic construct
  REGION 1..13: note = Calmodulin (58-70)
ADGNGTIDFPEFL

SEQ ID NO: 13471 - protein, 13 aa, synthetic construct
  REGION 1..13: note = Coiled-coil and C2 domain-containing protein 2A (1275-1287)
AECALKFPNRQCL

SEQ ID NO: 13472 - protein, 10 aa, synthetic construct
  REGION 1..10: note = Helicase ARIP4 (881-890)
AEKKAAKKSY

SEQ ID NO: 13473 - protein, 12 aa, synthetic construct
  REGION 1..12: note = NHP2-like protein 1 (60-71)
AEPLEIILHLPL

SEQ ID NO: 13474 - protein, 14 aa, synthetic construct
  REGION 1..14: note = Uncharacterized protein C20orf144 (70-83)
AGLGSPAAPRLRGA

SEQ ID NO: 13475 - protein, 13 aa, synthetic construct
  REGION 1..13: note = ATP synthase mitochondrial F1 complex assembly factor 1 (20-32)
AGLYRGLCAVRSR

SEQ ID NO: 13476 - protein, 20 aa, synthetic construct
  REGION 1..20: note = Gamma-soluble NSF attachment protein (267-286)
AKLGLSLVVPGGGIKKKSPA

SEQ ID NO: 13477 - protein, 18 aa, synthetic construct
  REGION 1..18: note = Deoxyuridine 5'-triphosphate nucleotidohydrolase, mitochondrial (124-141)
ALDDTERGSGGFGSTGKN

SEQ ID NO: 13478 - protein, 10 aa, synthetic construct
  REGION 1..10: note = Lysine-specific demethylase 6A (1264-1273)
ALIAAGKEII

SEQ ID NO: 13479 - protein, 10 aa, synthetic construct
  REGION 1..10: note = Protein S100-A6 (81-90)
ALIYNEALKG

SEQ ID NO: 13480 - protein, 14 aa, synthetic construct
  REGION 1..14: note = Collagen alpha-2(VIII) chain (568-581)
ALYKNNVPATYTYD

SEQ ID NO: 13481 - protein, 13 aa, synthetic construct
  REGION 1..13: note = Peroxiredoxin-5, mitochondrial (54-66)
APIKVGDAIPAVE

SEQ ID NO: 13482 - protein, 11 aa, synthetic construct
  REGION 1..11: note = Neuroblast differentiation-associated protein AHNAK (105-115)
APKISMPDIDL

SEQ ID NO: 13483 - protein, 11 aa, synthetic construct
  REGION 1..11: note = Ephrin type-B receptor 1 (422-432)
APSTVPIMHQV

SEQ ID NO: 13484 - protein, 17 aa, synthetic construct
  REGION 1..17: note = Fer-1-like protein 5 (176-192)
ARQLMGNNIKPVVKVSI

SEQ ID NO: 13485 - protein, 13 aa, synthetic construct
  REGION 1..13: note = Molybdenum cofactor sulfurase (561-573)
ARTQPTPSEKAAG

SEQ ID NO: 13486 - protein, 16 aa, synthetic construct
  REGION 1..16: note = Protein LAP2 (1003-1018)
ASFPPQLLPRSESTEN

SEQ ID NO: 13487 - protein, 15 aa, synthetic construct
  REGION 1..15: note = Cysteine-rich protein 2 (59-73)
ATLFGPKGVNIGGAG

SEQ ID NO: 13488 - protein, 16 aa, synthetic construct
  REGION 1..16: note = Sodium channel and clathrin linker 1 (424-439)
AVEEELEKIYREGRGN

SEQ ID NO: 13489 - protein, 12 aa, synthetic construct
  REGION 1..12: note = Interferon-induced protein with tetratricopeptide repeats 2 (285-296)
CQIGCCYRAKVF

SEQ ID NO: 13490 - protein, 25 aa, synthetic construct
  REGION 1..25: note = Fas-binding factor 1 (99-123)
DADILGLKKSNSAPSKKAAKDPGKG

SEQ ID NO: 13491 - protein, 17 aa, synthetic construct
  REGION 1..17: note = IQ motif and SEC7 domain-containing protein 2 (977-993)
DFIKNLRGVDNGEDIPR

SEQ ID NO: 13492 - protein, 13 aa, synthetic construct
  REGION 1..13: note = Peptidyl-prolyl cis-trans isomerase A (9-21)
DIAVDGEPLGRVS

SEQ ID NO: 13493 - protein, 16 aa, synthetic construct
  REGION 1..16: note = Peptidyl-prolyl cis-trans isomerase A (9-24)
DIAVDGEPLGRVSFEL

SEQ ID NO: 13494 - protein, 15 aa, synthetic construct
  REGION 1..15: note = Beta-secretase 1 (93-107)
DTGSSNFAVGAAPHP

SEQ ID NO: 13495 - protein, 14 aa, synthetic construct
  REGION 1..14: note = Elongation factor 1-alpha 1 (252-265)
DVYKIGGIGTVPVG

SEQ ID NO: 13496 - protein, 14 aa, synthetic construct
  REGION 1..14: note = GDNF family receptor alpha-1 (117-130)
EDSPYEPVNSRLSD

SEQ ID NO: 13497 - protein, 10 aa, synthetic construct
  REGION 1..10: note = H/ACA ribonucleoprotein complex subunit 2 (144-153)
EEVQSLPLPL

SEQ ID NO: 13498 - protein, 14 aa, synthetic construct
  REGION 1..14: note = Rho guanine nucleotide exchange factor 17 (425-438)
EGLLRSQARTRAKG

SEQ ID NO: 13499 - protein, 14 aa, synthetic construct
  REGION 1..14: note = Uncharacterized protein C2orf15 (95-108)
EGTGTGSLSGKALG

SEQ ID NO: 13500 - protein, 12 aa, synthetic construct
  REGION 1..12: note = Nesprin-3 (221-232)
EHEEYQAGVDEF

SEQ ID NO: 13501 - protein, 15 aa, synthetic construct
  REGION 1..15: note = Ankyrin repeat domain-containing protein 35 (351-365)
EPRASGKQGSSLRPG

SEQ ID NO: 13502 - protein, 12 aa, synthetic construct
  REGION 1..12: note = Probable ATP-dependent RNA helicase DDX53 (502-513)
EQSDQERAVEDF

SEQ ID NO: 13503 - protein, 18 aa, synthetic construct
  REGION 1..18: note = DNA-binding protein RFX6 (414-431)
ERVDLNSIGSQALLTISG

SEQ ID NO: 13504 - protein, 13 aa, synthetic construct
  REGION 1..13: note = Annexin A2 (242-254)
ESIRKEVKGDLEN

SEQ ID NO: 13505 - protein, 14 aa, synthetic construct
  REGION 1..14: note = Annexin A2 (242-255)
ESIRKEVKGDLENA

SEQ ID NO: 13506 - protein, 11 aa, synthetic construct
  REGION 1..11: note = Elongation factor 1-alpha 1 (280-290)
FAPVNVTTEVK

SEQ ID NO: 13507 - protein, 11 aa, synthetic construct
  REGION 1..11: note = Plasminogen activator inhibitor 1 RNA-binding protein (21-31)
FDDESDPFEVL

SEQ ID NO: 13508 - protein, 14 aa, synthetic construct
  REGION 1..14: note = Peptidyl-prolyl cis-trans isomerase A (8-21)
FDIAVDGEPLGRVS

SEQ ID NO: 13509 - protein, 16 aa, synthetic construct
  REGION 1..16: note = Peptidyl-prolyl cis-trans isomerase A (8-23)
FDIAVDGEPLGRVSFE

SEQ ID NO: 13510 - protein, 9 aa, synthetic construct
  REGION 1..9: note = Alpha-2-macroglobulin receptor-associated protein (252-260)
FEEPRVIDL

SEQ ID NO: 13511 - protein, 15 aa, synthetic construct
  REGION 1..15: note = BTB/POZ domain-containing protein KCTD7 (96-110)
FIDRDGTHFGDVLNF

SEQ ID NO: 13512 - protein, 11 aa, synthetic construct
  REGION 1..11: note = Small nuclear ribonucleoprotein Sm D1 (74-84)
FILPDSLPLDT

SEQ ID NO: 13513 - protein, 9 aa, synthetic construct
  REGION 1..9: note = Proteasome activator complex subunit 2 (35-43)
FLPQKIIYL

SEQ ID NO: 13514 - protein, 12 aa, synthetic construct
  REGION 1..12: note = Triosephosphate isomerase (230-241)
FLVGGASLKPEF

SEQ ID NO: 13515 - protein, 12 aa, synthetic construct
  REGION 1..12: note = Protein FAM208B (156-167)
FRSPLSTGVKDL

SEQ ID NO: 13516 - protein, 24 aa, synthetic construct
  REGION 1..24: note = Elongation factor 1-alpha 1 (190-213)
FVPISGWNGDNMLEPSANMPWFKG

SEQ ID NO: 13517 - protein, 14 aa, synthetic construct
  REGION 1..14: note = Fanconi anemia group M protein (201-214)
GACPAAEIKCLVID

SEQ ID NO: 13518 - protein, 8 aa, synthetic construct
  REGION 1..8: note = Collagen alpha-4(IV) chain (170-177)
GEKGNSVF

SEQ ID NO: 13519 - protein, 21 aa, synthetic construct
  REGION 1..21: note = Heterogeneous nuclear ribonucleoproteins A2/B1 (333-353)
GGNYGPGGSGGSGGYGGRSRY

SEQ ID NO: 13520 - protein, 13 aa, synthetic construct
  REGION 1..13: note = Structural maintenance of chromosomes protein 4 (528-540)
GIYGRLGDLGAID

SEQ ID NO: 13521 - protein, 18 aa, synthetic construct
  REGION 1..18: note = 60S ribosomal protein L5 (207-224)
GKETSPLQTPVVPENRFP

SEQ ID NO: 13522 - protein, 15 aa, synthetic construct
  REGION 1..15: note = Charged multivesicular body protein 7 (48-62)
GLATVLQDLLRRGEL

SEQ ID NO: 13523 - protein, 13 aa, synthetic construct
  REGION 1..13: note = Complement C4-A (1353-1365)
GLEEELQFSLGSK

SEQ ID NO: 13524 - protein, 17 aa, synthetic construct
  REGION 1..17: note = Complement C4-A (1353-1369)
GLEEELQFSLGSKINVK

SEQ ID NO: 13525 - protein, 23 aa, synthetic construct
  REGION 1..23: note = Collagen alpha-1(XIX) chain (351-373)
GLKGDKGETGLPGFPGSVGPKGQ

SEQ ID NO: 13526 - protein, 20 aa, synthetic construct
  REGION 1..20: note = Neuronal tyrosine-phosphorylated phosphoinositide-3-kinase adapter 2 (33-52)
GLVIQNASDIARENDRLRNE

SEQ ID NO: 13527 - protein, 20 aa, synthetic construct
  REGION 1..20: note = Kinesin-like protein KIF27 (84-103)
GQTGSGKTYTIGGGHIASVV

SEQ ID NO: 13528 - protein, 13 aa, synthetic construct
  REGION 1..13: note = Helicase SKI2W (705-717)
GRRGLDPTGTVIL

SEQ ID NO: 13529 - protein, 10 aa, synthetic construct
  REGION 1..10: note = E3 ubiquitin-protein ligase HUWE1 (757-766)
GTEERIPIPL

SEQ ID NO: 13530 - protein, 13 aa, synthetic construct
  REGION 1..13: note = Ankyrin repeat domain-containing protein 11 (421-433)
GTGEKLRLSAHTI

SEQ ID NO: 13531 - protein, 13 aa, synthetic construct
  REGION 1..13: note = US7745391-778469 (29-41)
GVALAPRPLGTSF

SEQ ID NO: 13532 - protein, 17 aa, synthetic construct
  REGION 1..17: note = Meprin A subunit beta (617-633)
GVCTVRDGKAECRCQSG

SEQ ID NO: 13533 - protein, 29 aa, synthetic construct
  REGION 1..29: note = F-box/LRR-repeat protein 4 (227-255)
GVKDKPVLSLKTSLIDMNDIEDDAYAEKD

SEQ ID NO: 13534 - protein, 14 aa, synthetic construct
  REGION 1..14: note = PHD finger protein 14 (609-622)
HFGCLDPPLKKSPK

SEQ ID NO: 13535 - protein, 15 aa, synthetic construct
  REGION 1..15: note = Arylsulfatase E (503-517)
HQRTLSPVPLQLDRL

SEQ ID NO: 13536 - protein, 17 aa, synthetic construct
  REGION 1..17: note = NACHT, LRR and PYD domains-containing protein 9 (146-162)
HTVVLEGPDGIGKTTLL

SEQ ID NO: 13537 - protein, 11 aa, synthetic construct
  REGION 1..11: note = 60S ribosomal protein L8 (31-41)
IAAEGIHTGQF

SEQ ID NO: 13538 - protein, 16 aa, synthetic construct
  REGION 1..16: note = Kelch-like protein 2 (479-494)
IAEMSTRRSGAGVGVL

SEQ ID NO: 13539 - protein, 12 aa, synthetic construct
  REGION 1..12: note = Protein RER1 (80-91)
IAFLSPKVDPSL

SEQ ID NO: 13540 - protein, 13 aa, synthetic construct
  REGION 1..13: note = Peptidyl-prolyl cis-trans isomerase A (10-22)
IAVDGEPLGRVSF

SEQ ID NO: 13541 - protein, 14 aa, synthetic construct
  REGION 1..14: note = Dedicator of cytokinesis protein 4 (1742-1755)
IGDGALPRSDPNLS

SEQ ID NO: 13542 - protein, 10 aa, synthetic construct
  REGION 1..10: note = L-lactate dehydrogenase A-like 6B (183-192)
IIVSNPVDIL

SEQ ID NO: 13543 - protein, 20 aa, synthetic construct
  REGION 1..20: note = Carboxy-terminal domain RNA polymerase II polypeptide A small phosphatase 2 (215-234)
ILDNSPASYVFHTENAVPVQ

SEQ ID NO: 13544 - protein, 13 aa, synthetic construct
  REGION 1..13: note = Heat shock cognate 71 kDa protein (379-391)
ILSGDKSENVQDL

SEQ ID NO: 13545 - protein, 21 aa, synthetic construct
  REGION 1..21: note = Poly(rC)-binding protein 2 (38-58)
INISEGNCPERIITLAGPTNA

SEQ ID NO: 13546 - protein, 12 aa, synthetic construct
  REGION 1..12: note = Diacylglycerol O-acyltransferase 2 (253-264)
IPKLEHPTQQDI

SEQ ID NO: 13547 - protein, 15 aa, synthetic construct
  REGION 1..15: note = Elongation factor 1-alpha 1 (115-129)
IVAAGVGEFEAGISK

SEQ ID NO: 13548 - protein, 17 aa, synthetic construct
  REGION 1..17: note = Macrophage migration inhibitory factor (3-19)
IVNTNVPRASVPDGFLS

SEQ ID NO: 13549 - protein, 10 aa, synthetic construct
  REGION 1..10: note = L-lactate dehydrogenase A chain (135-144)
IVSNPVDILT

SEQ ID NO: 13550 - protein, 16 aa, synthetic construct
  REGION 1..16: note = Fructose-bisphosphate aldolase A (153-168)
KIGEHTPSALAIMENA

SEQ ID NO: 13551 - protein, 11 aa, synthetic construct
  REGION 1..11: note = PWWP domain-containing protein 2B (191-201)
KIPSRVHGSLE

SEQ ID NO: 13552 - protein, 17 aa, synthetic construct
  REGION 1..17: note = DNA mismatch repair protein Mlh3 (135-151)
KLLSSTLIPPLEITVTE

SEQ ID NO: 13553 - protein, 12 aa, synthetic construct
  REGION 1..12: note = Cathepsin K (314-325)
KNNACGIANLAS

SEQ ID NO: 13554 - protein, 17 aa, synthetic construct
  REGION 1..17: note = Integrator complex subunit 12 (329-345)
KPVGLTGLATSSKGGIG

SEQ ID NO: 13555 - protein, 13 aa, synthetic construct
  REGION 1..13: note = Synaptojanin-1 (1453-1465)
KSRASSSLDGFKD

SEQ ID NO: 13556 - protein, 13 aa, synthetic construct
  REGION 1..13: note = Thymidylate synthase (284-296)
KVEKIDDFKAEDF

SEQ ID NO: 13557 - protein, 10 aa, synthetic construct
  REGION 1..10: note = Zinc finger MYND domain-containing protein 15 (138-147)
KVEPEEDREL

SEQ ID NO: 13558 - protein, 12 aa, synthetic construct
  REGION 1..12: note = Glyceraldehyde-3-phosphate dehydrogenase (219-230)
KVIPELNGKLTG

SEQ ID NO: 13559 - protein, 13 aa, synthetic construct
  REGION 1..13: note = Alpha-enolase (343-355)
KVNQIGSVTESLQ

SEQ ID NO: 13560 - protein, 15 aa, synthetic construct
  REGION 1..15: note = Histone H2A type 2-A (100-114)
KVTIAQGGVLPNIQA

SEQ ID NO: 13561 - protein, 9 aa, synthetic construct
  REGION 1..9: note = D-dopachrome decarboxylase (89-97)
LALGQDRIL

SEQ ID NO: 13562 - protein, 11 aa, synthetic construct
  REGION 1..11: note = Acidic fibroblast growth factor intracellular-binding protein (169-179)
LARDYAAIVFF

SEQ ID NO: 13563 - protein, 18 aa, synthetic construct
  REGION 1..18: note = FAST kinase domain-containing protein 1 (497-514)
LDLLRKELKSLKGNTFPE

SEQ ID NO: 13564 - protein, 14 aa, synthetic construct
  REGION 1..14: note = F-box only protein 41 (284-297)
LESLLKAAGGNLLI

SEQ ID NO: 13565 - protein, 10 aa, synthetic construct
  REGION 1..10: note = Eukaryotic initiation factor 4A-III (110-119)
LILAPTRELA

SEQ ID NO: 13566 - protein, 13 aa, synthetic construct
  REGION 1..13: note = Alpha-enolase (342-354)
LKVNQIGSVTESL

SEQ ID NO: 13567 - protein, 11 aa, synthetic construct
  REGION 1..11: note = Threonine synthase-like 1 (295-305)
LLERCIHPADI

SEQ ID NO: 13568 - protein, 10 aa, synthetic construct
  REGION 1..10: note = Beta-1,4-galactosyltransferase 7 (20-29)
LLSGGLPRKC

SEQ ID NO: 13569 - protein, 10 aa, synthetic construct
  REGION 1..10: note = Protein S100-A11 (40-49)
LSFMNTELAA

SEQ ID NO: 13570 - protein, 15 aa, synthetic construct
  REGION 1..15: note = 4F2 cell-surface antigen heavy chain (496-510)
LSTQPGREEGSPLEL

SEQ ID NO: 13571 - protein, 12 aa, synthetic construct
  REGION 1..12: note = L-lactate dehydrogenase A chain (254-265)
LSVADLAESIMK

SEQ ID NO: 13572 - protein, 9 aa, synthetic construct
  REGION 1..9: note = Complement C4-A (1202-1210)
LTKAPVDLL

SEQ ID NO: 13573 - protein, 12 aa, synthetic construct
  REGION 1..12: note = Usherin (3700-3711)
LYWSLPEKPNGL

SEQ ID NO: 13574 - protein, 11 aa, synthetic construct
  REGION 1..11: note = Phosphopantothenoylcysteine decarboxylase (1-11)
MEPKASCPAAA

SEQ ID NO: 13575 - protein, 14 aa, synthetic construct
  REGION 1..14: note = DEAD/H box polypeptide 11 like 12 (1-14)
MGLICRDPATKVKP

SEQ ID NO: 13576 - protein, 13 aa, synthetic construct
  REGION 1..13: note = Elongation factor 1-alpha 1 (201-213)
MLEPSANMPWFKG

SEQ ID NO: 13577 - protein, 14 aa, synthetic construct
  REGION 1..14: note = Transgelin-2 (130-143)
MNLGGLAVARDDGL

SEQ ID NO: 13578 - protein, 10 aa, synthetic construct
  REGION 1..10: note = Nucleoside diphosphate kinase B (76-85)
MVWEGLNVVK

SEQ ID NO: 13579 - protein, 11 aa, synthetic construct
  REGION 1..11: note = Endoplasmic reticulum aminopeptidase 2 (861-869)
NAISRIPKGQV

SEQ ID NO: 13580 - protein, 20 aa, synthetic construct
  REGION 1..20: note = Wiskott-Aldrich syndrome protein (262-281)
NLDPDLRSLFSRAGISEAQL

SEQ ID NO: 13581 - protein, 9 aa, synthetic construct
  REGION 1..9: note = Cartilage intermediate layer protein 1 (779-787)
NLEPRTGFL

SEQ ID NO: 13582 - protein, 9 aa, synthetic construct
  REGION 1..9: note = Probable phosphoglycerate mutase 4 (209-217)
NLPTGIPIV

SEQ ID NO: 13583 - protein, 14 aa, synthetic construct
  REGION 1..14: note = Nuclear receptor subfamily 1 group D member 1 (343-356)
NNTLAAQRHNEALN

SEQ ID NO: 13584 - protein, 18 aa, synthetic construct
  REGION 1..18: note = Tumor protein D52 (212-229)
NSAANASATTTEPLPEKT

SEQ ID NO: 13585 - protein, 20 aa, synthetic construct
  REGION 1..20: note = Tumor protein D52 (212-231)
NSAANASATTTEPLPEKTQE

SEQ ID NO: 13586 - protein, 23 aa, synthetic construct
  REGION 1..23: note = Replication initiator 1 (10-32)
PAAEVRPGQGRGATAGPRGAAPP

SEQ ID NO: 13587 - protein, 15 aa, synthetic construct
  REGION 1..15: note = Histidine protein methyltransferase 1 homolog (142-156)
PGENIVSKSFSSHSD

SEQ ID NO: 13588 - protein, 19 aa, synthetic construct
  REGION 1..19: note = Glutaredoxin-2, mitochondrial (32-50)
PGRTRSAARRMESNTSSSL

SEQ ID NO: 13589 - protein, 19 aa, synthetic construct
  REGION 1..19: note = Insulin receptor substrate 2 (989-1007)
PKPGAPSGHPVGSLDGLLS

SEQ ID NO: 13590 - protein, 11 aa, synthetic construct
  REGION 1..11: note = Polycystin-1 (4192-4202)
QLDGLSVSLGR

SEQ ID NO: 13591 - protein, 11 aa, synthetic construct
  REGION 1..11: note = Keratin, type II cytoskeletal 8 (226-236)
QLYEEEIRELQ

SEQ ID NO: 13592 - protein, 31 aa, synthetic construct
  REGION 1..31: note = Cilia- and flagella-associated protein 52 (145-175)
RDAICGSPAAGLNVGNATNVIFSRCRDEMFM

SEQ ID NO: 13593 - protein, 15 aa, synthetic construct
  REGION 1..15: note = Histone H3.3 (84-98)
RFQSAAIGALQEASE

SEQ ID NO: 13594 - protein, 26 aa, synthetic construct
  REGION 1..26: note = keratin 8, isoform CRA (125-150)
RGGLGGGYGGASGMGGITAVMVNQNL

SEQ ID NO: 13595 - protein, 11 aa, synthetic construct
  REGION 1..11: note = Oxysterol-binding protein 2 (60-70)
RGTINLSTAHI

SEQ ID NO: 13596 - protein, 13 aa, synthetic construct
  REGION 1..13: note = F-actin-capping protein subunit alpha-2 (100-112)
RKEATDPRPCEVE

SEQ ID NO: 13597 - protein, 19 aa, synthetic construct
  REGION 1..19: note = kelch repeat and BTB domain-containing protein 6 (1-18)
RKVLREDDPSSVRLASPSS

SEQ ID NO: 13598 - protein, 14 aa, synthetic construct
  REGION 1..14: note = UV excision repair protein RAD23 homolog B (268-281)
RQIIQQNPSLLPAL

SEQ ID NO: 13599 - protein, 24 aa, synthetic construct
  REGION 1..24: note = Protein boule-like (35-58)
SAPRYGTVIPNRIFVGGIDFKTNE

SEQ ID NO: 13600 - protein, 18 aa, synthetic construct
  REGION 1..18: note = Beta-1,3-galactosyltransferase 6 (23-40)
SAQPLRDARCALAPGDPR

SEQ ID NO: 13601 - protein, 13 aa, synthetic construct
  REGION 1..13: note = Structure-specific endonuclease subunit SLX4 (603-615)
SASQREHQALQDL

SEQ ID NO: 13602 - protein, 15 aa, synthetic construct
  REGION 1..15: note = Elongation factor 1-alpha 1 (396-410)
SGDAAIVDMVPGKPM

SEQ ID NO: 13603 - protein, 13 aa, synthetic construct
  REGION 1..13: note = Fructose-bisphosphate aldolase A (272-284)
SGGQSEEEASINL

SEQ ID NO: 13604 - protein, 14 aa, synthetic construct
  REGION 1..14: note = Sodium-coupled monocarboxylate transporter 2 (343-356)
SGTLSTVASSINAL

SEQ ID NO: 13605 - protein, 13 aa, synthetic construct
  REGION 1..13: note = Poly(rC)-binding protein 1 (223-235)
SIQGQHTISPLDL

SEQ ID NO: 13606 - protein, 17 aa, synthetic construct
  REGION 1..17: note = DNA ligase 3 (790-806)
SKSEAHTADGISIRFPR

SEQ ID NO: 13607 - protein, 12 aa, synthetic construct
  REGION 1..12: note = Keratin, type II cytoskeletal 8 (253-264)
SLDMDSIIAEVK

SEQ ID NO: 13608 - protein, 12 aa, synthetic construct
  REGION 1..12: note = Rabenosyn-5 (541-552)
SLHTRTRSLDFR

SEQ ID NO: 13609 - protein, 12 aa, synthetic construct
  REGION 1..12: note = Leucine-rich repeat-containing protein 28 (186-197)
SMAGNRLAFLPL

SEQ ID NO: 13610 - protein, 10 aa, synthetic construct
  REGION 1..10: note = NUAK family SNF1-like kinase 2 (446-455)
SNLKLPKGIL

SEQ ID NO: 13611 - protein, 12 aa, synthetic construct
  REGION 1..12: note = Keratin, type I cytoskeletal 18 (272-283)
SQQIEESTTVVT

SEQ ID NO: 13612 - protein, 22 aa, synthetic construct
  REGION 1..22: note = Striated muscle preferentially expressed protein kinase isoform X10 (928-946)
SQVLREGSKAGGGTLLCLPLAE

SEQ ID NO: 13613 - protein, 10 aa, synthetic construct
  REGION 1..10: note = Vimentin (72-81)
SSVPGVRLLQ

SEQ ID NO: 13614 - protein, 14 aa, synthetic construct
  REGION 1..14: note = 4F2 cell-surface antigen heavy chain (497-510)
STQPGREEGSPLEL

SEQ ID NO: 13615 - protein, 17 aa, synthetic construct
  REGION 1..17: note = Laminin subunit alpha-4 (1023-1039)
STSVPCARDKLAFTQSR

SEQ ID NO: 13616 - protein, 13 aa, synthetic construct
  REGION 1..13: note = Otoferlin (965-977)
TELRVIIGKPLLS

SEQ ID NO: 13617 - protein, 14 aa, synthetic construct
  REGION 1..14: note = Procollagen-lysine,2-oxoglutarate 5-dioxygenase 1 (388-401)
TEPNSLRLLIQQNK

SEQ ID NO: 13618 - protein, 17 aa, synthetic construct
  REGION 1..17: note = Galectin-1 (71-87)
TEQREAVFPFQPGSVAE

SEQ ID NO: 13619 - protein, 19 aa, synthetic construct
  REGION 1..19: note = Ovochymase-1 (314-332)
TKALSSVQEVNGSQRGKGI

SEQ ID NO: 13620 - protein, 24 aa, synthetic construct
  REGION 1..24: note = Envoplakin (1400-1423)
TQKDPKLREEHSRLSGSLDEEVGR

SEQ ID NO: 13621 - protein, 12 aa, synthetic construct
  REGION 1..12: note = Neuron navigator 2 (450-461)
TTVGPASSSPKI

SEQ ID NO: 13622 - protein, 19 aa, synthetic construct
  REGION 1..19: note = Bifunctional heparan sulfate N-deacetylase/N-sulfotransferase 3 isoform X3 (310-335)
VAILVSKEGARMGLDTHTP

SEQ ID NO: 13623 - protein, 12 aa, synthetic construct
  REGION 1..12: note = VIP peptides (52-63)
VFTDNYTRLRKQ

SEQ ID NO: 13624 - protein, 9 aa, synthetic construct
  REGION 1..9: note = 60S acidic ribosomal protein P2 (54-62)
VIAQGIGKL

SEQ ID NO: 13625 - protein, 18 aa, synthetic construct
  REGION 1..18: note = Elongation factor 1-alpha 1 (344-361)
VIILNHPGQISAGYAPVL

SEQ ID NO: 13626 - protein, 17 aa, synthetic construct
  REGION 1..17: note = Activin receptor type-2A (262-278)
VLEGAINFQRDAFLRID

SEQ ID NO: 13627 - protein, 19 aa, synthetic construct
  REGION 1..19: note = Serine/threonine-protein phosphatase with EF-hands 1 (308-326)
VLIPPTETNRDHDTDSKHN

SEQ ID NO: 13628 - protein, 11 aa, synthetic construct
  REGION 1..11: note = Galectin-1 (31-41)
VLNLGKDSNNL

SEQ ID NO: 13629 - protein, 13 aa, synthetic construct
  REGION 1..13: note = Profilin-1 (41-53)
VNITPAEVGVLVG

SEQ ID NO: 13630 - protein, 18 aa, synthetic construct
  REGION 1..18: note = Kin of IRRE-like protein 3 (402-419)
VPRVGAGEREVTLTVNGP

SEQ ID NO: 13631 - protein, 13 aa, synthetic construct
  REGION 1..13: note = Keratin, type II cytoskeletal 8 (66-78)
VTVNQSLLSPLVL

SEQ ID NO: 13632 - protein, 15 aa, synthetic construct
  REGION 1..15: note = Enhancer of rudimentary homolog (71-85)
VYRADTQTYQPYNKD

SEQ ID NO: 13633 - protein, 16 aa, synthetic construct
  REGION 1..16: note = Ankyrin repeat domain-containing protein 26 (168-183)
YDANIEAKNKDDLTPL

SEQ ID NO: 13634 - protein, 17 aa, synthetic construct
  REGION 1..17: note = 78 kDa glucose-regulated protein (635-651)
YGSAGPPPTGEEDTAEK

SEQ ID NO: 13635 - protein, 19 aa, synthetic construct
  REGION 1..19: note = 78 kDa glucose-regulated protein (635-653)
YGSAGPPPTGEEDTAEKDE

SEQ ID NO: 13636 - protein, 12 aa, synthetic construct
  REGION 1..12: note = Alpha-enolase (270-281)
YISPDQLADLYK

SEQ ID NO: 13637 - protein, 12 aa, synthetic construct
  REGION 1..12: note = Microsomal glutathione S-transferase 1 (121-132)
YLTPLPQPNRAL

SEQ ID NO: 13638 - protein, 14 aa, synthetic construct
  REGION 1..14: note = Beta-actin-like protein 2 (8-21)
YNELRVAPDEHPIL

SEQ ID NO: 13639 - protein, 21 aa, synthetic construct
  REGION 1..21: note = Gamma-enolase (25-45)
YTAKGLFRAAVPSGASTGIYE

SEQ ID NO: 13640 - protein, 14 aa, synthetic construct
  REGION 1..14: note = Polypyrimidine tract-binding protein 1 (114-127)
YTSVTPVLRGQPIY

SEQ ID NO: 13641 - protein, 9 aa, synthetic construct
  REGION 1..9: note = HLA class I histocompatibility antigen, B-13 alpha chain (26-34)
YVDDTQFVR

SEQ ID NO: 13642 - protein, 13 aa, synthetic construct
  REGION 1..13: note = Matrix-remodeling-associated protein 5 (34-46)
YVPSEVHCTFRSL

SEQ ID NO: 13643 - protein, 9 aa, synthetic construct
  REGION 1..9: note = Flotillin-2 (156-164)
DVYDKVDYL

SEQ ID NO: 13644 - protein, 9 aa, synthetic construct
  REGION 1..9: note = Gamma-adducin (305-313)
EAFHYIFNV

SEQ ID NO: 13645 - protein, 9 aa, synthetic construct
  REGION 1..9: note = Nucleoporin GLE1 (443-451)
EIFDKIHSL

SEQ ID NO: 13646 - protein, 9 aa, synthetic construct
  REGION 1..9: note = GRIP1-associated protein 1 (707-715)
EVAELFQRL

SEQ ID NO: 13647 - protein, 9 aa, synthetic construct
  REGION 1..9: note = HMG domain-containing protein 3 (954-962)
EVFALIHEL

SEQ ID NO: 13648 - protein, 10 aa, synthetic construct
  REGION 1..10: note = Beta-hexosaminidase subunit beta (330-339)
EVFPDQFIHL

SEQ ID NO: 13649 - protein, 9 aa, synthetic construct
  REGION 1..9: note = Selenide, water dikinase 2 (336-344)
EVSFVIHNL

SEQ ID NO: 13650 - protein, 9 aa, synthetic construct
  REGION 1..9: note = ATPase family AAA domain-containing protein 1 (15-23)
EVVGLIFRL

SEQ ID NO: 13651 - protein, 9 aa, synthetic construct
  REGION 1..9: note = MOB kinase activator 3A (64-72)
HVVDFFNRV

SEQ ID NO: 13652 - protein, 9 aa, synthetic construct
  REGION 1..9: note = Transmembraneoprotein NMB (539-547)
KGLSVFLNR

SEQ ID NO: 13653 - protein, 11 aa, synthetic construct
  REGION 1..11: note = Cytochrome b-245 light chain (78-88)
KLFGPFTRNYY

SEQ ID NO: 13654 - protein, 9 aa, synthetic construct
  REGION 1..9: note = Syntenin-1 (270-278)
MPAFIFEHI

SEQ ID NO: 13655 - protein, 10 aa, synthetic construct
  REGION 1..10: note = Transcription factor 7-like 2 (366-375)
REEQAKYYEL

SEQ ID NO: 13656 - protein, 9 aa, synthetic construct
  REGION 1..9: note = Tumor protein p63-regulated gene 1-like protein (59-67)
RVKEYFVFR

SEQ ID NO: 13657 - protein, 9 aa, synthetic construct
  REGION 1..9: note = Clathrin heavy chain 1 (1342-1350)
RVNIPKVLR

SEQ ID NO: 13658 - protein, 10 aa, synthetic construct
  REGION 1..10: note = COP9 signalosome complex subunit 6 (311-320)
VLYDRQGIGR

SEQ ID NO: 13659 - protein, 18 aa, synthetic construct
  REGION 1..18: note = GTP-binding nuclear protein Ran (203-220)
APPEVVMDPALAAQYEHD

SEQ ID NO: 13660 - protein, 9 aa, synthetic construct
  REGION 1..9: note = Ubiquitin carboxyl-terminal hydrolase 48 (534-542)
AADIFYSRY

SEQ ID NO: 13661 - protein, 9 aa, synthetic construct
  REGION 1..9: note = Transmembrane protein 141 (30-38)
AFMKGVFTF

SEQ ID NO: 13662 - protein, 10 aa, synthetic construct
  REGION 1..10: note = DNA replication licensing factor MCM4 (846-855)
ALADDDFLTV

SEQ ID NO: 13663 - protein, 9 aa, synthetic construct
  REGION 1..9: note = Protein FAM188B (498-506)
ALADIVWRA

SEQ ID NO: 13664 - protein, 9 aa, synthetic construct
  REGION 1..9: note = Protein TANC1 (1389-1397)
ALADLQEAV

SEQ ID NO: 13665 - protein, 11 aa, synthetic construct
  REGION 1..11: note = Protein TANC1 (1389-1399)
ALADLQEAVKL

SEQ ID NO: 13666 - protein, 9 aa, synthetic construct
  REGION 1..9: note = 5-oxoprolinase (523-531)
ALADVVHEA

SEQ ID NO: 13667 - protein, 9 aa, synthetic construct
  REGION 1..9: note = Nodal modulator 3 (459-467)
ALAGVSFEI

SEQ ID NO: 13668 - protein, 10 aa, synthetic construct
  REGION 1..10: note = Midasin (1405-1414)
ALANQKLYSV

SEQ ID NO: 13669 - protein, 9 aa, synthetic construct
  REGION 1..9: note = WD repeat-containing protein 36 (542-550)
ALDDFSISV

SEQ ID NO: 13670 - protein, 10 aa, synthetic construct
  REGION 1..10: note = EP300-interacting inhibitor of differentiation 1 (85-94)
ALDGGFQMHY

SEQ ID NO: 13671 - protein, 9 aa, synthetic construct
  REGION 1..9: note = Elongation factor 2 (350-358)
ALDNFLDKL

SEQ ID NO: 13672 - protein, 9 aa, synthetic construct
  REGION 1..9: note = Inverted formin-2 (131-139)
ALDTSNVMV

SEQ ID NO: 13673 - protein, 11 aa, synthetic construct
  REGION 1..11: note = Keratinocyte-associated protein 2 (108-118)
ALFASGLIHRV

SEQ ID NO: 13674 - protein, 12 aa, synthetic construct
  REGION 1..12: note = Exportin-2 (684-695)
ALFPHLLQPVLW

SEQ ID NO: 13675 - protein, 8 aa, synthetic construct
  REGION 1..8: note = Activating signal cointegrator 1 complex subunit 3 (627-634)
ALGTVTNV

SEQ ID NO: 13676 - protein, 9 aa, synthetic construct
  REGION 1..9: note = Replication factor C subunit 5 (276-284)
ALHDILTEI

SEQ ID NO: 13677 - protein, 10 aa, synthetic construct
  REGION 1..10: note = Tryptophan-tRNA ligase, cytoplasmic (433-442)
ALIEVLQPLI

SEQ ID NO: 13678 - protein, 10 aa, synthetic construct
  REGION 1..10: note = Tight junction protein ZO-1 (692-701)
ALLDVTPNAV

SEQ ID NO: 13679 - protein, 9 aa, synthetic construct
  REGION 1..9: note = Polypeptide N-acetylgalactosaminyltransferase 2 (185-193)
ALLGKIEKV

SEQ ID NO: 13680 - protein, 9 aa, synthetic construct
  REGION 1..9: note = Bifunctional glutamate/proline-tRNA ligase (218-226)
ALLNQHYQV

SEQ ID NO: 13681 - protein, 9 aa, synthetic construct
  REGION 1..9: note = LEM domain-containing protein 2 (70-78)
ALLTAVTNV

SEQ ID NO: 13682 - protein, 10 aa, synthetic construct
  REGION 1..10: note = Nuclear pore complex protein Nup205 (494-503)
ALLTGIISKA

SEQ ID NO: 13683 - protein, 10 aa, synthetic construct
  REGION 1..10: note = LYST-interacting protein LIP6 (84-93)
ALMDGKVYDI

SEQ ID NO: 13684 - protein, 11 aa, synthetic construct
  REGION 1..11: note = Leishmanolysin-like peptidase (353-363)
ALMEDTGRQML

SEQ ID NO: 13685 - protein, 9 aa, synthetic construct
  REGION 1..9: note = Kinesin-like protein KIF7 (91-99)
ALNEDIVRV

SEQ ID NO: 13686 - protein, 9 aa, synthetic construct
  REGION 1..9: note = 40S ribosomal protein S12 (17-25)
ALQEVLKTA

SEQ ID NO: 13687 - protein, 9 aa, synthetic construct
  REGION 1..9: note = Anthrax toxin receptor 1 (207-215)
ALQGIIHSI

SEQ ID NO: 13688 - protein, 10 aa, synthetic construct
  REGION 1..10: note = Probable ATP-dependent RNA helicase DDX5 (128-137)
ALSGLDMVGV

SEQ ID NO: 13689 - protein, 9 aa, synthetic construct
  REGION 1..9: note = Actin-related protein 2/3 complex subunit 1A (24-32)
ALSPNNHEV

SEQ ID NO: 13690 - protein, 9 aa, synthetic construct
  REGION 1..9: note = DNA-dependent protein kinase catalytic subunit (3134-3142)
ALTEIQEFI

SEQ ID NO: 13691 - protein, 9 aa, synthetic construct
  REGION 1..9: note = Annexin A1 (99-107)
ALTGHLEEV

SEQ ID NO: 13692 - protein, 10 aa, synthetic construct
  REGION 1..10: note = Cyclin-dependent kinase 2 (95-104)
ALTGIPLPLI

SEQ ID NO: 13693 - protein, 10 aa, synthetic construct
  REGION 1..10: note = Staphylococcal nuclease domain-containing protein 1 (428-437)
ALVSKGLATV

SEQ ID NO: 13694 - protein, 9 aa, synthetic construct
  REGION 1..9: note = Nicotinate-nucleotide pyrophosphorylase (carboxylating) (45-53)
ALWAKSPGV

SEQ ID NO: 13695 - protein, 11 aa, synthetic construct
  REGION 1..11: note = Guanine nucleotide-binding protein G(I)/G(S)/G(T) subunit beta-1 (74-84)
ALWDIETGQQT

SEQ ID NO: 13696 - protein, 9 aa, synthetic construct
  REGION 1..9: note = Centrosome-associated protein CEP250 (656-664)
ALWEKNTHL

SEQ ID NO: 13697 - protein, 12 aa, synthetic construct
  REGION 1..12: note = Nuclear pore complex protein Nup160 (372-383)
ALWHDAENQTVV

SEQ ID NO: 13698 - protein, 12 aa, synthetic construct
  REGION 1..12: note = Tyrosine-protein kinase JAK1 (79-90)
ALYDENTKLWYA

SEQ ID NO: 13699 - protein, 11 aa, synthetic construct
  REGION 1..11: note = Caskin-2 (147-157)
ALYGKTEVVRL

SEQ ID NO: 13700 - protein, 9 aa, synthetic construct
  REGION 1..9: note = Probable dolichyl pyrophosphate Glc1Man9GlcNAc2 alpha-1,3-glucosyltransferase (287-295)
ALYNALDKV

SEQ ID NO: 13701 - protein, 9 aa, synthetic construct
  REGION 1..9: note = Nuclear pore complex protein Nup155 (1038-1046)
ALYNWLIQV

SEQ ID NO: 13702 - protein, 13 aa, synthetic construct
  REGION 1..13: note = Lysine-tRNA ligase (583-595)
AMFLTDSNNIKEV

SEQ ID NO: 13703 - protein, 9 aa, synthetic construct
  REGION 1..9: note = Protein GPR107 (189-197)
AMGEKSFSV

SEQ ID NO: 13704 - protein, 9 aa, synthetic construct
  REGION 1..9: note = Probable cation-transporting ATPase 13A3 (829-837)
AMNGKSFSV

SEQ ID NO: 13705 - protein, 9 aa, synthetic construct
  REGION 1..9: note = Protein Wnt-5a (20-28)
AMSSKFFLV

SEQ ID NO: 13706 - protein, 8 aa, synthetic construct
  REGION 1..8: note = Syndecan-4 (2-9)
APARLFAL

SEQ ID NO: 13707 - protein, 9 aa, synthetic construct
  REGION 1..9: note = Dehydrogenase/reductase SDR family member 4 (110-118)
APGLIKTSF

SEQ ID NO: 13708 - protein, 9 aa, synthetic construct
  REGION 1..9: note = Filamin-A (1687-1695)
APQPGKYVI

SEQ ID NO: 13709 - protein, 9 aa, synthetic construct
  REGION 1..9: note = U1 small nuclear ribonucleoprotein 70 kDa (14-22)
APRDPIPYL

SEQ ID NO: 13710 - protein, 9 aa, synthetic construct
  REGION 1..9: note = Vacuolar protein sorting-associated protein 16 homolog (41-49)
APYGGPIAL

SEQ ID NO: 13711 - protein, 9 aa, synthetic construct
  REGION 1..9: note = Fatty acid desaturase 1 (12-20)
AQGPTPRYF

SEQ ID NO: 13712 - protein, 10 aa, synthetic construct
  REGION 1..10: note = Elongation factor 1-gamma (19-28)
AQYSGAQVRV

SEQ ID NO: 13713 - protein, 10 aa, synthetic construct
  REGION 1..10: note = Serine/threonine-protein kinase SMG1 (35-44)
ASADPDNLKY

SEQ ID NO: 13714 - protein, 10 aa, synthetic construct
  REGION 1..10: note = RalBP1-associated Eps domain-containing protein 1 (609-618)
ASDPASSLRV

SEQ ID NO: 13715 - protein, 10 aa, synthetic construct
  REGION 1..10: note = Tryptophan-tRNA ligase, cytoplasmic (352-361)
ASDPNSSIFL

SEQ ID NO: 13716 - protein, 13 aa, synthetic construct
  REGION 1..13: note = Extended synaptotagmin-2 (868-880)
ASEELAKGWTQWY

SEQ ID NO: 13717 - protein, 10 aa, synthetic construct
  REGION 1..10: note = Alpha-enolase (78-87)
ASEFFRSGKY

SEQ ID NO: 13718 - protein, 12 aa, synthetic construct
  REGION 1..12: note = Unconventional myosin-Ib (243-254)
ASELFKDKKALY

SEQ ID NO: 13719 - protein, 12 aa, synthetic construct
  REGION 1..12: note = Protein-glutamate O-methyltransferase (421-432)
ASEPSWWTTGKY

SEQ ID NO: 13720 - protein, 8 aa, synthetic construct
  REGION 1..8: note = Keratinocyte-associated protein 2 (111-118)
ASGLIHRV

SEQ ID NO: 13721 - protein, 10 aa, synthetic construct
  REGION 1..10: note = Cadherin-5 (339-348)
ATDPTIDLRY

SEQ ID NO: 13722 - protein, 10 aa, synthetic construct
  REGION 1..10: note = Mitogen-activated protein kinase kinase kinase MLT (111-120)
ATDVAKGMHY

SEQ ID NO: 13723 - protein, 11 aa, synthetic construct
  REGION 1..11: note = Mitogen-activated protein kinase kinase kinase MLT (111-121)
ATDVAKGMHYL

SEQ ID NO: 13724 - protein, 10 aa, synthetic construct
  REGION 1..10: note = Coatomer subunit beta' (480-489)
ATEESFFILK

SEQ ID NO: 13725 - protein, 12 aa, synthetic construct
  REGION 1..12: note = Rho GTPase-activating protein 5 (908-919)
ATEITAKFTALY

SEQ ID NO: 13726 - protein, 9 aa, synthetic construct
  REGION 1..9: note = Transcription initiation protein SPT3 homolog (109-117)
ATELQSMMY

SEQ ID NO: 13727 - protein, 9 aa, synthetic construct
  REGION 1..9: note = Clathrin heavy chain 1 (1626-1634)
ATETQPIVY

SEQ ID NO: 13728 - protein, 9 aa, synthetic construct
  REGION 1..9: note = HEAT repeat-containing protein 5A (1311-1319)
AVKLPGGQL

SEQ ID NO: 13729 - protein, 11 aa, synthetic construct
  REGION 1..11: note = L-lactate dehydrogenase B chain (200-210)
AVWSGVNVAGV

SEQ ID NO: 13730 - protein, 10 aa, synthetic construct
  REGION 1..10: note = Myotrophin (75-84)
AVYEGHVSCV

SEQ ID NO: 13731 - protein, 10 aa, synthetic construct
  REGION 1..10: note = Ubiquitin carboxyl-terminal hydrolase 11 (318-327)
AYADLVKQAW

SEQ ID NO: 13732 - protein, 9 aa, synthetic construct
  REGION 1..9: note = Phosphoinositide 3-kinase regulatory subunit 4 (481-489)
AYAENIALL

SEQ ID NO: 13733 - protein, 9 aa, synthetic construct
  REGION 1..9: note = Solute carrier family 26 member 6 (67-75)
AYALLLQHL

SEQ ID NO: 13734 - protein, 9 aa, synthetic construct
  REGION 1..9: note = CD109 antigen (1146-1154)
AYALLSHFL

SEQ ID NO: 13735 - protein, 10 aa, synthetic construct
  REGION 1..10: note = Stress-induced-phosphoprotein 1 (349-358)
AYARIGNSYF

SEQ ID NO: 13736 - protein, 9 aa, synthetic construct
  REGION 1..9: note = Nuclear receptor coactivator 7 (730-738)
AYATHPFKF

SEQ ID NO: 13737 - protein, 9 aa, synthetic construct
  REGION 1..9: note = WD repeat-containing protein 36 (426-434)
AYFLKPKEL

SEQ ID NO: 13738 - protein, 9 aa, synthetic construct
  REGION 1..9: note = Probable ATP-dependent RNA helicase DDX60 (93-101)
AYFNFPELL

SEQ ID NO: 13739 - protein, 9 aa, synthetic construct
  REGION 1..9: note = Liprin-alpha-4 (952-960)
AYGDMNHEW

SEQ ID NO: 13740 - protein, 10 aa, synthetic construct
  REGION 1..10: note = S-adenosylmethionine synthase isoform type-2 (376-385)
AYGHFGRDSF

SEQ ID NO: 13741 - protein, 9 aa, synthetic construct
  REGION 1..9: note = Mesoderm induction early response protein 1 (319-327)
AYGKDFHLI

SEQ ID NO: 13742 - protein, 9 aa, synthetic construct
  REGION 1..9: note = WD repeat-containing protein 36 (84-92)
AYGNVFSAF

SEQ ID NO: 13743 - protein, 9 aa, synthetic construct
  REGION 1..9: note = Kynurenine-oxoglutarate transaminase 3 (134-142)
AYGSLFNTI

SEQ ID NO: 13744 - protein, 9 aa, synthetic construct
  REGION 1..9: note = Cleavage stimulation factor subunit 3 (440-448)
AYIDYLSHL

SEQ ID NO: 13745 - protein, 9 aa, synthetic construct
  REGION 1..9: note = Leucine-zipper-like transcriptional regulator 1 (75-83)
AYKDAIYVF

SEQ ID NO: 13746 - protein, 9 aa, synthetic construct
  REGION 1..9: note = Small subunit processome component 20 homolog (1114-1122)
AYLPKILQI

SEQ ID NO: 13747 - protein, 9 aa, synthetic construct
  REGION 1..9: note = Ubiquitin-like-conjugating enzyme ATG3 (65-73)
AYLPTGKQF

SEQ ID NO: 13748 - protein, 11 aa, synthetic construct
  REGION 1..11: note = Elongation factor 2 (286-296)
AYLPVNESFGF

SEQ ID NO: 13749 - protein, 10 aa, synthetic construct
  REGION 1..10: note = Protein shisa-5 (128-137)
AYMDAPKAAL

SEQ ID NO: 13750 - protein, 10 aa, synthetic construct
  REGION 1..10: note = La-related protein 4B (250-259)
AYNDNWFITF

SEQ ID NO: 13751 - protein, 10 aa, synthetic construct
  REGION 1..10: note = Phosphatidylinositol-binding clathrin assembly protein (210-219)
AYNEGIINLL

SEQ ID NO: 13752 - protein, 10 aa, synthetic construct
  REGION 1..10: note = Beta-hexosaminidase subunit alpha (194-203)
AYNKLNVFHW

SEQ ID NO: 13753 - protein, 9 aa, synthetic construct
  REGION 1..9: note = Cirhin (34-42)
AYNNQSNRL

SEQ ID NO: 13754 - protein, 9 aa, synthetic construct
  REGION 1..9: note = Cell adhesion molecule-related/down-regulated by oncogenes (193-201)
AYNPVTHQL

SEQ ID NO: 13755 - protein, 10 aa, synthetic construct
  REGION 1..10: note = Ubiquitin-associated protein 2-like (267-276)
AYPPAPFMHI

SEQ ID NO: 13756 - protein, 11 aa, synthetic construct
  REGION 1..11: note = Cathepsin D (202-212)
AYPRISVNNVL

SEQ ID NO: 13757 - protein, 9 aa, synthetic construct
  REGION 1..9: note = Ras GTPase-activating-like protein IQGAP1 (794-802)
AYQDRLAYL

SEQ ID NO: 13758 - protein, 9 aa, synthetic construct
  REGION 1..9: note = Ras GTPase-activating-like protein IQGAP3 (955-963)
AYQHLFYLL

SEQ ID NO: 13759 - protein, 9 aa, synthetic construct
  REGION 1..9: note = 40S ribosomal protein S11 (9-17)
AYQKQPTIF

SEQ ID NO: 13760 - protein, 9 aa, synthetic construct
  REGION 1..9: note = UDP-glucose:glycoprotein glucosyltransferase 2 (114-122)
AYSPAIQMF

SEQ ID NO: 13761 - protein, 9 aa, synthetic construct
  REGION 1..9: note = Breast cancer anti-estrogen resistance protein 3 (211-219)
AYSRVQYQF

SEQ ID NO: 13762 - protein, 11 aa, synthetic construct
  REGION 1..11: note = Eukaryotic translation initiation factor 4 gamma 1 (168-178)
AYYPAQGVQQF

SEQ ID NO: 13763 - protein, 9 aa, synthetic construct
  REGION 1..9: note = Heterogeneous nuclear ribonucleoprotein L (387-395)
CLYGNVEKV

SEQ ID NO: 13764 - protein, 9 aa, synthetic construct
  REGION 1..9: note = Structural maintenance of chromosomes protein 4 (1136-1144)
DAALDFKNV

SEQ ID NO: 13765 - protein, 9 aa, synthetic construct
  REGION 1..9: note = Phosphoacetylglucosamine mutase (288-296)
DADGHFHLI

SEQ ID NO: 13766 - protein, 9 aa, synthetic construct
  REGION 1..9: note = Nuclear cap-binding protein subunit 2 (93-101)
DAENAMRYI

SEQ ID NO: 13767 - protein, 10 aa, synthetic construct
  REGION 1..10: note = Ras-related protein Rab-14 (163-172)
DAFLEAAKKI

SEQ ID NO: 13768 - protein, 9 aa, synthetic construct
  REGION 1..9: note = Rho-associated protein kinase 1 (187-195)
DAIHSMGFI

SEQ ID NO: 13769 - protein, 9 aa, synthetic construct
  REGION 1..9: note = Elongation factor 2 (348-356)
DALLQMITI

SEQ ID NO: 13770 - protein, 9 aa, synthetic construct
  REGION 1..9: note = SRR1-like protein (237-245)
DALSKMVII

SEQ ID NO: 13771 - protein, 9 aa, synthetic construct
  REGION 1..9: note = Carnitine O-palmitoyltransferase 1, liver isoform (477-485)
DAPIVAHLW

SEQ ID NO: 13772 - protein, 8 aa, synthetic construct
  REGION 1..8: note = ATP-binding cassette sub-family E member 1 (326-333)
DASLVFKV

SEQ ID NO: 13773 - protein, 10 aa, synthetic construct
  REGION 1..10: note = Glutamate receptor ionotropic, kainate 2 (325-334)
DAVHVVSVAV

SEQ ID NO: 13774 - protein, 9 aa, synthetic construct
  REGION 1..9: note = General transcription factor II-I repeat domain-containing protein 2B (818-826)
DGLNYIPKI

SEQ ID NO: 13775 - protein, 10 aa, synthetic construct
  REGION 1..10: note = HLA class I histocompatibility antigen, A-1 alpha chain (89-98)
DGSHTIQIMY

SEQ ID NO: 13776 - protein, 9 aa, synthetic construct
  REGION 1..9: note = Serine/threonine-protein kinase tousled-like 2 (313-321)
DGYAFQNLI

SEQ ID NO: 13777 - protein, 9 aa, synthetic construct
  REGION 1..9: note = Heterogeneous nuclear ribonucleoprotein L (411-419)
DGYAVDRAI

SEQ ID NO: 13778 - protein, 9 aa, synthetic construct
  REGION 1..9: note = T-complex protein 1 subunit epsilon (135-143)
DGYEQAARV

SEQ ID NO: 13779 - protein, 9 aa, synthetic construct
  REGION 1..9: note = Ribosomal protein S6 kinase alpha-1 (416-424)
DGYVVKETI

SEQ ID NO: 13780 - protein, 8 aa, synthetic construct
  REGION 1..8: note = DNA-directed RNA polymerase III subunit RPC3 (186-193)
DMYLVPKL

SEQ ID NO: 13781 - protein, 9 aa, synthetic construct
  REGION 1..9: note = Cyclic AMP-responsive element-binding protein 3-like protein 2 (54-62)
DPFLSEKSV

SEQ ID NO: 13782 - protein, 11 aa, synthetic construct
  REGION 1..11: note = Tubulin beta chain (39-49)
DSDLQLDRISV

SEQ ID NO: 13783 - protein, 11 aa, synthetic construct
  REGION 1..11: note = Zinc finger MYND domain-containing protein 11 (140-150)
DSEQADIARML

SEQ ID NO: 13784 - protein, 8 aa, synthetic construct
  REGION 1..8: note = Negative elongation factor C/D (323-330)
DTDISLIR

SEQ ID NO: 13785 - protein, 9 aa, synthetic construct
  REGION 1..9: note = Kinectin (454-462)
DYARLVNEL

SEQ ID NO: 13786 - protein, 9 aa, synthetic construct
  REGION 1..9: note = Enhancer of polycomb homolog 1 (423-431)
DYDSVFHHL

SEQ ID NO: 13787 - protein, 9 aa, synthetic construct
  REGION 1..9: note = Histone deacetylase 1 (71-79)
DYIKFLRSI

SEQ ID NO: 13788 - protein, 9 aa, synthetic construct
  REGION 1..9: note = Protein KIAA0100 (885-893)
DYPRYLFEI

SEQ ID NO: 13789 - protein, 9 aa, synthetic construct
  REGION 1..9: note = T-complex protein 1 subunit beta (509-517)
EAAEVILRV

SEQ ID NO: 13790 - protein, 9 aa, synthetic construct
  REGION 1..9: note = DNA-dependent protein kinase catalytic subunit (1728-1736)
EFPPGTPRF

SEQ ID NO: 13791 - protein, 11 aa, synthetic construct
  REGION 1..11: note = Nuclear protein 1 (26-36)
ESDLYSLAHSY

SEQ ID NO: 13792 - protein, 10 aa, synthetic construct
  REGION 1..10: note = General transcription factor II-I (242-251)
ESEDPDYYQY

SEQ ID NO: 13793 - protein, 13 aa, synthetic construct
  REGION 1..13: note = E3 ubiquitin-protein ligase HUWE1 (969-981)
ESEDYHFYQGLVY

SEQ ID NO: 13794 - protein, 9 aa, synthetic construct
  REGION 1..9: note = ATP-dependent RNA helicase DDX24 (571-579)
ETDEKDFYL

SEQ ID NO: 13795 - protein, 11 aa, synthetic construct
  REGION 1..11: note = Serrate RNA effector molecule homolog (86-96)
ETEAVKRYNDY

SEQ ID NO: 13796 - protein, 10 aa, synthetic construct
  REGION 1..10: note = Probable ATP-dependent RNA helicase DDX56 (239-248)
ETEEDKFLLL

SEQ ID NO: 13797 - protein, 10 aa, synthetic construct
  REGION 1..10: note = Complement C4-A (1516-1525)
ETEGPHVLLY

SEQ ID NO: 13798 - protein, 9 aa, synthetic construct
  REGION 1..9: note = Copine-1 (269-277)
ETEYSFLDY

SEQ ID NO: 13799 - protein, 9 aa, synthetic construct
  REGION 1..9: note = Melanoma-associated antigen 11 (252-260)
EVDPTSHSY

SEQ ID NO: 13800 - protein, 9 aa, synthetic construct
  REGION 1..9: note = General transcription factor 3C polypeptide 2 (329-337)
EWIPLAWKW

SEQ ID NO: 13801 - protein, 11 aa, synthetic construct
  REGION 1..11: note = Influenza virus NS1A-binding protein (632-642)
EWSPYTKIFQF

SEQ ID NO: 13802 - protein, 9 aa, synthetic construct
  REGION 1..9: note = Zinc finger protein 318 (408-416)
EYAKIHDLL

SEQ ID NO: 13803 - protein, 9 aa, synthetic construct
  REGION 1..9: note = CLIP-associating protein 1 (358-366)
EYDNFFQHL

SEQ ID NO: 13804 - protein, 9 aa, synthetic construct
  REGION 1..9: note = Pericentrin (3305-3313)
EYIHHLEVI

SEQ ID NO: 13805 - protein, 9 aa, synthetic construct
  REGION 1..9: note = Transcriptional regulator homolog RPD3 (72-80)
EYIKFLRSI

SEQ ID NO: 13806 - protein, 10 aa, synthetic construct
  REGION 1..10: note = Rab GTPase-activating protein 1 (632-641)
EYIPDLYNHF

SEQ ID NO: 13807 - protein, 9 aa, synthetic construct
  REGION 1..9: note = Gem-associated protein 4 (892-900)
EYIQFVPLL

SEQ ID NO: 13808 - protein, 9 aa, synthetic construct
  REGION 1..9: note = Inhibitor of growth protein 5 (48-56)
EYISTVKTL

SEQ ID NO: 13809 - protein, 9 aa, synthetic construct
  REGION 1..9: note = Inositol polyphosphate multikinase (290-298)
EYNNNFHVL

SEQ ID NO: 13810 - protein, 9 aa, synthetic construct
  REGION 1..9: note = Sorting nexin-18 (463-471)
EYQKVGQSF

SEQ ID NO: 13811 - protein, 9 aa, synthetic construct
  REGION 1..9: note = Poly (ADP-ribose) polymerase 12 (509-517)
EYQKVWNLF

SEQ ID NO: 13812 - protein, 9 aa, synthetic construct
  REGION 1..9: note = Poly (ADP-ribose) polymerase 4 (584-592)
EYRPEFSNF

SEQ ID NO: 13813 - protein, 9 aa, synthetic construct
  REGION 1..9: note = Ubiquitin-conjugating enzyme E2 K (161-169)
EYTKKIENL

SEQ ID NO: 13814 - protein, 9 aa, synthetic construct
  REGION 1..9: note = Leucine-rich repeats and immunoglobulin-like domains protein 2 (560-568)
EYTSILHLF

SEQ ID NO: 13815 - protein, 10 aa, synthetic construct
  REGION 1..10: note = HLA class I histocompatibility antigen, Cw-7 alpha chain (140-149)
FAYDGKDYIA

SEQ ID NO: 13816 - protein, 8 aa, synthetic construct
  REGION 1..8: note = 60S ribosomal protein L3 (362-369)
FIDTTSKF

SEQ ID NO: 13817 - protein, 8 aa, synthetic construct
  REGION 1..8: note = Cysteine-rich protein 2-binding protein (155-162)
FIEKHWTF

SEQ ID NO: 13818 - protein, 9 aa, synthetic construct
  REGION 1..9: note = DNA replication licensing factor MCM5 (427-435)
FIMEGGAMV

SEQ ID NO: 13819 - protein, 9 aa, synthetic construct
  REGION 1..9: note = 60S acidic ribosomal protein P0 (108-116)
FLADPSAFV

SEQ ID NO: 13820 - protein, 9 aa, synthetic construct
  REGION 1..9: note = Trifunctional enzyme subunit beta, mitochondrial (184-192)
FLAPELPAV

SEQ ID NO: 13821 - protein, 9 aa, synthetic construct
  REGION 1..9: note = Membrane-bound transcription factor site-2 protease (251-259)
FLDATLTSV

SEQ ID NO: 13822 - protein, 10 aa, synthetic construct
  REGION 1..10: note = Glucosylceramidase (172-181)
FLDAYAEHKL

SEQ ID NO: 13823 - protein, 9 aa, synthetic construct
  REGION 1..9: note = Neutral alpha-glucosidase AB (604-612)
FLDDGHTFN

SEQ ID NO: 13824 - protein, 10 aa, synthetic construct
  REGION 1..10: note = Cytoplasmic dynein 2 heavy chain 1 (42-51)
FLDDGNQMLL

SEQ ID NO: 13825 - protein, 9 aa, synthetic construct
  REGION 1..9: note = Thimet oligopeptidase (294-302)
FLDELAQKL

SEQ ID NO: 13826 - protein, 9 aa, synthetic construct
  REGION 1..9: note = Regulatory-associated protein of mTOR (240-248)
FLDLGPWAV

SEQ ID NO: 13827 - protein, 9 aa, synthetic construct
  REGION 1..9: note = Protein FAM83H (343-351)
FLDPDRHFL

SEQ ID NO: 13828 - protein, 10 aa, synthetic construct
  REGION 1..10: note = CAD protein (150-159)
FLDPNARPLV

SEQ ID NO: 13829 - protein, 9 aa, synthetic construct
  REGION 1..9: note = DDB1- and CUL4-associated factor 12 (303-311)
FLDPRQPSY

SEQ ID NO: 13830 - protein, 9 aa, synthetic construct
  REGION 1..9: note = Desmoplakin (1057-1065)
FLDQNLQKY

SEQ ID NO: 13831 - protein, 10 aa, synthetic construct
  REGION 1..10: note = Basic leucine zipper and W2 domain-containing protein 2 (51-60)
FLDSTGSRLD

SEQ ID NO: 13832 - protein, 9 aa, synthetic construct
  REGION 1..9: note = Exportin-1 (1034-1042)
FLEEREIAL

SEQ ID NO: 13833 - protein, 10 aa, synthetic construct
  REGION 1..10: note = Creatine kinase M-type (192-201)
FLFDKPVSPL

SEQ ID NO: 13834 - protein, 9 aa, synthetic construct
  REGION 1..9: note = Ras-related GTP-binding protein C (226-234)
FLFDVVSKI

SEQ ID NO: 13835 - protein, 11 aa, synthetic construct
  REGION 1..11: note = Nestin (43-53)
FLFPGTENQEL

SEQ ID NO: 13836 - protein, 11 aa, synthetic construct
  REGION 1..11: note = Unconventional myosin-Ib (362-372)
FLFSSDHLIEM

SEQ ID NO: 13837 - protein, 11 aa, synthetic construct
  REGION 1..11: note = Glycogen phosphorylase, liver form (525-535)
FLGDDVFLREL

SEQ ID NO: 13838 - protein, 9 aa, synthetic construct
  REGION 1..9: note = Lysosomal alpha-glucosidase (139-147)
FLGPEPKSV

SEQ ID NO: 13839 - protein, 9 aa, synthetic construct
  REGION 1..9: note = Sterol regulatory element-binding protein 1 (1036-1044)
FLHEATARL

SEQ ID NO: 13840 - protein, 9 aa, synthetic construct
  REGION 1..9: note = DNA-dependent protein kinase catalytic subunit (319-327)
FLKQVSNMV

SEQ ID NO: 13841 - protein, 9 aa, synthetic construct
  REGION 1..9: note = ADP-ribosylation factor-binding protein GGA1 (90-98)
FLNELIKVV

SEQ ID NO: 13842 - protein, 9 aa, synthetic construct
  REGION 1..9: note = CDK5 regulatory subunit-associated protein 2 (1316-1324)
FLNGKSVGV

SEQ ID NO: 13843 - protein, 9 aa, synthetic construct
  REGION 1..9: note = Nestin (377-385)
FLQARTPTL

SEQ ID NO: 13844 - protein, 9 aa, synthetic construct
  REGION 1..9: note = Plectin (2481-2489)
FLSEKDSLL

SEQ ID NO: 13845 - protein, 9 aa, synthetic construct
  REGION 1..9: note = Hemoglobin subunit alpha (5-13)
FLSFPTTKT

SEQ ID NO: 13846 - protein, 9 aa, synthetic construct
  REGION 1..9: note = DDRGK domain-containing protein 1 (215-223)
FLTEFINYI

SEQ ID NO: 13847 - protein, 9 aa, synthetic construct
  REGION 1..9: note = Elongation factor 1-gamma (69-77)
FLVGERVTL

SEQ ID NO: 13848 - protein, 12 aa, synthetic construct
  REGION 1..12: note = Laminin subunit alpha-1 (2178-2189)
FLWDLGSGSTRL

SEQ ID NO: 13849 - protein, 9 aa, synthetic construct
  REGION 1..9: note = Upstream stimulatory factor 1 (42-50)
FPDPNVKYV

SEQ ID NO: 13850 - protein, 9 aa, synthetic construct
  REGION 1..9: note = Deubiquitinating protein VCIP135 (505-513)
FPHLPGKTF

SEQ ID NO: 13851 - protein, 9 aa, synthetic construct
  REGION 1..9: note = Putative helicase MOV-10 (232-240)
FPIDHFTHI

SEQ ID NO: 13852 - protein, 9 aa, synthetic construct
  REGION 1..9: note = NEDD4 family-interacting protein 1 (61-69)
FPKPPSYNV

SEQ ID NO: 13853 - protein, 9 aa, synthetic construct
  REGION 1..9: note = Vacuolar fusion protein CCZ1 homolog (254-262)
FPRHIEPEL

SEQ ID NO: 13854 - protein, 8 aa, synthetic construct
  REGION 1..8: note = Retinoblastoma-binding protein 5 (81-88)
FPSPILKV

SEQ ID NO: 13855 - protein, 9 aa, synthetic construct
  REGION 1..9: note = DNA polymerase alpha catalytic subunit (594-602)
FPYAFKEVI

SEQ ID NO: 13856 - protein, 8 aa, synthetic construct
  REGION 1..8: note = HEAT repeat-containing protein 1 (243-250)
FPYIQKGL

SEQ ID NO: 13857 - protein, 9 aa, synthetic construct
  REGION 1..9: note = Reticulocalbin-3 (52-60)
FQYDHEAFL

SEQ ID NO: 13858 - protein, 10 aa, synthetic construct
  REGION 1..10: note = Short transient receptor potential channel 4-associated protein (457-466)
FSDHHENKYL

SEQ ID NO: 13859 - protein, 9 aa, synthetic construct
  REGION 1..9: note = Phosphoinositide 3-kinase regulatory subunit 4 (20-28)
FSDIHDFEY

SEQ ID NO: 13860 - protein, 9 aa, synthetic construct
  REGION 1..9: note = Serine/threonine-protein kinase N2 (754-762)
FSEPRAVFY

SEQ ID NO: 13861 - protein, 11 aa, synthetic construct
  REGION 1..11: note = Low-density lipoprotein receptor-related protein 4 (36-46)
FTDPGMGNLTY

SEQ ID NO: 13862 - protein, 9 aa, synthetic construct
  REGION 1..9: note = PR domain zinc finger protein 10 (81-89)
FTDPGQVAY

SEQ ID NO: 13863 - protein, 9 aa, synthetic construct
  REGION 1..9: note = Unconventional myosin-Ib (229-237)
FTDQQKLIY

SEQ ID NO: 13864 - protein, 11 aa, synthetic construct
  REGION 1..11: note = Glutathione S-transferase Mu 3 (27-37)
FTDTSYEEKRY

SEQ ID NO: 13865 - protein, 9 aa, synthetic construct
  REGION 1..9: note = Ribosomal protein S6 kinase alpha-5 (149-157)
FTEHEVQIY

SEQ ID NO: 13866 - protein, 10 aa, synthetic construct
  REGION 1..10: note = Unconventional myosin-Ib (526-535)
FVDKNNDLLY

SEQ ID NO: 13867 - protein, 9 aa, synthetic construct
  REGION 1..9: note = Heat shock 70 kDa protein 4 (200-208)
FVDMGHSAY

SEQ ID NO: 13868 - protein, 9 aa, synthetic construct
  REGION 1..9: note = Talin-1 (1850-1858)
FVDYQTTMV

SEQ ID NO: 13869 - protein, 11 aa, synthetic construct
  REGION 1..11: note = Trafficking protein particle complex subunit 3 (115-125)
FVELPDNHSSL

SEQ ID NO: 13870 - protein, 9 aa, synthetic construct
  REGION 1..9: note = Serine/threonine-protein kinase Nek6 (272-280)
FYGDKMNLF

SEQ ID NO: 13871 - protein, 9 aa, synthetic construct
  REGION 1..9: note = Myotubularin-related protein 5 (454-462)
FYGDVQTHI

SEQ ID NO: 13872 - protein, 9 aa, synthetic construct
  REGION 1..9: note = Protein CLEC16A (161-169)
FYNEHTNDF

SEQ ID NO: 13873 - protein, 9 aa, synthetic construct
  REGION 1..9: note = Fanconi anemia group I protein (922-930)
FYQPKIQQF

SEQ ID NO: 13874 - protein, 10 aa, synthetic construct
  REGION 1..10: note = Heat shock 70 kDa protein 1-like (295-304)
FYTSITRARF

SEQ ID NO: 13875 - protein, 9 aa, synthetic construct
  REGION 1..9: note = Little elongation complex subunit 2 (213-221)
FYVGHIDAF

SEQ ID NO: 13876 - protein, 9 aa, synthetic construct
  REGION 1..9: note = E3 ubiquitin-protein ligase MARCH6 (231-239)
GLDGSLVFL

SEQ ID NO: 13877 - protein, 9 aa, synthetic construct
  REGION 1..9: note = Malate dehydrogenase, mitochondrial (144-152)
GLDPARVNV

SEQ ID NO: 13878 - protein, 9 aa, synthetic construct
  REGION 1..9: note = Asparagine synthetase (glutamine-hydrolyzing) (177-185)
GLDSSLVAA

SEQ ID NO: 13879 - protein, 11 aa, synthetic construct
  REGION 1..11: note = DNA damage-binding protein 1 (996-1006)
GLFHLGEFVNV

SEQ ID NO: 13880 - protein, 10 aa, synthetic construct
  REGION 1..10: note = Importin-9 (119-128)
GLHETQPPSV

SEQ ID NO: 13881 - protein, 9 aa, synthetic construct
  REGION 1..9: note = HEAT repeat-containing protein 5A (449-457)
GLLDSILSV

SEQ ID NO: 13882 - protein, 9 aa, synthetic construct
  REGION 1..9: note = HEAT repeat-containing protein 5B (445-453)
GLLEIVTSV

SEQ ID NO: 13883 - protein, 10 aa, synthetic construct
  REGION 1..10: note = Zinc transporter SLC39A7 (454-463)
GLLGGVIMMV

SEQ ID NO: 13884 - protein, 11 aa, synthetic construct
  REGION 1..11: note = Protein SON (535-545)
GLLGQPEATMV

SEQ ID NO: 13885 - protein, 9 aa, synthetic construct
  REGION 1..9: note = Nestin (273-281)
GLQSQIAQV

SEQ ID NO: 13886 - protein, 9 aa, synthetic construct
  REGION 1..9: note = Armadillo repeat containing 8, isoform CRA_g (325-333)
GLSESSVKV

SEQ ID NO: 13887 - protein, 9 aa, synthetic construct
  REGION 1..9: note = Eukaryotic translation initiation factor 3 subunit F (252-260)
GLSSDLQQV

SEQ ID NO: 13888 - protein, 9 aa, synthetic construct
  REGION 1..9: note = Bifunctional glutamate/proline-tRNA ligase (1274-1282)
GLTTRTIGV

SEQ ID NO: 13889 - protein, 9 aa, synthetic construct
  REGION 1..9: note = Glyceraldehyde-3-phosphate dehydrogenase (230-238)
GMAFRVPTA

SEQ ID NO: 13890 - protein, 9 aa, synthetic construct
  REGION 1..9: note = WD repeat-containing protein 19 (311-319)
GPDELRPML

SEQ ID NO: 13891 - protein, 9 aa, synthetic construct
  REGION 1..9: note = Uncharacterized protein KIAA0355 (842-850)
GSDPEFARY

SEQ ID NO: 13892 - protein, 9 aa, synthetic construct
  REGION 1..9: note = Extended synaptotagmin-2 (388-396)
GSDPYVRMY

SEQ ID NO: 13893 - protein, 12 aa, synthetic construct
  REGION 1..12: note = YY1-associated protein 1 (203-214)
GTEFLNPLISKY

SEQ ID NO: 13894 - protein, 11 aa, synthetic construct
  REGION 1..11: note = Clustered mitochondria protein homolog (777-787)
GTEHPNTIQEY

SEQ ID NO: 13895 - protein, 11 aa, synthetic construct
  REGION 1..11: note = Nucleolin (451-461)
GTEIDGRSISL

SEQ ID NO: 13896 - protein, 9 aa, synthetic construct
  REGION 1..9: note = DNA-dependent protein kinase catalytic subunit (1480-1488)
GTELLSLVY

SEQ ID NO: 13897 - protein, 9 aa, synthetic construct
  REGION 1..9: note = Pecanex-like protein 3 (789-797)
GVLENIFGV

SEQ ID NO: 13898 - protein, 11 aa, synthetic construct
  REGION 1..11: note = Ubiquitin-like protein 7 (158-168)
GVLQDKDLFSV

SEQ ID NO: 13899 - protein, 9 aa, synthetic construct
  REGION 1..9: note = Polypyrimidine tract-binding protein 2 (308-316)
GVYGDVQRV

SEQ ID NO: 13900 - protein, 11 aa, synthetic construct
  REGION 1..11: note = Caseinolytic peptidase B protein homolog (337-347)
GWYDEEHPLVF

SEQ ID NO: 13901 - protein, 9 aa, synthetic construct
  REGION 1..9: note = Signal recognition particle subunit SRP68 (586-594)
GYIKGIFGF

SEQ ID NO: 13902 - protein, 9 aa, synthetic construct
  REGION 1..9: note = Hypoxanthine-guanine phosphoribosyltransferase (173-181)
GYKPDFVGF

SEQ ID NO: 13903 - protein, 9 aa, synthetic construct
  REGION 1..9: note = GMP reductase 2 (151-159)
GYSEHFVEF

SEQ ID NO: 13904 - protein, 9 aa, synthetic construct
  REGION 1..9: note = Lysine-specific histone demethylase 1B (77-85)
GYTSRWYHL

SEQ ID NO: 13905 - protein, 10 aa, synthetic construct
  REGION 1..10: note = ATP-binding cassette sub-family E member 1 (315-324)
GYVPTENLRF

SEQ ID NO: 13906 - protein, 9 aa, synthetic construct
  REGION 1..9: note = Ankyrin repeat domain-containing protein 17 (2149-2157)
HAFWGGSVV

SEQ ID NO: 13907 - protein, 9 aa, synthetic construct
  REGION 1..9: note = CCR4-NOT transcription complex subunit 1 (1619-1627)
HAIPPTLAM

SEQ ID NO: 13908 - protein, 9 aa, synthetic construct
  REGION 1..9: note = Syntaxin-binding protein 1 (295-303)
HIAEVSQEV

SEQ ID NO: 13909 - protein, 9 aa, synthetic construct
  REGION 1..9: note Dolichyl-diphosphooligosaccharide-proteinosyltransferase subunit 1 (45-53)
HLAKVTAEV

SEQ ID NO: 13910 - protein, 9 aa, synthetic construct
  REGION 1..9: note = ATP-binding cassette sub-family F member 1 (520-528)
HLDAQRLHY

SEQ ID NO: 13911 - protein, 9 aa, synthetic construct
  REGION 1..9: note = T-complex protein 1 subunit epsilon (147-155)
HLDKISDSV

SEQ ID NO: 13912 - protein, 10 aa, synthetic construct
  REGION 1..10: note = Pre-mRNA-processing-splicing factor 8 (1875-1884)
HLLDFPNIVI

SEQ ID NO: 13913 - protein, 9 aa, synthetic construct
  REGION 1..9: note = Polypyrimidine tract-binding protein 3 (383-391)
HLSNIPPSV

SEQ ID NO: 13914 - protein, 9 aa, synthetic construct
  REGION 1..9: note = Integrator complex subunit 4 (10-18)
HLTDTSHGV

SEQ ID NO: 13915 - protein, 9 aa, synthetic construct
  REGION 1..9: note = Clathrin heavy chain 1 (1356-1364)
HLWAELVFL

SEQ ID NO: 13916 - protein, 12 aa, synthetic construct
  REGION 1..12: note = LanC-like protein 1 (74-85)
HLYDVFGDPAYL

SEQ ID NO: 13917 - protein, 9 aa, synthetic construct
  REGION 1..9: note = U3 small nucleolar RNA-associated protein 6 homolog (267-275)
HTDDPLTWD

SEQ ID NO: 13918 - protein, 9 aa, synthetic construct
  REGION 1..9: note = Ras GTPase-activating-like protein IQGAP3 (1072-1080)
HTDPVHLYK

SEQ ID NO: 13919 - protein, 10 aa, synthetic construct
  REGION 1..10: note = Receptor-type tyrosine-protein phosphatase F (1334-1343)
HTEVPARNLY

SEQ ID NO: 13920 - protein, 9 aa, synthetic construct
  REGION 1..9: note = Non-specific lipid-transfer protein (143-151)
HVDLLINKY

SEQ ID NO: 13921 - protein, 9 aa, synthetic construct
  REGION 1..9: note = Rhophilin-2 (351-359)
HYAALAHYF

SEQ ID NO: 13922 - protein, 9 aa, synthetic construct
  REGION 1..9: note = Heat shock protein 105 kDa (739-747)
HYAKIAADF

SEQ ID NO: 13923 - protein, 10 aa, synthetic construct
  REGION 1..10: note = Eukaryotic translation initiation factor 3 subunit I (312-321)
HYFDPQYFEF

SEQ ID NO: 13924 - protein, 10 aa, synthetic construct
  REGION 1..10: note = General transcription factor 3C polypeptide 2 (687-696)
HYIDAGYLGF

SEQ ID NO: 13925 - protein, 9 aa, synthetic construct
  REGION 1..9: note = Centrosomal protein of 192 kDa (2495-2503)
HYINMPVQF

SEQ ID NO: 13926 - protein, 9 aa, synthetic construct
  REGION 1..9: note = Tubulin gamma-1 chain (59-67)
HYIPRAVLL

SEQ ID NO: 13927 - protein, 9 aa, synthetic construct
  REGION 1..9: note = Structural maintenance of chromosomes protein 4 (1123-1131)
HYKPTPLYF

SEQ ID NO: 13928 - protein, 9 aa, synthetic construct
  REGION 1..9: note = Rho GTPase-activating protein 5 (207-215)
HYLREVQAF

SEQ ID NO: 13929 - protein, 10 aa, synthetic construct
  REGION 1..10: note = E3 ubiquitin-protein ligase Arkadia (644-653)
HYMPPPYASL

SEQ ID NO: 13930 - protein, 11 aa, synthetic construct
  REGION 1..11: note = Rho-related BTB domain-containing protein 3 (239-249)
HYNSDLNNLLF

SEQ ID NO: 13931 - protein, 9 aa, synthetic construct
  REGION 1..9: note = DNA mismatch repair protein Msh6 (458-466)
HYPPVQVLF

SEQ ID NO: 13932 - protein, 9 aa, synthetic construct
  REGION 1..9: note = Dedicator of cytokinesis protein 5 (968-976)
HYSHYISTF

SEQ ID NO: 13933 - protein, 9 aa, synthetic construct
  REGION 1..9: note = Dynein heavy chain 14, axonemal (48-56)
IAEKETLEY

SEQ ID NO: 13934 - protein, 9 aa, synthetic construct
  REGION 1..9: note = Inositol 1,4,5-trisphosphate receptor type 1 (2578-2586)
IFGVIIDTF

SEQ ID NO: 13935 - protein, 9 aa, synthetic construct
  REGION 1..9: note = U5 small nuclear ribonucleoprotein 40 kDa protein (217-225)
IFQGNVHNF

SEQ ID NO: 13936 - protein, 9 aa, synthetic construct
  REGION 1..9: note = Progesterone-induced-blocking factor 1 (734-742)
IFTPKPTLF

SEQ ID NO: 13937 - protein, 9 aa, synthetic construct
  REGION 1..9: note = Phosphoserine aminotransferase (281-289)
IIDNSQGFY

SEQ ID NO: 13938 - protein, 10 aa, synthetic construct
  REGION 1..10: note = Vesicle-associated membrane protein-associated protein A (60-69)
IIDPGSTVTV

SEQ ID NO: 13939 - protein, 9 aa, synthetic construct
  REGION 1..9: note = T-complex protein 1 subunit gamma (100-108)
ILAGEMLSV

SEQ ID NO: 13940 - protein, 12 aa, synthetic construct
  REGION 1..12: note = Adenosylhomocysteinase 2 (196-207)
ILDDGGDLTHWV

SEQ ID NO: 13941 - protein, 9 aa, synthetic construct
  REGION 1..9: note = Disabled homolog 2 (198-206)
ILDDQTNKL

SEQ ID NO: 13942 - protein, 9 aa, synthetic construct
  REGION 1..9: note = Switch-associated protein 70 (208-216)
ILDVLKQGY

SEQ ID NO: 13943 - protein, 9 aa, synthetic construct
  REGION 1..9: note = Protein SCAF8 (864-872)
ILGGQPPNV

SEQ ID NO: 13944 - protein, 9 aa, synthetic construct
  REGION 1..9: note = Prolow-density lipoprotein receptor-related protein 1 (596-604)
ILKDGIHNV

SEQ ID NO: 13945 - protein, 9 aa, synthetic construct
  REGION 1..9: note = Nucleoprotein TPR (616-624)
ILLSQTTGV

SEQ ID NO: 13946 - protein, 10 aa, synthetic construct
  REGION 1..10: note = Noelin (14-23)
ILMGTELTQV

SEQ ID NO: 13947 - protein, 10 aa, synthetic construct
  REGION 1..10: note = ATP-citrate synthase (1022-1031)
ILNVDGLIGV

SEQ ID NO: 13948 - protein, 10 aa, synthetic construct
  REGION 1..10: note = D-3-phosphoglycerate dehydrogenase (22-31)
ILQDGGLQVV

SEQ ID NO: 13949 - protein, 9 aa, synthetic construct
  REGION 1..9: note = Poly (ADP-ribose) polymerase 1 (477-485)
ILSPWGAEV

SEQ ID NO: 13950 - protein, 11 aa, synthetic construct
  REGION 1..11: note = Heat shock-related 70 kDa protein 2 (212-222)
ILTIEDGIFEV

SEQ ID NO: 13951 - protein, 11 aa, synthetic construct
  REGION 1..11: note = Proteasome subunit alpha type-2 (46-56)
ILYDERSVHKV

SEQ ID NO: 13952 - protein, 10 aa, synthetic construct
  REGION 1..10: note = Elongation factor 2 (203-212)
IMIDPVLGTV

SEQ ID NO: 13953 - protein, 9 aa, synthetic construct
  REGION 1..9: note = Gem-associated protein 4 (471-479)
IPESQIRQV

SEQ ID NO: 13954 - protein, 9 aa, synthetic construct
  REGION 1..9: note = Serine/threonine-protein kinase 24 (212-220)
IPKNNPPTL

SEQ ID NO: 13955 - protein, 9 aa, synthetic construct
  REGION 1..9: note = Cathepsin D (24-32)
IPLHKFTSI

SEQ ID NO: 13956 - protein, 8 aa, synthetic construct
  REGION 1..8: note = ATP-binding cassette sub-family F member 2 (391-398)
IPPPVIMV

SEQ ID NO: 13957 - protein, 9 aa, synthetic construct
  REGION 1..9: note = Serine protease HTRA1 (3-11)
IPRAALLPL

SEQ ID NO: 13958 - protein, 10 aa, synthetic construct
  REGION 1..10: note = Serine protease HTRA1 (3-12)
IPRAALLPLL

SEQ ID NO: 13959 - protein, 8 aa, synthetic construct
  REGION 1..8: note = Lysine-specific demethylase 5D (1030-1037)
IPVHLPNI

SEQ ID NO: 13960 - protein, 8 aa, synthetic construct
  REGION 1..8: note = Pre-mRNA-processing-splicing factor 8 (724-731)
IPWKVPGL

SEQ ID NO: 13961 - protein, 8 aa, synthetic construct
  REGION 1..8: note = Serine-tRNA ligase, cytoplasmic (357-364)
IPYHIVNI

SEQ ID NO: 13962 - protein, 8 aa, synthetic construct
  REGION 1..8: note = T-complex protein 1 subunit gamma (296-303)
ISDLAQHY

SEQ ID NO: 13963 - protein, 9 aa, synthetic construct
  REGION 1..9: note = 39S ribosomal protein L12, mitochondrial (79-87)
ISDLNELLK

SEQ ID NO: 13964 - protein, 9 aa, synthetic construct
  REGION 1..9: note = Junction plakoglobin (651-659)
ISEDKNPDY

SEQ ID NO: 13965 - protein, 10 aa, synthetic construct
  REGION 1..10: note = ATP-citrate synthase (6-15)
ISEQTGKELL

SEQ ID NO: 13966 - protein, 10 aa, synthetic construct
  REGION 1..10: note = Peptidyl-prolyl cis-trans isomerase FKBP9 (274-283)
ISQSGDFLRY

SEQ ID NO: 13967 - protein, 8 aa, synthetic construct
  REGION 1..8: note = Staphylococcal nuclease domain-containing protein 1 (665-672)
ITDDLHFY

SEQ ID NO: 13968 - protein, 9 aa, synthetic construct
  REGION 1..9: note = E3 ubiquitin-protein ligase TRIM21 (423-431)
ITDHGSLIY

SEQ ID NO: 13969 - protein, 11 aa, synthetic construct
  REGION 1..11: note = 5-oxoprolinase (1145-1155)
ITDPEILESRY

SEQ ID NO: 13970 - protein, 10 aa, synthetic construct
  REGION 1..10: note = Wee1-like protein kinase (72-81)
ITESNMKSRY

SEQ ID NO: 13971 - protein, 9 aa, synthetic construct
  REGION 1..9: note = Interleukin enhancer-binding factor 2 (89-97)
IVAPGTFEV

SEQ ID NO: 13972 - protein, 9 aa, synthetic construct
  REGION 1..9: note = Pre-mRNA-processing-splicing factor 8 (1000-1008)
IVDHNIADY

SEQ ID NO: 13973 - protein, 9 aa, synthetic construct
  REGION 1..9: note = EKC/KEOPS complex subunit TPRKB (48-56)
IVDPFQILV

SEQ ID NO: 13974 - protein, 10 aa, synthetic construct
  REGION 1..10: note = Hydroxyacylglutathione hydrolase, mitochondrial (27-36)
IVDPVQPQKV

SEQ ID NO: 13975 - protein, 13 aa, synthetic construct
  REGION 1..13: note = POTE ankyrin domain family member F (851-863)
IVMDSGDGVTHTV

SEQ ID NO: 13976 - protein, 10 aa, synthetic construct
  REGION 1..10: note = Beta-secretase 2 (263-272)
IWYTPIKEEW

SEQ ID NO: 13977 - protein, 9 aa, synthetic construct
  REGION 1..9: note = Solute carrier family 12 member 4 (260-268)
IYAGGIKSI

SEQ ID NO: 13978 - protein, 11 aa, synthetic construct
  REGION 1..11: note = 1-phosphatidylinositol 4,5-bisphosphate phosphodiesterase gamma-2 (1124-1134)
IYDPNLAFLRF

SEQ ID NO: 13979 - protein, 10 aa, synthetic construct
  REGION 1..10: note = Cullin-4B (579-588)
IYGKDVFEAF

SEQ ID NO: 13980 - protein, 9 aa, synthetic construct
  REGION 1..9: note = ATP-dependent zinc metalloprotease YME1L1 (305-313)
IYGLLKNPF

SEQ ID NO: 13981 - protein, 9 aa, synthetic construct
  REGION 1..9: note = Protein transport protein Sec31A (147-155)
IYIWDLNNF

SEQ ID NO: 13982 - protein, 9 aa, synthetic construct
  REGION 1..9: note = USP6 N-terminal-like protein (97-105)
IYKGIPLQL

SEQ ID NO: 13983 - protein, 9 aa, synthetic construct
  REGION 1..9: note = Plectin (1069-1077)
IYLEKLKTI

SEQ ID NO: 13984 - protein, 9 aa, synthetic construct
  REGION 1..9: note = Tumor susceptibility gene 101 protein (109-117)
IYLPYLHEW

SEQ ID NO: 13985 - protein, 9 aa, synthetic construct
  REGION 1..9: note = Ubiquitin-conjugating enzyme E2 variant 3 (109-117)
IYLPYLQNW

SEQ ID NO: 13986 - protein, 9 aa, synthetic construct
  REGION 1..9: note = Collagen alpha-1(XV) chain (1157-1165)
IYLRDSTEF

SEQ ID NO: 13987 - protein, 9 aa, synthetic construct
  REGION 1..9: note = Disks large homolog 1 (868-876)
IYNQVKQII

SEQ ID NO: 13988 - protein, 11 aa, synthetic construct
  REGION 1..11: note = Nuclear fragile X mental retardation-interacting protein 2 (473-483)
IYPSNMQTMLL

SEQ ID NO: 13989 - protein, 10 aa, synthetic construct
  REGION 1..10: note = Pre-mRNA-processing-splicing factor 8 (1694-1703)
IYPSPTGVLI

SEQ ID NO: 13990 - protein, 10 aa, synthetic construct
  REGION 1..10: note = 5'-3' exoribonuclease 1 (610-619)
IYPSPWPEKF

SEQ ID NO: 13991 - protein, 9 aa, synthetic construct
  REGION 1..9: note = Protein unc-119 homolog B (91-99)
IYSIDFTRF

SEQ ID NO: 13992 - protein, 8 aa, synthetic construct
  REGION 1..8: note = Serine-protein kinase ATM (121-128)
IYTLIHYI

SEQ ID NO: 13993 - protein, 9 aa, synthetic construct
  REGION 1..9: note = Exocyst complex component 6B (648-656)
IYTNLNQKI

SEQ ID NO: 13994 - protein, 9 aa, synthetic construct
  REGION 1..9: note = Aminoacylase-1 (390-398)
IYTRLLPAL

SEQ ID NO: 13995 - protein, 9 aa, synthetic construct
  REGION 1..9: note = Kelch domain-containing protein 7B (353-361)
IYVTGGHLF

SEQ ID NO: 13996 - protein, 10 aa, synthetic construct
  REGION 1..10: note = RNA polymerase I-specific transcription initiation factor RRN3 (572-581)
KFIDPIYQVW

SEQ ID NO: 13997 - protein, 10 aa, synthetic construct
  REGION 1..10: note = Ubiquitin carboxyl-terminal hydrolase 8 (551-560)
KFLDPITGTF

SEQ ID NO: 13998 - protein, 9 aa, synthetic construct
  REGION 1..9: note = pre-rRNA processing protein FTSJ3 (64-72)
KFMPVSSLI

SEQ ID NO: 13999 - protein, 9 aa, synthetic construct
  REGION 1..9: note = M-phase inducer phosphatase 2 (349-357)
KFSNIVDKF

SEQ ID NO: 14000 - protein, 9 aa, synthetic construct
  REGION 1..9: note = Mitotic checkpoint protein BUB3 (21-29)
KFSPNTSQF

SEQ ID NO: 14001 - protein, 9 aa, synthetic construct
  REGION 1..9: note = Protein SCAF11 (1039-1047)
KLAESKVSV

SEQ ID NO: 14002 - protein, 9 aa, synthetic construct
  REGION 1..9: note = Neuroblast differentiation-associated protein AHNAK (2352-2360)
KLDADMPEV

SEQ ID NO: 14003 - protein, 9 aa, synthetic construct
  REGION 1..9: note = Ryanodine receptor 1 (3709-3717)
KLDEDYLYM

SEQ ID NO: 14004 - protein, 10 aa, synthetic construct
  REGION 1..10: note = Nucleobindin-1 (98-107)
KLDELKRQEV

SEQ ID NO: 14005 - protein, 9 aa, synthetic construct
  REGION 1..9: note = Spectrin alpha chain, non-erythrocytic 1 (201-209)
KLDENSAFL

SEQ ID NO: 14006 - protein, 9 aa, synthetic construct
  REGION 1..9: note = Striatin-3 (767-775)
KLDESIYDV

SEQ ID NO: 14007 - protein, 9 aa, synthetic construct
  REGION 1..9: note = DNA topoisomerase 2-alpha (278-286)
KLDETGNSL

SEQ ID NO: 14008 - protein, 9 aa, synthetic construct
  REGION 1..9: note = Eukaryotic initiation factor 4A-III (152-160)
KLDYGQHVV

SEQ ID NO: 14009 - protein, 9 aa, synthetic construct
  REGION 1..9: note = HEAT repeat-containing protein 2 (624-632)
KLFSILSTV

SEQ ID NO: 14010 - protein, 9 aa, synthetic construct
  REGION 1..9: note = Helicase-like transcription factor (170-178)
KLGPAPKTL

SEQ ID NO: 14011 - protein, 9 aa, synthetic construct
  REGION 1..9: note = Serine/threonine-protein kinase ULK4 (46-54)
KLIPLIFEV

SEQ ID NO: 14012 - protein, 11 aa, synthetic construct
  REGION 1..11: note = GTP-binding protein Rheb (102-112)
KLLDMVGKVQI

SEQ ID NO: 14013 - protein, 9 aa, synthetic construct
  REGION 1..9: note = Probable E3 ubiquitin-protein ligase HERC3 (474-482)
KLLEKLYKV

SEQ ID NO: 14014 - protein, 10 aa, synthetic construct
  REGION 1..10: note = Dedicator of cytokinesis protein 1 (386-395)
KLLPGDIHQI

SEQ ID NO: 14015 - protein, 9 aa, synthetic construct
  REGION 1..9: note = Adenosylhomocysteinase 2 (47-55)
KLNEVIRQV

SEQ ID NO: 14016 - protein, 9 aa, synthetic construct
  REGION 1..9: note = V-type proton ATPase catalytic subunit A (220-228)
KLPANHPLL

SEQ ID NO: 14017 - protein, 9 aa, synthetic construct
  REGION 1..9: note = Proline-rich protein 11 (128-136)
KLQEALKTI

SEQ ID NO: 14018 - protein, 9 aa, synthetic construct
  REGION 1..9: note = Serine/threonine-protein kinase MRCK alpha (461-469)
KLQESTQTV

SEQ ID NO: 14019 - protein, 10 aa, synthetic construct
  REGION 1..10: note = Integrin alpha-V (338-347)
KLQEVGQVSV

SEQ ID NO: 14020 - protein, 11 aa, synthetic construct
  REGION 1..11: note = 78 kDa glucose-regulated protein (2-12)
KLSLVAAMLLL

SEQ ID NO: 14021 - protein, 9 aa, synthetic construct
  REGION 1..9: note = Serum albumin (257-265)
KLVTDLTKV

SEQ ID NO: 14022 - protein, 9 aa, synthetic construct
  REGION 1..9: note = Zinc finger and BTB domain-containing protein 38 (661-669)
KMDLDNNFY

SEQ ID NO: 14023 - protein, 9 aa, synthetic construct
  REGION 1..9: note = Sister chromatid cohesion protein PDS5 homolog B (1060-1068)
KMNEKLYTV

SEQ ID NO: 14024 - protein, 9 aa, synthetic construct
  REGION 1..9: note = Nucleophosmin (250-258)
KMQASIEKA

SEQ ID NO: 14025 - protein, 12 aa, synthetic construct
  REGION 1..12: note = Breast cancer anti-estrogen resistance protein 1 (335-346)
KPFDPARTPLVL

SEQ ID NO: 14026 - protein, 9 aa, synthetic construct
  REGION 1..9: note = Poly (ADP-ribose) polymerase 1 (388-396)
KPLSNMKIL

SEQ ID NO: 14027 - protein, 9 aa, synthetic construct
  REGION 1..9: note = Vitamin K-dependent protein S (29-37)
KQQASQVLV

SEQ ID NO: 14028 - protein, 9 aa, synthetic construct
  REGION 1..9: note = POZ-, AT hook-, and zinc finger-containing protein 1 (157-165)
KQSNVQILV

SEQ ID NO: 14029 - protein, 9 aa, synthetic construct
  REGION 1..9: note = Probable global transcription activator SNF2L1 (37-45)
KQTELFAHF

SEQ ID NO: 14030 - protein, 9 aa, synthetic construct
  REGION 1..9: note = Probable ATP-dependent RNA helicase DDX5 (451-459)
KQVSDLISV

SEQ ID NO: 14031 - protein, 12 aa, synthetic construct
  REGION 1..12: note = Myosin-10 (296-307)
KSDLLLEGFNNY

SEQ ID NO: 14032 - protein, 9 aa, synthetic construct
  REGION 1..9: note = Importin-11 (549-557)
KSDLRPMLY

SEQ ID NO: 14033 - protein, 10 aa, synthetic construct
  REGION 1..10: note = Hepatocyte growth factor receptor (32-41)
KSEMNVNMKY

SEQ ID NO: 14034 - protein, 9 aa, synthetic construct
  REGION 1..9: note = Leucine-rich repeat-containing protein 42 (68-76)
KTDHFIFTY

SEQ ID NO: 14035 - protein, 11 aa, synthetic construct
  REGION 1..11: note = AMP deaminase 2 (106-116)
KTDSDSDLQLY

SEQ ID NO: 14036 - protein, 9 aa, synthetic construct
  REGION 1..9: note = pre-rRNA processing protein FTSJ3 (466-474)
KTEIMSPLY

SEQ ID NO: 14037 - protein, 9 aa, synthetic construct
  REGION 1..9: note = Fanconi anemia group I protein (402-410)
KTIETSPSL

SEQ ID NO: 14038 - protein, 13 aa, synthetic construct
  REGION 1..13: note = Tubulin alpha-1C chain (5-17)
KTIGGGDDSFNTF

SEQ ID NO: 14039 - protein, 12 aa, synthetic construct
  REGION 1..12: note = Calnexin (227-238)
KTYFTDKKTHLY

SEQ ID NO: 14040 - protein, 9 aa, synthetic construct
  REGION 1..9: note = General transcription factor 3C polypeptide 1 (135-143)
KVDAGKLHY

SEQ ID NO: 14041 - protein, 11 aa, synthetic construct
  REGION 1..11: note = Protein phosphatase Slingshot homolog 3 (281-291)
KVLDVSDLESV

SEQ ID NO: 14042 - protein, 9 aa, synthetic construct
  REGION 1..9: note = HEAT repeat-containing protein 5A (1475-1483)
KVLETLVTV

SEQ ID NO: 14043 - protein, 10 aa, synthetic construct
  REGION 1..10: note = DNA-directed RNA polymerase II subunit RPB3 (175-184)
KWNPTAGVAF

SEQ ID NO: 14044 - protein, 9 aa, synthetic construct
  REGION 1..9: note = UDP-glucose:glycoprotein glucosyltransferase 2 (42-50)
KWPETPLLL

SEQ ID NO: 14045 - protein, 9 aa, synthetic construct
  REGION 1..9: note = Serine/threonine-protein kinase PLK3 (427-435)
KWVDYSNKF

SEQ ID NO: 14046 - protein, 9 aa, synthetic construct
  REGION 1..9: note = Integrin alpha-V (188-196)
KYDPNVYSI

SEQ ID NO: 14047 - protein, 9 aa, synthetic construct
  REGION 1..9: note = Kinesin-like protein KIF7 (588-596)
KYFDKVVTL

SEQ ID NO: 14048 - protein, 9 aa, synthetic construct
  REGION 1..9: note = Putative deoxyribonuclease TATDN1 (130-138)
KYFEKQFEL

SEQ ID NO: 14049 - protein, 11 aa, synthetic construct
  REGION 1..11: note = BTB/POZ domain-containing protein 3 (484-494)
KYFSDGSSNTF

SEQ ID NO: 14050 - protein, 9 aa, synthetic construct
  REGION 1..9: note = Ras GTPase-activating-like protein IQGAP1 (191-199)
KYGIQMPAF

SEQ ID NO: 14051 - protein, 9 aa, synthetic construct
  REGION 1..9: note = General transcription factor IIF subunit 1 (83-91)
KYGIVLKEF

SEQ ID NO: 14052 - protein, 8 aa, synthetic construct
  REGION 1..8: note = Protein SOGA1 (415-422)
KYGIVQEF

SEQ ID NO: 14053 - protein, 9 aa, synthetic construct
  REGION 1..9: note = Tyrosine-protein phosphatase non-receptor type 13 (1101-1109)
KYGLGFQII

SEQ ID NO: 14054 - protein, 9 aa, synthetic construct
  REGION 1..9: note = Serine/threonine-protein kinase Kist (248-256)
KYGPVVSLL

SEQ ID NO: 14055 - protein, 8 aa, synthetic construct
  REGION 1..8: note = Serine/threonine-protein phosphatase 4 catalytic subunit (133-140)
KYGSVTVW

SEQ ID NO: 14056 - protein, 9 aa, synthetic construct
  REGION 1..9: note = Magnesium transporter protein 1 (356-364)
KYHGYPYSF

SEQ ID NO: 14057 - protein, 9 aa, synthetic construct
  REGION 1..9: note = Protein cramped-like (21-29)
KYIDFDHVF

SEQ ID NO: 14058 - protein, 9 aa, synthetic construct
  REGION 1..9: note = Ataxin-2-like protein (371-379)
KYIPLPQRV

SEQ ID NO: 14059 - protein, 10 aa, synthetic construct
  REGION 1..10: note = Programmed cell death protein 6 (90-99)
KYITDWQNVF

SEQ ID NO: 14060 - protein, 9 aa, synthetic construct
  REGION 1..9: note = Elongation of very long chain fatty acids protein 5 (200-208)
KYITQGQLL

SEQ ID NO: 14061 - protein, 9 aa, synthetic construct
  REGION 1..9: note = Muscleblind-like protein 3 (18-26)
KYLHPPPHL

SEQ ID NO: 14062 - protein, 9 aa, synthetic construct
  REGION 1..9: note = Muscleblind-like protein 2 (67-75)
KYLHPPTHL

SEQ ID NO: 14063 - protein, 9 aa, synthetic construct
  REGION 1..9: note = Nesprin-2 (895-903)
KYLKAVEEL

SEQ ID NO: 14064 - protein, 9 aa, synthetic construct
  REGION 1..9: note = Presenilin-1 (239-247)
KYLPEWTAW

SEQ ID NO: 14065 - protein, 10 aa, synthetic construct
  REGION 1..10: note = ATP-dependent RNA helicase DDX24 (720-729)
KYMDVVKERI

SEQ ID NO: 14066 - protein, 10 aa, synthetic construct
  REGION 1..10: note = Protein polybromo-1 (653-662)
KYMTPMQQKL

SEQ ID NO: 14067 - protein, 9 aa, synthetic construct
  REGION 1..9: note = Zinc finger protein 3 (173-181)
KYNDFGNSF

SEQ ID NO: 14068 - protein, 10 aa, synthetic construct
  REGION 1..10: note = Putative endoplasmin-like protein (136-145)
KYNDTFWKEF

SEQ ID NO: 14069 - protein, 9 aa, synthetic construct
  REGION 1..9: note = Sphingolipid delta(4)-desaturase DES1 (5-13)
KYPEIKSLM

SEQ ID NO: 14070 - protein, 9 aa, synthetic construct
  REGION 1..9: note = Neurolysin, mitochondrial (244-252)
KYPHYFPVM

SEQ ID NO: 14071 - protein, 9 aa, synthetic construct
  REGION 1..9: note = Protein farnesyltransferase/geranylgeranyltransferase type-1 subunit alpha (288-296)
KYPNLLNQL

SEQ ID NO: 14072 - protein, 9 aa, synthetic construct
  REGION 1..9: note = Protein ERGIC-53 (288-296)
KYQEEFEHF

SEQ ID NO: 14073 - protein, 9 aa, synthetic construct
  REGION 1..9: note = T-box transcription factor TBX3 (227-235)
KYQPRFHIV

SEQ ID NO: 14074 - protein, 9 aa, synthetic construct
  REGION 1..9: note = Isoleucine-tRNA ligase, cytoplasmic (288-296)
KYRPLFDYF

SEQ ID NO: 14075 - protein, 9 aa, synthetic construct
  REGION 1..9: note = Bardet-Biedl syndrome 10 protein (585-593)
KYSFPHTYI

SEQ ID NO: 14076 - protein, 9 aa, synthetic construct
  REGION 1..9: note = Ubiquitin-conjugating enzyme E2 variant 3 (36-44)
KYSMDTYVF

SEQ ID NO: 14077 - protein, 9 aa, synthetic construct
  REGION 1..9: note = Inositol-trisphosphate 3-kinase C (318-326)
KYSPFVVSF

SEQ ID NO: 14078 - protein, 9 aa, synthetic construct
  REGION 1..9: note = Serine/threonine-protein phosphatase 5 (314-322)
KYTAQMYEL

SEQ ID NO: 14079 - protein, 9 aa, synthetic construct
  REGION 1..9: note = FACT complex subunit SPT16 (92-100)
KYTEGVQSL

SEQ ID NO: 14080 - protein, 10 aa, synthetic construct
  REGION 1..10: note = Glycogen debranching enzyme (495-504)
KYTEITATYF

SEQ ID NO: 14081 - protein, 9 aa, synthetic construct
  REGION 1..9: note = Phospholipase DDHD2 (124-132)
KYVPYSESF

SEQ ID NO: 14082 - protein, 9 aa, synthetic construct
  REGION 1..9: note = Serine/threonine-protein kinase RIO1 (222-230)
KYVSGEFRF

SEQ ID NO: 14083 - protein, 10 aa, synthetic construct
  REGION 1..10: note = Splicing factor U2AF 65 kDa subunit (90-99)
KYWDVPPPGF

SEQ ID NO: 14084 - protein, 9 aa, synthetic construct
  REGION 1..9: note = Catenin alpha-1 (777-785)
LAYLQRIAL

SEQ ID NO: 14085 - protein, 8 aa, synthetic construct
  REGION 1..8: note = Heterogeneous nuclear ribonucleoprotein F (259-266)
LFGRDLSY

SEQ ID NO: 14086 - protein, 9 aa, synthetic construct
  REGION 1..9: note = Tubulin beta-6 chain (312-320)
LFKRISEQF

SEQ ID NO: 14087 - protein, 8 aa, synthetic construct
  REGION 1..8: note = Plectin (4148-4155)
LIDHQTYL

SEQ ID NO: 14088 - protein, 12 aa, synthetic construct
  REGION 1..12: note = Heat shock 70 kDa protein 1-like (198-209)
LIFDLGGGTFDV

SEQ ID NO: 14089 - protein, 9 aa, synthetic construct
  REGION 1..9: note = ATP synthase subunit beta, mitochondrial (215-223)
LIMELINNV

SEQ ID NO: 14090 - protein, 9 aa, synthetic construct
  REGION 1..9: note = DNA damage-binding protein 1 (880-888)
LLASINSTV

SEQ ID NO: 14091 - protein, 10 aa, synthetic construct
  REGION 1..10: note = Zinc finger protein 530 (30-39)
LLDEMQRLLY

SEQ ID NO: 14092 - protein, 9 aa, synthetic construct
  REGION 1..9: note = Phospholysine phosphohistidine inorganic pyrophosphate phosphatase (15-23)
LLDISGVLY

SEQ ID NO: 14093 - protein, 9 aa, synthetic construct
  REGION 1..9: note = Vacuolar fusion protein CCZ1 homolog (130-138)
LLDKVYSSV

SEQ ID NO: 14094 - protein, 9 aa, synthetic construct
  REGION 1..9: note = SPRY domain-containing SOCS box protein 1 (138-146)
LLDMPPVSY

SEQ ID NO: 14095 - protein, 9 aa, synthetic construct
  REGION 1..9: note = Beta-hexosaminidase subunit alpha (173-181)
LLDTSRHYL

SEQ ID NO: 14096 - protein, 9 aa, synthetic construct
  REGION 1..9: note = Fragile X mental retardation protein 1 (20-28)
LLDYHLNYL

SEQ ID NO: 14097 - protein, 9 aa, synthetic construct
  REGION 1..9: note = Supervillin (34-42)
LLEEDTPRY

SEQ ID NO: 14098 - protein, 9 aa, synthetic construct
  REGION 1..9: note = LEM domain-containing protein 2 (269-277)
LLELLHELY

SEQ ID NO: 14099 - protein, 11 aa, synthetic construct
  REGION 1..11: note = UDP-N-acetylglucosamine/UDP-glucose/GDP-mannose transporter (133-143)
LLETIILGKQY

SEQ ID NO: 14100 - protein, 11 aa, synthetic construct
  REGION 1..11: note = Complement decay-accelerating factor (9-19)
LLGELPRLLLL

SEQ ID NO: 14101 - protein, 8 aa, synthetic construct
  REGION 1..8: note = Kelch-like protein 24 (405-412)
LLGKVYVV

SEQ ID NO: 14102 - protein, 9 aa, synthetic construct
  REGION 1..9: note = Myosin-9 (292-300)
LLLEPYNKY

SEQ ID NO: 14103 - protein, 11 aa, synthetic construct
  REGION 1..11: note = Plectin (3700-3710)
LLSAEVARLLL

SEQ ID NO: 14104 - protein, 9 aa, synthetic construct
  REGION 1..9: note = Integrin alpha-3 (830-838)
LLYPTEITV

SEQ ID NO: 14105 - protein, 9 aa, synthetic construct
  REGION 1..9: note = Putative heat shock protein HSP 90-beta 2 (24-32)
LMSLIINTF

SEQ ID NO: 14106 - protein, 9 aa, synthetic construct
  REGION 1..9: note = LIM and calponin homology domains-containing protein 1 (480-488)
LNDPNPMKY

SEQ ID NO: 14107 - protein, 9 aa, synthetic construct
  REGION 1..9: note = Leucine-rich repeat-containing protein 59 (77-85)
LPADFGRLV

SEQ ID NO: 14108 - protein, 9 aa, synthetic construct
  REGION 1..9: note = DNA-directed RNA polymerase II subunit RPB2 (74-82)
LPAGINSIV

SEQ ID NO: 14109 - protein, 9 aa, synthetic construct
  REGION 1..9: note = Lysosomal Pro-X carboxypeptidase (301-309)
LPAWPIKVV

SEQ ID NO: 14110 - protein, 9 aa, synthetic construct
  REGION 1..9: note = Leucine-tRNA ligase, cytoplasmic (424-432)
LPFEPVPVI

SEQ ID NO: 14111 - protein, 10 aa, synthetic construct
  REGION 1..10: note = RNA-binding protein 26 (329-338)
LPFPAQPPVV

SEQ ID NO: 14112 - protein, 10 aa, synthetic construct
  REGION 1..10: note = Putative RNA polymerase II subunit B1 CTD phosphatase RPAP2 (434-443)
LPFRGSGTAI

SEQ ID NO: 14113 - protein, 9 aa, synthetic construct
  REGION 1..9: note = Major facilitator superfamily domain-containing protein 12 (308-316)
LPKKFIATI

SEQ ID NO: 14114 - protein, 9 aa, synthetic construct
  REGION 1..9: note = Targeting protein for Xklp2 (528-536)
LPLPHFDTI

SEQ ID NO: 14115 - protein, 9 aa, synthetic construct
  REGION 1..9: note = Heat shock 70 kDa protein 13 (26-34)
LPLPTPKVI

SEQ ID NO: 14116 - protein, 9 aa, synthetic construct
  REGION 1..9: note = Alpha/beta hydrolase domain-containing protein 14B (203-211)
LPNHRVLIM

SEQ ID NO: 14117 - protein, 9 aa, synthetic construct
  REGION 1..9: note = Ubiquitin carboxyl-terminal hydrolase 11 (143-151)
LPNIQKVEV

SEQ ID NO: 14118 - protein, 8 aa, synthetic construct
  REGION 1..8: note = Protein transport protein Sec61 subunit alpha isoform 2 (217-224)
LPNLMNLI

SEQ ID NO: 14119 - protein, 8 aa, synthetic construct
  REGION 1..8: note = Unconventional myosin-X (129-136)
LPPHIFAI

SEQ ID NO: 14120 - protein, 9 aa, synthetic construct
  REGION 1..9: note = Mimitin, mitochondrial (121-129)
LPPPVQTQI

SEQ ID NO: 14121 - protein, 9 aa, synthetic construct
  REGION 1..9: note = Phosphoglycerate kinase 1 (181-189)
LPQKAGGFL

SEQ ID NO: 14122 - protein, 9 aa, synthetic construct
  REGION 1..9: note = Coatomer subunit beta' (762-770)
LPSQVSRVV

SEQ ID NO: 14123 - protein, 9 aa, synthetic construct
  REGION 1..9: note = Neutral amino acid transporter B(0) (246-254)
LPVDHISLI

SEQ ID NO: 14124 - protein, 9 aa, synthetic construct
  REGION 1..9: note = Protein TALPID3 (38-46)
LPVGTGTSL

SEQ ID NO: 14125 - protein, 9 aa, synthetic construct
  REGION 1..9: note = Centrosomal protein of 63 kDa (446-454)
LPVSPLGSI

SEQ ID NO: 14126 - protein, 8 aa, synthetic construct
  REGION 1..8: note = Clathrin heavy chain 1 (859-866)
LPWLEARI

SEQ ID NO: 14127 - protein, 8 aa, synthetic construct
  REGION 1..8: note = Protein transport protein Sec16A (155-162)
LPYLPHYI

SEQ ID NO: 14128 - protein, 9 aa, synthetic construct
  REGION 1..9: note = Very-long-chain (3R)-3-hydroxyacyl-CoA dehydratase 3 (314-322)
LPYPVKIKV

SEQ ID NO: 14129 - protein, 9 aa, synthetic construct
  REGION 1..9: note = HAUS augmin-like complex subunit 6 (131-139)
LSDLKHMRY

SEQ ID NO: 14130 - protein, 9 aa, synthetic construct
  REGION 1..9: note = General transcription factor 3C polypeptide 1 (333-341)
LSDSQMKSY

SEQ ID NO: 14131 - protein, 10 aa, synthetic construct
  REGION 1..10: note = Importin-7 (681-690)
LSDTKYLEMI

SEQ ID NO: 14132 - protein, 9 aa, synthetic construct
  REGION 1..9: note = Cytoplasmic dynein 1 heavy chain 1 (2161-2169)
LSDVFPGVQ

SEQ ID NO: 14133 - protein, 10 aa, synthetic construct
  REGION 1..10: note = Cytoplasmic dynein 1 heavy chain 1 (2161-2170)
LSDVFPGVQY

SEQ ID NO: 14134 - protein, 13 aa, synthetic construct
  REGION 1..13: note = Creatine kinase B-type (162-174)
LSSLDGDLAGRYY

SEQ ID NO: 14135 - protein, 9 aa, synthetic construct
  REGION 1..9: note = Pumilio homolog 2 (167-175)
LTAAQQQQY

SEQ ID NO: 14136 - protein, 9 aa, synthetic construct
  REGION 1..9: note = 26S proteasome non-ATPase regulatory subunit 2 (391-399)
LTDDGNKWL

SEQ ID NO: 14137 - protein, 10 aa, synthetic construct
  REGION 1..10: note = Neural cell adhesion molecule L1 (975-984)
LTDLSPHLRY

SEQ ID NO: 14138 - protein, 10 aa, synthetic construct
  REGION 1..10: note = Pre-mRNA-processing-splicing factor 8 (246-255)
LTDLVDDNYF

SEQ ID NO: 14139 - protein, 9 aa, synthetic construct
  REGION 1..9: note = Exosome component 10 (356-364)
LTDPAIVKV

SEQ ID NO: 14140 - protein, 8 aa, synthetic construct
  REGION 1..8: note = Tubulin polyglutamylase complex subunit 2 (125-132)
LTDTFTAY

SEQ ID NO: 14141 - protein, 9 aa, synthetic construct
  REGION 1..9: note = Alpha-N-acetylglucosaminidase (121-129)
LTEATPNRY

SEQ ID NO: 14142 - protein, 9 aa, synthetic construct
  REGION 1..9: note = AF4/FMR2 family member 4 (1028-1036)
LTEHLKNSY

SEQ ID NO: 14143 - protein, 11 aa, synthetic construct
  REGION 1..11: note = Unconventional myosin-X (71-81)
LTELHGGSIMY

SEQ ID NO: 14144 - protein, 9 aa, synthetic construct
  REGION 1..9: note = Actin-like protein 6A (94-102)
LTELMFEHY

SEQ ID NO: 14145 - protein, 11 aa, synthetic construct
  REGION 1..11: note = Adenosylhomocysteinase 2 (192-202)
LTELTDDQAKY

SEQ ID NO: 14146 - protein, 9 aa, synthetic construct
  REGION 1..9: note = Semaphorin-4C (58-66)
LTEPTGLLY

SEQ ID NO: 14147 - protein, 9 aa, synthetic construct
  REGION 1..9: note = Oxysterol-binding protein-related protein 1 (580-588)
LTEYMEHTY

SEQ ID NO: 14148 - protein, 13 aa, synthetic construct
  REGION 1..13: note = Melanoma-associated antigen 1 (239-251)
LTQDLVQEKYLEY

SEQ ID NO: 14149 - protein, 11 aa, synthetic construct
  REGION 1..11: note = Caspase recruitment domain-containing protein 8 (43-53)
LVDNSIRELQY

SEQ ID NO: 14150 - protein, 9 aa, synthetic construct
  REGION 1..9: note = Non-canonical poly(A) RNA polymerase PAPD5 (82-90)
LYGRHFNYL

SEQ ID NO: 14151 - protein, 9 aa, synthetic construct
  REGION 1..9: note = Ras-related protein Rap-2c (70-78)
LYIKNGQGF

SEQ ID NO: 14152 - protein, 10 aa, synthetic construct
  REGION 1..10: note = Dedicator of cytokinesis protein 7 (456-465)
LYIYPQSLNF

SEQ ID NO: 14153 - protein, 9 aa, synthetic construct
  REGION 1..9: note = Mitochondrial carrier homolog 1 (63-71)
LYLPSFFTY

SEQ ID NO: 14154 - protein, 9 aa, synthetic construct
  REGION 1..9: note = Eukaryotic translation initiation factor 3 subunit C-like protein (609-617)
LYNRTMVQL

SEQ ID NO: 14155 - protein, 9 aa, synthetic construct
  REGION 1..9: note = Serine/threonine-protein phosphatase 5 (284-292)
LYPDHFHLL

SEQ ID NO: 14156 - protein, 9 aa, synthetic construct
  REGION 1..9: note = ATPase family AAA domain-containing protein 2B (421-429)
LYPEIFEKF

SEQ ID NO: 14157 - protein, 9 aa, synthetic construct
  REGION 1..9: note = Syntenin-1 (45-53)
LYPRLYPEL

SEQ ID NO: 14158 - protein, 9 aa, synthetic construct
  REGION 1..9: note = Nuclear factor erythroid 2-related factor 1 (392-400)
LYQEVFGRL

SEQ ID NO: 14159 - protein, 9 aa, synthetic construct
  REGION 1..9: note = Rapamycin-insensitive companion of mTOR (1676-1684)
LYSEVSHLL

SEQ ID NO: 14160 - protein, 8 aa, synthetic construct
  REGION 1..8: note = Nuclear protein 1 (29-36)
LYSLAHSY

SEQ ID NO: 14161 - protein, 9 aa, synthetic construct
  REGION 1..9: note = Protein CLEC16A (171-179)
LYTEAIKFF

SEQ ID NO: 14162 - protein, 9 aa, synthetic construct
  REGION 1..9: note = UDP-glucose:glycoprotein glucosyltransferase 1 (1417-1425)
LYVVDLKKF

SEQ ID NO: 14163 - protein, 9 aa, synthetic construct
  REGION 1..9: note = Sorting nexin-30 (408-416)
MADKNIQYY

SEQ ID NO: 14164 - protein, 8 aa, synthetic construct
  REGION 1..8: note = HLA class I histocompatibility antigen, Cw-2 alpha chain (4-11)
MAPRTLLL

SEQ ID NO: 14165 - protein, 8 aa, synthetic construct
  REGION 1..8: note = HLA class I histocompatibility antigen, A-23 alpha chain (4-11)
MAPRTLVL

SEQ ID NO: 14166 - protein, 10 aa, synthetic construct
  REGION 1..10: note = Uroporphyrinogen decarboxylase (66-75)
MLDDFGPHRY

SEQ ID NO: 14167 - protein, 9 aa, synthetic construct
  REGION 1..9: note = ATP-binding cassette sub-family F member 1 (474-482)
MLDEPTNHL

SEQ ID NO: 14168 - protein, 9 aa, synthetic construct
  REGION 1..9: note = V-type proton ATPase subunit S1 (306-314)
MLQDFQIQA

SEQ ID NO: 14169 - protein, 9 aa, synthetic construct
  REGION 1..9: note = Lysine-specific demethylase 5A (1454-1462)
MMVGDLLEV

SEQ ID NO: 14170 - protein, 9 aa, synthetic construct
  REGION 1..9: note = Inosine-5'-monophosphate dehydrogenase (348-356)
MMYSGELKF

SEQ ID NO: 14171 - protein, 9 aa, synthetic construct
  REGION 1..9: note = Nucleolar pre-ribosomal-associated protein 1 (691-699)
MPHLSMQQV

SEQ ID NO: 14172 - protein, 8 aa, synthetic construct
  REGION 1..8: note = Myoferlin (1357-1364)
MPPLVIKV

SEQ ID NO: 14173 - protein, 9 aa, synthetic construct
  REGION 1..9: note = Serine/threonine-protein kinase D3 (532-540)
MPVTPQASV

SEQ ID NO: 14174 - protein, 9 aa, synthetic construct
  REGION 1..9: note = Progressive ankylosis protein homolog (288-296)
MPYGWLTEI

SEQ ID NO: 14175 - protein, 10 aa, synthetic construct
  REGION 1..10: note = YTH domain-containing family protein 2 (206-215)
MSDSYLPSYY

SEQ ID NO: 14176 - protein, 9 aa, synthetic construct
  REGION 1..9: note = Bleomycin hydrolase (410-418)
MTDEWFSEY

SEQ ID NO: 14177 - protein, 9 aa, synthetic construct
  REGION 1..9: note = Eukaryotic initiation factor 4A-III (233-241)
MTDPIRILV

SEQ ID NO: 14178 - protein, 12 aa, synthetic construct
  REGION 1..12: note = Cytochrome c oxidase subunit 1 (484-495)
MVEEPSMNLEWL

SEQ ID NO: 14179 - protein, 11 aa, synthetic construct
  REGION 1..11: note = Son of sevenless homolog 2 (615-625)
MYADPNFVRTF

SEQ ID NO: 14180 - protein, 9 aa, synthetic construct
  REGION 1..9: note = Trafficking protein particle complex subunit 2 (93-101)
MYLKTVDKF

SEQ ID NO: 14181 - protein, 9 aa, synthetic construct
  REGION 1..9: note = Pyruvate carboxylase, mitochondrial (1012-1020)
MYPDVFAHF

SEQ ID NO: 14182 - protein, 9 aa, synthetic construct
  REGION 1..9: note = Constitutive coactivator of PPAR-gamma-like protein 1 (568-576)
MYPYIFHVL

SEQ ID NO: 14183 - protein, 9 aa, synthetic construct
  REGION 1..9: note = Msx2-interacting protein (2894-2902)
NASPVISSV

SEQ ID NO: 14184 - protein, 9 aa, synthetic construct
  REGION 1..9: note = Cytoplasmic dynein 1 heavy chain 1 (3346-3354)
NFIPTIVNF

SEQ ID NO: 14185 - protein, 10 aa, synthetic construct
  REGION 1..10: note = Ras GTPase-activating-like protein IQGAP3 (896-905)
NIMDIKIGLL

SEQ ID NO: 14186 - protein, 9 aa, synthetic construct
  REGION 1..9: note = Tuberin (178-186)
NLAAYVPLL

SEQ ID NO: 14187 - protein, 9 aa, synthetic construct
  REGION 1..9: note = Nestin (83-91)
NLAEELEGV

SEQ ID NO: 14188 - protein, 12 aa, synthetic construct
  REGION 1..12: note = Spliceosome RNA helicase DDX39B (201-212)
NLFGRGMDIERV

SEQ ID NO: 14189 - protein, 9 aa, synthetic construct
  REGION 1..9: note = Protein unc-45 homolog A (297-305)
NLLDLLTEV

SEQ ID NO: 14190 - protein, 10 aa, synthetic construct
  REGION 1..10: note = Ras GTPase-activating-like protein IQGAP2 (826-835)
NLMDIKIGLL

SEQ ID NO: 14191 - protein, 14 aa, synthetic construct
  REGION 1..14: note = Peroxisome proliferator-activated receptor gamma coactivator 1-alpha (767-780)
NSDDFDPASTKSKY

SEQ ID NO: 14192 - protein, 11 aa, synthetic construct
  REGION 1..11: note = NADH-ubiquinone oxidoreductase chain 5 (109-119)
NSDPNINQFFK

SEQ ID NO: 14193 - protein, 9 aa, synthetic construct
  REGION 1..9: note = Cadherin EGF LAG seven-pass G-type receptor 2 (2584-2592)
NSDTLLFHY

SEQ ID NO: 14194 - protein, 9 aa, synthetic construct
  REGION 1..9: note = Unconventional myosin-X (1519-1527)
NSDVVEQIY

SEQ ID NO: 14195 - protein, 9 aa, synthetic construct
  REGION 1..9: note = Dedicator of cytokinesis protein 9 (118-126)
NSDWHLVNY

SEQ ID NO: 14196 - protein, 9 aa, synthetic construct
  REGION 1..9: note = Serine/threonine-protein kinase RIO3 (378-386)
NSEEMKEAY

SEQ ID NO: 14197 - protein, 9 aa, synthetic construct
  REGION 1..9: note = Nuclear factor erythroid 2-related factor 2 (178-186)
NTDFGDEFY

SEQ ID NO: 14198 - protein, 9 aa, synthetic construct
  REGION 1..9: note = 26S proteasome non-ATPase regulatory subunit 12 (218-226)
NTEKLKLKY

SEQ ID NO: 14199 - protein, 9 aa, synthetic construct
  REGION 1..9: note = Transgelin-2 (106-114)
NTTDIFQTV

SEQ ID NO: 14200 - protein, 11 aa, synthetic construct
  REGION 1..11: note = Anaphase-promoting complex subunit 7 (236-246)
NVDLLGSLADL

SEQ ID NO: 14201 - protein, 9 aa, synthetic construct
  REGION 1..9: note = C-Jun-amino-terminal kinase-interacting protein 4 (137-145)
NYADQISRL

SEQ ID NO: 14202 - protein, 10 aa, synthetic construct
  REGION 1..10: note = Heterogeneous nuclear ribonucleoprotein U-like protein 1 (472-481)
NYAGRWDVLI

SEQ ID NO: 14203 - protein, 9 aa, synthetic construct
  REGION 1..9: note = Basic leucine zipper and W2 domain-containing protein 2 (110-118)
NYAQVFNKL

SEQ ID NO: 14204 - protein, 9 aa, synthetic construct
  REGION 1..9: note = Baculoviral IAP repeat-containing protein 6 (803-811)
NYATRIVTL

SEQ ID NO: 14205 - protein, 9 aa, synthetic construct
  REGION 1..9: note = Cleavage stimulation factor subunit 3 (71-79)
NYDKVEKLF

SEQ ID NO: 14206 - protein, 9 aa, synthetic construct
  REGION 1..9: note = E3 ubiquitin-protein ligase SHPRH (409-417)
NYFIPSHYF

SEQ ID NO: 14207 - protein, 10 aa, synthetic construct
  REGION 1..10: note = Translocon-associated protein subunit alpha (108-117)
NYKDLNGNVF

SEQ ID NO: 14208 - protein, 9 aa, synthetic construct
  REGION 1..9: note = Ubiquitin fusion degradation protein 1 homolog (197-205)
NYNEKIYEL

SEQ ID NO: 14209 - protein, 9 aa, synthetic construct
  REGION 1..9: note = Neurofibromin (31-39)
NYPDEFTKL

SEQ ID NO: 14210 - protein, 9 aa, synthetic construct
  REGION 1..9: note = Zinc finger MYM-type protein 4 (344-352)
NYQNVVHKL

SEQ ID NO: 14211 - protein, 9 aa, synthetic construct
  REGION 1..9: note = Alpha-mannosidase 2x (441-449)
NYQRLFDFF

SEQ ID NO: 14212 - protein, 9 aa, synthetic construct
  REGION 1..9: note = Neuron navigator 2 (1368-1376)
NYSIIPYLL

SEQ ID NO: 14213 - protein, 9 aa, synthetic construct
  REGION 1..9: note = E1A-binding protein p400 (343-351)
PFAKPLPTF

SEQ ID NO: 14214 - protein, 10 aa, synthetic construct
  REGION 1..10: note = Cyclic AMP-responsive element-binding protein 3-like protein 2 (17-26)
PSYGGQQQSY

SEQ ID NO: 14215 - protein, 9 aa, synthetic construct
  REGION 1..9: note = Coatomer subunit alpha (1152-1160)
PTDAYQLNY

SEQ ID NO: 14216 - protein, 10 aa, synthetic construct
  REGION 1..10: note = Endoplasmin (497-506)
PTDITSLDQY

SEQ ID NO: 14217 - protein, 9 aa, synthetic construct
  REGION 1..9: note = Neurofibromin (147-155)
PTDLETRSY

SEQ ID NO: 14218 - protein, 9 aa, synthetic construct
  REGION 1..9: note = H/ACA ribonucleoprotein complex subunit 1 (96-104)
PYFNAPVYL

SEQ ID NO: 14219 - protein, 9 aa, synthetic construct
  REGION 1..9: note = E3 ubiquitin-protein ligase UBR4 (190-198)
PYIIHTVLY

SEQ ID NO: 14220 - protein, 9 aa, synthetic construct
  REGION 1..9: note = Procollagen-lysine,2-oxoglutarate 5-dioxygenase 1 (449-457)
PYISNIYLI

SEQ ID NO: 14221 - protein, 9 aa, synthetic construct
  REGION 1..9: note = Zinc finger protein 503 (342-350)
PYKPGQTVF

SEQ ID NO: 14222 - protein, 9 aa, synthetic construct
  REGION 1..9: note = Synergin gamma (94-102)
PYLGQAPFL

SEQ ID NO: 14223 - protein, 9 aa, synthetic construct
  REGION 1..9: note = Tubulin polyglutamylase TTLL4 (755-763)
PYLISGSKF

SEQ ID NO: 14224 - protein, 11 aa, synthetic construct
  REGION 1..11: note = Protein-L-isoaspartate(D-aspartate) O-methyltransferase (45-55)
PYMDSPQSIGF

SEQ ID NO: 14225 - protein, 10 aa, synthetic construct
  REGION 1..10: note = Oxysterol-binding protein-related protein 10 (414-423)
PYNPIIGETF

SEQ ID NO: 14226 - protein, 10 aa, synthetic construct
  REGION 1..10: note = Oxysterol-binding protein-related protein 8 (441-450)
PYNPILGETF

SEQ ID NO: 14227 - protein, 9 aa, synthetic construct
  REGION 1..9: note = DNA-dependent protein kinase catalytic subunit (2252-2260)
PYRLIFEKF

SEQ ID NO: 14228 - protein, 9 aa, synthetic construct
  REGION 1..9: note = Ubiquitin-associated protein 2-like (857-865)
PYSGDLTKF

SEQ ID NO: 14229 - protein, 9 aa, synthetic construct
  REGION 1..9: note = Origin recognition complex subunit 5 (303-311)
PYYSKFILI

SEQ ID NO: 14230 - protein, 9 aa, synthetic construct
  REGION 1..9: note = Spectrin alpha chain, non-erythrocytic 1 (417-425)
QLLGSAHEV

SEQ ID NO: 14231 - protein, 9 aa, synthetic construct
  REGION 1..9: note = LIM and calponin homology domains-containing protein 1 (431-439)
QMFEGVARV

SEQ ID NO: 14232 - protein, 9 aa, synthetic construct
  REGION 1..9: note = Protein transport protein Sec61 subunit alpha isoform 2 (272-280)
QSALVSNLY

SEQ ID NO: 14233 - protein, 12 aa, synthetic construct
  REGION 1..12: note = HLA class I histocompatibility antigen, A-1 alpha chain (86-97)
QSEDGSHTIQIM

SEQ ID NO: 14234 - protein, 9 aa, synthetic construct
  REGION 1..9: note = Peroxisome proliferator-activated receptor gamma coactivator 1-alpha (61-69)
QSEIISNQY

SEQ ID NO: 14235 - protein, 12 aa, synthetic construct
  REGION 1..12: note = Probable ubiquitin carboxyl-terminal hydrolase FAF-X (1852-1863)
QSESETAGSTKY

SEQ ID NO: 14236 - protein, 9 aa, synthetic construct
  REGION 1..9: note = Obscurin-like protein 1 (662-670)
QVEPGALRY

SEQ ID NO: 14237 - protein, 11 aa, synthetic construct
  REGION 1..11: note = Regulator of nonsense transcripts 1 (738-748)
QWPQPDKPMFF

SEQ ID NO: 14238 - protein, 9 aa, synthetic construct
  REGION 1..9: note = Bardet-Biedl syndrome 4 protein (147-155)
QYASAFHFL

SEQ ID NO: 14239 - protein, 9 aa, synthetic construct
  REGION 1..9: note = Dynein light chain roadblock-type 1 (48-56)
QYASLMHSF

SEQ ID NO: 14240 - protein, 9 aa, synthetic construct
  REGION 1..9: note = Serine/threonine-protein kinase PLK4 (655-663)
QYASRFVQL

SEQ ID NO: 14241 - protein, 10 aa, synthetic construct
  REGION 1..10: note = Neuron navigator 2 (639-648)
QYDPYTDSRF

SEQ ID NO: 14242 - protein, 9 aa, synthetic construct
  REGION 1..9: note = Disks large homolog 5 (1316-1324)
QYNPHVHQL

SEQ ID NO: 14243 - protein, 9 aa, synthetic construct
  REGION 1..9: note = YY1-associated protein 1 (219-227)
QYNPKFQTL

SEQ ID NO: 14244 - protein, 9 aa, synthetic construct
  REGION 1..9: note = H/ACA ribonucleoprotein complex non-core subunit NAF1 (421-429)
QYPFPLPVF

SEQ ID NO: 14245 - protein, 9 aa, synthetic construct
  REGION 1..9: note = ATP-dependent RNA helicase DDX24 (585-593)
QYPGRSLVF

SEQ ID NO: 14246 - protein, 11 aa, synthetic construct
  REGION 1..11: note = Signal transducer and activator of transcription 1-alpha/beta (67-77)
QYSRFSLENNF

SEQ ID NO: 14247 - protein, 9 aa, synthetic construct
  REGION 1..9: note = Regulatory-associated protein of mTOR (699-707)
QYTPHSHQF

SEQ ID NO: 14248 - protein, 9 aa, synthetic construct
  REGION 1..9: note = 60S ribosomal protein L7 (200-208)
RFKEANNFL

SEQ ID NO: 14249 - protein, 9 aa, synthetic construct
  REGION 1..9: note = Cullin-3 (709-717)
RFLPSPVVI

SEQ ID NO: 14250 - protein, 9 aa, synthetic construct
  REGION 1..9: note = 40S ribosomal protein S30 (115-123)
RFVNVVPTF

SEQ ID NO: 14251 - protein, 9 aa, synthetic construct
  REGION 1..9: note = Putative PIP5K1A and PSMD4-like protein (555-563)
RILSKLHTV

SEQ ID NO: 14252 - protein, 9 aa, synthetic construct
  REGION 1..9: note = Schlafen family member 5 (693-701)
RIMEKIRNV

SEQ ID NO: 14253 - protein, 9 aa, synthetic construct
  REGION 1..9: note = Condensin complex subunit 1 (412-420)
RLADKSVLV

SEQ ID NO: 14254 - protein, 9 aa, synthetic construct
  REGION 1..9: note = DNA replication licensing factor MCM4 (739-747)
RLAEAHAKV

SEQ ID NO: 14255 - protein, 10 aa, synthetic construct
  REGION 1..10: note = Histone-lysine N-methyltransferase ASH1L (2786-2795)
RLDKSAHLFY

SEQ ID NO: 14256 - protein, 10 aa, synthetic construct
  REGION 1..10: note = Prolyl 3-hydroxylase 1 (554-563)
RLDTPLYFSY

SEQ ID NO: 14257 - protein, 9 aa, synthetic construct
  REGION 1..9: note = Elongation factor 2 (239-247)
RLMEPIYLV

SEQ ID NO: 14258 - protein, 10 aa, synthetic construct
  REGION 1..10: note = Solute carrier family 22 member 18 (149-158)
RPAALGRLGL

SEQ ID NO: 14259 - protein, 10 aa, synthetic construct
  REGION 1..10: note = BCL-6 corepressor (1395-1404)
RPMPPEARRL

SEQ ID NO: 14260 - protein, 11 aa, synthetic construct
  REGION 1..11: note = Protein FAM46B (291-301)
RPRPSTDVRAL

SEQ ID NO: 14261 - protein, 9 aa, synthetic construct
  REGION 1..9: note = Nuclear factor 1 X-type (113-121)
RQADKVWRL

SEQ ID NO: 14262 - protein, 9 aa, synthetic construct
  REGION 1..9: note = Multiple PDZ domain protein (911-919)
RQDENTPSV

SEQ ID NO: 14263 - protein, 10 aa, synthetic construct
  REGION 1..10: note = REST corepressor 1 (336-345)
RQLDMELVSV

SEQ ID NO: 14264 - protein, 9 aa, synthetic construct
  REGION 1..9: note = Bifunctional coenzyme A synthase (204-212)
RQVEKAWAL

SEQ ID NO: 14265 - protein, 12 aa, synthetic construct
  REGION 1..12: note = Serine/threonine-protein kinase SIK3 (368-379)
RSDAYDHYSAIY

SEQ ID NO: 14266 - protein, 9 aa, synthetic construct
  REGION 1..9: note = Truncated EKLF (17-25)
RSDELTRHY

SEQ ID NO: 14267 - protein, 10 aa, synthetic construct
  REGION 1..10: note = Unconventional myosin-X (35-44)
RTDYGQVFTY

SEQ ID NO: 14268 - protein, 9 aa, synthetic construct
  REGION 1..9: note = Ribonuclease P protein subunit p21 (66-74)
RTIAKRLVL

SEQ ID NO: 14269 - protein, 9 aa, synthetic construct
  REGION 1..9: note = Serine/threonine-protein kinase MRCK beta (1490-1498)
RTMEWVQTI

SEQ ID NO: 14270 - protein, 9 aa, synthetic construct
  REGION 1..9: note = Liprin-beta-1 (738-746)
RVDGRMLHY

SEQ ID NO: 14271 - protein, 11 aa, synthetic construct
  REGION 1..11: note = DNA damage-binding protein 1 (263-273)
RVDPNGSRYLL

SEQ ID NO: 14272 - protein, 11 aa, synthetic construct
  REGION 1..11: note = Src substrate cortactin (131-141)
RVDQSAVGFEY

SEQ ID NO: 14273 - protein, 10 aa, synthetic construct
  REGION 1..10: note = HLA class I histocompatibility antigen, alpha chain E (284-293)
RWKPASQPTI

SEQ ID NO: 14274 - protein, 11 aa, synthetic construct
  REGION 1..11: note = Serine/threonine-protein phosphatase 2A 55 kDa regulatory subunit B alpha isoform (100-110)
RWLPQKNAAQF

SEQ ID NO: 14275 - protein, 9 aa, synthetic construct
  REGION 1..9: note = snRNA-activating protein complex subunit 1 (64-72)
RYFLPPYTF

SEQ ID NO: 14276 - protein, 9 aa, synthetic construct
  REGION 1..9: note = Heterogeneous nuclear ribonucleoprotein H (275-283)
RYGDGGSTF

SEQ ID NO: 14277 - protein, 9 aa, synthetic construct
  REGION 1..9: note = Rab proteins geranylgeranyltransferase component A 1 (79-87)
RYGNTPFLF

SEQ ID NO: 14278 - protein, 10 aa, synthetic construct
  REGION 1..10: note = Pre-mRNA-processing-splicing factor 8 (1090-1099)
RYIDRIHIFF

SEQ ID NO: 14279 - protein, 9 aa, synthetic construct
  REGION 1..9: note = Cystine/glutamate transporter (148-156)
RYILEPFFI

SEQ ID NO: 14280 - protein, 9 aa, synthetic construct
  REGION 1..9: note = ER degradation-enhancing alpha-mannosidase-like protein 3 (281-289)
RYISQPPLL

SEQ ID NO: 14281 - protein, 9 aa, synthetic construct
  REGION 1..9: note = Homeodomain-interacting protein kinase 2 (411-419)
RYISQTQGL

SEQ ID NO: 14282 - protein, 9 aa, synthetic construct
  REGION 1..9: note = DNA-directed RNA polymerase III subunit RPC3 (90-98)
RYIYTTKTL

SEQ ID NO: 14283 - protein, 9 aa, synthetic construct
  REGION 1..9: note = Probable global transcription activator SNF2L1 (867-875)
RYKAPFHQL

SEQ ID NO: 14284 - protein, 9 aa, synthetic construct
  REGION 1..9: note = Ras GTPase-activating-like protein IQGAP1 (102-110)
RYKATGLHF

SEQ ID NO: 14285 - protein, 10 aa, synthetic construct
  REGION 1..10: note = RNA pseudouridylate synthase domain-containing protein 2 (461-470)
RYKGPGFEYF

SEQ ID NO: 14286 - protein, 9 aa, synthetic construct
  REGION 1..9: note = Cytoplasmic dynein 1 heavy chain 1 (979-987)
RYKLYQEMF

SEQ ID NO: 14287 - protein, 10 aa, synthetic construct
  REGION 1..10: note = DENN domain-containing protein 1B (346-355)
RYKPGEPITF

SEQ ID NO: 14288 - protein, 9 aa, synthetic construct
  REGION 1..9: note = Trimethylguanosine synthase (469-477)
RYLEKNVKL

SEQ ID NO: 14289 - protein, 9 aa, synthetic construct
  REGION 1..9: note = Catechol O-methyltransferase (196-204)
RYLPDTLLL

SEQ ID NO: 14290 - protein, 12 aa, synthetic construct
  REGION 1..12: note = Zinc finger protein 281 (390-401)
RYLPTASSNSAF

SEQ ID NO: 14291 - protein, 10 aa, synthetic construct
  REGION 1..10: note = Histone-binding protein RBBP7 (130-139)
RYMPQNPHII

SEQ ID NO: 14292 - protein, 9 aa, synthetic construct
  REGION 1..9: note = E3 ubiquitin-protein ligase DZIP3 (194-202)
RYNGGLLEF

SEQ ID NO: 14293 - protein, 9 aa, synthetic construct
  REGION 1..9: note = Influenza virus NS1A-binding protein (531-539)
RYNPENNTW

SEQ ID NO: 14294 - protein, 9 aa, synthetic construct
  REGION 1..9: note = Kelch-like protein 11 (425-433)
RYNPNLNTW

SEQ ID NO: 14295 - protein, 9 aa, synthetic construct
  REGION 1..9: note = Solute carrier family 35 member B1 (235-243)
RYPAIIYNI

SEQ ID NO: 14296 - protein, 10 aa, synthetic construct
  REGION 1..10: note = Myotubularin-related protein 5 (78-87)
RYPPDIRATF

SEQ ID NO: 14297 - protein, 10 aa, synthetic construct
  REGION 1..10: note = Myotubularin-related protein 13 (1004-1013)
RYPQSIFSTF

SEQ ID NO: 14298 - protein, 9 aa, synthetic construct
  REGION 1..9: note = Golgin subfamily B member 1 (2035-2043)
RYQEKISAL

SEQ ID NO: 14299 - protein, 9 aa, synthetic construct
  REGION 1..9: note = Zinc phosphodiesterase ELAC protein 2 (313-321)
RYQQWMERF

SEQ ID NO: 14300 - protein, 9 aa, synthetic construct
  REGION 1..9: note = Supervillin (423-431)
RYQTQPVTL

SEQ ID NO: 14301 - protein, 12 aa, synthetic construct
  REGION 1..12: note = Magnesium transporter protein 1 (137-148)
RYSSAFTNRIFF

SEQ ID NO: 14302 - protein, 11 aa, synthetic construct
  REGION 1..11: note = Retinoic acid receptor alpha (412-422)
RYTPEQDTMTF

SEQ ID NO: 14303 - protein, 9 aa, synthetic construct
  REGION 1..9: note = Beta-hexosaminidase subunit alpha (36-44)
RYVLYPNNF

SEQ ID NO: 14304 - protein, 11 aa, synthetic construct
  REGION 1..11: note = Beta-hexosaminidase subunit alpha (36-46)
RYVLYPNNFQF

SEQ ID NO: 14305 - protein, 9 aa, synthetic construct
  REGION 1..9: note = 39S ribosomal protein L43, mitochondrial (21-29)
RYVQQLQRL

SEQ ID NO: 14306 - protein, 9 aa, synthetic construct
  REGION 1..9: note = Syntaxin-binding protein 1 (149-157)
SADSFQSFY

SEQ ID NO: 14307 - protein, 9 aa, synthetic construct
  REGION 1..9: note = Histone-binding protein RBBP4 (220-228)
SFNPYSEFI

SEQ ID NO: 14308 - protein, 9 aa, synthetic construct
  REGION 1..9: note = Hemoglobin subunit alpha (7-15)
SFPTTKTYF

SEQ ID NO: 14309 - protein, 9 aa, synthetic construct
  REGION 1..9: note Dolichyl-diphosphooligosaccharide-proteinosyltransferase subunit 2 (185-193)
SFTPVGDVF

SEQ ID NO: 14310 - protein, 12 aa, synthetic construct
  REGION 1..12: note = Heat shock-related 70 kDa protein 2 (211-222)
SILTIEDGIFEV

SEQ ID NO: 14311 - protein, 9 aa, synthetic construct
  REGION 1..9: note = Transcription factor BTF3 (88-96)
SLAANTFTI

SEQ ID NO: 14312 - protein, 9 aa, synthetic construct
  REGION 1..9: note = Superkiller viralicidic activity 2-like 2 (92-100)
SLADLMPRV

SEQ ID NO: 14313 - protein, 10 aa, synthetic construct
  REGION 1..10: note = Aminopeptidase B (318-327)
SLADVIIHEI

SEQ ID NO: 14314 - protein, 9 aa, synthetic construct
  REGION 1..9: note = Epoxide hydrolase 1 (350-358)
SLDDLLTNV

SEQ ID NO: 14315 - protein, 9 aa, synthetic construct
  REGION 1..9: note = Band 4.1-like protein 2 (550-558)
SLDGAPIGV

SEQ ID NO: 14316 - protein, 9 aa, synthetic construct
  REGION 1..9: note = RNA-binding motif protein, X-linked-like-2 (67-75)
SLDGKAIKV

SEQ ID NO: 14317 - protein, 9 aa, synthetic construct
  REGION 1..9: note = Telomere-associated protein RIF1 (1157-1165)
SLDKTSPEM

SEQ ID NO: 14318 - protein, 9 aa, synthetic construct
  REGION 1..9: note = Cytoskeleton-associated protein 4 (535-543)
SLDNLKASV

SEQ ID NO: 14319 - protein, 8 aa, synthetic construct
  REGION 1..8: note = Signal recognition particle 54 kDa protein (200-207)
SLFEEMLQ

SEQ ID NO: 14320 - protein, 9 aa, synthetic construct
  REGION 1..9: note = WD repeat and FYVE domain-containing protein 3 (1518-1526)
SLFEHFIEL

SEQ ID NO: 14321 - protein, 10 aa, synthetic construct
  REGION 1..10: note = Programmed cell death 6-interacting protein (103-112)
SLFGGSVKLA

SEQ ID NO: 14322 - protein, 12 aa, synthetic construct
  REGION 1..12: note = Junction plakoglobin (670-681)
SLFKHDPAAWEA

SEQ ID NO: 14323 - protein, 13 aa, synthetic construct
  REGION 1..13: note = Unconventional myosin-Ib (552-564)
SLFPEGNPAKINL

SEQ ID NO: 14324 - protein, 9 aa, synthetic construct
  REGION 1..9: note = Disintegrin and metalloproteinase domain-containing protein 10 (80-88)
SLFSDEFKV

SEQ ID NO: 14325 - protein, 10 aa, synthetic construct
  REGION 1..10: note = Renin receptor (103-112)
SLFSEETPVV

SEQ ID NO: 14326 - protein, 9 aa, synthetic construct
  REGION 1..9: note = Tyrosine-protein phosphatase non-receptor type 9 (479-487)
SLIDFLRVV

SEQ ID NO: 14327 - protein, 9 aa, synthetic construct
  REGION 1..9: note = Probable E3 ubiquitin-protein ligase HECTD4 (234-242)
SLKTFVHTV

SEQ ID NO: 14328 - protein, 10 aa, synthetic construct
  REGION 1..10: note = Acyl-coenzyme A thioesterase 1 isoform X1 (59-68)
SLLAGKGFAV

SEQ ID NO: 14329 - protein, 9 aa, synthetic construct
  REGION 1..9: note = Cell cycle checkpoint control protein RAD9A (254-262)
SLLDGHFVL

SEQ ID NO: 14330 - protein, 9 aa, synthetic construct
  REGION 1..9: note = Unconventional myosin-Ib (9-17)
SLLDNMIGV

SEQ ID NO: 14331 - protein, 9 aa, synthetic construct
  REGION 1..9: note = Protein virilizer homolog (1470-1478)
SLLDSVVGL

SEQ ID NO: 14332 - protein, 9 aa, synthetic construct
  REGION 1..9: note = Programmed cell death 6-interacting protein (554-562)
SLLSNLDEV

SEQ ID NO: 14333 - protein, 11 aa, synthetic construct
  REGION 1..11: note = E3 ubiquitin-protein ligase UBR1 (683-693)
SLMDPNKFLLL

SEQ ID NO: 14334 - protein, 11 aa, synthetic construct
  REGION 1..11: note = Insulin receptor substrate 2 (1109-1119)
SLMEQVSGVEA

SEQ ID NO: 14335 - protein, 9 aa, synthetic construct
  REGION 1..9: note = UHRF1-binding protein 1-like (1293-1301)
SLMNIQHFL

SEQ ID NO: 14336 - protein, 10 aa, synthetic construct
  REGION 1..10: note = DNA-dependent protein kinase catalytic subunit (3481-3490)
SLMTKEISSV

SEQ ID NO: 14337 - protein, 9 aa, synthetic construct
  REGION 1..9: note = Serpin H1 (304-312)
SLPKGVVEV

SEQ ID NO: 14338 - protein, 8 aa, synthetic construct
  REGION 1..8: note = Vimentin (226-233)
SLQEEIAF

SEQ ID NO: 14339 - protein, 10 aa, synthetic construct
  REGION 1..10: note = Enhancer of mRNA-decapping protein 4 (777-786)
SLQESILAQV

SEQ ID NO: 14340 - protein, 9 aa, synthetic construct
  REGION 1..9: note = Plasma membrane calcium-transporting ATPase 4 (1197-1205)
SLQSLETSV

SEQ ID NO: 14341 - protein, 9 aa, synthetic construct
  REGION 1..9: note = Ubiquitin-associated protein 2-like (493-501)
SLTSKIPAL

SEQ ID NO: 14342 - protein, 11 aa, synthetic construct
  REGION 1..11: note = Ras-related C3 botulinum toxin substrate 1 (39-49)
SLVSPASFENV

SEQ ID NO: 14343 - protein, 9 aa, synthetic construct
  REGION 1..9: note = Renin receptor (241-249)
SLYGGNAVV

SEQ ID NO: 14344 - protein, 11 aa, synthetic construct
  REGION 1..11: note = Renin receptor (241-251)
SLYGGNAVVEL

SEQ ID NO: 14345 - protein, 13 aa, synthetic construct
  REGION 1..13: note = Renin receptor (241-253)
SLYGGNAVVELVT

SEQ ID NO: 14346 - protein, 9 aa, synthetic construct
  REGION 1..9: note = Nucleolar pre-ribosomal-associated protein 1 (1994-2002)
SLYIKDIWL

SEQ ID NO: 14347 - protein, 10 aa, synthetic construct
  REGION 1..10: note = Endoplasmin (71-80)
SLYKNKEIFL

SEQ ID NO: 14348 - protein, 9 aa, synthetic construct
  REGION 1..9: note = Probable ATP-dependent RNA helicase DDX59 (525-533)
SMDEYVHQI

SEQ ID NO: 14349 - protein, 12 aa, synthetic construct
  REGION 1..12: note = Zinc finger protein 841 (58-69)
SMLEQGKEPWTV

SEQ ID NO: 14350 - protein, 9 aa, synthetic construct
  REGION 1..9: note = E3 ubiquitin-protein ligase UBR2 (703-711)
SMMDPNHFL

SEQ ID NO: 14351 - protein, 9 aa, synthetic construct
  REGION 1..9: note = Neuroblast differentiation-associated protein AHNAK (323-331)
SMSEVDLNV

SEQ ID NO: 14352 - protein, 9 aa, synthetic construct
  REGION 1..9: note = Unhealthy ribosome biogenesis protein 2 homolog (629-637)
SMSGPLIGV

SEQ ID NO: 14353 - protein, 11 aa, synthetic construct
  REGION 1..11: note = Desmoplakin (1673-1683)
SMVEDITGLRL

SEQ ID NO: 14354 - protein, 13 aa, synthetic construct
  REGION 1..13: note = Aminoacyl tRNA synthase complex-interacting multifunctional protein 1 (90-102)
SMVSENVIQSTAV

SEQ ID NO: 14355 - protein, 9 aa, synthetic construct
  REGION 1..9: note = Poly (ADP-ribose) polymerase 4 (1186-1194)
SPFPDIPKV

SEQ ID NO: 14356 - protein, 9 aa, synthetic construct
  REGION 1..9: note = Neuroblast differentiation-associated protein AHNAK (1150-1158)
SPKGKFSLF

SEQ ID NO: 14357 - protein, 10 aa, synthetic construct
  REGION 1..10: note = Cohesin subunit SA-1 (459-468)
SPNGNLIRML

SEQ ID NO: 14358 - protein, 9 aa, synthetic construct
  REGION 1..9: note = Neural Wiskott-Aldrich syndrome protein (82-90)
SPRGYFHTF

SEQ ID NO: 14359 - protein, 9 aa, synthetic construct
  REGION 1..9: note = Collagen alpha-1(VII) chain (586-594)
SPRVPSIEL

SEQ ID NO: 14360 - protein, 9 aa, synthetic construct
  REGION 1..9: note = Microtubule-associated protein 4 (280-288)
SPTKLDVTL

SEQ ID NO: 14361 - protein, 9 aa, synthetic construct
  REGION 1..9: note = Kelch repeat and BTB domain-containing protein 2 (594-602)
SPWKPPTYL

SEQ ID NO: 14362 - protein, 9 aa, synthetic construct
  REGION 1..9: note = Molybdenum cofactor sulfurase (515-523)
SQADVIPAV

SEQ ID NO: 14363 - protein, 9 aa, synthetic construct
  REGION 1..9: note = Protein FAM63A (74-82)
SSAPPGPTL

SEQ ID NO: 14364 - protein, 9 aa, synthetic construct
  REGION 1..9: note = Coatomer subunit gamma-2 (186-194)
SSDNIMVQY

SEQ ID NO: 14365 - protein, 10 aa, synthetic construct
  REGION 1..10: note = Oxysterol-binding protein-related protein 8 (244-253)
SSDSTHVTFY

SEQ ID NO: 14366 - protein, 11 aa, synthetic construct
  REGION 1..11: note = RNA-binding protein with multiple splicing 2 (84-94)
SSDTTQQGWKY

SEQ ID NO: 14367 - protein, 9 aa, synthetic construct
  REGION 1..9: note = Discoidin domain-containing receptor 2 (676-684)
SSDVRTVSY

SEQ ID NO: 14368 - protein, 14 aa, synthetic construct
  REGION 1..14: note = RNA-binding protein EWS (265-278)
SSFRQDHPSSMGVY

SEQ ID NO: 14369 - protein, 9 aa, synthetic construct
  REGION 1..9: note = Bromodomain and WD repeat-containing protein 1 (343-351)
STDHVIRMY

SEQ ID NO: 14370 - protein, 10 aa, synthetic construct
  REGION 1..10: note = Integrin alpha-5 (179-188)
STDNFTRILE

SEQ ID NO: 14371 - protein, 9 aa, synthetic construct
  REGION 1..9: note = Actin filament-associated protein 1 (443-451)
STDPEALHY

SEQ ID NO: 14372 - protein, 11 aa, synthetic construct
  REGION 1..11: note = Eukaryotic translation initiation factor 2A (26-36)
STDVDKTGASY

SEQ ID NO: 14373 - protein, 10 aa, synthetic construct
  REGION 1..10: note = NADH dehydrogenase (ubiquinone) iron-sulfur protein 8, mitochondrial (174-183)
STETHEELLY

SEQ ID NO: 14374 - protein, 13 aa, synthetic construct
  REGION 1..13: note = Src substrate cortactin (285-297)
STFEDVTQVSSAY

SEQ ID NO: 14375 - protein, 10 aa, synthetic construct
  REGION 1..10: note = Protein Smaug homolog 1 (46-55)
SVDYGQTHYY

SEQ ID NO: 14376 - protein, 9 aa, synthetic construct
  REGION 1..9: note = Eukaryotic peptide chain release factor subunit 1 (70-78)
SVLGAITSV

SEQ ID NO: 14377 - protein, 10 aa, synthetic construct
  REGION 1..10: note = Elongation factor 2 (500-509)
SVSPVVRVAV

SEQ ID NO: 14378 - protein, 9 aa, synthetic construct
  REGION 1..9: note = Serum paraoxonase/arylesterase 2 (334-342)
SVYDGKLLI

SEQ ID NO: 14379 - protein, 11 aa, synthetic construct
  REGION 1..11: note = Renin receptor (47-57)
SWPGLAVGNLF

SEQ ID NO: 14380 - protein, 9 aa, synthetic construct
  REGION 1..9: note = Short transient receptor potential channel 4-associated protein (540-548)
SYADQMFLL

SEQ ID NO: 14381 - protein, 9 aa, synthetic construct
  REGION 1..9: note = Ankyrin repeat and BTB/POZ domain-containing protein 2 (419-427)
SYAETPLQL

SEQ ID NO: 14382 - protein, 9 aa, synthetic construct
  REGION 1..9: note = Zinc-binding alcohol dehydrogenase domain-containing protein 2 (16-24)
SYARHFLDF

SEQ ID NO: 14383 - protein, 10 aa, synthetic construct
  REGION 1..10: note = Spatacsin (908-917)
SYASLQQNKW

SEQ ID NO: 14384 - protein, 10 aa, synthetic construct
  REGION 1..10: note = Tubulin polyglutamylase TTLL4 (773-782)
SYDPLRIYLF

SEQ ID NO: 14385 - protein, 9 aa, synthetic construct
  REGION 1..9: note = Kinectin (1090-1098)
SYGEWLHGF

SEQ ID NO: 14386 - protein, 9 aa, synthetic construct
  REGION 1..9: note = Serine/threonine-protein kinase 3 (65-73)
SYGSVFKAI

SEQ ID NO: 14387 - protein, 9 aa, synthetic construct
  REGION 1..9: note = Ubiquitin-like modifier-activating enzyme 1 (921-929)
SYKNGFLNL

SEQ ID NO: 14388 - protein, 9 aa, synthetic construct
  REGION 1..9: note = Unconventional myosin-Va (78-86)
SYLHEPAVL

SEQ ID NO: 14389 - protein, 9 aa, synthetic construct
  REGION 1..9: note = Actin-related protein 10 (66-74)
SYLKEFIHI

SEQ ID NO: 14390 - protein, 9 aa, synthetic construct
  REGION 1..9: note = Kelch-like protein 15 (402-410)
SYNGKLYVF

SEQ ID NO: 14391 - protein, 11 aa, synthetic construct
  REGION 1..11: note = Coatomer subunit alpha (369-379)
SYNPAENAVLL

SEQ ID NO: 14392 - protein, 9 aa, synthetic construct
  REGION 1..9: note = Protein artemis (321-329)
SYSEIKDFL

SEQ ID NO: 14393 - protein, 9 aa, synthetic construct
  REGION 1..9: note = Zinc finger protein 24 (343-351)
SYSQSSNLF

SEQ ID NO: 14394 - protein, 9 aa, synthetic construct
  REGION 1..9: note = Melanoma-associated antigen 3 (282-290)
SYVKVLHHM

SEQ ID NO: 14395 - protein, 9 aa, synthetic construct
  REGION 1..9: note = Basement membrane-specific heparan sulfate proteoglycan core protein (176-184)
SYVTSPQGF

SEQ ID NO: 14396 - protein, 9 aa, synthetic construct
  REGION 1..9: note = Cell differentiation protein RCD1 homolog (6-14)
TAAPVPTTL

SEQ ID NO: 14397 - protein, 9 aa, synthetic construct
  REGION 1..9: note = Protein PRRC2C (2488-2496)
TAIHNFPTV

SEQ ID NO: 14398 - protein, 9 aa, synthetic construct
  REGION 1..9: note = Lipoma-preferred partner (284-292)
TAMDQVFHV

SEQ ID NO: 14399 - protein, 9 aa, synthetic construct
  REGION 1..9: note = Integrator complex subunit 1 (301-309)
TATMHILVV

SEQ ID NO: 14400 - protein, 9 aa, synthetic construct
  REGION 1..9: note = Histone-lysine N-methyltransferase 2C (316-324)
TFQDFSHIF

SEQ ID NO: 14401 - protein, 9 aa, synthetic construct
  REGION 1..9: note = Probable ATP-dependent RNA helicase DDX27 (430-438)
TFTDHVMLF

SEQ ID NO: 14402 - protein, 9 aa, synthetic construct
  REGION 1..9: note = Zinc finger protein RFP (458-466)
TFTFSHATF

SEQ ID NO: 14403 - protein, 9 aa, synthetic construct
  REGION 1..9: note = WD repeat-containing protein 61 (32-40)
THVGKVNIF

SEQ ID NO: 14404 - protein, 9 aa, synthetic construct
  REGION 1..9: note = Very-long-chain enoyl-CoA reductase (28-36)
TIAEIKNLF

SEQ ID NO: 14405 - protein, 9 aa, synthetic construct
  REGION 1..9: note = Heat shock-related 70 kDa protein 2 (214-222)
TIEDGIFEV

SEQ ID NO: 14406 - protein, 9 aa, synthetic construct
  REGION 1..9: note = 40S ribosomal protein S4, X isoform (127-135)
TIRYPDPLI

SEQ ID NO: 14407 - protein, 9 aa, synthetic construct
  REGION 1..9: note = Protein FAM73A (584-592)
TLAEDLMQL

SEQ ID NO: 14408 - protein, 11 aa, synthetic construct
  REGION 1..11: note = Calmodulin-regulated spectrin-associated protein 1 (102-112)
TLAELQPPVQL

SEQ ID NO: 14409 - protein, 9 aa, synthetic construct
  REGION 1..9: note = Importin-4 (587-595)
TLAETIQGL

SEQ ID NO: 14410 - protein, 9 aa, synthetic construct
  REGION 1..9: note = E3 ubiquitin-protein ligase UBR4 (345-353)
TLDAAISKV

SEQ ID NO: 14411 - protein, 9 aa, synthetic construct
  REGION 1..9: note = Molybdenum cofactor sulfurase (474-482)
TLDDVQAFL

SEQ ID NO: 14412 - protein, 9 aa, synthetic construct
  REGION 1..9: note = Solute carrier family 23 member 2 (493-501)
TLFGMITAV

SEQ ID NO: 14413 - protein, 11 aa, synthetic construct
  REGION 1..11: note = Putative elongation factor 1-alpha-like 3 (142-152)
TLGVKQLIVGV

SEQ ID NO: 14414 - protein, 9 aa, synthetic construct
  REGION 1..9: note = Dynactin subunit 1 (646-654)
TLHRYEHAL

SEQ ID NO: 14415 - protein, 10 aa, synthetic construct
  REGION 1..10: note = 60S acidic ribosomal protein P0 (50-59)
TLHSRFLEGV

SEQ ID NO: 14416 - protein, 9 aa, synthetic construct
  REGION 1..9: note = Peptidyl-prolyl cis-trans isomerase FKBP9 (457-465)
TLLDSTWNL

SEQ ID NO: 14417 - protein, 10 aa, synthetic construct
  REGION 1..10: note = Midasin (3030-3039)
TLLEVGQIAV

SEQ ID NO: 14418 - protein, 10 aa, synthetic construct
  REGION 1..10: note = Puromycin-sensitive aminopeptidase (786-795)
TLLPDLIQKV

SEQ ID NO: 14419 - protein, 11 aa, synthetic construct
  REGION 1..11: note = 116 kDa U5 small nuclear ribonucleoprotein component (103-113)
TLMEQTLPVTV

SEQ ID NO: 14420 - protein, 9 aa, synthetic construct
  REGION 1..9: note = SH3 domain-binding glutamic acid-rich-like protein 3 (218-226)
TLQEFLKLA

SEQ ID NO: 14421 - protein, 9 aa, synthetic construct
  REGION 1..9: note = Zinc finger BED domain-containing protein 5 (529-537)
TLSDFLTEI

SEQ ID NO: 14422 - protein, 9 aa, synthetic construct
  REGION 1..9: note = Elongation protein 4 homolog (S. cerevisiae), isoform CRA_b (319-327)
TLSDVVVGL

SEQ ID NO: 14423 - protein, 9 aa, synthetic construct
  REGION 1..9: note = Protein MON2 homolog (629-637)
TLSNKSYSV

SEQ ID NO: 14424 - protein, 13 aa, synthetic construct
  REGION 1..13: note = Malate dehydrogenase, mitochondrial (54-66)
TLYDIAHTPGVAA

SEQ ID NO: 14425 - protein, 9 aa, synthetic construct
  REGION 1..9: note = Cyclic AMP-dependent transcription factor ATF-6 beta (30-38)
TLYSGLDEV

SEQ ID NO: 14426 - protein, 10 aa, synthetic construct
  REGION 1..10: note = NAD(P)H dehydrogenase (quinone) 1 (124-133)
TPADARIQIL

SEQ ID NO: 14427 - protein, 9 aa, synthetic construct
  REGION 1..9: note = Dual specificity protein phosphatase 4 (356-364)
TPATPTSQF

SEQ ID NO: 14428 - protein, 9 aa, synthetic construct
  REGION 1..9: note = Cytoplasmic dynein 1 heavy chain 1 (264-272)
TPRIQGLTV

SEQ ID NO: 14429 - protein, 9 aa, synthetic construct
  REGION 1..9: note = Exostosin-2 (555-563)
TSDELQFGY

SEQ ID NO: 14430 - protein, 10 aa, synthetic construct
  REGION 1..10: note = Anoctamin-1 (662-671)
TSDFIPRLVY

SEQ ID NO: 14431 - protein, 11 aa, synthetic construct
  REGION 1..11: note = Actin-binding LIM protein 3 (350-360)
TSEDISQTSKY

SEQ ID NO: 14432 - protein, 11 aa, synthetic construct
  REGION 1..11: note = Serine/threonine-protein kinase MRCK alpha (699-709)
TSELDKLTTLY

SEQ ID NO: 14433 - protein, 10 aa, synthetic construct
  REGION 1..10: note = Catenin beta-1 (297-306)
TTDCLQILAY

SEQ ID NO: 14434 - protein, 10 aa, synthetic construct
  REGION 1..10: note = Junction plakoglobin (287-296)
TTDCLQLLAY

SEQ ID NO: 14435 - protein, 9 aa, synthetic construct
  REGION 1..9: note = ATP-dependent 6-phosphofructokinase, muscle type (251-259)
TTDFIFNLY

SEQ ID NO: 14436 - protein, 9 aa, synthetic construct
  REGION 1..9: note = Serine/threonine-protein kinase N2 (73-81)
TTDKKSLAY

SEQ ID NO: 14437 - protein, 9 aa, synthetic construct
  REGION 1..9: note = Heterogeneous nuclear ribonucleoprotein F (256-264)
TTDLFGRDL

SEQ ID NO: 14438 - protein, 10 aa, synthetic construct
  REGION 1..10: note = Heterogeneous nuclear ribonucleoprotein F (256-265)
TTDLFGRDLS

SEQ ID NO: 14439 - protein, 10 aa, synthetic construct
  REGION 1..10: note = Cofilin-1 (63-72)
TVDDPYATFV

SEQ ID NO: 14440 - protein, 9 aa, synthetic construct
  REGION 1..9: note = Heat shock cognate 71 kDa protein (138-146)
TVTNAVVTV

SEQ ID NO: 14441 - protein, 9 aa, synthetic construct
  REGION 1..9: note = Kelch-like protein 9 (442-450)
TVYGGLMYI

SEQ ID NO: 14442 - protein, 9 aa, synthetic construct
  REGION 1..9: note = Kelch-like protein 13 (468-476)
TVYGGVMYI

SEQ ID NO: 14443 - protein, 10 aa, synthetic construct
  REGION 1..10: note = 60S ribosomal protein L13 (24-33)
TWFNQPARKI

SEQ ID NO: 14444 - protein, 11 aa, synthetic construct
  REGION 1..11: note = WD repeat-containing protein 35 (163-173)
TWSADSKVLLF

SEQ ID NO: 14445 - protein, 12 aa, synthetic construct
  REGION 1..12: note = 26S protease regulatory subunit 4 (183-194)
TYADIGGLDNQI

SEQ ID NO: 14446 - protein, 9 aa, synthetic construct
  REGION 1..9: note = DNA replication licensing factor MCM3 (90-98)
TYAKQYEEF

SEQ ID NO: 14447 - protein, 9 aa, synthetic construct
  REGION 1..9: note = AT-rich interactive domain-containing protein 2 (938-946)
TYAPAIHQI

SEQ ID NO: 14448 - protein, 9 aa, synthetic construct
  REGION 1..9: note = Ataxin-2-like protein (167-175)
TYEGIFKTL

SEQ ID NO: 14449 - protein, 9 aa, synthetic construct
  REGION 1..9: note = Dedicator of cytokinesis protein 7 (588-596)
TYFDKNYNL

SEQ ID NO: 14450 - protein, 9 aa, synthetic construct
  REGION 1..9: note = Tubulin beta-6 chain (156-164)
TYGDLNHLV

SEQ ID NO: 14451 - protein, 9 aa, synthetic construct
  REGION 1..9: note = Cytoplasmic aconitate hydratase (542-550)
TYIKSPPFF

SEQ ID NO: 14452 - protein, 9 aa, synthetic construct
  REGION 1..9: note = Fanconi anemia group M protein (303-311)
TYIQILESF

SEQ ID NO: 14453 - protein, 9 aa, synthetic construct
  REGION 1..9: note = Protein FAM178B (655-663)
TYIRWQELL

SEQ ID NO: 14454 - protein, 9 aa, synthetic construct
  REGION 1..9: note = DNA-dependent protein kinase catalytic subunit (523-531)
TYKDYVDLF

SEQ ID NO: 14455 - protein, 9 aa, synthetic construct
  REGION 1..9: note = ETS translocation variant 3 (134-142)
TYKFNFNKL

SEQ ID NO: 14456 - protein, 11 aa, synthetic construct
  REGION 1..11: note = Leucine-rich repeat-containing protein 58 (257-267)
TYLPREILNLI

SEQ ID NO: 14457 - protein, 10 aa, synthetic construct
  REGION 1..10: note = Eukaryotic translation initiation factor 3 subunit I (47-56)
TYMGHTGAVW

SEQ ID NO: 14458 - protein, 9 aa, synthetic construct
  REGION 1..9: note = F-box only protein 38 (157-165)
TYMPHVHIL

SEQ ID NO: 14459 - protein, 10 aa, synthetic construct
  REGION 1..10: note = Protein polybromo-1 (261-270)
TYNEPGSQVF

SEQ ID NO: 14460 - protein, 10 aa, synthetic construct
  REGION 1..10: note = Cell division cycle and apoptosis regulator protein 1 (191-200)
TYNPNMPFKW

SEQ ID NO: 14461 - protein, 9 aa, synthetic construct
  REGION 1..9: note = Cell cycle control protein 50A (296-304)
TYNYPVHYF

SEQ ID NO: 14462 - protein, 9 aa, synthetic construct
  REGION 1..9: note = Aryl hydrocarbon receptor (47-55)
TYPAELNNI

SEQ ID NO: 14463 - protein, 9 aa, synthetic construct
  REGION 1..9: note = Elongation factor 1-gamma (5-13)
TYPENWRAF

SEQ ID NO: 14464 - protein, 9 aa, synthetic construct
  REGION 1..9: note = Pre-mRNA-processing-splicing factor 8 (224-232)
TYQRWQFTL

SEQ ID NO: 14465 - protein, 9 aa, synthetic construct
  REGION 1..9: note = Helicase SKI2W (746-754)
TYTMILNLL

SEQ ID NO: 14466 - protein, 9 aa, synthetic construct
  REGION 1..9: note = U5 small nuclear ribonucleoprotein 200 kDa helicase (604-612)
TYTQLVRLI

SEQ ID NO: 14467 - protein, 9 aa, synthetic construct
  REGION 1..9: note = Catenin beta-1 (330-338)
TYTYEKLLW

SEQ ID NO: 14468 - protein, 9 aa, synthetic construct
  REGION 1..9: note = Alanine-tRNA ligase, cytoplasmic (24-32)
TYVHSSATI

SEQ ID NO: 14469 - protein, 9 aa, synthetic construct
  REGION 1..9: note = E3 ubiquitin-protein ligase RNF213 (931-939)
TYVKEIEVW

SEQ ID NO: 14470 - protein, 9 aa, synthetic construct
  REGION 1..9: note = tRNA wybutosine-synthesizing protein 4 (507-515)
TYVPWPLML

SEQ ID NO: 14471 - protein, 9 aa, synthetic construct
  REGION 1..9: note = Cholinephosphotransferase 1 (178-186)
TYVSGMLRF

SEQ ID NO: 14472 - protein, 9 aa, synthetic construct
  REGION 1..9: note = Kinectin (1222-1230)
TYVTEVREL

SEQ ID NO: 14473 - protein, 9 aa, synthetic construct
  REGION 1..9: note = Renin receptor (97-105)
VANSIHSLF

SEQ ID NO: 14474 - protein, 9 aa, synthetic construct
  REGION 1..9: note = Elongation factor 1-alpha 1 (433-441)
VAVGVIKAV

SEQ ID NO: 14475 - protein, 9 aa, synthetic construct
  REGION 1..9: note = Glycogen synthase kinase-3 alpha (117-125)
VAYTDIKVI

SEQ ID NO: 14476 - protein, 9 aa, synthetic construct
  REGION 1..9: note = Influenza virus NS1A-binding protein (484-492)
VFDPVTKLW

SEQ ID NO: 14477 - protein, 13 aa, synthetic construct
  REGION 1..13: note = Cathepsin D (178-190)
VFGEATKQPGITF

SEQ ID NO: 14478 - protein, 10 aa, synthetic construct
  REGION 1..10: note = Pre-mRNA-processing factor 19 (271-280)
VFHPSQDLVF

SEQ ID NO: 14479 - protein, 9 aa, synthetic construct
  REGION 1..9: note = Heterogeneous nuclear ribonucleoprotein C-like 1 (18-26)
VFIGNLNTL

SEQ ID NO: 14480 - protein, 11 aa, synthetic construct
  REGION 1..11: note = Tectonic-3 (150-160)
VFMDSNGIRQF

SEQ ID NO: 14481 - protein, 10 aa, synthetic construct
  REGION 1..10: note = Serine/threonine-protein kinase N2 (753-762)
VFSEPRAVFY

SEQ ID NO: 14482 - protein, 9 aa, synthetic construct
  REGION 1..9: note = Paired amphipathic helix protein Sin3b (212-220)
VFTEVANLF

SEQ ID NO: 14483 - protein, 11 aa, synthetic construct
  REGION 1..11: note = Cytospin-A (478-488)
VIDEDVKSGRY

SEQ ID NO: 14484 - protein, 9 aa, synthetic construct
  REGION 1..9: note = Bifunctional glutamate/proline-tRNA ligase (506-514)
VIDPVAPRY

SEQ ID NO: 14485 - protein, 10 aa, synthetic construct
  REGION 1..10: note = Zinc finger protein 638 (208-217)
VIDYGHASKY

SEQ ID NO: 14486 - protein, 9 aa, synthetic construct
  REGION 1..9: note = DNA replication licensing factor MCM4 (151-159)
VIWGTDVNV

SEQ ID NO: 14487 - protein, 9 aa, synthetic construct
  REGION 1..9: note = Eukaryotic initiation factor 4A-II (181-189)
VLDEADEML

SEQ ID NO: 14488 - protein, 9 aa, synthetic construct
  REGION 1..9: note = Protein VPRBP (540-548)
VLDEAGSTV

SEQ ID NO: 14489 - protein, 9 aa, synthetic construct
  REGION 1..9: note = Protein ELYS (1430-1438)
VLDEGLTSV

SEQ ID NO: 14490 - protein, 11 aa, synthetic construct
  REGION 1..11: note = WD repeat-containing protein 48 (472-482)
VLDPNMDLRTV

SEQ ID NO: 14491 - protein, 11 aa, synthetic construct
  REGION 1..11: note = Acylamino-acid-releasing enzyme (226-236)
VLDVESGNISV

SEQ ID NO: 14492 - protein, 10 aa, synthetic construct
  REGION 1..10: note = Serine/threonine-protein kinase Sgk1 (270-279)
VLDYINGGEL

SEQ ID NO: 14493 - protein, 11 aa, synthetic construct
  REGION 1..11: note = Serine/threonine-protein kinase Sgk1 (270-280)
VLDYINGGELF

SEQ ID NO: 14494 - protein, 12 aa, synthetic construct
  REGION 1..12: note = Serine/threonine-protein kinase Sgk1 (270-281)
VLDYINGGELFY

SEQ ID NO: 14495 - protein, 9 aa, synthetic construct
  REGION 1..9: note = RNA-binding protein 34 (333-341)
VLFENTDSV

SEQ ID NO: 14496 - protein, 10 aa, synthetic construct
  REGION 1..10: note = Major prion protein (233-242)
VLFSSPPVIL

SEQ ID NO: 14497 - protein, 9 aa, synthetic construct
  REGION 1..9: note = Protein transport protein Sec16A (1388-1396)
VLIGSNHSL

SEQ ID NO: 14498 - protein, 9 aa, synthetic construct
  REGION 1..9: note = ATP-binding cassette sub-family D member 3 (541-549)
VLKEYLDNV

SEQ ID NO: 14499 - protein, 10 aa, synthetic construct
  REGION 1..10: note = Phosphotriesterase-related protein (148-157)
VLMNEILHGA

SEQ ID NO: 14500 - protein, 11 aa, synthetic construct
  REGION 1..11: note = Eukaryotic translation initiation factor 4 gamma 1 (187-197)
VLMNQPPQIAP

SEQ ID NO: 14501 - protein, 9 aa, synthetic construct
  REGION 1..9: note = GDP-L-fucose synthase (187-195)
VLPGLIHKV

SEQ ID NO: 14502 - protein, 9 aa, synthetic construct
  REGION 1..9: note = CCR4-NOT transcription complex subunit 4 (471-479)
VLPQRFPQF

SEQ ID NO: 14503 - protein, 9 aa, synthetic construct
  REGION 1..9: note = Mini-chromosome maintenance complex-binding protein (204-212)
VLPSVLNKF

SEQ ID NO: 14504 - protein, 10 aa, synthetic construct
  REGION 1..10: note = Fatty acid synthase (1496-1505)
VLQGDLVMNV

SEQ ID NO: 14505 - protein, 9 aa, synthetic construct
  REGION 1..9: note = Coatomer subunit alpha (130-138)
VLTGHNHYV

SEQ ID NO: 14506 - protein, 9 aa, synthetic construct
  REGION 1..9: note = Protein O-GlcNAcase (247-255)
VLWTGPKVV

SEQ ID NO: 14507 - protein, 11 aa, synthetic construct
  REGION 1..11: note = Integral membrane protein 2C (51-61)
VLYEDSLSSQV

SEQ ID NO: 14508 - protein, 9 aa, synthetic construct
  REGION 1..9: note = Deoxynucleotidyltransferase terminal-interacting protein 2 (359-367)
VMKSLTQTF

SEQ ID NO: 14509 - protein, 10 aa, synthetic construct
  REGION 1..10: note = Protein C-ets-2 (78-87)
VMSQALKATF

SEQ ID NO: 14510 - protein, 8 aa, synthetic construct
  REGION 1..8: note = ER membrane protein complex subunit 1 (192-199)
VPFSHVNI

SEQ ID NO: 14511 - protein, 9 aa, synthetic construct
  REGION 1..9: note = ER membrane protein complex subunit 1 (192-200)
VPFSHVNIV

SEQ ID NO: 14512 - protein, 8 aa, synthetic construct
  REGION 1..8: note = Interferon-induced 35 kDa protein (52-59)
VPFSVPKI

SEQ ID NO: 14513 - protein, 9 aa, synthetic construct
  REGION 1..9: note = Protein transport protein Sec16A (69-77)
VPHFPTPSI

SEQ ID NO: 14514 - protein, 10 aa, synthetic construct
  REGION 1..10: note = Filamin-A (436-445)
VPIPRSPYTV

SEQ ID NO: 14515 - protein, 9 aa, synthetic construct
  REGION 1..9: note = Tubulin alpha-1C chain (394-402)
VPKDVNAAI

SEQ ID NO: 14516 - protein, 9 aa, synthetic construct
  REGION 1..9: note = Helicase with zinc finger domain 2 (656-664)
VPVGFFSHI

SEQ ID NO: 14517 - protein, 9 aa, synthetic construct
  REGION 1..9: note = RNA-binding protein NOB1 (300-308)
VSDDGTLHM

SEQ ID NO: 14518 - protein, 11 aa, synthetic construct
  REGION 1..11: note = rRNA 2'-O-methyltransferase fibrillarin (174-184)
VSDIVGPDGLV

SEQ ID NO: 14519 - protein, 10 aa, synthetic construct
  REGION 1..10: note = Glyoxalase domain-containing protein 4 (145-154)
VSDLQKSLNY

SEQ ID NO: 14520 - protein, 9 aa, synthetic construct
  REGION 1..9: note = Tripeptidyl-peptidase 1 (68-76)
VSDPSSPQY

SEQ ID NO: 14521 - protein, 9 aa, synthetic construct
  REGION 1..9: note = DENN domain-containing protein 1B (677-685)
VSDPTSGLD

SEQ ID NO: 14522 - protein, 10 aa, synthetic construct
  REGION 1..10: note = DENN domain-containing protein 1B (677-686)
VSDPTSGLDF

SEQ ID NO: 14523 - protein, 11 aa, synthetic construct
  REGION 1..11: note = Liprin-beta-1 (207-217)
VSEMDSERLQY

SEQ ID NO: 14524 - protein, 9 aa, synthetic construct
  REGION 1..9: note = DnaJ homolog subfamily B member 12 (287-295)
VTDHLGVVY

SEQ ID NO: 14525 - protein, 9 aa, synthetic construct
  REGION 1..9: note = Selenocysteine insertion sequence-binding protein 2 (645-653)
VTDLLKELV

SEQ ID NO: 14526 - protein, 9 aa, synthetic construct
  REGION 1..9: note = Disabled homolog 2 (128-136)
VTDNRAFGY

SEQ ID NO: 14527 - protein, 9 aa, synthetic construct
  REGION 1..9: note = Integrin beta-1 (77-85)
VTEEFQPVY

SEQ ID NO: 14528 - protein, 11 aa, synthetic construct
  REGION 1..11: note = Neutral alpha-glucosidase AB (29-39)
VTEGGEPYRLY

SEQ ID NO: 14529 - protein, 9 aa, synthetic construct
  REGION 1..9: note = Cohesin subunit SA-1 (101-109)
VVDDWIESY

SEQ ID NO: 14530 - protein, 10 aa, synthetic construct
  REGION 1..10: note = Tubulin-tyrosine ligase (13-22)
VYAEVSRLLL

SEQ ID NO: 14531 - protein, 9 aa, synthetic construct
  REGION 1..9: note = E3 ubiquitin-protein ligase MARCH6 (744-752)
VYANGIRNI

SEQ ID NO: 14532 - protein, 9 aa, synthetic construct
  REGION 1..9: note = Enoyl-CoA delta isomerase 2, mitochondrial (230-238)
VYASDRATF

SEQ ID NO: 14533 - protein, 9 aa, synthetic construct
  REGION 1..9: note = Receptor tyrosine-protein kinase erbB-3 (110-118)
VYDGKFAIF

SEQ ID NO: 14534 - protein, 9 aa, synthetic construct
  REGION 1..9: note = SRR1-like protein (178-186)
VYDPLFSQL

SEQ ID NO: 14535 - protein, 11 aa, synthetic construct
  REGION 1..11: note = Prolow-density lipoprotein receptor-related protein 1 (736-746)
VYEGPELNHAF

SEQ ID NO: 14536 - protein, 10 aa, synthetic construct
  REGION 1..10: note = Partitioning defective 3 homolog B (682-691)
VYFPDQHINF

SEQ ID NO: 14537 - protein, 9 aa, synthetic construct
  REGION 1..9: note = Exocyst complex component 6B (452-460)
VYGFPVNQL

SEQ ID NO: 14538 - protein, 11 aa, synthetic construct
  REGION 1..11: note = Phosphatidylinositol-binding clathrin assembly protein (87-97)
VYGNERFIQYL

SEQ ID NO: 14539 - protein, 9 aa, synthetic construct
  REGION 1..9: note = Alanine-tRNA ligase, cytoplasmic (92-100)
VYHHTFFEM

SEQ ID NO: 14540 - protein, 9 aa, synthetic construct
  REGION 1..9: note = Elongator complex protein 1 (1236-1244)
VYHILKVLF

SEQ ID NO: 14541 - protein, 9 aa, synthetic construct
  REGION 1..9: note = Sterol regulatory element-binding protein cleavage-activating protein (751-759)
VYIDQTMVL

SEQ ID NO: 14542 - protein, 9 aa, synthetic construct
  REGION 1..9: note = Prelamin-A/C (44-52)
VYIDRVRSL

SEQ ID NO: 14543 - protein, 9 aa, synthetic construct
  REGION 1..9: note = F-box only protein 42 (181-189)
VYKDLLVLF

SEQ ID NO: 14544 - protein, 9 aa, synthetic construct
  REGION 1..9: note = mRNA cap guanine-N7 methyltransferase (390-398)
VYKKTFLEF

SEQ ID NO: 14545 - protein, 9 aa, synthetic construct
  REGION 1..9: note = Kelch repeat and BTB domain-containing protein 6 (407-415)
VYKPAQNSW

SEQ ID NO: 14546 - protein, 9 aa, synthetic construct
  REGION 1..9: note = Brain-specific angiogenesis inhibitor 1-associated protein 2 (16-24)
VYKTIMEQF

SEQ ID NO: 14547 - protein, 9 aa, synthetic construct
  REGION 1..9: note = Polymerase I and transcript release factor (225-233)
VYKVPPFTF

SEQ ID NO: 14548 - protein, 9 aa, synthetic construct
  REGION 1..9: note = Sarcolemmal membrane-associated protein (22-30)
VYLDEPIKI

SEQ ID NO: 14549 - protein, 11 aa, synthetic construct
  REGION 1..11: note = Molybdenum cofactor sulfurase (50-60)
VYLDHAGATLF

SEQ ID NO: 14550 - protein, 10 aa, synthetic construct
  REGION 1..10: note = Plectin (3681-3690)
VYLPGSRQTL

SEQ ID NO: 14551 - protein, 9 aa, synthetic construct
  REGION 1..9: note = Nuclear nucleic acid-binding protein C1D (92-100)
VYMNRVKEI

SEQ ID NO: 14552 - protein, 9 aa, synthetic construct
  REGION 1..9: note = Pre-mRNA-splicing factor SPF27 (137-145)
VYNENLVHM

SEQ ID NO: 14553 - protein, 9 aa, synthetic construct
  REGION 1..9: note = Kelch-like protein 11 (473-481)
VYNPELDKW

SEQ ID NO: 14554 - protein, 9 aa, synthetic construct
  REGION 1..9: note = Kelch repeat and BTB domain-containing protein 6 (536-544)
VYNPVRAEW

SEQ ID NO: 14555 - protein, 11 aa, synthetic construct
  REGION 1..11: note = Zinc transporter ZIP6 (191-201)
VYNTVSEGTHF

SEQ ID NO: 14556 - protein, 10 aa, synthetic construct
  REGION 1..10: note = BAG family molecular chaperone regulator 3 (113-122)
VYPQPGMQRF

SEQ ID NO: 14557 - protein, 11 aa, synthetic construct
  REGION 1..11: note = 3-ketodihydrosphingosine reductase (150-160)
VYPSRAVITTM

SEQ ID NO: 14558 - protein, 9 aa, synthetic construct
  REGION 1..9: note = Hemoglobin subunit gamma-2 (35-43)
VYPWTQRFF

SEQ ID NO: 14559 - protein, 9 aa, synthetic construct
  REGION 1..9: note = Nuclear factor of activated T-cells 5 (855-863)
VYQQTSHMM

SEQ ID NO: 14560 - protein, 9 aa, synthetic construct
  REGION 1..9: note = Anaphase-promoting complex subunit 2 (564-572)
VYSAGVYRL

SEQ ID NO: 14561 - protein, 11 aa, synthetic construct
  REGION 1..11: note = N-acetylgalactosamine kinase (311-321)
VYSEAARVLQF

SEQ ID NO: 14562 - protein, 9 aa, synthetic construct
  REGION 1..9: note = Zinc transporter 6 (62-70)
VYSFGFERL

SEQ ID NO: 14563 - protein, 9 aa, synthetic construct
  REGION 1..9: note = La-related protein 4 (319-327)
VYSIVPQSW

SEQ ID NO: 14564 - protein, 11 aa, synthetic construct
  REGION 1..11: note = Pre-mRNA-processing-splicing factor 8 (1177-1187)
VYSKDNPNLLF

SEQ ID NO: 14565 - protein, 9 aa, synthetic construct
  REGION 1..9: note = Condensin-2 complex subunit H2 (66-74)
VYSKKVEYL

SEQ ID NO: 14566 - protein, 9 aa, synthetic construct
  REGION 1..9: note = Zinc transporter 7 (318-326)
VYSLQEQHF

SEQ ID NO: 14567 - protein, 11 aa, synthetic construct
  REGION 1..11: note = Ribonuclease P protein subunit p30 (155-165)
VYSPAIKDSTM

SEQ ID NO: 14568 - protein, 9 aa, synthetic construct
  REGION 1..9: note = E3 ubiquitin-protein ligase MGRN1 (148-156)
VYSPKSPSL

SEQ ID NO: 14569 - protein, 9 aa, synthetic construct
  REGION 1..9: note = DDB1- and CUL4-associated factor 13 (310-318)
VYTGIDHHW

SEQ ID NO: 14570 - protein, 10 aa, synthetic construct
  REGION 1..10: note = Nuclear pore complex protein Nup153 (667-676)
VYTRPAISSF

SEQ ID NO: 14571 - protein, 9 aa, synthetic construct
  REGION 1..9: note = Tensin-2 (334-342)
VYTSGVYHI

SEQ ID NO: 14572 - protein, 9 aa, synthetic construct
  REGION 1..9: note = Pre-mRNA-processing-splicing factor 8 (809-817)
VYTTTVHWL

SEQ ID NO: 14573 - protein, 9 aa, synthetic construct
  REGION 1..9: note = Volume-regulated anion channel subunit LRRC8E (11-19)
VYVEKISFL

SEQ ID NO: 14574 - protein, 9 aa, synthetic construct
  REGION 1..9: note = Cleavage and polyadenylation specificity factor subunit 7 (127-135)
VYVGSFSWW

SEQ ID NO: 14575 - protein, 9 aa, synthetic construct
  REGION 1..9: note = Kinesin-like protein KIF3B (174-182)
VYVKDLSSF

SEQ ID NO: 14576 - protein, 9 aa, synthetic construct
  REGION 1..9: note = Cytochrome c oxidase assembly protein COX11, mitochondrial (223-231)
VYVLESWHL

SEQ ID NO: 14577 - protein, 9 aa, synthetic construct
  REGION 1..9: note = Splicing factor 3B subunit 1 (254-262)
VYWKIYNSI

SEQ ID NO: 14578 - protein, 9 aa, synthetic construct
  REGION 1..9: note Dolichyl-diphosphooligosaccharide-proteinosyltransferase subunit 2 (453-461)
VYWTQLNMF

SEQ ID NO: 14579 - protein, 9 aa, synthetic construct
  REGION 1..9: note = Tripartite motif-containing protein 47 (182-190)
YADRALAFY

SEQ ID NO: 14580 - protein, 9 aa, synthetic construct
  REGION 1..9: note = Monocarboxylate transporter 1 (34-42)
YAFPKSITV

SEQ ID NO: 14581 - protein, 8 aa, synthetic construct
  REGION 1..8: note = DDB1- and CUL4-associated factor 4 (355-362)
YAYLPLHV

SEQ ID NO: 14582 - protein, 10 aa, synthetic construct
  REGION 1..10: note = Septin-9 (180-189)
YFIPATGHSL

SEQ ID NO: 14583 - protein, 9 aa, synthetic construct
  REGION 1..9: note = Serine/threonine-protein kinase ATR (1253-1261)
YFLPDHPEL

SEQ ID NO: 14584 - protein, 9 aa, synthetic construct
  REGION 1..9: note = Cytochrome c oxidase subunit 2 (113-121)
YGGLIFNSY

SEQ ID NO: 14585 - protein, 9 aa, synthetic construct
  REGION 1..9: note = Sterol O-acyltransferase 1 (161-169)
YIDEGRLVL

SEQ ID NO: 14586 - protein, 9 aa, synthetic construct
  REGION 1..9: note = Unconventional myosin-Ic (44-52)
YIGPVLVSV

SEQ ID NO: 14587 - protein, 9 aa, synthetic construct
  REGION 1..9: note = DENN domain-containing protein 5B (228-236)
YIHNILYEV

SEQ ID NO: 14588 - protein, 9 aa, synthetic construct
  REGION 1..9: note = Kinesin-like protein KIF1A (510-518)
YIKDGITRV

SEQ ID NO: 14589 - protein, 12 aa, synthetic construct
  REGION 1..12: note = Signal recognition particle 9 kDa protein (18-29)
YLADPMKARVVL

SEQ ID NO: 14590 - protein, 9 aa, synthetic construct
  REGION 1..9: note = Ras GTPase-activating-like protein IQGAP2 (898-906)
YLAKLIFQM

SEQ ID NO: 14591 - protein, 9 aa, synthetic construct
  REGION 1..9: note = Kinesin-like protein KIF13A (1108-1116)
YLDEQIKKV

SEQ ID NO: 14592 - protein, 9 aa, synthetic construct
  REGION 1..9: note = Metastasis-associated protein MTA3 (123-131)
YLDKEDTFF

SEQ ID NO: 14593 - protein, 8 aa, synthetic construct
  REGION 1..8: note = Guanine nucleotide-binding protein-like 3-like protein (294-301)
YLDKFIRL

SEQ ID NO: 14594 - protein, 9 aa, synthetic construct
  REGION 1..9: note = DNA topoisomerase 1 (723-731)
YLDPRITVA

SEQ ID NO: 14595 - protein, 10 aa, synthetic construct
  REGION 1..10: note = Proteasome activator complex subunit 3 (188-197)
YLDQISRYYI

SEQ ID NO: 14596 - protein, 12 aa, synthetic construct
  REGION 1..12: note = Lysosomal protective protein (125-136)
YLESPAGVGFSY

SEQ ID NO: 14597 - protein, 11 aa, synthetic construct
  REGION 1..11: note = ATP synthase F(0) complex subunit B1, mitochondrial (165-175)
YLFDVQRNNIA

SEQ ID NO: 14598 - protein, 12 aa, synthetic construct
  REGION 1..12: note = ATP synthase F(0) complex subunit B1, mitochondrial (165-176)
YLFDVQRNNIAM

SEQ ID NO: 14599 - protein, 9 aa, synthetic construct
  REGION 1..9: note = WD repeat-containing protein 81 (72-80)
YLFEPVAKA

SEQ ID NO: 14600 - protein, 9 aa, synthetic construct
  REGION 1..9: note = WD repeat and FYVE domain-containing protein 3 (158-166)
YLFFDLPHV

SEQ ID NO: 14601 - protein, 9 aa, synthetic construct
  REGION 1..9: note = LIM domain-containing protein ajuba (391-399)
YLFSGFQEA

SEQ ID NO: 14602 - protein, 9 aa, synthetic construct
  REGION 1..9: note = Heat shock cognate 71 kDa protein (134-142)
YLGKTVTNA

SEQ ID NO: 14603 - protein, 10 aa, synthetic construct
  REGION 1..10: note = Intraflagellar transport protein 172 homolog (461-470)
YLIDIKTIAI

SEQ ID NO: 14604 - protein, 9 aa, synthetic construct
  REGION 1..9: note = Ankyrin repeat domain-containing protein 17 (599-607)
YLLDYPNNL

SEQ ID NO: 14605 - protein, 10 aa, synthetic construct
  REGION 1..10: note = Ankyrin repeat domain-containing protein 17 (599-608)
YLLDYPNNLL

SEQ ID NO: 14606 - protein, 11 aa, synthetic construct
  REGION 1..11: note = Filamin-A (148-158)
YLLKDKGEYTL

SEQ ID NO: 14607 - protein, 9 aa, synthetic construct
  REGION 1..9: note = Condensin complex subunit 3 (370-378)
YLLSYIQSI

SEQ ID NO: 14608 - protein, 9 aa, synthetic construct
  REGION 1..9: note = UDP-glucose 6-dehydrogenase (143-151)
YLMDEGAHL

SEQ ID NO: 14609 - protein, 9 aa, synthetic construct
  REGION 1..9: note = L-lactate dehydrogenase A chain (172-180)
YLMGERLGV

SEQ ID NO: 14610 - protein, 12 aa, synthetic construct
  REGION 1..12: note = H/ACA ribonucleoprotein complex subunit 3 (6-17)
YLNEQGDRVYTL

SEQ ID NO: 14611 - protein, 9 aa, synthetic construct
  REGION 1..9: note = POZ-, AT hook-, and zinc finger-containing protein 1 (645-653)
YLNKHIQKV

SEQ ID NO: 14612 - protein, 9 aa, synthetic construct
  REGION 1..9: note = Structural maintenance of chromosomes protein 4 (748-756)
YLNVQVKEL

SEQ ID NO: 14613 - protein, 9 aa, synthetic construct
  REGION 1..9: note = Mitochondrial-processing peptidase subunit alpha (107-115)
YLSGIAHFL

SEQ ID NO: 14614 - protein, 9 aa, synthetic construct
  REGION 1..9: note = Gelsolin (409-417)
YLSSHIANV

SEQ ID NO: 14615 - protein, 9 aa, synthetic construct
  REGION 1..9: note = Protein S100-A10 (25-33)
YLTKEDLRV

SEQ ID NO: 14616 - protein, 10 aa, synthetic construct
  REGION 1..10: note = Plectin (73-82)
YLTNEGIAHL

SEQ ID NO: 14617 - protein, 11 aa, synthetic construct
  REGION 1..11: note = Mitochondrial carrier homolog 1 (278-288)
YLVDDSFSQAL

SEQ ID NO: 14618 - protein, 9 aa, synthetic construct
  REGION 1..9: note = Thimet oligopeptidase (612-620)
YLWSEVYSM

SEQ ID NO: 14619 - protein, 12 aa, synthetic construct
  REGION 1..12: note = SWI/SNF-related matrix-associated actin-dependent regulator of chromatin subfamily A containing DEAD/H box 1 (108-119)
YLYQEGNNGPHL

SEQ ID NO: 14620 - protein, 9 aa, synthetic construct
  REGION 1..9: note = Transcriptional enhancer factor TEF-3 (369-377)
YMINFIHKL

SEQ ID NO: 14621 - protein, 8 aa, synthetic construct
  REGION 1..8: note = Pterin-4-alpha-carbinolamine dehydratase (70-77)
YNKVHITL

SEQ ID NO: 14622 - protein, 8 aa, synthetic construct
  REGION 1..8: note = Mid1-interacting protein 1 (7-14)
YNQKHSLF

SEQ ID NO: 14623 - protein, 9 aa, synthetic construct
  REGION 1..9: note = Phosducin-like protein 3 (158-166)
YPDRNLPTI

SEQ ID NO: 14624 - protein, 11 aa, synthetic construct
  REGION 1..11: note = Lipase maturation factor 2 (522-532)
YPFHKQPPTYV

SEQ ID NO: 14625 - protein, 8 aa, synthetic construct
  REGION 1..8: note = Ubiquitin-conjugating enzyme E2 K (66-73)
YPFNPPKV

SEQ ID NO: 14626 - protein, 12 aa, synthetic construct
  REGION 1..12: note Dolichyl-diphosphooligosaccharide-proteinosyltransferase 48 kDa subunit (233-244)
YPHAVGKNTLLI

SEQ ID NO: 14627 - protein, 9 aa, synthetic construct
  REGION 1..9: note = Ganglioside-induced differentiation-associated protein 2 (176-184)
YPLEDATHI

SEQ ID NO: 14628 - protein, 9 aa, synthetic construct
  REGION 1..9: note = TFIIH basal transcription factor complex helicase XPD subunit (39-47)
YPLEVTKLI

SEQ ID NO: 14629 - protein, 9 aa, synthetic construct
  REGION 1..9: note = AP-2 complex subunit beta (421-429)
YPNKYESII

SEQ ID NO: 14630 - protein, 10 aa, synthetic construct
  REGION 1..10: note = BAG family molecular chaperone regulator 4 (184-193)
YPYGDGNRSV

SEQ ID NO: 14631 - protein, 11 aa, synthetic construct
  REGION 1..11: note = InaD-like protein (703-713)
YQDPLDPTRSV

SEQ ID NO: 14632 - protein, 11 aa, synthetic construct
  REGION 1..11: note = DNA mismatch repair protein Msh6 (977-987)
YQLEIPENFTT

SEQ ID NO: 14633 - protein, 9 aa, synthetic construct
  REGION 1..9: note = Ubiquitin-like-conjugating enzyme ATG3 (210-218)
YQTPRLWLF

SEQ ID NO: 14634 - protein, 9 aa, synthetic construct
  REGION 1..9: note = RNA binding protein fox-1 homolog 2 (317-325)
YSDGYGRVY

SEQ ID NO: 14635 - protein, 9 aa, synthetic construct
  REGION 1..9: note = Signal transducer and activator of transcription 3 (22-30)
YSDSFPMEL

SEQ ID NO: 14636 - protein, 10 aa, synthetic construct
  REGION 1..10: note = Protein TANC2 (62-71)
YSENVERTKY

SEQ ID NO: 14637 - protein, 8 aa, synthetic construct
  REGION 1..8: note = Putative heat shock protein HSP 90-beta 2 (33-40)
YSNKEIFL

SEQ ID NO: 14638 - protein, 11 aa, synthetic construct
  REGION 1..11: note = Probable E3 ubiquitin-protein ligase HECTD2 (624-634)
YTDFLLNKSIY

SEQ ID NO: 14639 - protein, 9 aa, synthetic construct
  REGION 1..9: note = Tight junction protein ZO-1 (1054-1062)
YTDQFSRNY

SEQ ID NO: 14640 - protein, 9 aa, synthetic construct
  REGION 1..9: note = RNA-binding protein FUS (324-332)
YTDRETGKL

SEQ ID NO: 14641 - protein, 10 aa, synthetic construct
  REGION 1..10: note = Cytochrome c oxidase subunit 2 (110-119)
YTDYGGLIFN

SEQ ID NO: 14642 - protein, 11 aa, synthetic construct
  REGION 1..11: note = Cytochrome c oxidase subunit 2 (110-120)
YTDYGGLIFNS

SEQ ID NO: 14643 - protein, 8 aa, synthetic construct
  REGION 1..8: note = Peroxisomal multifunctional enzyme type 2 (339-346)
YTELEAIM

SEQ ID NO: 14644 - protein, 9 aa, synthetic construct
  REGION 1..9: note = Peroxisomal multifunctional enzyme type 2 (339-347)
YTELEAIMY

SEQ ID NO: 14645 - protein, 9 aa, synthetic construct
  REGION 1..9: note = RNA-binding protein FUS (6-14)
YTQQATQSY

SEQ ID NO: 14646 - protein, 10 aa, synthetic construct
  REGION 1..10: note = F-box only protein 11 (224-233)
YTSYPMHDFY

SEQ ID NO: 14647 - protein, 9 aa, synthetic construct
  REGION 1..9: note = Zinc finger and BTB domain-containing protein 38 (794-802)
YVADPGGSL

SEQ ID NO: 14648 - protein, 8 aa, synthetic construct
  REGION 1..8: note = Bax inhibitor 1 (92-99)
YVHMVTHF

SEQ ID NO: 14649 - protein, 12 aa, synthetic construct
  REGION 1..12: note = Negative elongation factor E (265-276)
YVYGEDMTPTLL

SEQ ID NO: 14650 - protein, 9 aa, synthetic construct
  REGION 1..9: note = Medium-chain specific acyl-CoA dehydrogenase, mitochondrial (316-324)
YYASIAKAF

SEQ ID NO: 14651 - protein, 10 aa, synthetic construct
  REGION 1..10: note = Eukaryotic translation initiation factor 3 subunit A (275-284)
YYNKVSTVFW

SEQ ID NO: 14652 - protein, 11 aa, synthetic construct
  REGION 1..11: note = Importin-7 (763-773)
YYNPHLLLNTL

SEQ ID NO: 14653 - protein, 9 aa, synthetic construct
  REGION 1..9: note = Prenylcysteine oxidase 1 (220-228)
YYQHIVTTL

SEQ ID NO: 14654 - protein, 9 aa, synthetic construct
  REGION 1..9: note = Protein PAT1 homolog 1 (367-375)
YYQNYFEKL

SEQ ID NO: 14655 - protein, 9 aa, synthetic construct
  REGION 1..9: note = ATP-binding cassette sub-family F member 1 (528-536)
YYRGNYMTF

SEQ ID NO: 14656 - protein, 9 aa, synthetic construct
  REGION 1..9: note = Polypyrimidine tract-binding protein 2 (124-132)
YYSAVTPHL

SEQ ID NO: 14657 - protein, 9 aa, synthetic construct
  REGION 1..9: note = Eukaryotic translation initiation factor 2A (345-353)
YYSPHGHIL

SEQ ID NO: 14658 - protein, 9 aa, synthetic construct
  REGION 1..9: note = 26S protease regulatory subunit 6B (111-119)
YYVRILSTI

SEQ ID NO: 14659 - protein, 11 aa, synthetic construct
  REGION 1..11: note = Glutathione peroxidase 1 (7-17)
AAAAAAAQSVY

SEQ ID NO: 14660 - protein, 9 aa, synthetic construct
  REGION 1..9: note = Interferon alpha-inducible protein 27-like protein 2 (6-14)
AAAAVGGAL

SEQ ID NO: 14661 - protein, 9 aa, synthetic construct
  REGION 1..9: note = Pumilio homolog 2 (304-312)
AAANPTLAF

SEQ ID NO: 14662 - protein, 9 aa, synthetic construct
  REGION 1..9: note = Angiomotin (918-926)
AAAPAAAAA

SEQ ID NO: 14663 - protein, 9 aa, synthetic construct
  REGION 1..9: note = RNA-binding protein 38 (217-225)
AAAPAGTTF

SEQ ID NO: 14664 - protein, 10 aa, synthetic construct
  REGION 1..10: note = Protein SON (246-255)
AAAPVPTTTL

SEQ ID NO: 14665 - protein, 9 aa, synthetic construct
  REGION 1..9: note = Kelch-like protein 7 (15-23)
AAASHFFNL

SEQ ID NO: 14666 - protein, 9 aa, synthetic construct
  REGION 1..9: note = Ephrin-A1 (167-175)
AADDPEVRV

SEQ ID NO: 14667 - protein, 9 aa, synthetic construct
  REGION 1..9: note = RNA-binding protein 4 (47-55)
AAEDAIRNL

SEQ ID NO: 14668 - protein, 9 aa, synthetic construct
  REGION 1..9: note = Death-associated protein kinase 3 (334-342)
AAEEGLREL

SEQ ID NO: 14669 - protein, 9 aa, synthetic construct
  REGION 1..9: note = Perilipin-3 (62-70)
AAEKGVRTL

SEQ ID NO: 14670 - protein, 8 aa, synthetic construct
  REGION 1..8: note = Ribosome-binding protein 1 (105-112)
AAFEKQVL

SEQ ID NO: 14671 - protein, 9 aa, synthetic construct
  REGION 1..9: note = Glycine dehydrogenase (decarboxylating), mitochondrial (969-977)
AAFPLPFVK

SEQ ID NO: 14672 - protein, 9 aa, synthetic construct
  REGION 1..9: note = DNA-directed RNA polymerase II subunit RPB1 (1495-1503)
AAGPTGMFF

SEQ ID NO: 14673 - protein, 9 aa, synthetic construct
  REGION 1..9: note = Programmed cell death protein 4 (282-290)
AALDKATVL

SEQ ID NO: 14674 - protein, 9 aa, synthetic construct
  REGION 1..9: note = Leucine-rich repeat-containing protein 59 (36-44)
AALPKATIL

SEQ ID NO: 14675 - protein, 9 aa, synthetic construct
  REGION 1..9: note = E3 ubiquitin-protein ligase BRE1B (225-233)
AAQAHTREL

SEQ ID NO: 14676 - protein, 11 aa, synthetic construct
  REGION 1..11: note = NEDD8-activating enzyme E1 regulatory subunit (495-505)
AAQEVIKIITK

SEQ ID NO: 14677 - protein, 9 aa, synthetic construct
  REGION 1..9: note = Protein FAM50A (7-15)
AASEAGRAM

SEQ ID NO: 14678 - protein, 9 aa, synthetic construct
  REGION 1..9: note = 4F2 cell-surface antigen heavy chain (127-135)
AASGAAMSL

SEQ ID NO: 14679 - protein, 9 aa, synthetic construct
  REGION 1..9: note = Nuclear pore membraneoprotein 210 (1023-1031)
AASPIITLV

SEQ ID NO: 14680 - protein, 9 aa, synthetic construct
  REGION 1..9: note = Cirhin (108-116)
AASPSGSQL

SEQ ID NO: 14681 - protein, 9 aa, synthetic construct
  REGION 1..9: note = 40S ribosomal protein SA (92-100)
AATGATPIA

SEQ ID NO: 14682 - protein, 9 aa, synthetic construct
  REGION 1..9: note = ELM2 and SANT domain-containing protein 1 (966-974)
AAVKATQTL

SEQ ID NO: 14683 - protein, 9 aa, synthetic construct
  REGION 1..9: note = UPF0668 protein C10orf76 (556-564)
AAVNHISQL

SEQ ID NO: 14684 - protein, 9 aa, synthetic construct
  REGION 1..9: note = Leucine-rich repeat and calponin homology domain-containing protein 3 (56-64)
AAVTGVLSL

SEQ ID NO: 14685 - protein, 9 aa, synthetic construct
  REGION 1..9: note = Synaptonemal complex protein SC65 (428-436)
AEAEPEPEL

SEQ ID NO: 14686 - protein, 9 aa, synthetic construct
  REGION 1..9: note = Rhotekin (187-195)
AEAGPDFEL

SEQ ID NO: 14687 - protein, 10 aa, synthetic construct
  REGION 1..10: note = Catenin alpha-1 (750-759)
AEAGSRMDKL

SEQ ID NO: 14688 - protein, 9 aa, synthetic construct
  REGION 1..9: note = Leucine-tRNA ligase, cytoplasmic (461-469)
AEAKEKIYL

SEQ ID NO: 14689 - protein, 12 aa, synthetic construct
  REGION 1..12: note = 5'-AMP-activated protein kinase catalytic subunit alpha-1 (501-512)
AEAQGKSSEVSL

SEQ ID NO: 14690 - protein, 9 aa, synthetic construct
  REGION 1..9: note = Something about silencing protein 10 (119-127)
AEASVDPSL

SEQ ID NO: 14691 - protein, 11 aa, synthetic construct
  REGION 1..11: note = Mediator of DNA damage checkpoint protein 1 (431-441)
AEEDMPQRVVL

SEQ ID NO: 14692 - protein, 9 aa, synthetic construct
  REGION 1..9: note = NudC domain-containing protein 1 (175-183)
AEEHSIATL

SEQ ID NO: 14693 - protein, 9 aa, synthetic construct
  REGION 1..9: note = Peroxisome assembly protein 26 (71-79)
AEEPAGTSL

SEQ ID NO: 14694 - protein, 9 aa, synthetic construct
  REGION 1..9: note = Alpha-actinin-4 (804-812)
AEFNRIMSL

SEQ ID NO: 14695 - protein, 9 aa, synthetic construct
  REGION 1..9: note = Coatomer subunit beta' (333-341)
AEIKDGERL

SEQ ID NO: 14696 - protein, 11 aa, synthetic construct
  REGION 1..11: note = Stathmin (73-83)
AEKREHEKEVL

SEQ ID NO: 14697 - protein, 9 aa, synthetic construct
  REGION 1..9: note = Heat shock protein 105 kDa (311-319)
AELLQKIEV

SEQ ID NO: 14698 - protein, 9 aa, synthetic construct
  REGION 1..9: note = LisH domain-containing protein ARMC9 (557-565)
AEMIRQIEF

SEQ ID NO: 14699 - protein, 12 aa, synthetic construct
  REGION 1..12: note = V-type proton ATPase subunit C 1 (170-181)
AEMVVPRSSNVL

SEQ ID NO: 14700 - protein, 11 aa, synthetic construct
  REGION 1..11: note = Centromere protein F (2273-2283)
AENSKAEVETL

SEQ ID NO: 14701 - protein, 11 aa, synthetic construct
  REGION 1..11: note = Thioredoxin domain-containing protein 5 (207-217)
AEPEADKGTVL

SEQ ID NO: 14702 - protein, 11 aa, synthetic construct
  REGION 1..11: note = Cell cycle and apoptosis regulator protein 2 (303-313)
AEQQDSGRLYL

SEQ ID NO: 14703 - protein, 10 aa, synthetic construct
  REGION 1..10: note = AP-1 complex subunit beta-1 (188-197)
AESHPSSNLL

SEQ ID NO: 14704 - protein, 11 aa, synthetic construct
  REGION 1..11: note = Clathrin heavy chain 1 (493-503)
AETGQVQKIVL

SEQ ID NO: 14705 - protein, 13 aa, synthetic construct
  REGION 1..13: note = T-complex protein 1 subunit eta (76-88)
AEVGDGTTSVTLL

SEQ ID NO: 14706 - protein, 9 aa, synthetic construct
  REGION 1..9: note = Heterogeneous nuclear ribonucleoprotein M (129-137)
AEVLNKHSL

SEQ ID NO: 14707 - protein, 9 aa, synthetic construct
  REGION 1..9: note = X-box-binding protein 1 (28-36)
AGAPAGQAL

SEQ ID NO: 14708 - protein, 9 aa, synthetic construct
  REGION 1..9: note = Protein YIF1A (153-161)
AGMALGIQK

SEQ ID NO: 14709 - protein, 9 aa, synthetic construct
  REGION 1..9: note = PAB-dependent poly(A)-specific ribonuclease subunit PAN2 (870-878)
AHIKVGETY

SEQ ID NO: 14710 - protein, 9 aa, synthetic construct
  REGION 1..9: note = Coatomer subunit gamma-1 (45-53)
AHILTKILY

SEQ ID NO: 14711 - protein, 9 aa, synthetic construct
  REGION 1..9: note = Clathrin heavy chain 1 (1312-1320)
AHMGMFTEL

SEQ ID NO: 14712 - protein, 9 aa, synthetic construct
  REGION 1..9: note = Elongation factor 2 (491-499)
AHNMRVMKF

SEQ ID NO: 14713 - protein, 9 aa, synthetic construct
  REGION 1..9: note = Methionine-R-sulfoxide reductase B1 (38-46)
AHSSPWPAF

SEQ ID NO: 14714 - protein, 9 aa, synthetic construct
  REGION 1..9: note = Calcineurin-binding protein cabin-1 (1962-1970)
AHTKPRPAL

SEQ ID NO: 14715 - protein, 9 aa, synthetic construct
  REGION 1..9: note = Protein RTF2 homolog (296-304)
AHWVTHTSY

SEQ ID NO: 14716 - protein, 10 aa, synthetic construct
  REGION 1..10: note = Endoplasmic reticulum-Golgi intermediate compartment protein 2 (241-250)
AIDHNQMFQY

SEQ ID NO: 14717 - protein, 9 aa, synthetic construct
  REGION 1..9: note = E3 ubiquitin-protein ligase RNF135 (258-266)
AIHPTFNLK

SEQ ID NO: 14718 - protein, 9 aa, synthetic construct
  REGION 1..9: note = Proteasome subunit alpha type-2 (187-195)
AIHTAILTL

SEQ ID NO: 14719 - protein, 9 aa, synthetic construct
  REGION 1..9: note = All-trans-retinol 13,14-reductase (189-197)
AIIDKYIKL

SEQ ID NO: 14720 - protein, 9 aa, synthetic construct
  REGION 1..9: note = General transcription factor 3C polypeptide 3 (294-302)
AILDKNFRK

SEQ ID NO: 14721 - protein, 9 aa, synthetic construct
  REGION 1..9: note = AP-1 complex subunit beta-1 (487-495)
AIVKLFLKK

SEQ ID NO: 14722 - protein, 9 aa, synthetic construct
  REGION 1..9: note = Ribosomal RNA processing protein 36 homolog (221-229)
ALAEKFKEL

SEQ ID NO: 14723 - protein, 9 aa, synthetic construct
  REGION 1..9: note = Gem-associated protein 4 (288-296)
ALAEKVKEA

SEQ ID NO: 14724 - protein, 9 aa, synthetic construct
  REGION 1..9: note = Glycosylphosphatidylinositol anchor attachment 1 protein (584-592)
ALAQGVLEH

SEQ ID NO: 14725 - protein, 13 aa, synthetic construct
  REGION 1..13: note = Ankyrin repeat and KH domain-containing protein 1 (182-194)
ALDEAAAALTRMK

SEQ ID NO: 14726 - protein, 9 aa, synthetic construct
  REGION 1..9: note = Hexokinase-1 (530-538)
ALDLGGTNF

SEQ ID NO: 14727 - protein, 10 aa, synthetic construct
  REGION 1..10: note = N-acylneuraminate cytidylyltransferase (79-88)
ALDSGAFQSV

SEQ ID NO: 14728 - protein, 10 aa, synthetic construct
  REGION 1..10: note = EP300-interacting inhibitor of differentiation 1 (70-79)
ALEEADKMFL

SEQ ID NO: 14729 - protein, 10 aa, synthetic construct
  REGION 1..10: note = Zinc finger protein ZXDC (46-55)
ALFSDTPANA

SEQ ID NO: 14730 - protein, 9 aa, synthetic construct
  REGION 1..9: note = Dystonin (1368-1376)
ALFSKVLER

SEQ ID NO: 14731 - protein, 9 aa, synthetic construct
  REGION 1..9: note = Protein transport protein Sec23A (40-48)
ALFTPLKER

SEQ ID NO: 14732 - protein, 9 aa, synthetic construct
  REGION 1..9: note = PRKCA-binding protein (279-287)
ALGEPLYRV

SEQ ID NO: 14733 - protein, 9 aa, synthetic construct
  REGION 1..9: note = Talin-2 (171-179)
ALHDLLQHV

SEQ ID NO: 14734 - protein, 9 aa, synthetic construct
  REGION 1..9: note = Golgin subfamily A member 3 (270-278)
ALHERIQAL

SEQ ID NO: 14735 - protein, 9 aa, synthetic construct
  REGION 1..9: note = SURP and G-patch domain-containing protein 2 (429-437)
ALLGQTFSL

SEQ ID NO: 14736 - protein, 9 aa, synthetic construct
  REGION 1..9: note = E3 ubiquitin-protein ligase AMFR (24-32)
ALLGTIISA

SEQ ID NO: 14737 - protein, 10 aa, synthetic construct
  REGION 1..10: note = Tropomodulin-3 (44-53)
ALLPAGFRQK

SEQ ID NO: 14738 - protein, 12 aa, synthetic construct
  REGION 1..12: note = RNA-binding protein NOB1 (19-30)
ALQDIGKNIYTI

SEQ ID NO: 14739 - protein, 9 aa, synthetic construct
  REGION 1..9: note = Kinesin-1 heavy chain (666-674)
ALSEELVQL

SEQ ID NO: 14740 - protein, 10 aa, synthetic construct
  REGION 1..10: note = Syntaxin-8 (157-166)
ALSSIISRQK

SEQ ID NO: 14741 - protein, 9 aa, synthetic construct
  REGION 1..9: note = Protein RCC2 (151-159)
ALTETGSVF

SEQ ID NO: 14742 - protein, 9 aa, synthetic construct
  REGION 1..9: note = Zinc finger BED domain-containing protein 4 (250-258)
ALVGSSPHL

SEQ ID NO: 14743 - protein, 11 aa, synthetic construct
  REGION 1..11: note = Protein unc-93 homolog B1 (440-450)
ALWGVGSALNK

SEQ ID NO: 14744 - protein, 10 aa, synthetic construct
  REGION 1..10: note = Galectin-3-binding protein (184-193)
ALWKEPGSNV

SEQ ID NO: 14745 - protein, 9 aa, synthetic construct
  REGION 1..9: note = Fructose-bisphosphate aldolase A (132-140)
AMATVTALR

SEQ ID NO: 14746 - protein, 10 aa, synthetic construct
  REGION 1..10: note = Myosin-9 (1912-1921)
AMNREVSSLK

SEQ ID NO: 14747 - protein, 9 aa, synthetic construct
  REGION 1..9: note = NAD(P)H dehydrogenase (quinone) 1 (128-136)
AMYDKGPFR

SEQ ID NO: 14748 - protein, 9 aa, synthetic construct
  REGION 1..9: note = Type II inositol 3,4-bisphosphate 4-phosphatase (368-376)
APAAHFQGF

SEQ ID NO: 14749 - protein, 11 aa, synthetic construct
  REGION 1..11: note = Ankyrin repeat and zinc finger domain-containing protein 1 (4-14)
APDAAPAPASI

SEQ ID NO: 14750 - protein, 10 aa, synthetic construct
  REGION 1..10: note = E3 ubiquitin-protein ligase NEURL1B (119-128)
APRPDGGRTL

SEQ ID NO: 14751 - protein, 9 aa, synthetic construct
  REGION 1..9: note = 40S ribosomal protein S4, Y isoform 1 (27-35)
APRPSTGPH

SEQ ID NO: 14752 - protein, 10 aa, synthetic construct
  REGION 1..10: note = 60S ribosomal protein L36 (51-60)
APYERRAMEL

SEQ ID NO: 14753 - protein, 10 aa, synthetic construct
  REGION 1..10: note = PHD and RING finger domain-containing protein 1 (159-168)
AQFGGKILRK

SEQ ID NO: 14754 - protein, 11 aa, synthetic construct
  REGION 1..11: note = Cleavage stimulation factor subunit 3 (59-69)
AQFPSSGRFWK

SEQ ID NO: 14755 - protein, 10 aa, synthetic construct
  REGION 1..10: note = Transcription and mRNA export factor ENY2 (10-19)
AQMRAAINQK

SEQ ID NO: 14756 - protein, 9 aa, synthetic construct
  REGION 1..9: note = V-type proton ATPase 21 kDa proteolipid subunit (10-18)
AQNPSLFVK

SEQ ID NO: 14757 - protein, 8 aa, synthetic construct
  REGION 1..8: note = Myosin-9 (2-9)
AQQAADKY

SEQ ID NO: 14758 - protein, 9 aa, synthetic construct
  REGION 1..9: note = MICOS complex subunit MIC60 (196-204)
AQQEKQEQV

SEQ ID NO: 14759 - protein, 9 aa, synthetic construct
  REGION 1..9: note = Ubiquitin-like protein 5 (33-41)
AQTGTRWNK

SEQ ID NO: 14760 - protein, 9 aa, synthetic construct
  REGION 1..9: note = Cytochrome c oxidase assembly factor 3 homolog, mitochondrial (44-52)
AQWQKVLPR

SEQ ID NO: 14761 - protein, 9 aa, synthetic construct
  REGION 1..9: note = SUMO-activating enzyme subunit 1 (17-25)
AQYDRQIRL

SEQ ID NO: 14762 - protein, 9 aa, synthetic construct
  REGION 1..9: note = Poly(U)-binding-splicing factor PUF60 (204-212)
ARAFNRIYV

SEQ ID NO: 14763 - protein, 9 aa, synthetic construct
  REGION 1..9: note = Protein transport protein Sec61 subunit alpha isoform 1 (310-318)
ARFSGNLLV

SEQ ID NO: 14764 - protein, 9 aa, synthetic construct
  REGION 1..9: note = Ran GTPase-activating protein 1 (576-584)
ARHSLLQTL

SEQ ID NO: 14765 - protein, 11 aa, synthetic construct
  REGION 1..11: note = Probable RNA-binding protein 19 (488-498)
ASALGSSSYKK

SEQ ID NO: 14766 - protein, 9 aa, synthetic construct
  REGION 1..9: note = Polyadenylate-binding protein 1 (551-559)
ASAPPQEQK

SEQ ID NO: 14767 - protein, 9 aa, synthetic construct
  REGION 1..9: note = 3'(2'),5'-bisphosphate nucleotidase 1 (13-21)
ASAYSIAQK

SEQ ID NO: 14768 - protein, 9 aa, synthetic construct
  REGION 1..9: note = WD repeat-containing protein 26 (616-624)
ASDDGTVRI

SEQ ID NO: 14769 - protein, 9 aa, synthetic construct
  REGION 1..9: note = WD repeat-containing protein 61 (115-123)
ASDDGYIKI

SEQ ID NO: 14770 - protein, 10 aa, synthetic construct
  REGION 1..10: note = Selenoprotein O (215-224)
ASDNTGRYAY

SEQ ID NO: 14771 - protein, 9 aa, synthetic construct
  REGION 1..9: note = Protein flightless-1 homolog (1107-1115)
ASDPDEAKL

SEQ ID NO: 14772 - protein, 10 aa, synthetic construct
  REGION 1..10: note = Transcription factor 20 (70-79)
ASETSGHQGY

SEQ ID NO: 14773 - protein, 11 aa, synthetic construct
  REGION 1..11: note = Zinc finger protein 622 (77-87)
ASFNAYENHLK

SEQ ID NO: 14774 - protein, 9 aa, synthetic construct
  REGION 1..9: note = LIM domain and actin-binding protein 1 (496-504)
ASFQSTSVK

SEQ ID NO: 14775 - protein, 11 aa, synthetic construct
  REGION 1..11: note = Origin recognition complex subunit 3 (514-524)
ASGSQPKGLQK

SEQ ID NO: 14776 - protein, 11 aa, synthetic construct
  REGION 1..11: note = Serine/threonine-protein phosphatase 6 regulatory ankyrin repeat subunit B (624-634)
ASIFVKDNVTK

SEQ ID NO: 14777 - protein, 11 aa, synthetic construct
  REGION 1..11: note = Serine/threonine-protein phosphatase 6 regulatory ankyrin repeat subunit A (637-647)
ASILVKDYILK

SEQ ID NO: 14778 - protein, 11 aa, synthetic construct
  REGION 1..11: note = 39S ribosomal protein L22, mitochondrial (37-47)
ASLDISRKWEK

SEQ ID NO: 14779 - protein, 9 aa, synthetic construct
  REGION 1..9: note = Centrosome-associated protein 350 (95-103)
ASLIKQLEV

SEQ ID NO: 14780 - protein, 11 aa, synthetic construct
  REGION 1..11: note = Deoxynucleotidyltransferase terminal-interacting protein 2 (668-678)
ASMDPKRFYKK

SEQ ID NO: 14781 - protein, 11 aa, synthetic construct
  REGION 1..11: note = Myosin-10 (370-380)
ASMPENTVAQK

SEQ ID NO: 14782 - protein, 12 aa, synthetic construct
  REGION 1..12: note = Discoidin, CUB and LCCL domain-containing protein 2 (153-164)
ASNFLEPEFSKY

SEQ ID NO: 14783 - protein, 9 aa, synthetic construct
  REGION 1..9: note = Chromosome transmission fidelity protein 8 homolog isoform 2 (379-387)
ASNPATFQR

SEQ ID NO: 14784 - protein, 12 aa, synthetic construct
  REGION 1..12: note = Heterogeneous nuclear ribonucleoprotein H (160-171)
ASQEIAEKALKK

SEQ ID NO: 14785 - protein, 9 aa, synthetic construct
  REGION 1..9: note = Zinc finger protein 574 (226-234)
ASQELWLNH

SEQ ID NO: 14786 - protein, 9 aa, synthetic construct
  REGION 1..9: note = E3 ubiquitin-protein ligase MARCH7 (344-352)
ASQGFRFLR

SEQ ID NO: 14787 - protein, 9 aa, synthetic construct
  REGION 1..9: note = Ubiquitin-conjugating enzyme E2 T (183-191)
ASQLVGIEK

SEQ ID NO: 14788 - protein, 13 aa, synthetic construct
  REGION 1..13: note = Anthrax toxin receptor 2 (131-143)
ASYYGGRGVGGIK

SEQ ID NO: 14789 - protein, 9 aa, synthetic construct
  REGION 1..9: note = Transmembrane protein 147 (107-115)
ATAELIMSR

SEQ ID NO: 14790 - protein, 10 aa, synthetic construct
  REGION 1..10: note = Multifunctional protein ADE2 (2-11)
ATAEVLNIGK

SEQ ID NO: 14791 - protein, 11 aa, synthetic construct
  REGION 1..11: note = Clathrin heavy chain 1 (311-321)
ATAGIIGVNRK

SEQ ID NO: 14792 - protein, 9 aa, synthetic construct
  REGION 1..9: note = Cilia- and flagella-associated protein 58 (79-87)
ATALKLSQD

SEQ ID NO: 14793 - protein, 11 aa, synthetic construct
  REGION 1..11: note = Mitogen-activated protein kinase-binding protein 1 (686-696)
ATASPFSGLQK

SEQ ID NO: 14794 - protein, 9 aa, synthetic construct
  REGION 1..9: note = Glucosamine 6-phosphate N-acetyltransferase (99-107)
ATATLIIEH

SEQ ID NO: 14795 - protein, 9 aa, synthetic construct
  REGION 1..9: note = UPF0472 protein C16orf72 (67-75)
ATAVAQLYK

SEQ ID NO: 14796 - protein, 10 aa, synthetic construct
  REGION 1..10: note = NAD(P) transhydrogenase, mitochondrial (730-739)
ATDAAANLTK

SEQ ID NO: 14797 - protein, 11 aa, synthetic construct
  REGION 1..11: note = E3 ubiquitin-protein ligase RNF220 (291-301)
ATDDLHHSDRY

SEQ ID NO: 14798 - protein, 10 aa, synthetic construct
  REGION 1..10: note = Collagen alpha-1(XII) chain (183-192)
ATDPDDTHAY

SEQ ID NO: 14799 - protein, 9 aa, synthetic construct
  REGION 1..9: note = V-type proton ATPase 21 kDa proteolipid subunit (120-128)
ATDPKAIGH

SEQ ID NO: 14800 - protein, 9 aa, synthetic construct
  REGION 1..9: note = ATP-dependent RNA helicase DDX1 (614-622)
ATEKEKVWY

SEQ ID NO: 14801 - protein, 12 aa, synthetic construct
  REGION 1..12: note = Apoptosis inhibitor 5 (17-28)
ATEQVGQHKDAY

SEQ ID NO: 14802 - protein, 11 aa, synthetic construct
  REGION 1..11: note = Calcium-binding protein 39 (186-196)
ATFKDLLTRHK

SEQ ID NO: 14803 - protein, 10 aa, synthetic construct
  REGION 1..10: note = Serine/threonine-protein kinase OSR1 (172-181)
ATGGDITRNK

SEQ ID NO: 14804 - protein, 10 aa, synthetic construct
  REGION 1..10: note = Inositol-pentakisphosphate 2-kinase (170-179)
ATGKWKQISK

SEQ ID NO: 14805 - protein, 10 aa, synthetic construct
  REGION 1..10: note = DNA-directed RNA polymerase II subunit RPB2 (442-451)
ATGNWGDQKK

SEQ ID NO: 14806 - protein, 9 aa, synthetic construct
  REGION 1..9: note = Plexin-B2 (68-76)
ATGPALDNK

SEQ ID NO: 14807 - protein, 9 aa, synthetic construct
  REGION 1..9: note = General transcription factor IIH subunit 2 (32-40)
ATIEDILFK

SEQ ID NO: 14808 - protein, 11 aa, synthetic construct
  REGION 1..11: note = Polycomb group RING finger protein 6 (210-220)
ATIGHVEKFLR

SEQ ID NO: 14809 - protein, 11 aa, synthetic construct
  REGION 1..11: note = Isocitrate dehydrogenase (NAD) subunit alpha, mitochondrial (333-343)
ATIKDGKSLTK

SEQ ID NO: 14810 - protein, 9 aa, synthetic construct
  REGION 1..9: note = Protein MMS22-like (831-839)
ATIPPISSL

SEQ ID NO: 14811 - protein, 10 aa, synthetic construct
  REGION 1..10: note = Ankyrin repeat and KH domain-containing protein 1 (1428-1437)
ATITDKELLK

SEQ ID NO: 14812 - protein, 11 aa, synthetic construct
  REGION 1..11: note = Ankyrin repeat and KH domain-containing protein 1 (1428-1438)
ATITDKELLKK

SEQ ID NO: 14813 - protein, 11 aa, synthetic construct
  REGION 1..11: note = Ankyrin repeat domain-containing protein 17 (1306-1316)
ATITDKEMLKK

SEQ ID NO: 14814 - protein, 10 aa, synthetic construct
  REGION 1..10: note = HAUS augmin-like complex subunit 7 (418-427)
ATKMNELMEK

SEQ ID NO: 14815 - protein, 9 aa, synthetic construct
  REGION 1..9: note = E3 SUMO-protein ligase NSE2 (69-77)
ATLDRQLNH

SEQ ID NO: 14816 - protein, 11 aa, synthetic construct
  REGION 1..11: note = PIN2/TERF1-interacting telomerase inhibitor 1 (312-322)
ATLEETLVKKK

SEQ ID NO: 14817 - protein, 11 aa, synthetic construct
  REGION 1..11: note = Coatomer subunit beta (111-121)
ATLGDLKLVEK

SEQ ID NO: 14818 - protein, 12 aa, synthetic construct
  REGION 1..12: note = DNA-directed RNA polymerase II subunit RPB1 (907-918)
ATLKPSNKAFEK

SEQ ID NO: 14819 - protein, 11 aa, synthetic construct
  REGION 1..11: note = Telomerase protein component 1 (83-93)
ATLSDLKTMEK

SEQ ID NO: 14820 - protein, 10 aa, synthetic construct
  REGION 1..10: note = KIF1-binding protein (254-263)
ATLSQFYINK

SEQ ID NO: 14821 - protein, 12 aa, synthetic construct
  REGION 1..12: note = Eukaryotic initiation factor 4A-I (214-225)
ATMPSDVLEVTK

SEQ ID NO: 14822 - protein, 11 aa, synthetic construct
  REGION 1..11: note = Activity-dependent neuroprotector homeobox protein (988-998)
ATMQGDREQLK

SEQ ID NO: 14823 - protein, 10 aa, synthetic construct
  REGION 1..10: note = Arf-GAP with coiled-coil, ANK repeat and PH domain-containing protein 2 (155-164)
ATNILTATRK

SEQ ID NO: 14824 - protein, 10 aa, synthetic construct
  REGION 1..10: note = Homeobox protein Hox-A13 (342-351)
ATNKFITKDK

SEQ ID NO: 14825 - protein, 10 aa, synthetic construct
  REGION 1..10: note = Rho-related BTB domain-containing protein 3 (557-566)
ATNYLIFSQK

SEQ ID NO: 14826 - protein, 9 aa, synthetic construct
  REGION 1..9: note = Glutathione S-transferase kappa 1 (148-156)
ATPKVKNQL

SEQ ID NO: 14827 - protein, 10 aa, synthetic construct
  REGION 1..10: note = Splicing factor 1 (7-16)
ATPLDFPSKK

SEQ ID NO: 14828 - protein, 9 aa, synthetic construct
  REGION 1..9: note = Geranylgeranyl transferase type-2 subunit alpha (31-39)
ATQAVFQKR

SEQ ID NO: 14829 - protein, 12 aa, synthetic construct
  REGION 1..12: note = Forkhead box protein J3 (44-55)
ATQNAHGTGISK

SEQ ID NO: 14830 - protein, 9 aa, synthetic construct
  REGION 1..9: note = Tubby-related protein 4 (741-749)
ATQYPVSNR

SEQ ID NO: 14831 - protein, 11 aa, synthetic construct
  REGION 1..11: note = Importin subunit alpha-5 (407-417)
ATSGGSAEQIK

SEQ ID NO: 14832 - protein, 9 aa, synthetic construct
  REGION 1..9: note = CLIP-associating protein 1 (426-434)
ATSGVVAVR

SEQ ID NO: 14833 - protein, 9 aa, synthetic construct
  REGION 1..9: note = Origin recognition complex subunit 3 (253-261)
ATSPIIIHR

SEQ ID NO: 14834 - protein, 10 aa, synthetic construct
  REGION 1..10: note = Origin recognition complex subunit 3 (253-262)
ATSPIIIHRL

SEQ ID NO: 14835 - protein, 9 aa, synthetic construct
  REGION 1..9: note = Importin subunit alpha-1 (60-68)
ATSPLQENR

SEQ ID NO: 14836 - protein, 9 aa, synthetic construct
  REGION 1..9: note = tRNA pseudouridine synthase-like 1 (125-133)
ATSRTYLYR

SEQ ID NO: 14837 - protein, 11 aa, synthetic construct
  REGION 1..11: note = Golgi apparatus membrane protein TVP23 homolog B (186-196)
ATSYFGKQFLR

SEQ ID NO: 14838 - protein, 11 aa, synthetic construct
  REGION 1..11: note = ATP-citrate synthase (93-103)
ATVGKATGFLK

SEQ ID NO: 14839 - protein, 9 aa, synthetic construct
  REGION 1..9: note = Phosphoribosyl pyrophosphate synthase-associated protein 1 (222-230)
ATVHPGLEL

SEQ ID NO: 14840 - protein, 10 aa, synthetic construct
  REGION 1..10: note = Integrator complex subunit 7 (445-454)
ATVIFVASQK

SEQ ID NO: 14841 - protein, 9 aa, synthetic construct
  REGION 1..9: note = Pre-mRNA-processing factor 19 (180-188)
ATVLTTERK

SEQ ID NO: 14842 - protein, 11 aa, synthetic construct
  REGION 1..11: note = Mitochondrial folate transporter/carrier (241-251)
ATYPYQVVRAR

SEQ ID NO: 14843 - protein, 11 aa, synthetic construct
  REGION 1..11: note = Eukaryotic translation initiation factor 3 subunit D (48-58)
ATYQDKRYTNK

SEQ ID NO: 14844 - protein, 9 aa, synthetic construct
  REGION 1..9: note = Cleavage and polyadenylation specificity factor subunit 2 (52-60)
ATYVQPRRK

SEQ ID NO: 14845 - protein, 9 aa, synthetic construct
  REGION 1..9: note = Protein phosphatase methylesterase 1 (362-370)
AVATFLIRH

SEQ ID NO: 14846 - protein, 9 aa, synthetic construct
  REGION 1..9: note = Serine/threonine-protein kinase SIK2 (699-707)
AVDPQHNGY

SEQ ID NO: 14847 - protein, 9 aa, synthetic construct
  REGION 1..9: note = Fanconi anemia group D2 protein (69-77)
AVDQIAFQK

SEQ ID NO: 14848 - protein, 9 aa, synthetic construct
  REGION 1..9: note = Breast cancer type 1 susceptibility protein (1104-1112)
AVFSKSVQK

SEQ ID NO: 14849 - protein, 11 aa, synthetic construct
  REGION 1..11: note = Uncharacterized aarF domain-containing protein kinase 5 (335-345)
AVHDIAEKLIK

SEQ ID NO: 14850 - protein, 9 aa, synthetic construct
  REGION 1..9: note = Telomere-associated protein RIF1 (481-489)
AVHDSFVAV

SEQ ID NO: 14851 - protein, 11 aa, synthetic construct
  REGION 1..11: note = Protein canopy homolog 4 (15-25)
AVHEAWAGMLK

SEQ ID NO: 14852 - protein, 9 aa, synthetic construct
  REGION 1..9: note = Zinc transporter ZIP3 (302-310)
AVHETLVAV

SEQ ID NO: 14853 - protein, 9 aa, synthetic construct
  REGION 1..9: note = Bifunctional methylenetetrahydrofolate dehydrogenase/cyclohydrolase, mitochondrial (270-278)
AVIDVGINR

SEQ ID NO: 14854 - protein, 13 aa, synthetic construct
  REGION 1..13: note = Cytoplasmic dynein 1 heavy chain 1 (3288-3300)
AVIEAQNAVKSIK

SEQ ID NO: 14855 - protein, 9 aa, synthetic construct
  REGION 1..9: note = Nucleosome-remodeling factor subunit BPTF (2407-2415)
AVIEHLKQK

SEQ ID NO: 14856 - protein, 11 aa, synthetic construct
  REGION 1..11: note = L-xylulose reductase (110-120)
AVIQVSQIVAR

SEQ ID NO: 14857 - protein, 11 aa, synthetic construct
  REGION 1..11: note = Protein S100-A16 (11-21)
AVIVLVENFYK

SEQ ID NO: 14858 - protein, 10 aa, synthetic construct
  REGION 1..10: note = Periodic tryptophan protein 1 homolog (46-55)
AVLDLSWNKL

SEQ ID NO: 14859 - protein, 11 aa, synthetic construct
  REGION 1..11: note = Zinc finger SWIM domain-containing protein 8 (430-440)
AVLDPALSPQR

SEQ ID NO: 14860 - protein, 9 aa, synthetic construct
  REGION 1..9: note = Vacuolar protein sorting-associated protein 11 homolog (740-748)
AVLKHIENK

SEQ ID NO: 14861 - protein, 11 aa, synthetic construct
  REGION 1..11: note = Charged multivesicular body protein 3 (30-40)
AVLRVAGSLQK

SEQ ID NO: 14862 - protein, 11 aa, synthetic construct
  REGION 1..11: note = Long-chain-fatty-acid-CoA ligase 4 (332-342)
AVPEIMDRIYK

SEQ ID NO: 14863 - protein, 11 aa, synthetic construct
  REGION 1..11: note = Aspartyl aminopeptidase (23-33)
AVQTAAKELLK

SEQ ID NO: 14864 - protein, 10 aa, synthetic construct
  REGION 1..10: note = TSC22 domain family protein 4 (336-345)
AVREEVEVLK

SEQ ID NO: 14865 - protein, 10 aa, synthetic construct
  REGION 1..10: note = Peroxisomal acyl-coenzyme A oxidase 1 (63-72)
AVRKSAIMVK

SEQ ID NO: 14866 - protein, 11 aa, synthetic construct
  REGION 1..11: note = Pre-mRNA-processing factor 6 (914-924)
AVSKDIANWQK

SEQ ID NO: 14867 - protein, 9 aa, synthetic construct
  REGION 1..9: note = 5'-AMP-activated protein kinase subunit gamma-1 (141-149)
AVSSLIRNK

SEQ ID NO: 14868 - protein, 11 aa, synthetic construct
  REGION 1..11: note = CD99 antigen-like protein 2 (58-68)
AVSSYISYQQK

SEQ ID NO: 14869 - protein, 9 aa, synthetic construct
  REGION 1..9: note = Inactive hydroxysteroid dehydrogenase-like protein 1 (258-266)
AVSTLGISK

SEQ ID NO: 14870 - protein, 11 aa, synthetic construct
  REGION 1..11: note = CD81 antigen (63-73)
AVVDDDANNAK

SEQ ID NO: 14871 - protein, 9 aa, synthetic construct
  REGION 1..9: note = GTP-binding protein 2 (496-504)
AVVEKIHAK

SEQ ID NO: 14872 - protein, 11 aa, synthetic construct
  REGION 1..11: note = Mitochondrial folate transporter/carrier (154-164)
AVVNSPHRQYK

SEQ ID NO: 14873 - protein, 9 aa, synthetic construct
  REGION 1..9: note = Inositol 1,4,5-trisphosphate receptor-interacting protein (385-393)
AVYERHFLR

SEQ ID NO: 14874 - protein, 11 aa, synthetic construct
  REGION 1..11: note = Nuclear factor interleukin-3-regulated protein (146-156)
AVYFQDYQTSK

SEQ ID NO: 14875 - protein, 9 aa, synthetic construct
  REGION 1..9: note = Aladin (158-166)
AWHPHTNKF

SEQ ID NO: 14876 - protein, 9 aa, synthetic construct
  REGION 1..9: note = Ankyrin-2 (1480-1488)
AYIADHLGF

SEQ ID NO: 14877 - protein, 9 aa, synthetic construct
  REGION 1..9: note = Leucine-rich repeat protein SHOC-2 (468-476)
AYLKDLQKL

SEQ ID NO: 14878 - protein, 9 aa, synthetic construct
  REGION 1..9: note = Fragile X mental retardation syndrome-related protein 1 (356-364)
AYLKEVEQL

SEQ ID NO: 14879 - protein, 9 aa, synthetic construct
  REGION 1..9: note = Serine/threonine-protein kinase RIO1 (156-164)
AYLSKAMEI

SEQ ID NO: 14880 - protein, 9 aa, synthetic construct
  REGION 1..9: note = ER degradation-enhancing alpha-mannosidase-like protein 1 (395-403)
AYQSIQNYL

SEQ ID NO: 14881 - protein, 9 aa, synthetic construct
  REGION 1..9: note = Angiomotin-like protein 1 (604-612)
AYVEKVEKL

SEQ ID NO: 14882 - protein, 9 aa, synthetic construct
  REGION 1..9: note = Angiomotin-like protein 2 (481-489)
AYVEKVERL

SEQ ID NO: 14883 - protein, 9 aa, synthetic construct
  REGION 1..9: note = Zinc finger protein 580 (248-256)
DAAELAQHV

SEQ ID NO: 14884 - protein, 9 aa, synthetic construct
  REGION 1..9: note = Embryonic stem cell-specific 5-hydroxymethylcytosine-binding protein (62-70)
DADSSERII

SEQ ID NO: 14885 - protein, 9 aa, synthetic construct
  REGION 1..9: note = Proteasome subunit beta type-10 (90-98)
DAEMTTRMV

SEQ ID NO: 14886 - protein, 9 aa, synthetic construct
  REGION 1..9: note = Torsin-1A-interacting protein 2 (129-137)
DAHLGSSSV

SEQ ID NO: 14887 - protein, 9 aa, synthetic construct
  REGION 1..9: note = Centrosomal protein of 95 kDa (61-69)
DAHNVQAVI

SEQ ID NO: 14888 - protein, 9 aa, synthetic construct
  REGION 1..9: note = Cohesin subunit SA-1 (302-310)
DAIAEIRAI

SEQ ID NO: 14889 - protein, 9 aa, synthetic construct
  REGION 1..9: note = Heat shock cognate 71 kDa protein (323-331)
DAKLDKSQI

SEQ ID NO: 14890 - protein, 8 aa, synthetic construct
  REGION 1..8: note = Phosphatidylinositol 4-kinase alpha (403-410)
DAPELSHV

SEQ ID NO: 14891 - protein, 8 aa, synthetic construct
  REGION 1..8: note = Carnitine O-palmitoyltransferase 1, liver isoform (477-484)
DAPIVAHL

SEQ ID NO: 14892 - protein, 10 aa, synthetic construct
  REGION 1..10: note = Transcription activator BRG1 (696-705)
DAPKAGQLEA

SEQ ID NO: 14893 - protein, 9 aa, synthetic construct
  REGION 1..9: note = Protein RMD5 homolog B (51-59)
DAREQQQQI

SEQ ID NO: 14894 - protein, 9 aa, synthetic construct
  REGION 1..9: note = Myotubularin (278-286)
DARPSVNAV

SEQ ID NO: 14895 - protein, 9 aa, synthetic construct
  REGION 1..9: note = Filamin-A (1614-1622)
DASKCTVTV

SEQ ID NO: 14896 - protein, 9 aa, synthetic construct
  REGION 1..9: note = E3 ubiquitin-protein ligase RNF114 (127-135)
DASLQPRNV

SEQ ID NO: 14897 - protein, 9 aa, synthetic construct
  REGION 1..9: note = Translocon-associated protein subunit delta (40-48)
DAVISTETV

(The sequence listing continues in the following parts.)

1. An artificial nucleic acid molecule comprising at least one coding region encoding
a. at least one antigenic peptide or protein,
and at least one additional amino acid sequence derived from at least one immune response activating signal transduction protein located in the external plasma membrane,
wherein said at least one additional amino acid sequence comprises or consists of at least one transmembrane domain.

2. The artificial nucleic acid molecule according to claim 1, wherein said immune response activating signal transduction protein located in the external plasma membrane (IRSTₑₚₘ) is selected from CTLA4 (Cytotoxic T-lymphocyte protein 4), CD36 (Platelet glycoprotein 4), TRBC2 (T-cell receptor beta-2 chain C region), TRDC (T-cell receptor delta chain C region), TLR4 (Toll-like receptor 4), CD4 (T-cell surface glycoprotein CD4), TRBC1 (T-cell receptor beta-1 chain C region), CD3E (T-cell surface glycoprotein CD3 epsilon chain), PTPRC (Receptor-type tyrosine-protein phosphatase C), FCG3A (Low affinity immunoglobulin gamma Fc region receptor LNP-III-A), CD28 (T-cell-specific surface glycoprotein CD28), CD79A (B-cell antigen receptor complex-associated protein alpha chain), CD19 (B-lymphocyte antigen CD19), NKG2D (NKG2-D type II integral membrane protein), FCERG (High affinity immunoglobulin epsilon receptor subunit gamma), CD79B (B-cell antigen receptor complex-associated protein beta chain), CD86 (T-lymphocyte activation antigen CD86), CD226 (CD226 antigen), MUC17 (Mucin-17), CD209 (CD209 antigen), TLR8 (Toll-like receptor 8), or a variant, fragment or derivative of any of these proteins.

3. The artificial nucleic acid molecule according to claim 1 or 2, wherein said at least one additional amino acid sequence further comprises
b. at least one cytoplasmic domain.

4. The artificial nucleic acid molecule according to any one of the preceding claims, wherein said at least one coding region further encodes
c. at least one signal peptide.

5. The artificial nucleic acid molecule according to any one of the preceding claims, wherein said at least one antigenic peptide or protein is selected from or derived from tumor antigens, viral, bacterial, protozoal, fungal or allogenic antigens.

6. The artificial nucleic acid molecule according to claim 5, wherein said at least one antigenic peptide or protein comprises or consists of an amino acid sequence corresponding to any one of SEQ ID NOs: 3719-27945; 76420-76439, 76440-76474, or a fragment, variant or derivative thereof, and is optionally encoded by a nucleic acid sequence according to any one of SEQ ID NOs: 27946-52172; 76495-76514, 52173-76399; 76570-76589, 76515-76549, 76590-76624 or a fragment, variant or derivative of any one of said sequences.

7. The artificial nucleic acid molecule according to claim 5 or 6, wherein said tumor antigen is selected from BRAF, PIK3CA, KRAS, IDH1, TP53, NRAS, AKTI, SF3B1, CDKN2A, RPSAP58, EGFR, NY-ESO1, MUC-1, 5T4, Her2, MAGE-A3, LY6K, CEACAM6, CEA, MCAK, KK-LC1, Gastrin, VEGFR2, MMP-7, MPHOSPH1, MAGE-A4, MAGE-A1, MAGE-C1, PRAME, Survivin, MAGE-A9, MAGE-C2, FGFR2, WT1, PSA, PSMA, Prostate-specific antigen precursor, Kita-kyushu lung cancer antigen 1, Trophoblast glycoprotein, Cyclin-dependent kinase inhibitor 2A, Cyclin-dependent kinase inhibitor 2A, isoforms 1/2/3, multiple tumor suppressor 1/cyclin-dependent kinase 4 inhibitor p16, GTPase NRas or a fragment, variant or derivative of any of said tumor antigens, or any combination thereof.

8. The artificial nucleic acid molecule according to any one of the preceding claims wherein said IRSTₑₚₘ comprises or consists of an amino acid sequence corresponding to any one of SEQ ID NOs: 157-179, or a fragment, variant or derivative thereof, and is optionally encoded by a nucleic acid sequence corresponding to any one of SEQ ID NOs: 365-387, 573-595, 781-803, 989-1011, 1197-1219, 1405-1427, 1613-1635, 1821-1843, 2029-2051, 2237-2259, 2445-2467, 2653-2675, 2861-2883, or a fragment, variant or derivative of any one of said sequences.

9. The artificial nucleic acid molecule according to any one of claims 1 to 8, wherein the at least one additional amino acid sequence comprises or consists of at least one transmembrane domain and at least one cytoplasmic domain comprising or consisting of an amino acid sequence corresponding to any one of SEQ ID NOs: 76625-76647, or a fragment, variant or derivative thereof and is optionally encoded by a nucleic acid sequence corresponding to any one of SEQ ID NOs: 76648-76947, 77004-77017, 77066 or a fragment, variant or derivative of any one of said sequences.

10. The artificial nucleic acid molecule according to any one of claims 1 to 8, wherein the transmembrane domain comprises or consists of an amino acid sequence corresponding to any one of SEQ ID NOs: 180-208, or a fragment, variant or derivative thereof and is optionally encoded by a nucleic acid sequence corresponding to any one of SEQ ID NOs: 388-416, 596-624, 804-832, 1012-1040, 1220-1248, 1428-1456, 1636-1664, 1844-1872, 2052-2080, 2260-2288, 2468-2496, 2676-2704, 2884-2912, or a fragment, variant or derivative of any one of said sequences.

11. The artificial nucleic acid molecule according to any one of claims 4 to 10, wherein the signal peptide comprises or consists of an amino acid sequence corresponding to any one of SEQ ID NOs: 1-156, 76948-76951, or a fragment, variant or derivative thereof, and is optionally encoded by a nucleic acid sequence according to any one of SEQ ID NOs: 209-364, 76952-76955, 625-780, 76960-76963, 833-988, 76964-76967, 417-572, 76956-76959, 1249-1404, 76972-76975, 1457-1612, 76976-76979, 1665-1820, 76980-76983, 1873-2028, 76984-76987, 2081-2236, 76988-76991, 2289-2444, 76992-76995, 2497-2652, 76996-76999, 2705-2860, 77000-77003, 1041-1196, or 76968-76971 or a fragment, variant or derivative thereof.

12. The artificial nucleic acid molecule according to any one of the preceding claims, further encoding in its at least one coding region
d. at least one linker.

13. The artificial nucleic acid molecule according to claim 12, wherein said linker is a non-immunogenic linker, optionally comprising or consisting of an amino acid sequence according to any one of SEQ ID NOs: 2937, 76400-76418, 77018-77058 optionally encoded by a nucleic acid sequence according to any one of SEQ ID NOs: 2936, 76494, 76569, 76475-76493, 76550-76568, 77059-77061 or a fragment, variant or derivative of any one of said sequences.

14. The artificial nucleic acid molecule according to any one of the preceding claims, wherein said at least one coding region further encodes
e. at least one T helper epitope.

15. The artificial nucleic acid molecule according to claim 14, wherein said helper epitope sequence comprises or consists of an amino acid sequence corresponding to any one of SEQ ID NOs: 3083-3294, or a fragment, variant or derivative thereof, and is optionally encoded by a nucleic acid sequence according to any one of SEQ ID NOs: 3295-3506, 3507-3718, or a fragment, variant or derivative of any one of said sequences.

16. The artificial nucleic acid molecule according to any one of the preceding claims, comprising at least one coding region of the following Formula (I), preferably in 5′→3′ direction: [chemical structure]
wherein
“SIG” encodes a signal peptide, preferably as defined in claim 11,
“L” encodes a linker sequence, preferably as defined in claim 13,
each “AN” encodes an identical or different antigenic peptide or protein, preferably as defined in claim 5, 6 or 7,
“IM” encodes a helper epitope, preferably as defined in claim 14 or 15,
“TMD/TMCD” encodes an amino acid sequence derived from an immune response signal transduction protein located in the external plasma membrane, preferably a transmembrane domain, preferably as defined in claim 10, and optionally a cytoplasmic domain, preferably as defined in claim 9
b, d, m, n, o is each independently an integer selected from 0, 1, 2, 3, 4, 5, 6, 7, 8, 9, and 10,
a, c, e, p is each independently an integer selected from 1, 2, 3, 4, 5, 6, 7, 8, 9 and 10.

17. The artificial nucleic acid molecule according to any one of the preceding claims, encoding in its at least one coding region at least one, or a plurality of at least two, three, four, five, six, seven, eight, nine or ten antigenic peptides or proteins, optionally selected from at least one antigenic peptide or protein according to claim 5 or 6, or fragment, variant or derivative thereof, or a combination of said antigenic peptides or proteins, or their fragments, variants or derivatives.

18. The artificial nucleic acid molecule according to any one of claims 1 to 17, wherein said artificial nucleic acid molecule is an RNA.

19. The artificial nucleic acid molecule according to claim 18, wherein the RNA is an mRNA, a viral RNA, a replicon RNA, or a circular RNA.

20. The artificial nucleic acid molecule, preferably RNA, according to any one of the preceding claims, wherein the artificial nucleic acid molecule is mono-, bi-, or multicistronic.

21. The artificial nucleic acid molecule, preferably RNA, according to any one of the preceding claims, wherein said artificial nucleic acid molecule is modified, preferably stabilized.

22. The artificial nucleic acid molecule, preferably RNA, according to any one of the preceding claims, wherein
the G/C content of the at least one coding region is increased compared to the G/C content of the corresponding coding sequence of the corresponding wild-type artificial nucleic acid, and/or wherein
the C content of the at least one coding region is increased compared to the C content of the corresponding coding sequence of the corresponding wild-type artificial nucleic acid, and/or wherein
the codons in the at least one coding region are adapted to human codon usage, wherein the codon adaptation index (CAI) is preferably increased or maximised in the at least one coding sequence of the artificial nucleic acid,
wherein the amino acid sequence encoded by the artificial nucleic acid is preferably not being modified compared to the amino acid sequence encoded by the corresponding wild-type artificial nucleic acid.

23. The artificial nucleic acid molecule, preferably RNA, according to claim 22, wherein said at least one coding region comprises or consists of a nucleic acid sequence corresponding to any one of SEQ ID NOs: 417-2912, 76671-76947, 77004-77017, 77066.

24. The artificial nucleic acid molecule, preferably RNA, according to any one of the preceding claims, which comprises a 5′-CAP structure, preferably m7GpppN or Cap1.

25. The artificial nucleic acid molecule, preferably RNA, according to any one of the preceding claims, which comprises at least one histone stem-loop.

26. The artificial nucleic acid molecule, preferably RNA, according to claim 25, wherein the at least one histone stem-loop comprises a nucleic acid sequence according to the following formulae (II) or (III): [chemical structure]
wherein:

| | |
|---|---|
| stem1 or stem2 bordering elements | is a consecutive sequence of 1 to 6, preferably of 2 to 6, |
| N₁₋₆ | more preferably of 2 to 5, even more preferably of 3 to 5, |
| | most preferably of 4 to 5 or 5 N, wherein each N is |
| | independently from another selected from a nucleotide |
| | selected from A, U, T, G and C, or a nucleotide analogue |
| | thereof; |
| stem1 [N₀₋₂GN₃₋₅] | is reverse complementary or partially reverse |
| | complementary with element stem2, and is a |
| | consecutive sequence between of 5 to 7 nucleotides; |
| | wherein N₀₋₂ is a consecutive sequence of 0 to 2, |
| | preferably of 0 to 1, more preferably of 1 N, wherein |
| | each N is independently from another selected from a |
| | nucleotide selected from A, U, T, G and C or a |
| | nucleotide analogue thereof; |
| | wherein N₃₋₅ is a consecutive sequence of 3 to 5, |
| | preferably of 4 to 5, more preferably of 4 N, wherein |
| | each N is independently from another selected from a |
| | nucleotide selected from A, U, T, G and C or a |
| | nucleotide analogue thereof, and |
| | wherein G is guanosine or an analogue thereof, and |
| | may be optionally replaced by a cytidine or an analogue |
| | thereof, provided that its complementary nucleotide |
| | cytidine in stem2 is replaced by guanosine; |
| loop sequence [N₀₋₄(U/T)N₀₋₄] | is located between elements stem1 and stem2, and is a |
| | consecutive sequence of 3 to 5 nucleotides, more |
| | preferably of 4 nucleotides; |
| | wherein each N₀₋₄ is independent from another a |
| | consecutive sequence of 0 to 4, preferably of 1 to 3, |
| | more preferably of 1 to 2 N, wherein each N is |
| | independently from another selected from a nucleotide |
| | selected from A, U, T, G and C or a nucleotide analogue |
| | thereof; and |
| | wherein U/T represents uridine, or optionally thymidine; |
| stem2 [N₃₋₅CN₀₋₂] | is reverse complementary or partially reverse |
| | complementary with element stem1, and is a |
| | consecutive sequence between of 5 to 7 nucleotides; |
| | wherein N₃₋₅ is a consecutive sequence of 3 to 5, |
| | preferably of 4 to 5, more preferably of 4 N, wherein |
| | each N is independently from another selected from a |
| | nucleotide selected from A, U, T, G and C or a |
| | nucleotide analogue thereof; |
| | wherein N₀₋₂ is a consecutive sequence of 0 to 2, |
| | preferably of 0 to 1, more preferably of 1 N, wherein |
| | each N is independently from another selected from a |
| | nucleotide selected from A, U, T, G and C or a |
| | nucleotide analogue thereof; and |
| | wherein C is cytidine or an analogue thereof, and may |
| | be optionally replaced by a guanosine or an analogue |
| | thereof provided that its complementary nucleotide |
| | guanosine in stem1 is replaced by cytidine; |

wherein
stem1 and stem2 are capable of base pairing with each other
forming a reverse complementary sequence, wherein base pairing may occur between stem1 and stem2, or
forming a partially reverse complementary sequence, wherein an incomplete base pairing may occur between stem1 and stem2.

27. The artificial nucleic acid molecule, preferably RNA, according to claim 25 or 26, wherein the at least one histone stem-loop comprises a nucleic acid sequence according to the following formulae (IIa) or (IIIa):

[chemical structure]

28. The artificial nucleic acid molecule, preferably RNA, according to any one of the preceding claims, optionally comprising a poly(A) sequence, preferably comprising 10 to 200, 10 to 100, 40 to 80 or 50 to 70 adenosine nucleotides.

29. The artificial nucleic acid molecule, preferably RNA, according to any one of the preceding claims, optionally comprising a poly(C) sequence, preferably comprising 10 to 200, 10 to 100, 20 to 70, 20 to 60 or 10 to 40 cytosine nucleotides.

30. The artificial nucleic acid molecule, preferably RNA, according to any one of the preceding claims, which comprises, preferably in 5′ to 3′ direction, the following elements:
a) a 5′-CAP structure, preferably m7GpppN, an ARCA Cap or Cap1
b) optionally a 5′-UTR element, preferably comprising or consisting of a nucleic acid sequence, corresponding to the nucleic acid sequence according to SEQ ID NOs: 3061 or 3063 or a fragment, variant or corresponding RNA sequence thereof,
c) at least one coding sequence as defined in any one of the preceding claims,
d) optionally a 3′-UTR element, preferably comprising or consisting of a nucleic acid sequence corresponding to the nucleic acid sequence according to SEQ ID NOs: 3065; 3067; 3069; 3071; 3073; 3075 or 3077, or a fragment, variant or corresponding RNA sequence thereof,
e) optionally a poly(A) tail, preferably consisting of 10 to 1000, 10 to 500, 10 to 300 10 to 200, 10 to 100, 40 to 80 or 50 to 70 adenosine nucleotides,
f) optionally a poly(C) tail, preferably consisting of 10 to 200, 10 to 100, 20 to 70, 20 to 60 or 10 to 40 cytosine nucleotides, and
g) optionally a histone stem-loop, optionally comprising or consisting of a nucleic acid sequence corresponding to SEQ ID NO: 3079 or 3080.

31. Composition comprising at least one artificial nucleic acid molecule, preferably RNA, according to any one of claims 1 to 30 and a pharmaceutically acceptable carrier and/or excipient.

32. Composition according to claim 31 comprising a plurality of at least two artificial nucleic acid molecules according to any one of claims 1 to 30, wherein preferably at least two of said plurality of artificial nucleic acid molecules encode a different antigenic peptide or protein, optionally selected from an antigenic peptide or protein as defined in claim 5, 6 or 7, or a fragment, variant or derivative thereof.

33. Composition according to claim 31 or 32, wherein said composition is a pharmaceutical composition, optionally a vaccine.

34. The (pharmaceutical) composition or vaccine according to claim 33, wherein the artificial nucleic acid molecule, preferably RNA, is complexed with one or more cationic or polycationic compounds, preferably with cationic or polycationic polymers, cationic or polycationic peptides or proteins, e.g. protamine, cationic or polycationic polysaccharides and/or cationic or polycationic lipids.

35. The (pharmaceutical) composition or vaccine according to claim 34, wherein the cationic or polycationic compound is a polymeric carrier.

36. The (pharmaceutical) composition or vaccine according to claim 34, wherein the N/P ratio of the artificial nucleic acid molecule, preferably RNA, to the one or more cationic or polycationic compounds is in the range of about 0.1 to 10, including a range of about 0.3 to 4, of about 0.5 to 2, of about 0.7 to 2 and of about 0.7 to 1.5.

37. The (pharmaceutical) composition or vaccine according to any one of claims 31 to 36, wherein the artificial nucleic acid molecule, preferably RNA, is complexed with one or more lipids, thereby forming, lipid nanoparticles, lipoplexes and/or preferably liposomes.

38. The (pharmaceutical) composition or vaccine according to any one of claims 31 to 37, said composition further comprising a non-coding RNA selected from the group consisting of small interfering RNA (siRNA), antisense RNA (asRNA), circular RNA (circRNA), ribozymes, aptamers, riboswitches, immunostimulating RNA (isRNA), transfer RNA (tRNA), ribosomal RNA (rRNA), small nuclear RNA (snRNA), small nucleolar RNA (snoRNA), microRNA (miRNA), and Piwi-interacting RNA (piRNA).

39. The (pharmaceutical) composition or vaccine according to claim 38, wherein the immunostimulating RNA comprises at least one RNA sequence according to formula (IS-I) (GₗXₘGₙ), formula (IS-II) (CₗXₘCₙ), formula (IS-III) (NᵤGₗXₘGₙNᵥ)ₐ, and/or formula (IS-IV) (NᵤCₗXₘCₙNᵥ)ₐ).

40. The (pharmaceutical) composition or vaccine according to claim 39, wherein the immunostimulating RNA comprises at least one RNA sequence corresponding to any one of SEQ ID NOs: 2938-3032.

41. The (pharmaceutical) composition or vaccine of any one of claims 31 to 40, wherein the composition comprises a polymeric carrier cargo complex, formed by a polymeric carrier, preferably comprising disulfide-crosslinked cationic peptides, preferably Cys-Arg₁₂, and/or Cys-Arg₁₂-Cys, and an isRNA, preferably comprising or consisting of an RNA sequence corresponding to SEQ ID NOs: 2938-3032.

42. Kit, preferably kit of parts, comprising the artificial nucleic acid molecule, preferably RNA, according to any one of claims 1 to 30 or the (pharmaceutical) composition or vaccine according to any one of claims 31 to 41, and optionally a liquid vehicle and/or optionally technical instructions with information on the administration and dosage of the artificial nucleic acid molecule or the composition.

43. The artificial nucleic acid molecule, preferably RNA, according to any one of claims 1 to 30, the (pharmaceutical) composition or vaccine according to any one of claims 31 to 41, or the kit according to claim 42 for use as a medicament.

44. The artificial nucleic acid molecule, preferably RNA, according to any one of claims 1 to 30, the (pharmaceutical) composition or vaccine according to any one of claims 31 to 41, or the kit according to claim 42 for use in a method of treatment or prophylaxis of cancer, infectious diseases including viral, bacterial, fungal or protozoal infections, autoimmune diseases, Graft-versus-host disease (GvHD) or allergies.

45. The artificial nucleic acid molecule, preferably RNA, for the use according to claim 44, wherein said use comprises (a) administering, to a subject in need thereof, said artificial nucleic acid molecule, preferably RNA, said (pharmaceutical) composition or vaccine, or said kit.

46. The artificial nucleic acid molecule, preferably RNA, for the use according to claim 45, wherein administration is accomplished parenterally, preferably intradermally, subcutaneously, intravenously, intramuscularly, intranodally, transdermally, or intratumorally.

47. A method of treating or preventing cancer, autoimmune diseases, or infectious diseases including viral, bacterial, fungal or protozoal infections, wherein the method comprises administering, to a patient in need thereof, an effective amount of the artificial nucleic acid molecule, preferably RNA, according to any one of claims 1 to 30, the (pharmaceutical) composition or vaccine according to any one of claims 31 to 41, or the kit according to claim 42.

48. The use according to any one of claims 44 to 46, or the method according to claim 47, further comprising subjecting the patient to at least one or more of the following additional therapies: chemotherapy (e.g. first-line or second-line chemotherapy), radiotherapy, chemoradiation (combination of chemotherapy and radiotherapy), kinase inhibitors, antibody therapy and/or checkpoint modulators (e.g. CTLA4 inhibitors, PD1 pathway inhibitors) or inhibitors inducing expression of T cell epitopes associated with impaired peptide processing (TEIPPs).

49. The use according to claim 48, wherein said additional therapy is effected prior, simultaneously, or subsequently to the administration of said artificial nucleic acid molecule, (pharmaceutical) composition or vaccine, or kit.

50. An in vitro cell culture or cell treatment method comprising (a) providing cells in vitro, (b) contacting said cells with the artificial nucleic acid molecule, preferably RNA, according to any one of claims 1 to 30, the (pharmaceutical) composition or vaccine according to any one of claims 31 to 41, or the kit according to claim 42.
